United States Patent Application Publication US 2012/0017292 A1 - sequence listing, part 2

SEQ ID NO: 4113 - DNA, 1605 bp, Zea mays
  Peptide Sequence Number=SeqID_47488
atgaatggcggcgaccacccccgcggcggtaagccctccttctcgcagctcctccaaggccttcaaaaggggctggagattcttctgtctgtcgcgtggggtcccgtagcgccagttatcgacgacggcgccaccggctcgcaccgccatgcagactcttctttcccccgtcgacgaggcaaaaagctctgcggagaagagatgggtccacaggtcccagtggggggcgatccccaaatatccttcgcaaaccgccgtgaagatggctgcttgcgagatggagttgggactgagattgtgcagctccaccccgtagacatgcagaatcgcccgcatgaaacgacttgccggcactccgaacccccgctcatgaaaggagacgaagcttaccacataccccggcggcggggacggggcggctccgctcagaggggccatccactccagctgcgaatcaccggagagagggcgaagcaaaccatcagcaacaagggcctccaggtcatccaccgtgacggtggaaaaaggccacgggtcgcgcgacgaaacaatggtcacccggtcggcatcaccaagcagaaggggtggcggcggagaggactagggaccggaaaaggggatactccgaaagggatccttctccgcgaaggaaacgggccccgagccctcctactgatcaggggttcgaaggctggcccctcaggagggttcgacagccgccccagagcactcgggctccgcgcccatttactggctggcccccgaagggttcacagccgcctcagagcacgcagagtgagggatgactcggggtacgttcgatacataaccaaggctcggtctacgctcccgaggtaccctaggacatttccgagaccggcgagaacgatttgtaacggaatcccaccaaaggtaggcatcgagccctcggaccccgtcaaaaggggaccgggtccggcgaataacccgcagctggtaaatcccatcagcacaaagctgcaaaggcctgatggggcgactcaggccaaggctccgcccaagggacacgatcccgcctcgtccgagcccggcctcgggcaaagacagccgaccccggaggattcacccccgactctggaagacgacggactccacctcgcccgaccccagggctcggactcaaccccgactctggaagacgacggactccgccctcgccccgaccccagggctcggactcaaccccgactctggaagacgacggactccgccctcgcccgaccccagggctcggactcagccccgactctggaagacgacggactccgcctcgcccgaccccagggctcggactcagccccgactctggaagacgacggactccgcctcgcccaaccccagggctcggactcagccctgactctggaagacgacggactctgcctcgccccgaccctagggctcggactcagccccgactctggaagacgacggacaccgcctcacccgaccccagggttcggacccagcctcgacctcgggagggagtcaccacctcaccccaaacacgggcttggacccaacccacgtcatcaggaggcccatcattaccctacccccggctag

SEQ ID NO: 4114 - DNA, 1408 bp, Zea mays
  Peptide Sequence Number=SeqID_47489
cactaatgggattagacaaagtcaatatggtataactgaagtacagcacaaggaacgacttcgaggccatgataattttatccttgcacaccagtgcgatcaggtctactatctgtcgtacccaaatcccaagtttgaagcatggtgggtagttcataaggaagaggaggacgacgaggaggaggtgcaacaccatgaggaggaggacgagcaggcccatgaggaggatgacgaggaggaggtgcaacaccatgaggaggaggacgagcaggcccatgagggcatagatgctgaggcggatgacgataccaccgaggctcctgtcgttcgacgaaggggcactcggaagggccactttgtcctacctccgtcagcgcctgcacaatctgaagctcgagtactgatcatcccggttggtgatagccaatgggaagacacgtcatttgacggtcgaggtcaccatagacaggttaatcaagtcttaggtaacctctgtcgtctacataacccaggaattgtcaccgacccgaaaggtgtggtggttccttgcactagctggtcgcacttcgcactagctccacatgctacatatggaacagctcaaggcgccgtcaagcacgacttttggagacgctattgtgtggaacctgaggctcaagagcatgcagaccgagtattagagaaaaatgcgaagaaggtgtgcagggatgcattttccaatgctcgtctacaggttgtgaacgcgtacatgaagcgccgaggtcattctatcaataactttcgacaatattcagatgtctacttgactgtagaccagtacatggaggagacatacgggcaggagatgattaagaagtatggagaagactacgattggcgaggagcgcctaccatcgacgctgaggttgtgcattcacttggaggcaaggcgcatggacgatattctatgtttaccggtgttatcgattcgacggagttgcgttctcgtggcggctcttcgtcgcaggcgggctgtggtagtagcagccgtagtcgccgctctgtatctagcatggaggaagctatgagggagcagcaagaaaagtttcgtgaagaaatgcggcaaaaacaaatggcatttctccaacaacaatcagagtacatggctgcttacaacgcacaggcacaacaagcaatgaacccgccgatgcctcagtggggattacatgctccgccacctccacctccacctcagggatccggggtcatgggccacaacacgccaccaccggtcataccagcaccaggaggagcttatgcaggggagggagcttatgcaggagaggatccaaacccgttacacaacttcgtcaaccagttattggcttctggaggtagtggacacaactccaacgaccccaatgtatga

SEQ ID NO: 4115 - DNA, 315 bp, Zea mays
  Peptide Sequence Number=SeqID_47490
atgcaaatccactatgttatcctaaaagaaaacctaaacctaaaagactgtaatcttgctgacggagagtacatcctcgtgccggagcaaggagctgctcaggagcagattgccctcctcacgcgacctgagacgaggtctcccattccggttatggtgggtacaagtgcggtcactgcacgacggccagtcggggtcagtgaggcattgtacgccaaggcggctttattgtatttgctctgtgactcaccttcgagtgagattgtggtacttgatcctgtcagtggccgtgtcggactagatccgagggattga

SEQ ID NO: 4116 - DNA, 594 bp, Zea mays
  Peptide Sequence Number=SeqID_47491
atggggtctgcgaggggactcgtgcactcgtggcttggcccgccggtgcataccacgtgccacctgacacctgctgtgacgtcggtgttgcacgtcgtgcatgcgccagaagaggagcagccttcaccgggggatgtgaggatagggatagaggaagaggctcctggcgctgctactgaggcccctagggtggttgatggcgtccccagtggcgtccccgatggcgccgctgtccctgctggccctatgggtgatgatgggattgaagtggcggccgtcttgggggcacggtcccgcctcagagatccgcctttgtcctactctcggaggaggagccgggtggtggctgcggccaccccaccgtgggcccctgccgaacagttcatcaaccgcatcacgtcgaaggtgggatcgctccttcctgtgccaaaaatttcaagaagaagatccaagaccgcccaggcaagccatgcccctcgccggagtcgcagggttgctggcctgcctgttgagcctgggaaagttgatgcttcaggctgcaggacctgttgcgtgcgcttggttctgacgctgtggaggtcaaaatcaccatga

SEQ ID NO: 4117 - DNA, 249 bp, Zea mays
  Peptide Sequence Number=SeqID_47492
atggcgcaccggacagtccggtgcacaccggacatgtccggtgccccagccacgtcaccagtgccgttggaatctgaccgttggagttctgacttctgggcccgcctcgatgtccggtggcgcatcggacatgaactgttcagtgtccgagaaacttttataggctattcacaaatgtctagccatctaggtcctttcaacaagcaataccactctactaatatcaagctcaaggaggagctctactag

SEQ ID NO: 4118 - DNA, 462 bp, Zea mays
  Peptide Sequence Number=SeqID_47493
atggtcgtcggttcgcctagcggaggcataaccgacgatgacctctccccagggcggaagaggaacactcgggtcaaccccgccaccctcctcgccgaatgtaacaccctgaatttggggcgtaaacctagtggaatgagccctagaggcactctggttgttgcattcatgccgttgcatggtgtttctaagtgcaaaatgaatcgacagtcaagcttcggcaaccaaataacccagctcttcgagttctacaaggtcgaagaccctgagcatctgtttggtgaaggcaagaactggggtgtagttcgcttcgccgtcgtgccgttaatggggctcggtgtatgcggctcgctctgccaagacgacgatgaggatggttatgatcatgcttatggtaatggtaaagaaggcgtcgaggcggatctccaggagttccaggacgtcgacgagttcgaggattag

SEQ ID NO: 4119 - DNA, 573 bp, Zea mays
  Peptide Sequence Number=SeqID_47494
atggccaggcaagaggcagcacctcgtcggctgtcggaccagagcaagttgacggcgccggcacccctgcgggggacatgtcgggctgtccaacacaagtgcctaagtgtcaaatggtggacaaagtacaaatcaagtcaaaagccaaagccagctctgtctgggtgcactggactgtccggtggtgcaccggactgtgtccggtgcgccaggctggctcttgcgaactcgctgctctcgggatttcatcggcggcgtacgactataattcaccggactgtccggtgtgcaccggactgtccggtgagccaacggtcggccgagccaacggtcagctgcgcgatctgcgcgagacatgtggccgagcaaacggtctgcagggggcaccggactgtccggtgtgcaccggacagtgtccggtgcgccaacggctcccaggcgccaacggtcggctacgccacagaaggaaagaaatctgcaccggacagtgtccggtggtgcaccggactgtccggtgcgccaggcgacagaaggcaagaattgccttcctggaatgctctcaacggctcctag

SEQ ID NO: 4120 - DNA, 90 bp, Zea mays
  Peptide Sequence Number=SeqID_47495
atggaaataaagatagattacaaatgtaccttcggcttgaaggaaagcaaatacaggcgtgacgcaaaaatgaatgccaagtcagcgtga

SEQ ID NO: 4121 - DNA, 297 bp, Zea mays
  Peptide Sequence Number=SeqID_47496
atggcgcttcctgttgacgtggctggcctgcgccctaggttgggcgacgtggaggctcctccgaagccgagggcggagtccgagccctggggtcgggcggagcggagttcgtcgtcttctggggctgagcccgagtccgagccctgggtcgggcggagcggagttcgccgtcttccgggacttagcccgagtccgagccctgggtcgggcggagcggagttcgccgtcttccgggacttagcccgagtccgagccctaggtcgggcggagcggagttcgccgtcttctggggcttag

SEQ ID NO: 4122 - DNA, 108 bp, Zea mays
  Peptide Sequence Number=SeqID_47497
atgaaggatgccaaggccatcaagacacccatgggaacaaatgggcatctcgacctcgacacgggaggttccaagccgatcctaaggaagttcaccttagggccatga

SEQ ID NO: 4123 - DNA, 378 bp, Zea mays
  Peptide Sequence Number=SeqID_47498
atgcatctggcatgcaaccgcaccacgggagcgcaccccttcggcttcgtcgcatccagcatggaggcccaggtccacacatcatgtaaccggcacgccggttactacgtgcaagcaaccgcaccgccacttgcgccaatgtcgcgccttctcgattgcgagaccagtgccgcgactcgaggcaaccctgcgcatggcccaacagtgccaatcgagcacatcgatcacaggtaccgggaaaggggatatttcgaaagggatccttctccgcgaagcaaacgggccccgagccccctactgatcaggggttcgaaggctggcccttcggaagggttcgacagccgccccagagcactcgggctctgcgcccactactga

SEQ ID NO: 4124 - DNA, 651 bp, Zea mays
  Peptide Sequence Number=SeqID_47499
atgtgggggaaggcgaactgctgctgcctggccagggtgcagcattccgtccttcgtctgggcggctatggccggccgcaccggggggtcgcacaacacgtcgtacgccgcgagggcggtactcgtgttctgggatggtcctgttctcgttctcgtggcaagaacgggagtgaggacctgccggtgcgctttggggcggccgccgctcgttggtgcggtgttggtgggcatgtggccgctgtcgtcggtgctgaggtggtggcagccggagaaggtttctccgccaacgacaccgttagtgccacctgcgctccgggcctccagctctttggctttaatggctggttctcgtcccccgcgaggggacgtgaacgagggccttccagcggtagcgttcgccctggggccatcattgctgctgtcttgccgtccgagacggaggtcgtcgccgcactgttgggtgcagcggtcgccggcgagccacccggaagtttgtcgtcccgcaggcccttccgatgtggaggcgcggtgctggcgtcctccttcgaggtggagatctttccgcccgggtcgccgtccgaggctgggccaggatctgccgaaggtggaaacgatgccgagggtgctgctgctccctctatcgatgtctga

SEQ ID NO: 4125 - DNA, 447 bp, Zea mays
  Peptide Sequence Number=SeqID_47500
atgtgtgacatccgtgatttggggctattttatgttgtattttcttttcctaaaaaatccaaccctcctgtttttgacaagtgtgattggcaatgtgtttcacatattgaagtagcttgggatcttgcatattctattgggagctgtgtgttcagcagtggttctgactccaagtcacagaaatcggagagggagagggtacggtaccgatcggatgaggcgccgagctccacgaatgtggtgggggcgttgggccttcgtcgtgcccaccacctactccgggaaagagatggaacagtgggcggcgatggatggcgttggcggcggcgcgatgagcttgggctgagggggcggcaagccgaggacgagaatgaacgggctggcggcggcgcggtgacctttggctgctgggcagcgagccgaggagctctggcggcgccgcggtga

SEQ ID NO: 4126 - DNA, 345 bp, Zea mays
  Peptide Sequence Number=SeqID_47501
atggccttgtcatcaggttcagcaagagagctgtcgccactgctggagggagacgtggaccccggagacaccaagtcgcagtggaaatgcttccggctgtgggacaactactgcgtgaagaacaagagatgcgtcgacgagtgcctaggcgtcgaggggaagggctacacccacggacactgcgagctgtggacgtgcatctgctgcaagaagaatggcgaggatgaaatactagctcctagctgctgggcgaccctgagcagcgagcagaatcacccatcagtgtcaaacaaacgaagcgttaggggggagctcaaatggtttccacatttcgctgtattgtag

SEQ ID NO: 4127 - DNA, 3171 bp, Zea mays
  Peptide Sequence Number=SeqID_47502
atgtcgtcttcctcttcttccgctgctactacgccgccggccgccgcctcgtctaaggagacgttgagtagcttgatggtggaggagttgcgcgccggcgactctgttgattttggtgtgtcacggatgacgtcagcccgcgttgaagatatgcagcgattgggctactttggcggcggagttgctcgtgctccagggacggaggaagtccccgagccggaggaagaggatgattgggacgaagtcgcccagttcgggtcatgcacattcacgccgaagaccggcaagaccacaatgcaagtagtggagttggttccgtgcgcccgcaacaagtggggcaattggaacgaattttggttttacgttgctgaggctactgtcgaaggccatgaaggactccctgtgtctgagatgtgctctcattattactctgcgtatccgccctttgaagtggcggaggaagatgcagacgaaggggcccttcggtgcgccgccggtcagagcagtgggcgtgatttagttgaagagttcgtggcgtacggggtgtggcccttggcgtacggctgggcgctgggcgaagtgtgccctcgccagatgccttttcacggaggaagggtggtgcgaagccctgccttcgcactgaatctgcaaaaccgcgacccggccgcgtttgtgcgcgatgcggaggacggggcggtgcggctcgtggggcgttacgtgccgaggacggaaggccagcgcagctttgatatccgcgggtcaaatgaccgtttgaacagggtcttcgaattaaatcaattgccgtacgacggctatcctggtcaagacgaagcggaccgccgtggaaagaaaccggcggtggagactggaggcgaccctacgctggcggccgccccttcctcaaaaaagagaaaattaggtactgcgatgggaggacttggggtgtctgatagttttgctagagagttaatgaggacgtgcgccgccccgggggaaaggatgtcttcgcccgagctccgggagtcttcggctcggatgctgagggttaccgggggttgctggcctaggaatgttcctatcccctgcgcggctggcgaggactgttttacatctcgtatggttcgtcggtggagagtttttccttacgggcggaatatcggtgctgttgtgtgggcagtgatggacaaggatggccaaggtgcggcgcaaaaacgccaggcgactgtcaggctgcatgaagctaggccaaagaggcagcggggggctgcgaaggctgcggcctccggcggaggcaggccgccgctggcggcgaaggcgggcgccgctgcacctagcaaggcgccggaggcaacggcgggcgctggaggctccaagtcaacgaaggtggtgccgccggccagcggagtggcggaggcctcaaaggcggcccgagcgttgccgttgtcgggcaagcgcgttgccgacttcggcaccgatattactgtagacgactatcttggtgggtcggacgaggggcagcttgctatggttgcgcctggcgcggagaccgcgacggcggccatagtgccgagggcgaggggcgaggcccttggtgccggaggcgaggcgtcggccctcgcggtggttagggacgaggcgagcgcagcgacccgccggctgaagggagtgacggaggcgctgagtcaggcgacggaggcactgggtcaggtggctgacttcgccagccgtactgcgtcgggggccctcacggtagctgtgtctgccgaagtcgagagactttggacacaacatgctgacgctgtccgtgagaagttggcctccgacagcaagtgtcgtaagctgacggacagggtggctgccctggagagggagaaggctgacctccggcgccagctggcggcggagaggagggaagccaacgaggccgtcgccaaggggcaggctgcgcaggcggaggccaagctggcgcgggcggagggcaatcttgccaaggagctcgccgaacatctgcaagagcggctcaccgccctggagagccgcgcgaaggaggccgaggccgcgatgcatgcggaggccgaacggacgcgcacgcagcttatggatacatatcgtgagctgggtgcgcggactggtgacttcgaggtgccggaccgagagcccgggcttcgctgtctgcagtgggtgcaggaggagctgttggaacttccagccgtcgcggggggggttgatgtcgccttcgaccaggcggatgaagaatttgagcgagatatctataaggtcgaagaccccgtagtgaaggaatctgccggggccctttatgaccggatgtggggtctgtacggtcgtgaggtggtcagggagcgggccgagactgcgagggctcaggcggagcgcggcgagcgggtggacgacttcggggctctgaacagcgcgctgccagacccggagccgaccctcgcggaggctgtgactggggtcgccctggagccaaccccggcgaccgcagcgatcgcgacggctgcccccacatccgctgtggccggcgaagacctgcccccgaaggtggccgaaggcgcccctgatgcccccgcagctgctgtgccgagcgctgaagatcccgcgacggtggcggcggaaacaacggcggaggcagcggcggagccaacagcggaggctcccgcagcgtcagggccttcgcaggttcaagattttgggcctgcgcacgcaaccgctactactgagtttttggcggcttcgaccgcggaaggtgggaatgaatatggtgggtctgtatctgagttttttgattttactgactctgggagctcggttgagtggactgaggagtcgtcggaggaggacttggattattttgcggccttggacgtggctgcggcggaggctccgtcacacgccgcggacgcgccagacgtgccaggtcctagcaccgggcgccgacggcgaagggcggttgcaaagcgtagggttagtgcggaggaaggggctcggcttcgcgtgagtggggctggtcggcaggagctgttgtctttgccggccgccgcgggtacaggggaaggggaactgcgaagtattttcacgggtgaggagcttaggataatgttatttaattatagggagatgggaattattcctaaggttgagccgatgtag

SEQ ID NO: 4128 - DNA, 1548 bp, Zea mays
  Peptide Sequence Number=SeqID_47503
atgcagaccggctccaagcagaagaagccaaaccgccgcgtgtggggcacgcaaccgcccagcggttacaagcgatcctccacctttgcccagaccaacgggcgagagaggcgggcagccatgcaggcggcatgcaaccgcgccaagtggacgcgcttctccgactcccagcgcgcccagcctggaggcccaggcccacgcgtcacgcaaccggcgcgccggatgctgcatgcaagcaactgcaccgccacttgcgccaccaccacgcctctttggttgcggaaccaataccgcgactcgaggcgaccaggcacaagacccagcagcgccagcctgacgcgacagtcaatgcggccgaaaggaccgggaaagggggatcccccgaaagggatccttccccgtgaaggaaccaggctccgagcctccttactgatcaggggttggaaggctggcccccgaagggttcatcagccgcctcagatggcgtgggccctacacccactcctggtcagaggttggaaggccggccccccgaagggttccacggccgcctcaggttactcgggctccgtgcccattactgatcaggggttcgaaggctgggcccctgaagggttcacagtcgcctcagacgccgagcgagggatgaccaggggggaccgggtccggcagatcaccctcaggtacttttgggcgtgcctctgggcccctagccgacccctaacgaacggggcacagacgtccactcggattacccgcttgcagctcaccggagacaccatgttcggtgcccatcgaggaggctcgggggctgctctcgcaaacccggctccggccgaaccgttgacagcgtcaacataccagcccgagaacttaggcctcgaccgtacacccggggctacggccagctcgcatgagggaacaaccagaccagccgaagcattacgcaaggcattaagacctcgaaggagtgaaatcactcctccgaggcctcgggggctacacccggcgggtgcgctcgcgcgcacccaccggaaccaaatgcaaccgagaaaggctggtccccttgcaaaaaagtgcgacgaaagcctccaagcgagtgctaacactcccttcgaggctcgggggctactgtcggggaccataattagggggatcagtccatacgagcgactcgatcacgcttcgcccgagcctagcctcgggcaagggcagccgaccccgaaggggtttccgtctcgcccgaggccccccttcaacggcggacacatctccggcttgcccgaggccttgccttcgctgagaagcaaccctgacagaatcgccacaccgaccggccaagtcgcaggagcatttaacgcaaaggaaaccaggccctgccaaaggcaccataggaaactccgctccgcccgacccagggttcggattcgggctaagccccggaagacggcgaactctgctccgcccgacccagggctcggactcgggctaagccccggaagacggcgaactccgctccgcccgacccagggctcggactcgggctaa

SEQ ID NO: 4129 - DNA, 633 bp, Zea mays
  Peptide Sequence Number=SeqID_47504
atggccatgatgggttcaacatcggaaaagatgtacctctgccaggtaccaaactttgggtttgaaatgataaagcggagaccgggcgggccaattggcgtaccacgccatcaactagctccaaggcatgaggacagtagtagtggtagcaatgatcctatcggagatctggaagctcaagtagaacaacttcgatcagagctccgtcacaggaatgaagtatgggtcgaggatggtcagcgaataaacgagttgagaactgacatccgccacctgcaagaccaacttgctgaacgagatttagcgctcgattgggctgttaactcaagttcacttgcctgtgccaaggaagccaaagctcgagcctgcgtggaggagcttagcacaaccgtggacaacttgcaggtttactgtaatacactgcatgaggaagttcatgtattgtattcacaactacaccctaacatacctgtggatcctgtcgggatgaaagccggaccatctggagcagcgggtgaagcccttggtggggaactggaccttttcaggccccctccttcaatgaatctggtcgatgaatggtctcctacacctgacagcgaagctaccaaaagtgataagaagctagagtag

SEQ ID NO: 4130 - DNA, 354 bp, Zea mays
  Peptide Sequence Number=SeqID_47505
atggggagcgcccgcgttgccttcgtcttgctacctttggaggagcgcaacttcgcggaagttggcatctttcagccatcgctcggcttcaaggattttcatcagacggtgaccaccagtccgatggtggggagaagcaagccgggctgcggcctccgccccgcccttagcttcaaggatcttcatcatccttgctggggcggagggcgagctgagccggagctctaccccccgcatgggtcggtgggccaccttctccttcagcatttaggggagagggcgcccaccggcctagcggagagggcagacttcgacaacgtggggctggtcggccgcgagcgtcgtcagccttag

SEQ ID NO: 4131 - DNA, 282 bp, Zea mays
  Peptide Sequence Number=SeqID_47506
atgcaggcagcatgcaacctcgccacggggatgcaccctttcgacttcgacgcgtccagcatggagtcccaggcccacacaacatgctcacgtcccctcctggagcagcaggagagccctcacccacggcgtgaagacgacgcgcccgtgttccgttcctcgaacggctcgtgcatgcacaacggctgccccgtcaaccactcgtcccgtcgcattaactccgcggcagggcaggcgacacctttggcaggcgaagcgggcgatgcttcacctccgccataa

SEQ ID NO: 4132 - DNA, 564 bp, Zea mays
  Peptide Sequence Number=SeqID_47507
atggtgtctccggtgagctgcaagcgggtaatccgagtggacgtccgtgccccgttcgttgggggtcggctaggggcccagaggcacgcccaaaagtacctgcggcaactggcgcgccggttgctcgacgcgtgggcctgggttcccaagctgacgcgtcagaagttggagaagcgcgtccacctggcgcggttgcatgccgcctgcatggctgcccgccccttctgcccgttggtctgggcgagaaaggggggggggtcgcttaaggcagccatgtcttcttcctcccttaagcgtcgtgtcttcccatcttctaagcccccggatggggggtatccaccgcctttccgcctcctcgttggaggaacgcagctccatgggagttggtacctctcagccatcgttcggcttcaaggattttcatcaccggtcgcaccccttcaccggcggtcatccgagatggcggcctccggcttgatggtgggggaaagcgagccgggctgcggcctctgcccctccctcggcctcaaggattttcgtcatccaggccaagatggaagatga

SEQ ID NO: 4133 - DNA, 1977 bp, Zea mays
  Peptide Sequence Number=SeqID_47508
atggctccccccgcgctcggatctcaggtggccgccgcagcctcggtgcccgtcggctcggactctctcgccaagggcgcggcgctcaagggtaacagcactctaaactttcggaccaaaccatgcatcgggatggcattagcgtggaaaaacaggacccagcaaccacggcgtctgaacaaggtactctgcatgtctgttcaacaagcaagcagaagcaaggttgctgtcgtgcccatcgagttggagaaggcaaaggagccaccgctccacctgtacaaaccaaaggagccttacacggccacgatcgtctctgtcgagaggcttgtaggacccagagctcctggcgaaacatgccacgttgtcattgatcatggcggcaatgttccgtactgggaaggacagagttacggcgtcattcctcctggagagaatccaaaaaaacctggatctcccaatactgttaggctctattcaattgcttctactaggtatggtgattcttttgatggaaagacagcaagcttatgtgttcgccgtgctgtttattatgatcctgaaactggagaggaagacccctcaaagagaggtgtctgcagtaacttcctgtgtggctcaaaaccaggggacaaagttcagatcacaggcccctcgggcaaaataatgcttcttcctgaggatgatccaaatgccactcatatcatgattgccacggggaccggtgttgctccctaccgtggctacctacgtcgcatgttcatggaagatgtcccaactttcaaatttggtggtctggcttggctcttccttggtgttgcgaactctgacagccttctctatgacgaagagttcacaaactaccttcagcagtatccagacaatttcaggtacgacaaagcgctaagcagggagcagaagaacaagagcggcgggaagatgtacgtgcaggacaagatcgaggagtacagcgacgaaatcttcagactgctagatggcggtgcgcacatctacttctgtggtttgaaggggatgatgccggggatccaggacacgctcaagaaggtggctgagcaaagaggcgagagctgggaccagaagctgtcacagctgaaaaagaacaagcagtggcacgtcgaggctgagccatccagctcagcaccccagggggctcccaccaccgccgacgcccgggccccacgagccacataccggggccacccgcattaccgcacgtcccattgtcccaaccacccctaccgtttgttcctgccagggctccgattcaccaccacccgtcctcttcaactgccgccgttatcccctacccggcacgcgctgggcggggagcagctgaaccccaccccagccgcccgcaacggcgccaacaaggcgctgaagcggactctccggctcctgccaatggcgcggatccagcttgtaagtctctccgtgccgccgtgcttgtgcgttcggaattccgtggtggttcgttggggtttggggctgctcgaattggctggcgcggttcggagcggggatggtcgatgctgccatgcttacttagtggctgtagctggagacgcttcgcgggcgtcctccgccgctagggttttgccgttctggaggatcgaggtggacgggcggaagcggaaccttcattgctttgcttcaatgcgtgctctgcttttggtgcgggagggcgtggggttttgctgttttgggacggggaagagcaccgcccggggtgaattgctctgctcttctctggtcacctcgcagcgtccaatactccactgctgttggttgcttcggcacgcttttaccctggctgagtgggagaggaatggaatagttgtctatggtactgccgtactggcatactggtgttctgttcccgtcctgcaattgtcgctcttggctattacttcgcacccgtcaccagagttcctctactccgttagctctactggatggtaa

SEQ ID NO: 4134 - DNA, 204 bp, Zea mays
  Peptide Sequence Number=SeqID_47509
atgggccacgcactaacgcgcccacgcgggccacgcgacgtctgtgacttccgcggtccgccgctgtgcgcctgtggcttccgagctgtaacagtaagcaaagcaaaatcagagatcatcaatgtcaagatcttcaccaaatcaagttatcctacctcactgaagatcggaccttgtcttatatcaggtcctatgttcctttaa

SEQ ID NO: 4135 - DNA, 324 bp, Zea mays
  Peptide Sequence Number=SeqID_47510
atggagagggccgaggcttctattcgcgtggagattgagcggacgcgcaaacagctcgtggactcgtaccgcgagctaggtgcgtggactgctgacttcgaggtgcctgaccgagaggcgggccttcggttcctcgaatggctgcaagaggagttgcaagcgctcccgaccatcgtggcgggcttcatgtcgtatgcctccctcgtcacctgcgacggggctatgatgcgctgtcccgtgaggggtgccgtcactatgaggtcttcgaccgatccgatgaagattttgggcgcgagatttttaaggtcgaagaccctgtggtga

SEQ ID NO: 4136 - DNA, 711 bp, Zea mays
  Peptide Sequence Number=SeqID_47511
atgcaggggcactccgtccccacgcacatcaaccgtccccatcgattccccgtcagcagagaggggctcactaccttggcgctcgggtgctggatctggggctacctcctgagcagctccttgctctggcacgaggatgtactctccgtcagcaagattacagtctatcgaaatgcaatgaacattccttcccctcatgcaaacagtaaccgcgggaaagaaaagggcggcgcggcttaccggcggcgagggaggtccggcgaagggtggggttggttctgggagactctggcggtcacgtcgaggtacggctcgacgtcggagatggccggaatcgcccggtccacgcgtacaggcgggtgtcctcgtcggcggcgagtataccggccaaacaacggcgaactggttcaatccgagggcatggtgagcttcacggggtcacgcagcgactgtgtgcacaaggaatcgaaggatggtggagtggtttacccggtccacgtactccggcgagggcgagagctccggcgagcgtggactggcttctccggcgaagtactctccgattccttgctcggggagcctcacggaggtgtgcacagtcttctccgagggctagacggggttgggaatggctctattggccggtctatggtggcagaggggttgggcggccgcggactcgctgcgcacgggcaaacggcgacgagctaa

SEQ ID NO: 4137 - DNA, 231 bp, Zea mays
  Peptide Sequence Number=SeqID_47512
atgttcggattgcagttggcaatgagattgatggttcttggtattggctctggtaatgctagtccactacaggcaaacaagatacttgttgagtatgttgatgtgtactcacccttcctctacacaccaaaccccccatccccaggttgtccgcattgcaaccactgctcaggagaagatgaagctgtggaaggagaacaccaggagttccaagattatgacgagttctag

SEQ ID NO: 4138 - DNA, 486 bp, Zea mays
  Peptide Sequence Number=SeqID_47513
atgcaggcggcatgcaaccacgccaagtgggtgcacctctccgacttccaacaagcccagcatggaggaccaggcccacgcgtcatgcaaccggcgcgccggttgctacgtggaccgagaaagggggataccccaaaaaggacccttctccgtgaaggaaacaggctccaagcctccctactgatcagaggttcgaaggccggcccctcggaggggttcaatggccgcctcaggtcgattgggttctgcgcccactactggtcagagagggaggcatcgagccctcggaccccgtcgacaggggaccgggtccggcagatcacccgcagaggctcgggggctgctctcgcaaactcggctctggccaaaccgttgacagcgtcaacataccagcccgagaacttgggacccgaccgtgcactcgggctacggccagctcgcatgagggaacaactagaccagccgaagtgttgcgaaacgcactaa

SEQ ID NO: 4139 - DNA, 159 bp, Zea mays
  Peptide Sequence Number=SeqID_47514
atggcgagagtagcgtgtaccctccgtggtaagaggctggacggtggtgtatctttgctctcggtgaggaagcagcaaatttttgttgtttctgttccaaggtggtgcccaaagaagaaaatcaagactgaagctgcgggaggcaaggtcctccgttaa

SEQ ID NO: 4140 - DNA, 216 bp, Zea mays
  Peptide Sequence Number=SeqID_47515
atggaggagtggatttacgttaaaaatgatttaaagaaaagggaggacatcaaggaaattatccagcgtcccatctggtctcgcttcggcctccgaaggccgaagagtgctgaagagctgattgtagtgccgaaggtacctacatgtgggggacagatatcccccgggtccactagaaggataaaagacctcacaaaaggcccaaaggccccataa

SEQ ID NO: 4141 - DNA, 189 bp, Zea mays
  Peptide Sequence Number=SeqID_47516
atggagcaccgtcccgggctggaaaggttgctggatactgcccatctggagcttgacgggaagctattcgtgaacacgcagcagacccctacctggcgcgccaattgtcggcgtaaggagaggatccaggtgtacattgggggtgtagcagagtgctacgtgtctagcggaggagagctagtgccctaa

SEQ ID NO: 4142 - DNA, 231 bp, Zea mays
  Peptide Sequence Number=SeqID_47517
atgatcagcttgattcgtttcgggattaagcttcacgcctttcgccttgagacatcggaacgtcgcttcaaggtcggaaaggaggtcggaggccttcctcgtcttgactacgatgtcatcgacgtaggcctcgaccgttcggctgatgtgttcgccaaacacatggttcatgcatcgctggcatcgaggaaagacagggtttcgcacccagtagtggaatccacgatctga

SEQ ID NO: 4143 - DNA, 1833 bp, Zea mays
  Peptide Sequence Number=SeqID_47518
atggagggccaagccatcgctggcgccggagttcgagaccgtactggacaggatcaagaccctggcaactggtggcctgacgtcgatgcacgtggtcggcgacttcttgaagcgacggatcgcgccgctttagaggagggcgcgtctgcgttctggttcaccggcccgaacgacatcggtcgaatccagcgcgagccaggcaccgacctgtcctgggaggaactggaacttctggtgaaggggatcactgggttgaggacggcgatcttggcctggccgccgaccctcgacgagagcgacgtggcggttcgccagaccggtggccgggacccccaccatgggatccagatcctcggtgtaccggcgggaggttcccagcccgccggtgcgggttccagggttccccccgcggcccccagccccttggacaagggcaaaggggctgcaagtagctccttcgccccgggtggcaccaggggtcagaggaggataggcgacgccggctacgtcgcgccgatgggtcgctcgtcacggaccctcctcttgatgcggacccgccccaaaagcatcaaaggacagctggcggggccgaggggaccggcacccaggctcagggcacgcagaggcgcgtcagtcctccgccaccatcggatccgccgccgccgccaccaccaccatcggtcccgtcaccaccacctgggggtgatctcccctaggggcgccaacaacaatagcagcagcagcaacagcagcggacgtcccgcttctagggccgctggaaggtccagggccccaagtaagtgtagtcccatccttgtttttgcgagtctagttatcatgccgacgggtctcaacccatccttgtttgccaggacttcctccccctctgctcccaagggcgcgcctactccatcgggtaccatgctcgctggcgggtctggctctcagcaacaggcgtctgctgggagtggtgccggcggcccgcccccgaccggtgcaactacgccgacggctacctcagcctcaacgacggcgacgttgtcgagtacaccgtcggcagcggtcgaggaggcccttcaagagactgacgcggtgatccggcaggaatgggaggcgctggagtccaagcaccagcacctcagcgactcacatacccagctggaggaacgcaccaaggcggcgtcccagtggttcgcctttgagcagtctgaactagcgcgggaccacaaggactacaagaaggacctcctgaaggagaaggacctcgccttcagggaggaaatgtttgaaaggcgggagaagctgctggctaatcatgagctcgaggcgaaggagaaggagcgggcactggaggagcgggttcgccagttcgaggcggcgcgggcggcacaggcagcaccgggcccccacgcggtggaggcgatgaagaagacactcgaagatctccaggcggagcagcgcgccggggtcctgcgcattgccgcatgggccgacaagacgagcacggcactggtgccgctaggggtgagccccatcccggtgtcggagccaccgacgtccatctctgacgcactcccggtgctggattccaccgccgaccacctccgacgcctggaccaaatccttggcgcccgcctggaagccgagggcggcaggctctgtcgggcggtgatagagtacatcctgacgtgcttccagagccatgacccggccatctccttggagccggtgatcgctggtccggtggccgacattgaagacgtcacccgagaaggcgtacaagatatcatggtggtggtgggccgagcgcttccagcgggatcccaccgatga

SEQ ID NO: 4144 - DNA, 1335 bp, Zea mays
  Peptide Sequence Number=SeqID_47519
atggcggtggcgctttggcgtgcgcgcagcgtggggggaggtggaagggaggtctgcaggtgcgcaaatgagggagggagagagggtgggctaggctccggggctcaagtggccgagggcgaggtggttgcgagcttcacgcgcgacgtgggcgcggaggccgcggcacgcgcagctcggggcggcggttacgcggggatgagggagctgtcagcccgggcccacgagcagagagagcgggggagcgagcgcggatgcggggaaggcggctgcactgacgggcgggcccgccagggcagagagaggaggggggagaaggcgcgcgcggggtgggctggctgggccgaaaggctgaggggggggcagggaagtcagatggaggtccgttgccaaaccagcttttgccagaatgaagatggtttccccaagttgctgaaagcatgcatagttcgccttggaatcaggagccagctagagtatgatggtcgtgaattcatcgagcatggcacagagaagtgtgtcgtgactgtatacattggatccagtccgcaccatgtggaatggagtgtcactgctgctgggcacagattcaaagacacctgccaagtcgtcgctcgcaaggcattgagggccctgtgtcagatctatgaagaagaagtggccgacaccccgctcagattctttccgccctttcagagagatcgtccagtctggatggccaggatgcgtgcattggaagggcagcagctgcttgaggacgacccctcagtcatgtacctcactgcatacctgctcaccttggatgtgcagtatgatttcttggctcggcaccaccgtcagatgattgcccgagcagaagatgcagagaagtgcaaccgtcagctccatgtggatctcaccacagctcaagcccgtgtagctgccttggaaagtcgtgaagccattgttgttgaagccctgaagcaagccaaggatgagcatgtccaaaagctgatggaggcctacttggtcacccataaccaacaaggagccatagtcttggaaggaattccagtcttccctcaggctatgaataagcaagagcaccccgagtcctcccaagatcccccgccggagttgtttgagcccctcaccatgaagaagattccagcaccatcccttgaagtcaaggaagaagctgcaagcacctcgccagcaccgccaccctttgaggaactacaagagccattccagcttgaagaagagttcgaccccgtgctgccatctcagtcgccgccagaagaagtcatcaacatcagctccctcttaacccatccaggagatgcctcagattga

SEQ ID NO: 4145 - DNA, 765 bp, Zea mays
  Peptide Sequence Number=SeqID_47520
atggacaataaatcgagatctgatgatctaccaatgatggtccataccattcacaccactcggatcaacaccaacttcatcccttcgccacggcaagttcctgtctacccagtggtagtcgaggaaatccctgtggatctccctcgcattcgggtggagaacggagtcattctggaggacagcttggaggagtttctgcctacgcccaccccgttggcaaaatcactagccttcgcagctggatcgtcagcttcagcaccgccagcaccagcagtccaagcccctgctcccgaaggcgacgacctagacgaccctgttgatagagggttcaggactctgtcaacacatgagtctctaacgccgctatccacctacgctgcttcggtcagcgatgctgctaggcgaactctgtggtctctcagccacacctaccagcagcagctgcacaatacagagtacaagcatcttcctctacgtattcgtggagagaaccagaccatcattgttccaggtggagcaaatgaagatcgcctcaacaccctagctggtgtggtggcaggtcttaacaccgacctggatagtgctaccctggacctctctagggtacacttggagctagaggatgcacatgcaaggatcatagccctagaagctcagcttgctggaaggaatcccccggatgttcaagtccccgctatggcgttatcccctccccgcaagaggatccgctatggagaaccaggatccatcaccagactgctttag

SEQ ID NO: 4146 - DNA, 1017 bp, Zea mays
  Peptide Sequence Number=SeqID_47521
atggttgcctttcaagggggtcaccctccttttaaaagcaactctccccacttgcgtcctcagccgtcgcggactgagtcttctccaacacgctccaaggtcctccccctacgacacgggggctgggccccacgcatcgtgcaagctggcccaggacagaaggagccaaaactgccgcgcgcgatgcgcgcaactgcccagcggttacgagcattcctccactttcgcccagaccagcgggtgaaagggcggaccgccatgcaggcaacatgcaacagcaccaagggggcgcaccccttcgactttgacgcgtccagcgtggaggcccaggcccacacgtcatgtaaccggcgcgccggttactacgtgcgagaaactgcaccgccacttgcgccagtaccgcgcctcctcgactgcggaaccagtgccgtgactcgaggcaaccctgcgcacggcccaacagtgccaaccgagcacatcggtcacgggtcagtcagccacgggagaaggcgtgacggtcgatacggccagaaatgggccggcagtaatggcggtggcaggcgggcggaagcagcggtcaagtcgtcagcaagctcacgtcccctcctgggataccgcctcagacgcagagcgagggatgaccatgagtacgttcgatacataaccaaggctcaggctacgctcccgagaatcccaccaaagggaggcatcgagccctcggactccgtcaaaaggggaccgggtccgacaaatcacccgcaggtcatggaattaccactagacgcgcagagcagcggaagacgtctcgatgtagacgaacgcgtcgagcagtgccgtgcagtcgccggcgtccttcacgtcctcgcacggtccgtccaagtgctccagatgcagcacctccaaggtatccacaagtacagggaggaagcgccgcgtaccgaactgctaggttcgcgacggcggcttggcgagggcgagaggtgggcggcggctgttagttcgctggtggcgaattag

SEQ ID NO: 4147 - DNA, 66 bp, Zea mays
  Peptide Sequence Number=SeqID_47522
atgacgaatgtggatgcttgccgaaggtggtcgttcaggttcaccggagtttgcttgaaggcgtga

SEQ ID NO: 4148 - DNA, 525 bp, Zea mays
  Peptide Sequence Number=SeqID_47523
atgacgcttcacatctggcacctctttggagaggttttccaggtcggcgatgagggcctcggactcggcgagggcctcggcgtactccacgcactccacgtcgcattcgaacgcgtgtttgtacgtggggccgacggtgatgaccccgttggggcccggcatcttgagcttcaggtaggttcctcggaacccgaccacctcgaacgtcaaggtctcccttcagaagttggagggcgttccgaagcagacggggaggtcgagtcgtccgaggggctggacgcgcttcccagggatgatcccgtggaagggcgcagcgcctgctcggacggaggacagatcgacgcgcaggagcctgagggtctcggcgtagatgatgttgaggcagctgcccccatccatcaggaccttggtgagcctgacgttgccgatgatggggtcgacgacgagcgggtatttccccgggctcggcacgtggtcggggtggtgggcctggtcgaaggtgatgggcttgtcggaccagtctag

SEQ ID NO: 4149 - DNA, 786 bp, Zea mays
  Peptide Sequence Number=SeqID_47524
atgggggtgtttgacccgctgggggtatcttatcgagtcctttcttatttgatcctatatcagtcctttggttggcctagccgaccaaaggggggcctcatggccaccccatcagctgggtttcctcaggagaatgtgaggtggttcgtatcctgcaaaaacatatcgccttccacctactcctggggtaacagcgtcctgaatgggaggcttctgggtctggttacacttaccacgttcatgcgcttgggcctctatcttcttccccttagaaagccttgtgctactttgctctttttgctcccttgtgatttccacccgctggtcctatggccgcctttccccgtgctctaccactcggagccaacccaagggcttggaggcaaaagggttccttccctccgagccgatctcacgctggcgtttggaggaaaagggcggtgctccagcgcctcgcagtggcgaagttgtggtgcttgcctctttctactagcatggctttgggctcccctgcatccgttcgtgcgggggcttctcttctactatggtttggagctccaaaatcttaatccaaacaccgtactctacatagtgtgtttcattaggctatgtgaagcttatctcggcatgcccccactgaaagctctggatgcatttgttctgcccatgggcggtcctcgaccgaggtggtcagccattcgttggctccttcaatgcttagcttcgcgggtcgtggatggtgtcctacctttcaatcccccttccatcctctatccatggctatga

SEQ ID NO: 4150 - DNA, 273 bp, Zea mays
  Peptide Sequence Number=SeqID_47525
atggctcaccggatagctcggcctacgcgtagtggcgggtggccgaagtccggcgacgaggatctcgctgttccggtgaggcagagcttcgatccttgcttggagaagcttcacggctcctcggggaaattgtccaagggctcggttgaggctgagggtctctggaaatggctggccatggtggccggcgctcgggtggctcgggcgggtggcacagagctcgccggagctaaggatggtgtctggccagcgaaggcttatgggttttgctga

SEQ ID NO: 4151 - DNA, 270 bp, Zea mays
  Peptide Sequence Number=SeqID_47526
atggataagcttagcctcagctggaccaataccagaaaggtcggcccgaaatgggagtggagagatggcgagagtatcgtgtatccacctggcaagaggctggatggtggggtactgagctctcggttggcggggacccgttctggtcttgagaaaaccgtgggcgagttgacatatgcaaggcttgagagtcttttctttagtcgggattataagtttgttctgttgtggatggtgctaagtgccggtgggctcggccttcttatataa

SEQ ID NO: 4152 - DNA, 1017 bp, Zea mays
  Peptide Sequence Number=SeqID_47527
atggtgtctccggtgagctgcaagcgggtaatccgagtggacgtccgtgccccgttcgttgggggtcggctaggggcccagaggcacgcccaaaagtacctgcggcaactggcgcgctggttgcgtgacgcgtgggcctgggcctccaagctggcgtgtcagaagtcggagaagcgcgtccacctggcgcggttgcatgccgcctgcatggctgcccgccccttccgcccgttggtctgggcaaaagtggggggtcgcttcccggccgcacccctccaccggcggtcacccaagatggtgacctccagcttgatggtgggggaaagcgagccgggctgcggcctctgcccctccctcagcctcaaggattttcatcaccaaggctggggaggggagagtgccgagttgggctgcagcgtgcccggtcttcagacgcgagtggcttcggagccgctcgcggcgccggcgtctgccacggcagctggaagaggttcttctgccggcgcgatagccggggccggccatgggctgacctccaactctacggccttctgcccgtccttgcctcatgagttttggcatgggcgggggcctcctggcagcggcatccaccctgaggtcagcgttgccgctgttcggccccccggagcagaagtcgtcgtcgtcgccgctgctggagcaggtgatggcgcgccgttcgtcggccttccgttgctccgcaggccttcccccatggagtggggttgttcgtacctgcggagggggaaccggagttctgtttgtaatggcacttcgaatgccagtgtttttgttcattatggctgtcgaggcctgaacatcttagttaaggggaccccttggccgctcttcgatgagccgaggccaggggtagcgatatcagtacgaacagaggcggagttggctcgaaaatgggaacctggttggccggagctgttgggggcgttcggcttacgaaggtcctcaaaaacaggatttaacagtatttctggagtttaa

SEQ ID NO: 4153 - DNA, 621 bp, Zea mays
  Peptide Sequence Number=SeqID_47528
atggcgcccaaggctggacttggctgctgtcagcctcaccctggcgggtggcacagcagtcggagcagcgcaggcggcgctattttcctgtcaggtcagtcagtggaggggcgaagtgactgcggtcacttcggccttgtcgactggaaagtgcgcgtcaggataaggtgtcaggcaatccttgcattaaatgctcctgcgatccggtcggctggcgaggcgatctggccaaggttgcttctccgtgaagcctgcccgagctgggcctcgggcgagtcgaaggtgctgagtggtccaccgttcagcaggtgcaggcgactgttcagcgggtgcgggcgacttggcgattcaccttcccacctgcagcactatataaacagacgggtccatcaaatggccagagtacgtttgactgcaagggtaactcgtgaaggagaagagaccgaggccaccgagacagctctgatttccgaagtcatgagacagtcgggtttagttgtgacagagggaaccgttgacgaaggtacttctggtgccaaagctgacactagtacacacaacctctatagtgacggttctagagacgttttcactggcgcttttcagtgccgccagtgctag

SEQ ID NO: 4154 - DNA, 1125 bp, Zea mays
  Peptide Sequence Number=SeqID_47529
atgctggtagactacacaacggtagtcgatggaccaagtgtgccagttgaaagcccaacgcagcaaggtgccgagagcatcgtggaagtgacacccgtgagcggcatcgcgagtgatgggtctagcgatccacccctctggctccggctcctccgagagcttcgtgccgtggctcgaactgccactggcgtcgtcgtcgtatctgtctccgtcagggtctcctcccgtagccgggatgccctatggtggtacagggggcatctctggctgaggtgcagggggaggcgacctcccagactccacctcctgctgaggcaagggggaagagtcctactgctcctggtcctgctcctcctcctggcatcgacgctcctgctcctcgtgcaggcgacgatgcagtctctccaggtgactggactgacctggcaccgtgtgacgcagtggacactccgccaggcgagaaggcaaaaaggggatcacagacttacgtgcagtgcacctaatacgagccatctacaaaacatcaaccagcacgggggcgccagagaacacagaccgcagtgggaaaagtcccgcggcggcacaactaactccggtgagcaattgcgcggactctggggcgatacttggcgaaataaaggcatgggaagggtgctcaccctcgagtgcgaacttcgggacgcttggagaatggcgggggtgcgatggagcctcgggtcaacggcatcggggctccggctacgcaaggaacgctccggtgagcgtagactgggcaaaccagagagaggaacaacaaaccagagggtgtcccgagtagctgatgacaaggtggaactcaccgaggcaacagacggggcgcgggctcgacaacggtcacagaacggacgacagtcgacggtgggcggtggcggagctctctggtcacgctcgcagagcgagagagagggcgagagggttcggctgagggcgcaacacggacagaggcggggtcagctggagaagaaacttcgtcggcccaagagtaggggacttcccaggccgaggaggcgtagcagtggtggctgggacctcgcctggtcgtccactggcgggaccaaccctggagtcgggctgtcgaggccatga

SEQ ID NO: 4155 - DNA, 267 bp, Zea mays
  Peptide Sequence Number=SeqID_47530
atgaccgggaaaaagaccacggcttcctctaacggcggcactctaaagaaagccaaggtggtggtggaggatgaggaagaggcggggttggaggatgaggaagaggcgactgtgacactatccatggagaaggacacactggagtgcgacatctgctgcctacccttccagtccgaagttttcatggcaagtcagattaccatgcattgcaagaacgggcattctggatgtgcaaagtgctgcatccgcacggatgaaagtcactag

SEQ ID NO: 4156 - DNA, 990 bp, Zea mays
  Peptide Sequence Number=SeqID_47531
atgctgacgctgtccgtgaaaaatcggcctccgacagcaagtgccgtaaactggcgaacaaggtggccgcccctggagaaggagaaggctgacctccggcgccagctggcgggggagaggagggaggccaacgaagccatcgccaaagagcaggctgcgcaggcggaggccaagctggcgcgggcggaaggcaatattgccaaggagctcgtcgggcatctgcaggagcggctcgctgccctggagagccgcgcgaagggggccaaggccgcgatgcgtgcggaggccgaacgaacgcgcacacagcttatggatacatatcgtgagctgggtgcgcggaccggtgagttcgaggtgccggaccgggagcccgggcttcgctgcctggaatgggtgcaggaggagctgcaggaactccccgctgtcgtgggggggtttatgtcgtacgcctccctggtcacctgcgagggggcggtgaacgcactctcccgcgaagggtgccggcacttcgaggtctttgaccaggcagatgaagattttgaacgagatgtctataaggtcgaagaccccgtcgtgaaggaatccgctggtgccctctatgaccggatgtggggtccgcacggtcgtgaggtggtcagggagcgggccgagcttgcgagggctcaggcggcgcgtggcgagcgggtggacgacttcggggcgttgaacagcgtgctgccagacccggagccgacccctgcggaggctgtgaccggggccgccctggagccaaccccggagaccgcagcgattgtgacggctgcccccgcatctgctgcggccggcgaagacctgcccccgaaggtggccgaaggcgcccctgatgcccccgcagcagctacgccgagtgttgaagatcccgcggcggaggcggtgggaacaacggcggaagtagcggcggagccaacggcggaggctcccgcagcgtcagggccttcgcaggtggcgtag

SEQ ID NO: 4157 - DNA, 126 bp, Zea mays
  Peptide Sequence Number=SeqID_47532
atgtccgacggcgacccgcacaccgttgtgatccccgagacctcccttacgtcctcgaccacttcactggagcaatctcgccgccgagaacctaggaaaaatacagagaccattaactcggactag

SEQ ID NO: 4158 - DNA, 951 bp, Zea mays
  Peptide Sequence Number=SeqID_47533
atggaggacttgagtgccatgaccccgaccattgtgattggaaaaatcgcggcttttgagatgtcgcgaaaaatgtgtcagggagaggagacaacttcctcaaggccatatgcttttgcatgtgatgaaaggaagggtaaaaagaaggctcccactccaagttcctcaagtgaagaagaggaagaagaagaaagtgatgatgatgaagataatcaaccatgcacatcatcctctgaggacgaaaaaaacaatctgacgcgtcggaaaggaaaaagcaaagaaagagaggatgcttcgcatgtggggagaagggccacttcagggatagctatccaactatggccaaacccaaaaaggagaggagcaaaggatgtttgcactaagcaaaaagctcaacttaaaaccttgaaaaataagttgattagctcccaaaatgattacaaagagaaaatggaaattcttagcatacacaatgatgagctaactactaagctagaaaacattggtagcaccccagaagcatctttagttaaaattattgaaattattaaaaaggatgcttttacttattgctttgatttaattgatgatactaatccctgcaaccatgttcttgttgagaatattatagaaacatgttcggatgaggttgcaaagaaaaatgagcaattaaggcaagaagtggctcgtcttggcaaggctttgtatgacaagaaaggcaaagccaaacaaatccgacctccacaggataacaccattgcgggagtgaacaagcctatggagggagaaactgtgatttgtaggttatgccacaaggaaggccacaagtctttccaatgcaagacgatgaccggggataagcaaaggcaaagctcaagcaaaagccatcaagcaaaatctccaacacctacatcaaaaaggtggacaaaaaggctgctacaccatatttga

SEQ ID NO: 4159 - DNA, 396 bp, Zea mays
  Peptide Sequence Number=SeqID_47534
atggcggagctaaccgaagcgttggcgctacttggacgcgactggagagagctggccacggcggccgaggctctgaaagcttggcgggcggtggcgcggcgtgctcggggcaattttcggctagggacagggagttgtagcgtcaccaaggtgccagtgtcagaatgtttggtcccgaggtcaaactgcgccaaaaccgtgtcaaaagaatttggtttgagttcaaacttttccaggacgtgttcaagggaatttggctcaactttgatttttggatctcctggttttgagtttcgaaaaacagagaacgcagatgatccttggaaagaggtcggaaattcagaaattcagaaactccaagggttcatggttcaagggctgatttgggaattttaa

SEQ ID NO: 4160 - DNA, 492 bp, Zea mays
  Peptide Sequence Number=SeqID_47535
atgtggccgagggcaggggagctcgtcggtggcgaggagttcggcctatccagggcacaattgaccaatcaaatgggtcagagagctttaccagggatcaaggaaggggtgaagttctgccaggtccaagggcttggaaagcttcacgggccaatggcggagctaaccgaagcgttggcacgacttagacgcgactggagagagctagccacggcggccgaggctttgaaagcttggcgggcggtggcgcggcgtgctcggggcaatttccggacgtgttcaagggaatttgccacaactttgatatttggatctcctggttttgagtttcgaaaaacagagaacgcagatgatccttggaaagaggggtccgacactttcccatgggggtccggactcactattgatgccctagagtacatcaccttctctggccacgtggcggcccaggagccgcccacatggtggggtcggatgctgttgctggcctag

SEQ ID NO: 4161 - DNA, 501 bp, Zea mays
  Peptide Sequence Number=SeqID_47536
atgggcgcatttgtaaggagcgcctttaagttttcgagggcttcctcggcctcagggttccaagtgaagcgctcaaccttccttaagaggcggtacaagggtaatcatttctcgccgaggcgcgagatgaagcggctcagagccgcaaggcatcccataaccctttgtactcctttcaaatccttgataggccccatgttggtgatggccgcgattttctccgggttggcctcgatgccccgctcggagacgatgaacctggagcatgcctcgggggactccaaaggcacacttctcgggattgagtttcatgcctttcgccctctgacacttgaatgtcgtttcaagatcgaagaggaggtcgaaagctttcctcgtcttgaccatgatgtcatcgacgtaagcctcgaccgttcggccgatgtgctctccgaacacgtggttcatgcaccattggtatgttgcacctgcattcctcaagccaaatgtgagagcacctag

SEQ ID NO: 4162 - DNA, 759 bp, Zea mays
  Peptide Sequence Number=SeqID_47537
atgtctggacattggatgggcatcgtctcctcagacgacgaagatgacgagaacgatgacggcagcggtgactacgacagcagtgacgaggacagtgacggcagtggcgacgatgatgacgatgatgatggcggggcaagccaatgcgatgagatgcttcctagcaagcatcgtcggctactgcatggtagcttattctgttcctgcataaggttgcccaatctggcacattcattcactgattcttgttccccggacaaacataaccataatgggcttggccttgactcaaggactggtgatatagaggctgatgattcgtactgggggacccaagaaggggatcctagtcctcagggcagtcgaggaaaaccaccaccctttcttgatgagctttacactttgtttggtctaaccacacacgacaggggcaatttgattagtgttggaggtgtccgtgaacccctgcgaagctatggcagccacgatactcctgatgacggcaactccgagatgagtagtacagaagactccagccatagcgacacaacaagtgatgatagctccaacatattccaacaagctggtgcaacgacgattctagctgctttcacttctcgttcatatactcttgctcctatgatcaaccttcatactccattgtcgcacgtgacaggacgaaaatgggtggaacttaatatgagggacttcaggaagtgtcatgacaattttcgtatgactccacattcttttagataa

SEQ ID NO: 4163 - DNA, 447 bp, Zea mays
  Peptide Sequence Number=SeqID_47538
atgggcaagaacaacaagcgcaagcgtgagccgactcctccatcggaggagtttggtgactcggaatactcagaggaggagttctcctctgagtccgaggggtctccggctcccatccccctgcgtgagtcgtctgatgacgactcccaggggcttgcggcggaggtctggacgtacatccgggccgtcgagcgctccgggctcgagggctcggatgagtctgagttctcctcggacgaggaggactcggacggcggcgaggacgaagatgacgacgacgacgacggtggtgacggcgacggtgatggcggcaagggcggcggaagcagcggcggcaagggcagcaccagaggcggcagcagcacgggcagcaccagaggcggcagcagcaagggcagcaccaagggcggcggcggcaagggcagcggcggcaaggctagtggctaa

SEQ ID NO: 4164 - DNA, 303 bp, Zea mays
  Peptide Sequence Number=SeqID_47539
atgaagcctcagaagtgggagaaactcccgacgagcgagtacaccgagaaaggcggaactcttgccgccgtcatcaccgacaagctaaggaccaagaatgggagcaagccgagcaaggtgcaaggttacgttgagataaccgttgttggggcaaaggcaaagacgccacccctcgctcgaggccttcgctgcagtcgctggtctgacagagacaaaacgggcagggacacccttcgctcgattcagcaccagacgaaggcctgcggtgacgtcatcccgcagcgcggcctcgtccagctctga

SEQ ID NO: 4165 - DNA, 1119 bp, Zea mays
  Peptide Sequence Number=SeqID_47540
atggaggctgcggcagcggcagcggcggcagctccagcgcctgcgggggagagggaccccgagcaccaccacggatgtctggccgtcaggacgtcgctgccgcggtgcgccatcggcgccggcggcggctcctcgctgcctggatcttccggtcagaaatccagaaatgcaagattcatccgttgccgtcccgtcctcttcctttccctgctcattttggcgcctttctgcctcaactcaaagatacacatgaccgaccaagccacgcaaccactaatccactatttcgagaaaataattctgaaccatcggctcaacagcaagacaagccagcagtcgctttgccttctggacatggctttgctgggctcacgcgtctctcaccggtggggaggcatccgatttgatgaaacatcatgtggatcaccgagatggatagggagaggcctctcgtgtgtgtgcatcaagcggaaaggcacatatgaaaggatatgcatgaacctcacaccagtgcaggaagaaaggcttcagagattgaagcatcgcatgaaggtttactttgatccatctagacgagatcaccaggaagccctgaaagctctttggcatgcaacataccctgatcaagaacttgaaggtttgatatctgagcagtggaaggacatgggctggcaaggaagagacccatcaactgactttagaggcgcaggattcatatccctggagaatcttttgttctttgccaagacgttctccgcatcgtttcagagacttctaaataaacagtgcggtaacagagccacatgggagtacccatttgcggttgctggtgtaaatattacattcatgatcatgcagatgctagatctccagtctactaagccaagaacatttgtgcgagccatttttatccaaatgctctcagaggatgagtgggcatttgatctgctctactgtgtcgcatttgttgtgatggacaagcagtggctggacaagaatgcatcttacatggacttcaatgaggtgctgaagtcgacacgagcccagctggagagggagcttatgctggacgatgtcatccgcatcgaagacatgccgtcatacagcctgctttgctag

SEQ ID NO: 4166 - DNA, 1437 bp, Zea mays
  Peptide Sequence Number=SeqID_47541
atgccttcggcgccgctcgtcgcggctgccatcggcacgcgcgtcagcctccgcccgaacctctcactcctcgccgatcgttgcgctacaccttgcgccctagcccgcgtgcacgccgccatgctcgtctccggccgcctcgccgaggacgctttcgccgcgtcccggctcctggacgcctacgtcgcgctctctccggatcccgctgccgccgcactcgcgctcctctcctccctgccctgcgcgcccaactccttcatgttcaacaccacgctccgcgtgctcgcttcctccccggacccggccaccgcattccccttcttctcccgcatccacggcactggagccctcgtgcccggccggcacacattccccttcctcctgaaggccgccgcgcgccttccgctctctctccccgtcaccgaacagctccacgcgctcgccgtccggcacggggtccacctcgatgcctacgtcgccaatggcctcgttcgggcctactccgtggcgggccttctccgccccgcgcgcagggtgttcgacgaggtgcccgagcggaacgcggccgtgtacactaccatggtctccgcgtacgcgcagaacgggaggcacgaggacgcgatggcggcgttcgtccagatggtccgcgtgggcttcgagccctgcggcgccgcgctggcctcggtgctgtctgcgtgcgcgcggtcgccgtcgggcgggctcgagatgggccgtcacgtgcacgacctaatggtggcacggggcgtggcagttggtcccatcctcggcacggcgctggtcgacatgtacgtcaaaaatggcgccattgaggaggccttggcagtgttcgacgggctgccagagcggcgcgtgccggctgcatggaaccctctcatctcggggctggcgaacctcgggcacggtgagcgtgcactcgactttttcagacggatgcagcgggagggtgtgccaccgaatgcgaccacactcgtcggggcactctcggcgtgctcccacccagggctgctggacgaggcccgccggctgttcaggtccatggagaaggacttcgggatcgttccaggaatccagcactacggatgcatggtggacctccttggccgtgctggcctcttatcggaagcggaggatatgatacgggagatgtcatgcaaggcggacaccgtgatatggggagcactcctgacggcctgcaagaaccacggtgtcattgagattgcggagcgggcagcggtggagatgctgaaactaaatcccagtaaccatggagtgtatgtggtactgtccaacttgtatgccgaggctggtaggtggcaggacgtggacaagctgaggaaggtgatgaagggagcgaggctctctaaaatccctggggcaagcgcagttaatggtgatgggtcactggagcaaccatag

SEQ ID NO: 4167 - DNA, 477 bp, Zea mays
  Peptide Sequence Number=SeqID_47542
atggcgctcatcgctagccgcattcgggaactagaggctaatgcgttctggctcggggttcaccacgcactggtcacgactgggtctcatcttgacgactcgatcaagcgggatcgagaatgcctctgtcatgctaatggatggggggacatgggtcgcgaggataaggtgtccttcattttcctcatcgttgggaggtctgtcctcactgcttgttggggagacaaggccttggagggcaaggacaatccctgctctgtaccttgcccctgtagggtaaggttgaggccgccgagtgcttccacaacgatgttcgggtttttgggcggtgaaggtcaggtgggtgacgcttggaccatctcgtcatctttgtcgatgatgaagtcgaggctcctgaagcgatcaatcactctgagagtgagaacggcatgggggtcaccgcaggaccacgtcatagcgttgagactcctaggatga

SEQ ID NO: 4168 - DNA, 939 bp, Zea mays
  Peptide Sequence Number=SeqID_47543
atgcagtcggcatgcaaccgcgccaagtgggcgcgccccttcgactccaacgcgcccagcatggaggctcaggcccacacgtcatgcaaccggcgcgccggttgctacgtgcgagcaactgcaccgccactcgcgccactaccacgcctcctcgactgcggagccaataccgcgactcgaggcaaccctggaccgggaaagggggataccccgaaaaggatccttctccgtgaaggaaacaggccccgagcctccctactgatcagaggttcaaaggctggcccctcggaggggttcaacggccgcctcagagtgcttgggttctgcgcccactactggtcagaggctggccctcgaagggttcacagtcgcctcagacacagagtgagggatgaccctgggtatgttcgatacataaccaaggctcgggccacgctcccgagaggcttgggggctgctctcgcaaacccggctccggccgacccattgacagcgtcaacataccagcccgagaacttgggacccgaccgtacaccagggctacggccagcctgcatgagggaacaactagaccagccgaacgccgcctgcgccgctccgactgctgagccactcgacagagtgaggctgacagcagccaagtccggtctcaggcgtcataggaaactccgcttcgcccgaccccagggctcggacttgggctcagccccggaagacggcgaactccgctccgcccgaccccagggctcggactcgggctcagccccggaagacggcgaactccgctccgcccgaccccagggctcggactcgggctcagccccggaagacgacgaactccgcctcgcccgaccccagggctcagactcaggctcagccccgaaggacgacgaactccgcttcgcccgaccccagggctcggactcaaccctggcctaa

SEQ ID NO: 4169 - DNA, 354 bp, Zea mays
  Peptide Sequence Number=SeqID_47544
atggccaccttctcgtacgagggccctggaccttccttttatagatgtaaggagagggtccagtccgagcccaaggtcgggcgaggcggagacccgccttccgaggtcgaggttgaggccgagccctggggtcgggcgagacggagatcgtcttccgaggtcgaggttgaggctgagccctggggtcgggcgaggcggagcttcctatggcgcctgaggctggacttagctgttgtcagcctcacccctggcgggtggcacaacagtcggagcggggcaggcggcgctgttttcctgtcaggtcagtcagtggaggggcgaagtgactgcggtcacttcggtcctgccgactga

SEQ ID NO: 4170 - DNA, 468 bp, Zea mays
  Peptide Sequence Number=SeqID_47545
atggcccgctccgtctaccaccacttctcacctcgtcgacgatcttatcttgtagcggcgatgcacatggcgagcgagaccatctccgagggtggcaagtttgaccatgcagatcgtttgttccaaagcattgagagcgcttatataaatagcttatcaaatacaagtgacgtcaaagagcttattccagaattcttttacatgcccgagtttcttgaaaattcaaattcatatcatcttggtgtcaagcaggatggggaacctataggcgatgttgctctccctccatgggcaaaggatgataactcaagtgacgagtttgacaaagattctattgagagtgatgatagatctcttgaagagctaagctgggagacacagaacttcttgtggtacctcatatattcaggaatttggacctacatgttttgtactcatctatactacttattaaggctgcaagggtag

SEQ ID NO: 4171 - DNA, 390 bp, Zea mays
  Peptide Sequence Number=SeqID_47546
atggactacaaccccacggtatggtgtcgtcgcttccctatcgcctttcctactttctatgagaggcttatctcggaatccctaatactttgtttggtgatgaggaagattcctgatgagctggtggagcactaccttggccaccgcagcgggtttcactgccccgaccttcatttaaatgttgtggagaaacagttggggaagaacttcgatgacatgtttgaattcttcgatgtcgagcctgttgggtctgcttctattgcacaggtgcatcgagcaaggcttaaattatcaaagacagacgttactgtcaagaagcatgacctcaactttgatctattttctgccaccaaagagatggaaaaacaggtttctcccccactcccatag

SEQ ID NO: 4172 - DNA, 324 bp, Zea mays
  Peptide Sequence Number=SeqID_47547
atgaggaaaaaacttcgaaggaaaatttttttaatgcttcgttgtgtacgaaaagaagagaaggtgtttttcgccttcggctcaaaagagaagtttcgtccacagcaaagcagactgaatgcggataagggagacagaatatattacaagcttcgtcatcctgtgtatgccaaacagcaggataagaaaggtgcaaatttcaaaggagaagccagcccttcaaaaagcagtagctgtaccccgagaagctaccagggcgcagaagtcggcgtgcccaccaataacttcgtcaagggcatcaacttcgccttcaatatattctaa

SEQ ID NO: 4173 - DNA, 258 bp, Zea mays
  Peptide Sequence Number=SeqID_47548
atggctcatgaaataatgaagaagagcgaaaaagatatccacgactctcgagaagcagcaaagaaagctaagaaagccgcagagcttgagagacagatagctgagctacctcctccactggagccgttcgaccccctagccgacccggaaacaaagaaagcgatagaaatcattaatatggccgaagctattgtcgacgaagttgttaccaaactgcttaacgaagttgcagaaaaagttctcaaggaagaagagtag

SEQ ID NO: 4174 - DNA, 297 bp, Zea mays
  Peptide Sequence Number=SeqID_47549
atgtcgtgctgtccattatgcccgctgtcaccgtggacagagcgatttagagctccgctagtgaaattaattgaggggaaacacttgttagagcttgaattaggtctcagccgaaaaaacgaggaagagatagaagttgaagaagcgaggactacaccaccacctgaagaacctcaggcaagaaactgcttttactttgatatctgtggagcagagcctgactcacctatcacacaaggcaagccccagtgcatttgccacctccttgctattttaaaaactttctcacttgcttga

SEQ ID NO: 4175 - DNA, 288 bp, Zea mays
  Peptide Sequence Number=SeqID_47550
atggcgcctcctgtcgatgtggccggtccacgccctaggttgggcgatgtggaggctcctccgaagtcgaggtcgagtctgtcttccgtggccgaggtcgagtccgagcccctgggttgggcgaggcggagaccgtcggctgaggccagggcggagtccgagccctggggtcgggcgaagcggagttcgtcatcttccggcggagcggagttcgccgtcttccggggcttagcccgagtccgagccctgggtcgggcggagcggagttcgccgtcttccggggcttag

SEQ ID NO: 4176 - DNA, 450 bp, Zea mays
  Peptide Sequence Number=SeqID_47551
atggagcagggagggcgctgcttgggggctcggctgggggagagaagagctcctgctcctgcggcaaggcacacagggaggaaaaaggccggcgtcgagcacctcgctggtttgctgcgtcgagggggagcgagtggagggaggcgctgggagaaaagacagccggttgggggagctcggctgcgggattttctggacgccatggctgggagcttgactgctcgagcttcaccggcgccatggatccagggaactgctgcgcgatggcgaggccgagctgggagatgcagcgtgcgtgaggaagaaggggcaggggcaggggccaccgcgccctggctggccgagaggaggagcaggcctgggcgccatgggaggaagggagccgagctccctgcgcgctggctgtgtgcatgggagaagaagacagggagaagagagagtggcggctag

SEQ ID NO: 4177 - DNA, 1086 bp, Zea mays
  Peptide Sequence Number=SeqID_47552
atgtcttcgcgctcccttatgcatcgtgtctttccaccttccgagaccccggatgggggatgcccgcagtccttccgccttgccgttggaggaacgcaactccgtgggagttggtacctttcagccatcattcggcttcaaggattttcatcatgcagcccagctgcacccctccgccggtggtcacccaagacggtgaccaccagcccctggatggggagaggcaagccaggctgtgatcttggtcccgccctcagcttcaaggatgatgcaacattccaccctcttcctcgctttcgtggtgaggacgggaacgaggacctgccgatgcgctttggagcggcccgctctttggctttgatggctgactcgcctgttggttgtctgaaccgcttcaccaagcgtgagttgccccgtgcaaaggtgacgagtgagcatggacagaggcagagttggctcgaaaaagaagacttggtcggccggagcctggccgggtcgtccgttagcgggaccgacgccggaattgatctgccgaggcctcgggccaggttgatgtcctcggaggacagctggccgaggcctcggggtgaccagccgagccgcctgctcgggcaggattctcggagaagaccctggcggcgatggcccgggcttggtgatgatgtcgtccttcggagtggagaccctcagaccgcgtcgccgtccgaggctaggtcggacctcgccgaaggtggagccgatgccgaggactttttcgtcgataacagaattgtctgtgcgagcgagagttgcttctcgcagaaggtgatgagtgagggttctgtcaccaacgtagtcgagaaggctcgaagaatcgcttcggcagaggagctttcgaacgtgaagacttgttcggtccgcggaatcacttatccgaacatgagttacttatcgcagaaggtgatgagtgagccgatgcaccaagtcgcccacctggaggtctcaggaccggacccctcgggcgtggtagcgtcgcagggactgttggccttcgtcctcggggaaccgtattctaagtctgtgggcaagatggcctcggccccatag

SEQ ID NO: 4178 - DNA, 63 bp, Zea mays
  Peptide Sequence Number=SeqID_47553
atggcagtcggggtcagtgaggcattgtacgccagggcggtacttcttaggtcgattggttga

SEQ ID NO: 4179 - DNA, 873 bp, Zea mays
  Peptide Sequence Number=SeqID_47554
atgggtcggcgcgagacggagcacgaaggggggaaactagagggagacaggcgtaaaggggaaacccgcggccttcatgtttgtcctgcgcccaggtcgaggtcgagtccgagccccgggtcgggcgaggtggagttcgtcgtcttccggggtcgaggccgagtccaagccctggggtcgggcgaggcggagttcgtcatcttccggggccgaggccgagtccgagcactgggtcgggcgaggcgaagttcgtcgtcttccggagtcgaggctgagtccgagccctgggtcggggcgaggcggagttcgtcgtcttccggggccgaggccgagtccgagccctgggtcggagcccaggctgaatccgagcctggggtcggggcgagggcggagtttcattgtcccagggccgagacgggggcccgagccctgggggtcggggcgagggcggagctttccaagggcgccccgaaagcccggacttgggctgctgtcagcctcactctgtcgagcggcacaacagtcggagtgacgcagtccggcgctgtcctcttgtcaggcccgaccatccttgcattaaatgcttctgcgatacggtcggttggtgtggcgatctggccaaggttgcttcttggcgaagactgggcctcgggcgagccgaagctttgtgctgatgggggttaccagctgagattaggagtcttggggtcgagtcccaagttctcgggctggtatgttgacgtcgtcaacggtttggctggagccgggtttgcgagagcagcccccgagcctccgcatagaggcgccgaacatggtgtctccagtgagttgctaacgggtaatccgagtggacgcccgttccccattcgttag

SEQ ID NO: 4180 - DNA, 738 bp, Zea mays
  Peptide Sequence Number=SeqID_47555
atgaccgcgtcaaaaaaggtgtgccacgtcattcgatttcgtacccttttccttttcctctttctctctcttacaacagggaccgagaaaggggataccccgaaagggatccttctccgcgaaggaagcgggccccgagcccccctactgatcagaggttcgaaggctagcccctcggaagggttcaacagccgcctcagagcactcgggctccgcacccactactggtcagaggttcgaaggccggcccctcgaaagggttcaacggccgcctcaggccactcgggctcagcgcccactactgatcaggggttcataggctggcccccgaagggctcgacagccgcctcagacgcagagcgagggatgaccctgggtaccctaggacatttccgagaccaacgggaacgattttgtaatggaatcctaccagagggaggcatcgagccctcgaaccccgtcaaaaggggaccgggtccggcaaatcacccgcagagtgaggctgacagcagcccaagtccgggctttcggggcgcccttggaaagctccgccctcgccccgacccccagggctcgggcccccgtctcggccctgggacaatgaaactccgccctcgccccgaccccaggctcggattcagcctgggctctggaagacgacgaaactccgcctcacccgaccccagggctcggactcagcctcgactccggaagacgacgaaacaccgcctcgcctaa

SEQ ID NO: 4181 - DNA, 174 bp, Zea mays
  Peptide Sequence Number=SeqID_47556
atggagagtcatgatctccgggcagaatgggaatcacggcttgtgggtggttatgagattgatggttttggttatgactatggtgctggttgccagcattgcaaccactgctcaggcgaagatgaagctgtggaaggagacttccaggagttccaagactacgacgagttctag

SEQ ID NO: 4182 - DNA, 585 bp, Zea mays
  Peptide Sequence Number=SeqID_47557
atgtcttcttcctcccttatgcgtcgtgtctttccatcttccaagcccccggatgggggcccggtcgcttccccccgctggcggtcacctaagatggtgacctccagcttgatggtgggggaaagcgagccgggctgcggcctctgcccctccctcagcctcaaggattttcatcaccaaggctggggaggggagagtgccgagttgggctgcagcgtgcccggtcttcaggcgcgagtggcttcggagccgctcgcggcgccggcgtctgctacggtagctggaagaggttcttccgctggcgcgatagccggggccggccacgggctgacctccaactctacggccttctgcccgtccttgcctcacgagttttggcatgggcgggggcctcctggcagcggcattcaacctgaggtcagtgttgccgctgttcggccccccggagcagaagtcgtcgtcgtcaccgctgctggagcaggtgacggcgcgccgttcgtcggccttccgtcgctccgcaggccttccccctcggagtggggttgttcgtacctgcaggagggggaaccggagttccgtttgtaa

SEQ ID NO: 4183 - DNA, 4104 bp, Zea mays
  Peptide Sequence Number=SeqID_47558
atgaccgaaggagtagacgttgggaagcagcacttgacatcttcgactattaccaccaatgaggatgctgatgagactgtactttttaaagaagatgatgatgatgaagaaggatacctattcgctgggcaagatggtgaatctggtgaggatattgagattgatgaaacccaagatgcctttactgtcaaccctgacgtacctgacttgtacgacaaggtgtatagtaacatacctgaagaaacacatttgctgagcactgttgctgactgcgattactgcaaagcgaagaagtttcagtatgaaccacctggattttgttgtcgtaatggacagattaatttagccgcattcgagacaccgctccagcttaggaggctgtgggagtctgcagatgctgatgcgaggcactttcgtgataacattcgattttttaatggccatttctcgttcacttctctgtactgttgccttgatagtatgactacaaacatggattgtggtatctatacgtttcgtgcacatggcatgatgtaccacaacgtaaggtcgttcggtagggaagttggggcggaacataaacaccttgaactctacttctacgatgatgatcccagcctcgagcatagatatcgtaaatgtcatcaacaacaatttgagaaagacaagtcagttattaaacaattggttgaaatacttaagggaaatccatactctgagcaccttaggagtatggggcacgttgataacattgaagactaccacatcgccttgaaccttgaccaaacgctgaaccagaagttatataattcacccattacttcggaggtagctgtaatttggattgaggggagtgaatgtcgagaacgacctagccatctatgcgtgtctgtacgtgactattactgctacagattccaaattcgtccaagtatattcaatccaatacttcatgggaagcggcttttccaacagttcgcggttgacacctacatcaagattgagagctctcgtttggatttcatatgtaaaaaccaagacagattaagggcggatctatacaagggtttggtagatagcttgcatgaaggcgagaacaaagcagacaaaattggaaagcgaaccgtgttgtctacatcatttattggtggtcctcgtgacatgagacgtcagtatatggatgttatggcccttgtgcggaagtttgggaagccagacatattcctcattatgacgtgcaaccccaattgggatgaaataaccagagagcttctccctatgcagtcaccacaggatcgtccggaccttgttaagcgaggtttgcctcatgtccatttcctactcatcatgcagagaaagtacaagctaacttgtcctgatcagtatgatcaccttatctccgctgagatccctgacaagaagaagtaccctgaactatacaagatggttatcaagcatatgatgcatggaccgtgcgggttgctaaatcctaaatgcccatgcactaagggtcgtgcttcatgcaaaaaccattatcctagagcttttagcaatgcaacgtctcaaggaaaggattcatatcctatttataggcgtcgtgatgatgggcgtaagaaaacagttcgaggttgtgaattggacaacagatgggtcgtcccttacaacccttacctcctctggctcttcaactgtcacatcaatgttgaggcgtgcgggagcatcaaggctgtcaaatacttgttcaaatacatatacaaaggccacgatcgtgtgtctgtggctgtgacagacgcaaacaaggctgatggtgatgttgatgagatcaagcagtatagagatgctaggtgggtgacccctccagaagccctttggaggatattcagctttgatctaagtcaaaactctccaccagtgatgcaactgcagctccatcttgaaaacatgcatatggtgtcatttcacgagcgtgctaaagtaaatcatgttgtccaacgtctaggtgccgataggtcaatgcttacgacatattttgaggcaaataggctacacgaggaggctcggggcatcctttaccgtgatttttctgagtggtacactttgcagcagggcaaggtgtggcaaaggaggaaacgaaacacgggtggacaggttggtagaatagtctctgctcatccagctgagggggagcgcttttatcttcgacttctcttaaaccatgtgacgggtgctacctcctatgcggatctaaggacagtagatggtgacacactaccaacttttcgtgaggcagcacaaaggaggggactgcttgaagcagacgacacaatagatgagtgtctcaacgaagccgctatttaccaaatgccgtcagcactacgaaggttgtttgcaacaatactggtatactgcgagccgaacgatgtggcagaattatggcagagacaccttgactcaatgtcagaggactatcaccgtagtactcaaagcaaaatccatgtgcagcagatggtcttgattgacattagaaacattttgcagtcaatgggtaaagacataaagacattccctctccctgctattattgatagatatgacgattcgcatggtactgatagagagatttacgaggaggaaagtatcgagccgacgacagaagacgttgctctgaaagaaaccttaaacgaggagcagaggtctgcttatgataagatcctatctgtcgttgacaccaataacagtggagtgttctttgtggatgggcctggtgggactggaaagacctatctgtataaggcattgcttgcagcactacgcagtcacgacaagattgcagttgcaacagctacatctggtgttgcggcttctatattgcctagggggaggactgcccattcgcgcttcaagataccacttactattgatgatggtgttgtatgtagcttcacgaaacaaagcgggacagcaaagttgctacaaaaagcatcgctcattatctgggacgaggcatcaatgactaagagacaagcaattgaggcgctagacaatagcatgcgtgatataatgggacggtctaggttgccctttggtgggaagactgttgtgttcggggttgatttcagacaagtacttcctgttgtacgcaaggggtcaagggctcagatagttgctgcctctctacggagttcttacctctgggaatccatgtgccacctaaagctttttcaaaacatgagggcacagagcgacccatggtttgtagaatatttgttgcgcgtcggtggtggaactgaggaagcgaacaacgatggtgatgttcgtcttccagatgaggtatgtgtgccatatactggtaatgaccgcgaccttgatagactgatagatgacatttaccccaatctaaatgaaaacatgtctaacacaagctacatcacttcaagagcaatattgtctacacggaatgactgggtggatatgataaatatgaggatgatcgatcgtttccaaggggagcaaatgatgtaccatagttttgacaccgcggtggatgatcctaataactattacccatcagagtttctaaacacgctgactcctaatggactacccccgcacgttctgaagctcaaagttggatgcccaatcatgttgcttaggaatatagaccctgctaatggactttgcaatggcacgaggttggtggttcgtggtttccaaaaaaacagtattgatgctgaaattgtccttggccaacatgctggaatgcgaattttcttgcctcgtatacctctgtgcccctctgatgatgagatgttccctttccagtttaaaaggaagcagtttccgataagactaagttttgccatgacagttaacaaggcccagggccagacgattcctaatgttggtgtgtacttgccggaaccagtgttctctcatggtcaactttatgttgctctatcaagggccaccgctcgatcgaaagtgaagatacttgccattccagtccacgatgagaagaagaagaagggggttgaaaggaactcagcgataaatggcgcaacatacacaaataatatcgtttataaggaggtccttacgccgtaa

SEQ ID NO: 4184 - DNA, 525 bp, Zea mays
  Peptide Sequence Number=SeqID_47559
atggtgaagagtctaccatccgtaggcgtaatctccagttggccaagtttatggagttcctctttatggatctctactgatcaagcctggagtttacccagagcaaagaccatgcccttgctcagccaaacaagcgactgtgttcattgtctgagcacgttcctcatggttaccgtaggaaatcactttttgaagctacagacccgacagacacctaacagtatttcagtagcgggttctgataaccaacgctctcagtggacaaaggatgttgttgaatatttacaacatatgttggacgaattttgttctaaagagggtgcatttgtgcatccatcttttagagagcagtcatcaccaggacctactgctggaaccaatcagataaaaatgaaaactgaagcatctccagctgttggagacattgaagaacacttggtgcacttcaaatggtggtatatggttcgtctcatccaatgggatctcacagaagaattgcttgttccctcagtacttatcgaatga

SEQ ID NO: 4185 - DNA, 198 bp, Zea mays
  Peptide Sequence Number=SeqID_47560
atggccaagcgaagtcatggcatcgtcggcggcgcgggtgtagagcaggagagcgcgaatgcaaagggacacagagggctcgaaggcgtgctaagatggtgccccaatcaccggtcatgtcatgatgaggtgaagtacaagctttggccccacctgcaggctcacatccttgtagcatcccaaaaattcaaatcttga

SEQ ID NO: 4186 - DNA, 189 bp, Zea mays
  Peptide Sequence Number=SeqID_47561
atgaccactttattagactcaaacactaatttgagaccctgtcgacatagcagcgacactgatatgaggttccggctcatcgagggcacatatagtacatccttcagcatgagcgtctttcctgaagttaacttcaggaccttcggcgacgaagcagaccccccaacagtagccccttcgcagtgctag

SEQ ID NO: 4187 - DNA, 315 bp, Zea mays
  Peptide Sequence Number=SeqID_47562
atggagagtcatgatctccagacagaaagggaatcacggcttgtgggtggcaatgagaatgatggttttggtattgattatggtaatggtaagtggtattctttccatttggaaagggttgtccgcattgcaaccactgctcaggagaagatgaagccgtggaaggagacttccaggaattccaagattacaacgagttctaggcgtgggttagcggcaacccccagtcggctgcctgtgaaggccgagtgtatctacgtttcttttccgcactttgattattgtaaagactatgtggatgtctcagacatatga

SEQ ID NO: 4188 - DNA, 474 bp, Zea mays
  Peptide Sequence Number=SeqID_47563
aagcagcaaaagtctgctacttcctcacctaaaaacaacgaagggataaaccctgagtatggaatactcagcaagtcttacccgactaaagaaaagactctcaagggtatgctggttatatgggagtcaagggtttcaaggagggtaatcaaaatcaaggaagtcactgacaacttgcaaaagagacctccggtttctgtttcttcgcaggggaaggtccccgaccacggcagcgcacggagaggctccggcgagccactgtaccggccgattggggcagtgaccggcgctaatcttcggctgagaccaaatccgagttcctatgaacgttttccccaacttaattgcaccattggtggactagggagctccggccacggtggccgtaagcaaagcggcaataaggtcgtgttcccggcgatgggcgccggtctagtgcaattaaaggggtcggggagcatcacagaggcatga

SEQ ID NO: 4189 - DNA, 567 bp, Zea mays
  Peptide Sequence Number=SeqID_47564
atggggagtagctctctccgggcagaaagggaatcacggcttgtgggtaaagtgcacagccccgggggtggcaatgagactgatggttttggttatggttatggtgctgctagtccactacagccaaacaggatacttgctgagtatgttgatgtgtactcacccttgctctacacaccaaaccccccccatccccaggttgtcagcattgcaaccactgctcaggagaagatgaagccgtggaaggagacttccaggagttccaagactacgacgagttctaggcgtgggttagcggcaacccccagtcggctgcctgtgaaggccgcgtttatctacttttcttttccgcactttgatttattatggctcgtcttagacacactacccgaaagtccgtcatccccttcttaccctcccgccttgctgagcgtccgcttcgccgtcccgtggccggacagtccagccacttggagagactgcaccaccgtctgcatgaggagcaggaacgtcgacgacaggagcaggagcagcagggctcttctttctcgctccagcaggagatag

SEQ ID NO: 4190 - DNA, 198 bp, Zea mays
  Peptide Sequence Number=SeqID_47565
atggagagtcatgatctccgggcagaaagggaatcacggcttgtgggtggcaatgagaatgatggttttggtattgacccggtgatggttgtcagcattgcaaccactgctcaagagaagatgaagccgtggaaggagacttctaggagttccaagattacaacgagttctaggcgtgggttagcggcaaccccctag

SEQ ID NO: 4191 - DNA, 381 bp, Zea mays
  Peptide Sequence Number=SeqID_47566
atggcacccaagagagctagctcgaaggcagccccatccgttgacgaagcagcgaaggcagcgctgttggctgagaaaaagggaaaggcccttgtcgacaccacccaccaagaagcctgtgaagacgacgcactcggcaagaggcagcggaatgaacaacccactcccgaaggcagtctccgcacctgcagctccggaggacaaccgcaacctcccccaggcttcgctccaccggagggcgcggacgccactgaggatggcgaagtcatcggcgtttcagcagaagaacagctacagctgcgggccttgcgcatcaagaaccgcaacctccagaagcagaaggagatcctcgaggccaagcgccaacgtgtctctgtgtag

SEQ ID NO: 4192 - DNA, 237 bp, Zea mays
  Peptide Sequence Number=SeqID_47567
atgacgacttacaggccacttgagctgctccacatggatttattcggcccgatcgcgtacataagcatcggcaggacagaggacacacctgctgccgaagcaacacaagctgatgttgaagaagttggttctgaggaagagttcagctacggggtaccaactaaacctagtcatttggactttggaaagtccaccatcactgaagctgaccttccaaaaatgatgaagctgggctaa

SEQ ID NO: 4193 - DNA, 540 bp, Zea mays
  Peptide Sequence Number=SeqID_47568
atggggagtagctctctccgggcagaaagggaatcacggcttgtaggtggcaatgagactgatggttttggttatggttatggtgctggtaagtggtattctttccgtttggaaagggactaccataccttgctggtagaggtcatcagagaaaggaatacagctttgtctgaagtagcgcagcttagggcaacacaggtcaacctgatgcagcagctgaacaatgttgaagcttggaatactaatctacacgaagaggagggtgaccaagaagcaccacttcctccacctccgccatacacacccgagcagttcttcgcacaacttcttggagctcagaggaacatggagaacttgcagcagaagatggaggcaaaacttcacaacattgctaacaacacccgccatgggcaaccacaagaagcacatggagttaatcaatatagtagcttcaaggatttcatggataccaggtcgccgatattcaaggaagcagcaaaacctttggaggcacatgaatggatcaacactatggaatag

SEQ ID NO: 4194 - DNA, 150 bp, Zea mays
  Peptide Sequence Number=SeqID_47569
atggagggggagatccggtacacatcttttatcgcccacgctttatggggccagagaagtccgagcgcggagtcgtggtcaccaaagtccatggttcttgtgcggcgggtatggcgcgaggcaatcggtgtccgttattctaaattttga

SEQ ID NO: 4195 - DNA, 168 bp, Zea mays
  Peptide Sequence Number=SeqID_47570
atggcgctttcatggggagctgcgcgggcggcggaacatcggcggttaacgccggacaccatcgctgcgcgaggtttcgaggatgtgaagaatcaccctggtaactggaatctcaagtcccaggcaagttgtgcccttgatcacttcttttacccactcatgttctag

SEQ ID NO: 4196 - DNA, 354 bp, Zea mays
  Peptide Sequence Number=SeqID_47571
atggcgccgccgtggtgccaaaagttcatctataactatactaaatcgactgtccggaataccgtagattattccggacaggagaagctttttggaaaaacaggccaagcgcggaccgtccgggcccttgcggcggaccgtccgcgacatcggaatatccctcggacagaaccaatgcaaaaacacaagtttccactacagaccgtccggaggaaaagcaaagaccgtccgagccctcgcgcggaccgtccggcctcaggcgcggaccgtccgatcgccgttgatctacaggggcggaccgtccgcaccaggagggcggaccgtccgcgctcggcagaatggcccaacggctag

SEQ ID NO: 4197 - DNA, 2553 bp, Zea mays
  Peptide Sequence Number=SeqID_47572
atggaggtagttgagttggttccttgcgcccgcaataaatggggcaactggcatgagttttggttctacgttgcggagggcacagtcgaagaccatccgaggctcccggtggccgagatgtgctcgcattattactcagcatacccgccgtttgaagtggcggaggaggatgcagacgaaggggcccttcggtgcgccgccggcctgagcagcgggcgcgatttggttgaggagtttgtggcgtatggggtgtggcctttggcgcatggctgggcgctgggcgaagtatgccctcgccagatgccttcccgtggtgggatggtggtgcaaagtcccgccttcgcactggatctgcgtagccgcgatccggccgcctttgtgcgtgaggcggaggatggggcggtgcagattgtcggtcggtacgtgccgaagatagagggccagcgtagctgggatatacgcgggtctaatgaccgcttgaacagggtcttcgagttgaaccgtctgccgtatggcggttatcccgggcgagacgatgtggatcgtcgtgggaagaagccggcgatagagactggacacgacctcgtgccggcggccgccccatcctctaagaagaggaagctaggtattgctatgggaggactgggggtttctgatggtttttctagggaattgatgaggacatgtgcggccctggggggaaggatgtcttcgcccgagctccgtgagtcttcggcgcggatgctgagggttaccgagggttggtggcctaagaatgttcctatcccccgcgcggccggcgaagacttttttacatctcgcatggttcgtgattggagagtgtttccttacgggcggaatattgctgctgttgtgtcggcagtgatggacaaggatcgtcagggagctgcgcagaagcgtcaggcggtcgtccggcaccctgttggtggcctaaaaatagtgtttccttacgggcggaatattgctgctgttgtgtcggcagtgatggacaaggatcgtcagggagctgcgcagaagcgccaggcggtcgtccggctgcatgaggtcaggccgaaggggtcgcgggggactgtgaaggctgctgcccctggcggaagccagccgacgctggtggcgaagttggccgcccctgggtccagcagggtgccggaggctgcgaaggcgaccgccgctggcgggtcgggcgaaggccaacttgttgtcgttccgcccgccgtggcgaccgcggcggctaccgtggtgcccagggcgaagggtagtgctcttagtgccggtggtgagattccgacactcactgccgtcagggacgaggcgggcgctgtgtcccgccggctgaaggaggcattaagtcaagcggctgacttcgcagaccgcgcggcgtcggggggccttacggcagttgtgtctgccgaagtcgagagagttcgggcgcaacatgctgacgccgtccaggaaaagtcggccgctgacagcaagtgccgcaagttggcggataaggtggccgcgctggagggtgagaggactgacctccggcgccaactggcggaggagtggaaggaggctaatgaggccctcgtcaaggcgcaacagcgcgccgaggaattggaggagcggctcaacgctctgcagacccgtgtggagagggccgaggcttcgacgcgctcggaggttgagcggacgcgcaagcagcttatggactcataccacgagctgggcgcgcgaaccgcggacttcgaggagttgctggcgctccccgccatcgtggaggggtttatgtcctacgcctccctggtcacctgcgaaggggcgatgaacgcgctgtcccgcgaagggtgccggcactatgaggtcttcgaccaagctgatgaggatttcgagctcgatatttacaaggttgaggaccctatagtgaaggaatccgcgggagccctcttcgaccggatgtggggccctcacggtcgggaggtggtcagggagcggtccgagacggcgaggggtcaggcggcgcgtaatgagaaggtggaggacttcggggctttgaacagcgcgcagcctgactcggagtcaaacccggtggcggctgtgtttgagatcgccccggcgccgccccccgaaaccgtcgaaggcgttcctgatgcccccgcagccactgcggccgacggaggctcgtcgccaactgctgcgccgagggctgaggatcctgtgaagatggcggcggagccggcagcggaggatcccgcgacggctgggtcttcgcaggttcaagattttgggcctgcgcacgcaaccgctactgctaactttttggcggcttcgaccgtggatgatgggaataaatcggatgagtctgcatctaagttttctgattttgcggcggaggcttcgccgcgtgctgcggatgctgaagttgtgcctggtccgagcgctgggcgtgagggggagctgcgaagtctttttgcgggtgaggagctgaggataatgctatttaactatagggagatgggaattattctaaaggttgagccgatgtaa

SEQ ID NO: 4198 - DNA, 159 bp, Zea mays
  Peptide Sequence Number=SeqID_47573
atggcgagagtagcgtgtaccctccgtggcaagaggctagacggtggtgtatctgtgctctcggtgaagaagcaacaaacttttgttgcttctattccaaggtggtacagaaagaagaaaatcaagactgaagttacgggagaaagggtcctccgttaa

SEQ ID NO: 4199 - DNA, 895 bp, Zea mays
  Peptide Sequence Number=SeqID_47574
atgatcgacccaacagaacgacggtggaaccctggtctcctccctcttcacccgcagctgcactgcagcacacgcgccaccgaagcgctctgcccacctcgctcccctccagtggccgccagcgcggctcagcggtccatcctcctgacgccacctgcaacggcgtcaggcggtgatccattccaactcgcgctccgtcctggcaatcactttgggaaggtggtcagtggaatagctttgcttaaaaagcttgaagcagttggtagtgaaactggaaatccttcttatcaagtgaaaattgtagactgtggtgaagtttccaacacaaattctcaggatccgctaaagggagataaagtaagctcaaagacagataacagcagttcagacagtgaaaagggtggccatcgtaccaagcgttccttaccgaaagtaaatgtagatggcaacattggtggtgataatgcagaggctagcatgtctagaactggtgaaggaaggcatctgccaagcaatgaacctttgtccaccaatggtaaagatttaggtgtgggttctgcagacaatgggcaacctcaacaaatcaggaaaggacgtggttttactcagaagtatgggtatgaaagaaatggtccttacagtagacgctcgccagtaaggagataccatggctcgccaagagccaatagcccatccagtactacccaagcctcaaccgttcaaagtgttgctcgaaggggatatgtacaggaagaacagaaagtcataccatcttctttggtcgtttctggtgctagcataccttctgacagacaattgaaaaagagaattgatcttttttatgggcgaagtgttgaagatggctttggtgaaggaaatgtcttgttagcatcaa

SEQ ID NO: 4200 - DNA, 1329 bp, Zea mays
  Peptide Sequence Number=SeqID_47575
atggaagggatggcggcgcaaggggcaggaagggcggccagggcgaaaccgtttccagcgctccgcccggaccggacgcgggattcaaaaaacgcgaagcggaacagccgttcctcgaacggctcgcgcacgcgcaacggccgccccgccaaccactcgccccgtcgcattaactccgcggcgggacaggcggcgcctctgggaccgggaaagggggataccccgaaaaggatccttctctgtgaaggaaccgggctccgagcccccctactgatcagaggttcgaaggctggccctccgaagggttcaacagtcgcctcagatcgcgtgggcccgacacccactactggggttcgaaggctggcccccgaagggttcacagtcgcctcagacgccgagcgagggatgaccaggggctcgggggctgctctcgcaaacccggctccggccaaaccgttgacagcgtcaacataccagcccgagagcttgggccccgaccgtgcacccgagctacgaccagttcgcatgagggaacaaccagaccagccgaagcattacgcaagggctcggactcgggctaagacccggaagacggcgagcaccgttccgcccgacccagggcttggactcgggctaagacccggaagacggcgaaatccgctccgcccgacccagggctcggactcgggctcggccccggaagacgacgaactccgcctcgcccgaccccagggctcggactccgctctggcctctgccgaacgatctctgcctcgcccgacccaggggctcgggctcggcctcggccacggaagacagactcgacctcggcttcggaggagcccccacgtcgcccgacctagggcacaggcccgccatgtcaacggaaagcgccatcatcatcctaccccgagccgactcgggtcacagagaacaagaccggtgtcccatcaggctagctccgccagatgggcaatgatggcgccccacaagctctgtgacgacggcggctctcagctctcttacggaagcagggggacgtcagcaaggactcgaccgctccgacagctgtccctccgccaggctccgttgctcctccgacagccacgacatcacgccagcagggtgccaagatctctccggctgccacattggcattccaaccaagagtcatcggtactcgtcatatcgcgcgcgttcgacgactactatatcgaggactatgacgtcatcttggtgccgaaggtgacgcagaggtggatcgacaacagtgaccagttcgtcatcgtcgccaccgtcaggatagcttttgtgccggcctacctttaa

SEQ ID NO: 4201 - DNA, 705 bp, Zea mays
  Peptide Sequence Number=SeqID_47576
atggcgtccggggctgctgcttcctcggccctcttgctcctcgtcgcggccttggtggccaccagtgcgagggcggccacattcaccatcaccaacaactgcggctcgacggtgtggccggcggccaccccggtgggcggcggcacgcagcttgaccccgggcagacgtggaccgtggacgtgccggcggggacccagtccggcagggtgtgggggcgcacggggtgctccttcaacggcggcagcgggagctgccagacgggcgactgcggcggcgcactctcctgcacgctctcggggcagcctcccatgacgctggccgagttcaccatcggcggcggcggcagccaggacttctacgacatctcggtgatcgacggctacaacctggccatgctcttctcgtgcagcaccggcgtgaccctcaactgcggcgggcccagctgcccagacgcctacctgtttcccagcgacaacaccaagacccatgcctgcagcggcaacagcaactaccaggtgacactcgacaaagagattatcggcctacactcggcaaaggggccaccagcggggccatttgtcagtttctttgccaagtgcgctaggaggcactcggcaaagcttgcttctttgctgagtggcaaggtcacagcactcgacaaagaggctttacaggtgcccaggtgttccttctatgccgagtga

SEQ ID NO: 4202 - DNA, 684 bp, Zea mays
  Peptide Sequence Number=SeqID_47577
atgaataaaatttattcaaaattagtaaccaaagttataaaagagttggcagaggcacctgcattcacatgcaacaggtactacaaatcacttccacctataagcaaggcatatgggacattgtgtttcttcaccactgtgctagttcggctccatatcctgaatccgctgtttctgtacttatattaccctcgggtgttcaagaagtttgaggttggggtttttgaaatttctttgcatagagcaaggtatggtgtcatgttggaaaagggagcatttgataaacggactgcagatttcttgtggatgatgatatttggtgccatctcactattggtgttgtctgttattccccaattgaatacttatgtcttgggattacctatggtcagcatgcttgtttatgtctggagccgagagaatccaaatgcccagataaatatatacggcatcctccaattgaaggcgttttatcttccatgggttatgctcttattagatgtgatatttggatcaccattaatgccaggccttctgggtatcatggttggacatctatactactactttgcagtgttgcaccctctcgccaccggaaagaactacctcaagactccgaaatgggtgtatccttttacatggtcatggccaaagcattatctctcagtttgcatatacaactga

SEQ ID NO: 4203 - DNA, 99 bp, Zea mays
  Peptide Sequence Number=SeqID_47578
atggacatggtgtcatactctaggccgatggcaccgccaccgtctactgtggtcttccacgaccaggacttcaggttcctcttcttgtttgcttcgtag

SEQ ID NO: 4204 - DNA, 300 bp, Zea mays
  Peptide Sequence Number=SeqID_47579
atggcgctgccgatctcgccttcttcttgctgttgctggaggagcgcgacctcatgggggttggcgctcttccgccggtgctcagtttcaaggatgttcatcagcctcgcggtggtgggaagcgagtcgggttgcggtctcccaccaacgctcagcttgaaggatgatcatcagcctcgtggtggtgggaagcgagctgggctgcggcctcccctgtcctcagcttcaaggatgttcatcagccttgcaggggtggagagcgagctgagctgcggttctgccttccgcatgagctggtga

SEQ ID NO: 4205 - DNA, 906 bp, Zea mays
  Peptide Sequence Number=SeqID_47580
atggagcctggcggagggacagctgtcggagctgttgagtccttgctgacgttcgcttgcttccgtaagggggctgagagtcgccgtcgtcacagagtatgcggggcgccatcatcgcctatctggcggagcgagccagatgggacgccggtcttgtccccgtggcccaagtcagctcggggtagggtgatgatggtgcctcctgttgacgtggctggtctgcgccctaggttgggcgacgtggaagctcctccgaagccgaggtcgagtctgtcttccgtggccgaggtcgagtccgagcccccgggtcgggcgaggcggagaccgtcggctgagcccgagtccgagccctgggtcgggcggagcggagttcgccgtcttccggggcctagcccgagtccgagccctaggtcgggcggagcggagttcgccgtcttccggggcctagcccgagtccgagccctgggtcgggcggagcggagtttcctatggtgcctgcggccgggcctgactgcctgtcagcctcactctgtcaagtggcaccgcagtcggagcggcgcaggcggcgctgtctctcagtcgggccggtcagtggagcggcgaagtgacagcggtcacttcggctctgtcggctggggggcgcgcgtcaggataaaggtgtcaggccacctttgcattaaacgctcctgcgacttggtcggtcggtgcggcgatttggtcagggttgcttcttggcgaagacagggcctcgggcgagccgggaacacgttcgccgctggaggggggcctcggccgagacggagatcctccgggctttatgctgatgggggttaccagctgagaattaggagccttgagggtacccctaattatggtccccgacacctagtaattactaaagtatag

SEQ ID NO: 4206 - DNA, 597 bp, Zea mays
  Peptide Sequence Number=SeqID_47581
atggttcttggtttggcttttttaagagaaaccctaggtgacactggggtgtcacaggagttcctgagcacgcagccacccttgttcaccaaggcagaggattcgttggacgccgacgtatggctccgcgtcgttgagtccaagtttcccctcctcacgggagactgccctgatgaagccaaggctcgcttcgccgcgcagcagctttgcaaccctgctcggaccacttccgtgctatgctccccgctgatcgggaagtgtcttgggaggaattcaagactgctttcagagggcaccacatcccagctggcattcttgatcatatttttcacgggtacgggtttgggaaggcaaaacccagtgggtttgtaccacctatgccagtatgcaggttaccatgctgattctgatgagaagaagagagaccgctttcgcaggggtcttaacaccaagctgcgggaacgactcaacactgtctgggctgatagctttaatgagttggtcaacctggccatctcccaggaggaccgtattgtagctcaccgggcagagaagaagagaaaggcaccaatggcagcaccatccgctcaggcctag

SEQ ID NO: 4207 - DNA, 435 bp, Zea mays
  Peptide Sequence Number=SeqID_47582
atggcttcgcttggtcatcctgaccactttcagtccgaggaagcgcttaacctggaggagttcgggcttcagcttcaacacctcatgcctcactccgtcctccaggctgccatctttgtccacctctacgagatgttcttaagtgtggccccctgcacttccctcttccgctacttcttcgtgctggtcaagtccgggaagaccagggaccacatcgggttctactacttccagacgaggccagatccggtcgtagtctacatccccacctttggtggagcgaggtgggaaaactggcgtagcgactgggtgattgccagcactgaggacaacgaccgcctcatcctgccttccaatgggccagcactcgaccgcaagcaatggaggagcaagctatggcagaaccatccgaattattccagcttaagttcctaa

SEQ ID NO: 4208 - DNA, 810 bp, Zea mays
  Peptide Sequence Number=SeqID_47583
atgtgggcccaggacaaatggaaggaagcaactaatgcttgtaacgccaggcgcatgcggcagtatgggtgtattacctgcaaacggaatggacaggcacactgcctgcaagatggcctggtcgccctccatcagcgggcgcgccttatccgcaataaatgcagaggacgcgcagctcagaggccttatgtcaggctccgcccgctggctttcgtcacgggcagtgggccacgaggcagcatcgggtctccgcctcagcatggagtagaagcgtacgtggtatggtccggacacgtgtcagctccgaacccccgcctggtcttgattaaggttcgggtactctttgtcccagaatcctgggaccctgttgttagtggtctggaccccacacagaggggtccgagacccctcccaggggtccggttcgtgcccatggaggtcttggaccttacctggaggtccaatccgtatacacaggggtctggtaccctcccatgggggtccggacccactgccgatgccttggagcatatcgtcttctctagccacgtggcggccctggagccgcccgcgtggtggggtcgggcccaaacgttggaacctgcgcagcaaccgaggttcagtatcacaaaaacaaaagtttacactgaaagccctagcccctattccgccacctgcgaaggctcggccgacgccgctgggtcttcggcagctggttcgccctccacctttgaagcgtcctcacccgtcggcgtagtggccggcacggggtctttgccagttcaaggaagttatgcaacaaatgtttaa

SEQ ID NO: 4209 - DNA, 648 bp, Zea mays
  Peptide Sequence Number=SeqID_47584
atggccatgatgggttcaacatcggacaagatgtacctctgcgtggtaccaaactttgggtttttaaatgataaagctgagaccgggcggactaataccacaaaggccaacacgcaatgggagtggaaagatggtgagagtagagtgtaccctccatggcaagaggctggacggtggtgtatctatgctctcggttggcgtgaacccggtctggtcttaagaaacctggtgggttatccaagggtgtgggcacaagacagtcagcgtattgctgagttggcagctgacgtcagacgcctgcaagacgagcttgctgaacgggatttggcggtcgattgggccgtcaactcacgttcggttgcttgggaccgtgaagccaaagctcgtgctcgtgtgactgagcttagtgcggcccttgacaatctgcaagtatactgcaatactttacatgaggaagtacatgtactgtatgcacgactacacccagacgtgccttccgacgctggtttgggagccggaccaccaggaacagcaaacgaaggacttgacaaggagttggacctttttcagcctcctccttccatgaaccttgctgacgaacagtctcctacggcaggaaatgaagcagcaaagggtgatgaagtctaa

SEQ ID NO: 4210 - DNA, 165 bp, Zea mays
  Peptide Sequence Number=SeqID_47585
atggccatgatgggttcaacatcggaaaagatgtacctctgccagaataagataacacgcaatgggagtggagagatggcgagagtagcgtgtaccctctgtggcaagaggctggatggtggtgtatctgtgctctcggttggcgtgaacttgatctggtcttaa

SEQ ID NO: 4211 - DNA, 756 bp, Zea mays
  Peptide Sequence Number=SeqID_47586
atgttcatgggggtggcgccctgcacctccctcttccgccatttctctgcgctggtgaagtcggggaaggcgaaggaccacctcggcgcctactacttccagacaaggccggattcggctggcacctacatcccctcccttggcggcgcaaggtgggagaactggcgcggcgactgggtgatcactagcgtggaggccaacgatcgcctcgccctgccgagggacgggccaagactcgatcggaagcagtggaggaccaagccatccctggcgctagagctccagcttgtactggacaggatcaggagcttggcggaggaactagaggttctggtgaaggggattactggtgagtccttcgtccctgagtctctaatccttctcgagggcatctctgcgctctacgacgatgcagggttgaggtcggtgaatttggccatgctaccaacccttgacgagcatggcatcgcggttcgccagaccggcggccaggacccccatcgtgggatccagatctccgatgcgccgtttggaggcgcccagactgctggcgtggcccccagcatccccgccggagcttctcactcccccgccgtggccccccgccccttggccaagggcaaaggagctgcaagtagctcctccgccccaggcggcgccgggatgtcggaggtggagaggagacgtcggctgcgccgcgccgatggagcatttttttcggacccccccgttggggccgaggaggccggctcctaa

SEQ ID NO: 4212 - DNA, 339 bp, Zea mays
  Peptide Sequence Number=SeqID_47587
atggagacctgtgcactcttgttttgcttaggaaccagggagaagaccgaaagggaaaaggatttgaacatgctggatttggactgcagaagaacaccaacttgtgacggtcaccacggtcagatgcgggctcggattggaatgttcaagcacaacatggaaaagcttatcaagtctactttcatatggatccggaattatagtcatatctgttctgaggccgccgacgagtgccctagtggccagggtgtcacgctccacaagatcgtgacagccataggaggtggtgtatcggttgctaaggcgcagcgtctttggaaggctgtagtcgggccgtga

SEQ ID NO: 4213 - DNA, 447 bp, Zea mays
  Peptide Sequence Number=SeqID_47588
atggcgcgagaaggagaattaccaggtcgtgtgtacccgtcctatggtgggaccaccttgcactcggaatatttaaatcgtttctcaacaacgagctcagggaaggggaagaagagaaaagctgctgctttggcggccctagctgagtctgtgccgaaggctgcgggcaaaaagatgaaggtacttacccaccggccgtgttacattgaaccggctgtgatacctgaacttggcgaaaggacctcttcatctaccaagacaaaggaaaccgttcctcccgtgcaaaggactgaagagtcggctacaatgccgaaggtacctttggttaagctagctgaaccaaaggcagacaaagattgtagagatgccaagaatgacagaagttttaagtccttcaacagaggcaacagtgccgaagatacaaaaaggctccgccgcaactcctaa

SEQ ID NO: 4214 - DNA, 402 bp, Zea mays
  Peptide Sequence Number=SeqID_47589
atggagaacagagctccacagatcacgctgtcagaaccactgaagatgttggccatggtagaattgggtgtcagccgcaccggagcgccgatcattgcgttctccagccagtacaggctcgtcggagacacactcgtcgctgtccaccatcgtggacttagcactacgaagaaacagaaagggggtctcgataacgaggaagaggtgactgttgaagaagaggagactactccatcaacagaaaatccacctgccgggaactgtttttattttgacatctgtggaatagagcccgattctcctacaacacaaggcaagcctcggtgcatttgccacctccttgctgttttaaatctttatcacctttatgatgcattaggtgataggagttgtgtgctataa

SEQ ID NO: 4215 - DNA, 1131 bp, Zea mays
  Peptide Sequence Number=SeqID_47590
atgtcttcgcactctcctcatgcatcgcgcccttccaccttccgagcccccggatggggagtgcccgcgttgcttttgtcttgtcgtcgttggaggaacgcaacttcgcggaagttggtacctttcagccatcgttcggcttcaaggattttcatcaggcagcccggctgcatccccttgccggtggtcacccaagacggtgaccaccagtttgatggtggggagaagcaagccgggctgcggcctctgccccaccctcagcttcaaggatcttcatcatccttgctggggcggagagcgaggcgagccggagctctacctcccgcacgggtcggcgggccacctcttcttctagcttctgggggtggaaaccatcctccagctctgcggaggaggcgccctccagccatgccggggaaggcgaactgttgctgcccagccagggtacaacattccgtcctctatcctcgttttcgtggcgaggacgggagtgaggacctgccggtgcgctttggggcggccgacgctcgccggtgtggtgttggtggacaggtggacaccgccgtcagtgctgaggtggtggcacctggagaaagcttctccactgacgagaccgtcagcgctacccgcaaaccaacctctggctctttggctttaatgtctggttttcgtcccttgagtggggacgcgaacgagagccttctagcggctgcgtccgtctcgggaccatcgctgctgctgcagaggtcgctggcgagtcgcccggagtttgtcgtcccgcaggctctccgatgtggaggttgttcatacccacgggagtggaaccagagttccgtttgtaatggcaccttgagtgccggtgtctgttcattgtggctgtcggggcctgaacatgagtccctcggctcagtcggccttgccgcccgaggcttctcttgcttagttaaaggaaccctcggccgctctgcgatgagccagagccggaggcagcggtgtcagcatggacagaggcggagttggctcgaaaagaagcttcgttggccagagcctggtcgggctgtccactggccggaccagcgccggagtcgggttaccgaggccatgagccgggctgatgtcctcgagggatag

SEQ ID NO: 4216 - DNA, 1032 bp, Zea mays
  Peptide Sequence Number=SeqID_47591
atgcaggcggcatgcaactgcaccaagggggcgcaccctttcgacttcgacgcatccagcgtggaggcccaggcccacacgtcatgcgacacctttggcaggcgaagcgggcgacgcttcacctccgccataatggccgcgtcaaaaaagggactgggaaaggggacactccgaaagggatccttctccgtgaaggaagcgggccctgagccctcctacggatcagaggttcgaaggctggcccctcggaagggttcgatagccgcctcagagcactcaggctccgcgcccactacttgtcagaggctggcccccgaagggtttgacagccgcctcagagcacgcagagcgagggatgactctgggtacgtccgatacatggctgaggctcgggctatgctcccgagggctcagtccactcaagggacacgatctcgcctcgccggagcacagcctcgggcaaaggcagccgacccaggaggattcacgtctcgcccgagggccccctcaagcaacggacgcaccttcgactcgcccgatgcccagctcgggcaggcttcacggagaagcaaccttggccagatcgccacgccaaccgatcgtatcagctcgggctcaacctcgacgccggacgacgaactccgcctcgcccgaacccagggctcggactcagcctcgacctcggaagacggactccgcctcgcccgaccccagggctcgaactcaacctcgacctcggatgatggtctccgcctcgcccgaccccagagctcgggctcaacctcgacgtcggacgacaaactccgcctcgcccgaccccagggctcggactcaacctcgacctcagacgatggtctctgcctcgcccgacccccggggctcgttctcaacctcgacctcgaacgacggtctccgcctcgcccgacccccgggcccagactcgacctcgacctcggaggagcctccgcctcgcccgacctcgggctcggatcgaccacgtcacagggggggccatcattatcctacccctag

SEQ ID NO: 4217 - DNA, 444 bp, Zea mays
  Peptide Sequence Number=SeqID_47592
atgaacggatcgcctgtaccgggagcgccggacgacacgcggccggcttatatgcaggtctccgcgcgcgaggcgtttcgtccttcggcgaaaccggccggcggtacaagtggcgagtcggcgcaagcctggggcctggggggtggaatggaaaccgtgggcgcggagccgcggacggaggcttcggccgggaagcagcgtggctctggaggctttaggccgcgcgtatggccggcatttaaaggggccccgcccagctcacagcccgcggccgaggctggtagtggccgatggctactgaccgtgggctggtcgtgctcactcgccggccaccacacggaaggaccggcgtcgccgtcctcgagcagactcaccgttgccatggacggcgatgccttcgacctcaactcgcaggcgccggacacatatcaaggttgtggttga

SEQ ID NO: 4218 - DNA, 75 bp, Zea mays
  Peptide Sequence Number=SeqID_47593
atggctcgtagaagatcccaaaagaacaagaagacaattccgaaggagaacaaggagagtgataaatgcctttag

SEQ ID NO: 4219 - DNA, 2379 bp, Zea mays
  Peptide Sequence Number=SeqID_47594
atgttcgccttttttccgccgccaaacccgctcctcccccggcatcgcagcttctctcgcctcctaggacgcatccctcgccccccatcacagccgcgggctcgcgcaagcatcgcccctcccctccacggcatcgcagtcgtgggcgtcctcccgcttctctcgcctggccctgtccccgtcgtgctggcacccgcccgaggcacccgcaggaacgccatccatctgggttcaagagggccgccgccccattatcgtcctcatcaccgacgccccgttattatcttcgccgagctggaactactgagcgatggggccaacgtgtacaagctcatcggaccggtgctggtcaagcaggacctcgctgaggccaaggccaacgtcaagaagcgcatcgagtacatctccgcagagctgaagcggatggatcaggcgctcaaagacttggaggaaaagcaaaagagcaagaaggaatcgaacattccagatgtttacccttttcagaatcatagttggcagtaccatttctgttataatatcctttgtgtggaaattaaatttgttgttaattgtttcttaacctgtagtgtggcagcagatattcagactatgctagaagaaacccagctgaaatttgaggaggaaagacagaatttgttaaaagtactgtctaacacttccaaagagcagtgtgagagttcactgaacgaagagtacaacaagtttcaggaaacatatgatacgttctgtaaagaaaaaggatgctcacatgcagactttcagagagggcagtgtagactgcctccgctccccgcctatgaatcccacccgccgctccacctcccccgccgcgaaaccagccgtcacccgcacgccctcacgctccgcgaatcccccgccacgcctcaagctccgtgtagcccacccgccgcaatcctattcgccttttttctgccgcctaacccgcccctcccccggcatcgcaacttctctcgcctcctaagacgcatccctcaccccccatcacagccgcgggctcgcgcaagcatcgcccctcccctccacggcatcgcagtcgcgggcgtcctcccgcttctctcgcctggccctgtccccgccgtgctagcacccgcccgaggcacccacaggaacgccatccatctgggttcaagagggctgccgccccgttatcgtcctcatcaccgatgcccagttattctcttcgccgaaacggatgcattgggcgctcaaagacttggaggaaaagaaaacaacaagaagcaatcgaacattccagatgtttacccttttcagaatcatagttggcagtaccatttctgttacaatatcctttgtgtggaaattaaactcctgcacatttgtaactcgcccttcgccgtcgctgaccagctcgggtacgacggcggcgccgacgcgttctacgccgacaagtacggctgctggtcccccgcgggtgccgccggcgcccaccaccggagcttctcgctcagcaaagccgaggcagccgcgtcgtggaggccctgcatgtactacgcacgtgggtactgcaaaaacggctcctcctgccgtggcttccacggtgtgcccgaggacgacgctgcggagcgggagatggccgtcatgcgtgccaaggccctggccgccgcgccgccgatgcagcagcagctcatggcgtctgcgtaccccttctcgacgtcgcccaaaggaggcgtcagcctcagcttcctgatccagcagcaccagcagcagcagagcgagacccaaagggcagcggtgggcatgctgctcggcagcgaggacatgcacatgttcccggtgtgctccccgcggatggaccgcggcgacctcatcggcagtcccgccacgcggcagatcgtgtccaactacttcagcatattcgggccagtgcaggacatgcgcatcccgtaccagcagaagcgcatgttcggcttcgtcaccttcatgtacgctgagatggtgaaggccatcctgagcaagggcaacccgcacttcgtgtgcgacgcgcgcgtgctcgtcaagccctacaaggagaagggcaaggtccccggcaggttcaggaagctgcagcacgcgcaccatggcggagccgagttcgccggttgcgcgtcgcccaccggattgctggattccagggacctctacgccctcctgcttctttcaggtgcccaggtgttcaccagtgaggtgttaaaggttgtagaggatggactgagggaagctagctttgagattggacttgatgatcgaaaggtgcacaaggagatggacaagatctataccctggcaactataatctcgagaataccatggagtcctaggtcaggtttattgagctaa

SEQ ID NO: 4220 - DNA, 276 bp, Zea mays
  Peptide Sequence Number=SeqID_47595
atggagagttctcggatggcatcggccgccctcaccactgatgacctcctcaagagggtcaagggtacggtggggaaggctgattacatcgtccccgtcttgatgtgccccgagtgggggctatgtatccctggtacatattggacatttcctctgtctttgtccttatttcttcatctcaactcgacctcccgttcatccataggggctacgggggtactgaaccgccttgcccccctcgtctcggaagaggcggctggccggctggcgtgctag

SEQ ID NO: 4221 - DNA, 1493 bp, Zea mays
  Peptide Sequence Number=SeqID_47596
atgcaggcggcatgcaaccgcgccaagtggacgcgcttctccgactcccaacgcgcccagcctggaggcccatgcccacgcgtcacgcaaccggcgcgccggatgctgcatgcaagcaactgcaccgccacttgcgccaccaccgcgcctcctggattgcagaaccaataccgcgactcgaggcgacccagcagcgccagccggacgcggcggtcaaagcggccaaaacaagagaacctcctctcacggcgtgaagacaacgcgcccgtgatccgttcctcgaacggctcgcgcacgcgcgacggccgccccgccaaccactcgccccgttgcattaactccacggtgggacaggcggcgcttctggcaggagaaggaccgggaaaggaggataccccgaaaagggcccttccctgtgaaggaaccaggctccgagcctccttattgatcagaggttcgaaggctggccccccgaagggtttcaacagccgcctcagatcgcgtgggccctacacccactactggtcagaggttcgaaggccggccccccgaagggttccacggccgcctcaggctacccgggctccgcgcccattactgatcaggggttcgaaggctggcccccgaagggttcacatccgcctcagacgccgagcgagggatgaccaggggtacgttcgatacataaccaaggctcgggctgcgctcccgagctcaccggaaacaccatgttcggcgcccatcgaggggctcgggggctgctctcgcaaacccggcttcggccgaaccgttgacagcgtcaacgtaccagcccgagaacttgggccccgaccgtacacccgggctacggccagttcgcatgagggaacaaccagaccggccgaagcgttacgcaaggcattaagacctcggaggagtgaaaccactcctctgaggcctcgggggctacacccggcgggtgcgctcgcgcgcacccaccggaacaaaatgcaaccgagaaaggctggtccccttgcaaaaaagtgcgacaaaagcctccaagcgagtgctaacactcccttcgaggctcgggggctactgtcggggaccataattaggggtaccctcaagactcctaattctcagctggtaacccccatcagcataaagctgcaaaggcctgatggggctcggactcgggctaggtcccggaagacggcgaactaccgctccgcccgacccagggctcagactcgggctcagccccagaagacgacgaactccgcattcgcccgaccccagagctcaagactccggccctatcctctgccgaacgacctccgcctcgcccgacccaggggctcgggctcggcctcggccatggaagacagactcgacctcggcttcggaggagcctccacatcgcccaacctagggcgcaggccagccacgtcaacaggaagcgccatcatcaccctaccccgagctgactcaggccgcagagaacaagatcg

SEQ ID NO: 4222 - DNA, 489 bp, Zea mays
  Peptide Sequence Number=SeqID_47597
atggctctagctttgatgttgcgtactctccagaccacccgtgtgaacaccaatcgtatccctccaccacaactggctccttcctacccagttatggaggaagacatccttgtggagtggcaccacctttccgtgaggaatggtgtgatcttggaggatagctctgaggagattttggcaacacctactccgtcatcagaacctcatgcctttgttgctggagcttcatctttagtaccaccggtgtcagtagctcaagcccctgctcctggaggtgatgaccctgatggttctggtgatgatggagatgatgatgaatataatgaagaagaaaacttcaatcatgaagatgccaacaatgaacaagaacaagaagaaaaatttgttggaatgtggcctgccgcggagcattacacctcaatgttcgagtcaggacacttcccaaacttgctgcaggatgtgctccatgtgttgggaacctatgtttga

SEQ ID NO: 4223 - DNA, 1933 bp, Zea mays
  Peptide Sequence Number=SeqID_47598
atgaaaattgtgggaaaatatgtgccgaagacggagactctaaggagttgggatattcgcggttcaaatgttaggttgaaccgtgtttttgagttaaaccacttgtcgtatggtggttacccggggaatgactatgccgacgttgcagtccgccgggggaagcaagcgatgtcaacggccaacgagggccccacgtgggacaaggctccgggcgcagccgccaagaaaaggaaattaggtacagtagcagaggggttgagggcttccaatcgttttgttgtgaatttgttggagacgtgcgtggctcccggggagacgatgtcttcgcccaagctccaggaatcttctatgcgaatgctgaaggttacctggggtcactggcctaggaatgtttcgatacctcgggcagccagcgaggacatgcttacgtctcgattagctcatgagatgaaaattttcccttacgaaaggaatgttggtgctattgtatcggcagtgatggagaagtatcgccaagatgcaccgcggaagcgtcgggcgtacgctaggttggcggacccgaggtgcgaggcgaagatgacgcggcccagcgtgaagcctgctgccccgggcgccagcatgcctccgcctgtcgcgcccatacatgagagaaggcctccctcgccaccgtgcactgctgaggtgacggtggcgggcaccgaagcctccaaggagctctccgtggacgattaccttgttggcggggtcgctatgttcgacgcccacacgagactggctcctgatgcggtgtcggtcggcctggtggccgcggctaccgtggagaagggtgacgtgggcgccccagaggacccatggtccaagttctatgtcgggggcgagattgcctcggccaccactgcgatggatgtggctgccttcaccgaacgcattgcttcgggcgtgctgacctctgagttttctgccgagaggcggcgacttgaggggaggatcgagcgccttcggatgcaacatacggggcagtccgggacaactacaccgagaaggcggaggcctccacccgcgctggggttgaacgggcgcacgcgctgttcatggatgcgtacctcgagctcggcgcgaaccgtcccttttgagaaatctggcgaagaggtgggccttcgctttcttgggtggctgcagaaggagctggagtcgctcccggctatcgcgactggcctcatgtcctatgcctcgctcgttacctgcgagggggcggtgaatgtcttgtcccatgaagggtgtaggcatttcgaagccttcgatcgggtaaccgaggacttcgactgtggaatcttccaggtcgaagtcgaggtgctaaagcggtccgctagggcgctttatgacaggatgtggggccctcacggccgtgacactgtcctggagaaggccgaccgaacattggcacagatgatgaacaatgaagaagttgaggacttaggtggccttgaaagctcgatgacccggacagagggcgtggagatgggggctgaagggcactcaacgcctcaagacagccctagcgaagactctacagtggttccgacgttcgggcctgcgcaagcaatcaccgctgatattgatactggtattttggaggccgctaatgtgataccctttaatagaaatgtgtctgagacttctgaaactgagtcgtggtcctcagacggggatgattttggtatcccgcttttgtggattgaggagtcttctgaggaagatttagactactttgttgcgttggatttggttgcatcggagtccccgccgcaatctgatgcatgcgaagagtctgctcccctggtcagggcgatagccgaagaccaccgcaggcaaaaggtggtgtcgaaacagagtgtaggtgggatgtcacgaagtgggaggcatcgccggatgg

SEQ ID NO: 4224 - DNA, 558 bp, Zea mays
  Peptide Sequence Number=SeqID_47599
atgggtgctacgcagttagaagatggaggtggatccgagaaggaggttctcaccaggatttgtagcttggagcaccatggccacgacgatgcgcgacaccgcggcggcggagaaacatcggcaacaattgggttggtgcctcttgatgtcttcgccgtgaaacaagcaatagaatcatcacggctgctgggtctatcctcggccccttcctcttgtgtcgttgccgcggccttgaggggggtattcctgacgacggttgggctctccggttgggtgttggttggctatgggattcaactttgcgctaatggagctcctcagacctggtgtacttctcaaacagttggtagagttcctagggataactcggccagtgcacttgtgtcgggtcggtatccttggaaattgagtaggaacttgtcgcgaagccctttccaggactcgattgacagtggcggcaccgaccttgaagttggcaggccagggtgttgcttggagctgcgaagccacgggacttcgctcgtcgagatagttgattccctggaaagcaacatctag

SEQ ID NO: 4225 - DNA, 513 bp, Zea mays
  Peptide Sequence Number=SeqID_47600
atgaagactcttacaactttctgtggctaccaccccctggaaatggtgatgcaccccttgggactcttccctgctgagaagaaggatgaccccatgtggtgtaaccgtgccctacagagcgacgctatggcacatcttgctaacatcactcaaaccaccaagcgcaccctcgacagccgagaacactttgtggtcgacttgtcctccgagttagtggagaaggacctacaggtggaaaggctgagccagcgcatgaccaccttggagcagcaggtggagatccgagacaacactattgatgtcttggagaaccagctatatgatgtgcagcaggaactcaaagaagctaatgaccacctggacatgcaccacttggagaaggaggccaatgaggctggaagcgagggagaagaggctcccgaagagttaggaccagcccctggtgccaacgggactacctccgtgatgcccccttcacccgcatccagtgtcgcttccaccgctcagggttga

SEQ ID NO: 4226 - DNA, 629 bp, Zea mays
  Peptide Sequence Number=SeqID_47601
agatggaaaaagagccacttgacatggttgagagctcagttcgagtcatcgagacacatgttgacatcattcgcagtctagtgactgatggggttgtggatactagtgagccggaatcagtgtacacacttaagaccactttgtttcaaattggagatgtatgcgacatgcttgagaagtgtgctctgtccatcaaaaagtatgctgactccaagagggctaaaattattcaagatgaagccctgcaatatgctgaagatgatgaagctgcagatgatttggaggaactcccaagcctagatctccttactcaagccgacatattggaaaaatattttggaattgagatgcaatacatggatgataagaagaaacaacttaagacagggtttcttgacccgttgatgatatcccaagctcgctacaaagaagttgctcggagacatggagaagaatacaaagacttggatgatgctgaatttgagaaagccatcaaaaagaatcagagaaagaaaatgaaggttcctaaatccaagatcaatgctcaatggttagaaagagatatggtttccgtcggcgtggctaaggttgcggtgcaccacaagcggttcctggaaccgcctgtgtag

SEQ ID NO: 4227 - DNA, 165 bp, Zea mays
  Peptide Sequence Number=SeqID_47602
atggccatgatgggttcaacatcagaaaggatgtacctctgcccagaaaggccaacacgcaatgggagtggagagatggcgagagtagcgtgtaccatccatggcaagaggctggacggtggtgtatctgtgctctcggttggcgtgaacccggtctggtcttga

SEQ ID NO: 4228 - DNA, 72 bp, Zea mays
  Peptide Sequence Number=SeqID_47603
atgggcaagagggggagcgagggtgatgctggagactttgatggagattttatcgacgacgatgatttctaa

SEQ ID NO: 4229 - DNA, 516 bp, Zea mays
  Peptide Sequence Number=SeqID_47604
atggatcctggcacacatatggtttgcgctcggttctaccccctggaaccgggtgtgacagtttgcctccaggcttcatatgggcagggagatgggttcaacgccatggggaggagtacgattggaggagccaaccaatcgaccctcagggcagcatatgctagcgcaggaggacaagcccatgggacgtaccagaggcaacaatctgaataccagagacaacaagccgagtatcagaagaagagggatgagtattatgcaagcctccatgcccaaaatcaagctcttctctcgcaactagcccaacaagcgggcgtcccgatgccgacatatgggatgccgcctctggactttgcactgccaatgccaatgttggcgcctccacctccgcctccgcctccgtcacaattccctatgggatttcagacaccacccgcttcagttgccgcacctggagatgggtctgttcaagacgacacaacacattcgtgggtgaacaaccttttcaacacgtag

SEQ ID NO: 4230 - DNA, 540 bp, Zea mays
  Peptide Sequence Number=SeqID_47605
atggtcacccggtcggccatcaccgagcaaaagtgggtggcggcggaaaggaccgggtgggcggtttctttttctctggctaaatctctcaggttgcgaaaacctaagaaggaggcaagaagcggagcaaagaaccgtcgccagaccctcccccgagtatataaagaccaaggcgagacccgttcaacgtttcgcccggacccgccgcgggattcaaaaactcaaagtgaaacggccgttcctcgaacggctcacgcacgcacaacgaccgcctcgcgaaccactcgccccatcgcattaactccgcggcgggacaggcggcgcctctggcaggggaagcaagcgacgcttcgccttcgccataatgaccgcgtcaaaaaaagaggctcgggggctgctctcgcaaacccggatctggccaaaccgttgacagcgtcaacataccagcccgagaacttgggacccgaccgtgcacccgggctacgaccagctcgcatgagggaacaaccagaccagccaaagcattgcgcgaggcattaa

SEQ ID NO: 4231 - DNA, 315 bp, Zea mays
  Peptide Sequence Number=SeqID_47606
atggtgacatgtttggaccttacctacactagggctgtcagtactgcactggcagtcgaagccaaaaatgcaggacatggaaaatcaaaagggtttggaggtgaaaggtcaaatcaaggaccggaaaagagaacaagttcatccactggttgcttcaattgtggaaagtccggacacttcatcaaggactgcccaaacctgaagcaaaataaaaccaatttccaacagaactctgggaactccaaccaaggaaaggggaacacggctaatacttcaacgggcaagaatttcaagaaaactggacggatttattaa

SEQ ID NO: 4232 - DNA, 393 bp, Zea mays
  Peptide Sequence Number=SeqID_47607
atgagacaacgaagatggcttgagctaattaaagattatgacttcgaaatccactatcaccctggaaaagccaaatgtggtggcagatgcattgagtcgcaaggcttcctgtcattgtcatacatatttgagaacaagtccccaacattggcgcccacctccggtgaaccctttttcgaccaccttcggcaagcaccgactttcgtcatgccaccgaagaaagcttcagcgccaggggctgccgcacttcagccactggacccaaatcaggagaccctctctcttcgagaggtcctatcggggaccataattaggggtaccctcaaggctcctaaatctcagctggtaacccccatcagcacaaagctgcaaagacctgatgggtgcgactaa

SEQ ID NO: 4233 - DNA, 333 bp, Zea mays
  Peptide Sequence Number=SeqID_47608
atggcggtgatggtcatgtgcgcttggctaagcgaatggaagtcaaatccggccgtacgcccacggatgtggaggtgtatatgcaagggcataggggttctgatcctcagaatcctgatgtgttatgcactcagacggccaccgaccgtctaccgttgcagcctctgttcgccatcgtcgaagctgcccgctgtaaaggatagccggtgtcctcgacgccgtgcccgcgtcgacttccctgctcgccgaacgccgcaagcccctctactcacctcgacgtcgctgtgccccatccgccctctgcgcaagtacagcaaggtgtataccgaataa

SEQ ID NO: 4234 - DNA, 129 bp, Zea mays
  Peptide Sequence Number=SeqID_47609
atggcgggcggaaaagagctcaccggagctaaggaggggcgtctgaccggcgaaggatttgagctagggatcaaggtgaacacgttgatctttgacccaaggtctgaaatccagaattctgaattttag

SEQ ID NO: 4235 - DNA, 147 bp, Zea mays
  Peptide Sequence Number=SeqID_47610
atggtgggtacaagtgcggtcactgcacgacgacagctgggtacgcttcagggtatggttgatggtgtgacttggcctaccaccctaccaccgggttggacggtcgagtgggatgctgctccggcaggagaggagcacgaggattag

SEQ ID NO: 4236 - DNA, 333 bp, Zea mays
  Peptide Sequence Number=SeqID_47611
atggccaactccggccaaccttcccgtgcgccatggcatggcgagaacctaaacgagtggatagggacgatgatgacgccacgaatgacgttcgacggcgagatcgacggcgatacaagatggtggcgggatcgacacccgagtgcatggcttgaggagggagatagcagaggggaggagccagagtgccagacgccatggtcaagggctagagcagagggggacttggtggggaagacgcagggcatggagcggaggtacgacaagctcgtagtagcaccaaagaaactgctggtgaggagccgagctggagcaggggcgagacggccatag

SEQ ID NO: 4237 - DNA, 492 bp, Zea mays
  Peptide Sequence Number=SeqID_47612
atgtcaaccgtctccatcaattccccgttcgcgtccaggcctcactgccttggcatacaatgctccactgaccccggctgccgccgtgcagtgacagcacttgcgggggagttcgtcggcggcgaggagtacggcctatccagggcacaattgaccaatcaaatgggtcagagagcttcaccagggatcaaggaaggcgggcggccgaagtccggtgtgggcgatcttggccttccggtgaagttctaccgggtccgagggctaggaaagcttcacaagctaatggcgaagctaaccgagcggctggtgtggtttggaagtgactggagtgggctggccacggtggccgaggctctggcggcaatggcgggcggaaaagagctcgccggagctaaggaggggcgtctggccggtgaagagatttggagccctgaaatccggtctgtctctctgctcaaacccgaggcaaatccagggttttgtcatgtctag

SEQ ID NO: 4238 - DNA, 498 bp, Zea mays
  Peptide Sequence Number=SeqID_47613
atggggaagcctggcccatcactccttatgctcctcctcggccgaggtagggtcccactcgactatccaccccggtggcaagatggacgaccaagtcacgccagcaaccatgtcctccagagaacctgtaaaaattatgccataagcaaggctgagtatactaatactcagctatacttacccgtgaccgcacttgtacccaccataatcggaatgggagaccacgtctcaggtcgcgtgaggggtaaagtctgtgggcaggttcactcagatgctccttgtgcaaaattaacaaaagcgggcgagctcgtcggcggtgagcgctctggcctgctcacggcggcatcgctcaatccaagggctcagggagcttcacggggtgttaaggatgctacccgtgcaaggaatcgaagaaagactcaccgtggagctcggtctacgcacaccggcggttgggtgaagtccggcgacgtcgatccggtgtctccggcgaggtag

SEQ ID NO: 4239 - DNA, 1041 bp, Zea mays
  Peptide Sequence Number=SeqID_47614
atggggaagaaccaggcgtacaaggcggtgcagcgggcacgactggggtcctcgtacggcacgccgggcgccgccgacgcccccgaagacagcatggtcaagtacccggagaacttctttcttctaaggggcaaccatgaatgcgcatcagtaaatcgcatctatggtttttatgatgagtgcaaacgcagattcagtgtaaagctgtggaaaacattcacagactgttttaactgcttgctagtgtcagcattgatagatgaaaagattctctgtatgcatggtggtctatctctggagttgaacaagcttgagcaaatactcaacctgaatcgccccacagacatgtctgatactggattgctctgtgatcttctttggtctcatccttccaatgaagcaacgggctgggccatcaatgatcgaggtgtttcattcacatttggtcctgataaagtttcagaatttcttgagaagcatgatttggaccttatctgccgagcacatcaggttgttgtgttcttaaagatgggaccaagttatggttatcgaggcagagtgatgcttgcttttgaagataatggatcctcaaaaattggagtccgatttgacaagcagatccctgatggctgttatatttccacagctgaatcacttcgcccagacttttctgctggtgaagaagttgagaggctagctatgaccgagctaatagaggatgaagctctacttacagattggaagcagcagttggatcgtggtgttgaaacccttaaagccaaatcaaacattggtagcattcgcacgagagaggtaggaacaacaatggtcgttgttgctgcacaaacaaaggctattgctggagtatggctcataactttatggatcaaaagttatagttcttcaaagtgggatgaaaatactaaaattcagattcaggattccggctctcatcaagtgactcctccccctcacgttgactttgcggacagatgtctcaattccagtggtggagctacgaacaacaatccgatgtcctga

SEQ ID NO: 4240 - DNA, 132 bp, Zea mays
  Peptide Sequence Number=SeqID_47615
atggcctgtacaagccgcgtctggggtgatcagcgagcgcatcgcgaaaacgaggaagaggttgagatagaagaagagaagactacaccaccaccacctgtggaacatcaggtgataggagttgattgctaa

SEQ ID NO: 4241 - DNA, 108 bp, Zea mays
  Peptide Sequence Number=SeqID_47616
atgggtaaaaccctaagtacgcaagtactcagaaagacttacccgactaaagaaaagactctcaaggattttcaagtcagtgaccaagtcttcatatccgagaagtaa

SEQ ID NO: 4242 - DNA, 81 bp, Zea mays
  Peptide Sequence Number=SeqID_47617
atgcggattcatacccttagagatgatgtggttttatactctcagaggtgcttgttgctcatcaagggaagtgggaagtag

SEQ ID NO: 4243 - DNA, 78 bp, Zea mays
  Peptide Sequence Number=SeqID_47618
ggagtacgatgggtgactattaattctgatgaggacatcctccacaattacccgttggcaaagacacaattggcctag

SEQ ID NO: 4244 - DNA, 1095 bp, Zea mays
  Peptide Sequence Number=SeqID_47619
atggggggtacccgccgcctttccgcctcctcgttggaggaacgcaactccatgggagttggtacctttcagccatcgttcggcttcaaggattttcatcacgcagcctggccgcaccccgccaccggcggtcacccaagatggccaagatggaagatgaggcgagtcggggggccgcccccgcgtgggtcggctgcctttttcttccccccgcgcctgggggagagtggcgtcctcgagtcccacggggacttcctccagccatgccgggataggcagggcgctagtggccctgggtctccgtctccctgcctgaatggctggttctcgtcctcagcgggggagagccctcctgtcgtgacacctgccccaaagctactgcctgagccgcttcgctgcctagggcgggggtggttgtcgtcgtggttagaacgggcggcagcgagccgctcatcgttcttctgttactccgcaggcctttcccctcggagtggggttgaatccctcggcccgatcggccttgttgtctggggctcctctagcttagttaaagagacccctcggccgcccttcgatgagccgaggccagggccgacgccaaagtcgatcagccgaggcctcgggtcgggttggcgcccttggaagccggttggccgaggcccccagggtaaccggccgagccgcctgctcgggccggattcccggaggagtccctggaccgcgtcgccgtccgaggctgggtcggactttgctgaagacgtcgttgatgccgagggtgctacggctcccttcagcgcgaagacccgagcctgcaggatcagatcgtcttgtagcgtgtgccttctgcggccgccgaggccagaaaaacacaccctcgccgtgcttgcgaagctgcgtcttttttcctcttgtttcgagcatctggactctgtcggtaacagggattcgctttatccgagcgcgagttacttctcgcagaaggtgatgagtgaggatccgctttctgaagtagtcaagaagcacgaaagtaatcctgctgaaaagagatcctttttcgaggaaaaattcgacgcagagggggtctcccccttttag

SEQ ID NO: 4245 - DNA, 144 bp, Zea mays
  Peptide Sequence Number=SeqID_47620
atgggggtggttgcttttggttcaacctatgctcaggtgaagaagaagaaggcgtcgaggcggatatccaggagttccaagacttcaaagagttcaaggattaggctagcgacctcgcctagtcagctacctgtggtgggttaa

SEQ ID NO: 4246 - DNA, 762 bp, Zea mays
  Peptide Sequence Number=SeqID_47621
atgtggaggggatccgggccttgctgctgcgtgcaaggtctcagctcggggagcaccgcgagtacaaggccaccgcagggtcgacgctgtcctggtgcgcggctgggaaagctgagcgccatttatggagaggagaggctccctgcagggctgctgctagcgtcttggatagggcaggggaggtctggatggggagagatgccatgggggaaggaggcatgtgcttcctgttccattcctgaatggggcgcccacatggggaaggggctgctgctccctggcataggagctcggctcctatggaaaatggcaggggcagagggaggtggccatggggaggggagcgaggagggagacgcagggagctcgggtgccatggctatccgcaagaacaatggagaggctggagaacagggaagggcgccatccatgggaggtggagctcgcgcccatggagggggcgagcagagctgctgctcggccaagggagagaggggagctcgcagggggtcgcttgcagggagatgtggcgtgcgcgaggagcaggaaggaggagggcaccgcggcatggctggccgagggaggaacggagagctgctgcgcaagggagaagaagacaggaaagtcggctggagaagagagaagtcggagaaggcgaatcgtgatattttaaaatcgctgtcgatacggggttttgagttcggtttggacacgagatatttggccgagtcagataaaattgattacaggatgacgtattga

SEQ ID NO: 4247 - DNA, 156 bp, Zea mays
  Peptide Sequence Number=SeqID_47622
atgtccttaaatccgaagcttagaagctcagaaaacttaagaaacaaagcaactgttggaaagcaagagctaagaaatcaagcaaagcaaagtaccttcggactcggatcagaaccacaatatgaagaagtacaaagaatgcgaaggttggcgtag

SEQ ID NO: 4248 - DNA, 819 bp, Zea mays
  Peptide Sequence Number=SeqID_47623
atgggcccaacagggataaaagggaaaagattatgcaaatggccaattcatgaaagggagcctttaccaaagatgaagtatattagtaaatctacaaaatgtattaagggaggcgcaagaacttggacagatgaacacagccacgtgttcgacgcgccctggcaacgccagagcacgccctcggtgctcagcccacgcgtgcagccccacgcccgcggctataaaagcgacccctgcctcgaccgtacacccccacgcgtccctgaccctgcccgagcacgagttcgctggcgtttgcctagagaacctcgtgccggcggaagcgcaagccacggccaccgtagaccagccaaactagccatcctctaccccatacgacctttggggttagcttctacggacctcagtgaagctccccgagccgaggattggacaatacctcaccggagacgctggatcgacgtcgccggacttcaaccggccgtcgtcgcatgtagaccgagttccacgccctaccaccgtgagcaggccagagcacatgccaccaatgagcccgaccgcctgcgcatgcggtcagacctattccggccatcatcgtcgacgacccgcacctcgacgtggccgctaggacctcccggacctcacccagcccttcaccggacctctctcaccgccgattgtaatcttgctgacggagagtatgtcctcattccggagcaaggagctgctcaggaggtagtccaggagccagcaccagagcctgccatcgaggatctgcctactctagctttggaaggcaagccccggtgttatgcataa

SEQ ID NO: 4249 - DNA, 309 bp, Zea mays
  Peptide Sequence Number=SeqID_47624
atggtcagaggatatgtgatgaaaagaaatgatcaacagctagagcttggttacaagtttattgaagaactaagaaaggatggttccctactggttctgcatataggaaggtacacaatatttgctaacgtcatcgactcaagccaggtgagggttcaacgtggaggtttgtcgaggtctgctgcttgtagctcccgtcgctccactcaagatccagcagaagtggagcaactgcgagaagaacttaggcaacatcaggattatttgaagcaacaagctgcgcaacatgaatattatgactatgtatga

SEQ ID NO: 4250 - DNA, 483 bp, Zea mays
  Peptide Sequence Number=SeqID_47625
atggaaattcttagcatagacaataacgagctaactactaagcttgaaaacatcggtagcaccctaggagcatctttaattgaaattcctgaaatcattaagaaagatgcttctactttttgctttgatttaattgatgattctaatccctgcaatcaagttcttgttaagaatgttgttatagaaacatgttcggatgagattgcaatggagaatgaacaattaaagcaagaggataacactactgcgggagtgaacaagcctgtggagggagaaactatgatttataggctatgccacaaggaaggccacaagtcttaccaatgtaaggcgaagaccggggataagcaaaagctcaagcaaaagccaataagaaaaatctccaacatcaatatcagcaagatggacaaaaaggtcgctacgccatatttgatcaagaagaaaaagaatggaaaggtgatagcaatcaaggctaacaagtaa

SEQ ID NO: 4251 - DNA, 558 bp, Zea mays
  Peptide Sequence Number=SeqID_47626
atgacttctcacggatcctcggatgaagggaatgcacagtcccacactacgggcttgcacgagagggtttccctcgtatcttgtgagagggctgaggacactatggaggcaattgctcttcacggactgacctccttctacggattccaccccttggagctgtccactcaccccattggtttgttccccgcggagaaggaggacgacccaatgtggaaggatcgagtggagcatgccaaggatatctgggctatctacccaagtcagactgctcacttgacggtggaacaattgtccaatgagatccaagagcttgaggagctagtgggaaccagggagaacactatcaaggttctcgaggataagcttatcaacactcagcagcaactcgtggaggctaaccagcatctggatatgcaccaccaggagatccaggatatggaggccaacgaggatgtcgacatcgagggaggagaggagcctgcctccagtttggacactgctggctcagggagaccaccttcccccgagtcgagtgttgcctcgtttgctcactag

SEQ ID NO: 4252 - DNA, 268 bp, Zea mays
  Peptide Sequence Number=SeqID_47627
atgggggagatcatggggcacgatggcaatggggtggagggcttcaagctttgtgggggcgtggggctaggagtggcagcgcttggaggcgacgctgtgtcagggaggcgcgcggggctgggcacggagccagagaggcgctggaggcgacgtccagtggcagcgaccaaggaggcggggcacgacagtggggtggaggcgcagggcagcggcggcgaggcgcgcagggtggcggcgatggggcgcgcgagctggcggctggcggcgg

SEQ ID NO: 4253 - DNA, 1002 bp, Zea mays
  Peptide Sequence Number=SeqID_47628
atgatccttggccttcccgaacttcataagcacgaaaaactagcggaagagggaggtacacggcgctacccccacgaacatctcgcacaggtgagcaaagatggccacctgaaggatggagtggggcgtgaggtgctggagctgaagaccgagctcctccagcagcaacatgaagaagggcaagatcggcaacgccaacccgcaagaaaggtaggagacgaagagcacaaactccccggcggcgagatcgccgaggggagtagcgccggctcggatcctcccggcgtgcaccggcgcactccatcccagcaggcggcacaccataccgagtgccctctcagtctggaaacgctcaggatgaaccagcgaggccatggcgactacggcggcgaaaagcagaagaatgcgaacgcaatgggacgcagagggctgagaggcgaaaggacgcagcagttggagaaaatacaaaagcgtaaccgctactctcggggcgaatcccctttcaaggaagactctcccactcgcgccccgagacgccgcggaaaatctaacccgatgctcaccaaagctgcccgagaaggcaaaccgcctcgcgaggagcgaaccaccgcctacggcaacatggtagacggcttgaccgaaggtgggttggcggcaactacgtcagcaaatgcccagaagcagcgcgccaatctcaagtcagactttggtcccacccacaggctcgtatcctcccctgaggtgggcccgggggccacagtcggtcgcccaaggcacgggcggctaatcgggacccacggcagcacccagttccgccacgtggtcggccctagggacgccacgtggccagaagaggtgatgtactccaggacatcatcagtgggtccgaacttccataggagagtgccgaacccctgtacatacaactcagaccccttggatgggatcaggattcctccgaatgaggtccgggccgctcacaacgaggccccgagattctag

SEQ ID NO: 4254 - DNA, 612 bp, Zea mays
  Peptide Sequence Number=SeqID_47629
atggatgaaggaactcccctcggtggtttcgagtctaaggacgatgccaagccgagccacgggcttcacaccattttttctagtctatggggccgaggatatcttgcccacagacttagaatacggctccccgaggacaagggcgtacgacgaccgaagcaactagaccagccgacaagactcactagactagctggaagaggctcgggacatggccttactacactcggcacggtatcagcagtctctgcgacgctaccacgcccgaggggttcggtcccgagacctccaggtgggggacctggtgcttcggctacgacaagacgcccaagggcgccacaagctcacacctccctgggaagggtcgttcatcatcgccaagattttgaagcccagaacatacaagctggccaacagtcaaggcgaggtttagacatcaatagggggagcagcagcaccctcggcgtcgactccaccttcggcggaatccggcccggcctcggacggcgacacggtcggaggatctccacctcgaaggaagatgtcagcaccatgcctgagccatcgccgccagggtctcctccaggaacccggcccgagcagacggcttga

SEQ ID NO: 4255 - DNA, 414 bp, Zea mays
  Peptide Sequence Number=SeqID_47630
atgcaggaatcccttgcaggacagccatcacagcaaaatcctcccgagggcctccccaggaatcccttgcaggaccgccatcacagcaaaatcctcccgagggccttcccaggaatcccttgtaggaccgctatcacagcaaaatcctcccgagggcctccctacactgaccactcccctactgcccttgcccctttcgggtgcggcggacatggctatgggcatcttaccgataatgatatcgtagagaagtcggcctacggcgcgagcaggttccatggcggggcagcagaagctcccgatgagttcggtgaggaaggaaaggctgacccaggtggcccacgtattttcattcctccttttacatttcaaattcaaattatatcagatgtaccaatttacatttggagataa

SEQ ID NO: 4256 - DNA, 381 bp, Zea mays
  Peptide Sequence Number=SeqID_47631
atgaccgtgagcacggctagtataccagttttacagtctgcagaggttgcgcacctttacccacaagtcgtgttacccatttgccacagagttgatcagaccccatacaccttctaccaagaaagcgaggcagggtaccactacgaggcctttacaaaagttccactagcttcagaaaacccgctacagtttataggaagctccagtgcaggaatccctcgcctgaccgccatcgcagcaaaatcaacccaaggacctccctacactgaccactcccctactgcccttgcccctttcggggtctctttagcaagaatccagagccgaaggggtactggcaagaaattggctgttggatctggttttagcgtgcaggattag

SEQ ID NO: 4257 - DNA, 345 bp, Zea mays
  Peptide Sequence Number=SeqID_47632
atgggggttggcatcctttcaccaccattcggcttcaaggatgttcatcatcctcgctgtggtggaaggcgggttgagccggggccctaccctccggcgtggttgcccatccaccgcacgggcgacagttgtgtcgtgcgcgggtttgccacatccatggcttcccctgcccgccgggcgcactgggggccatacaagacgtcgtacgccgcggcggtggcggcggcgacgttcttggatggtcttgtcctcactcctgttggtcgaaacgggagcgaggaccccttcgtgcgtgctgaggcagccgccgcccaccggtgcagaggtggtcgccgccgctggtga

SEQ ID NO: 4258 - DNA, 966 bp, Zea mays
  Peptide Sequence Number=SeqID_47633
atggagagctacggccggaagcgcgcgtggaagaagggcccgacgcgtgggaagggcggcccgcagaacgcggcgtgcgagtaccgcggcgtgcgccagcggacgtggggcaagtgggtggccgagatccgcgagcccaacaagcgcacccgcctctggctcggctccttcgccaccgccgaggaggccgcgctcgcctacgacgaggccgcgcgcaggctctacgggcccgacgccttcctcaacctgccgcacctccgcgtctccgccgccgccgcccaccagaggatcaggtggctcccggcctccgccaggggcgccgccgccgccgccgtcccggcctacggcctgctcaacctcaacgcgcagcacaacgtgcacgtcatccaccagaggctgcaggagctcaagaacaacggctcgcccgccaagccaccgccgccggcaccgcgggtttctcctgctgcccgccagcagcagctcgccccggccgatcatctcccggtggcctccacgtctccctgctccaccgtcaccacccacgcggctgcggcggctctgccgccgcccatgtcctgcttccacgccctggacctggacctggagcaggcggtggccacggccgccatgacgacggtcgacgacgccgagccgttcgagggcggcggcgccttcccgcccggcgcggacaagccccagctcgacctcagggagttcttgcagcagatcggcgtgctcaagaccgacgacgacggcacggccactgccaaaggcagccttcacggtgatgccgccgacgctggctgcttcggtggcaatggcgagttcgactgggacgcgctagcagcggatctcaacgacattgcgggagcccacggcggcgccaacggagggtttcagatggacgatctgcatgaggtcgaccagttcggaacctgcctgcccatccctgtctgggacgtctag

SEQ ID NO: 4259 - DNA, 132 bp, Zea mays
  Peptide Sequence Number=SeqID_47634
atgacgaccgacaggccacttgaactactccacatggacctattcggcccgatagcttacataagcatcggcgggaaaaaaatctcaaacccaagagactctaaagggattcttgagacgggctcaaaatga

SEQ ID NO: 4260 - DNA, 1140 bp, Zea mays
  Peptide Sequence Number=SeqID_47635
atgaggcgaaaagacggcgggttccccccatccgggggcttggaaggtggaaaggcgcggcgcataagggagcgagaagacacggtcgcctttcgaaagggaccaacgggcgaaaggggcgagcagccatgcaggcggcatgcaaccgcgccaagtggatgcgcttctccgactcccgacacgccagcatggaggcccaggcccacgcgtcgcgcaaccggcgcgccggatgctgcatgcaagcaactgcaccgcctgcgccaccaccgcgcctcctcgattgcggaaccaataccgcgactcgaggcgacccagcgcgcgacccagcagcgccagcctgacgcggcggccaacgcggccaaaagtgggccggcagtaatgacggtggcaggcgcgcgggagcagcggtcacgtcgtcagccaagctcacgtcccatccgggggcagcaaaagaaccccctctcacggcgtgaagacaacgtgcccgtggtccgttcctcgaacggctcgcgcacgcgcaacggctgccccgccaactactcgccccgtcgcattaactccgcggctggacaggcggtgcttctggcaggagcagcgggcgacgcttcgccttcgccgaaacaaccgcgccaaaaaaggctccgagcctccttactgatcaggggttcgaaggctggccccccgaagggttcaacagccgcctcagatcgcgtgggccctacacccactactggtcagaggggttcgaaggctggcccccgaagggttcacagccgcctcagacgccgagcgagggatgaccaggggtacgttcgatacataaccaaggctcgggctgcgctcccgagctcaccggagacaccatgttcggtgcccatcgagggtaacatggcgctctcccccctcctccttgcggaaaggcgacgtaggggcgtatgtaaaaaagccgagtctgtccctgatcaccctctcgccctgtgcggaggctcgggggctgctctcgcaaacccggctccggccgaaccgttgacagcgtcaacataccagcccgagaacttgggccccgaccgtgcacccgggctacggccagttcgcataagggaaccaccagaccagccgaagcattacgcaaggcattaa

SEQ ID NO: 4261 - DNA, 624 bp, Zea mays
  Peptide Sequence Number=SeqID_47636
atgggggggcctatggagcaacagaagactgacgaacggcgcgccgtcgcccgctccagcggcagcgacgacgacgacttctgctccggggggccggacagcggcagcactgacctcagggcggatgctgctgccaagaggcccccgcccatgcccaaactcgtgaggcaaggacgggcagaaggccgtagagttggaggtccttccctacggcgcgggggctgggtcccacacgtcatgcaagccgactcagggcagaagaagccaaaccgccgcgcgcggtgcatacaaccgcccagcggttacaagcgaccctccacttttgtccagaccagcgggcgaaagggtgggcggccatgcaggcggcatgcaaccgcgccaagtgggcgcgcttctccgactcccaacacgcccagcctggaggcccaggcccacgcgtcatgcaactggcgcgccgactgcttcgtgcatgcaactgcaccgccacttgcgccaccaccgcgcctcctcgactgcggaaccaataccgcgactcgaggcgacccagcgcacgactcagcagcgccagcctggcgcggcgggaccgggaaagggggataccccgaaaagggtccttccccgtga

SEQ ID NO: 4262 - DNA, 756 bp, Zea mays
  Peptide Sequence Number=SeqID_47637
agaaaggagatcggaagtcagatggaggttcgctgccaaaccagcttttgccagaatgaagatggtttccccaagttgctgagagcatgcacaattcgcctcggaatcaggagccaaccagagtatgatggtcgtgaattcgtcgagcatggcacagagaagatgcgtgcattggaagggcagcagctgcttgaggacgaccccacagtcgtgtacctcactgcatacctgctcaccctggatgcgcagtatgatttcttggctcgacaccaccgtcatatgattgcccgagcagaagatgcagagaagcgcaaccgtaagctccatgtggatctcaccacagctcaagcccgtgcaactgccttggaaagtcgtgaagtcattgctgttgaagccctgaggcaagccaaggatgagcacatccagaagttgatggaggcctacttggtcacccataaccaacatagagccctgcggatccaagagcccgctccatccaacccagttcaacccatgagagctgaagatccccagattcttgaaggtcacccggctatggataagcaagagcaccccgagtcctcccaagatcccctgccagagttgtttgagaccatcaccatgaagaagattccagcaccatcccgtgagatcaaagaagaagctgcaagcaccccaccagcaccgccgccctctgaggagctacaagagccagtcccgcttgaagaagagttcaaccctgtcctgccatcttag

SEQ ID NO: 4263 - DNA, 279 bp, Zea mays
  Peptide Sequence Number=SeqID_47638
atgaagctcttgttccagtgtccctgctgctcctgcttctgcttcatgaagacggccagcagcaagacccaacacggcggcggcagcggcaacaaggagggagcagcagcccaccaccagcgcaccggtaaactgcaaggagtagtggtaggcaaggccatggagatggacaatggaggtgacaccggcagcagcggccatgctccaccaacaccaagccaggacgcgtcaacacaacaacaacaaaggtatgtttctctattcctctcagcagaatag

SEQ ID NO: 4264 - DNA, 363 bp, Zea mays
  Peptide Sequence Number=SeqID_47639
atgtacgacaagcttcggcgcagccgccgcttgaacgcggtgcagaacggctgctccgcgctgtccatcgtcaagcagggggacctcatggtcgtcgccaacgtcggcgactctcgggttgttctgggcaccgcattcgacgacgacgggtactatcttgctgatgagcccggggagcacttcgttttacagcccagccaagagtcatcagtactcggtatgtcgcgcgcgttcgacgactactatatcgagaactgtggtgtcatcttggcgccagaggtgacgcagaggaggaccgacaacaatgaccagttcgtcatcctcgccaccgttggggtaacttttgtgccggcttgcctttaa

SEQ ID NO: 4265 - DNA, 234 bp, Zea mays
  Peptide Sequence Number=SeqID_47640
atggatgttttgatgattaggaaccttggagaggaccagcaaggacttgggaaaggcctaggtgttgaggaggaggagcagcaagggtggcacaacaggaaggagatcaagtccgactcggctgcgactccatctcgggttccaggaccagaattagccctcgtggctaggtcaattgcgcagtgcatggttgataaccagaggagaagtggtgttgcgattgcggggttctag

SEQ ID NO: 4266 - DNA, 369 bp, Zea mays
  Peptide Sequence Number=SeqID_47641
atggtgctggtaagtggtattctttccgtttggaaagggtacatcgggttaataacttgggttaatgctaaaacttggctttctactactagtccactacagccaaacaggatgcttgctgagtatgttgatgtgtactcacccttgctctacacaccaaaccccccccaggttgtcagcattgcaaccaccgctcaggcgaagatgaagctgtggaaggagacttccaggagttccaagattacgacgagttctaggagtgggttagcggcaacccccagtcggctgcctgtgaaggccgcgttatctacgtttcttttccgcactttgatttattgtaagaaccatatggacgtctcagacgtatga

SEQ ID NO: 4267 - DNA, 549 bp, Zea mays
  Peptide Sequence Number=SeqID_47642
atgtggcagatacacgcctcacacctcccacgcgccgagtggtccaccgttcagtgggtgcggcccgtaacacaaaggcggccacgcggggcccgttacaatgggccagatcacacgtgggcctcggagcaggacgaggccgagctacggggagacgtcaccgcaggccttcgtctggcgctgattgaagcgaagggtgtccctgcccgttttgtctttgtcagaccagcgactgcagagaaaggcgacgagcgaagggtggcgtctttgccttcgccccaacatttgccctccgagggaccagttcgacaaagtcacctggtgccgaagacgtcgctagatggcggagacgctgccctcgctcgaagtggttccgcgggggttttcgatgtgaccgttgatggacggcgtactgttggattgcgggtttcccgaagcgccgcgccctatcggattgcgggtttcccgaagagccgcgccctgcctataaaagggggcgggggtcggtgctttttgaactttgccttccgcgctccgcgaaaaccctag

SEQ ID NO: 4268 - DNA, 1155 bp, Zea mays
  Peptide Sequence Number=SeqID_47643
atgggaggacttggggtgtctgacagttttgctagagagttgatgaggacgtgtgcggccccgggggaaaggatgtcttcgcccgagctccgggagtcttcagctcggatgctgagggttaccgggggctgctggcctagaaatgttcctatcccctgcgcggctgaggaggactgttttacatctcgtatggttcatcggtggagagtttttccttacgggcgaaatatcggtgctgttgtgtgggcagtgatggacaaggatcgccaaggtgcggcgcaaaaacgccaggcgactgtccggctgcatgaagctaggccgaagaggcagcggggggctccgaaggctgtggcctccggcggaggcaagccgccgctggcggcgaaggcgggcgccgctgcacccagcaaggcgccggaggcaacggcgggcgctggaggctccaagtcaacgaaggtggtgccgccggccagcggagtggtggaggcctcgaaggcggcccgagcgttgccgttgtcgggcaagcgcgttgccgacttcggcaccgatattactgtagacgaatatcttggtgggtcggacaaggggcagcttgctatggttgcgcctggcgcggagaccgcgacggcggccatagtgccgaggacgaggggcgaggcccttggcgccggaggcgaggtggctgacttcgccagccgtactgcatcgggggccctcacggcagctgtgtctgccgaagtcgagagacttcggacacaacatgcagacgctgtccggtggccgccctgcagagggagaaggcccgacctccggcgccagctggcggcggagaggagggaagccaacgaggccgtcgccaaggggcaggctgcgcaggcggaggccaagctggcgcgggcggagggcaatctcgccaaggagctcgccgaacatctgcaagagcggctcaccgccctggagagccgcgcgaaggaggccgaggccgcgatgcatgcggaggccgaacggacgcgcacgcagcttatggatacatatcgtgagctgggtgcgtggaccggtgacttcgaggtgccggaccgagagcccgggcttcgctgtctgcagtgggtgcaggaggagctgctggaacttctagccgtcgcgggggggcgatga

SEQ ID NO: 4269 - DNA, 228 bp, Zea mays
  Peptide Sequence Number=SeqID_47644
atgaggatcaggcttaagacaatgaacaagaagatcaagaagatgatccacctcaagaggagggcaatgatcaagggggagataaccatgacaaagacaaggaagatgatcaagaagtacagggtcaaagaccgccacacccaagagtccaccaaggtggaagatgcattaagagattcgatgggtgttggcaatgcaagaggagctcaacaacttcacgaggaatga

SEQ ID NO: 4270 - DNA, 954 bp, Zea mays
  Peptide Sequence Number=SeqID_47645
atgacttcacccacccccaccaatagaggagacactcgtttcagttccgactaccattcccacgagggtttcccttctatcttgtgggaggtgctcagctccgccggttaccctacaccccctctatacacagtgcagttgtacgaggagcatcgggtgccccatcgccgagtttggctaactctggaggctcaccctctacaaacgagttggcgttcccttgactccaagactattggattcagggcggacgacaccatcgaggctgcagctatgaagaccctgacgactttctacggataccatcccttggagatgccttcacgccctacagagcgacgccatggcacacctcctaaccttgctcagaccactaagctcaccctcgacagcagagaggacttcgtggtcgacttgtctttagaattggtggagaaagaccaacaggaggagcttgaggaagctaatgagcacctggagatgcaccaccaggagatggaggcaaacgaggcaggaagcgagggagaggaggctccccaggaattagagccagccctaggtcccaatgcgactccctccgggatgccccttcacctgcatcaagtgttgcctctaccactcagggttgatgggaagactataatgaagctcaccggtcagagaagaagcaaaaaagcaccaatgttaggaccctcagctccaacccagagatttcggattgtttccaacagtcagagcagaggatttcagcagacaagaagatgggttatcaggccgcctcagcaaccacaagcgcccaaccgttttccagctcccgccccaaggaacaatcaacctcagcagcagcagcaacgagaatggaaacaaatgcttcacatgtggcaatgtgggccattatgccaagaattgcccaaggaatcagctgaggcaactgccagcaccaaatcaagatag

SEQ ID NO: 4271 - DNA, 486 bp, Zea mays
  Peptide Sequence Number=SeqID_47646
atgtctgcaatccataatgtgttccatgtatcccaattgaagaactgtgtccatttgccaaccaaggtcatagcagaaccagaagtggagatagagctagatctatcatatcaagattacccttccaaggaagaatcaaagagccatgtgctcgacgccgtgtcaggccagccgagtgcggactggccgcggcagcacgtgcccccgcgcgtggttgcccctccccacgcgcttcagagcctcaccggaggacctgaatcaccttgccagacttcttccgctcaccggcaaacgtggaccgagccagaatactcaccaccgacgaactcccccgcctgcgcacgtggactagccgactccaaccaccttcaacgccgacccatacctcgacgtgaccgccgtaacctccccgacctccctgtacacctcatcggagctgtctcgccgccgggggttttctacgctgtcagagactcagttcaatag

SEQ ID NO: 4272 - DNA, 1107 bp, Zea mays
  Peptide Sequence Number=SeqID_47647
atggagtccccaaagaaagacaataagcttccaatgcaaatatacaaagtggggcgagagtcttgtgagactgtgacaaccgagtttgtgtcacgtccgccaccgtgtaccagaaggaatgaggcccgcaacgtttctgttggaagctcgatagtggagatagcggggagcgtccgagaggagccagaagcggagcaccacttgaaggtgctagagactgcaatgtgtgagttgttcgctgagtgccttatctcggtaggcttcacccacaacatgctagtaaatgcccgggttgtattcaatgacttcagtctgacggagaccacatggctgcccgacgtgattcaagggttgatgaccttttctgtcctcgtgacctaccagagtggatttgagtcattggttcacgaagggtgcgaccacgtggcccgtttgaccttatccgacttggtgacactgaacctttacaccgaggttggcgaggttgctggcatgaatgtggacaaaatgttggatcacatgtggagccccttcgccgctgaagttgcccgcaagtgctcagtggcggagctggagcggatgggtcggcgcgagacggaacacaaaggggggaaaaacagcaaaggggaacccgcggccttcgtgttgtccgagcccgaggtcgggcgaggcgaaggctccttcgaggtcgaggctgagtccgggcccgggggtcgggcgaggcggagaccgtcgtccggggtcgaggttgagtccgagcacaggggtcgggcgaggcggagacggccttccggagtcgaggttgagtccgagccctggggtcgggcgaggcggagaccgtcttccgaggtcgaggttgagttcgagccctggggtcgggcgaggcggagtccgtcttccgaggtcgaggctgagtccgagccctggggtcgggcgaggcggagtccgttgttcggcatcgaggttgagcccgagctctggggtcgggcgaggaggagcttcctatggcgcccgagtctggacttagctgctgtcagcctcactctgtcgagtggcacacaagtcagagcagggcaggcgacgctgttttcctgtaaggtcggttag

SEQ ID NO: 4273 - DNA, 855 bp, Zea mays
  Peptide Sequence Number=SeqID_47648
atgaagtctaaccatcaaggaagggtcagccttgcctcggcaaagcctgaccctccctcgggggctagaaggggggcacctcctctgcgtcaaaattttcctcggaaaaagtctttctgccagaacatctttcgtgcttttcgactacttcgaaagtcggatcctgaaaacgatggagtacacgaacccggcccgagcagacggctcgactggccgctccgaagcctcagccagctgtcctccgaggacatcagcccggctcatggcctcggcaacccgactccggcgctggtccggccagtggacagcccggccaggctccagccgacgaagcttcttttcgagccaactctgcctctatccatgctgacaccgctgcctccggctccggctcatcgcgaagcggccgaggacggaacttcggttccacccccgctggtacgaacaaccccccacattggagggcctgcggggcgacagaaccccaggtggttcgccgacacccgctccggcagcagcgacaacgacctccgctccgggtggccaaatagcagcagcgatgacctcagggaggacgctgctgcgacgagcccctcgcccacgtccccactcgaggggcaaggacaagctatcaaagccaaagagacggaggtccggagcgcggatggtggcggtgatcccgtcggtgacgaggacttcttcagccgccaccacctcagcaccgacgacggtagccgtctgcccaccggtagatccccactcaagtcctcccggacgggcgaacaccgaccttcgcgcaggggcgtcgtaccggagcaaaggcaggacagcccaagaacacgaacgccaccctag

SEQ ID NO: 4274 - DNA, 852 bp, Zea mays
  Peptide Sequence Number=SeqID_47649
atgcatcgcgcccttccatcttccgagcccccggatggggagcgcccgcgtcgctttcgtattgtcgtcgttggaggaacgcaacttcgcggaagttggtacctttcagccatcgctcggcttcaaggattttcatcaggcagcccgactgcatcccctcgccagtggtcacccaagacggtgaccaccagttcgatggtggggagaagcgagccgggctgcggcctctgccccgccctcagcttcaaggatcttcatcatcttggctggggcggaggccgggctgagccggagctctacctcccgcacgggttcgtgggtcaccctctccttaagcattcaggggtgagggcgctcaccggcctagcggaaggggcggacttcgacaacgcgggctggtcggtgttcgcccgtccgggaggacttgagtggggatctaccggtgggcagacggctaccgtcgtcggtgctgaggtggtggcggctgaagaagtcctcgtcaccgacgggatcaccgccaccatccgcgctccggacctccgtctctttggctttgatagcttgtccttgcccctcgagtggggacgtgggcgaggggctcgtcgcagcagcgtcctccctgaggtcatcgctgctgctatttggccacccggagcggaggtcgttgtcgctgctgccggagcgggtgtcggcgaaccacctggggttctgtcgccccgcaggccctccaatgtggggggttgttcgtaccagcgggggtggaaccgaagttccgtctgtaatggcaccttgagtgccggtgtctgttcattgtggctgtcggggcctgaacatttatgtattttggcgtga

SEQ ID NO: 4275 - DNA, 683 bp, Zea mays
  Peptide Sequence Number=SeqID_47650
atggccgcgcccacgtccacacaaatcccagccactacccacgtgtccgacccctactcaaacccccctctcgtctgctctgccatttcaaccactcgcagacacctcccaacccaccttcgctcgtgcactacctcttccctgagctcagaagaccgttgccgttcatcgcgccacacgtccgttctatcgccgccgttgaggtcccactatgccttttgcctcggtgagttccgcctcgtcggagcaccaccaccgtcgacccaggccctcgtcgtgtccctgtcgccgttcaagggtcccgaagtctccactcgagacgacgagcagcacttggttcctgaatgtgttgccaaagatcttcctaagcaacaacctggtgaaggcaaagccattcccaaccccgtccagccctcggagaagactgtgcacacctccgtgaagctccccgagcaaggaatcggagtttgcttcgccggagaggccagtccacgctcgccggagctcttaaccccgccggattcgccgtggtttggccggtacactcgccgccgacaaggacacccgcctgcgcgcgtggaccgggcgattccggccatcctcgacgtcaagccgtacctcgacgtgaccgccagagtctccccgagccaaccccacccttcaccggacctccctagccgccg

SEQ ID NO: 4276 - DNA, 1359 bp, Zea mays
  Peptide Sequence Number=SeqID_47651
atgaatgtatgtgagctcacccttgctgtctcaccccccacaggtcaagaacagggaaagcttcttgtagaagggataacacagtgcgctgcttggcacgggcgccctgttcgccagcagatccagcaggcgcgccgcctgctggatgaccttgacgctgcctgccagcggatgggacgggacacattaaatgctgagagggcacgtcgcctgtcagcgcagtggcaggcggcacatcctctcctcaataaatgcaggggctacacggctttacgtcaggctcggcccgatggcttatgtcatgggccacaagcaacgggccttcgcctgcgcggggagcggagaataaggcctccacatgtgtctgcaccggacccctgcataccccaaggtccttctcgttccgaaaccctgccggggttcggacctcccccggggctccggccctgcctccagatggggtgcaccggtgttctccggaggggtccgcgtcaaggtcgtctcttccggcgactttaccgtcggagagcgggcgcccgtggtggtgccgccaatctagtcttcttcctgccgccattggaggagtgcaaccccatgggggttagaatcctttcaccgcccttcggcttcaaggattttcatcatgcagcccagctgcagccccccgccggtgcttcaaggatgttcatcatcctcgctagggcgaaaggcgcgtcgagccagggttctgcctcccacgtgggccagcggcccgcttcttcctccagcattcgggggatgagaggggttcaccagccccgtgaaggaggcgaacttcggctacgcggggccggccaggtgcaggcgctgacagctaccgcgtgcctggctcttggcctgggtggccctaccggctaccgccgcctctgtcgctgcctcctgctgtttggtcggggcgtggctatccgtccaccacaagggcgacggtcgcgccgtgtgcgggtctgccacatccacggcttctcccgcgccgtcggccatacggggggaccgtccaagacgccgtacgctgcgggagtggcggcggctttcttggatggttttgtcctcactccgtgggaggacgggagcgagggcctcttcagcgcttgccctgaggcgatcgctgctgctgtctgggcgcccggggcagaggtcgttgtcactgctggtgcagaggtggttgccgccgctggctcacggcacgggaccaggctgagcggctacatggcttccggatccccccaggagacaagtgcatgttcttcaaaaccggacctccagctcgatgtgtcgaggctggacaccagctcgtataaaagagttgtcaacggcctttag

SEQ ID NO: 4277 - DNA, 2256 bp, Zea mays
  Peptide Sequence Number=SeqID_47652
atgcagatgctttatgtcgacatcctgcaacatggattagacacaagtcctttttcaatccctcgatgtgctttcttggactccaagatgattgatgctatagcaagtaaggatctcaggggagatgttcctcctgggaccactgagtttggacacctcaggcaatattacatgcttccagtaccagcacctgccccagtagcaatccttaatccaacagcagcacctaacccagtagcagcagcatctgtcccagtagtaacagcagcacctagtgggacatacgctgatgtgcttggcacatcccatgatcccgcctgtcattcttccttcaatatccaacccccagtcttttaccagtaccctagctttagatcttcttttggtcagagaattactaatttagttggaaggagtaggaagtcagatgcgctgaacatcttgaaggcgtttgatgaaagcactagtgaagcccagtcgtacgcacagaaggctacgaagtattcaacaatatcccgcaaccttatggcaaaagctcaccacgagtgctacactggcattcagaagcttatcgctgacgctatcgttgagaagcgagctgccaaagagcgcaggaggaaggagcaggaactagttcaattgcaccggaggaccaatctagaggaggtgatggtgaagaaattatacggagtcccgttgcaattgacactagagcatgagcaggatcaggaactacttcaaatgtaccggaagaccaatctggaggagcactttgcaagcattgatggcgagggagcacctgagacagaagaggagcctctgagcagggacactgggatgcagcatcctactgcccaggatcatataacttactcaaggaggagcgataggtccattcaagttgccaacacacagaaggcagaggctgagaagaagaaggctgagattgagatgaagaatgctgaagctgaggaggctgagaagagaaaggctgaagccgaacaagctgataagaagaaggcagaagaagctgagaataagagaaaggctgaggccgaagtagctgagatcaagagaaaggctgcagctgaagaagctgagaagaagaaggaagaagaagctgaggataagagaaaggctgaggccgaagaagctgagattaagagaaagtctgaggccgaagaagctgagattaagagaaaggctgtagctgaagaagttatgaagaagaaggctgatgccgagaagaaggttgaagcggaggagaaaaggatacaagttgcaatccagaaaacagctgaaggacaacatcaaagctttgaaaaagccggtgcccgctaccaagttaaagaagatgttccagttacaaatgtcaaaaagaatatgttgagtagcgccaacaacgaagtctcagtaggccaggctgatttcagtgagtttcaaaggatgatattcaagcgcctaggtgatagagtgctgaagaagcctagggagtacatatccccgttcaagatccctcgtaatcgacctgagatacccctggccaaggctgttgcacttaggcggaagatcgcatctgatcctgagctaaaaaggagaattttgttggagtttggccttcttgttggactcactggcgaggaaattttaacatttttttctaatgacacccttggtgagtcaggaatcatagactttttcgtgcactgcatgcgacatgatgatattgtgcacaaggttgattcttgtggatacagagtgtttctgaccactggtttttatgtttttgtccctatcaaagatggtactcactattttgtatattgcttcaattttatccataagcgtattgatgtgctggactcgaacgattacttcctaaattgttctaatcaggaagaacggcacaaggctgtctttgccaaaatcccaatcattgatgcagccttccagaaagtttccaacctcaagttacccagagttagcaagtggaggcggccttttattgatgtgccaaagcaagcaggtcaaagcgattgtcttttttttgtatggaagtacatggaatattatgatggggacaaaatgaccaaggaaatcaatccgttcaagggcccgatatacagatgtgagctgttgcattacgagatcttccaccctttgaaccaagctgaaattcctggatcgcttgataagtttagaattggtggtcgtccgttgccaattgaatgggatagtagtcagtcgaacaattag

SEQ ID NO: 4278 - DNA, 354 bp, Zea mays
  Peptide Sequence Number=SeqID_47653
atggcccacgcccgcgcctataaaaccctcccaggcttcgactgcactcttccgcgcaccctcaaacctcgccggagtctaactcgccgtcgtttgcccgtgcgaagcgtgtccgcggccgcccaatccctctgccaccgtagaccggccagtagagccattcccaaccccgtccagccctcggagaagactgtgcacacctccgtgaagctccccgagcaaggaatcggagtttgcttcgccggagaggccagtccacgctcgtcggagctcttaacccccgtcgcagtttgtggaccggccaaaagctcaataatagaaagaaaaatagttgtgctatttgactggggttag

SEQ ID NO: 4279 - DNA, 165 bp, Zea mays
  Peptide Sequence Number=SeqID_47654
atggaggtagccccggattcagccgccgagcttgcatctgaggacttgctagtcgcaggttctttggaggaaatggttgctggagtgacttggccgtccatcttgccaccgggttggactgtcgagtgggaccctgcctcggctgaggaggagcatgaggagtga

SEQ ID NO: 4280 - DNA, 159 bp, Zea mays
  Peptide Sequence Number=SeqID_47655
atggctagagcacaccttggcactaaagactatgatcacatgtggaagaacttaaggagcaaagactataaccttgctaacggagagtacgtcctcgtgccggagcaaggagctgctcaggaggtagccccagatccagcaccagagcctgcatcatag

SEQ ID NO: 4281 - DNA, 237 bp, Zea mays
  Peptide Sequence Number=SeqID_47656
atggctagagcacaccttggcactaaagactatgatcacatgtggaagaacttaaggagcaaagactgtaaccttgctgacggagagtacgtcctcgtgccggagcaaggagctgctcaggaggtagccccagatctagcaccagagcctgcatcagaggacctgcctgccactgctttggaagccaagccccggtttatgcataacctgttatttatgctatcttacttcacttga

SEQ ID NO: 4282 - DNA, 672 bp, Zea mays
  Peptide Sequence Number=SeqID_47657
atggcgcctcctgttgacgtggtcggtccgtgccctaggttgggcgatgtggaggctcctccgaggtcgaggtcgagtctgtcttctaaggccgaggtcgagtccaagcccctgggttgggcgaggcggagaccgtcggctgaggccagggctgagtccgagccctggggtcaggcgaagcggagttcgtcgtcttccggggctgaacccgagtccgagccctggggtcgggcggagcggagttcgtcgccttcaggggctgagcccgagtctgagcctagggtcggcctcactctgttgagtggcacagcagtcggagcggcgcaggcggcgctgtcctcttgccagaccggtaagaaggtgaatcgtcaggatttttacaccaggcagacaattgctcgcacccgctgcacggtgggccgcaaaaaccaaaatagtgaacctgcatggtgggaccgctacacgctcgaaaactgtatcgtttctcaacaacaagctcagggaaggtgttttcggaccttcggcttcctgaagcctaagagacttttttcacggatcaagctcgttacgaaaaacgatctagcaccgcgaaggggctactgttgggaccatgcttcgtcgccgaaggtcctgcagaaagcgacagcttcggctgaagctgctcgtacgtga

SEQ ID NO: 4283 - DNA, 327 bp, Zea mays
  Peptide Sequence Number=SeqID_47658
atgagggctccctcgtcaaacgcagatgggaacccagggtcgggacctagtcctacggcaagaaccaaaccaagaagggctccgcaactctcccccagctgggaaggacccttcaaggaccactctgcgaaagcaggagggctcgacagcctgggagccgactctagagaacgggaccccattccatggggtggtccggagcctgtgtggccgcttagcctggttccgtacccgaaagcctacacactccaccactccgtgacggggaccggtccattcgacggactcgatcacgcctcgcccgagcccagcctcgggcaagggtag

SEQ ID NO: 4284 - DNA, 429 bp, Zea mays
  Peptide Sequence Number=SeqID_47659
atggagctagggctccgcttgaaagcgaatgtaatacttctgctttttgtaaggctcgatttgtcgaggctgcagaccagcatacctaagaaagagtttggcggtgacccccaggaggttgggcgatgtggaggctcctccgaggtcgaggtcgagtccgagcccctgggtcgggcgaggcggagaccgtcggctggggccagggctgagtccgagccctggggtcgggcgaagcggagtttgtcgtcttcaggggctgagcccgagtccgagccctgggtcgggcggagcggagttcgccgtcttcaggggctgagcccgagtccgagccctgggtcgagcggagcggagttcgccgtcttccggggcttagcccgagtccgagccctgggtcgggcggagcggagtttgccgtcttccggggcttag

SEQ ID NO: 4285 - DNA, 546 bp, Zea mays
  Peptide Sequence Number=SeqID_47660
atggctcgcttcccaccccaagatactgggggcgcgtgggatggagccatggctcagcccgctgcccacctccacgaggctgctggcccgaagcgcgaagaaggtgaatcgacgcacaaggagcgtgcaaccgccttgtggttatacgcccttccatctttgccgcaaccagcggtcaagaaggtgaaccgccgcacaaggagcgtgcaaccgccctgcggttatatgcccttccatcttcgccgcaaccagcggtcaaggaggcaatccgtcgcacaaggagcgtgcaaccgccccgcggttgtgcgccccctcggcttcgaccggtggtccaacctctggcatgggggcccaggcccacatgtcatgcacccggcgcgtcggtttctgggtgcagaaaagtcgcaccgccgctcgcgccaataccgcgcctcctcgaggccgtcgcagaaggctgagaagataaattttcaaaatcaatgcagcaactcgaggcaccccacgcatggcccaacaaagacattaagtgcagaggtcatgggctag

SEQ ID NO: 4286 - DNA, 216 bp, Zea mays
  Peptide Sequence Number=SeqID_47661
atggcaaggaaagacaacacatcccagtcagtctggtcccccacagaaggacaccggacccctatacatataagtccggagcctccgggcggtgtcaaggtcatccagcaggcggcgcgcctgctgggtctgctggcaaatagtgcacccgcaccaggcagtgcactatgttattccttctacaagaagcttccccagcacaccgaagatacatag

SEQ ID NO: 4287 - DNA, 996 bp, Zea mays
  Peptide Sequence Number=SeqID_47662
atggcgggaggcagcgttggaggcggcgccaaagccatccaagccaaggagctagacacgcggcagctgacggcacctgcagccggcgggccccgcgtaaccgaagtttgcctcttccgcaaggctggaggaagaagcaggtcaccagcccttctcctccaaatgctagaggaagaagcgggtcaccagcccatgcggaaggcaggactccaactcggctcgccttccaccccaatgaccactggtgggagactgcaaccaggctacatgatgaaattccttgaagctgagcgatggcagaagagcgccaacccccatgaggtcgcgctactccaacaacagcaagaagaagacaagatcggcagcaccaccacgcaggaaacgaagagcgcgagctacaaggcggtgagatcgctagggagggtggccctaagacggatccccccagcgaacgccggcgcgcctcatacagaggcccggaaggcgattaccccgctcatgcctcaaagcgtcacgggcaaggtctcccccgatgcgcaccaaggctcacatgtcatacacccggcgcgccggttcctaggtgcaggaaagatgcaccgccgctcgcaccaatgccgcgcctcctcgaggccgtcgcagaagactaagaagataaattttcaaaaccgatgcagcgacttgaggcaccccgcacatggaccaacaaagacattaagtatggaggtcacgggccagttagccgcaggggcaggcgcggcagtcggcgtgaccataagcgggacggcagtaactgcatcaatgggtgcgcaggggcagcgagccaatcaccagtcaaactctggccccacctgcaggatcgcatcctcccctgaggcgggcccgggggccactgtcggtggcattctcggagacaacgccgtcggacccagaaggcacgagacccctatacgcacaacccggacccccgaagtaaagcagctcggagccattggatag

SEQ ID NO: 4288 - DNA, 468 bp, Zea mays
  Peptide Sequence Number=SeqID_47663
atgacgacggtggttctcagtcccctacggaagcaaggagacgtcagcaggatcccagcagcactgccagctgtgcttctaaagggctcaggcacttctccgacggccaccgacaaatttactggttggcttacggacccccgggtccgaaacgccgacagttgcgctggtagccgttgctccgctggtgtactggacagttcggtgacacaccggacagtccgtgagtcagtgctcaccatcctcggcgccgcggcccagcaacctgcctgcaccctgctcggtggcccaacaacctgcagcgagcatcggcaaggcagcaacatgagttcatcatccgacgagtggggttggcgccgtgaacgtgcaacagctgttgaggtgatcatgggagactcatacattagagaagagagcactggtggtggtgatgcgactgctgaaagtcgcctagaggggggtgaatag

SEQ ID NO: 4289 - DNA, 537 bp, Zea mays
  Peptide Sequence Number=SeqID_47664
atggtggttttggagaaaatacaacaagtgattatgtctgtgtttgagtctagcactacaaaggtcacaagtttccctggcaatgtacctctaaatctaaatagttttggaactgtgatccagggaggacgtccttctcccacgccccagacggccagccgtcacggtctcacggaccgcgccccagccgccctgcgttgctccctgggcttcgtcgccaccgatgactctcttctcacatgggagcatgttgatcatgccaccggtgcatctacacaccttcaaggccgctactttcctatgagagcccatggtattcaagtgtcaacagttgaggacaatgaagattggcttgatgtgggtgaagagaatgaagatgatgaaaattttgtgcttgtgtgctatgtttgtgcctttgtggttgtggacattgcattccactttagttgctttagtgctatgtttgtgattgtggactactgcacatttcattccactttgtttgtggttgtctacttgctagttgctattagttga

SEQ ID NO: 4290 - DNA, 537 bp, Zea mays
  Peptide Sequence Number=SeqID_47665
atggatgaaccgaatttcattatggacgcttgcattgggccagctcatgtagtatgtgatcaaaccatgctttccttccaaacagggattaggttgcaccaatgttcacgtattgttagtaatgaagttgcttctcatgcagcacttcttattagcaagcagtatgtattggcaatgggttttgcaatgctggaacacctgacagaaattcttattctcccggaagtaaaggagttctggtttgtcagtaatattggccttctaatggttattatcggtgaaattatccgtaaacttgctgtagtgacagctggacgtgccttcacacacgttataagaacttattatgaagatcagcatcaattgatcacgcatggactgtataggtttatgcgccaccctgggtattctggctttcttatatgggcagtaggaacccagaacaggtatgaagaatttttcttgaagcagttctttggctctgaatacgatgaatatgcacagagagtacactctggaataccatttattaaatga

SEQ ID NO: 4291 - DNA, 222 bp, Zea mays
  Peptide Sequence Number=SeqID_47666
atggccggctcggccgccccgcccccctgcctcgcccggctcggccgccccacggccggctcggccgccccctgcgccgccccctgccccgccggtggcaatgagattgatggttctggttatgattatggtgctggttgtcagcattgcaaccactgctcaggcgaagatgaagctgtggaaggagacttccaggagttccaagactacgacgagttctag

SEQ ID NO: 4292 - DNA, 594 bp, Zea mays
  Peptide Sequence Number=SeqID_47667
atgtccggtgcaccaccggacatgtccggtgcaccagaggactccaacgctaactcgccaccttcgggaatttccagaggcgactccgctataattcaccggactgtccggtgtacaccggacagtgtacggtgcgccaaggaagagcggcctcaggaactcgccggcttcgggaatctccaacggctagtccgctataattcaccggacatgtccggtgtgcaccggactgtccggtgcaactccggagcaacggctattcggcgccaacggctacctgcgacgcaattaatgcgcgcgcagaagtcaggcgcgcccatactggcgcaccggacaaggtacaatgcatgtccggtgtgcaccggacatccaggcgggcccacaagtcagaagctccaacggtcagaatccaacgacagtgatgacgtggcgggggcaccggacatgtccggtgtgcaccggactgtccggtgcgccatcgacagacagcctccaccaacggtcaagtttggtggttggggctataaataccccaaccaccccaccattcattgcatccaagttttccacttctcaaccacttacaagagctag

SEQ ID NO: 4293 - DNA, 291 bp, Zea mays
  Peptide Sequence Number=SeqID_47668
atgtcgtgcgcgttcgacgactactatatcaaggactatggcatcatcttggcaccagaggtgacgcagaggaggaccgacaacaatgaccacttgccatcgtcggcaagcgtgtatggtggtgcgtatctgatgactgataatgtacgagggaacttctaccggcagagcgtgcgcggcggtggacccccatccggtggcggctccccgatccagagggcgagcgatagcagggcccttgtgcgggcaagcggcggcgtccccgaggccccgaggaggcggcacttctaa

SEQ ID NO: 4294 - DNA, 138 bp, Zea mays
  Peptide Sequence Number=SeqID_47669
atgaagcgccgaggtcattctatcaacaactttcgacaatatccagatgtctacttgactgtagaccagtacatggaggtaactcttccatggatggaacaccggccgcaggcttacaaggcttttgagagcacctag

SEQ ID NO: 4295 - DNA, 258 bp, Zea mays
  Peptide Sequence Number=SeqID_47670
atggcggacctagaggtgggcttaatttggtcagaggaggtcgggagggggctgcccgcggggaggtggcggagcttcgcggcggggttgccgccggtgagctctgggcgagccgccgaggtgggggaggggtgtattgtgttcgcggcaaggcatttgcggagctgggacacgtggaacacattgtggatgtcggacatggattctggtagttccaggcggtatgccataggtcctattcgggaaatgacagggtaa

SEQ ID NO: 4296 - DNA, 681 bp, Zea mays
  Peptide Sequence Number=SeqID_47671
atggggaagcctgtcccatcactcctcatgctcctcctcagccgagtgactgcacttgtacccaccataaccggaatgggagaccacgtctcaggtcgcgtgaggggcaaagtctgctgccaggttcaatcagctggaacagtaaccggggtaaagatcacgacagcgaggcttaccggtggcagtagagctccggtggggtggtcggtgacatcggggaggtcacagcggtcacaacggtatgcgggtcggcttcagaggtggctggagctcctctggccacaagcgcaggcggcggaggtcagcggcggtacctgctctggccaaaccacggcggtagggttcaatcaaggtgcacgaggagctccattgggtgatgtagaggctatgcgcgcaaggaatcgagaaatggttcagtggattacccggtccacgtgctccggcggggtcacgaactccggcgagcgtgatctcattgttccggtggggctggtcctcggctcaagcttgggaaagcttcacggcctctcgaggaagctatccgcgggctcggatcgagcggaggtgggcgggaacggtttggccacggcgggcgccctcgggcagctctggcgggtcgcggggaggttgccggagctgcgggctggctcgggaaagctaggcgcggtgcggagtgggtaa

SEQ ID NO: 4297 - DNA, 606 bp, Zea mays
  Peptide Sequence Number=SeqID_47672
atggagaagagcacggtggtggtctgtgtccctgttgttatcatggccgagattgctgagatcgactacagctcgagcttctcggtgttcacaatggaggcttacgacctactcggtggcgacgcgtgcagcacacagatgtactcggaggccaagctcgcctcagtggcagcaacagtgagaaggagggtggagaaggaggagagggactacctatcgcatgacaagccaagaacggtgttatcgggcaaggcatgcaacgaccttgatggtgagttctgcgatgcgccataccaggttctgagagacctcggtgggaagtttgtgttcatcctttataacaccctgtcgaagtccacctttgtcactgttggtgttgactccgaaaaccatcttgtgttctctaacgatgctagaatcctcaagacaatctgtgacaacttgtacatgccatttccgaaagattgcaacctcgctgacggagagtacatcctcgtgccggagcaaggagttgctcaagaggtagcccaggatccagcaccagaaccagccattgaggatctgcctgccccagctttagaaggcaagccccggttttatgcataa

SEQ ID NO: 4298 - DNA, 693 bp, Zea mays
  Peptide Sequence Number=SeqID_47673
atggcgcaggccgagccatcagcgcccttccgcaggctaccttcgacgccgatgaagccatcctcgccgcagtccatctacgcccgcatccacacccgtccccagtccccacgtgaggcgcaggcaaagcaatcagcaatccacacacgtggctccgcctgcccccacccgcgcgtccccacctccactcgtgatgcctccgccctcgcccccatccgccaccacgcccaccatgagatctcgctccggctccttgtcggcacaaaccacgcgcgcgcccttgacccatggcatccccacatcccgcccccagttcctctcccttcccgttcacggatgacgcttccacgcgtcgacgttcgcgtccccaaatccccggttcccctcccttcccgttcgcggacggcgcttccgagccctcgacccatggcgtccccaaatcccaggttcctctcccttcccgttcgcggacagcgcttccgcgcgttgatgttcgtgtccccaattcctgccccggttcggtgtttccccacatcgaggcgccacaccatcgccatggggtaccgacaacgtcgacagcgcgtggccccatcgttcgcggaccaacctggccaagggctcaccggtcatgagcgctacacgacaaggctccctaccaatgtgagtgagatacaaccgggccatgatgtctag

SEQ ID NO: 4299 - DNA, 399 bp, Zea mays
  Peptide Sequence Number=SeqID_47674
atggccatgatgggttcaacatcgaaaaagatgtacctctgcaaggtaccaaactttgggtttttaaatgataaagctgagaccgggcgggtgacttgcacgagaagagagtctcggtgtagtgtctctgtctgcgtcgttaaggaccgtgtcgatgtaggcttgatgattgaggaccttttaactggtcacatgactcatcatgggggcagaggcaacgggaacacgtgttcgaccgtggctgacacccccggttcacgcccgttcgcgcaccgcgcctcccagtgcacgcccgcgcgcactcgccggtccacgaccgcccgtgcaccgcgccgcgcctataaagccttcccaggcgtgccccacttcaccggagcaatcccgccgccgagaacatag

SEQ ID NO: 4300 - DNA, 267 bp, Zea mays
  Peptide Sequence Number=SeqID_47675
atggctctgcgcttttcttcgtcaaatcggcgtagaggctacttcacgggtcgggctccagctcggatatccagcgggtgctcggcgacatccctcgagacaactgatcaagccaaggatggaggcaagaagagcttcgaggtaccgagtgcacgggagaaggtcaaggagaccaggaacccaaagccaggggtgaagaagaagacttgcaaagtcaaggttgatcgagttaagaagagttatggtgcatcaaggatcactacataa

SEQ ID NO: 4301 - DNA, 207 bp, Zea mays
  Peptide Sequence Number=SeqID_47676
atggcgcaccggacagtccggtgcgccaccggtgcgccaacggtgcgccaccggtgcgccaacggtcgtttccaacggctagttctgacagctagccgttggactcatggcacaccggacagtgaacagtcactgtccggtgcacaccggacagtccggtgcgatgtccggggagcttcttcctcggaccagcctggtcccacctag

SEQ ID NO: 4302 - DNA, 2223 bp, Zea mays
  Peptide Sequence Number=SeqID_47677
atggagaagtgcaaaccaatcaagacccccatgcctacaaatggacatctcgacttagatgagggagtgaccttgattgcccgtgtgtcgtctcctgtcctgcctggatcgtcacctctcgtacatcagttcaggatgtcgcgcacgaagaatgtgtcggcaccagggggaggcgatgatgaggatcctcgtcgccccttcaggcaggtcaagggcaagacagtttacttggagcagcaggaaggccgcaagaagcagcgtacggacagagcagcccgtgcagcggcagcagctgcagcagccgctgcgcaggccgagcttggagatcagccgcagactccgtcagatcagatcgcataccgtgttcgtcgtctcgcctcccggcctcgctcctccactcacacctctgcttccactccgccacccactctgcctgctcccgtcacccctgttgcgccatccaccaccacagccatacccgctacctccactacgccagcttccactgctcctcctcccgctcccgctacagctcctcctatccctccacctcatttccgggagcgcgatgagactgaggtacaaccacttgctgcggatcctagattgtttgaccttcagcgtgctacagcagcacgggtacgtaggttcagatacgtacccgtggagtcttggttaccagctaagagggaccctgtggcaggtgacctattcagcacacgtattcaggagtcgtttttcagagcccagatgtctgctcagatagctctgcgagtgcaccggctcttggaccttctagcttttctgctcaccgtcggtgctgactctgaggcgcacctcacatatctgcctggccttctgacccttttgactaccagcggcaggtatgttgaggagtgggtacgagtcttctacgcctctgtatggattgacccggatcatcactggatgaggttttgttttgagcgagaggatgtcaccattactgccagtcagatccgccagctttttggattccccgagtcgacgactcgtcttcacagcctttgctacggcacttctgaccctcctcgtcgccctcacggcggtgtggctccgggtacagctcacgtcgcggccctgttccgcccgcccttctctgatgggtcgcgacgttcaccggcagattttactacagcagccaagtatttatatgagcttatcagacggactcttctgccgaggatgggatacagggaggctaccacacatattcagctctggctccttggtgccctggtctctcactctgagtttgatgtcgtggacttccttatttgtgagatcgaggacaccgttttggataggattcgtgctcgtcgtcagttgccatatgctcactacttatgccacatctttgcgcagctgattcagcctcctcggtttcagggcacacttgaggcctcacgcctcgtttttggattctaccgtcctgcgcctgagactcctgtgccagcttctgctcctgtttttgactctcaggccgaggatgcagctcttcatcagttcgacactcaggctacagcagttgatgatgatgatgatgatgattttggggttcctcctccgcctcctatgcctccacactcacatgatcatgaggctgggagttctagtgctgcccccgctgccccttcggctatggaccctgctctggcttcgattctccagtctatcactcagcagcaggctcacctggcagtcgagcaggcccggttatccgagaggatgctctcgatgtttcagaacatgcaggacaggcaggatgcgcttcagcagcagctactccaggatcgggctgagagcagggcattcatggctcttatgctacagcagtctggtgtctcagttcctccggttcagtctcctccacctcctccgcttcacgctccagttgtgccatcgattctgtcaggaccccctgttggtccttctccgctccggccggtcactttggctttcacctctccggttctcagctctgtctgcccgcagccgccagtgccaccagcctctgctgttaccactactgttgtggcagtatctgtgacctcttctgttccggtagctcctgcagcgcgacctcagtccgagtcagtactagctctagcttctaccacagatcctggatccgagactgactctgaccctccgccggcgttcgctctgctgcctcgaccgtga

SEQ ID NO: 4303 - DNA, 150 bp, Zea mays
  Peptide Sequence Number=SeqID_47678
atgacgaccgacaggccgcttgagctactccacatggatctattcggcccgatagcttacataagcatcggcgggagaaaaatctcaaacccaagagaccttatgaagcgtcccgatcctttgggactcaaatgtgatacaaattactag

SEQ ID NO: 4304 - DNA, 561 bp, Zea mays
  Peptide Sequence Number=SeqID_47679
atgccgccgcgcacgagaaagaccgcgcgcaagtctaccgggccgattggcgtacctcgccatcaacttgctccgaggcatgaagacagtagcagtggtagtaacaatccaatcggggatctggaagcccaagttgatcaaattcgatcagaactccgtcacaggaacgttatatgggtcgcggatggtgaaagaataaatgaattgagaacagacatccgccacctgcaagaccaactagcggaacgggatctagcgctcgactgggctgtgaactctcgttcactagcttgggcaaaggaagctagagctcgatcccgggtggaagagcttagctcagccgtggataatttgcaggtttattgtaatatactacatgaagaagttcatgtattgtattcacaactacaccctaacgtccctgcggatcctgtcgggatgggagccggaccatctggagcagcagatgccgtcttagactcgcgcacaggatggggcaggaatctcccgtgggagggaggtaaccccgaatccacccccagtacctccaacattagctga

SEQ ID NO: 4305 - DNA, 816 bp, Zea mays
  Peptide Sequence Number=SeqID_47680
atgccggggaaggcgaactgttgctgcccagccagggtgcaacattccgtcctctgtcctcgctttcgtggcgaggacgggagtgaggacctgccggtgcgctttggggcggccggcgctcgctggcgcggtgtcggtggacaggtggacaccgccgttggtgctgaggtggtggcagctggagaaagcttctccgccgacgagatcgtcagcgccacctgcgggccgacctccggctctttggctttaatgtctggttctcgtcccttgagtggggacgcgaacgagagccttccagcggcagcgtccgtcctgggatcatcgctgctgctgcaaaggtcgctggagtccctcggctcggtcggccttgccgcccgaggcttctcttgcttagttaaagaaaccctcggccgctctgcgatgagccagagccggaggcagcggtgccgggttcctggaggagaccccaagcgacgatggcctaggcatggtgctgacaggttccttcgaggtggagatcctccgaccgtgtcgccgtccgaggctgggtcggactccgccgaaggtggagtcggtgccgagggtgctgctgctccccctgctgatgtccgatcctgccggaacagtttatctgtagacttgttcgtcggtaacagaattgcttacccgagaaagagttacttttcacagaaggtgatgagtgagaaggtgatgagtgaggtatccgtatcccggaggcataggagtccctcggctcggtcggccttgcctgcttacgtgtactccgtcgttttctggatcccactttcgaagtag

SEQ ID NO: 4306 - DNA, 534 bp, Zea mays
  Peptide Sequence Number=SeqID_47681
atgttcggcgccctccaagggcaacatggcgctttcccccctcctccttgcggaaaggcgacacaggggcaggacagcgccgcctgcgtcgctccgactgctgtgccgctcgacagagtgaggcggacagcagccaagtccagcctcgggcgccataggaagctccgcctcgtccgaccccagggctcggacccggtctcggccccggaagacgacgaactccgcctcgcccgaccccagggctcggacccggcctcggccccggaagacgacgaactccgcctcgcccgacccccagggctcggactcggcctcggctccggaagacgacgaaactccgcctcgcccgaccccagggctcggactcagccctggcctcagccgacagtctccgcctcgcccgacccggggctcggactcgacctcgacctcggaagacagactcgacctcgacctcggaggagcatccgcctcgcccgacccagggctcggaccgaccacgtcacaggggggccatcattaccctacccctag

SEQ ID NO: 4307 - DNA, 135 bp, Zea mays
  Peptide Sequence Number=SeqID_47682
atggcgagagtagcgtgtaccctccgtggcaagaggctggacgatggtgaatctgtgctctcggttggtgaggaaatagcagagttttgttgtttgtgttcaaaggtggtacccaaggacgagccccagcagtga

SEQ ID NO: 4308 - DNA, 1071 bp, Zea mays
  Peptide Sequence Number=SeqID_47683
atggtcgcgccccaggcgccgtcttggccccgcgcccgtgccccggtgtccccagcggcctcgcgcttcgcgaactgtggtgtagttcgcttcgccatcgtgctgttaatggggctcggtgtatgcggctcgctctgccaaggtggtgatgaggatgatgattttggttatgactatggtaacggtaagtggtattctttccgtttggaaaggacacactgcacggaagtcagtcatcctttcttgccttctcgtctcgcggagcgtttgcttcggcatctggtggctggtcagtctagccacttggagaggctgcaccaccgcctgcacgaggagcaggatcgtcgacgacaggagctggagcagcaggactcttctttctcgctccagcaggagatagagtctctgaggagctgctcccctgtgctcccgctggaggcgccccctgcaccaccactgagtgccctagccgctggagtagctgctggaggagacccagacgacggaggtggagacagcagctcgagccatagcaccgacctttcagaggagcaggagttcgaaggatgggttgctcgacccatcactcgcgacaccgctcgcgggtgtcacttctacgacgtgctcaacaccctactgcaccaggcacttgaccggcgcacttggtctatcgagtatcactgtgttgtcttccagcacagtcgcggggtttacccgaaccgttgggaggcgacctgcttggtgcgccatcctgagaacagtctccggggtgcagacgtctgcttagagcactattccatctctgagcgggactcagccgaggcagccatgcaagatgccgcatggcgtgcgctttcgcactactgctcagtgctcggcggggtagccgatggtttcaacctgaagtattacccccgccgtccatctggcagcacaggaggcgtgattgtctcaactgttggtgaggacaatcctaggttgagcagcacagtcaacctagccatcgtgctaaacacggagctggaccatgccttaaacgagctgagtagggctcgtgctgagatcgcctag

SEQ ID NO: 4309 - DNA, 132 bp, Zea mays
  Peptide Sequence Number=SeqID_47684
atggccggttcggccgcctccctgcccgccgggctcggccgccccccgcgccgccccctgccccgccgggttcggccgccccacggccgggctcggccgccccctgcaccgccccctgccccgcccggttaa

SEQ ID NO: 4310 - DNA, 267 bp, Zea mays
  Peptide Sequence Number=SeqID_47685
atggcggcggtggggatggtcgggacggtggtgatttggtctcggttcccgcgcaaggagggatgggtgagggaaggagggagaaggggagtgctcctacttatcctctgtggactcggcacgggctggaaaggatgtcgcgcaacaattctgagatccccgacgcttgctccgccatggacggattccgttgaaggggagtctgacaaccccggcccacaccacggtgagacgtcgcggttccgagcgcggacggtgaacgactga

SEQ ID NO: 4311 - DNA, 279 bp, Zea mays
  Peptide Sequence Number=SeqID_47686
atggcgagagtagcgtgtacccgtagcaagaggctggacggtggtgtatttgtgctctcggtttggcgtgaacccggtctggtcttaagaaacccggtgggcgagttgacatatgcaagggttaagtgctacatatgtcatgtgattggagatccccaactggggttgtctaaggtccgttggacaaggacaactgtaggtgggcctaataacttgggaggttccgtcacaatagaagtagctgagcaggagctcattgaaggcaagttgtgcccttga

SEQ ID NO: 4312 - DNA, 357 bp, Zea mays
  Peptide Sequence Number=SeqID_47687
atgacgcagcctctgagaaattacattcatgtcctttacaaagccagtcttccgaaggtgtttcttcttatgggaccttcggcgacgaagcaggcccccaacaacgacaatcctaggttgagcagcatggtcaaccttgtcgccgtgctcaacaccgagttgtaccacacccttgacgagttgggcaaggttcgtgcggagatcgtggagctatgtgctgagcgcgtgcagtgccaccatcaagaggatggttcccccgcccctgttggtactcagcacccttaccgctcgccaccccgtggtcatcatgcttatggcactcctgactgcagaaccaagatagacttggagccttag

SEQ ID NO: 4313 - DNA, 978 bp, Zea mays
  Peptide Sequence Number=SeqID_47688
atgaacgcactctcccgcgaagggtgccggcacttcgaggtcttcgaccaggcagatgaagattttgagcgagatgtctataaggtcgaagaccccatagtgaaggaatccgccggggccctttatgaccggatgtggggtccgcacggttgtgaggtggtcagggagcgggccgagactgcgagggctcaggcggcgcgtggcgagcgggtggacgacttcggggcgctgaacagcgcgctgcctgacccggagccgacccctgcggaggccgtgtctggggtcgccctggagccaaccccggagaccgcggaagacgcaccggatgcccccacatccgctgcggccggcgaagacctgcccccaaaggtggccgaaggcgcgcctgatgcccccgcagttgctgcgccgagtgctgaagatcccacggcggtggcggcggaaataacagtggaagcagcggcggagccaacggcggaggctcccgcagcgtcagggccttcgcaggttcaagattttgggcctgcgcacgcaaccgctactactgaatttttggcggcttcgaccgcggaaggtggtaatgaatatggtggatctgcatctgagttttttgattttactgactctgggagctcggttgagtggactgaggagtcgtcggaggaggacttggactattttgcggccttggacgtggctgcggcggaggcctcgccacacgccgcggacgcgcaagatgtgccaggtcctagcaccgggcgccgacgacgaagggcggttgcaaagcgtagggttagtgcgaaggaaggggctcggcttcgtgtgagtagggctggtcggcaggaactgttgtctttgccggccgccgcgagtacaggggagggggaactgcgaagtctttttgcgggtgaggagcttaggataatgttatttaattatagggagatgggaattattcctaaggttgagccgatgtag

SEQ ID NO: 4314 - DNA, 1950 bp, Zea mays
  Peptide Sequence Number=SeqID_47689
atgattggggacgaagttgctcagtttgggtcatgcacattcacgccgaagaccggcaagaccacaatgcaagtagtggagctggttccatgcgcccgcaacaagtggggcaattggaatgaattttggttttacgttgctgagggtaccgtcgaaggccatgagggactccccgtgtccgagatgtgctctcattattactcagcgtatccgccctttgaagtggcagaggaggatgcgaacgaaggggcccttcggtgcgccgccggtcagagcagtgggcgcgatttagttgaagagttcgtggcgtacggggtgtggcccttggcgcatggctgggcgttgggcgaagtgtgccctcgccagatgccttttcacggtggaagggtggtgcgaagtcctgccttcgcactgaatctacgaaaccgcgacccggccgcctttgtgcgtgatgcagaggatggggcggtgcggctcgtgggacgttacgtgccgaggacggaaggccagcgcagctttgatatccgcgggtcaaatgaccgtttgaacagggttttcgaattaaatcaattgccgtacgacggctatcctggtcaagacgacgcggaccaccgtggaaagaagccggtggtggagacaggagacgaccctgcgccggcggccgccccttcctccaaaaagagaaaattaggtactgctatgggaggacttggggtgtctgatagttttgctagagagttgatgaggacgtgcgcggccccggggggaaggatgtcttcgcccgagctccgggagtcttcggctcggatgctgagggttaccgggggttgctggcctaggaatgttcctatcccccgcgcggctggcgaggactgttttacatctcgcatggttcgtgaatggagagtttttccttacgggcggaatattgctgctgttgtgtcggcagtgatggacaaggatcgccaaggggcagcgcaaaaacgccaggcggctgtcaggcttcatgaagctaggccgaagaggcagcgggggtctgcaaaggttgcggcctccggcggaggcaaaccgccgctggcggcgaagccgggcgcctctgcatctagcaaggcgccggaggcaacgacaggcgccggaggctccaaatcgacgaaggtggtgcctccggtcagcggagtggcggaggtcgcgaaggcggcccgagcgttgccgttgtcgggcaagcgtgttgccgacttcggcaccgatattaatgtggacgactatcttggtgggtcggacgaaggccaacttgctatagttgcgcctgccgcggcgatcgcgacggctgccatagtgccgaaggcgaggggcgatgcccttggcgccggaggcgaggtgtcggccctcgcggttgtcagggacgaggcgggcgcagcgacccgccgactgaaggaggtgacggaggcgctgagtcaggtggctgacttcgccagccgtactgcgtcgggggccctcacggcatctgtgtctgccgaagtcgagagacttcgcacgcaacatgctgacgctgtccgtgaaaaatcggcctccgacagcaagtgccgtaaactgacggacaaggtggccgcactggagagggagaaggctgacctccggcgccaactggcgggggagaggagggagaccaacgaggccgtcgccaaggagcaggctgcgcaggcggaggccaaactggcgcgagcggaaggcaatcttgccagggagcgcgccgaacagctgcaggagcggctcaccgccctggagagccgcgtgaagggggccgaggccgcgatgcgcgcggaggccgaacggacgcgcacgcagcttatggatacatatcgtgagctgggtgcgcggaccagtgacttcgacgtgccggaccaagagcccgggcttcgctgtctggaatgggtgcaggaggagctgtag

SEQ ID NO: 4315 - DNA, 378 bp, Zea mays
  Peptide Sequence Number=SeqID_47690
atgggcaagaacaacaagcgcaagcgtgagccaactcctccatcggaggattttggtgactcggagtactcagaggaggagttctcctctgagtctgaggggtctccggctcccatcccctgcgggctcgcggcggaggtctggacgtacatccgggttgtcgagcgctccgggctcgagggctcggatgagtcggagtactcctcggatgaggaggactcggacggtggcggcgaggacgaggacggcgacgacgacgacgacgacgacgacgacgaaggcggtggcagcggtgacggtgacggcagcggcaggggcggcagcagcggcagcaagggcagcaacaggggcggcagcagcaacagggccagtggctag

SEQ ID NO: 4316 - DNA, 525 bp, Zea mays
  Peptide Sequence Number=SeqID_47691
atggcgaaaaacggtccaagggcacatttccctttcaatcttgctcatcaatgcaataagcccaagaacaacaagttcaagggcaagaaagatgatgagaagaaagaaaagaagttcttcaagaggaaagaaggcaagcacaagaggtttcacaaaaagaaggatggaaaagcatatattgttggtgattggctcactgacattgaattctcaagcgggcttcttcaagtgaagaagaaaatgatgaaaaggttgctgccatcgctggggatttctgttcaccaccaccatcaccttcatctacttcacacctatgtctcatggctaaaggtgaacggaagtgatagtgataatgaatatgcttctcctacttatgatgaattagctgacttgcgtcaagaatataatcaaatcattagaaagtccaaagctaaatgtgacaagctaaaagatgaaaatgaattcttaactgctaagtacgacatagttgtccacccctaccgaagaaataaaggaagaaaataa

SEQ ID NO: 4317 - DNA, 426 bp, Zea mays
  Peptide Sequence Number=SeqID_47692
atgaggcaggttgaagcactggtggaagcctctaaagaagaagtaaaagccgctgccgcgccggtaactggcccgctggcagatgatccgattcaggaaaccatcacctttgacgacttcgctaaagttgacctgcgcgtggcgctgattgaaaacgcagagtttgttgaaggttctgacaaactgctgcgcctgacgctggatctcggcggtgaaaaacgcaatgtcttctccggtattcgttctgcttacccggatccgcaggcactgattggtcgtcacaccattatggtggctaacctggcaccacgtaaaatgcgcttcggtatctctgaaggcatggtgatggctgccggtcctggcgggaaagatattttcctgctaagcccggatgccggtgctaaaccgggtcatcaggtgaaataa

SEQ ID NO: 4318 - DNA, 75 bp, Zea mays
  Peptide Sequence Number=SeqID_47693
atggccatgatggggttcaacatcggaaaagatgtacctctgacaggtagcattccagtgaacaagaagggttga

SEQ ID NO: 4319 - DNA, 84 bp, Zea mays
  Peptide Sequence Number=SeqID_47694
atgtggaaggaccgagtggagcatgccaaggacatctgggctatctacccagatggccgggagagcgcgtcgtggtcaaaatga

SEQ ID NO: 4320 - DNA, 873 bp, Zea mays
  Peptide Sequence Number=SeqID_47695
atgtcgaaaacccccgcggaaccacttcgagcgagggcagcgtctccgccatctagcgacgtcttcggcaccagtcgctggtttgacgaagacaaaacgggcagggacacccttcgcttcattcagcaccagacgaaggcctgcgggcttatcttcccttggaactcacatacaagagatagccataggtgccaggaagaggtctacgccggatttttgccaagattcgcacgtttgcgatctcagcaagcttttgaacacgggcagatgaacacctccacgtgttcgacacattctgcgcgcgccagagcacgcccgcgcccgaccccgcgtgctccgcgccacgccaagccatgcccacgtcgcctgctcgtgcccacgcctataaatcaccctcaggcgtcgaccgtactcttccgcgcacgctcgacctcaccggagtccgaaaccaccggcgtttgccccgtgcacggcgtgcccgcggccacccgagcccctgccaccgtagaccgggccaacagagcccttcccagccacgcccgatcattggaagagactgtgcacgcctcggtgaagctccccgagcaagaaatcggactttgcttcgctggagaagccagtccacggtcgccggacttcgcccgaccgccggtgaacgtagaccggacatatcccctcacgcgacctgagacgtggtctcccattcctgttatggtgggtataagtgcggtcactgcacgacggcagtcggggtcagtgaggcattgttctctggaggacatggttgctggagtgacttggccgtccatcttgccactaggttggacattcgagtgggatcctgcctcggctgaggaggagcatgagaagtga

SEQ ID NO: 4321 - DNA, 411 bp, Zea mays
  Peptide Sequence Number=SeqID_47696
atgtctttccaccttccgagccccccggatgggggacacccacaatcctcctgccttgtcgttggaggaacgcaacttcatggaagttggtacctttcagccatcgttcggcttcaaggattttcatcagtcagcccagttgcatcccctcgccggtggtcacccaagacagtgcccaccagcccctgggtggggagaagcaagccgggctgcgatcttggtcccaccctcagcttcaaggacgttcatcgtcctcgctggggcggaggccgggctgagtcggagctctacctcccgcacgggttcgtgggtcagcctctccttcagcgttcgagggagagggcgctcattggccctgcaagaggggcggacttggacaacgcggggctggtcgacggcgggcgtcgttag

SEQ ID NO: 4322 - DNA, 720 bp, Zea mays
  Peptide Sequence Number=SeqID_47697
atggaggacttgagtacaatgaccctgacaattgtgatcgaaaagattgaggcatttgaaatgtcgcgaaaaatgggtcgacaagaggagccaacttcttcaaggcgatatgcttttgcatgtgatgaaaagagccaaggaaagaagaaggctcccactccaaattcctcaagtgaagaagagaaaaaagaagaaagttatgatgaagaagataatcaaccatcaacatcatcctccgaggacgaagaaacaatcctacgcatcggaaaggtaatgaggatgatccacaagattaatctaatgggtgtgccactgcaggtcgagcaccttctctttaacattgacaggaaaaagcaaagaaagagaggatgcttcgcatgtggggagaagggccacttcagggaaaactatccaaatatggccgaacccacaaaggtgaggagcaaaggaaaggcgcttacaagtgtcaaaacatgggatgactctgcaagcgaagatgaatctcaaaggactcgcagccaccgatcctcgtcatgctcatcatggtcatcacagaagtgccttaaggcaagaggtaaaatgagtattccatcctctagtgatgatagcagtagtgatgataaagatgatgatgaggataatgccggtttctattgtgattatgattatggttatggtttctcgtattctttctgcttggaaagggtacttttgggttaa

SEQ ID NO: 4323 - DNA, 738 bp, Zea mays
  Peptide Sequence Number=SeqID_47698
atgacaattgctgagtatgttgatgtgtactcacccttgctttacacaccaaaccccccaggttgtccacgttgcaaccactgctcaagagaagatgaagtcatggaggaggacttccaggagttccaagagtacgatgagatggctcgccttagacacaccgcacggaagtcagtcattccttccttgccttctcgtctcgtggagcgtccgcttcgccgtccggtgactgtggaggcgccccctgcaccaccattggtcgtcctggccgctggagtagctgctagaggagaccccgacgacgagggtgacgatagtagctcgagccacagcaccgatctttcagaggagcaggagccggagggatgggttgctcgacccatcactcgtgatgccgcttgcgggtgtcacttccatgatgcgctcgacaccttgctacgccaagcacttgatcagcgtacctggtctatcgagtatcgttgtgttgtcttctatcacagtcgcagggtttacccggaccactgggaggcgacttgtttggtgcaccgtccggagaacagtctccgtggtgcggaggtctactcagagcattactctatctctaagcgggactcagctgaggcggccatgcaaaatgctgcacggtgtgcgctttcgcactactgctcagtgctcggtggggtggtcgatggtctcgacctgaggtattacccccaccgtccacctaacagcacataa

SEQ ID NO: 4324 - DNA, 483 bp, Zea mays
  Peptide Sequence Number=SeqID_47699
atggaggcccaggcccacgcgtcatgcaaccggcgcgccggttgctacgtgcgagcaactgcaccgccactcgcgccactaccacgcctcctcgactacggaactagtaccgcgactcgaggcaacccagcgtacgacccagcagtgccagccaggggaagcgagcgacgcttcgccttcgccataatgaccgcgtcaaaaaagggaccgggaaagggggataccctgaaaaggatccttctccgtgaaggaaacaggccccgagcctccctactgatcagaggttcaaaggcaggcccctcggaggggtttaacagccgcctcagagcgcgtgggctccacacccactactggtcagaggttccaaggccggcccctcggaagggttcaacggccgcctcaggccactcgggctccgcgcccactactgatcaggggttcgtaggctggccctcgaagggttcacagccgcctcagacatag

SEQ ID NO: 4325 - DNA, 921 bp, Zea mays
  Peptide Sequence Number=SeqID_47700
atggcacctcctgttgacgcggtcggtccgtgccctgggttgggtgatgtggaggctcctccgaggtcgaggtcgagtctgtcttccgaggccgaggtcgagtccgagcccctgggtcgggcgaggcggagaccgtcggctgaggccagggctgagtccgagccctggggtcgggcgaagcggagttcgtcgtcttccggggctgagcccgagtccgagccctggggtcgggcgaagcggagttcgtcatcttcaggggctgagcccgagtccgagccctggggtcgggcggagcggagttcgtcgtcttctggggctgagcccgagtccgagccctgggtcaggcggagcagagttcgtcgtcttccggggctgagcccgagtccgagccctggggccacctttgcattaaatgctcctgcgatttggtcggttggcgtggcgatttcgcctaggttgcttcttggcgaagactgggcctcgggcgagccgaagctttgtgctgatgggggttaccagctgagaattaggagccttgagggggaccagcctttctcggttgcgttttgttacggtgggtgcgcgcgagcgcacctgctgggtgtagcccccgaggcctcggacgagtggtttgactcctccgagggcgagaggacggtcaaggacagactcgacttttttacatacgcccctgcgtcgcctttccgcaaggaggagggggggaaagcgccatgttgccctcggagggcgccgaacatggtgtctccggtgagctgctggcgggtaatccgagtggacgcccgtgccccatttgttaggggtcggctagaggcccggaggcgcgctcaaaagtacctgcgggtgatctgctggacccggtcccctttcgacgaggtccgagggctcgatgcctccctctga

SEQ ID NO: 4326 - DNA, 366 bp, Zea mays
  Peptide Sequence Number=SeqID_47701
atgggttggcgtggcgcggagcgcatggggtcgggcgcgggcgtgctctggcgcgcgcagaacgcgtcgaacacgtggaggtgttcatctgcccatgttcaaaagcttgctgagatcgcaaaagtgcgaatcttggcaaaaatccggcgcagacctcttcctggcacctatggctatctcttgtatgagataggagctcaagaggggtctagggtttactcccctcttgcccaaggtggtaagtgcacaaaagcttgggtaatgcttttggttattcacatttcttggttaatccatggtctccaaggttcttatgctcttctccttaagtttcttccacatgtgatcacagtcattagtgtatag

SEQ ID NO: 4327 - DNA, 369 bp, Zea mays
  Peptide Sequence Number=SeqID_47702
atggggaagcctgtcccatcactcctcatgctcctcctcagccgagataggatcccactcgactgtccaacccggtggcaagatggacgaccaagtcactctagcaaccatgtcctccagagaacctgtaaaaattatgccacaagcaaggctgagtacactaatactcagctagacttacgtggtcagcatggatcaagcagtctcattagctatgagaagcagatgattcgaatcgagtttttatccttgcaagtgaccgcacttgtacccaccataaccggaatgggagaccacgtctcaggtcacgtgaggggatatgtctgcgggcaggttcactcaggatttggtaaacattatgctaagtaa

SEQ ID NO: 4328 - DNA, 519 bp, Zea mays
  Peptide Sequence Number=SeqID_47703
atggtcacccaagacggtgaccaccagtttgatggtggggagaagcaagccgggctgcgacctctgccccgccctcatcttcaaggatgttcatcatccgtgctgaggaggggagtgcgccgagttggggcttgtctccgcgcgagcagcggcccgctccttccttcagtgatcggggggaagggtgttcgccgttcgtggcgctggcagctgccgcgtgtctggctctccggcctgagcggctccgacgctgcttccggtgccacctccccccgaggcagccggaggaggtttctctgccgacgagatagtcggtgccacccgcggtctgaccttcggctctacggccttggtagcttgtcctcgcccctcgagtggggtcgtgggcgagggccttatcgcaacagcgtctgccctgaggtcatcgctgctgctgtttggccgcccggagcggaggtcgttgtcgctgctgccggagtgggcggcggcgagccacctgggatttttttcgtcccgtag

SEQ ID NO: 4329 - DNA, 570 bp, Zea mays
  Peptide Sequence Number=SeqID_47704
atgaccgttggtggaggctgtctgcgtatggtgcaccggacagtccggtgtacaccggacatgtccggaagctccgcctcgcccgaccccagggctcgggcccccgtctcgacctcggacgacggactccgcctcgcccgaccccagggctcggactcaacctcaacgccggagacggtctccgcctcgcccgaccccagggctcgaactcacctcgacaccggaagatggtctccgcctcgcccgaccccagggctcggactcaacctcgacgccggaagacggtctccgcctcgcccgaccctagggctcggacttaacctcgacctcggacgacggtctccacctcgcccgacccccagggctcggactcaacctcgaccttggacgacggtctccgcctcgcccgaccccagggctcggactcaacctcgactccggaagacggtctccgcctcgcccgacctcagggctcggactcagcctcgacctcggaggagtcaccacctcgcccgacttcgggctcggaccgaccacgtcacaggggggccatcattaccctactcctag

SEQ ID NO: 4330 - DNA, 135 bp, Zea mays
  Peptide Sequence Number=SeqID_47705
atggcgcaccggacagtccggtgccccaccgggggagactctgccgtggaccagcctggccccacctggcagagggtgcaccggacagtccggtgcacaccggacagtccggtgcccctaagccagaaacactaa

SEQ ID NO: 4331 - DNA, 1926 bp, Zea mays
  Peptide Sequence Number=SeqID_47706
atgccgcccaagcgcgcgtgccgcctggcgctgctggccgcggcggcggcgtacctcctcttcctcctcctcttcgagctgccctccttctccgtctccaccgcgtctccccgcctcgcccaggccgccacgcgccgcgagctcctccgcgcctcctccgcgcgctccccgctccgcccccgcaccagcgccccgctcgccgtctcctccgtccgcgtccaccgccgcgccaccagctcctcctcctccgcctccgccgccgccgccatatcatccatcgacgcctcggccgccgccgccttcgccgccgcggcgccgcacctcgcgcgcctcctctccgcccccgctcccccgtcctccgccccttcgccgtccccgaccgcggccgcctcggcctcctgccccgcgacggtctcggcgccgagggaccagctcgcgagcggcgcgggagtcgcggtggacctgccgtgcgggatggcggtggggtcgcgcctcacagtggtggcgcggccgcgcgccgcgcgcccggaggtcgcgggagcgggggacggggccgcgccgccggtcatggtgtcgcagttcatgctcgagctccttggcaccaaggcggtgcagggggaggagccgcccaggatactccacttcaaccccaggatccgcggggacttcagcgcccgccccgtcatcgagctcaacacttgctaccggatgcagtgggcgcagccgcagcggtgcgaggggtggcagtcacgcccggacgacgacactgttgatggggaactgaagtgtgacgaatggattcgtgatggtaacaacgagacacaagaatcacggatgaaacggtggctgaaccgtttgattggtaggccgaaagtcaatcggccatacccatttgcggagggcaagcgatttgttttggtcataacagctggtttggagggctaccatgtcaatgttgatggccggcatgtcacgtcattcccttaccgcaccggctacaatcttgaggatgcgacacaattgtctttgaaaggagacattgatgtcgagtccgttttggctggttcattgcccacttcacctcctacttctgcaacaagaagttaccttgagatgtctaaacagtggaaggcctcacccttgccaactgaacctgttgaactttttattgggatcctgtcatctgctaaccatttcgccgagcgtatggcagttcggaaatcatggatgatttctaccaggagatcatctgatgttgttgcgcgcttctttgttgctctgaatggaagaaacgaggtcaatgaagagctgaagaaggaagcagattactttggggacattgttatagttccattcatggataactatgaccttgttattctaaaaactatcgccatcgttgagtatggggtgatggttgttcctgcaaagcacataatgaaatgtgacgatgatacgtttgtcagaattgaatctgtattggatcaagtaaacaaggtcccacgtggaaagagcatttatatgggaaatataaactactaccacagacccttaagatctgggaaatggtctgtcacatatgaggaatggccagacgaagtgtatcctccttatgctaatgggcctggctatgtcatttcatcggatattgctcaatatattttatccgagtttgataataagacattaagattattcaagatggaagatgttagtatgggcacgtgggttgagaagttccatacgactcgtcagcctgtagagtatttgcatgatgtcaggttctaccaacctggttgctttgatggttatttcaccgcacactaccagtcaccacaacacatgatctgtctgtggagaaagttgcaagctgggagcgctcaatgctgcaacataatgatatattctaaactcactcaagagtag

SEQ ID NO: 4332 - DNA, 948 bp, Zea mays
  Peptide Sequence Number=SeqID_47707
atggatgaggatcttcattatgcaacagatttattctatgattgtgaaaatgtccgctctctttttggtagtgtggctccatatgctgtaccgcaggtatctagcagttcacttaagaaggccattggattcaaaacagaggtatcttactgtgatgcattgatggtcctgaagtcttggataacgtcaaaggttccctttagagcaagtatgagccagatgtgcaaattctataccttcttgtctgaaggcgtggcagacgcaaagattgacattaaacgggagttcatgtcgtctccttctatatttacaccactacagcgtcctcgggcaagtgaggttattcctggaaggtttttggcgccagaagacctctattggcatgacccaacaggatgttctgaaataacagaggatttcgttgcaacgaaaaacagaagtatgttcccaagaaaaatgctgtctgcagcctatccaaacctttatgaattatttactctgacatgcggtgtaccaaaggccccaacaacatcaaattatgttgagatgctgctacggttgtcaaccattgcattgccttcacaggcaggaaaccatgtcttttgtgtatttgtgagatgggccaagtgtatgcattctgaaagtgacaagatgaatgatatattgtacttgaaagaatcccttcagaaattagaaacaacaatattgcccacctcagccgataaatgggtctctctacatccttcttttggccttgtttgctgggtagatgatgatgagctaaagcaacagtttgttaactctaatgatgtttacttcatacaatttggcgacctttcttctgaggataagcaaatgttgtatggaagagttgctgctttaatgaaaagcttaggcatccaagcactttcaaagcctgcttcttatatgcacgaagagttaggttaa

SEQ ID NO: 4333 - DNA, 141 bp, Zea mays
  Peptide Sequence Number=SeqID_47708
atggcggtcgtcagcccgcccaccggcggtggaatcaacgacgtcttccccacatggcggaagaacagcatccagcttttacaaggctccaacactttggaggaagttcgaatgggagtcgaaaactccacgcgcaaatga

SEQ ID NO: 4334 - DNA, 375 bp, Zea mays
  Peptide Sequence Number=SeqID_47709
atggggggcgtggtgttcccgaagtggcgcacgagagaggagcggctgtcttccctttatctagccacgacgtggagcatcggcccgagaagtcggcaagaatggcggggaggtggttgtgacccggcggattcggcgctgcgttgcggcgttgcgtcgacttggtccgcgacggggaggacgaccctgacagtgcggtcccgcacaacggtcacagcgcaaaagaaaacgcgggtctgcagcgagggccccattggccagtggcaaggatgcggctgcgcgaaggtggagtggagattgcctggcgaactggcccacgtggaagtgaagcgcgatcaaaggggctgccagatagggcctgcacgcagtggctaa

SEQ ID NO: 4335 - DNA, 375 bp, Zea mays
  Peptide Sequence Number=SeqID_47710
atggcggagacgccacaccggagagcaattccgaaccggtccgctcccgatccggccgcggaagccacgacgtggagcatcggcccgagaagtcggcaagaatggcggggaggtggttgtgacccggcggattcggcgctccgttgcggcattgcgtcgacttggttcgcgacggggaggacgaccctgacagtgcggtcccgcacaacggtcacagcgcaaaagaaaacgcgggtctgcagcgagggccccattggccagtggcaaggatgcggctgcgcgaaggtggagtggagattgcctggcgaactggcccacgtggaagtgaagcgcgatcaaaggggctgccagatagggcccgcacgcagtggctaa

SEQ ID NO: 4336 - DNA, 375 bp, Zea mays
  Peptide Sequence Number=SeqID_47711
atggggggcgtggtgttcccgaagtggcgcacgagagaggagcggctgtcttccctttatctagccacgacgtggagcatcggcccgagaagtcggcaagaatggcggggaggtggttgtgacccggcggattcggcgctccgttgcggcgttgcgtcgacttggttcgcgacggggaggacgaccctgacagtgcggtcccgcacaacggtcacagcgcaaaagaaaacgcgggtctgcagcgagggccccattggccagtggcaaggatgcggctgcgcgaaggtggagtggagattgcctggcgaactggcccacgtggaagtgaagcgcgatcaaaggggctgccagatagggcccgcacgcagtggctaa

SEQ ID NO: 4337 - DNA, 336 bp, Zea mays
  Peptide Sequence Number=SeqID_47712
atgggcgcgattaaggccaaggctcggtccactcaagggacacgatctcgcctcgcccgagcccagcctcgggcaaaggcagccgaccccggaggattcacgtcttgcccgagggccccctcaagcaacggacacgccttcggctcgcccgaggcccagtcttcgcagagaagcaaccatggccagatcgccacgccaaccgacccggctaagtccagcctcgggcgacataggaagctctacctcgcccgaccccagggttcggcccccatctcggcctcggaagatggacttcgcctcgcccgaccccagggctcggactcaaccacgacttag

SEQ ID NO: 4338 - DNA, 321 bp, Zea mays
  Peptide Sequence Number=SeqID_47713
atggccgtgatggattcaacatcggaaaagatgtacctctgccaggtaccaagttttttggttaaaaagattaagctgagaccgggcaggcgacttgcacgagaagagagtctcggtgtagtgtctccgtctgagtcgattaaggaccttgtcgatgtaggcctgctgaccgaggaccctttaactggtcacatgcctcgtcatgggatccactttagtaagcatttctgcaaaacagagtctttgattattgaaaagccttaccttgactcccatataaccagcatacccttgagagtcttttctttagtcgggttctaa

SEQ ID NO: 4339 - DNA, 1705 bp, Zea mays
  Peptide Sequence Number=SeqID_47714
atgggaggacttggggtttccgatggcttcgctagagagttgatgaggacgtgcgcggtcccgggggaaaggatgtcttcgccccgagctccgggagtcttcggctcggatgctgaagtgatggacaaggatcgccagggggctgcgcaaaagcgccaggcggctgtcaggcttgttgacgccaggccaaagaggcagcgggggtcggcgaaggctgcggcccccggcggaggcaagccgccgctggcggcgaagtcaggcgtccctgcatctagcaaggcgtcagagacggcggcaggcgccggaggctccaaaccggcgaaggctgtgccgccgcccagcagggtggcggaggccgcgaatgcggcccgagcgttgccgtcggcaggcaagcgtgtcgccgacttcgccaccgacatttgtgtggaggactatcttggtgggtcggacgaaggccaacttgttatggttgcgcctgccgcggcgacagcggttgctgccgcaacgccgaaggcgaagggcggggctcttagcgccggaggtgaggtggcggccctcgcggctgtgaaggatgaggcgggcgctgcgtcccgccggctgaaggaggtggtggagtcgttaagtcaggtggctgactttgccaaccgcacggcgtcgggggccctcacggcggttgtgtctgccgaagtcgagagacttcggacacaacatgctgacgccgtccgagagaaatcggccgccgacagcaagtgccgcaagctggcggacaaggcggaggccaagctggcccgagcggagggaaatattgccagggagcgcgccgagcagctgcaggagcggctcatcgccctggagagccgcgtggagcaggccgaggccgcgatgcgagcggaggccgaacggacgcgcacacagcttgcggatgaagactttgatcgagatgtctataaggttgaagacctcatggtgaaggattctcccggggccctctacgaccggatgtggggtccgcacggtcgcgaagtggcgttgcgtggcgagcgggtggacgacctcggggcgttgaacagcgcgctgcctgacctggagccgacccctgcggaggccgtgtccggggtcgccctggagccaaccccggaggccgcggaagacgcaccggatgctctcacatccgcagcggctggcgaagacctgcccccgaaggtggtcgaaggcgcacctgatgcccccgcggctgctgcgccgagtgctgaagatcccgcggcggtggcggcggaaacaacagtggaagcagcggcggagccaatggcggaggcttccgcagcgccagggccttcgcaggttcaagattttgggcctgcgcacgcaaccgctactattgaatttttggcggcttcgaccgcgggaggtggtaatgaatatggtggatctgcatatgagttctttgattttactgactctgggagctcggttgagtggactgaggagtcgtcggaggaggacttggattattttgcggccttggacgtggctgcggcggaggcctcgccacatgccgcggacgcgcaagatgtgccaggtcctagcaccgggcgccgacggcgaagggcaattgcaaagcgtagagttagcacggaggaaagggctcggcttcgtgtgagtagggctggtcggcaggaactgttgtcttggcccaccgccgcgg

SEQ ID NO: 4340 - DNA, 246 bp, Zea mays
  Peptide Sequence Number=SeqID_47715
atgactcggacgactactctaggccagcaacagcacctgaccccaccatatgggcgggtccggtgccgccacgtgtcagagaaagtgacatattcggaggcatcaccaatcgtcgagcaccgcgacttgtctcctgaggacttcctgatggaggaaggggcagcatcttctgtgccacgaggctcttaccgccctacgcctggtgctgctgctatgcacgctgcgcagcagcacacgcccgcgtag

SEQ ID NO: 4341 - DNA, 489 bp, Zea mays
  Peptide Sequence Number=SeqID_47716
atggctgaaaggtaccaactcccacgaagttgcgttcctccaacaacgaggcggaaagaaggcgggtatcccccatccgggggcttggaaggtgggaagacacgacacataagggagcgtgaagacatggtcgccttccaagggggtcaccctccttttaaaggcgactctccctacttgcgtccccagccgtcgtgggctgagacttctccaacacactccaaggtcctcccctacggcgcgggggctgggtcccacacgtcatgcaagccggctcagagcagaagaagccaaaccgccgtgcgcggaaccaagctccgagcctccctactgataagaggttcgaaggctggcccctcgggaagggttcaacagccgcctcagagcgcgtgggctccacacccactactggtcagaggttcgaaggccggcccctcggaagggttcaacggccgcctcaggctactcgggctccacgcccactactga

SEQ ID NO: 4342 - DNA, 81 bp, Zea mays
  Peptide Sequence Number=SeqID_47717
atgcggcttcatacccttagagatgatgtggttttataccctcagaggtgcttgtttctcatccagggaagtgggaagtag

SEQ ID NO: 4343 - DNA, 870 bp, Zea mays
  Peptide Sequence Number=SeqID_47718
atgtcttttcactcccttatgcatcgcgtctctccaccttccaagcccccggatgggggatacccgccgtcttttcgcctcatcgttggaggaacgcaactccgtgggagttggtacctttcagccatcgttcggcttcaaggattttcatctcacagcccggttgctcccctccgctggtggtcacccaagacggtgacctccagctcctggatggggagaggcaatccgggctgtgatcccgatcccgccctcaacatcgaggcttctggtggtgcaatcgccctccagccctacggcgaagacgtcctccagccatgtcggggaaggcaaattgttgctgcccagctaggatgcaacattccgccctctccctcgcattcgcggcgaggacggcagcgaggacctgccggtgcgcttgggagcggcccgctctttggctttaatagctggttcgcgtcccttgagcgggaccgcgaacgagagccctccggtggccgcgtccacccgggaccatggctgccgctgcagaggtcgctggcagactcgcctgttgattatctgaaccgcttcaccttgcatgagttgccccgtgtcaaggtgacgagtgagcatggacagaggcggagttggctcgaaaatgaaaacctggttggccggagcctggctgggttgtccgttagcgggaccgtcgccggagttgaccagccgaggcctcgggtcgggctggcgcccttggaagatggtcttcggaccgcgtcgccgtccgaggctaggtcgaacctcgccgaagttgtcgtcgatgccgagggtgctgctgcccccttccagcgtcaagacccgagcctgcaggatcagattgtcttgtag

SEQ ID NO: 4344 - DNA, 345 bp, Zea mays
  Peptide Sequence Number=SeqID_47719
atggcctgggccccggaagacgacgaactccacctcacccgatcgcagggctcggactcagcctcggctccggaagacgacgaactccgcctcgcccgacctcagggctcggactcagccttggcctcagacgacggtctccgcctctcccgacccggggctcggactcgacctcgacctcggaagacagactcgacctcgacctcgaaggagcctccgcctcgcctgacctacggctcggaccgatcatgtcacaggggggccatcattaccctacccctagctagctcaggctacggggaacaagaccggcgtcccatctggctcgccccggtaaacaaataa

SEQ ID NO: 4345 - DNA, 750 bp, Zea mays
  Peptide Sequence Number=SeqID_47720
atgggctaccgggggcccgacagtgagagtcatctgaatggcaccctgaaagcattccgtggcgccttggaaggtgtgcctcatgtccttgtgatacgggcactgggaatcgaggatctcatccagcgtctgtaccccttcatggggcgatgcaggttttgtgcctccaatgaggtcctgagcccgctcatccgcgataatgtagacgtccgcctccctgaacagttgttcagaggtggcaggtactttttgaagtatggctcagacaaagggtgggtcgttggatccccgatagaagtcttcaattactgtcgcctcagtgactttggggatacggttcctcatcgtttgaaatcttttgaggaacgaacgaagagtttcatcattctgtcgcctaatggatttgaggtcccatggctgcgccggtttatcagaaagaaactagaaattcttgataaatcgtcggctgaagtcaccccaatcgtcgatgcagtgtcatggcaggtgccagagccattacagtgcgtcctaccccagaacgatgggcaattacgccgtcatgacgtcctccattgccccagcagcctgggcggcggttgtatagacggccaaccagccccccggatcctgcttaggctcatatttgtcgacgttggagaccttgaaattaggaggccattggatggctcggaggcgaggggtcgttcggcggatgagcgagaggtagaagatgattggccacctgagtaa

SEQ ID NO: 4346 - DNA, 354 bp, Zea mays
  Peptide Sequence Number=SeqID_47721
atgtcgcatttcttcagcggcctcatcaatcttcttctgaagaacggcgagacgaagcatcttttcctttttcctctagacctgttgatgaatggcttcgaggtccctgatttcttggtccaactcctcctcctgagccctgaagacttcttcggcggcatgacgaaggtcacaacttgccgaaggtggtcaaatgagttcaccggagatcgcgcctttcatacggtgcgcaccttcatctcaaagccaaaggttcctaaatgggagaaactcccgatgaaagagcacatcgagaaaggcgcaactcccgtcaccgcgatcgccgtcaggctcaagaacgagagcgggaactag

SEQ ID NO: 4347 - DNA, 249 bp, Zea mays
  Peptide Sequence Number=SeqID_47722
atgtgggagcctggcgtcctgctcagcttgttcccgctcgcgctcttgggcgtggcaataatcatggtgtcaggaattgcggcgctcatagagcgctctgtcgttaggggtttcccctacttcagaggcttcatcccaggagacgtgttgagcaggatcccgttcctcggcctcgtgatgacgtcgaatgttacagtgcatgttccgatgtcggcgtgcctcgcgctgcaggggctcctcccccagtaa

SEQ ID NO: 4348 - DNA, 480 bp, Zea mays
  Peptide Sequence Number=SeqID_47723
atgtgctcagtagcagtattgtcatctggttcttcctcattcttgatatacctgatgatcagcgtcctccgaccattcggatctgattccacttgctctattgccttgcactcttcctctggccctgatgtgacacttggttgctgtatttcttggatgaaaatgcctagtggagcctgtgctcggcttgatcccaacttagataggagcttgggtcttgatcactttgccaggtcgaaactctatatcgtgagctccgagttcgcacacccatttggttgtcctccccacttcttctctattgcggagtatgtctcctatctgaaagcctataaccactatgactttgtgatcatcaaaataatggcacaactttcgtgcggtgaggagcactacatacaacaacttctggacttgcggttatctgatcttggagggcctaaggacttcactgatgaagtatacgggatgctggactag

SEQ ID NO: 4349 - DNA, 381 bp, Zea mays
  Peptide Sequence Number=SeqID_47724
atggggcccaaacgacagacgtctaacgcggcttggagacttggagtccagctcgctcgctccgtcgttccactgctggtgggattcttttgtttttttttcttctgccgggccactgattggtgggctctgccatcgctggatttggggctctggatcaccgacgggcctggtgggtatgctcgctgccgctgggcacattgtgccgcttcgttcggtcactgggaggaagggagcagcgcgcgcggtagatcacttggtcgtagtttgggcgggattctggcgtgcgccgctgtgttctaccagggcgccgtcgctgcctgtatccgcgggaggaagaagattagtttgggccgttggacccatttcaagccgttctga

SEQ ID NO: 4350 - DNA, 159 bp, Zea mays
  Peptide Sequence Number=SeqID_47725
atgacgaccgacaggccgcttgagctactccacatggatctattcggcccgattgcttacataagcatcggcgggagaaaaatctcaaacccaagaaaccttaaagggattcttaagatgagctcaaaacgagttcggcttaaggatcaagaaaattag

SEQ ID NO: 4351 - DNA, 1722 bp, Zea mays
  Peptide Sequence Number=SeqID_47726
atggagtggagtcccgggcaaccgctgtccgctgggcaggggcaaccactttcgtctcgtccgcacatgcacggcgaagagaggactcctgttgattcattcattcacttgatctgctcagctcagcaacaggaagcatcgtatgcatggccagccagcccaggcccgctctccatacccggctgccacgcactcaccgaccccacgctctccaaacgggttaaaaggtcgcggtggacaacgcccggtgcgggtgtcagtgccagcgccagcggagaaaagaaacagagttcgaccggccccgccccgccccgcccggccgcccccaccgcagcgcccgcgaagccgccaaacaccaccacctatccgccagaagcctcttcctccctcgctctcccccatcggcgcgctgccaatggccgcgtggtgaagcgcacccgacggaagaagcacgcaccaacacccaagccccctgtgccctcgccgtcgccgcccgcgcaagggtcaccggcgccggccgctcctaagaacggccttggggagcgcccagagagcctggacgtccgcggcgttgcggcgaagccgggagcctcgtctagtgccgtgagggcgagcaagacgcgcgcccacgctgcggtccccaagatgaacggtgggggcaagtccgcggtggcggatggggagcacgaaaccgtaccttcttcggtgccgaagactttctacaaccagcttcccgactggagcatgctccttgcggccatcaccaccatcttcttggccgcagagaagcagtggacgatgcttgactggaagcctaggaggcctgacatgctcactgacacgtttgggtttggccggatcatacatgatgggctcatgttcaggcagaacttctccattaggtcctatgagattggggcagataggacggcatctatagagacgctgatgaaccatttgcaggaaacggcactcaatcatgtgaagaccgctgggctgctaggtgatggatttggctccacaccagagatgagtaaacgaaacttgttctgggtggttagccaaatgcaggccatcatcgagcgttatccatgctggggtgatactgttgaagtagatacatgggttagtgctaatggtaaaaatggaatgcgtagggattggcatatacgcgatcctataacaggcctcacgatactgaaggcaacaagtaaatgggttatgatgaacaaactcactaggaagcttgcaagaattccagatgaagtgcggactgaaatagagccatacttttttgagcattctgctattgttgacgaagacaaccgcaagcttccaaaactgccagagggacaaagcacgtctgtagctaaatatgtgaggacaggcctgactcctcgttgggctgatcttgatataaatcagcatgtcaataatgttaaatacattgcgtggattcttgagagtgcacccatctctattcttgagaatcatgagctggcgagcattgtgctggattacaaaagggagtgtggccgggatagtgtgctgcaatcacacacctctgtgcacacggattgcaacagtgagtctggagaaacaaccttgcactgtgagcatgtgctgagccttgaatcaggtccgaccatggtgaaggcccggaccatgtggaggcctaagagaaccaaggcccaagaaacagttgttccatcttcaatttga

SEQ ID NO: 4352 - DNA, 1659 bp, Zea mays
  Peptide Sequence Number=SeqID_47727
gatcatataacttactcaaggaggagcgataggtccattcaagttgccaacacacagaaggcagaggctgagaagaaaaaggctgagattgagatgaagaatgctgaagctgaggaggctgagaagagaaaggctgaagccgaacaagctgataagaagaaggcagaagaagctgagaataagagaaaggctgaggccgaagtagctgagaagaagaaggaagtagaagctgagaataagagaaaggctgaggccgaagtagctgagatgaagagaaaggctgcagctgaagaagctgagaagaagaaggaagaagaagctgaggataagagaaaggctgaggctgaaaaagctgagattaagagaaaggctgaggccgaagaagctgagattaagagaaaggctgaggctgaagaagctgagattaagagaatggctgcagctgaagaagttgtgaagaagaaggctgatgccgagaagaaggttgatgcggaggagaaaaggatacaggttgcaatccaaaaacagctaaaggacaacatcaaagctttgaaaaagccggtgcccgctgccaagttaaagaagatgttccagttacaaatgtcaaaagaatatgctgagcagcgccaacagtacgaggacaggttgaacatgcttcgtcaggaggccaaagctgagattgatagtttggagaacagcattgatggccaggcaggacccagctcatcatttgatgatatacagttcccggcggagtctgatgatgatatcaacaatttgacccaaccaatccgactttctcaagacgaagtctcagtaggccaggctgatttcagtgagtttcaaaggatgatattcaagcgcctaggtgatagagtgctgaagaagcctagggagtacatatccccgttcaagatccctcgtaatcgacctgagatacccctggccaaggctgttgcacttaggcggaagatcgcatctgatcctgagctgaaaaggagaattttgttggagtttggccttcttgttggactaactggcgaggaaattttaacatctttttctaatgacacccttggcgagtcaggaatcatagactttttcgtgcactgcatgcgacatgatgatattgtgcacaaggttgattcttgtggatacagagtgtttctgaccactggtttttatgtttttgtccctatcaaagatggtgctcactattttgtatattgcttcaattttatccataagtgtattgatgtgctggactcgaacgactacttcctgaattgttctaatcaggaagaacggcacaaggctgtctttgccaaaatcccaatcatcgatgcagccttccagaaagtttccaacctcaagttacccagagttagcaagtggaggcggccttttattgatgtgccaaagcaagcaggtccaagcgattgtcttttttttgtatggaagtacatggaatattatgatggagacaaaatgaccaaggaaatcaatccgttcaagggtccgatatacagatgtgagctgttgcattacgagatcttccaccctttgaaccaagctgaaattcctggttcgcttgataagtttagaattggtggtcgtccgttgccaattgaatgggatagtagtcagtcgaacaattag

SEQ ID NO: 4353 - DNA, 2040 bp, Zea mays
  Peptide Sequence Number=SeqID_47728
atgaggaagagattaaggttgaaagtccctcctatacaagatgtcgaaagtgatgatgaacaagacccagagtttgttcctggtggcgatgggtctggcgatgacaatgttggtattgttggtggagatgaaaataagggtataactaagacacgagctatacgatgctcacctgggaagtttataaagcttgtgaattctctatttgatgaattgaaaagtgaagtagttgctaaggggtttggcggcctgctgagattcaagccgcacttattgtccagaaagttgctcagctggctgatgcagaagcttaacccagaaacgatgaaattagagattggtggtggaaaagagattcaaatcaccgagcacagtgtttggtgtgttttgcagttaccaaacgttggcagtgatccgccccccatgtctgatgcagatgctcgtgccttgcgggacgagctgggggagcaaatttgtggcaaatcttatagacacatatctggtatcaatatatctgttatcactgatagactacagaagaggactctcaatggggagctgggcctgagagcctttttcatggcagcatttcagtgtctgctattctttaacactgacactcgcatcaggattgatgatgtaaagtacactcaggacatccagaacatgggcaacaagaactggtgtaaagctgtagtagacaggctcagcatagctgctcgtatttatagaaaggattttgcggagaaaggcattaacacacccatcagtggatgcgggatcttcatagctatgctttatgtcgacaacctgcaacatggattatacacaagtcctttttcaatccctcgatgtgctttcttggactccaagatgattgatgctatagcaaataaggatctcaggggagatgttcctcccgggaccactgagtttggacacctcaggttgagaagtatcactgacacgtgctacggcgtccccattggtgctctagcaatattacatgctccagtaccagcacctgccccagtagcagtctctaatccaacagcaacacctaacccagtagcagcagcagcacctactaggacatctgctgatgtgcttggcacatcccatgatcccgcctgtcatgcttccttcaatatccaacccccagtcttttaccagtaccctagctttagatcttcttttggtcagagcattactgatttagttggaaggagtaggaagtcagatgcgctgaacatcttgaaggcgtttgatgaaagcactagtgaagcccagtcgtacgcacagaaggctgcgaagtattcaacaatatcccgcgaccttatggcaaaagctcaccacgagtgctacactggcattcagaagcttatcgctgacgccatcgttgagaagcgagctgccaaagagcgcaggaggaaggtgaagaacgaccctagagcaggagcaggagcaggaactagttcaattgcaccggaggaccaatctagaggaggtgatggtgaagaaattatacggagtcccgttgcaattgacactagagcaggagcaggatcaggaactacttcaaatgtaccggaagaccaatctggaggagttgatagtgaagaaatacagttggattgcagtggtggagatcttgatgacagcttagattttatgagaaccccattgtgtggtgatgacattgatctggaagagggaaatttgaatagaacacctcctgatttacgtggggcagtccgaagtcttgatgatatattgcaaatgatgtattccccacaacactttgcaagcattgatggcgagtcccctcccaatagccagccgactcgtgcacgacgaattgctgttcgcaagaggaaggcttcctcaaacccccatggcaatgatcaacggcctatgggagcacctgagacagaagaggagcctctgagcagggacactgggatgcagcatcctactgcccaggatcatataacttactcaaggaggagcgataggtctattcaagttgccaacacatag

SEQ ID NO: 4354 - DNA, 366 bp, Zea mays
  Peptide Sequence Number=SeqID_47729
atgggcccttgttccgaaggcattgagtgtccctcgaccaatgattgcattgtaggggtattccatgtcaataatgtcaaagataacctgttcagtccttgtgttgtggacatagccaaaggccttagcaaatatgatattcgctgcactgcctgtgtcaaccagaacattatgggccagaaatcccttgatgacacaagatatgaccatagcatcattgtgagggtaatctttgagctgaaggtcctcctaggaaaaggtgattgggatgtgagaccatttggacttgatgaagggtccctgcaccccaacatgctgcacccttctctacgcttcgttcttctgcttcttgttagccggctctga

SEQ ID NO: 4355 - DNA, 189 bp, Zea mays
  Peptide Sequence Number=SeqID_47730
atggctggaccgtccgcgacctggcaacttgaagcacccggacttctgaccaagagcgactgtccgccatcaaagccggacggtccgcactataattcagggactgtcccgaaagcagacttctctggtcaggactacggacggtccagccccaaggctcggacggttcgcagtgcaaaggaacagtaa

SEQ ID NO: 4356 - DNA, 996 bp, Zea mays
  Peptide Sequence Number=SeqID_47731
atgtcgccggatatttcggtgtcggttccttcatcggtgggattcccgctgaggaggttcttctctgggtgcagtcggctcgtcgtcggagacggggggcgactccactctcccaatgaagaggacatcggggcccacgagggggatgaccttacgaattatggggcctttggacctttcgtgaggtcttttatccttctagtggacccgggggatatctgtctcccacaagcccccgatctttgggctgattttgaaataaacggcccaaagatcccaggtccagcttgcggtgtagcccctgagcttcgagtagatttttgcagacaatccactcgaaggtcttcacttcagacttgtaccttatcagctatatttggctttcctttgatccttgctggtatctcttttctgtcttggagtattcattgcgcatactgcacggatgtgacagttttggaaaatatactgataatttctgggtgtccccccaatgggtgtaggcaagggacggcttgcgttttcacgcttcttgctactgctttctgcttcatctcctctccttccttccacttccgccatgggcaagagcaagaatgcagctcttcacatcactcgggtgacaagcgcaagcgcgagccgactcctccatcggaggacttcggcgactcggaatactcggaggaggagttctcctccgagtctgagggctctctggctcctgcctctcccccggtgtcatctgatgattcagacgactcccaggggatcgccgcagagggctcagatgagttgaagtactcctcggacgaggaggattcctccggctcatctgaggagggcagcggcggcgacgacggtgatggcgacgacgacggaggcgacgatgacggtggcagcggcagcggcaagggcggtgacggcagcggcaagggcggcggcggcggcagcggcagcaagggcagcagcaagggcagcaacaaggccagtggctag

SEQ ID NO: 4357 - DNA, 108 bp, Zea mays
  Peptide Sequence Number=SeqID_47732
atggagtttggtgactcggaatactcagaggatgagttctcctctgagtcccgaggggtctccggctcccatccccctagaaacaacgccgagcgatgtgaaggttga

SEQ ID NO: 4358 - DNA, 273 bp, Zea mays
  Peptide Sequence Number=SeqID_47733
atgaagaagttcatgtattcacatctgcacccgaacgtccctgcgaattctgtcgggatggaagccggaccttgtcatgtagcgggagaagcacttgatggtgcattggacctttttcagtatccccctccctctatgaagttggttgacgaatggtcttctacgcccgaaagccaagacatagatgttatcttgggcatgaactggttagcccagcgtaaagcagttctcaacactgatatgagaaccatcaggttgagttatgaccaatag

SEQ ID NO: 4359 - DNA, 261 bp, Zea mays
  Peptide Sequence Number=SeqID_47734
atggcatcgccgcttagcacatgtggggatgaagaacctccacaagcttctaaagggagaacatgtgataggtctaacaaatgtgggaggagcgcatcacagcaagaatgtgatgaccacgtcaagacccctggagctactgcatatggacctcttcggacccgtcgcctatctaagcatagggggaagataagtctgaaacccaagggaccctcaaacgcttcctcaggagagctcaaaatgagtttgagctcaaagtga

SEQ ID NO: 4360 - DNA, 372 bp, Zea mays
  Peptide Sequence Number=SeqID_47735
atgccactagagaatcttgttggcgtggcgtcgtgcctctgtgggtttctttggctggctccatcttcaccgatgttgaaggggattgatgagcagagatatggattcgcaagggcaggatggaagtggcgtgcggaatacgagctttggcgcggtgagaattccatctataaaaatctaaacaacaccattgcaaaaaaggtatatgaaataccacttataaatcattccatgttcaaaatatcagttaagtttgccatgtctaagggaatcttgccatacttttacaagtcattgaccactgaaatctacgtagcaggagaaaaaccttgccacaactatggctccaaactaaacacatgcctaacttag

SEQ ID NO: 4361 - DNA, 363 bp, Zea mays
  Peptide Sequence Number=SeqID_47736
atgagcttgacacaactaaaagggatgtgcattggtcaaccttctcaagataacagtgatcacatggtgaagaagcttgagacaggaacaaccgtggcatgcactaaatcccttgaagaaaatgtcaaggacttgaggattgccaagaggagggaacaaaagaagaaaatcaatacctcttccaaaagcctcaaccatgcctccataaaagaccaacatgccgtggacacggacctcggcggctcggtgctccctacccgtgcccggcgcctcgacggctcattcactgccgcccggagcccgccgtgcctgccgcctctggccaccgccctcagtcccgctcctgcccgcagcgctgcctga

SEQ ID NO: 4362 - DNA, 264 bp, Zea mays
  Peptide Sequence Number=SeqID_47737
atggggagagcgagcctggttctcaccgacgttgcggccagcaccgcccttgctcacgccgtagagaagagagggcgccaggactccgagacggcggaaagcgcgtcggagagcggggtggaggccgacgcggaggagacagagaggagggaggcgagctcggcagcgggtatagtagggggcggggaggaggatggaaggggcaggtgttacgcgagagcgctgatccgatcacgatccgataaggatttgcacccttattag

SEQ ID NO: 4363 - DNA, 207 bp, Zea mays
  Peptide Sequence Number=SeqID_47738
atgtcgtgcgcgttcgacgactactatatcaaggactatggcatcatctttggtaccatagcaatcgtgtatggtgatgcgtacctgatgactgacaatgtacgagggaacttctaccggcagcacaatgatattgtgcgcattgctaggaatttcatcatcaagatgaacctcttcgtgaggcaaatcaccatcagggtgaattaa

SEQ ID NO: 4364 - DNA, 720 bp, Zea mays
  Peptide Sequence Number=SeqID_47739
atgtggttgtcgtgggtccgccggagcaagacctccgggcggctcacgcagtcgccgtccttctcagcgcccacggtttcgtcgcccaccggcaaggaccacccgggcatcggcgctgtcctcgatgacgacgcagcggtcggctccggcgacggcgccggcgcaggcagcaagatcgtcctccaccgcgcgcggtcggcgtccaggctgcgggcgtgcaagtcgttcgcagcggccgcggaggccgcggcagcctccgtggcgggggagcgccacgttgtgctttacttcacctccctccacgccgtgcgcgccacgttcgagggctgcctcaccgtgcgcaccatcctgcgggggctccgcgtctccgtcgacgagcgggacgtgtccatggacgccgcctacctcgccgagctctgcgcgctgatgcggcgggaccgcccgtccctgccgcaactcttcgtcggcggaaggctcctcggggacgccgaagaggtgctcctcctgcacgagagcggggagctccggcgcgtcctggccagcgcggtgcaggcggcgcccgcgccatgcgcgtcgtgcggaggctcgcggttcgtgccgtgcggcgcctgttgcggcagccaccgacggttcagcgacaagaccggcggtttccgcgtctgcacgtcctgcaatgagaatgggcttgtccggtgtgccgcctgctcctccggcagctga

SEQ ID NO: 4365 - DNA, 558 bp, Zea mays
  Peptide Sequence Number=SeqID_47740
atggagaaatctccaagatccattcctatcggatctggagctgctagggccgacacacgcaaagttgtcgcagaaggtgcagaagggagtaggcgcacaggcatcgtcgacatgagcaagattgattatgacactagtagattacgtccgcgccatcgattatgtaggacacatgatccggcacagaggtataatcgagtttgggatggtcttttagacgccattagacagatgcaattatctgccgatgagttgaggaagttgagccgccgcaatcatgtgcctgagtatttggatatgttgcacaagaattgtttggttaatgccatgagtgatgttaatgaaattgcaaaaggtctagacagtatgagcagggatttggaggaagttcttattggtccgcaacctctacttgaggattacaaagcccttggaatgtacgatgatttaaaaactgatgttaattgtgattgtactgagcagtgtgcttcggatgaggacaactcttcttttgactcggatgagatccctgatcgccgtatgaagggctcgttatga

SEQ ID NO: 4366 - DNA, 648 bp, Zea mays
  Peptide Sequence Number=SeqID_47741
atggccttgcgtaactgtagaaggaatcaatgccagttgtcctctgtttcagactcaaagaatccatatgcaacagggaacatccagttgtggccgtcgacggctgttgcagatgaatggtgccaaccttggtgggaactgggaataggggggtccaaatcagttaccgtttcaacaggatcttcacgacaacctggtggtgcctccaaccaagagttgtcaacgtcgtcgatcgtcagagcagcatcgaccaacggcgacggattgagggccagccctgtgtcgctgccaacgacctcgcctggaggcaacgacgaggataactcgccggctgcgtggactgcgaggtccagcgagagttcgtccggcgaggggactgccggaggttgcattgggacgaagaaagagctcgacgagcgtcggaatcagtcggggagccggacagagatggagaggaagaaaggagcgagctcgcgatccgttctgaagaatagaggaaggccgatccgttttgacgaacaggaaatccaaatcttcaacgtaaaagaagggcacacgcgcggtaacagcagccggtacaagttaatacttagcgcgacggataaaagtgcccacgatgacaaatttccaaacgaaagcctattataa

SEQ ID NO: 4367 - DNA, 1596 bp, Zea mays
  Peptide Sequence Number=SeqID_47742
atgaggaggggcctcgacgttttgcttgttagttggaagctgagtggaaacacaagaacacacaaggatttagagtggttcgggccgccggagcgggaagcttcttgtagaagggatgatgagtaccgtgcgccgctcggcttgggcgcactgtttgtcaacagagtggacatgcgcgccgtctgctgggggctgcacgacgttatgggccttgcgtcatgcatagcccgttggcttatgtcatgggccacaagccacgcggtagcagcgggtctctgcctgagcgggaagcgtagggaagggcctggacgcgtgccagcaccggacccttactcaagccggggtcctcctcgttcagggaccttgctaaggcccggaccttactcggagggacctggggccttcccgagggacccggcataccttcttgggagctccggacttacctgccccatgtggtgggggtcggtgtcattctccgtgtggcctaagggtgtaccgcgggtgcggcgtcttcatgctgtagaagaggtcttctgtggcagccccgagaagacgtggcattggcgcgagcggcggtgcgattttccgcacccgatggggtgcgccggtgttctctgggggatccgcgtcagggtcgccccctccggcgatctcaccgccggagagctcgcgctcatggtggtgctgtcggtcttgtcttcttcttgcagctgttggaggagcgcaaccccatggggagggatgaccaccagccttgtggtggagagaagcgagctgggctgcggcctcccccctgccctcagcttcaaggatgttcatcatccgtgctggggaggagggcaagccgagttggggtccgccttccgcatgggctggtggcccgcttcttcctccatcattcgggggagaagggcgttcaccagcctcggcctcgcggaggaggcaaactttgggtacgcgggaccggccaactgcaggtgccaccggccgccgcgtgcccggttccccggcttggatggcctcggcgccgccttcgacgctgcctcctactatttggttggggtgtggctacccgtgcactacacgggcgacggtcgcgctgtgcgcagcgaggacgggagcgaggacctcttcgcgcgcactggggcggtcgccattcgccggtacggcactgaggtggccgccgctgtcggtgctgaggtggtcgcctccgctggcgagccgctcggagctagctatcctgcggccctactggtgtggaggcttgatttgttgaggttggataccagcgtatctgaaaaggttgtcaataattctcgggaggcagcttcgtcgagggcggtggagcgtgcaggcccatggtacgggaccaggctgagcggctacacgggcttcggaccaccccatgagactaatgctaagcggccacacaggcttcagaccaccccatggaacggggtcccgttctctggagccggcccccaagctgtcggacctcccaactttcgtatcgggggccctaaactgcaagcctggctgctcaattcggatgtcgtcatgtcagaacagattgaagtcgtatgggtgggttag

SEQ ID NO: 4368 - DNA, 309 bp, Zea mays
  Peptide Sequence Number=SeqID_47743
atggagtcttcttctacctccacctccagccatcacgcagcagcatgggggctgccatggctggcgtccatggagagcagaggaggggctgctgcaggggcagggacagccaccacgaaggggagctggagccatgaagaagaagggagggaggggcgagcaccaccattggagagggtgggtgccatggaggcagggctgctgctccatggatgggaggagaggaggatggcatggggagaacagagcgaactagagttcggacgaacggaagatcgaatgattaacatgaccgagagtttgatttga

SEQ ID NO: 4369 - DNA, 456 bp, Zea mays
  Peptide Sequence Number=SeqID_47744
atgggcaaaaacaacaaacgcaagcacgagccgactcctccgtcagaggactttggcgactcggaatactcagaggaggagttctcctctgagtccgaggggtctccggctcccgtctctcccccggcgtcgtccgatgactcggacgactctcaggggattgccgcggaggtctggacgtacatccgggccgtcgagcactccgggctcgagggctcggatgagtccgagtactcctcggatgaggaggactcggacggcggcgacgaggacgacgacgacgacgacggcggcggcgacgacggtgacggtgacggtgacggcgacggcagcggctggggcggcaacggcggcggcaggggcggcgacggcggcagcaggagcggcaacggcggcagcagctggggcagcggcggcggtggcagcagcaagggcagcaacaaggccagtggctaa

SEQ ID NO: 4370 - DNA, 294 bp, Zea mays
  Peptide Sequence Number=SeqID_47745
atggcgggcggaattaagctcgccggagctaagggaaagtggctggccggtgagggtttggcatttgagagaaaccctgagcgacactggggtgtcccacagaagactgacgggcggctcgccgccgcccgctctgactgcgacgacaacgacccccgctccgggtggccgaactgcagcagcgcaggcctcagggtgggcgctgctgcaatcttgccctcgcccacgccgacgctcgaggggcgaggacaagtacaaagagccggaggctcgaagcgcggatggtggcggtga

SEQ ID NO: 4371 - DNA, 1005 bp, Zea mays
  Peptide Sequence Number=SeqID_47746
atgccgcgtcttctcgactgcagaaccagtgcagcaactcgaggcagccccacgcgtgacccaacagtgccaattaggtgcggcgatcacgggggagccctctcccacagcgtaaagacgacgcacccgtcacgaaattcaaactcgaagggcacgcaacacatctggcagacgaagcgggcgccgtttcgtctccgtcatgatgaccgcctcaaaaaagggatcgagaaaaggggacatttcgaaaggatccttctcagtgaaggaagcgggccccgagccctcctactgatcaggggttcgaaggttgcgccctgcggggttcggcaaccgccccagagcacacgggctccgagccctttactgattaggggttcgaaggctggcccctcggaagggttcaacagccgccccagagcacacagagtcagggatgaccctgggtacgtccgttacatggccaaggctcgggctacgctcccaacgtaccctaggacatttccgagaccagcgggaacgatttgtaatggaatcccaccggagggaggcaccgagccctcggaccctatcaaatggatccgggtccagcaaatcccctgcagtcacttcgcaacagggagctccgcctcgtccgaccttaggcctcggcctcagcctcgacctcgggagaaggtctctgcctcgcccgaccccaggcctcggcctcagcctcggccttgggagaaggtctcctcctcgcccaacctcagcctcggcctcgggaggagtcacatcctcgcccgacctcagtctcagcctcaggagaagtctccgcctcgcccgacctcggcctcggaccgactacgccacaggggatacatcattactctacccctagctagctgcctcaggctacgaaggaacaagaccggtgtcccgtctagattactccggaccccgtgccgcaacgccagctgcgcttctacagggctcaagtacttctccgtcggccacgttagcacatag

SEQ ID NO: 4372 - DNA, 516 bp, Zea mays
  Peptide Sequence Number=SeqID_47747
atgacggagaaaaagcgaaggcagacaaagactgatggagcgaaggccccaagaaggagggagcagacgaagcaggcgaaggccttgcacgtacctattagagccagaaaccgcgaaggcctctccgactgtcgaagacctggcacatggagcacgaaggcatcatgtagccaaccgcgcgttgttaagacagcgtgcccatgtaaaaccgctctaggccgcctggtcccacttcatcgaatcatccctgttctaccattgtttggatttgctagaccacgtgtcagcaagttccaacatttggcgcccaccgttcgtgcctcgaaaaacattcctgcgatggctcccaaaaaagcgacttcgaaggctgccacttccatcgacgacgcagcgaaggcagcccttctcgctgagaagaagggaaggcagtcctcgctgacgatatacctcatcaagcccttaggaatgaggcagtcaacaagaagcgacatcgccaagagaatccaccaaccctag

SEQ ID NO: 4373 - DNA, 267 bp, Zea mays
  Peptide Sequence Number=SeqID_47748
atggcccacgaaataataaagaagagcgaaaaagatactcatgatgctagtgaagcaacgaaggcagctgaaaaagctgcggaactcgaaaggcggatagccgaactatctcctcccctagagcccttcgagtcattggtcgacccagaggcaaaggaatcaacagaaattattaacatggccgaaagcattatggacgaagtcgttactcaactgctgaccgaagctgcagacaaagttttgaaagaagaagaatatatattataa

SEQ ID NO: 4374 - DNA, 510 bp, Zea mays
  Peptide Sequence Number=SeqID_47749
atggctactactcccaacttaagatccaccaatcttgcgtttcctgtcctccatctcccgacgcttccttttagtcatgattgctttgtcgatcagatgctggaaggtagggaaggtgtggttcatcagttggtaatggaggggatcaaccaatcctctcaagaagaggggaccttgcttcaaggcgagaaactcctccttcctcactatcatcagtccctcgggcacatggtagcgatggaagttgtccctgaattcttcccaagtgatggcttcagggttggtaggggtggcgaggcacttgtggcatctagacttgcacctgaggctgaggcagtggtggctgctgctgcacctactgcatcgctgctagggtctgaccaattgcttggactgcttgagtctgcatcaggaacatttgctcaatggtcattgggggtggcggtggcaaatgctgctgcggagctgcctcctcttggggtgccagctattctggctgagcacgcctag

SEQ ID NO: 4375 - DNA, 246 bp, Zea mays
  Peptide Sequence Number=SeqID_47750
atggcgatggcttgtatcaggtgcactgcacataagtctatgatcccctttttgccttctcgcctggcggagcgtccactgcgtttcatggtgccaggtcagtccagccacctggagagactgcatcgtcgcctgcacgaggagcaggagcgccgatgccaggagcaggagcaggagcagcaggactcttccccctcgcctcagcaggaggtggagtctaagaggccgccttcccctgtatcttag

SEQ ID NO: 4376 - DNA, 354 bp, Zea mays
  Peptide Sequence Number=SeqID_47751
atggaccttcgcctttttactctgcagcttcagctttggcttggtcaacctgtatgtaagtattataagctaaattcaaaattcaaagggaaagctagacttcaaaaaggcaacagttgtgccccgagaagctgccagggcacagaagtcgccatgcccagctataacctcgtcaagatcattaatttcaccttcaatatgctcgaaggcaccaagcaggtcttcagccgaaggagtaaacttttcgctactggctccaacaaaatggaatacctgtttcaactgttgaatgcatcgattgctaaactccaggcatttattctaaagatttgtcaaggattctttcagctctga

SEQ ID NO: 4377 - DNA, 435 bp, Zea mays
  Peptide Sequence Number=SeqID_47752
atgaccagaggtgatgggggcgatagcgggggtccaggccccaagctgcgcgcggaggcggcggcgcctggcccctgcatccccgacgacgcgctcgtcgagatgttcggcctcctcctcgccaactccctccaccgcttcaagtgcgtctccaagatcttttcccgtttgcgaggaatctccacaacttggagtctctcgcccttacaattgagtttcacaaagaagtacagagtaagggagggaagcaaacacacacaaatccacagcaaaatgcgcacacacacggccaagactcgagctcaaaagactatcttgaagttctcactagaacggagctcgaatcacttagaaagacaaacgaatgcgcaaagactgagtgtggatgatcaagattgctctaaggttgcttggtgtactcctccatgcgcctag

SEQ ID NO: 4378 - DNA, 1038 bp, Zea mays
  Peptide Sequence Number=SeqID_47753
atggcgtcgctgtggggggcgctgcgcaggtcgacgtctcatgcgtcgaaggttagcgggcgtgggggatgttttgatgttgctggtgtggtggtgggggtgggggaggtacgatttgtacttcctgatggtgttggtaagcatggtgcggtggatgcggggcgggggcgtggatatatggtggagggggttgctgtcttcgccatggaagaggcagtagaatcggcgcggcggctgcgcacgccccccgacccttgccgcgagttccatttccgcggccctgggggggatattcctggcggcgaggggcgtcagcagcggggtgctggttggcgatgttgtgcacttgctgttgattgcggccgtctcgaccggagtcttgctgcggagtcctcgtccacgtgcggctggactgtggagcatctttgggcttcctttgagactcaaccttggctggtggagctctttcggatttggcgtatttttcaaacagctgatataattcctggagagcgagagttcggccaaggcgtcggtgtctgggcggtacccttggaagttgagcaagaacttgtcccggaggcatctctaggaatcaatggacagcggaggcaacccggtgaaccaggtgagagctgggccttcgagggcgatgatgaaagacttggccattgtggcatcatcccctccggaagatgcaacggcgacctgataactcattatgtattgtgccgggtcagtgctgccgttgtacttgggataggtccctgcccggaagttggcgggccaaggcatcacttgcagatgtggcgccaggggacttcgctcgtcgaggtagttgaccccttggaatggcgcggcgtgcgggaaggtgtggtcgcgctgggggaaacgcgggtcttccggttgtgcgggctgttgcacgggtggcccatgctgcaggccgaggtggccttcgcgctgcatcagcgcgatctcccgctcgaggtcctgggccttctgctcttcatcgcgtatcatttgccgcaccttggctag

SEQ ID NO: 4379 - DNA, 582 bp, Zea mays
  Peptide Sequence Number=SeqID_47754
atgctgggcgcgttggagtcgaaagggtgcgcccacttggtgcggttgcctgccgcctacatggcggtccgccctttcacccgctggtctgggcgaaagtggaggaatgctcgtaactgctgggcagttgcgcgcaccgcacgtgacgccatcgttcggcttcaaggattttcatcaggcagcccggccgcatcccctcgccatcggtcacccaagacggtgaccaccagcccctgggtggggagaagcaagccgggctgcggcctctgcccctccctcagcttcaaggatgttcatcatcagtcctggggaggggagtgcgccgagttggggtcggtctctgcgcgggcagcggtgttggggcgaaggcgaagacgccacccttcgctcgaggccttcgcttcagtcgttggtccaacggagacaagacaacgggcagggacacccttcgccccgtacgacatcagacgaagacctgcgacgaggtcatcccaccgtgcggcctcgtccagcatggagacccacgacgttgggcactcagatacctataaatacccccgcacagtgcccgtgagaggctag

SEQ ID NO: 4380 - DNA, 1122 bp, Zea mays
  Peptide Sequence Number=SeqID_47755
atggctggttctaaggatcacaccaagatctccaccaccaacatcatcaagctagccatggaggcgctcccggctgatgaccaaagaccctttgaggacctcataatgcgcgatgagaaggagggtaatgatggcccctcctgtgacgtggtcggtccgagcggaggctcctccgaggtcgaggtcgagtctgtcttttcgaggtcgaggttgagtccgagccccttgggtcgggcgagacggagaccgtcggctgaggccgaggccgagtccgagccctgggtcgggcgagttagagttcgtcgtcttccggggccgagcccgagtccgagccctgggtcgggcgaggcggagttcgtcgtcttccagggccgagcacgagtccgagccctgggtcgggcgaggcggagttcgtcgtcttccagggccgagcccgagtccgagccctgggtcgggcgaggcggagttcgtcgtcttccggggccaagcccaagtccgagccctgggtcgggcgaggcggagttcgtcgtcttccggggccgagcccgagtccgagccctaggtcgggcgaggcggagttcgtcgtcttctggggctgaggccgagtccgagccctgggtcgggcgaggcggagcttcctatggcgcccgaggccggaattggccgcttcgacagaagggcgcgcgtcaggataaggtgtcaagccatctttgcattaaatgctcctgcgatacggtcggtcgtcgtggcgatttggccaaggttgcttcttggcgaagactgggcctcgggcgagccgaaggtgtgtccgttgctagagggggtcctcgggcaagacgtaaatcctccggggtcggcttcccttgcccgaggctgggctcgggcgaggcgagatcgtgtccattgagtggaccgagccttgacttaatcgcacccatcaggcctttgcatctttgtgctgatgggggttaccagctgagattaggagtcttgggggtacccctaattatggtccccgatacccccgaggcctcggaggagtggtttgactccttcgaggtcttaatgcgtttcgcgatgcttcggtcggtctggttgttccctcatgcgagctggccgtag

SEQ ID NO: 4381 - DNA, 906 bp, Zea mays
  Peptide Sequence Number=SeqID_47756
atggagatcaagacaatcaataagaaggcaataatcaatggagagatgaggaaaatcaagacaatgaagatgaagaggaagttcaaccaccaagaagccaagtgcctcacccaagagtccaccgaaccatttgaagagatcatccgggtcaaagatgctttgaaggatccggattgggtgatggcaatgcaagaagagctcaacgactttaagaggaatgaggtcgagtgcgcttgcagtaggggggttacaagcgtccacgcgggtgagggaagcgagcggccccaagagagcgcatgtctcgtcctcgtccccgcgcggccaaccttctctaagaaggccctggtccttccttttatagtcgtaaggagaggatccaggatgatgatggcgctccttgttgacgtggcgggcctgcgccctaggtcgggcgacatgggggctcctccgaagccgaggttgggcctgtcttctgttgccgaggccgagtccgagccatcgggtcgggccaggcggaggtcgttcggccgaagccagggcggagtccgagccctggggtcgggcgaggcagagtttcgtcgtcttcaggggctgagcccgagtccgagccctagggtcgggcggggcggagttcgccgtcttccgggtcttagcccgagtccgagccctgagtcgggcggagcggagttcgccgtcttccgggtcttagctcgagtccgagccctggggtcgggcggagcggagttcgccgtcttccgggtcttagcccgagtccgagccctggggtcgggcggagcggagctcgctatggcgcctttggcaaggtctgactgcctgtcagactcactctgtcgagtgtcactgcagtcgagtggcacaggcggcgctgtccttctgtcagactga

SEQ ID NO: 4382 - DNA, 1704 bp, Zea mays
  Peptide Sequence Number=SeqID_47757
atggaagtcgtggagttggttccctgcgcccgcaataaatggggcaactggtgggaattctggttttacgtttccgaaggcacagtcgaagaccatccagggctccgcgtggccgtcatgtgctcacattattacgtagtgtacccgcagtttgaggtagctgaggatgatgaagaagaaggggcccttcggtgcgctgtccgcatgagtagcgggcgcgaccttgttgaggagtttgtcggtatgccctcgcaagatgccctcccgtggcgggatgttggtgtgaagtccttgccttcgcgctggattttgcatggccgagatcccgccgcattcgtgtgtgaagcggaagacggtgcggcaaggatcgtggggcgctacgtgccgaagacagagggtctgcggagctgggatatccgtgggtccaatggcaggctgaatcgggtcttcgaattgaaccgcttgccgtacggtggttatcccggggaagacgccgtcgaccgccgtgggaagaaaccgatgggcgttgatgcggacatgtgcggcccccgggggaaggatgtcttcgcccgagctccgggagtcttcggcgcgaatgctggagtgatgaacaaggatcgccaggatgctgcgcagaagcaccgagcggttatcaggctccccgatcctaggcgtgaggcgaagagagcgcggtggagcgcgaaggctgctgcccccggcggtagccagccgacgccggctacgaaaccggccgcgcccggatccagcaaggtgtcggagagcgcgaaggcggtcgtcgccggcggaaccaagtctaccccgggcgaagctgcgaaggttcgggagttgccttcgccagggaaacgtgttgccgacttcgacacgaatattagcatggatgactatttcgttggtaacgtcagccgcggtggttggggtgaagggtggcgctttttgcgcgagcggcgagatttcgtcggccgcttccgtcaaggacgaggcgggcaccatgtcccgccggctgagggaggcatcgcaacatctaagtcaagaaagttgagctggacttcggtgtttgctgtttccctggggattgtggactcatgtgattctgttaagcagcgacttcacgaccgcgtgacgtacgggctggcggagaaggtggctgccctggaggccgagaagatagacctctggcgccagctggccaaattggcgcgggcggagggaagtctcgccagccaacgcgccgaggagtgggaggtgaggttcaacgctctgcgcggccgcgtggacaaggccgaggcctctacgcgctcggaggttgagcggacgctcgcacagctcgtggattcgtaccgcgagctgggtgcgcggactgctgacttcgaggtgcccgaccgagaggcgggccttcgcttcctcgagtggttgcaagaggaattgctggtactcccgaccatcgtggagggtttcatgtcctatgcctccctcgtcacctgcgaaggggccatgaatgcgctgtctcacgagggctgcagacactatgaggtcttcgaccaatcagacgagagctttcaacgcgagatctttaaggccgaagaccctgttgtgaagcagtcagcgggggcactttttgataggatgtggggggcgcatggtcaggaggctgtcagggagcgatccgaccgagcgagagagcag

SEQ ID NO: 4383 - DNA, 387 bp, Zea mays
  Peptide Sequence Number=SeqID_47758
atgcgctcagccgcgcggggcctgttacaatgggccgaattctacgtgggccttcgtgttggacgaggccgcgagacggagcgcctcgtcgagagccttcgtcttgcagcatgttggacgaagggtggaaactgccggccgcttagcctccgttggttcggagagatcggcgaaggcatcgagcgaagggtggcgtcttcgccttcgccccaacatttgccctccgagggaccagttcgactgagtcatctggtgccgaaggcgtcgctagatggtggagacgctgccctcgctcgaagtggtttcgcgggggtttttgatgtgaccgttgacggacgcggcactgttggactgcgggtttcccaaagcgtcgcgtcctgtgtataa

SEQ ID NO: 4384 - DNA, 342 bp, Zea mays
  Peptide Sequence Number=SeqID_47759
atggcccaacagtgccaaccaagcacatcggtcatgggtcagtcagccgcaggagaaggcgcgatggtcgatacggccaaaaatgggccagcagtgatggcggcagcagggaccgggaaaggggatattccgaaagggatccttctccgcgaaggaagcgggccccgagccctcctactgatcaggggtttgaaggctggcccctcggaagggtttcgacagccgcctcagagcactcgggctccgcgcccactactgatcaggggttcgaaggctggcccctcgaagggttcgacagccgccctagaacacgcagagcgagggatgactctaggtacgtga

SEQ ID NO: 4385 - DNA, 366 bp, Zea mays
  Peptide Sequence Number=SeqID_47760
atgtcgtggccgtcggaggagcgcttgagccctgtagaagcacagctgtcggggctgctggaccttgctgacgtctccttgcttcccccaaggtcgggcgaggcggaaactcctccgaggtcgaggttgaggccgagcgaggatgcgattccgcccggggtcgaggtcgaggccgagccctggggtcgggcgaggcggagtccatcttccgaggccgaggcgggggccgagccctggggtcgggcgaggcagagtccatcttccgaggccgaggcgggggccgagccctggggccgggcgaggcggagacttctcctgaggccgaggcccaaggtcgggcgaggcggagcttcctgtggcgcctga

SEQ ID NO: 4386 - DNA, 132 bp, Zea mays
  Peptide Sequence Number=SeqID_47761
atgacgaccgacaggccgcttgagctactccacatggatctattcggcccgattgcttacataagcatcggcaggagacaaatctcatacccaagagaccttaaagggattcttaagacgggctcaaaatga

SEQ ID NO: 4387 - DNA, 267 bp, Zea mays
  Peptide Sequence Number=SeqID_47762
atgcccagcatggaggcccaggcccacgcgtcatgcaaccggcgcgccgaatgcttcgtgcatgcaactgcacctccacttgcgccaccaccgcgcctcctcgactacggaaccagtaccgcgactcgaggcggcgcctctggcaggagaagcaggcgacgcttcgccttcgccataataaccgcgccaaaaaagggaccgggaaaggggataccccgaaaaggatccttccccgtgaaggaaccaggctccgagcccccctactga

SEQ ID NO: 4388 - DNA, 705 bp, Zea mays
  Peptide Sequence Number=SeqID_47763
atgtcttcgcgttcccttatgcatcgtgtctttccaccttccaagcccccggatgggggatacccgccgtctttccgcctcatcgttggaggaatgcaactccgtgggagttggtacctttcagccatcgttcggcttcaaggattttcatcagccagcccggctgtacccccccgccggcggtcacccaagacggtgaccaccagcccctgggtggggagaagcaagccgggctgcgatcttggtcccaccctcagcttcaaggatgttcatcatcctcgctggggtggaggccgggctgagctggagctctacctcccgcgcgggttcgtgggtcaccctctcctgcggcgttcgagggagagggcgctcactggcccttcgggcgggtcggacttcgacaacgtggggcttgtcgacggcgggcgtcgtcagcctcagcgtgtcgagctcgtcggcttggctcccggtgccccctcctgccagaaggcggcttccgcgccgtactcgcctgttggttgtctgaaccgcttcaccaagcgtgagtcgccccgtgtaaaggtgacgagtgagagtggagatccttggaccgcgtcgccgtccgaggctaggtcggacctcgccgaaggtgtcgtcgatgccaagggtgctgctgcccccttccagcgtcaagacccgagcctgcaggatcagattgtcttgtag

SEQ ID NO: 4389 - DNA, 405 bp, Zea mays
  Peptide Sequence Number=SeqID_47764
atgggcaagaacaacaagcgcaagtgtgagccaactcctccatcggaggattttggtgactcggagtactcagaggaggagttctcctctgagtctgaggggtctccggctcccatccccctgcaggtctggacgtacatccgggccgtcgagcgctccgggctcgagggctcggatgagtcggagtactcctcggatgaggaggactcggacggtggcggcgaggacgaggacgacgacgacgaaggcggtggtggcggtgacggtgacggcagcggcaggggcggcagcagcggcagcaaggacggtgacggcggcggcaggggcggcagcagcaggggcggcagcagcaggggcagcaacaggggcggcagcggcggcggcagcaacagggccagtggctag

SEQ ID NO: 4390 - DNA, 462 bp, Zea mays
  Peptide Sequence Number=SeqID_47765
atggcgctcaacaaaggggaaggcagaggtccggccaaggaggaaaagctcctgctggaaaaatctaggcgtcatgcaggacagcagaggcgccgcgccatggctgggaggtgcctgagcgccgagtttttgaggagggagagggatggcgtgggagaggggatgggtagagatgcggtggatctagggtgcctagaggccaacaacgatggaggcttgggcgagctcggccatggagctcctgcgcgcagggaagaaaaagctccctgctgccgaacgtcgtggataagggggcgctccccatgggggccctgctcccgcgatggcgtgctgctgcatcccagggagccgaggggggagaagggtgctgttgctgggcgaccatgggaggggaggagcctagctccctgtgcttgccgcacgcgggaggaagaagaaccgtgctggctgctgatggcgtga

SEQ ID NO: 4391 - DNA, 783 bp, Zea mays
  Peptide Sequence Number=SeqID_47766
atggcgcctagggggtccttttatagccccaagagacctaggagccgctggaactccattaggaaggccctggttgccttctggccgtgggtgcatcggactgtccggtgcacattggacacttcacaatgcaacagtcatgtatctcttgattggctactttctgcttctggggcaccagaccgtccgatgggcggcatcggacagtctgacacagtacccacgcggctatctcttagtcgtgtggtgaaggtgctgtgtgtgggaccaaatcatgactcgccccagcctcaggcgactactctgggcccacaacagcgcctgaccccaccatatggacggatccagagccgccacgtgtatagagaaagtgatatactccaaggcatcaatagtgagtctggacccccatgggagagtgccggaccccttgatatacagtccggacctccaaggttggtccaggacctccatgagtgcaagccggacccctggaatgggatccggaccccccgtatggggtccaggccgcccacaatggggtcccaaggtcccaggacagaacatactcaggccttgaacaggacccaggcgggggtccggtgccgacacgtgtccggacctagtctggtgggttccggaccagtccgcatacactcctgccccctgctcaagcggagacccgttgcagccacatggcatactgcgtgcggcttaagccaacgggcggaacctagcatgacgcctctgggctacgcgcgcctccgcattcattacagataa

SEQ ID NO: 4392 - DNA, 141 bp, Zea mays
  Peptide Sequence Number=SeqID_47767
atggccatgatgggttcaacatcgaaaaagatgtacctgtgccaggtgaggaagcggcaaatttttgctgcttttgttccaaggtggtacccaaagaagaaagtcaagactgaagacccgggaggaagtgtcctccactaa

SEQ ID NO: 4393 - DNA, 552 bp, Zea mays
  Peptide Sequence Number=SeqID_47768
atgtcagaacaatcgacaatcccaacacaaatgatgataggaccaatcatactcagagcagccagcatagcacacagactttgggaatccaataaacttcctataggccaccagccccgagaggcagaggagggagaagctttggaggaaggtatggtaatcagcccagtaaactgttctacttattctgtggcgaagacaagggacacaccacaaggacgtgccaagtcacgatccagaagcagaaggaaatcgctgaagccgaagcacgacagaaccagccgaagcaggtcttgcatactgcttctgctactctacgtatatctcggagtatgtgggcaatcaacagcctacgacttatgttgcttcagcaagtcattcccaagcttcctgggctcagttgccaccaccaccaccaccacgagcgcttgcccgattcataaccaacaaccagaagggcatcatcaggttcagcaaaagtgtgaccttcgggaggagtccaaagctcgcacagtcaacaacactgtgcccgagtcgaggcatatctactga

SEQ ID NO: 4394 - DNA, 447 bp, Zea mays
  Peptide Sequence Number=SeqID_47769
atggggaccatcctaggaaaatctactatctattttgtggagaagacaagggccacaatacaagaacatgtcaaatcactatccaaaagcaaaaagaaattgcagaagccgaagcccagaaaaattagccgaagcaggtcctgcacactgcttcgtgtcattcaccctacataccagaatatgtgggtaatcatcccgcagcttctgttgcttcggctagtcagccgcaagtttcttggccacagcttccaactccgccgccgctacagcctgcctactcatgaggccatcagccagaagggagtcaacagactcattaggagcgagatttcagggaggggtccgaagctcgcacagttaacagcactgtgccagagtcaaaacacatatattgagagatatccaacctttggcacagttttacattcactgtcgttttctttttaa

SEQ ID NO: 4395 - DNA, 840 bp, Zea mays
  Peptide Sequence Number=SeqID_47770
ggtgacgtgggggagacaccgaagccgaggttgagtctgtcttctgttgccgaggccgagtccgagcccctgggtcgggcgaggcggaagtcgttcggcagaggccagggcggagtccgagccctggggtcgggcgaggcggagttcgtcgtcttccggggccgagcccgagtccgagccctggggtcgggcggagcggacccgagtccgagccctgggtcgggcggagcggagttcgccgtcttccgggtcttagcccgagtccgagccctggggtcgggcggagcggagttcgccgtcttccgggtcttagcccgagtccgagccctggggtcgggcggagcggagttcgccgtggcgcctttggcaaggcctgactgcctgtcagactcactctgtcgagtggcaccgcagtcggagtggcgcaggcggcgctgtccttctgtcagactgctttatgctgatgggggttaccagctgagaattaggcgtcttgaggcccccgagcctctgcacagggcgagaggacgatcagggacagactcgaccttttacatacgcccctacgtcgcctttccgcaaggaggaggggggagtgcgccatgttaccctcgatgggcaccgaacatggtgtctccggtgagctgcaagcgggtaacccgagtgggcgtccgtgccccgttcgttgggggtcggctaggggcccagaggcacgcccaaaagtacctgcgggtgatttgccggacccggtcccctggcgacggggtccgagggctcgatgcctccctccgatgggattccgttacaagatcgttcccgctggtctcggaaatgtcctag

SEQ ID NO: 4396 - DNA, 1002 bp, Zea mays
  Peptide Sequence Number=SeqID_47771
atggatcagtcagccgtgggagaaggcgcggcgatcgatatggccaaaagtgggccgacagtaatggcggcagcaggcgagcagaagcagcggtcaaatcgtctgcaggctcacgtcccctcctggggcagcaggagagccctctcccacggcgtgaagacgacgcgcccgtgttccgttcctcgaacggctcgtgcaacggctgccccgcgaaccactcgtcccgttccattaactccgcggcagggcaggcgacacctttggcacgcgaagcgggcgatgcttcacctccgccatgatgaccgcgtcaaaaaagggaccaggaaaggggatactccaaaagggatccttctctgcgaaggaagcgggccccgagccctcctactgatcaggggttcgaaggctggccccttggaagggctggcccctcggaagggttcgacagccgcctcaggccactcgggctccgcgcccactactgatcaggggttcgaaggctggccccccgaagggttcgacagccacctcagaacacacagaacgagggatgactctgggtacgtccgatacatggctgaggctcaggctacgctcccgaggtcaaagctccgcccactcaagggacacaatctcgcctcgcccgggcccagcctcgggcaagaacagcagacccaggaaaacagcgtcgcctgctctactccgactgttgtgccacccgccagggtgaggctgacagcagccaagtccagcctcgggcgccataggaagctccacctcgcccgaccacagggctcggactccacctcgacctcggaagacggtctccgcctcgcccgaccccagggctcggactccacctcgacctcagacgacggtctccgcctcgcccgaccccagggcttggacttcacctcgacctcggaggagtcaccgcctcgcccgaccttgggctcagaccaaccacgtcacagggggccgcatcattaccctacccctagctag

SEQ ID NO: 4397 - DNA, 93 bp, Zea mays
  Peptide Sequence Number=SeqID_47772
atggccagcgggtggcgcgtggcggccagcattggtgcatgggtacaaatccatgaaactctgcagcacggatgcgttactaaatgtaagtag

SEQ ID NO: 4398 - DNA, 984 bp, Zea mays
  Peptide Sequence Number=SeqID_47773
atgcgcctcatcctgcggtacttgtgcttgacctgtgggggtgtgagacagcaaggagttgatcagaccccatacacctctaccaaggaagcggggcagggtaccactacgaggcctttacaaagttccactagcttcagaaaatccgctatagtttctaggaagccccaatgcagggatccctcgtctgaccgccatcacagcaaaatcagcccgaggacctccctacaccgaccactcccctactgcccttgccactttagggtaaaaaggagtgatcaagggcacaacttgcctgagactcaagattccaggcaccaggatgatcttcaggttctcgtgacctcactgctattcgtagcaatacaaacaaacatgttactattttttgagagcaaggggtctaaactgcaaatatcagggctcagatgtaaggttcttttacatagggtggatcgcaggttgattctagtatttgttagggtctcttttataaaagtgtatggtgaagagacatctttctgccgcttgttgcttactctcttctcttctactccaccatggggcaagagcaagaaggtcagaagttcatcgcaccattccgacgacaagcggaagcgtgagccgactcctccctcggaggactttgacaattccgagtactcagaggaggagttctcctccgagttcgaggggtcgccagtccatgcctctcctccggcgtcatctgacgactcaaacgtttcctgggggatcgctgctgaggtgtggacatacatccgggccgtcgagcgcgctgggctcgagggctcggatgagtcgggggtctcctcggacgaggagaactcctcagactcgtccgaggaggggagcggcggtgatggcgatgacgagggcgacgacgacggcggaggcgacgacgatggcgacggtggcagaggcgacggcaagggcggtagtggcaggagcaaggccagtggctag

SEQ ID NO: 4399 - DNA, 744 bp, Zea mays
  Peptide Sequence Number=SeqID_47774
atgtacctagagctgatacttcgccgccaggctgctgcgccgccgttcctgtccccgtctccgagccgtgagcgccctccacgccgttgccgagcccgagcccaaccaccaccgtctccgagctgggcgcccgtccccgtccccgagcgccaccgtcatccgaggcgccctccaccccgtccccgagcccgagcgccgccgagcccatctccgagtgcgccaccgtccccttccccgtccccgagcccgagcgccgccgagcccatctccgagtgcgccaccgtccccttccccgtacccgagcccgagcgcgccgccgtgcccatctccgagtgcgccaccgtccccttccccgtccccgagcccaagcgccaccgtctccgaggccaagcgccgccgtccccatcctcgagcccgagcgccgccgagcccgagcgccgagtgcgccgccgtgcccatctccgagccctcgaccccaagaagagattaagtcctgtagtctaccacctcccgttatttgtgggcttcaccgatggctggaaacatttggtgatagcaaacgaccttcgggttgaagacgtctgcgagcttgttaaggggccagacgatgccgacataagagaagagaagcgcacagatgaagccggggcagctttaaattttgtgaccacacatccggacatagtacaccggctcaccatcgtctggccccttaacaagctcgcagacgtcttcaacccgaag

SEQ ID NO: 4400 - DNA, 255 bp, Zea mays
  Peptide Sequence Number=SeqID_47775
atgcgcccccttctctctctctctcatttggatttcccgcgcagcaacctccctctccctcttccaacgctctccccgtggtgccctagggattggagacagcgatcaccggaatttggaccccgaggtggcaatgagactgatggttttggttatgactatggtgctggttgtcagcattgcaaccactgctcaggagaagatgaagctgtggaaggagacttccaggagttccaagactatgacgagttctag

SEQ ID NO: 4401 - DNA, 852 bp, Zea mays
  Peptide Sequence Number=SeqID_47776
atggcccgtatcaggtgcactgcatgtaagtctatgatcccctttttgccttctcgcctggcggagcgtccactgcgtcgcacggtgctaggtcagtcaagtcacctggagagactgcatcgtcgcctgcacgaggagcaggagcgccgacgccaggagcaggagcaggagcagcaggactcttccccctcgcctcagcgggaggtggagtctgagaggcctcattcccctgcacctcagccagagatgccccctgcaccacctcagggcatcccggctgctggaggagatcctgacggagacgacgacgatgctggtggcagttcgagccatggcacggagatctcgaaggagccggagccggagggatggatcgctagacccatcactcgtgacgccgctcgcgggtgtcacttccatgacgctctcgacaccctgctgcgtcgggccttcgaccgacacacatgcggggtagctgatggcctcgacctgaagtactatcctcgtcgttcgaccagcagtgctggaggtgtgattgcctcgccagctggtgagggcaatcctaggctgaacagcatggtcaacttggccgccgtgctcaacacagagttggactacgccttgacgagttgggcaaggttcgggcaaaggttgcggaattgcatactgagtgcgcagcacgccagtatctggatggtggttcttctgcccctgtcgggattcagcacccttaccattcaccgcctcgtggtcacttcgactatggtaccccagactacaggacccggagagattttgatccctagatcgacagagtcaaagtctgcaataatgcttagttcagtgtcttag

SEQ ID NO: 4402 - DNA, 360 bp, Zea mays
  Peptide Sequence Number=SeqID_47777
atgctgtcaaaaacattttttgttacatgcatcaaatcaatgctgtggcaaatttccatatccttccagtacgggagtgcataccgtttttattggaaagatcttggcggcgaacatccagaggacaagcctaatttgtcaatatcattatttccatatggtgacaaacaacctccgggtactgtcctgtgcagttattatgtatgcgaatggtgtcgtgtcaccttccattacatggtcaatcgtgaggatgttcctaaatccaaaatcaatgctgaatggttagaaagagatatggtttccgtcggcgttgctaaggttgcggtgcaccacaagcggttcctggaaccacctgtgtag

SEQ ID NO: 4403 - DNA, 621 bp, Zea mays
  Peptide Sequence Number=SeqID_47778
atgggtatgggtaggaggggcaggggcttgcctcaccgcttcgatggcaagcgcaagcgtgccccaagtcctccttcgaaggattttggtgacttggagtactcggaggaggcttcctccgagtatgatcgatcgcttgctcccgcctccccggtggcgtcgtccgaggactcggatgactccatggggctgtccgccgtggcccgagcatactggcgctccatcgagcatgctgggctcggtggatcggatgactcggaggaggtctcctcggaagaggtggactcctccgactcttctgaggagtggagcggcggtgaaggtgacggcggcgaggacgatggcagcagcggcgacaacgacggcgagggtggtggaggcgacaacggcgaggttaatggcgacagcaagggcgacgacaacagtgattgtgagggcgatgttgacagccggggcgacggcagcaagggcgatggtgacagcagcaagggcgacaacgacggcggcaagggcgatggcgacgatagcaaaggcgacggcaagggcgacggcaagggcgacggtgacggtggcaaggggtgggagaggctgactcataatgagtcggcttcaagtttgtga

SEQ ID NO: 4404 - DNA, 372 bp, Zea mays
  Peptide Sequence Number=SeqID_47779
atgatgctggtagactacacaatggtactcgatggaccaagtgtgtcggtcgaaggcccgacacaacaagttgtcgagagcatcatggaagtgacacccgcgagcggtgtcaagagtgatgggtctagcgatccacccctccggctccgactcctccgagcgctccgtgtcgtggctcgaactgccaccgacgtcgtcgtcgtctctgtctccgtctccgtcagggtctcctccagcagtgggatgcactgtggtggcgatgatgcagtctctccaggtgactggactgacctggcaccgtatgacgcagtgggcgctccgccaggtgagaaggcaaaaaggggatcacagacttacgtgcagtgcacctga

SEQ ID NO: 4405 - DNA, 282 bp, Zea mays
  Peptide Sequence Number=SeqID_47780
atggcgcttcctgttgacgtggctggcctgcgccctaggttgggcgacgcggaggctcctccgaagccgaggtcgagtctgtcttccatggccgaggccgagcccgagcccctgggtcgggcgaggcggaggtcgttcggcagaggcctgggcggagtccgagccctgggcccgagtccgagccctgggtcgggcggagcggagttcgccgtcttccgggacctagcccgagtccgagccctgggtcgggcggagcggagttcgccgtcttccgggacctag

SEQ ID NO: 4406 - DNA, 402 bp, Zea mays
  Peptide Sequence Number=SeqID_47781
atgagtaataggctcaaggtgatgaagaagaagatcaagaagatgagccacctcaagaggaggacaaggatcaagggggagatgaagttgatcaagacaaggaagatgatcaagaaattcagggtcaaagaccgccacacccaagagtccaccaagcaatccaacgagatcaccccgattaaggatgcattaagagattcggattgggtgatggaactgcaagaggagcacaacaacttcacgagaaatgaggatgcaaaacccatcaagacacccatgggaaccaatgggcatctcgacctcgacacgggagcgccgctcctctataattcaccggactgtccggtgcaccagcagagcaacggctccttcgcgcaatggtcgactgcacagtgcccctga

SEQ ID NO: 4407 - DNA, 1029 bp, Zea mays
  Peptide Sequence Number=SeqID_47782
atgcattgcgtccttccaccttccgagcgcccggatggggagcgcccgcgctgctttcgtcttgctgtcgttggaggagcgcaacttcgcggaagttggtaccttttagccaccactcggcttcaaggattttcatcaggcagcccggctgcatcccctcaccgatggtcacctaagacggtgaccaccaatttgatggtggggagaagcaagtcgggctgcgacctctgccccgccctcagcttcaaggatcttcatcatccttgctggggcggagggcgagctgagccggagctctacctcccgcacgggttcgtgggccaccgtctccttcagcattcaggggagagggcgctcaccggcctagcggaaggggcggacttcgacaacgcggggccaagcggccgcaagcgtcgtcggctccagcatgcctggttcgctggctcagctggctctggcacgacttccggtgccacctcccaccgctgggcggagtgtggctacctgcccgccatacgggtggctgttgcgctgcgcgcaccaggggaccgcccaagacgtcgtgcgctgctagggtggcgttcgtgttcttgggctgtcctgcccttgcttcggcacgacgccttcgcgcggaggtcggtgctcgcccgtccgggagtacttgagtggggatctgcctgcgggcaggtggctgccgtcgtcggtgctgaggtggtggcggctggagaagtcctcgtcgccgacgagatcgccgctgccatccgcgctccgggcctcggctctttggctttgatagcttgtcctcgcccctcgagtggggacgtgggtgagggccttatcgcagcagcgtctgccctgaggtcatcgctgctgctgtctggccgcccggagcggaggtcgttgtcgctgctgccggagtgggcggcggtgagccacctgggattttgtcgtcccgcaggccttctaatgtggggggttgttcgtacctgcgggagtggaaccggagttccgtttgtaatggcaccttga

SEQ ID NO: 4408 - DNA, 1266 bp, Zea mays
  Peptide Sequence Number=SeqID_47783
atgagcgatgtcacttgctgcctccgcttcctaggacagctgaactctgacctgcgcaagcttgcagtcaacctgatctcgttccctcggctccacttcttcatgatcggctttgcaccactcacctcgcgtggctcgcagcagtacccctctgccatgttctttggcaagatgagcactaaggaggttgatgagcaaatgattaatgtccagaacaagaactcatcctactttgtggagtggatccccaacaacgtcaagaccagtgtttgtgatatccctctgcgtggcctctccatggcctccactttcattggcaactccacctccatccaggagatgttctgccatgtgagtgagcagttctctgctttgtttaggaggaaggctttcttgcattggtacactggtgagggcatggatgagattgagttcaccgaatctgagagcaacatgaacgatctggtgtccgagtaccagcagtaccaggatgccgctgctgacgaggaggcaaaatacaaggacgaggaggccatccaagatgaatcaggagttgcctacgagtgggttgtcaccaagaaatcagggtattgttctaagggggatattattgcccttttcaagaagcagcctgaacaacaaaggccggatagaggactgatggtgctggggcaaggagaaccggcgagcagaggagcgcgcgcagggaactctaggccggacgagtgcaaggagcagggagctgggcgaccaagcgccattggggatggggcgtgcgcatccctgcgactagagggagagtcgcggccacagggacgcgagcacaggggcgccagggggaagacgccatgggggagctcgaccaggggcgcggtgcttcaggaaaaaatccagggcggtggaggatggcgagagtccggcaagctgacggcacagaggaagacgtcggccaccggaaatcaaagagcggcgcagtccgagctgggaggccgcggtgccatggatttgaggagcagagaaggcactggcagagaggagaaggggaaagatgaagccaaggggctgcgcagcggccaggcgaacgacgcaaggaggaagaggagggagagagaagcaagggggtgcgcgtccatggagatggcggccaggagagtgagcagagggacgccgcgatggagcttgagcagaggaaaactgcatgcgtggaagataaggcttcagagaacggcgacgcgcaggggaaaaatcaaggcgcagttggaataa

SEQ ID NO: 4409 - DNA, 168 bp, Zea mays
  Peptide Sequence Number=SeqID_47784
atggggaggctagaaccccgggcagaatgggaatcacggcttgtgggtaaactgtgcaacctctacagagtgttagaaactggttgtccccactatactcagtgctcaggaggtgatgttggtaacatggaggactttgaggagttccaggactacgatgagttttag

SEQ ID NO: 4410 - DNA, 279 bp, Zea mays
  Peptide Sequence Number=SeqID_47785
atgaggatcggtaggcacggatccggcggaggcggcgcgcatggcggttgggcgttcgggcgtgaggtgagatgcgggcgcgaggtgagatggggggcgcgatgcatgcgggggcacgaggtgagatgcggcggcgacggcgcgaggcatgcgggggcgcagttgatggatggcatcggcaatcgaacggtggggatggaggcgggggcatggttgtgccaagtctacactatcgtcttaaggaaaagtagagattgggtaataggagttgtgtgctaa

SEQ ID NO: 4411 - DNA, 510 bp, Zea mays
  Peptide Sequence Number=SeqID_47786
atgggtcgacgcgaggccgagcgcgaaggggggaagcgtaaggagaggatccaggtgtacaatgggggctggtgtgatgtcgtggccgtcggaggagtgttggagcctggcggagggacagctgtcggagctgttgagtccttgctgacgtcctcttgcttccgtaagggggctgagagccgccgtcgtcacagagtatgcggggcgccatcattgcctttctggcggagtgagccagatgggacgccggtcttgttccccgtggcccgagttcggggtagggtgatgatggcgtcttcctggggtcgggcggagcggagtttgtcgtcttccggggctgagcccaagtccgagccctgggtcgggcggagcggagttcgccgtcttccggggcttagcccgagtccgagccctgggtcgggcggagcggagttcgccgtcttcctgggcttagcccgagtccgagccctgggtcgggcggagcggagttcgccgtcttccggggcttag

SEQ ID NO: 4412 - DNA, 1596 bp, Zea mays
  Peptide Sequence Number=SeqID_47787
atgtacatgcacataaatgacaaggatgggtcttcttctaagagaaaagacttggctctcaaagccaaccaagaaaataaagggaaagctaaaatgaaaattgaggaggaatcctcaagtgatgatgatcttgatgctaatattgctttgctggtgagaaagaccaccaaaatgttgaagaaactcaatagagaaggcatcaagtttgactcaagaaagaagaagttcttctccagcaaaagaaagcccatctctaagatggactgctataattgtggagaactcggtcatcttgctcatcaatgcaacaagcccaagaagaataagttcaagggcaagaaagatgatgacagtgatgatgagaaaaaggaaaagaaatttttcaagagaaaggatgggaagcacaagagattccataagaagaaaaatggaaaggcatatattgttggtgactggctcactgacattgagtcctcaagcgagtcttcttcaagtgaagaagaaaatgatgaaaaagttgccgctatcgctggggatttctcttcaccaccaccatcaccctcatccacttctcacttatgcctcatggctaaaggtgaatggaaggtacaaattgagaatgatattattgatgatagtgatagtgatagtgatgatgagtttgcttctcgttcctatgatgaattagttgacttacttaaagaatacactcaaatcattaggaagtcaaaggctaaatgtgataagttaaaggatgaaaatgaatttttaactgccaagtatgacatagttgtaaaagctagtgatgaaatgaaagaagaaaataaaactatgtcatccactgcaaatgagctcaaatcctccctaaaagatgccaaagataagtgtgacaaattaaatgaagcaaatagggagttgaaagatagacttgtcaaagttaagaaagattatacaaaaattaaacttgactatgataatcttcttgttgcaaatgagcttttatcttgcaatatacatgaggctattaaccatgctgttaagattgatgtagcaacctcatatgcaaccactagaggaaaagtttccatagaaagcaatgccattaacaatgagttggcagtggacaatgaaaggcttagaaatgaggtcaagaaacttaagaatgaaaatgaacatcttgccacaagtgtgcaaaagttcaacaaaggccaataccttcaaaatgagttgctcatgaacactatcatgaaaaataacaagagtggtattggatacaattcttttgtgcaaaagaaagcaacaagtcaatacaaggcaacacagactcctaagcctatcaaatgctttgagtgtggaaaagaaggacactttgcccacaactgtaaagccaaaccaccaactcccttgtcaaagcactcaaggccatttgctttcaatgctcattatgttctaagaaaagtagcaaatgcgaaagtcaaagttacattcctaggtccaccaagcaagagtagacctagacaaatttgggttgcaaagtccttgattgagaaagttactggtcctatgcaaaatagggccctcaaaattgaaacttga

SEQ ID NO: 4413 - DNA, 264 bp, Zea mays
  Peptide Sequence Number=SeqID_47788
atgaccttgatcactcttgcaagaataatgattgatgagtataacacaccggagaggttgtgggctgaagctgtcaacactgcatgctacgcctcaaacaggctatttgaaagggaaatgtgcctttgggctatttctatattgttttggaactcaattaagtcaagtccaaaaggagcaaaaggagttcagctgaaacaaccagtggagcaccagttgcgggtgcaccggacagtgcccggtgcccaggctgctcagcaatga

SEQ ID NO: 4414 - DNA, 327 bp, Zea mays
  Peptide Sequence Number=SeqID_47789
atgtgccatggccatggtaacacctggggtgttacaggaggtgtgattgtctcgcctattggtgagggcaatcctaggctaaacagcatggtcaacctggccgttgtgctcaacacagagctagaccacacccttgacgagttgggcaagatgtctaaaaacaggtgcagaggtgcaaggcgtgctcagccagaacagcagccaccccaagaagatgcagctcaccagcagttgccaccaccacccccgatgaccattgagcagatgttcctgatgcagacccaagcagtccaagcaattggtcagaccttagcagcgatgcagtag

SEQ ID NO: 4415 - DNA, 435 bp, Zea mays
  Peptide Sequence Number=SeqID_47790
atgggcaagagcaagaaaggcggaagttcctcgcaccattccggcgataagcggaagcgcgagccaactcctccctcggaggacttcggcgactccgagtactcgaaggaggagttctcctccgagtccgaggggtcgccggtccatgcttctcccccagcgtcgtctgatgactcagacgactcccaggggatcgccgcagaggtgtggacctacatctgggccatcgagcgcgccgggctcgagggctcggatgagtcggaggtctcctcggacgagcagaactcctcgaactcgtccgaggagggtggcggtggcagcgatggcgagggcggcgacgacggcggaggcgatggcaacggtgacggcggcgaaggtgatggcaagggcgacggtgagggtggcagcaagggcagcaacaaggccagtggctaa

SEQ ID NO: 4416 - DNA, 159 bp, Zea mays
  Peptide Sequence Number=SeqID_47791
atgacaactaacaggccactcgagctcctacacatggacctattcggcctgatagcttacataagcatcgacgggagaaaaatctcatacccaagagatcttaaagggattcttgagacgggctcaaaacgagttcggctaaaggatcaagaaaattag

SEQ ID NO: 4417 - DNA, 660 bp, Zea mays
  Peptide Sequence Number=SeqID_47792
atggcagtcggggttagtgaggcattatacgccaaggcggtgagcccctctctattgacggggaatcgatggggacggttgatatgtgtggagacggagtgcctcgccacgtcgggtaatgatggcgcctcctgtgacgtggtcggtccgagccctgggttaggcgaggtggaggctcctccgaggtcgaggtcgagtctatcttccaaggccgaggtcgagtccgagcccctgggtcgggcgaagcggagtttgtcgtcttccggggctgagcccgagtccgagccctggggtcgggcgaagcggagttcgtcatcttccggggctgagcccgagtccgagccctggggtcgggcggagaggagtttcttatggcgcctgaggccggacttggctgctgtcagcatcactctgtcgagtggcacagcagtcggagcggcgcaggcggcactgtccttttgtcaggccggtcagtggagcggcgaagccacctttgcattaaatgcccctgcgattcggtcggttggcgaggcgacttggccaaggttgcttcttggtgaagactgggcctcgggcgagccgaagctttgtgctgatgggggttaccagctgagatttaggagtcttgagggtacccctaattatggtccccgacagtag

SEQ ID NO: 4418 - DNA, 1050 bp, Zea mays
  Peptide Sequence Number=SeqID_47793
atgaacaagacaccggcactcaaggtgccattacaaatggaactccggttccgtccccacgggtatgaacaacctccacaccagggagcctgcggggcgacaagctccgggcgactcgccagcgacctctgcagcagcggctatggtcccaggacggacgcggccaccggaaggctctcattcgcgtccccgctcaagggacgtgaaccagacattaaagccaaagagccggaggccgagctggaggatggtttccaccaccagaagctggaagaggaggtggccagccgacccatgcgggaggtagagccccggctcacctcggcctccgccacagcaaggatgatgaacatccttgaagctgagggaagggcggaggccgcagcccggcttgcttctccccatccaggggctggtgggcagaagaagccaaaccgccgcgcggtgcatgcaactgcccagcggttacaagcattcctccacttttgcccagaccagcgggtgaaagggcggacagccatgcaggcggcatgcaaccgcgccaagtgggcgcacccctccgactccaacgcgccagcctggaggcccaggcccacacgtcatgcgaccggcgcgccagttgctacgtgcgagcaactgcaccgcccctcacaccactaccgcgcctcctcgactgcggaaccagtaccgcgactcgaggcaaccctgcgcatgacccaacagtgccagccaggcgcatcggtcacgggccagttagctgcgggagaaggcgcgacggtcgatgcggccaaaaatgggccggcagtaatggcggtggcaggcgagccgaagcagcggtcacgtcgccagccaagctcatgtcccctcatgggacagcgggagaaccctctcccacggcatgaagacggtgcgcccgtgttccgttcctcgaacggctcacgcacgcgcaacggctgccccgtgaaccactcgtcccgtcgcattaactctgcggcaggacaggcggcacctttggcaggagaagcgggcgacgcttcgccttcgccataa

SEQ ID NO: 4419 - DNA, 177 bp, Zea mays
  Peptide Sequence Number=SeqID_47794
atggagcttcgtctttttactctgcagcttcagcttcggcttggtcaacctgtatctagacttcaaaaaggcaacaaatgtgccccgagaagctgccagggcacagaagtcgccatgaccagctataacttcgtcaagatcattaatttcaccttcattaatttttgccctaggtga

SEQ ID NO: 4420 - DNA, 552 bp, Zea mays
  Peptide Sequence Number=SeqID_47795
atggagcagaggattacccggtctacgttcaccagcggtcgggtgaagttcggcgaccgtggactggcttctctggcggagcaaagtccgattccttgctcggggagcttcaccgaggcgtgcacagtctcttccaagggtcgggcgtggctgggaagggctctgttggccggtctacggtggcaggggctcggtggccgcgggcacgccgtgcacggggcaaacgccggtggtttcgagctccgggggtgccttaggtggtatgccacatttttggtatacaacttaggtggttttggtgccatctacaagtcattagtgcataggtgtgccatagccatggtaacacttggggtgttacaaccctcccccttaaaggaatctcgtcccgagattttaggtagagtcctcaggaggggtgccgagaaggtagcacttcagtgggtaagcggacacattttcgcagctgagatacatggaacacatcatgaacagctgacaggtgtggtggcaacttcaattgatatgctactggtccacaagtctccttga

SEQ ID NO: 4421 - DNA, 99 bp, Zea mays
  Peptide Sequence Number=SeqID_47796
atgggggaccacgtctcaggtcgcgtgaggggatatgtccactgccaggttcactcaggatttacaaatattatgctaaagggagaaaaactaagttag

SEQ ID NO: 4422 - DNA, 735 bp, Zea mays
  Peptide Sequence Number=SeqID_47797
atggcgagagtagcgtgtaccctccgtggcaagaggctggacggtggtgtatctgtgctctcgataagttattgtaaatgcttccgcttttccgtatctctgatgatttgtaatgtctgcaagacgggtaaaacgctcttgggaagaaaaatgccgccgcgcacgaggaaaactgcgtgcaagcatattggcccaattagtgtgccacgtcatcaacttgccccaagacacgaggataacagtagtgggagtaatgatccgatcggggatcttgaagtgcaaattaatcagcttcaaacagaactccgacgcaggactgacatatgggtcgcggatggcgacagaatcaatgaattgagaagcgacatctgccgcctgcaagatcagctcgcggatcgagatttagcgctcgactgggcggttcactctcgttcgcttgcctgggctaaggaggcaaaagctcgagcccgagtagaagagcttagctcagctattgataacctgcaggcttattgcaatactctacatgaagaagttcatgtactgtattcacaattgcaccccaatgtacctgcggatcctgtcgggacagaagccgaaccttctcatgtagcgggagaagcttttggtggcgaactagacctttccaggccccctccctctatgaagttggtcgatgagtggtctgctacgcccgacagcgaggctaccaggagcaacgggaagcaggagtag

SEQ ID NO: 4423 - DNA, 96 bp, Zea mays
  Peptide Sequence Number=SeqID_47798
atggaggccaggtacaggacaaccgtgctagggaacaacactgatttgatgccgttttggagatgcttggaagaagccatctatggaattgtttga

SEQ ID NO: 4424 - DNA, 870 bp, Zea mays
  Peptide Sequence Number=SeqID_47799
atggtgaccgcgtcaaaaaaggctggcccctcggaagggttcgacagccgcctcagagcactcaggctccgcgcccactactggtcagaggttcgaaggctgtccccttggaagggttcgacagccgcctcaggccactcgggctccgcgcccactactgatcaggggttcgaaggctggccccccgaagggttcgacaaccgcctcagaacacgcagagcgagggatgactctgggtatgtccgatacatgaccgaggctcgggctacgctcccgagtcggcagggccgaagtgaccgcagtcacttcgcccctccactgactgacctgataggaaaacatcattgcctgccctgctccgactgctgtgccacccgccagggaagctccgcctcgcctgaccccgaggctcggcctcgcctcgacctcggaagacggtctccgcctcgcacgaccctagggcttggcccccgcctcgacctcggaagacggtctccgcctcgcctgaccccagggctcggactcaacctcgacctcggaagacggtctccgcctcgcccgaccctagggctcggactcaacctcgacctcggaaggcggtctccgccttgcccgcccccagggcttggactcaaccttgacctcggaggagtcaccgcctcgcctgaccttgggctcggaccgaccacgttactgggggggccctcgtatgagaaggtggccgcgcgggaggacgggctgacgagcaggctctctccctctctcgcgaacgcttgtaacccctactgcaagcgcatccgccctgggcgcaggataacacgagccgtgggaccccccggcgtcgaaacgccgacatcaccgtacgcctaa

SEQ ID NO: 4425 - DNA, 390 bp, Zea mays
  Peptide Sequence Number=SeqID_47800
atgtatggctgcctcaaacttgttgattgcaccctgtccaaggatggagttttatggggtggcctcttcactaaaaccacaaagtgggttgttggccttttgaagctgattagggttgatggccatgtgtttgaaggcatacatgaaaattatgttttcttggctactgatgtcaacgaggactttgtgcccgtcccaattgctgatgttgtggttgatgaccatggtgtctgtatgcgaggcacttcacaaattgacatcccttatgtcaaaggttatgaagatgggcttgaggtagttgttctccgtcttttgggtgtggaggtggtagttggagggtggggtggagctgtgggggagggggagttgcaacctttcttggtgtggtaa

SEQ ID NO: 4426 - DNA, 342 bp, Zea mays
  Peptide Sequence Number=SeqID_47801
atggatctattaacttctacactcgcagccaaaatgtatgttcatacagtgggaactcctgcatacattgctcatgatgttcttctgaagaaggaatacaatggaaaggaattactgacgttacctatacagaggatcaccatccctgagataagaaaccatccatggttcttgaagaacctcctagctgacctaatggatgatagcatgatgacagctggttcacgtggactcaatcaatttctgaatgatgacattgacctcgacgatgacatagaggacctagactcagatgccgatcttgacctggaaagcagtggggagatcatgtatgctatttga

SEQ ID NO: 4427 - DNA, 807 bp, Zea mays
  Peptide Sequence Number=SeqID_47802
atgggatccagactgcaagcgccgcctaaggttttggattcgagcaggggaggcagaatggggatcaggggaggcagattggggatcgtgggcagggaggagattttcaaccagccttttgactatgagaactgtttgagagataataggtattgttctcttagcccatttggttttctcccaagtctcaggcatgcccacgaaggaatttattctcaattttgtcacttcacaatcatgcacaagttttgtggtgttttgaattcttttgtcaagcgaacatccaatggaaagcatgtgagttcattgccaccaaagcccttgaatagtgctgcagtcgtcgcgcggtctaagcctagtgttactccaaaggagcagtttgttactgctcggcggcaagatttgcctgtaagttcaaagcagggagcaggcactaagtctgagaaggataattccacaatattagataaggttggcaatggtcctgttgtcaaagaacaatcagttgatacctatgcaagcaaaagtaaagctcaaaatggaaaggccatgcctagtaatggtggatcgctggctaacatgtggggccgtgcatcagcaaaacctatgcctccaagtaccactaattctacagctgtagcaagtgttgcagctactgctgatgcacaaatttgtgcgaaggaagaagcagatggaaatagcagcgatgatgaacatgggataaagtacaagaggggatccactaatgcaaataacagaaagagaagagtggtatttgattattcagatgatgaggaagatgagtag

SEQ ID NO: 4428 - DNA, 69 bp, Zea mays
  Peptide Sequence Number=SeqID_47803
atggacgagtctggtgtggtatggcaattagtgttttgttttcaaaaaaaagaaaaggagatcaggtaa

SEQ ID NO: 4429 - DNA, 471 bp, Zea mays
  Peptide Sequence Number=SeqID_47804
atgggcaagagcaagaaaggtggaagttcgtcgcaccattccggcgacaagcggaagcgcgatccgacccctccctcgaaggactttggcaatttcgagtactcggaggaggagttttcctccgagtccaaggggtcgccagtctacacctctcccccggcatcgtccgatgactcggacgattcccaggggatcgccgccgaggtgtggacatacatccgggccatcgagcgctccgggctcgagggctcggatgagtcggaggtctcctcggacgaggagaactcctctgactcgtccgaggaggggagcggcggtgacggcaacggcgagggcgacagcgacgacggaggcgatgatgatgctgacggcgacggcgacgagggcgacggcggtgagggcgacagcaagggcgacggcaagggcagcagcggcagcagcaaggccagtggcaaagcgccactggcttag

SEQ ID NO: 4430 - DNA, 624 bp, Zea mays
  Peptide Sequence Number=SeqID_47805
atggcgagagtagcgtgtaccctctatggcaagaggctggacggtgatatgccgcgcacgaggaaaaccgcacgtaagtccactggacctattggcgtgcctcgtcatcagttggctccaaaacatgaaggcagcagtagcggcagcaacgatccaatcggagacttggaagcccaagtgaaacagcttcggacggagttacatcaccgaaacagggtatgggcacaagatggtcagcgtataaataagttggcagctgacgttagacgcctgcaagacgagcttgctgaacgggatttggcggtcgattgggctgtcaactcacgttcggttgcttgggaccgcgaagccaaaggtcgtgctcgtgtggcagagcttagtgcggcccttgacaacttgcaggtgtactgcaatactttacatgaggaagtgcatgtactgtattcacgactgcacccggatgtgcctgccgaccctgttgcaatgggagccggaccatcagggacatcaggtgaaggacctgatggggagctggacctttttaggcctcctccttccatgaacctagctgacgatcggtctcccacggcagaaaatgaagaaatcaaggacgacgaagactag

SEQ ID NO: 4431 - DNA, 402 bp, Zea mays
  Peptide Sequence Number=SeqID_47806
atggaggtgttggatgagctcgatgtcgttctatgccgattagagccagatattggatgtaatgagtcaacagatgttagtgatgatgaggaagacaaggaagtagaattgaataaaaataatgttggcgatgggatggaagatgacaatacaattacatgccataaaaaggatgagcataacaccatgactggatgtgaacatgcgttaacattaataacaactggtaaccaggaggacaacatgagaattccacaagaggttggtgatacaagttctccgtgtcacgtagcacatgaacaaatggaacatattgttgcatcctcagaagctaaaaagaagtggaaaatgaagaagccgatgagcatatggaattgggcgaataatttgaagtgtgactaa

SEQ ID NO: 4432 - DNA, 1137 bp, Zea mays
  Peptide Sequence Number=SeqID_47807
atgaagtctgttgatcgcccgcccagtaatccaaaaagattaaccattgaatccagtcaggaggttttttcaattgacatttccagacgtacaagatccagcatctcagctcgccaagatgatattccacaaaatcaggagcagaatgagccacaaccagccccaatccatcgtttttgcagaaaggctttagcttgtcgtttaaaaagaaaaccttctgctccatccacactgtccgacgacgatttcatggatgctccatcttttaagcgccaattcagatctgcctcaccttctccttcagaacaaatcagtgcaaagaagttaaaaaaattgaatatccgctgcattccctatgatgttattgtatcatcttggataatgagcgatcggcagcgcgatgctgtcgctaggttgggattttctagtatatttgatttgcgaactgatgccttagagagcatatcactcatcaggtggttgatggataaattggatccacatgacatgaccatacgcccaggggctggcaaggaactgaagataacaaaagatacggttcatctgattttgggtttgccatgtgctagaggaggcaaggagtttactgattggtacggtgaagtggatgctgctgcaaaactgagacgtgatctcaatgttggtaaagaagaatttgatgttgtcaagcttcaagacaagatagtgcttggcaatgatgatgagctatcaattagatgcttttttctgattctattcaatcgacttctttttccttctacttcttggggcattacaaacaatgaggtactcatgacttcaaacatggcccgaatggctgatattgactggtgtcaactagtttacacggacttgtgtgatgctgccgcacgttggcataaaaggaacaaaacaaacatcacagcaacaatatatggatgctcactcattgttctaatttactatcttgatcacctacatcaccctgcatctcctgataacaaatatggtactccccgcattaagttttttgataatgagaccataagagagttggctaggggtgacagaccccccccccgtaaaactggtgaaccattcggctatgcagagatgttcaaatattattactgctaa

SEQ ID NO: 4433 - DNA, 306 bp, Zea mays
  Peptide Sequence Number=SeqID_47808
atggatgttttgatgattaggtaccttggagaggaccagcaaggacttgggaaaggcctaggtgttgaggaggaggagcaagggcgcccacaacaggaaggagatcatgtccgactcggctgcgactcgatctcgggttccaggaccagaccaaagaatcaaatggacaaggacaaggggcctaagcttaacgacgatgagtgtgtctctcagatggaattgaaagagatgatgcgcgtgatgactgaagcttttaaaaaataccaggactctgcggcgacatcctatgagcagcttgatcgatga

SEQ ID NO: 4434 - DNA, 951 bp, Zea mays
  Peptide Sequence Number=SeqID_47809
atgtcgccgtcacatgaggactatgtcaccgtcaccgagaggcctggccatcactgtaacgccctgaatttgagggataacggtcagttggcggagtccgaaggagttgcaggtgaagaccctgagcagcagctgatggctcgtcttagacacaccgcacggaagtcagtcattcctttctttccttctcgtctcgcgaagcgtccgctttgtcgtccggtgactggtcagtctagccatttggagaggctgcaccacctcctgcacgaggagcaggagcgtcggcgacaggagttggagcaacagggctcttcttcctcgcctcagcaggaggttgagtctgtgaggcgctgctcttctgtgcccctgctggaggcgccccctgcaccaccactgggcgtcccggccgctggagtagctgttggaggagaccccgacgacggaggcgacgacagcagctcgagctacagcaccgacctttcagaggagcaggagccggatggatgggttgctcgacccatcactcgtgacgccgcttgcgggggtgcgaaggtctgctcagagcattatcctatctctaagcgggacccggctgaggcagccatacaagatgccacacggcgtgcgctttcgcactactactcagtgttcagtggggttgccgatggtcttgacctgaggtattacccccgtcggcaacctggcagcacaagaggcatgattgtctcacctgttggtgaggacaatcctaggttgagcagcacagtcaacctagtagtcatgctaaacacggatctggaccatgctttagatgagctgagtagggctcgtgctgagattgcccagttgcgggctgagcgtgtggagcgccgtcacctggaggatggctcccccgccctcgtcgggactcagcacccgtaccgctcacctcagtgtggacaccatgcctaa

SEQ ID NO: 4435 - DNA, 1230 bp, Zea mays
  Peptide Sequence Number=SeqID_47810
atgcaggcagcatgcaaccgtaccaagggggcgcaccctttcgactccgacgcatccagcatgggggcccaggcccacacgtcatgcggcacctttggcaggcggagcaggcgacgcttcacctccgccataatgaccgcgtcaaaaaagggaccgagaaaggggatactccgaaagggatccttctccgcgaaggaatcgggccccgagccccctactgatcagaggttcgaaggctggcccctcggaagggttcggcagccgcctcagagcactcaggctccgcgcctactactgatcagaggttcgaaggctggcccctcggaagggttcgacagccgcctcagagcactcgggctccgcgcccaccactggttagaggttcgaaggctggcccctcggaggggttcgacagccgcctcaagccactcgggctccgtgcccactactgatcaggggttcgtaggctggcccccgaagggttcgacagccgcctcagagcacgcagagcgagggatgactctgggtacgttcgatacacaaccaaggctcgggctacgctcccgaggctcgagggctgctctcgcaaacccggctccggccaaaccgttgacagcgtcaacataccagcccgagaacttggaacctgactccgaccccggaggattcacgtctcgcccgagggccccctcaagcgacggacacaccttcggctcgcccgaggcccagtcttcgcggagaagcaaccttggccagatcgccacgccaaccgactgtatcgcaggggcatttaatgcaagggaaaacagcgtcgcctgccccgctccgactgctgtgtcactcgacagagtgagactgacagcagctaagtccagccacgggtgccataggaagctccgcctcgcccgacccagggctcggactcagcctcgaccccgaaagacgaactccgcctcgcccgaccctagggctcggactcagcctcggcctcggaagacggtctctacctcgcccgaccccagggctcggactcagcctcggcctcggaagacggtctctgcctcgctcgacccagggctcggactcagcctcgaccccggaagacgaactccgcctcgcccgaccctagggctcggactcgacctcgacctcggaggagcctccgcctcgcccgacctcgggctcggacccgccacgtcacaggaaaggctatcattaccctacccctag

SEQ ID NO: 4436 - DNA, 673 bp, Zea mays
  Peptide Sequence Number=SeqID_47811
tcgtcaggtcaggatgccacgcacgaagaatgtgtcggcgccagggggaggagatgacgaggaccctcctcgccccttcaggcaggttaaggggaagacggtctacttagagcagcaggaaggccgcaagaagcgacgtttggatagagcagccctagcagcagcagcagcagccgctgagcagactgagagaggtgatcagctgcagattccttcaaatcagattgcttaccgagttcgtcgtcatgcctctcggcctcgctcctccgctcctaccactcccgccactgctaccactccaccacccactttgcctgctccagtcactcctgcgccatccaccacctcagccatacctaccacctccactactccagcttccactgctcctcctcccgctcccctttccgctccacctatctcacctgcccgcttctgggagcgcgatgagactgaggtacaacctctggttgcggatcccatgctatttgatctccagcgtgctacaacggcacagctagctaggggtagggtaatgatgtatcccaagtggcgtagtcggtccgaggcggagacttctcctgaggtcgaggctgaggtcggacgaggttgtgactcctcccgaggcccgaggtcgggcaaggcggagaccttctcccgaggccgaggctaa

SEQ ID NO: 4437 - DNA, 507 bp, Zea mays
  Peptide Sequence Number=SeqID_47812
atggtgtacctatttgtaaaatgtaatttatctaaagcatgttgggattcaattgggctcttacctctaggaacaagttgcccacaaagagcaatcaatagacttaggatacaactagaagtgtcatgtgacatcaaggttgtggagtatctggaaatgcaagaaattcatggttgtttgacaatgtgcccctttgatggacgattggcaaagaatgctcagatttatgctatttcatatgcgtttagcgggtatctgggttatccgacgatttttttactcatacagaggtggtaccctttacccacaagtcatgttacccatctgccaagggatcgcgacttcccatacacctctaccgaggaggcgaggcaagaacatgagtgggtaaaagaagtgatcaagggcacaacttgcctgggacttgagataccagttaccagggtgattcttcagatcctcgtaacctcactgctagtcgtagcaatacaagcagacatgatatag

SEQ ID NO: 4438 - DNA, 155 bp, Zea mays
  Peptide Sequence Number=SeqID_47813
ctgaactatctccgccactggaacagtacgatcccctagctgatccagaaacaaaggaagcgctggacattataaacatggcagactccattattgatgaagttgtcgacaaacttttaaacgaagttgcggaaaaagttctcagagaagaatag

SEQ ID NO: 4439 - DNA, 1815 bp, Zea mays
  Peptide Sequence Number=SeqID_47814
atgtcttcgcctgagctccgggagtcttcggcgcgaatgctgaaggttaccaggggtcgatggccaaagaatgttctgatcccccgcatggctggcgaagacttttttacgtctcgcatggctcgtgacttgaagatttttccttacggacgaaatattgctgctgttgtgtcggcagtgacggagaaggaccgtcaagacgctgcgcagaaacgtcaggcggttgttaggatcggggatcctttccgcgaggcgaagaaggcacggggaggcacgaagtatgctgccccgggcagtagcaaaccagtgccggctgtgaaaccggccgcccccaggcccagcaaggcttcaacgggtgtgaaggctgctgcttctggcgcgggcaagccaccctcaggcggacccgcgaaggggcaaaggatgccttcgccggctcgtacggacgaggcagcggtgcgcgttgccgacttcgacacggacatctgtgtcggggattattttgttggttgcgagtatcatgggtttttgtggcaggcgactgacttcgccgaccatgtcgcgtcgggtgctttgactgcggagtttgctaccgaggtcgagcatctccgggcgcagcatgcggatgctgtttgggagaagtcggctgcggaaagtaaaaaccacaggctgatggagaaggtggccgctatggaggccgagaagggggatctccggcgccagctggtgaaggagaggagggaggcgaacaaggccatcgctgatgcgcaggctgcgcaagccgaggctaaagttgcgcgggcggagggcagtctcgcccaccaacgtgccgaggagctggaggcgaggctcaacgccctacgcaaccgcgtgaacaaagccgaaacctcgacgcgcgcggaggtcgagcggacgcatgcgcagttcgtggacgcgtaccgggagctgggtgtgcagaccgctgacttcgaagcgcccagccaggaagcgggccttcacttccttgaatggttgcaggaggagctgggggtgctcccgacgatcgtgacgggtctcatgtcctttgcctccctcgtcacctgcgagggggccgtgaatgctttatcccgcgaggggtgcaggcatttcgaggtcttcgaccaatcggacaaaaagtttgaacgtgaaatcttcaaggtcgaggaccctatgctgaagcagtcagcgggggcgctcttcgacaggatgtggggcccgcacggccgagatacggtccaggagcggtccgaccgggcaatagatcagatggtgcatgccaaaggggttgaggaccttggtggtctagacggcacgctgtccgaggccacaggggcggaactggtgccgccatccgatgccggcgagggcccatcattgacccccgcgccgactggagccggcgaagactccgcaccagcccctgcgccgacgtgtgaggacgcctcgaaggcggtggtcgaaagagctgccgaagaccccacggcggtggccgagccttcgcaggttccgacgtttgggcctgcgcaagcaaccactaccgacaatactgattttgcggcggagacttcaatagtagtgcctgccgatgttagtgtgcctagttttatgtctgaatgttttgagtccgacggtgagtctgcgagtttgtttctttggacggaggagtcctcagatgaggtcttggattattttgttgtgttggatgtggctgcggctgagacttcaccgcgtgtggagggtgccgaggatcttcatggtgcgagtactgggtgtaggcggcgaagggtggtgggaaaataa

SEQ ID NO: 4440 - DNA, 873 bp, Zea mays
  Peptide Sequence Number=SeqID_47815
atggcggcgtcccaaacgaaaaggggaaggaccgaaggaatcaggcggcatcgcccaggagattgggctaggagaggagcacccgcttgccctctacgcagagctaccggatctccgcctcggacagctgcacctggcgccctcctcgcgccgccaccggcaaccgctgaatcctcggtggtggagttgttgaaggacaggggcatggcctccctcgattcgaccaccacccggtgcctgcgtgcttggtcgcagttgccgccgttgaggccgtgctcggaggaataccaagtccctgtcgcaaagaacgtgggaggaagaggtaggggagagataggtacagggaatcagcaaccacgggagggcggtaatcctgctcaccagagttggggaaggggctcgggcgggggcatggctgcgcccttgttgtccttcttcttgagggactcgagcgccgcgaacaacttgtggcaggggaaggggccacaatggcatcctcgtcctcctcctcctcaacagccatcacctcctcctctgctcctcccttgcgagacgacgggcccttgcgcagagacgacgggggcaggggaaggggcgcccttgcgagacgacgagcccttgcgcagagacgacgagcccttgcgagacgacgttggcaggggaaggggagccgaggacttgcgcgtaggagggcaaggatggtgggggcgggtgggggcgaggacggcggagagcggacgagggcgagaatggtgggtaatcccgggaatggcgcccttccttcgatggagagtcgggcgagggcgaggatggcggcagagacgcgggcatggcagaaccaccaacttgtgcacacctacactaataacttaa

SEQ ID NO: 4441 - DNA, 384 bp, Zea mays
  Peptide Sequence Number=SeqID_47816
atgggcatggtgctggatgcatctgcggccgatggcaggagggtcgagctggatggggacatgcggtggacatcacaggttggcccctccagtgatccatctcaaacactagccagggctagaataatgaacgatatgaagatcagatcaagtagcattatatatgtcaataagaagcagaggagagaagcagtccgcatcgcaggagacaaggacttcacttgtttggccagttcaggacttcaggattgtagcgatgaggcaggtggctgtttagcaggggctgaaggccgttggtgctgtcagaatgtttttttggagttttggtggatgatgctcagtgactgcaatgcaaaggatccttctgttttgtctactgaatga

SEQ ID NO: 4442 - DNA, 1560 bp, Zea mays
  Peptide Sequence Number=SeqID_47817
atgagccgccgcgagccggacacctcccccttctgcgacctctccaacctccgcaccccgagacccaaccccaaaaccgtacctccctcgcctcagttcttcaccgcctccaaatccgccctccaggctcccactccgacgtcactccgccgccggaggcctggcgacggcgtccctaccccgacgcccctcggccgccgcctccacgccctcgaggtcgaccagtcgcgctccgcccgccgcgccgagtccggccgtgagcgcgccctccgtaccttttccgcctccgcctcgtcatggctatccctcctcctacgcgacccctccgcctgcgggtgcttcccagggttcaccggttccgccgcggccgcgcagccctgggctacggggaaacgcggcgcgctcgatggagaccgggcgcgtggggggcgcagcccgaagaggtgccgcggtggtggtgatcgcggcggagagaggagcaaggagatgacgccggcgatggtggccgcgttaagggaatctcttaaggatgcgtgcagcctggaggatgtcacggagaggatggagaaacacatgagtaagggcgcgtgtgaggaggctgttgtcattgccactttctttatactttctgttgaaaatcctcatgcttgggtttctgtgaactggctacgggacgatgggagggaggccgtgggggcggaggagctggtcggcagcgtggcagcgaactggccggcaatgatggtggggacggccggagccacgccagagatggacgcagaggcggggccgtgcccaaagtggcgtccgcgctcaggccgtaggtggcatccgcgccggcgggcaatatgctcaaagattggcatgactgttgaaagttcatctcagttagacagaagagcactgaactgtttcatcaactattatttgaatattgatatttcccccttcaaggaaacaccaactggatgccgaaaggaattgttcacctgtcaccaacttgatactatatcagatatcgctggctggccatccagcgagatggggaaagtactctccgatgttcttcaggcagtttcctatgtcaaagcctaccttgtgaggaaggcttcgaagcaagaagttgcacatataagatctagactgcagaagtcatcttcacaggttgatgatagtactgctacagagtattccaagaaatgctgcgagaagctggtcgctgctggtgctgtagatatattgctaaagcaaatatatttgctgaaccgtgggattgctgaccaggaggtcttgaagcaagtgttccttactctcaggaacattgctcgatattcaaatcttagacaggtgttagccagcactgcagaatctgttgaaatcatcttccaggaattactgaggaacaaagcagacggattcttcatcgcgtctgatattctaaaaagcctatgtgaatccaaggaaggccgtgaaaccgtccaagcgctgagtcacctcatcaaaaggctgcgcaatctggtgcatgacctggaaaagaaggtagagcttgataagaggtaa

SEQ ID NO: 4443 - DNA, 108 bp, Zea mays
  Peptide Sequence Number=SeqID_47818
atggcgcaccggacagtccggcaggaattagccctcgtggcgaggtcaatcgcgcagcgcacggttgataaccagaggagaagtggtgctgcgattgcggggttctag

SEQ ID NO: 4444 - DNA, 726 bp, Zea mays
  Peptide Sequence Number=SeqID_47819
atggagcaccagagctctgaccacgatgagctaacacacgcggactatctgtcgtacaaggccggacgcctactgacaaacctcgcggacgtcaacgttatcgacgctttcatcttggggaccacagacaaaaccctggtgcataagctacgacagaatagcttgcagacggcaaaggagccttttgacattgcaatcagccatggatcgagagaggaagcagtgggagccatcttcgatcgctgcaagcggaaggttgtacgcgacaaagaattggacaagggtgtcaacagccagctcaacacagaagggagaggaagccgacgacagcgagtcagcgtgttgatggttgtggcaagccagacggaaagaaggcctctaaccgaggaaaccaccgaccacttcaaaaaaaactcctcgaagccccatgtacaaaccattagcatccggttcgacatgcctataaggatcgagagcaagttcccccaagcaccaaaacaggaagacttcgctgatcagctgtatcgtggagtcattcacatgatcactagagggtccagcgtcgactttgacacgaagcgacaaaagagggaccactaccgaagcatcaaccacgtcgccatcactgggcccagtcgtgcaaacgaagtggtcccatgtgccgctgaccttcgacgcccagagatgttgacctacgcggcgcaccccacgttgacgccatggtaa

SEQ ID NO: 4445 - DNA, 330 bp, Zea mays
  Peptide Sequence Number=SeqID_47820
atgcccaacacattgattgagtacttatgtgcgagaagtgcaaatcagagacaaaggatcacctattcaccccctctaggtgctctcactcacatccaagacactgttcatgatccaattatgactagaatgaacaacatgcagcagagctttcaggataatatgggggccttgtccagtcagtttgacaacctgtccacaaatgaaagcatccaggatatacgtcagaggcaacaacagctccagcatgacttcgggcagttctcctctgtcttcgacacttttagcacccattactacagcatgtaccctccacctagtgatcagtga

SEQ ID NO: 4446 - DNA, 393 bp, Zea mays
  Peptide Sequence Number=SeqID_47821
atggccctaaagtctggttgtcagataatacagagactgaatattgactgtcatacactgaaatatcccaggattcagtccccctcgctgccggtgatccgcgtgcccggattcgcgtcggtcgccgtgattcgtgcttggcacgccgtggatattcatggggagccactgccaatcttggctggtccgagcatcagagtggtcgacgaaaacgaagaagaagtagaagttgaagaaacaagagctacaccaccaccacctgaagaaccacctgccggggactgcttttattttgacatctgtggagcagagcccgactcacctataacacaaggcaagccctggtgcatttgccacctccttgctaatttaaaatctttctcacttgcttga

SEQ ID NO: 4447 - DNA, 543 bp, Zea mays
  Peptide Sequence Number=SeqID_47822
atggccgactcaccccatttcaacctacggtgcacgactgctaggtatactaggtgcgaaatgaaattgggaagaacgcgaacatggggaagggactcataccgtcaatttcgcagtgcagcgccctgcccaccgagatgcgcggatccgcggcggaggaagaagcacggttctggacccgatcttaggctttgggcgtcgacggggaggagagttcacggcggcacggattatctggttgtcgggtcaccgattccccacctgcgtacggcctgggctccgctgaccggtgggccccccatgccaggcggtagcgcgctctgtggaagagggatgtgcttcactctgatatcagctgtgacagaacctcccaagtcattaggcccacctacagttgttcttgtccatcggacttcggacaaccctgcaggtgcacctgatcacttgacaagttcggtatctaaattctttaccttgcccaagagcgtttcacccatcacgcagatattacaacacatcagagaaacgagtatgcggaagtag

SEQ ID NO: 4448 - DNA, 594 bp, Zea mays
  Peptide Sequence Number=SeqID_47823
atggcgatggtgatggcgatggtttggacgggcttgaagcggtccttcctctccgcatgtgtagtagccagtaggctattcaaatggttgagctgcagggccatcatgcacgcgcacgctgccggttgggttgtgtcccttccccggttcccccaccagcttcctcgtccgatagcgcctcgtgaccaccggtcgtctccgactgcgagccgcggtactagccccgcgccgtcccggacgacggccaccttcccgcagcgccccggcctccccgtcgacggcgccgagctctctgccacgacgctcgagctctctggcacggcgctcctctccctgctcggcccttccaagccgtacagagctctctcactggtgcccatctcactggtgctcttacctgtagccgtcaatcttgagcaggtcgtcgtaggttccttgcccgcggccatggagaaatctccaagatccattaatatcggatctggacctgctagggccgacacacgcaaagatgtcgtagaagctgcagatgggagtaggcgcacaagcatcgtcggcacgagcaaaattgattatggcactattttggtctga

SEQ ID NO: 4449 - DNA, 351 bp, Zea mays
  Peptide Sequence Number=SeqID_47824
atggaggctcctccgaagccggggtcgagtctgtcttccatggccgaggccgagtccgagcccctgggccgggcgaggcggaagtcgtcggcagaggccagggcggtgtccgagccctggggtcggcctgagtccgagccctgggtcgggcggagcggagttcgccgtcttccgggtcttagcccgagtccgagccctgggtcaggcgaagcggagttcatcgtcttccggggccttagcccgagtccgagccctgggtcgggcggagcggagttcgccgtcttccggggcttagcccgagtccgagccttgcgtcgggcggagcggagttcgccgtcttctggggcttag

SEQ ID NO: 4450 - DNA, 2202 bp, Zea mays
  Peptide Sequence Number=SeqID_47825
atggaatgcaacaaagatgaggcccaaagggcgaagggtattgcaaagaagaagtttgaagcaggggacttgcagggtgccaggaaattcgccctcaaggctcagactctctttcctgcgcttgagggcgttgatcaaatgatcgccatctttgatatctatcttgcttcagaagggaaggttgctggggagaaggactggtactctatcctttctgttcccttgaacgcaaacgatgaaaagatcaagaaacagtacaagaagttggttcttcagttccaccctgataaaaacaagtcagtgggcgctgagggtgctttccagatggttcaagaggcatacacagtgctatcggatagaaccaagcgagctgtatatgaccaaaagaggaatgtgaggacattccaacagaggacagcacaatcaggtaaagcaagcacggtccctggtgcatccaatggcttctataattttgcagctaatgctgctactgcctccaagtggacagtaaacaagcaaacagtgggatcagcaacacatgccccatctgcaccttcaactgctactcgtgcacctgtggcaaagcctgatacattttggacctcatgcaacaaatgcaagatgaactatgagtacctcagggtgtatttgaataaccatcttcgctgccctagttgccgtcagccattcctagcaaaagaagtacaaaagccaccagcagggaacgtggtacaagattcaaacatcagtggtgctaatcaaaacacaaccactaatagaaatttgcagtggggtccattttcaagggctgctggtgcagctagtgccactgcatcgtctgctgctgctgctcaagctgctaatgtagttcatcagacatatgaaaaagttaggagggagagggaggaagcacaagcagcggcaagaagggaagaggctcttcgccggaagtacaatcctctaaagaggcatgcaagcatgtcagggaatgttaatcttggaccaggtgatgcaacatctggaaagaagacaaggactatgactaaagatgctgaagttggttcttcatccaccatatccagtccaggagcaaatttttttagagtgcctggtgtgaatatatccttttccaacaacattggggcctatgagtttcaaggcgatgatggtggccccagttggaaacccaggcctctgatccacttaagtttagccaagaccttctctcagatggatcttaggggtcttttgctggaaaaaacgaaaactgagcttaaaaacaagctaacagtaataaaaagtaaaacatcccaagttgctagtgaaaaagcgagcaagaaaattgcggtcaaggaaaatggtggggataatgaagctcttggaccagaagatcctacagctattaaagattctcatgattcagaacagactggttctaatactagcacagatgctgaaaatgaagatgatgaccacttatcttataatgttcctgatccagatttccatgattttgacaagaatcgcactgaggaatgtttccaaagtgatcaaatttgggctacatatgatgatgaagatggaatgcctcgttattatgcatttattcagaaagttctttccttgaaaccattcaagctcagaataagctatctcacatcaagagcaaatagtgaatttgggcctttgaattgggtttcttctggcttcataaagacttgtggtgatttcaggattggtaaatatgaaagctgtgatatagtcaacatgttctctcaccagatgaaatgggataaagggccgcgcgggcttatcaaaatttatccacagaaaggtgatatctgggctgtttatcggaattggtcctctgactgggatgaagatactccagataatgtgctccatgcctacaatgtggttgaggtactggacgcctatgatgaagaccatggcatctccataattcccttagttaaggttactggatttcgaacagtatttcagcgccatcaggatccaaatgctaccatgaagattcctaaagaagagatgtttcggttttcacacctagtgcctttttacaggatgtcaggcgaagaagctgcaaatgtccccaaagatagttatgagcttgatccagctgctatttctaaagaactgcttcaggggatcacggaagcagtggagccaaatggaacctaa

SEQ ID NO: 4451 - DNA, 576 bp, Zea mays
  Peptide Sequence Number=SeqID_47826
atggagttgcgttcctccaacaaggaggcggaaaggcggcggataccccccatccgggggcttggaagacgggaagacccgacgcttaagggaggaagaagacatggttgccttacgaagggagcctccctcctttttaaaggcaactccccctacgtgcgcccccaagcgccgcgggccgagtcttctccaacacgctccaaggccctcccctgcgactcgggggctgggtcccgcacgtcttgcaagccggctcagggcagaagaagccaaaccgccgcgcatgggaccgggaaagggggataccccgaaagggatccttctccgcgaaggaaccgggctccgagccccccattactgatcaggggttcgaaggctggccccccgagggttcaacagtcgcctcagatcgcgtgggcccgacacccactactggtcaggggttcgaaggccagccccccgaagggcttcatggccgcctcaggctactcgggctccgcgcccattactgatcaggggttcgaaggctggcccccgaagggttcacagtcgcctcagacaccgagcgagggatga

SEQ ID NO: 4452 - DNA, 504 bp, Zea mays
  Peptide Sequence Number=SeqID_47827
atgtcccatctgatggcattgttggaagcaactaagattaccttggataaccaagaggagcttgtggttgacttgtccacggagatggtggaaaaagacttgcaggtggagcaactgtcaaatgagatccaagagcttgaggaactggtgggaacaagggagaacaccattgagatggccgggagagcgcgtcatggtcaaaatgagcgcgttcctccaccgccaccaccgcctcctactctgcaggagctaatggctcagcataatgagatcttgaggcagctagctcagcgtcagccgccacctcagcactatggtggtggtgatcatcagcgtaaccccgtggcatccacctaccaggagttcctcatgccgatttgtctctccccggcttcggggcaccaacacccgggcatgaaaataatcaccacgtgtgctgggagcctttctcacacatatgaggaaccatggtacaggatcgaatgtctcatctttactacataa

SEQ ID NO: 4453 - DNA, 615 bp, Zea mays
  Peptide Sequence Number=SeqID_47828
atgggacccttctgtcactctcatctctcccccttcttcgcgattttggttcgctccgcgtcaacaacccgagcgccatgcgtggattccttccttgcttcgcgcgagttaggccacgatcccgactccgagggctcggtggataaaagtcgagcgcacgcgctttttctcccctatcccctctttagcccgatttctcctcgccaccagaacgccaccgcgagccgtgtgaggggattcagtccgccgtcgtcgaccggtcgatttctcagcgattggaccgaggtctggggtgcgggagctccacctggtccggtgggtcacggctggaaccttgcctgggcgcatcgcgcggcggacgaccttgaatttctcgtcgtcgctgcatcttcgccgtgcgccgcggaccgggcagagcgccactcgattcccggtaagaaccttaccaacgcgttcgcaatgttatcctattcatttagtagtgttctgagcgaaggtcgtgagctgggggcgctaatggcggaatgccggcgatggcgccgccgcgtagagtcgccccgacggccggagttgggtgatgcagctgagctaatgcgtgggccgttgatcttctaa

SEQ ID NO: 4454 - DNA, 405 bp, Zea mays
  Peptide Sequence Number=SeqID_47829
atggtgaaaaattttggcagcgaaacagtgcaaatagcaatgaatgctgtggaacctgtcattggccttcacatcacacttgtattcttcaagaccgaagaaaaatggaaacgatatcagattacaaatgtaccttcagctcgtgagaagctgttctacacacagcttcggctctgcgccaaccttcgtgttcattgtgcttcttcatactgtggctctgatccaagtccgaagatacctgttaatctagggcttttgggcaaccaaacccacagccaaacagctgcatggtctagaggttctctggaggacatggttgctggagtgacttggtcgtccatcttgccaccgggttggatagtcgagtgggatcctgcctcggctgaggaggagcatgaggagtga

SEQ ID NO: 4455 - DNA, 201 bp, Zea mays
  Peptide Sequence Number=SeqID_47830
atggagtctgcgaggcttataatttccaatgcttccttcatttctggatcagctaggggatcatacggctccgaaggcggggatagttcagctgaagtaggtggctatgagatcgatggttttggttatgactatggtgctggcgaagatgaagctgtggaaggagacttccaggagttccaagactacgacgagttctag

SEQ ID NO: 4456 - DNA, 1044 bp, Zea mays
  Peptide Sequence Number=SeqID_47831
atggaaggctcttgggtcattagaacatcctactgctcagaggaggaaggattccctcacgtcttacggagttgcgcgctacgcatggggatccacaagaagccagaatatgtctggaaagaataccaagaaaacggagttgagaagtgctctatggcagtctacctgggagaaagccgaagttacccaaaccaccctcccttccaagtcaccttcatcgggcaccgcttcccagacacttgccaaaatgttgcccgaaaagcccttaaacatctatgccaaaactacaacagagaggtctttgaaaccccccttcgttacttcccacctagcaacaaaaatacccccacctggaggaaaagacttcaggccctgtcagggagagatcctaccgaggatgaccccaccatcgtttacatggccggatacctccacactctcgataaccactacgacgacctttcctcccactacatccacctaaactcccgggtggaaagcttagagcagcaggtcaaggaacttaaaaaggagaaggcgtccctccaagagtgtctcgatatagcagaaggcgaggaggccaacacttgtgaagcctaccgaaccctgaagatggattatgataagaagctaaagaagcttgcccccacgaagaaaatccaaaagaagaccaagagccaaggatgccagactgagcggaagaagaaagcctctccagcaccacctcccgccaggatagagaatttgtccgatgtcgaggatatgtccctagctagccttgatgaccttctcaaggaatttggggacactttagaaaaagagttcgaaatgactctctccccctggcagatggcttcggataaaaccacgcctaccgcctctgggattggagcagggtttcccctaagagctgaaagagaagccggtggagaagggagtgagacccacctccccgcacctccagaactacccttagatttagcccaggttctagccaaccaaacccgactcattgaggtcctcacacgaatcaagctgatctga

SEQ ID NO: 4457 - DNA, 66 bp, Zea mays
  Peptide Sequence Number=SeqID_47832
atgtcggtgaggtcgaagggtgttggcgcggaaagccgaaaacccaaacaggatggcacaggatga

SEQ ID NO: 4458 - DNA, 540 bp, Zea mays
  Peptide Sequence Number=SeqID_47833
atgggcagagagaaggcgacgaggtcggtaccttcccccctcccgctccccagcctcactgtcgccagagcgtcctgccgggaggctcacatgggcatgaggatggcgggccctgctcttgtttggtggcatggcagtggcgacaagttgcccaggcaggcacatgatggtgacaacagtggcggcgcgcccagcaatagatggctttggtggctgcggttgccaggggcgacgacgacaaccggcatcgagaaaattgccattatgaaacaccacgtgtgtggcttcgacgaattgaaggaagctgttgatgctgctcgtgctgcggcagttgcagttgcggaggctagatgtgcggcgttggtggctgagaaggaggcacgagcggcggttcaatcttccactattgccgccgataaggttcaactagtcgtcgaagctgtgaagtatcgaagctttgttgaagataactccatggtggaattcttggtggctgattttctttctctcttcctttgccgcatgtggaatagggtttag

SEQ ID NO: 4459 - DNA, 1551 bp, Zea mays
  Peptide Sequence Number=SeqID_47834
atgggcatcagtgacaatgttgcaaaagtgggtgtttgttatggcgaagtggtgagcaatgaggcggtaaggaggacaaaggaactgtgggaggatgcatatgatgaaccatatgatatggctggatcagaggttgatgtgggagcagttagcacagcaagggaggcattttactgggtgccagcagcatcagaggaggatgccaaccggctatacaagagtttgcagccaagattccttattgagcaaccttccatttgtttctggaccacatatggcacaatgccaacaactgtatatgtgttcttgaagggagaatttgataaggagcccaccagcaaggagttcctacgattgcgaacacagaggtgtcacagatcactaaagctcaacatatcgatgtccaatttatcctgcaaaagctggcagaaagtatggcacttgtattgtgaatttgcaactcggggcctcttcattgagttcaggcgcacccttagtgggtgcttcaggaaaagcaagttcctcaagaacatctcattctcatggagcgatgtgttgcatgagaaagcacttgctctcacagaagaacttgatgtcaggatgagagcgatggcatcaattacccctccagttcaagcaccatacttgttgaagtgtgtgcctgatcgagtaactgatgatggtggggccatgatttctgatgtcatattgcgcatgagaaattaccgtccccaagaaggacgttggctgacacgcactgtacttgatcacagtgggagagaatgttttgtcatccggatgagagtaggcagagggatttggcggagaggtgctgaaactcccatggcagtgaaatgggaggataggagcattgaggttcgagaaggatcatggtcatacattgccagtacaagctctgttggttatgctcctgaaaagatagtgggcacaggaacagtgatgaaagatcatcaggagaataaggtagtttggagcttatcaacaggagatacgctgacaatacgtttgggagatgaactcagctttcagttaaaaaatgacagctcagaagaggaggcaaggctgcttgtcgggaggaggttgagctacagagtaaacacagataatgcgtcgagcaacctagtcgaggaggagcaatacctgacacttgttcgtaagtcaccgtatcatcatggtgacagagcaaccgtgcttctaaactggaaattacttgctgtggagttcttacctgaagaggatgcagtttttgttcttctcctatgcatggtgattgcacggaccatgacagagatcaggagagaagatgtggctgggcttttagtgcggcggaggataagtgaagcaagggccgggcagagagactggggttcggtgatgcttcctggctcgctttcaccggatcctcatctgcagccttggtaccggaacgcaacgcaggttttgagctctgcggagacaggaccagtgctcacaaagtactcacctgctgacgggaaggacatgttgtacaggcaagctcttataccctga

SEQ ID NO: 4460 - DNA, 77 bp, Zea mays
  Peptide Sequence Number=SeqID_47835
ccttccaggcaacagcatcgcgcactctctcttctccgccaaactccaaggctccaagccgttttccgtccgtgcaa

SEQ ID NO: 4461 - DNA, 417 bp, Zea mays
  Peptide Sequence Number=SeqID_47836
atgccgcacccttttccacctcctattgcgcttgactgcctcgccggcgacttcaccgccgcgagcacccgccaatgcgccgtggaccggccaccccaagcctccaccggtcaaattgaccccatcttcgtgaccccttacccccgcccgtgccttgccaccactcccccgtcgcaaaaccggacccccggcggagaaccgccgcgggatttcactggcggtcgaaccccggccggctccctctcccccatcaccgttccgcgccgtcagcccccctttcctctggcatgtgggcccgcaccacgacaccgtccccacgccgtctcccccgctggcgggccgagtgggccgcctgcccacgcggccgcgtgcgcgctcgcgctcggctgggccaaaaactccccccggcccagctag

SEQ ID NO: 4462 - DNA, 729 bp, Zea mays
  Peptide Sequence Number=SeqID_47837
atgttccaggagtactctaagtcttcgccggatggcattgatagcctgtacgcgctgggggatgccttcgacttgacgatgaatggaccctcccattttggctccagcttgccccgtgactgtccgggtggtccggacgagtatgaggtctcctttgttgaactctcttgggacgaccgcgttgtcgtgccaggccttggttggagcttggtatttgttgagggcctgcagggcgaagacgcggtctccatcgatgagggcgacccatgctttatatcctacggcgtcatggcctccgatccgtataatagacgaaaaggtgtgaatccggttgcccggcattcggtcgtgttgagggcccagactacttcagatagttggtcggcccatttacccttcttgtcgtcgagaagcctttttcttgatggcagtgaaaatcttgccattggcgcgctcgacgacgccgttggattgtggatggtataccgaggcgaaggcaagcttggtgccgatggagaggcagaagtccctgaagtcctggctgtcaaactatttgtcgttgtcgactgtgagctcggacgggactccgaatcggcaaataatgttttcccagaagaacttctgggtagtcttcgacgttattgtgaatactgccctggcctcgatccacttggtgaagtattcgacggcgatgaaggtgaacttgaggttcccttgagccgtaggtag

SEQ ID NO: 4463 - DNA, 993 bp, Zea mays
  Peptide Sequence Number=SeqID_47838
atggagtcagcgggtagcatccaagaggaggcggaagcggatcaccacttgcgtgtggagaaggcccgtggctctctacagagttactcgaccatggtgcttggccctctcgtgggctaccctttgcgtagcggcaccaatgaggattcgggaccttgcgtggttccggatacctcgctccatgatgacacatctaatatccgtgagcaaaagcattgtctagtcttagatgagtataattcttttgctatgaaagaaaatgatcttgttagagacatgtattctcacttaaatcttgtgattaatgagctcaactcttttggtattaataagctaagtgatgtagacattgtgaggaagatcatctccctcctaccacaacaaagatatgggatcatcatcaccaaccttcacattcttgaggacttgagccaaatgaccccgacgattgtgattggaaagattgcagcatttgagatgtcgcggaaaatgggtcaagaagaggagctaacttcttcaaagccatatgcttttgcatgtgatgagcacaaaaggatgaaaggcaagaagaaggctccaagctcaagttcctcaagtgaagaagaggaagaaaaagatgaaaatgatgatgaagaaaatgatcaagcctcaacatcatcttatgacgaagaaacagtccgatgcgttagaaaggaaaaaagcagaggaagagaggatgcttcacatgtggggataagggtcacttcagggacaactatccaaatatggtcaaacccaaaaagaggaggagcaaagacaaggcgcttacaagtgtcaaaacttgggatgattcttcaagtgaatatgatcctccaaggacttgcagccatcgctcttcatcacactcctcacgatcatctcacaaatgccttatggcaaggggtaaatgaagtatcccatcctctggtgatgatagtgaagatgagtgtgatggcgagggaaagccctccttag

SEQ ID NO: 4464 - DNA, 729 bp, Zea mays
  Peptide Sequence Number=SeqID_47839
atgtggggccctcagggccgagagactgtccgggagaggtctgaccgggcgatggatcaaatggcgcatgacgaagaggttgaggaccttggtgatctggacagcacgttgcctgaggcgtcggcggtggagctagtgccgccatccgatgcgggcgagggcccctcgacgaccctcgcgccgactggagctggcgaagaccctgcgccagccactgcgctgacgggcaatgacacctcgaaggtggtggccgaaccagctgccgaagacccagcggcatcggccgggccttcgcaggttccgacgtttgggcctgcgcaagcaaccactgctggcaatactgattttgtggcggcctcaaccgtagtgcctgtcgatgataatttatttggctctgtgtctgagtgttttgagtctgatggtgaatttgagagttcgttttcctggacggaggagtccttggatgaaggcttggattattttgctgcgttagatgtggctgcagcggagtcttcgccgcgtgtggagggtgccggggatttccctagtgcgagtactgggtataggcagcgaagggtggtgtcgaaacacagtgtgggtgaattttcgcgaagtggtaggcgtcgtcgtatggggatggagcatggccgtcttcgagtagaccggattggtaaacgagaattgttatcctcgctgattggggcgagcataggtgaaggggatttgtga

SEQ ID NO: 4465 - DNA, 276 bp, Zea mays
  Peptide Sequence Number=SeqID_47840
atggcggccaacccgggcctgtggcggcggaggaagcggtggtttttctcaacggactgcgagcgcgagggagggcgagtggtcgtgcttgaggattccgcggtggcggcgagctcggcgccattttcgcggagccggtaccaggatgatcttcagatgactcgtgacctcactgctaaacgtagcaatacagacaaatatgacccgaggatggcggccacaattccagagaagtccgaggggtcacacgcaaacttccgggcccagctgcgatag

SEQ ID NO: 4466 - DNA, 693 bp, Zea mays
  Peptide Sequence Number=SeqID_47841
atgcaggcggcatgcaaccgcaccaagggggcgcaccctttcgacttcgacgtgtccagcattaaggcccaggcccacacgtcatggaccgagaaaggggataccccgaaagggatccttctccgcgaaggaagcgggccccgagcccccttactgatcagaggttcaaaggctggcccctcggaagggttcaacagccgcctcagagcactcgggctccgtgcccactactggctggccctcgaagggttcgacagccgcctcagacgcagagcaagggatgaccctgggtacgttcgatacataaccaaggctcgggctacgctcccgagctcactggagacaccatgttcggcgccctccaagggcaacatggcgcttttcccccctcctccttgtggaaaggcgacgcaggggcccatgtccggcattaggcgccataggaaactccgcctcgcccgaccccagggctcggactcggcctcggccccggaagacgacgaactccgcctcgcccgaccccagggctcagactcggcctcggccccggaagacgacgaactccgcctcgcccaaccccagggctcggactcgacctcgacctcgacctcggaagagcctccgcctcgcccgacccagggctcggaccgaccacgtcacgggggggggcatcattaccctacccctagctag

SEQ ID NO: 4467 - DNA, 453 bp, Zea mays
  Peptide Sequence Number=SeqID_47842
atggcaggaatgtactgcaacgcccgcgactgcctcaacaagagaatgcagccgccggcccgcaccgctgcacggatcctcctctcccccgtcgacaaggcgaaaggctcggcgagaaagaaggaaaagaagggagcagagcgaagaaccgtcaccggaccccctctcaagtatatgaaggccagagcgaaaccgtttccagcacgccgcctggaccggacgcaagggaccgggaaagggggataccccgaaagggatccttctccgcgaaggaaccgggctccgagccctccactactgatcaggggttcgaaggctggccctccgaagggttcaacagccgcctcagatcgcgtgggcccgacacccactactggtcaggggttcgaaggccagccccccgaagggttccatggccgcctcaggctactcgggctccgcgcccattactga

SEQ ID NO: 4468 - DNA, 144 bp, Zea mays
  Peptide Sequence Number=SeqID_47843
atgacgaccgacaggccgcttgagctactccacatggatctatttggctcgatcgcttatataagcatcgacgggagaaaaaactcaaacccaagagactttattaagattctccgagatgggctcaaaatgagttcagattga

SEQ ID NO: 4469 - DNA, 774 bp, Zea mays
  Peptide Sequence Number=SeqID_47844
atgagcctcaccgaggcgccgtccccgtccccgtcgtcgtcgagcgggagcgatgacttcgcggccttcctcgcctccgagctcgagctcacctccggtgctgactccgccttccctggtgacccctcctccgttttccccgccaccgacgacgagggcgaggacgaggatccggaggagctagaggttgaagccatagaacaaaacggtaccaaaaggcgtagagtagaggaacaatgccaagatcaaggaacatcagttaggcctgacaaaatccccactggcgcatctaaaattgttcaggttgaggcatgtccacatcctggacattttggtggactttgcattatctgtggcaagccacaagacgaggaagatgtttcaggagttgcttttggttacatccacaagggcttgaggctaggtacctcagaaattgacagactacgtggtgctgatttgaagaatctgttgcgtgaaagaaaattagtactcattttggacctggatcacacattgatcaactccaccaaactccaagacatttcttctgccgaaaaagatttgggtattcagtctgctgcttcaaaagaaggtttccgtaaagagaggggattcttccttagattatttcgctttcttatggatcaagggccacctttctcatctctgtgggcgtcttccattgtaggcgtcgatggtgtgcccgccgttttggacgttccccacttcagcaagctcgacttctccacctacgatggcaaggacccctga

SEQ ID NO: 4470 - DNA, 557 bp, Zea mays
  Peptide Sequence Number=SeqID_47845
ggaaggatggacttgccttcgttgaagctttcctggcacaaaagatctacttccgggagatcaggctccggcccttcttccggggctacgggttccggatcaacggcgcccgagggaaggggagcggtggagctcggcgggcgccggtgaggtgcacagcgctgtcattaatgccgcacagcggcgacgacgagacctcacggcggggggcggtaccgggcgactacacggtcaagcggcaaggacgggcggtgccaaactttcctgtgcggcgaggggatgggcgaggagacggcgatggaggggacggcgacgagtcgtacgcgaggaggacgacgaagcggctgaccggtggggccgtcactcaatctaaactcgtacggtccaaccccagggttatgaaggctggggagcaccgggaggataagaaggggaaatgttttatccggtttggacatggcggcggcctgactccttccggaatggacgattctggtgtggggattttattctatattgaaaaacttcctgcttctttgggagaggatgcgctttga

SEQ ID NO: 4471 - DNA, 345 bp, Zea mays
  Peptide Sequence Number=SeqID_47846
atgtgctactccactacatacatcatgttcgaggacactcacacaacgtcagcaacgtccatcgtcccagcgcacaagaattcatgtccgaacaacccgagagtcgtcgatgttggcgacaaccatgaggcctccctgcttaatgatggacagtgcggtgcagctgctctggaccgcgtccaagtggtggcttcgcgggagcttgtcgaacacagcggcgcatgcgaccacgtaggactgcttctagaggtcgaactgacagtcgccaagcttcttctcgtcatcgatgagcgacgccaacgtgagtgcctcctgctcatggtgtttgtttggggtttcaagtaa

SEQ ID NO: 4472 - DNA, 561 bp, Zea mays
  Peptide Sequence Number=SeqID_47847
atggtggggagaagcgagccgggctgcggcctccgcccctccctcagcttcaaggatgttcatcatcctcgctggggcggagagcgaggcgagccggagctctacctcccgcacgggtcggctggccacctcttcttccagcttctgggggtggaaaccatcccccagctctgcggaggaggcgccctccagccatgccgaggaaggcgaactgttgctgcccagccagggtgcaacattccatcctctgtcctcgttttcgtggcgaggacgggagtgaggacctgctggtgcgctttggggcggccggcgctcgctggtgcggtgttggtggacgccgccatcggtgctgacgtggtggcagctggagaaagcttctccgctgacaagtccgtcagcgctacccgcggaccgacctccggctctttggctttaatgtctggttcgcgtcccttgagtggggacacgaacgagagccttctggcggcagcgtccgtcctgggaccgtcgctgctgctgcagaggtcactggcgagtcaccaggagtttgtcgccccatag

SEQ ID NO: 4473 - DNA, 603 bp, Zea mays
  Peptide Sequence Number=SeqID_47848
atgggaagctccgcctcgcccgacccagggctcggactcagcctcgaccccggaagacggactccgcctcgcctgaccccagggctcgaactcagcctcggcctcggaagacagtctccgcctcgcccgacccagggctcgaactcagcctcgaccccggaagacggactccgcctcgcccgacccagggctcggactcagcctcgaccccggaagacggactccgccttgtccgaccccagggctcggactcagcctcagcctcggcagacggtctccgcctcacccgacccagggctcggactcagcctcgacatcggaagacgaactccgcctcgtccgaccccagggcctagactggacctcgacctcggaggagccttcgccttgcccgacctcgggctcgggccctgttgggaacttgttctcaaatgctatgaattaagaacaaggcaacatagaatgttaaatgttaaagcccttcgtccgctgaagcattatttccctgaggatttaatgagcttcggacgaaggtcattgatgataaatcacgaaggtcctaccttcgtgttcagaaataaaacaatgctaagtgaaatataa

SEQ ID NO: 4474 - DNA, 1008 bp, Zea mays
  Peptide Sequence Number=SeqID_47849
atgcaggcggcatgcaaccgtaccaagggggtgcaccctttcgactccgacgcgtctagcatgggggcccaggcccacacgtcatgtaatcggcgcgccgattactacgtgcgggaaactgcaccgccacatgcgccaataccgcgccttctcgactgcggaaccagtgtcgcgactcgaggcgaccctgcgcatggcccaacagtgccaaccgagcacatcgatcacgggcgacgcttcacctccgccataatgaccgcgtcagaaaagggaccgggaaaggggatacttcgaaagggatcgttctccgcgaaggaagcgggccccgagccctccctactgatcagaggttcgaaggctggcccctcggaagggttcgacagccgcctcagagcactcgggctccgagccctcctactgatcagaggttcgaaggctggcccctcggaagggttcgacagccacctcagagcactcggactccgcgcccaccactggttagaggttcgaaggctggcccctcggatgggttcgacagccgcctcaagccactcaggctccgcgcccactactgatcaggggtttgtaggctggcccccgaagggttcgacagccgcctcagagcacgcagagcgagggatgactctgggtacgttcgatacacaaccaaggctcgggctacgctcccgaggtaccctaggacattttcgagaccagcgggagcgattttgtaatggaatcccatcagagggaggcatcgagccctcagaccctatcaaacgggaccaggcgacgcaggggcgtatgaaaaaagccgagtctgtccttgaccgtcctctcgctctgtgcggaggctcgggggctgctctcgcaaacccggctccggctaaaccgttgacagcgtcaacataccagcccgagaacttggaactcgactatgcacccgggctacggccagttcgcatgagggaacaaccagaccggccgaagcatcacgaaacgcgctaa

SEQ ID NO: 4475 - DNA, 531 bp, Zea mays
  Peptide Sequence Number=SeqID_47850
atgaacatacaccggcactcaaggtgccattacaaacggaactctggttccactcccgcgggtatgaacaacctccacatcagagagcctgcgggacgacaaactccaggtggctcgtcggcgaactctgcagcagcagcgatggccccagggcgaacgctaccgcctaggaggctctcattcgtgtcccctcacgggggacaagaaccagacattaaagccaaagagccggaggcccggagcgcaggtgacgccgacgatctcgtcggcggagaaaccttctccggctgccaccacctcagcaccgacgacggcgtccacctgcccaccaacaccgcaccagcgagcgtcggccgccccaaagcgcaccgttcgccttccctggcatggctggaggacgcctccttcgcagagctggaggatggtttccacccccagatgccggaggaagaagcgggacgccagcccacacgaaggcaggccccggctcgcctcgccctcctccccaacaaggatgatgaagatccttga

SEQ ID NO: 4476 - DNA, 690 bp, Zea mays
  Peptide Sequence Number=SeqID_47851
atgcaggcagcatgcaaccgcaccacgaggatgcaccctttcgacttcgacgcatctagcatggaggcccaggcccacacgtcatgtaaccggcgcgccggttactacgtgcgaaaaactgcactgccacttacgccaatgctgcgccttctcgactgcggaaccaatgccgcgactcgaggcaaccctgcacatggcctaacagtgccaaccaagcacgtcggtcacgggtcagtcagccgtgagagaaggcgcgacggtcgatatggccaaaagtgggccgacagtaatggcggcagcaggcgagcggaagcggcggtcaaatcgtctgcaggctcacgtcccctcctggagcagcaggggagccctctcccacggcatgaagatgacgcgcccgtgttccgtccctcgaacggctcgtgcaacggataccccacgaaccacccgtatcgtcgcattaacttcgcggtagggcagacgacacctttggcggggaccgggaaaggggatactctgaaagggatccttctccgcgaaggaaatgggccccgagccctcctactgatcaggggttcgaaggctggcccctcagaagggttcgacagccgcccagagcactcgggcttcaggctcattactgatcagaggttcgaaggctggcccctcggaagggttcgacagccgccttag

SEQ ID NO: 4477 - DNA, 465 bp, Zea mays
  Peptide Sequence Number=SeqID_47852
atgagcaccttctggtttccgaatttcctcgtcttcaccaaggaaaacagcgccgcctgccccgctccgactgttgtgccactcgacagagtgaggctgacaacagctaagtccagcctcgggcgccatgggaagctccgcctcgcccgacccagggctcggactcagcctcgaccccggaagacggactccgcctcgcccgaccccagggctcggactcagcctcgggagatggtctccgcctcgcccgaccccagggctcggactcagcctcggcctcggaagacggtctccgcctcacccgacccagggctcggactcagcctcgaccccggaaaacggactccgcctcgcccgaccctagggctcggactcagcctcgacctcggaggagcctccgcctcgcccgacctcgggcttggacccgccacgtcacagggaaggccatcattaccctacccctag

SEQ ID NO: 4478 - DNA, 312 bp, Zea mays
  Peptide Sequence Number=SeqID_47853
atgcagaagatcgggatcagaaatgatagacatgtggttaccggtgaatggatgctggccgttgggatcaatgggcggaattatcggaacagcggcactctgtctctttcgcttgggagccatcacaatctctcgggtggagtgggtgggtccaacacaaacttgaagccaactcattatgagtcggcctcttctacccctggtcactacattacattaccctactacttacactacactaatactactctagtccattactacttactactacttattgctactactactgctatctatactaatatttaa

SEQ ID NO: 4479 - DNA, 1092 bp, Zea mays
  Peptide Sequence Number=SeqID_47854
atgcagtcggcatgcaaccgcgccaagtgggcgcacccctccgactccaacgcgcccagcatggaggcccaggcccacacgtcatgcaaccggcgcgccggttgctacgtgcgagcaactgcaccgcccctcgtgccactaccgcgcctcctcgactgcggaaccagcgagcggaagcagcgatcacgtcgtcagccaagctcacgtcccctcatgggacagcgagagaatcctctcccacggcgtgaagacggcgcgcccgtgttccgttcctcgaacggctcgcgcacgcgcaacggctgccccgcgaaccactcgctccgtcgcattaactccgcggctggcccctcggaggggttcaacagccgcctcagagcactcggactccgcgcccactactggtcagaggttcgaaggctggcccctcggaagggttcaacggccggctcaggccactcgggctccgcgcccactactgatcaggggaccccctccagcaatggacacaccttcggctcgcccgaggcccagtcttcaccaagaagcaaccttggccaagtcgccacgccgaccgaccgtatcgcaggagcatttaatgcaaagggctcggactcgggctcagccccggaagatgacgaactccgcttcgcccgaccccagggctcggactcgggctcagccccggaagacgacgaactccgcctcgcccgaccccagggctcggactcgggctcagccccggaagacgacgaactccgcttcgcccgaccccagggctcggactcgggctcagccccggaagacgatgaactccgcttcgcccgacctcagggctcggactcagccctggcctcagccgacgggctcggaccgaccacgtcacaggaggcgccatcattaccctaccccaagctaactcaggctacggggaacaagaccggcgtcccatctggctcgccccggctccagcgctcctccgacggccacgacaccacacgaaccgggtgccaaaacctctctggctgccacgatggcatggccctcttacagagggttggccgcgcggggaaggacgggacggcgctcgagtaa

SEQ ID NO: 4480 - DNA, 606 bp, Zea mays
  Peptide Sequence Number=SeqID_47855
atgaacaagacaccagcactcaaagtgccatcacaaatggaactccggttccacctccgcaggcacgaacaaccccacacgattggggggcctgcggagcaacagaaggccgacgggtggctcgctgcggcccgctccaacaacgacgacgatgacttctgctccgaggggccgaacagcagcagcgatgacctcagggcggatgctgctgccatagggccctcgctcacttcctcactcgagaggcaaggacgagcagaaggtcgtagagttggaggtcagtccgtgggcggcaccgtctatctcgtcggcgaagaaacctcttccggctgccgtggcggaaggcggcgccggaagcggctccgaagccgctcgggtcagagagccgggcacgcggcagctgccagcgccacgaacggcgaacgcccttccccccgatcactgagggaaggagcgggccgctgcccgcgcagagaccgaccccaactcggcgcactcccctccccagcactgatgatgaacatccttgaagctgaaggaggggcagaggccgcagcccggcttgcttctccccacccaggggctggtggtcaccgtcttgggtga

SEQ ID NO: 4481 - DNA, 741 bp, Zea mays
  Peptide Sequence Number=SeqID_47856
atggctgctagtccccacttcatctctcctccccctacgacgtgcagtggttggcgaagtcgattgaagcgtatcgcgggagttggcaaagccggcattggatcttgggactggaggttgaaggaggacaggtgcacttaccacgccctgttcccaaggtcatggacgatatatgatggcggacggaggaaaggcgttgaggacaggggcacaatgggagacatgggagggagacagatgtggagcgggggcatggagctgcggcccgaggtgcgctccagcatggtgagatctgcggcggggacggagttgtgcgagtctatcttggacgcgcacggaggatggcaggtcccgcgcggcccgggcgacggcctcgccgagcacctcggtctcgtggcgcaggtcggtgccaaactcggcgaggtcgcggcggtaggcctacgccagggcgccggatccacctttgcttcctacaacggcaatggtggcgaggtggtggtcgtcgctgaagaagaggaggaggaaggcgagcggggcttgaagacgatgttggtccccgccctgccctcgtggccatcgatctctcacgctgccaccgctccctggggcgacattcccgaggacgggcgcgggggtaggcgggggatggcacgggggaggcggagggggtggggattgcatcacggggtgggtgcaggggcgacattcgcggggacgggcgcgggggtaggcgggggatag

SEQ ID NO: 4482 - DNA, 1320 bp, Zea mays
  Peptide Sequence Number=SeqID_47857
atgacgtcggtggttctcagccccctacggaagcaaggagacgtcagcagaatcccagccgcaccgccagctgtgcctctacggggctcgggcacttctccgacggccacattatcgcgtacacagggctcaagcatctctctggcagccacattggcatgtacacagggcccaggcacttctctgccagacacgttagcgccttgctacacccccattgtacatctggaccctctccttgcatttataaaagggagatctgctcgacgtgtgaaccaccgcgtcgccgagaaggagatcgtcgtcgtcctctccttcgcctccgcggcccttgtcgagagcagtgttgccgtcgtcgaccacctcaccttcctcgtctctcaccttcctcccctccaaaatatcacagtcgcttcctcctcttccttgcagaatccaatcgctgcatacaacattggttcaaggctctgcttcttgccctccagaagattaagctgtggaatgtattcttctcccgaggtaagctgtcaaagcatcttgggttttgacttctcagatgacaatgaagatagacaggaatctgatgaaccaccatcagtatatatcttcatcaacaaaagcatgtgtcaccttgcttctatagagaagtatgtggaaaattttgccacatttgttccaattcttctattcaatcttgaactagatacatttcggtatgtctcatatatcccaaaccattgcttatttatgaggcagtggcttatgcaattcatgatacaattctaccgggggcttatggggtttccccaaaaggcgaaagaactattgagagttattggtttacaagaagagggaagctcccttgaatttctaagaggatacaaggacagcgccgcatgcgccgctccgactgctgtgccactcgacagagtgaggctgacagcggccaagtccggcctcgggcgccataggaagctccgcctcgcccgacctcagggctcggccttggcctcggccccagaagacgacgaactccgcctcgcccgaccccagggctcggactcggcctcggccccggaagacgacgaactccgcctcgcccgaccccagggctcggactcggcctcggccccggaagacgacgaactccgcctcgcccgaccccagggctcggactcggccctggcctcaaccgacggtctccgcctcgcccgacacaagggctcggactcgacctcgacctcggaagacagactcgacctcgacctcggaagagcctccgcctcgccctacccagggctcggaccgaccacgtcatag

SEQ ID NO: 4483 - DNA, 363 bp, Zea mays
  Peptide Sequence Number=SeqID_47858
atgagggcctctaggtcatccgccgtgacggtggagaaaagccacgggtcacgcggcggaacaatggtcacccggtcggccatcaccaagcagaagaggtggcggcggcaagggctggggaccgagaaaggggataccccgaaagggatccttctccgcgaaggaaacgggccccgagcccccctactgataagaggttcgaaggctggcccctcggaggggttcaacatccgcctcagagcgctcgggctccgcgcccactactggtcaaaggttcaaaggccggcccctcggaagggttcaacggccgcctcaggccactcgggctccgcgcccactactgatcaggggtttgtaggctag

SEQ ID NO: 4484 - DNA, 771 bp, Zea mays
  Peptide Sequence Number=SeqID_47859
atggcccctcctgtgacgtggtcggtccgagccctgggtagggcgaggcggaggctctttcgaggtcgaggtcgagtctgtcttccgaggtcgagtccgagcccttgggtcgggcgaggcagagaccgtcggctgaggccagggtcgagtccgagccctgggtcgggcgaggcggagttcatcgtcttccggggccgaggccgagtccgagccctggggtcgggcgaggcggagttcgtcatcttccggggccgaggccgagtccgagccctggggtcgagcgaggcggagttcgtcgtcttccggggccgaggccgattccgagccctggggtcgggcgaggcggagttcgtcgtcttccggggtcgaggccaaggccgagccctgaggtcgggcgaggcggagcttcctatggcgcccgaggccggacttggctgctgtcagcctcactctgtcgagtggcacatcagtcggagcggcgcaggcggcgctgtcctcttgtcaggccggtcgcgcgtcaggataaggtgtcaggccatccttgcattaaatgcccctgcgatacggtcggtcgtcgtggcgatttggccaaggttggttcttggcgaagactgggcctcgggcgagccgaaggtggtcgtagcccgggtgctcagtcgagttccaagttctcgggctggtatgttgacgctgtcaacggttttgctggagccgggtttgcgagagcagcccccgagcttccgcatggagcgagaggacggtcaaggatag

SEQ ID NO: 4485 - DNA, 441 bp, Zea mays
  Peptide Sequence Number=SeqID_47860
atgggcacggcggcgcactcggcgctcgggctcggcggcgctcgggctcgaggatggggacggcggcgcttggcctcggagacggtggcgcttgggctcggggacggggaaggggacggtggcgcactcggagatgggcacggcggcgcgctcgggctcgggtacggggaaggggacggtggcgcactcggagatgggctcggcggcgctcgggctcggggacggggaaggggacggtggcgcactcggagatgggctcggcggcgctcgggctcggggacggggtggagggcgcctcggatgacggtggcgctcggggacggggacgggcgcccagctcggagacggtggtggttgggctcgggctcggcgacggcgtggagggcgctcacggctcggagacggggacgggaacggcggcgcagcagcctggcggcgtag

SEQ ID NO: 4486 - DNA, 795 bp, Zea mays
  Peptide Sequence Number=SeqID_47861
atggaggctcctggggttcttgttggcactgttactagtgagcctgctgttcagctggtgtctactattctatctatgtcagctactccgcctggttctgggaatcaggtgactgaggtcattccgcaagatgattctccctgcctcaaggtttatttcaagagaaagaagtttgttctagagccagttcaggatgaggagagtgtgctttcatcacagctgcaagagttcaagaatgatgtaactaaaccgattaatagtttgctgccacctcctcgaatcaccaatagaaggaggaggactgtgcctgctaatttcattcccaggcatagcaggagagtggccaagtttcctccaaagttgggttctagttctgctgcccaggtctgtagacaattgggtttttgtgatgaaatggagaacatctctcttgaggatgccaacggttatgcaaggctattcgaaaatgggctctctagtagccatattgttgtagttgttgtgctttttggatggcaggattgtaaagggaagcgcagatttcactttgaaggtttctggctcaagctccctggtttcaatgaggtggtggctgattcctggaatcagccaatgttggcaacctgccctttggaaaggctctcccaaaagctcagaaggcttgctaaacatctgcagtcctgggggcatagagaggctcgtttcaggaagaaaaggaatttcatttcatatctagaggaagagggaagagtggtctctaagcatgaggatatgcaggacagcaggaggtgctag

SEQ ID NO: 4487 - DNA, 1002 bp, Zea mays
  Peptide Sequence Number=SeqID_47862
atgctggacgcgtcgaagccgaaaggttacgcgctccgcgcgcggcggtttggcttcttctgtcctaggccagctcgcatgacgcgtgggacccagcccccgtgtcgtagggggaggaccttggagcgtgttggtgaagacttagtccatgacgcctggggacgcaagtggggagagtcgccttttaaaaagggggcgacccccttggatggcagccatgccttcacactcccctcatgcatcgcgtccttccacctttcgagcccccggatggggagcgcccgcgttgctttcgtattgctgtcgttggaagagcgcaacttcgcggaagttggtacctttcagacatcgctcggcttcaaggattttcatcaggcagcccggttgcatcccctcgccgatggtaacccaagacgcttcaaggatcttcatcatccttgctggggcggagggcgagctgagccggagctctacctcccgtacgggcctgccttcgcgtgggctggcgtcccgcttcttcctccagcttctgggggtggaaaccatcctccagctctgcggaggaggcgtcctccagccatgccggggaaggcgaactgctgctgcccagccagggtgcaacattctgtcctttgtccgggcggtggtggccagccgcatcggggggtctcccaacacgtcgtacgctgcgagggcggtactcgtgttctgggagggtcccattctcgttttcgtggcgaggacgggagtgaggacctgctggtgcgctttggggcggccggcgcccgctggtgcggtgttggtaggcaggtggacgccgccgtcggtgctgatgtggtggcagctggagaaagcttctccgccaacaaggccgtcagcgccaccggcggaccgacctctggctctttggctttaatgtctggttctcgtccctcgagtggggacgcgaacgagagcctttcagcggtagcgtccgtcctgggaccatcgctgctgctgtag

SEQ ID NO: 4488 - DNA, 957 bp, Zea mays
  Peptide Sequence Number=SeqID_47863
atggatgaaggaactcccctcgatggtctggagtctgagaacaacgccaagccgagccacgggcttcacaccattctttctagtctatggggccgaggctatcttgcccacagacttagaatacggttccccaaggacgagggcgtacgacgaccgaagcaaccagtccagccgagaagactcactggaccagctggaggaggctcaggacatggccttactacactcgacaaggtatcagcagtctctgcgacgctaccacgcccgaggggttcggtcccgagacctccaggtgggggacttggtgcttcggctacgacaagacgcccgagggcgccacaagctcacgcctccctaggaagggccgttcatcatcgccaagattttgaagcccggaacatacaagctgggcaacagtcaaggcgagacatcaataggggggtagcagcaccctcggcgtcgactccaccttcggcgggatccggcccggcctcggacggcgacacggtcggaggatctccacctcgaaggaagacatcagcaccgcgcctgggccatcgccgccagggtctcctccaggaacccggcccaagcagatggctcgatcggccgctccgtagcctcatccagctatccctcgaggacatcagcccggctcatggcctcggcagcccgactctagggttagtcccgccagtggatgacccggccaagttccagccgccgctgctacacctccttggcctgggaaccgactccgcctctgtccacgctgacaccgctgcctccggctccggctcatcgcagagcggccgagggtcttctttaactgagcaagagaagcctcgggaggcaaggacgatcgagccgagggactcctacgcctccgggatacggatacctcacttgtcaccttccgcacgaggcaactcacactcggttaagcggtccagctag

SEQ ID NO: 4489 - DNA, 612 bp, Zea mays
  Peptide Sequence Number=SeqID_47864
atggggcaaccgagggctcccctggtctggcgcaccggactgtccgatatggcgcgaaccaagaccactcaacacaaatcaaccggaccacatggtgtacctaggcaccagctggcctctaggcatgaaggaagtagcagtggaagcaacgaccctatcggggatttggaggctagagtggagcgactcaggtctgagctatgccatggatgcagggagcatgcgcacgatagccgctgcattgctgaattatcagcagaagttattcgcctggaacaggaaatttcgaaacgcaatacgaccattgattgggccataaactcgtgctctttcgcttgggattgtgaagccaaagctctagctcaagtagcagaacttagcgcatccctcgaaaacctgcaagcgtactgcaacaccttgcatgaagaagcgcacgtattgtatgatcggctgcacccgaacgtgccaccagaagttgcagcaatgggagctggaccatctagaacagctgatggggagttggacctttttggggcccctcctgccatgaaccttgcagatgaacggtctcctgaagcgggcagtggagcagttaaggatgaagaaaattag

SEQ ID NO: 4490 - DNA, 261 bp, Zea mays
  Peptide Sequence Number=SeqID_47865
atggcgcagccgaccgttggccgccagagagccgttggcgcaccggacatgtccggtgcacaccggacagtccggtgcccccttctagccgttggctcggccacgtgtcccgcgcagattgcgcggccgaccgttggctcaccggacagtccggtgtacaccggacagtccgcggaccccgcgaaccagaggacgggtgaggagaagagcgagagtgagcggctgtctggtggccccttcctgtcggcgctacccccatga

SEQ ID NO: 4491 - DNA, 579 bp, Zea mays
  Peptide Sequence Number=SeqID_47866
atggacgcacaagcaccaccaccaaattgtgacatcgccatcattggctctcagtctcagccatcgacagatgttgtgcactcatctagtaagcactacatgtccattgcccatgtatgtttaattgttctagctatttctttatttggttacttagagaaaatcatttttataggaatactagctctcgttgcaagtgaaggtgcaagtcatattgttggtcaatctgcatcttcgttgacacctgcatctgatggaattcttttgccaagtgttggtgctagtgctgttggcagtggtactgatgctccaaccaattttgatgctgaaaatgatggcaaggatggcgagcgtcctatcaagaggccaaagaagaccacatcagaagtgtgggatcactttgaaaagtatacagtgacagtggaggtcaatgggtctaagaatatttcttctatgcccaatgatcttgagattctggaagtcattaaggagaatctgatactagaggatgcattcttggacgtgggaggtgacaacgtgggtgctgaagatgatgacttgcctgaggttcaactgtag

SEQ ID NO: 4492 - DNA, 393 bp, Zea mays
  Peptide Sequence Number=SeqID_47867
atgtccggtgcccccgccacgtcatcagtgccgttggaaatcgaccgttggagttctgacttctgggcccgccttgatgtccggtggcgcaccggacatgcactgttcactgtccggtgcgccggcatgggcgactctgactctgcgcgcgctgcgcgcgcattaaatgctgtcgcagcgcgagtgcctccggaaattcccgaaggtggcgagttcgagttagagtcctctggtgcaccggacatgtccggtggtgcaccggacactgtccggtggcacaccggacagtccggtgtgccagaccagaggtgccttcggttggccctttgctcttttgttgaacccaactcttggtcttattattggctaagtgtgaaccttttgcacctgtaa

SEQ ID NO: 4493 - DNA, 423 bp, Zea mays
  Peptide Sequence Number=SeqID_47868
atggcgcaccggacagtccggtgcacaccggacatgtccggtgcccccgccacgtcatcagtgccgttggaaatcgaccgttggagttctgacttctgggcccgccttgatgtccggtggcgcaccggacatgcactgttcactgtccggtgcgccggcatgggcgactctgactctgcgcgcgctgcgcgcgcattaaatgctgtcgcagcgcgagtgcctccggaaattcccgaaggtggcgagttcgagttagagtcctctgcaccggacatgtccggtggtgcaccggacactgtccggtggcacaccggacagtccggtgtgccagaccagaggtgccttcggttggccctttgctcttttgttgaacccaactcttggtcttattattggctaagtgtgaaccttttgcacctgtaa

SEQ ID NO: 4494 - DNA, 294 bp, Zea mays
  Peptide Sequence Number=SeqID_47869
atgataacaagttacaagagtaccttcggcttgaaagaaggcacgggacacagcccatgtaaaattacattcatgccctttacatttgctaataaatctacgcttcggctctgcgccatccttcgtattctttgtgcttcctcatactgtggttttgacccaagtccgaaggatctaagcccaaagattgagaagttcagagatgcactagcaaagcacagacttctaacaccaacgacaccattggcaaggcagggatctaatgatatgtccttggtgtcatccgtgatataa

SEQ ID NO: 4495 - DNA, 264 bp, Zea mays
  Peptide Sequence Number=SeqID_47870
atggctgcattagcatcaccatcatcttcttcagcatatccctctttatcaagagaccttgctcctacagattatgagtgcaattgtgttctgatggattctcgtattgacaccttgtgtgatgagttgcgcaagatgaagattgaaataattccttctggtgctttgtctcacatttctgttgagccagctttgcaagaccagatcatcatggcccagctcagtgacaagggagtgcagattatcaaggagaatctccattag

SEQ ID NO: 4496 - DNA, 501 bp, Zea mays
  Peptide Sequence Number=SeqID_47871
atgaagctgtggaaggagacttccaggagttccaagactacgacgagttctaggcgtggattagcggcaacccccagtcggctgcctgtgaaggccgcgtttatctgcgtttcttttccgcactttgatttattctaccgatcctcatcacggtcatcacgcaagtgccttatggcaagagctaccgatgatggccttattaaaaagaatgaaaaacttaaggctaagttagctaactctcaagaagccattgaaaacttgctaggaaaaatggaaattcttagcatacacaataaggagctaactactaagatagaaaacattggtagcaccccaggagtatctttggttgaaatacctaaaattattaagaaagatgcttctacttcttgctttgatttaattgatgactctaacccctgcaatcaagttcttgttaagaatgttgttatagaaacttgttcggatgagattgcaatggagaatgagcaattaaagtaa

SEQ ID NO: 4497 - DNA, 186 bp, Zea mays
  Peptide Sequence Number=SeqID_47872
atggggaagcctgtcccatcactcctcatgctcctcctcagccgagtgaccgcacttgtacccaccataaccggaatgggagaccacgtctcaggtcgcgtgaggggtaaagtctgcgggcaggttcactcaagtactaggcttaccgatttaccatatttctcggatttaataacattatgctaa

SEQ ID NO: 4498 - DNA, 459 bp, Zea mays
  Peptide Sequence Number=SeqID_47873
atggcggctctcagcccccttacagaagcaagagggcgtcatcaaggactcgacagctccgacagctgtccttccgccaggctccagcgctcctccgacggccacgacaccacacgaaccgggtgccaaaacctctccggctgccacgacggcatgaaggaccagggccctcttacagagggttggccgcgcggggaagaggacgggagaggcgctcgcgtgaggccgctcgctccccctcccgcgtggacgcttgtaaccccctactgcaagcgcacccgacctgggcgcgggacgaacacgaaggccgcgggatttccacctctctcacgcccgtctccggcagcctttcttccccccttcgcgctcggcctcgcgccgacccatctgggctggggcacgcggcgacatctcactcgtcggcccagggaccccccggtctcgaaacgccgacactag

SEQ ID NO: 4499 - DNA, 408 bp, Zea mays
  Peptide Sequence Number=SeqID_47874
atgtcgctagaggatgaccctaaggccaccggatcgacgaacgcatctgaagccaccagatcggatgtggtcttcgtcgaaggacgtctgagatatgccagattgaaggagatcattgccttcagatgctgccacgagcggtcaccgccaccatcgccgctcggtgttggacggttgccgccgcagacgcttgtgctgccgctcgtgccttgtgcagtcacggtcgccgtgtcgctcgagtcttgggtcgtcgctcgccgacgtcgcctggggccgccactcatgcctcatgccgccgctcgtgtctcacgccacaggaagccatcgtcaatgtccagccaccggtcgccgtcgctcgcacctcaagcagttgcagccgccaccaaaccccgaaaccctaattcctag

SEQ ID NO: 4500 - DNA, 150 bp, Zea mays
  Peptide Sequence Number=SeqID_47875
atggagggttgtgtacaatgtaaatccccgcgaacgcctatacactcctgggtgccgctaaagtcaaagaagtcagtgaaggggctgttcaaggacctgggcctttttaggacagttcttcgagcagcagcagacgtcgagagctgttga

SEQ ID NO: 4501 - DNA, 516 bp, Zea mays
  Peptide Sequence Number=SeqID_47876
atggtgcctcctgttgacgtggtcggtccgtgccctaggttgggcgatgtggaggctcctccgaggtcgaggtcgagtctgtcttccgaggccgaggtcgagtccgagcccctgggtcaggcgaggcggagaccgtcggctgaggccagggctgagcccgagccatggggttgggcgaaatggagtccgtcgtcttccggggctgagcccgagtccgagccctggggtcgggcggatcggagttcgccgtcttccggggctgagcccaagtccgagccctgggtcgggcggagcggagttcgccgtcttccagggccgagcctgagtccgagccctgggtcgggcggagcggagttcaccgtcttcctggctgagcccgagtccgagccctgggtcgggctgtcacacccggttttagaaggcaaaccgaatgcgaaccatgtacgtgccaggatcagttattcacgtacacagcagttacataatatggacatcatcacacagtgctcaaagtag

SEQ ID NO: 4502 - DNA, 93 bp, Zea mays
  Peptide Sequence Number=SeqID_47877
atggtgggctgcgcggaggagaaggaagagatgggccagaatgggtacagtcggcccagatattttaatgataattttatttgtattgaataa

SEQ ID NO: 4503 - DNA, 900 bp, Zea mays
  Peptide Sequence Number=SeqID_47878
atgggcagaggcaacaggcacacgtgttcgaccgtggctgacacctccggttcatgcccgttcgcgcaccgcgcctcccagccagatttcaccggaggcccgagatcgacctcaccggacttcagtctttcgatgccgcgcgtggacagagctaaccagccggactcctcgcctccgacgagcatccccgcctgcgcacgtggacctaccgactccggccatccccgacggcgacccgcccaccgttgtgatccccgagacctcccctacgtcctcgaccacttcaccggagccatctcgccgccgatgaattcacccacccccgccagtggaggagactctcgtttcagttctcacttcctttctcgcgatggctttccttccatcttgtgggaagtgcttaactccgccggttaccctacgccccctttgtacacagtgcagttgtatgaggagcaccgggtacctcgttgtcgggtctggctgactttggaggctcatccccttcagccgggttggcgttctcttgattctgagacgattggactcaggacggacgacaccgttgaagcggcagccatgaagactctgacgactttctgtggctaccatcccctggagatggtgatgcaccccttgggactcttccctactgagaagaaggatgatcccatgtggtgtaaccgcagcgatgccatggtactccttgctaacaccgctcaaactgccaagctcactctcgacagtcgagaagattttgtggtcgatctatccaccgagttggtagagaaggatctgcaggtggagaggctgagccagcgcatcaccaccttggagcagcaggtggagatccgagacaacactattgatgtcttggagaaccagcttcacgatgtgtag

SEQ ID NO: 4504 - DNA, 612 bp, Zea mays
  Peptide Sequence Number=SeqID_47879
atggcacgcacaaaaactacccagcgcaaatcaactagacctcagggtgtgcctcgacatcaactggcctccaagcatgaaggaagcagcagtggaagcaacgaccctatcgaggagttggaggccagagtggatcgccttaggtctgaactacaccatgggtgtagggagcgtgcacgcgatagtcgccgaatcgctgaactatcagccaaagttaatcgcctgcagtacgaaatttcggaatgtgatacggccattgactgggtcgtcaactcgcgctctttcacttgggactgtgaagccaaagctctagctcgagtagcagaacttagacatagagtgactccacaaaccaaacacaccattagtgcatccctcgaaaacctgcaagcgtactgcaacaccttgcatgaagaagtgcatgtattgtatgatcgactgcacccgaacgtgccactcgatgtggcagcaatgggagctagaccatctggaacagcaaatggaggatctgatgaggggattgacctttttggagcccctcctttcatgaatcttgcagatgaacggtctcctgaagcaggcagcggaatagttaaggacgaggaagattag

SEQ ID NO: 4505 - DNA, 315 bp, Zea mays
  Peptide Sequence Number=SeqID_47880
atggccggctcggccgccccgcgcgccctgccccgcccttggccggctcggccgccccccgcgcgccctgccccgtgcccgcccggctcggccgcccctgcgccgcccggcctcggccgccccggccccggcccaaccgcccgcccgcccctgcgcgccgccggctcggccgcccccgcccctgccccaggccggttcaaccgccccctggccggtggttatgagatcgatgattctggttatgactatggtgctggtgaagatgaagctgtggaaggagacttccaggagttccaagattacgacgagttctag

SEQ ID NO: 4506 - DNA, 363 bp, Zea mays
  Peptide Sequence Number=SeqID_47881
atgtggggccgtcattccagtctcacccacctggccgcgcccgcgcctcaagccaccgccatctgggccccctcgactgacaggcttcttctccgtggggatcggatcgcgctaaccccgaacgaccacgatctcagggagtcctgtgcttcacgcgcatcgtggcggaacttcgccgcggcaaattgcacctggaacctcacctcctccgcaccaggcgtacacaccgtgccgacgtcgtgggagatcgggagcctctgtactatcaccggagaacgccccgccatagcgcctgctcgctccgtagccgacttctctgcgacatcatcgccgctttcgttgaagcagtatttgggcgattag

SEQ ID NO: 4507 - DNA, 363 bp, Zea mays
  Peptide Sequence Number=SeqID_47882
atgtggggccgtcattccagtctcacccacctggccgtgcccgcgcctcaagccaccgccatctgggccccctcggctgacaggcttcttctccgtggggatcggatcgcgctaaccccaaacgaccacgatctcagggaatcctgtgcttcacgcgcatcgtggcggaacttcgccgcggcaaattgcacctggaacctcacctcctccgcaccaggcgtacacaccgtgccgacgtcgtgggagatcgggagcctctgtactatcaccggagaacgccccgccatagcgcctgctcgctccgtagccgacttctctgcgacatcatcgccgctttcgtcgaagcagtatttgggcgattag

SEQ ID NO: 4508 - DNA, 99 bp, Zea mays
  Peptide Sequence Number=SeqID_47883
atggggaagatctacagcggcaggggggtccgagtccagcggcgagggtttcaggcggtgctaacgaaaaatagagtttggatgtgggatcagaagtaa

SEQ ID NO: 4509 - DNA, 519 bp, Zea mays
  Peptide Sequence Number=SeqID_47884
atgagtgagctcgccgtggccagctttctgcagtggaatgggatgttttcaaaaataaaacttgatggtggatccatcatggacatgatgggttcaacatcggacaagatgtacctctgccaggacggtcagcgtatagctgagttggcagctgacgtcaggcgcttgcaagacgagcttgctgaacgagatttggtggttgattgggccatcaactcaagttcgattgcctgggaccgcgaagccaaagctcgtgctcgtgtggcaaagcttagtgcggccctcgacagcttgcaggtgtactgcaatactttacatgaggaagtacatttattgtatgcgcgactgcacctgcacgtgcctgtcgaccctattgcaatgggagccaaaccatcagggacagcaggtgaaggacatgatggggagttggacctttttaggcctcctccttccatgaacctggctgacgattggtctcctgcagcaggaaatgatgaaaccaaggatgatgaagactag

SEQ ID NO: 4510 - DNA, 89 bp, Zea mays
  Peptide Sequence Number=SeqID_47885
ggcgttacaacagtacccatgtactgttcacgctgacctgtattcactcgcacgtcacacttggattctcaccttctgtcaagccgaag

SEQ ID NO: 4511 - DNA, 159 bp, Zea mays
  Peptide Sequence Number=SeqID_47886
atgctgctcctgtcgtcgacgctcctgctcctcacgcaggcggtggtgcagtctctccaagtggctggactgtccggccacgggacggcgaagcggacgctcagcaaggcgagaggggatatcaaagtcaaggcagagacagaggtctatagtccttag

SEQ ID NO: 4512 - DNA, 357 bp, Zea mays
  Peptide Sequence Number=SeqID_47887
atggcggcggcgctctgcgtgcgcgcagcgagggggaaagagggtttgctggggcgcaaatggggggagagggtgagggcgagtgggggctcggggcacaagtggccgagggcgaggtggggcgagtcccacgcgcgacgtgggcgcggggaaggcgggcgcgagcagctcggcggcggttacgcggggacgacggggctgacaagccgggcccgcaacgcagagagagagaagaaagcgggtgcgggcgcgagagaagcggggctgacgggttgggcccacgggcagagagagaggagggagcgggcgcgcgcggggaagcggcagcgccgacaggtggggccgggcgagcagtga

SEQ ID NO: 4513 - DNA, 807 bp, Zea mays
  Peptide Sequence Number=SeqID_47888
atgacagaggtgctcaaaagatcccctacaacatcaaccagaggtgctgctggagagcttggacatcacatcgcgaccggggtgaccgaggctacgatgccaaatcatagaagaggcgaccgctgcaagaacaggtggggcagaggtcgatgtagtggaagcaggcatgcgaagtgtgtagagcggcccgcggctgtcacactgagcgagaagggttctggtggcaagatccctcacagaaagaccaaacgggtcaaactccatggaacaagagttgtcagtagtgaactgacagacggaaagaagattttgaatgatgtgggggcaacaagaacgttggataaacggaaaggaccgggaaggaccgcgtcacctacggaggtgacgggaagggcagagtcgtttccaaccacgatggaagaaggaagggaagggtgggggaggtggaagacagaatacctgcgtccggggtggtgtggtaggaggcaccggagtcaaccaccaagtcagagatcgagggcccccacacgggctgggccggaggccccggaaggggaaggagcccctgctgaggctggggaggtgcggagggcgctgccgaaggtggagcggcaaagaagaccggctgaggggtggtggggcgaggggccgaggcacccgtggacggcccgggccacatgtggatggtgccagtccacaggttgtagaaagatggtcactgggaaccacccagagagctgcctcggccacccgtcgtgccactgtgtccactcttgcgaccacgactccccccccccgagccagtag

SEQ ID NO: 4514 - DNA, 957 bp, Zea mays
  Peptide Sequence Number=SeqID_47889
atggtgtgcctcgaagaggcgcctgatgggccagccagagggcacgcacggtctgatttgggcgtcgtcgccagggccgaggacatctggcccaacagagccaaggagccaactgcgaacgcagaagtcagcaatgttccagcagggagcaacgaggacagcaggggcagggaaggagcccatgttgttcgaggtgctggaggaggaggagaagttggtgtcagactcggtcgacatggtgacctaggtgagaggggcaatacagcagagggtgcgggtgataggtcggggcctcggcgcgagagcgagccggggtaccgcgtcgaccacggcgctgaaggcgtcggtgtcgcacggggctgtgcgggagacggtggggccgcgcgaggcgacagaggggacgtcgaggccgcacgtagctgtgcgggggagggcggcgtagagaacgccgaggccgcacgtggcagtgcgggggtgagcggcgcaggctgggccgagcgaggcgacttaggggacgccgaggccgcacgtggctatgcgggggtgggcggcgtaggcagggccgcacgaggcgactcagggaacgccgaggccgcacgtggctgtgcgggggagggcgtcgcaggcaggccgcgcgaggcggtgaagtggacgaacctgcggggaaggggggcacgattgtgggggacacagggtcgaggtcgaggaacacgccgagctcgccaaggaagacacggcgagtggagcaaggggcgagcttatgaggagcagtggatgcgagattggggtagcaagcgcacccgaagacacgaagatggtcgtaagagggatcgatgccgaagagagcgaaggagtgggttgggcaaccgtcttggtggggagacggttgaggaggtaggtggcagtggcgagggcctcagcccagtactgagcggaaatggaagcctggaaaagtag

SEQ ID NO: 4515 - DNA, 1773 bp, Zea mays
  Peptide Sequence Number=SeqID_47890
atggggcgcatccgtgttgccctcctcttgcagttgtcgtgggggttggcgctcttcagccatcgctcggcttcaaggattttcatcatgcagctcgactgcattccctcaccaatggtcatccatagggatgatcaccagccttgttcaagagggcgcgccgagttggggcctgcccccgtgtgggccggcgacccgcttcttcctccagcattcgggggagaaggacatcctccagctctgcggaggaggcgtcctccagccatgcgggggaaggtggctgctgtcaccggcctcaccgagggggcgaactccgacaacgcgggtccggttggccgcaagcgtcgtcagctgcagcgtgcctggcatgctggctcagctggctctggcgccgcccgcgaggacttgagtggggatctgccggtgcaagctggggcgaccgccattcatcggtgtggcgctggcgcgcaggtggccgttgtcgtcggtgctaaggtggtggcagccagaggaggttgtctccgccgacgagaccgtcggcggcgcctgcggttggacctccggctctttggctttgatagcttgtcctcgcccctcgtgtggggacgtgggcgagggccttttcgcagcagcgtttgccctgaggtcatcgctgctgctgttgagccgcccgaggcgaaggtcgttgtcgctgctgctggagcagttgtcggcgagccacctagagttcgcaggccctctagtgtggaggatgttcatcatccgggctggggaggagggcgcgccgagttggggcctacccccgcgtgggccggtgacccgcttcttcctccagcattcgggggagaaggacatcctccagctctgcggaggaggcgtcctccagccatgcgggggaaggtggctgctgtcaccggcctcgccgagggggcgaactccgacaacgcgggtccggttggccgcaagcgtcgtcagccgcagcgtgcctggcatgctggctcagctggctctggcgccgcccgcgaggacttgagtggggatctgccgccagaggaggttgtctccgccgacgagaccgtcggcggcgccgggcggtcggacctccggctctttggctttgatagcttgtcctcgcccctcgtgtggggacgtgggcgagggccttttcacagcagtgtttgccctgaggtcatcgctgctgctgttgagccgcccgaggcggaggtcgttgtcgctgctactagagcagttgccggcgagccacctggagtttgttatcccgcaggccctctgaacctttggccgctctgcgatgagctgaagctggaggcagcggtgtcagcgtggacggaggcggtgtcggctcgaaaaagaggcttcgttggcccaggagcaggtggcttcccaggccgaggaggtgcagcagcggcggctggagcttggccaggtcatccgcgagcgggaccaatcctgggtcaagccgccgaggccgtgagccaggctgaggtcctcgggggacagctggctgaggcgacggagcggctagccggggtgtctgctcgggccagaacccttgcggagagcctggccatgagggtccgagcgtggtgctggcgtcctgcttcgaggtggagatccttccgcccgtgtcgtcgtctgaggctgggccagattccgccaagggtggaaacgacaccgagggtgctgctgctccctctgccgatgtctgaacctgcaggaacagtttgtctgaagattctgttatcggtatag

SEQ ID NO: 4516 - DNA, 789 bp, Zea mays
  Peptide Sequence Number=SeqID_47891
atgaccgcgtcaaaaaagccgccccagagcactcgggctccgagcccattactgatcaggggttcgaaggctggcccctcggaagggttcgacacccgccctagagcacgcagagtgagggatgactctgggtacgtccgctatatggccgaggctcgggctacgctcctgagtcggcaaggtcgaagtgacagcggtcacttcgccctttcactgaccgacctgacaggaaaacagtgccgctcgccccgctccgactgttgtgccacccaccagggtaaggctgacaacagccgagttcagcctcaggcgcaacaagaagctccacctcacccaaccttaggcctcggtcttaggagggggtctccgcctcgccagaccccatggctcgacctcagcctcggcctcaggaggaatcgcgtcctcgcccgacctcggcctcggcctcaggagaagtctccgcctcgcccgaccttgggcttggaccgaccgcgccacaggggatacatcattaccctacccctagctagctcaggctacaagggaacaagaccgacgtaccatctggctcgccccgggctcaggcgctcctccgacggccacgttatctcgtacacaaggctcaagcgcttctccgacagccacgttggcatgcacacagggctcaggcactccactgccggacacggacacacagcgttaaattcactggtcggcctggtcgagggtcccccggggtccgagacgccgacgataataaacaacaatcatgaaatccatagaatgtag

SEQ ID NO: 4517 - DNA, 414 bp, Zea mays
  Peptide Sequence Number=SeqID_47892
atggctagctcgtcggcgttgttgtccctcctccctccccccctcccgggcgcctataaaagggaccacccgagcaccgccttccaccacaccaggcctcagccactccacctccctccctcgagctcaatcggactcggcgccgtcgtctctcccctctccgtgtacgatgaagggtattcaccctcatcacctggtgagtgggatgatcagggactccctggtttaggggagggcctaagggttatgaaggctggggagcaccgggaggataaggagggggcatgttttgtctggtttggacatggcggtggcctgactccttctggtataaccattaaggttaggacgtgcgaggaaggaaagagattcggattggatctcattggccacgagatcgcagagtcggactag

SEQ ID NO: 4518 - DNA, 1362 bp, Zea mays
  Peptide Sequence Number=SeqID_47893
atggtgacctccggcttgatggtgggggaaagcgagccgggctgcggccccttcccctccctcagcctcaaggattttcatcaccaaggctggggaggggagagtgccgagttgagctgcagcgtgcccggtcttcggacgcaagtggctttggagccgctcgcggcgccggcgtccgccacggcagctggaagaggttcttccgccggcgcgacagcccgggccggccacggactgacctccaactctacggccttctgcccgtccttgcctcacgagttttggcgtgggcgggggcctcctggcagcagcacccgccctgaggttagtgctatcgctgttcgaccccccggaacagaagtcgtcgtcgtcgccgctgctggagcaggtgacggcgcaccgttcgtcggcctttcgttgctccgcaggccttccccctcggagtggggttgttcgtacctgcggagggggaaccggagttccgtttgtaatggcacttcgaatgccagtgtttttgttcattatggctgtcgaggcctgaacatcttagttaaagggaccccttggccgctcttcgatgagccgaggccaggggtagcgatatcagtacgaacagaggcggagttggctcgaaaatgggaacctggttggccggagcctagccgggttgcccgtcagcgggggtcgacgtcggagtcgatcagccgaggcctcgggtcgggctggcgcccttggaagaggcttggccgaggccccaggggtaaccggccgagccgcctgctcgggccggattcccggagaagtccctggaccgcgtcgtcgtccgaggctgggtcggacctcgctgaaggcgtcgtcgatgccgagggtgctacagctcccttcagcgtgaagacccgagcctgcaggatcagatcgtcttgtagcgtgtgccttttgcggccgccgaggccagaaaacacaccctcgctgcgttgcaaagccgcgtctcctttcctctcatgtcgagcatctggactttccgtcggtaacagggatgtttgtgtgggcgagagttgcttctcgcggaaggcgtgggagtccctcggctcggtcggccttgccgcttacgcgtactttcgcccgtccatgaggctcagtcaccgattcagtcgagaaggcttgaaggaccgtctcggcagaagagcttccgagcgtgaagacattcggtccgcggaatcactttatccgaacgcgagttacttatcgcagaaggtgatgagtgaggtatccgtatcccggaggcgtaggagtccctcggctcggtcagccttggctgcttacgtgtactccgtcgtttccaggatccgcttttcgaagtag

SEQ ID NO: 4519 - DNA, 345 bp, Zea mays
  Peptide Sequence Number=SeqID_47894
atgagactccacggcagggcggtactgggcaaggacgttggtcaagcggtgaggacggggcggtgccgaactcttcctatgcggcgaggggatgggccaggggatggcgatggaggggacggcgagatgggcttcgctccgataccagttgtgacagaacttcccaggtcattaggcccacctacagttgtccttgtccatcggacctcagacaaccctgcaggtgcacctgatcacctgataagttcggtatctgtattctttaccttgcccaagagcgtttcacccgtcacgcagatattacaacacatcggaggaacgagtatgcggaagcagttacaataa

SEQ ID NO: 4520 - DNA, 453 bp, Zea mays
  Peptide Sequence Number=SeqID_47895
atgggcaagagtaacaaacgcaagcgcgagccgactcctccatcggaggacttcggcgactcagaatactcggaggaggagttctcctccgagtccgaggggtctccggctcccgtctctcccccggcgtcgtctgacgattcagacgactcccaggggattgccgcagaggtctggacttatatccgggccgtcgagcgctccgggctcgagggctcggatgaatcggagtactcctcggacgaggaggactcttcggactcgtccgaggagggcggtggcggcgatggcggagacgacgacgacgacggaggcgacggtgacgacggcgacgatggcggtgatggcggcagcaggggcggcaacggcggcagtgagggcggcaacggcggcagcagcaggggcagcaacggcggcggtagcagcaagggcagcaacaaggccagtggctag

SEQ ID NO: 4521 - DNA, 264 bp, Zea mays
  Peptide Sequence Number=SeqID_47896
atgccccgaccctcggaagagaccgtgcatgcctcggtgaagctccccgagcaaggaatcagactttgcctcgccggagaagccagtccacggtcgccggacttcacccaatcgccggtgaacgtagaccggccttgcttgtggcataattttacaggttctctggaggacatggttgctggagtgacttggccgtccatcttgccaccgggttggactgtcgagtgggaccctgcctcggctgaggaggagcatgaggagtga

SEQ ID NO: 4522 - DNA, 834 bp, Zea mays
  Peptide Sequence Number=SeqID_47897
atggcgcgcagaggcgcgtcagtcctccggtcccgccgccaccaccaccatctgggggtgatcacccccaggggcaccaacagcagcaacaacaacagcagcaggagcggcgatcgccttgcttccaaggtcactggaaagtccagggctccaagcaagtgtagtccctttttccacgagtctaatcatcgtgccgacaaagtcttaacccatcatctgtttatcagggcttcttcccccgccgctcccaaggtcatgcctcctccgccagataccaggcccaccgacgggtctggctctcagcagcaggaatctgctgagggtggtgctggcggtccgcccccagctgctgccaagaccgcgctagaggcttcccatgccccagccgaggatccggcggcagcggcgccagcgtcgggtggcgtcgcagcggcagaggaggtcctagctaggggattcgcgcccactcccgacactgggggtggcgcaggaggcgcgtccagctccaaccccccacctgctccggaggagatggaggtggtgtttgggcagcgactccggtcctcagtgacactgaggcagcaatcttgcgggagtgggaggcgcttgaggctgagcaccagcgactggcgcacccaactggaggaacgcaccaggacgatgtcccgacagttcgccttcgagcggtcccaactcgagcgggaccgcaaggagtacaagagagacctccagaaggtgtgtgccagggagctagaggcggcccggagggaaaagaaggtgactaggagggaagaagccgtgacccagtgggaggccctcacgacagagtactag

SEQ ID NO: 4523 - DNA, 939 bp, Zea mays
  Peptide Sequence Number=SeqID_47898
atggctgccagtggccgagagcagggagctcgccggaagaaacacagcaggggcgctgcgcagagaagggcgcaaggatttgtggccatggacagggaggtcgctcggctgcttctcatccaagcaaggcgagcaacagcagggagcagggaggtcggcgaccaccatggctggcgctgtagagagatgggagtagggcctcacgccatgggagagagggcacaggggcttggacgccatggatccagggagggagctgggaggcgtcggcgtgcctgctgcagtggagaagttggaaggggcaccgggcttcatccacggaagggccgcgctgctcggcaaggaagctcgggaagggggacgccatggctgctggtttccatgggagggcgagcgttggtgcagacagcaacggggaaggaggaagatagcgtggggaagattgcagggggggcgccatggccagccgacagtgtggccgagcagggaggctccccgcgccctgcagggggagatatcacaagggaggccaccatgggagagagggcgtcggtgatctgctgttgtggggggggtgccgagcaccatggcgaggaggaggagcccggcgtgaggaggaagaaggagcagggacaggggccaccgcgccctggctggctgaagctggagctcgaccgtgcatgcgactgggcgccatggagacagggaaacagggagccgagggaaggagcgccaagcacagggggcagagggaggtgctcgacatctgctggacagccaacaccggagggaagctgggcggccatgggaggaagggagccgagctccctgcgctctgctcgctgtgcgtggaagaaaacagggagagaagaaatggcggctaggaaaaaaatggagggtgggagtgcaaatttgccaagtgagcacccctatttatag

SEQ ID NO: 4524 - DNA, 288 bp, Zea mays
  Peptide Sequence Number=SeqID_47899
atggcccgcgcctataaagcccccagggacttcgaccgtacccctccgcacgcgctcgacctcaccagagcccaaacccaccggcgtttgcccgtgcacggcgtgtccgcggccgcccgatccccctgccaccgtagaccggccaacaggacccttcccaaccccgtccgaccctcggagaagactgagcacacctcggtgaagctcccgagcgaggaatcggagtttgcttcgccggagaggccagtccacgatcgtcggactccacccgactgccggcgagcgtag

SEQ ID NO: 4525 - DNA, 255 bp, Zea mays
  Peptide Sequence Number=SeqID_47900
atggggaagcctgtcccatcactcctcatgctcctcctcggccgaggcgggtacaatggatcaagcagtctcattagccgcgagaagcagacgattcgaatcgagtttttatccttgcaagtgaccgcacttgtacccaccataaccggaatgggagaccacgtctcaggtcgcgtgaggggtaaagtctgcgggcaggttcactcaagtactaggcttactgttggggacttgttctcaaatgctatgagttaa

SEQ ID NO: 4526 - DNA, 396 bp, Zea mays
  Peptide Sequence Number=SeqID_47901
atgactcgcccccagcctcgggcgactactttgggcccagcaacagcgcctgaccccaccacatgggcgggttgcaaacaaacgcctgacccccaccacatgggcgagtccggggccgccacgtgtccagagaaagtgatatactccaaggcatcaacatacaatggatcaagcagtctcattagctgcgagaagcagacgattcgaatcgagtttttaaaccttgcaaggtatccgcacgttaatccttattccaattttcatctcgtagaccacgcgtccccatgggacccgtgtccacagaccgttaccattctgttatcaaagtggatacaaccaattcctgacctcgcgcgagtgctagaaaaatcactcgacttctaccgagatccctaa

SEQ ID NO: 4527 - DNA, 174 bp, Zea mays
  Peptide Sequence Number=SeqID_47902
atggagagtcatgatctccgggcagaatgggaatcacggcttgtgggtggttatgagattgatggttctggttatgactatggtgctggttgtcagcattgcaaccactgctcaggcgaagatgaagttgtggaaggagacttacaggagttccaagattacgacgagttctag

SEQ ID NO: 4528 - DNA, 1377 bp, Zea mays
  Peptide Sequence Number=SeqID_47903
atgaagcttggtggtcaaagtcccaaaagaatgagggacctatcaagcttgtgggttccaccagtataccggagactcttaagtgctgacaaggcagaaagggacatggtagaaaggtgccttattaaggtgtcatgtgttattctaccacctcaacctctcctttccaaggctgttgcttcagaccttgagcagaagctactctcctgtatggtaaatatgcttgatgatccttccaagaaagttcaaactgtgaagtcatggggatggattgtatctttgcttggtccagatgcagtgaacaatagacctctgcttaataaacttataaaggttcctgagcagatgtttactgatctgaatccacaagttcaggttgctacaatggcaactgagattgtggcccagcaaactgtgatttccccattaaaacccattgaacaggcaagtgcacagccagaactattccaggacataattcctgaaacaatggtgattgttatggattctgcaacagagattttcagatttcttctaaaaggaaagaatagtgttatcaagtgtgctgcattactggaatttggtcttcggtttatgaaagttattgcgaaggaactagatcattctttgttagcttctgaaaacattgagatcaggcggccaacatgtaacaaggaaagattaaaatggttgatggtttatgaagttgtcaagttttcatttcaaagcaaatccagctggacagcaccaggtcacaagcagattattggagaccaacttaccgagtggctctctttaagcatcatattgtactctgaaatgcaacaaggacaaattgttgttcatcttgagaacctttggctcaagatggttgagtgcctgaagaggagtcagctagttagtgatgttcccttaataaatcagaagcatcgacttcttcaagctgcactcaatcgcccacatcgccccatttcagttgcaacagcatcagtttgcagagtagcaacacatggcaacacaaccctgcaccctggttgcttaatttctgaatttgctgagttattaatgcatagaagaaaggctcttgatagctccaggaaaacagtcatcacatccaatcctactgatctcacggccgagaggtatgatggatctgtgaatgtctcggtgggtttggggaggaagaggctgaagatcatgaagtattcaactaaaccaaaggaactcaacaaaaatagagccaacatgggcatctcaccagccaacacttcgtttgttaactacagccgcaggttcttttccaatcgcattaataatgctgagaagcaagtcatgtcttcaccatctacattcttacataaggtgcaatttgtctag

SEQ ID NO: 4529 - DNA, 675 bp, Zea mays
  Peptide Sequence Number=SeqID_47904
atggcgtgggtggacatgtcagactgcttctgcttccacctatggaacgcgtgggaggatgccagcaatggggagggtaatttgcagcatgagtacagtggaaatgactgtctccaacttaaaggacatcagacatatactgaagtatcttctctccttgagcacttgaagctttgcatgttcttctcaaagaaatcttttttagcatttctgaagtttggtgggtacaaacaagaagacattcttattcacaaggctaaggcgaggctcatgcagtcttctttcgcattggtgtgtgacaaaagaaccaagtgcttgctgcttttcattcggggtgctatcagcactaaagagcgcctgactgcagcaacttctgctgaagttccttttcaccatataattctatctgaaggaaagatcagcaatgtagttttaggtaagttgcagtccgaggttctcaaggatgccatctcccagatagttcaggatgccaataagaataggaagttcactgagactgttgagcttcagattagtctgaagaattgtaatccacaaaaggacaagcgcttcagtggctctgttaagttgcctcacatccctcgtccaaagatgaagagggctgtggcgatgacgagggctgtggcgatggagatgccagcggcaagcgcttga

SEQ ID NO: 4530 - DNA, 309 bp, Zea mays
  Peptide Sequence Number=SeqID_47905
atgcaggtggcatgcaaccgcaccgcagtggcgcacctcttcggcttcgtcgcatccggcatggaggcccaggcccacacgtcatggaccgggaaaggggatatttcgaaaaggatccttctccacgaaggaagcgggccccgagccctcctactgatcaggggttcgaaggctggccctcagaagggttcgacagccgccctagagcactcgggcttcaagcccattactgatcaggggttcgaaggctggcccctcggaagggttcgacagccgcccagagcactcgggctccgcgcccactactga

SEQ ID NO: 4531 - DNA, 315 bp, Zea mays
  Peptide Sequence Number=SeqID_47906
atggagtctgggttacgccgtcgatctggcctcgactggtggatcgagagcttcgtgaaattgagcgaatcaggcgttgggtcgtcgaatctgggagccatggcgtgcataactgggactgcgcaccgaagaaagaacaccgccgcgaatccacgtgacgccgtgggggaccctgttgctgcctccattaccgcaccaccatctctaggaggtgcctggctgccggggtgtagttgggggcgatgcggtggcccttggttcagcgatgaacgccccagattaagccacacgtaccggttcgaccgtgagctttga

SEQ ID NO: 4532 - DNA, 978 bp, Zea mays
  Peptide Sequence Number=SeqID_47907
atgcggcccggttgcacccctccaccggcggtcacccaagatggtgacctccagttcgatgacaggggaaaagcaaatcgggccacgggcctctgcccctccctcagcctcaaggattttcatcaccagggctggggaggggacagccgcgtgcctggctctcggacgcgagtggcttcggagccgctctcggcgccggcttctgccacggcagctggaagaggttcttccgccgacgagatagccagggccgcccacggaccgacctccaactctacggccttctgcccgtccttgcctcacgagtttgggcatgggcgggggccaccttgcagcagcatccgccatgaggtcatcgctgccgctgttcggccccctggagcagaagtcgtcgtcgtcgccgctgccggagcgggcgacgacgcgccgttcgtcggtcttctgttgctccgcaggcccccccatcgagtggggttgttcgtacctgcggagcgctatgactcgcctgttggttgtctgaaccgcttcaccaagtgtgggtcgccccgggtaaaggcgacgagtgagccgcccttcgatgagccgaggccgggggtagcggtgtcagcgcgaacagaggcagagttggcctgtaaagaagacctggtcggccggagcctggccgggttgcccgttagcgggaccgacaccggaattgacctgtcgaggcctcgggtcgggctgatgcccgcggtggacagccggccgaggcctcggggtgaccagccgagccgcctgcccgagccggattctcggagaagaccctggcggcgatggcccgggcgcagcgatgacgtcgtccttcagagtggagatcttcggaccgcgtcgccgtccgaggctaggtcggacctcgccgaagctgttgtcgatgccgagggtgctgctgctcccttcaagcgtcaggatccgagcctacaggatcggattgtcttgtag

SEQ ID NO: 4533 - DNA, 870 bp, Zea mays
  Peptide Sequence Number=SeqID_47908
atgatgaccaccagtttggtggttgggagaagcaagccgggctgcggcctctgcctcgccctcagcttcaaggatcttcatcatcctcgctgtggaggagggcggggcgagtcggggcctgcctccgcgtgggccggcggcccgcttcttcctccggcattcgggggagaaaggcatcctccagctctatggaggaggcgtcctccagccatgcgggggaaggcgaactgctgctgcttggacagggtgcagctgtccgtcctccaccccgggcgacggtcgtgccgtgcgcgggccagccacgtccaggtcctccctacgccgtcggctgcacaacacgtcatactccacgagggcggtactcatgttctgggacggtcccgttcttgttcttgtggcgagaacgggagtgaggacctgccggtgcgctttggggcggccgccgctcgctggtgcggtgttggtgggcaggtggccgctgtcgtcggtgccgaggtggtggtcgccagaggaggtttctccgccgacgagatcgtcggcgccacccgtggtcagacccccggctctttggctttgatggcttgtcctcgcccctcgtgtggggacgtgggcgagggcctttccacagtagcgtctgccctgaggttatcgctgctgctgtttagccgcccgaagcggaggtcgttgtcgctgctggtgcagtggttgccggcgagccacctggagtttgttgtcccgcaggccctctggtgtggaggttgttcatacccgcgggagtggaaccggagtttcgtttgtaatggcaccctgagtatgggtgtttgttcattgtggctgtcgaggcctgaatatctgggtatttgggcgtga

SEQ ID NO: 4534 - DNA, 1188 bp, Zea mays
  Peptide Sequence Number=SeqID_47909
atggctgaaaggtaccaacttccacaaagttgcgttcctccgatgacaaggcggaaggattgcgagagttccccatccgggggctcgaaaggtggaaagacgcgatgcataagggagcgcgaagacatggtcgcctttcaagggggtcaccctccttttaaaggcgactctccctacttgcttcccgagccgtcgcgggctgagtcttctccaacacgctccaaggtcctccccctacggcgtgggggctgggtcccacgcgtcatgcaagctggcccagagcagaagaagccaaaccgccgcgcgcggtgcatgcaactgcccagcggttacgagcattcctccactatcgcccagaccagcggggaccgggaaagggggatacctcgaaaagggatccttctccgcgaaggaaacaggccccgagcctccctactgatcagaggttcaaaggctggcccctcggaggggttcaacagccgcctcagagcgcttgggctccgcgcccactactggtcagaggttcgaaggccggcccctcgaaagggttcaacggccgcctcaggccactcgggctccgcgcccactactgatcagggcgggaacaatcttgtaacggaatcccatcaaagggaggcatcgagccctcggaccccgtcgaaaggggactgggtccggcagatcacccgcagggctcggactcgggctcagccccggaagacgacgaactccgcttcgcccgacccagggctcggactcgggctcagccccggaagacgacgaactccgcttcgcccgacccagggctcggactcgggctcagccccggaagacgacgaactccgcttcgcccgaccccagggctcggactcgggctcagcctcggaagacgacgaactccgcttcgcccgaccccagggctcggactcagccctggcctcagccgacggtctccgcctcgcccgacccaggggctcggactcgacctcggccttggaagacagactcgacctcgacctcggaggagcctccacctcgcccaacccagggcccggacccgaccacgtcaacaggaggcgccatcattaccctgcccccaagctgactcaggctacggggaacaagaccggtgtcccatctggctcgctccgctatacgagtaatgatggcgcctcacacgctttatga

SEQ ID NO: 4535 - DNA, 567 bp, Zea mays
  Peptide Sequence Number=SeqID_47910
atgaacaagacaccgacactcaaggtgccattacaaatggaaccccggttccacctccgcaggtacgaacaaccccacacgattggggggcctgcggagcaacagaaggccgacggatggctcgccgtcgcccgctccagcagcagcgacaacgacccccgctccgggtggccgaactgcagcagcgatggcctcagggcggatgccgctgcaaccttgccctcgcccacgccgacgctcgaggggcgaggacaagagccgtcagcccaccggcagatccccactcggatcctcccggacgagtggagcaccgacctccgcgcggaggcgccgtaccggagcaaaggcaggacagccccagaacacgaacgccgccctagcagcgcgcgacgtcttgggcggtcctcccgtgcgcgcggcgcgacaaccgctcttgcggcgggagggggcaccaggagccaagccggcaagcccaacgcgctgaagctgacgatgcccgccgtcgaccagccccgcgttgtcgaagtccgcccctctcgcagggccagtgagcgccctctcccttga

SEQ ID NO: 4536 - DNA, 372 bp, Zea mays
  Peptide Sequence Number=SeqID_47911
atggggaagcctgtcccatcactcgtcatgctcctcctcggccgaggtagggtcccactcgacagtccaacccagtggcaagatggacggccaagtcactccagcaaccatgtcctccagagaacctgtaaaaattatgccgcaagcaaggctgagtatactaatactcagctagacttacccggggcactccgtccccacacacatcaaccgtccctatcgattccctggcaacagatcagggctcaccgccttggcgtacaatgcctcactgaccccgactgccgtcgtgcagtgaccacacttgtacccaccataaccggaatgggagaccacgtctcaggtcgcgtgaggggatatgtctgcgggtag

SEQ ID NO: 4537 - DNA, 594 bp, Zea mays
  Peptide Sequence Number=SeqID_47912
atgcaggaatcccttgcaggaccgacatcgcagcaaaatcctcccgagggcctccctacactgaccactcccctactgcccttgcccctttcggtgggccccaataacagaaaacagcaggagcgattacataacaatcctgagactcagtcaacagtagcccaggactgcgggttctatttctgttttggtcgggggctcatatgcaaaatgcgtgaccgcgaaggggtatgcacggtttctggccgcccgatcgcgaatcaagggccacgattagatctaggtatcatcaaccagtacacgatgaccgccctcggattgaggatctacggcccggatctactgaatacagagctacgcgcctatcgtccgattatgatccaagggttaggaatcaacagttcacacgatctaatctcgggcgctcctttcccatccaacggccatcgggtcccagccgaaccgttcacttggcttcaaatccccaccgtagattgcaagatcaacgacacgcaccctttcttcttccctcaacccgagccgtgctggcgcaccgagtccctcggcggtcgccatggttggcccccctgctaa

SEQ ID NO: 4538 - DNA, 288 bp, Zea mays
  Peptide Sequence Number=SeqID_47913
atggcgtccgtggcggagctcaaggagaagcacgccgcagctacggcgtcggtgaactccctgcgcgagcgcctccgccagcgccgggagacgctcctcgacaccgacgtggcgaggtactccaagtcgcaggggagggtgccggtgagcttcaaccctacggatctggtctgctgccgcacgctgcagggccatagcggaaaggttgttgactttggtctctcacctccatttcggcacaacttttgcgacttttcccttagtttccgtttgctcgtgtgcaattga

SEQ ID NO: 4539 - DNA, 372 bp, Zea mays
  Peptide Sequence Number=SeqID_47914
atgaacatagaaaggttggcaatgtcaacagattcaggagctaggataccattggatgtgctagaaggaagaaaaaacttcagctactgcctactgccgccgcggtgcctccagtccgcgccgtccctgtccctgtccgcccacgcccatctggtgcagccgccgcggcgcctccaggagtccaggccgccatcgcctgtgccaggcagcgccatccctgtccgcgtccgcccatccgccgcccccacaaggccacaacagggacgtccgccacccgccaagcagggccagtccgcctgctcgcttgctccagcactatctgcacttcagcagttgctcaagcgaacagcttgcctgttgctcgcttgctga

SEQ ID NO: 4540 - DNA, 192 bp, Zea mays
  Peptide Sequence Number=SeqID_47915
atggcattacttaccagcggcatatcaaaagcaaagaagttgccaacaggcttgctggcaacaaacaccatccttatattggacaggttcgtcttcctcgtggctgctcagcttttcctatacctccctgcccgcgaaccaatctttacgaacataaacaagtacacaagcactgcaggaatcaacaagtag

SEQ ID NO: 4541 - DNA, 600 bp, Zea mays
  Peptide Sequence Number=SeqID_47916
atgcgcggccacgctgctcctgggatccgccgccgccttgccgcgtcccggtttcgcggctacagcgccgttcgcgtcccaatggagacgtcgccagatcaccctgattacacgattaatggagaggagaaacttttctttggacaagtgaaattgctattccagttcatcccacaaatgctgtcgagaagggagaaggcaacaaacttcaaaccagactatgatattgatatccatatgaaggtcctagctatgagtgtgcaagaatccagtattcttacaggctacaaaatgaaggttcgcactattaaagtggaaaagaggatcaatgagattgtgaaccgcttgaataagacaaaggtggaacggaaacctgatttaaaggctgaaagagaggctattagtgctgctgaaaaggcagaaagaaaggcacaacttagagacaagaaacgtagggaagagatggagaggcttgacaaagagaagcaggctgatatcaggagctacaagggtctaatggtccaagagaagatgacttccaacaagcaaatcgcttctggcagcaagaccctgcaggaacttgaagaagacttcatgtga

SEQ ID NO: 4542 - DNA, 96 bp, Zea mays
  Peptide Sequence Number=SeqID_47917
atggcgaggcaacaacatgatcctcgtgcttgcagctgctctgctcattgcaagattctatatcctatttattcgcaatcaaagaaaaacaactaa

SEQ ID NO: 4543 - DNA, 741 bp, Zea mays
  Peptide Sequence Number=SeqID_47918
atggtcacccaggatggtgaccaccagtttgatggtggggagaagcaagccgggatgcggcctctgccccgccctcagcttcaaggatcttcatcatccttgctgtggaggagggtgaggcgaaccggggcctgccttcgcgtgggctgggtgcggcattccgtcctttgtccgggcgactgtggtcggccgtaccggagggtctcacaacatgtcgtacgccgtgagggcggtactcgtgttctgagacggtcccgttctcgttcttgcggtgaggacgggagtgaggacctaccggtgcgctttggggcggccggtgttcgctggtgcggtgttggtgggcaggtggctgtcgtcgtcggtgctgaggtggtggcagccagagaaggtttctctgccgacgagatcgtcagcgccacctgcggtcggacctccggctcttcggccttggcggcttgtcctcgcccctcgagtggggacgcgggcgaggagggccttgtcgcagcagcgtctgccctgaggtcatcgttgctgctgtttagctgcccggagcggaggtcgttgtcgctgctgctgcagtggtcggcggcgagccaactggagcttgtcgtcccgcaggccctccgatgtgcaggttgttcatacccgcgggagtggaaccggagttccgtttgtaatggcaccttgagtgccggtgtttgttcattgtggctgtcgaggcctgaacatctaggtatttga

SEQ ID NO: 4544 - DNA, 600 bp, Zea mays
  Peptide Sequence Number=SeqID_47919
atggtcctcgcctcagttgtcgccaccttgttcgtcatcctacttgttttctgtctcccctcatgcctccacctccgcgccaccccattctcgacagaggacgtgagagcaggcgcctcctccccgtattcatccgacaccaaccccgacaccgacccgcgcagtggctattgcgcgtccacgaggacgtttcacagcatgcgcacaccatcattttcgccgtcgtcggacgtcccgttcgtcttctcggccttcgctctgttcttactccccaacctgctgcccccgcccacggtcacagccacgagccgaccgacgctcgtcgacgcggatgcccaggtcttcgtcgtgtctttctccggcaacgaacagtgggggaggcgagggatgggggtccctgatttgctgcatatgatacatgttcgatggctcggcatcgcctgtctacatgacctttcccttaccacggtgtcaactcgcggtatactactgatgtcgcctccagatgcccaggtcttcgtcgtgtctttctccggcaacgaacaggatttggagatccttgcgctcgtccctcgtgttcttgcctcttgcatgcattag

SEQ ID NO: 4545 - DNA, 1143 bp, Zea mays
  Peptide Sequence Number=SeqID_47920
atgtcttcgcgctcccttatgcatcgtgtctttccaccttccaagccctcggatgggggatacccgccgtctttccgcctcgtcgttggaggaacgcaactccgtgggagttggtacctttcagccatcgttcggcttcaaggattttcatcggccagcccggctgtacccctacgctggtggtcacccgagacggtgaccaccagcacctgggtggggagaagcaagccgggctgcgatcttggtcccaccctcagcttcaaggatgttcatcatccttgctggggcggggagcgaggcgagccggggctctacctcccgcgcgggccggctggccacctcttcttccagcttctggtggtggcaaccatcctccagctctgcggaggagacgtcctccagccatgccggggaaggcgaactgttgctgcccagctaggatgcaacattccaccctcttcctcgctttcgtggcgaggacaggagcgaggacctgccggtgccctttggagcagcccgctctttggctttaatagctggttcgcgtcccttgagcgggaacacgaacgagagccctccggcggccgcgtccgtcctaggaccatggctgctgccgcagaggttgctggcgggtcccccggtgcccgtcgccccgcgggctccccggagtccctcagctcggtcagccttgttgcccgaggcttctcttgctcagttaaaggaacccctcggccgctcttcgatgagccgaggccaggggtagcggtatcagcgcgaacagaggtggagttggctcgaaaagaagacctggtcggccggagcctggccgggtcgtccgttagcgggaccgacgccggaattgacctgccgaggcctcgggccgggctgatgtccttggaggacagctggccgaggccctggggtgaccggccgagccgcctgctcgggccggattctcggagaagaccctggcggcgatggctcgggcttggtgatgacgttgtccttcagagcagagacccttggaccgcgtcgccgtccgaggctaggtcgggcctcgctgaaggtgttgttgacgccgggggcgctgctgctccctttagccgtcaggatccgagcctgcaggatcggattatcttgtag

SEQ ID NO: 4546 - DNA, 129 bp, Zea mays
  Peptide Sequence Number=SeqID_47921
atgggaaccaatgggcatctcgacctcgacacgacaggattacggggaggctacgctagcacaaaacaaaattttcaaccccataaaaccaagaactactgcggttataggtcatggaattaccactag

SEQ ID NO: 4547 - DNA, 447 bp, Zea mays
  Peptide Sequence Number=SeqID_47922
atgccgacacaggcgagaggatcgcagggtatccatgccggggaagaggtggtcggcactggtgaggacagtggcgcgcgcaggaaggccgggggcgctgcgcatgggagcggaccgcgcagggtgcgcaggaaggccgcggggcgctgcgcgtgggggtggccggagcgtcttgagcgggagcacagacgcggcgacacggtgcgcagcgttcagatccgcgcttggcggagggaatcctggtcgcgggcggacgaatcggggtcgaatcgagggcgaaattgcctatcgcgacccgcggggagagggagggagggaaggggaaagggaggcgacgggcgctcaggggagaagggccagactggccggaggtggaggggagcggcgagcccgccatggcttcgaccagctcgtcgatggaggagcaggggtagacgccatggttga

SEQ ID NO: 4548 - DNA, 705 bp, Zea mays
  Peptide Sequence Number=SeqID_47923
atgttgctcgttcttcctaccacggacaaatccgtccgagctgaagcacaaggacctatagtgcacgtttctcagtctttaagtgagactatcatcgatctagtcatcgtgccacggatcacaattccagaagaagacttcaggcgaacggtgaagtatggattttggccagatcttcaaaataaagataaggtggaatgcaccctatgtggtcaggttgttagtggagggataaagaggttaaaacaacatttggcatgggcatatggagatgcaaagttatgtcccaaggctagcagtggattaaggaaggagatgacaagttatttggaggcaaacaagagaaaaagaccaatgtttctagatgaagatgaagaagatgatgaagtggtggaggtggcagcagcagatgaggcgaatgatacatctgctgtggagtctcaagcatgcaggctaagcctagttctggcaagtagtaaagcacagccaaagacagccaagtccgtagttgagatgttgcggagaacaccagaggaggtggtggatgagagactttcaggttcttatcagcccacaatcttggctagtgcaaaaacagctaggcagtttcagattgcaattgaggccacacacagttggttcaggtataagcctccaacaccttacactacaaatgaccaggaagttgcatctctcatagaatga

SEQ ID NO: 4549 - DNA, 81 bp, Zea mays
  Peptide Sequence Number=SeqID_47924
atgcagcttcatacccttagagatgatgtggttttataccctcagaggtgcttgttgctcgtcaagggaagtgggaagtag

SEQ ID NO: 4550 - DNA, 456 bp, Zea mays
  Peptide Sequence Number=SeqID_47925
atgcagcttcatacccttagagcattctggggtgtttgtggatcccggggtgttacacgcgtgcctggctctcggacgcgagtggcttcggagccgctcccggcgccggcgtatgccacggtagctggaagaggttcttccgccgacgagattgccagggccgcccacggaccgacctccaactctacggccttctgcccgtccttgcctcacgagtttgggcatgggcgggggcctcctggcagcagcatccgccctgaggtcatcgctgccgctgttcggccccccggagcagaagtcgtcgtcgtcgccgctgctggagcgggcgacggcgcgccgttcgtcggtcttctgttgctccgcaggcccccccccatcgagtggggttactcgcctgttggttgtctgaaccgcttcaccaagcgtgagtcgccccgtgtaaaggtggcgagtgag

SEQ ID NO: 4551 - DNA, 597 bp, Zea mays
  Peptide Sequence Number=SeqID_47926
atgggccgatcagccgaaggaggttgtcgcccccaccacagcagcagtcaaggccgtgaggggagaggtggcaaagaagagagcgccaccccacagcacctacacaagccccaaccaactgccgccaccggccgcaaccgcaccaactgccagctgctgaggcagatccgatcgacagggtccagatccggcctccgggcaccggatccgaccgcctgggccacgggccaacgaccccaggttgagctactgccgtcgtcaagaaaggaggaggggaacatgtggggagaaagaaagatgccccaccaccgtccccgacacctgcatgggcaccagccggcgccgccacagccgcagcagccacccacgtcaactccatgcagccgcgcgagggatggcttgccggcttgctgcggagcgtgccaccaacgcgaggacgagagccttgctgccaccatccctgtcggccagacggccatgccggcggccagctccggcggcagcgtagcaggagaggagaagagagggaaagcagtggcgggcttgggagccgcacgtgtcgccccgcgtgggagcgacgccctcggagtaccataa

SEQ ID NO: 4552 - DNA, 327 bp, Zea mays
  Peptide Sequence Number=SeqID_47927
atgctggacgacggactccacctcgctcgaccccagggctcggacacagcctcggcctcagaagacggtctctgcctcacccgaccccagggctcgggctcaacctcgatgctagatgacggactccgcctcgcccgaccccagggctcggacacagcctcggcctcggaagacggtctccgcctcgcccgacctagggctcggactcaacctcgacctcggaagatggactccgcctcgcccgagcccaggggtcagactcagcctcgacctcggaagacggactcgacctcgacctcggaggagcctccgcctcgcccgacctag

SEQ ID NO: 4553 - DNA, 285 bp, Zea mays
  Peptide Sequence Number=SeqID_47928
atggggaagcctggcccatcactcctcatgctcctcctctgccgagtgaccgcacttgtacccaccataaccggaatgggagaccacgtctcaggtcgcgtgaggggcaaagtctatgggcagaattttgaggttgaaattaattcagatgctcatggtgcaaaattaacaaaagtttctgaaaagccagtttacacgaggaccctgggttctcctaaaccaactcttaactatgcccctgcgcaactattcactgagtctctaaccattcaaaaacccccgtga

SEQ ID NO: 4554 - DNA, 699 bp, Zea mays
  Peptide Sequence Number=SeqID_47929
atgaccttggagcctcatcccttgcagccaggctggcgtttgttggactccgagtctttcggataccgggctgaagacactattgaggccattgctctccacgggttgacgaccttttgtggctttcaccccttggagttgtccactcatcccatcggtttgttccccgctgaaaatgaggacgacccaatgtggaaggatcgagtggagcatgccaaggatgtgtgggctctttacccagggcagactggtcacttgacggtgcgatgcatgaatgccctgtatcgcctgcaagcggtgcgaggagaggcaatgtctcagctaatgggcttggcggaggctaccaagatcaccctggataacagggaggaccttgtggtagacctatccactaagacggtggaaaaggacctccaggtgttgcagatggccacccagatccaagagcttgaggagctagtaagagccagggagaacaccatcgaggttctcgaggatcagcttatgaacactcagcagcaacttgaggaagctaaccagcacttggatatgcaccatcaggagattcaggacatggaggccgacgaggatgttgacatcgagggaggagaggagccggagcctgcatccagcctagacactactggctcagggagaccaccttcccccgagtcaagcgttgtctcgtttgctcattag

SEQ ID NO: 4555 - DNA, 180 bp, Zea mays
  Peptide Sequence Number=SeqID_47930
atgaaggtccacttgagaaaacgtgatcggcacatgagaccatttagacttgatgatgggcgcgttaaaaaggagcttcttgaggtccccaagggcttcttcggcttcgggtgtccaaatgaagagctcagtttttctcaagagatgatacaggggcaaacccttctcgccgagacgtga

SEQ ID NO: 4556 - DNA, 1938 bp, Zea mays
  Peptide Sequence Number=SeqID_47931
atgcaggcggcatgcaaccgcgccaagtggacgcgctccccgactcccgacacgccagcatggaggcccgggcccacgcgtcgcgcaaccggcgcgccggatgctgcatgcaagcaactgcaccgcctgcgccaccaccgcgcctcctcgattgcggaaccaatgccgcgactcgaggcgacccagcgcgcgacccagcagcgtcagcccgacgcggcggccaacgcggcgaaaagtgggccgacaacgcgcccgtggtccgtttcctcgaacggctcgcgcacgcgcaacggctgccccgccaactactcgccccgtcgcattaactcccgcggctggacaggcggcgcttctggcaggagcagcgggcgacgcttcgccttcgccgaaacaaccgcgccaaaaaaggctccgagcctccttactgatcaggggttcgaaggctggccccccgaagggttcaacagccgcctcagatcgcgtgggccctacacccactactggtcagaggttcgaaggccggccccccgaagggttccacggccgcctcaggctactcgggctccgtgcccattactgatcagggttcgaaggttggcccccgaagggttcacagccgcctcagacgccgagcgagggatgaccagggggctcggactcgggctaggccccggaagacggcgaactccgctccgcccgacccagggctcggactcgggccaggccccggaagacggcgaactccgctccgcccgacccagggctcggactcgggctaggccccggaagacgccccagaagatgacgaactctgcttcgcccgaccctagggctcggactccgccctggcctctgccgaacgacttccgcctcgcccgacctaggggctcggactcggcctcggccgtggaagacagactcgacctcggcttcggaggagcctccacgtcgcccgaccaagggcacaggcccgccacgtcaacaggaagcgccatcatcaccctaccccgagccgactcgggccgcagagaacaagaccggctccgttgctcctccgacagccacgacatcacgccagcagggtgccaagatctctccggctgccacattggcatggccttcttagagaaggttggccgcgcggggacgaggacgggacatgcgctctcttggggccgctcgcttccctcacccgcgtggacgcttgtaaccccctactgcaagcgcacccgacctgggcgcgggacgaacacgaaggccgcgggatttccacctctctcacgcccgtctccggccacctcgcttccccccttcgcgctcgcccacgcgctcgacccatctgggctggggcacgcggcactcactcgtcggcttagggaccccccgggcgggcccttggccgtgtcgggcgccatgatttggtttgacgggatgggggctcatgactcatggatggaccctgctgccggcctgccgctgcttcgcggtcccggcggcggctctacgcgggtccaacgctcgcacgggagcagcgtgagcgtgacgggaaggggctggcctgggggaccgtggacaccggtgatgggttgggttgggtgggtgggtggcgaggcccgcccgtcgctcgtcacatggccggacccgacgcatcggccccgtggaccgcgcgcgccgcggctcgatcctagccgtaaatggacgtgggcccccgacctgggagtccgtccgacgccaccatcggccatcgcgccctccccaaatcgcctcgtccgcccaattatgctcctcaaaccgcacgcgcgcgcgcgactcaccgccgttgtcgtcgtcgtgttcgcggagatccgcggggctcgcccatccccctcctccctgctctcctccccagcacccacggcccgctgctgcccctccgcgcgccccctcgccaaaccctag

SEQ ID NO: 4557 - DNA, 459 bp, Zea mays
  Peptide Sequence Number=SeqID_47932
atgaagtcgtggaggaggacttccaggagttccaagagtacgatgagttctaggcgtgggttagcggcaaacccccagtcggctgcttgtgaaggccttcaagctcctgcacccggaggcgacgacccggacaactctagggacgatgatgaagatgacgacgacaaagaagatgatgaggagaacatcaacgaagaagccaccggtggagctagagaagatcgcctcaacaccctagctggtgtagtggcgggtcttaacacagacctggacagtgccaccctagatctctctagggtgcacttggagctggaagatgcccacgccaggattgcagccctggaagctcaacttcaaggaagggatccccctgaagcccaagtccccgccatggcgttgtcccctccccgcaagaggattcgctatggagagcccgaatccatcaccaggctgctttaa

SEQ ID NO: 4558 - DNA, 1044 bp, Zea mays
  Peptide Sequence Number=SeqID_47933
atggcaggaatatactacgacgcccgcgaccttcctctcccccgtcggcgaggcaaaaagctccgcgaaaaagagatgggtccacaaatcccaatgaagggcgatccccaaatacccctcgcacaccgctacgaagatagcggcctgcgagatggagttgggggtgaggttgtgcaactccaccccatagtggtacaggatcgcccacataaagcggcccgccggcacaccgaatccccgctcgtggaaggagacgaagctcacgacgtaccccggcggtggggatggagcggctccgcccacggaaggaatccattccggtcgctgctcatcggtgagagggcgaagcaaaccctcgccgaccagatcctccagatcgctcgccgtcaccgtggaaaagggccatggatcgcgcggcgagatgatggtcacccgtctcttgggttgcgaaaacctaagaaggaggcaggaagcggagcgaagaaccgtcaccagaccctctcccaggagaagcgggcgacgcttcgccttcgccgtaaaaaccgcgccaaaaagggactgggaaagggggataccccgaaaaagatccttccccgtgaaggaacctggctccgagcctccttactgatcagaggttcgaaggctggccccccgaagggtttcaacagccgcctcagatcgtgtgggccctacacccactactggtcagaggttcgaaggccggccccccgaagggttccacgaccgcctcaggctactcgggctccgcgcccattactgatcaggggttcgaaggctggcccccgaagggttcacagccgcctcagacgccgagcgagggatgaccagggctcaccggagacaccatgttcggcgcccatcgagggtaacatggcgctttcccccactcctccttgcggaaaggcgacgcaggggccgtcaacataccagcccgagagcttgggccccgaccgtacacccgggctacggctagttcgcatgagggaacaaccagaccagccgaagcattacgcaaggcattaa

SEQ ID NO: 4559 - DNA, 600 bp, Zea mays
  Peptide Sequence Number=SeqID_47934
atgaagtcgtggagaaggacttccaggagttccaagagtacgatgagttctaggcgtggtgtacgtgaattgctgatcctggcacgtacatggttcgcattcggcttgccttctaaaaccgggtgtgacataggtggtttcaaagtcgtgctgactatggctcgtcttagacacaccgcacggaagtcagtcattcctttcttgccttctcgtctcgcggagcgtccgctacgctgtcctgtgactgaccgctgggaggcgacttgcttggtgcgccgtccagagaacagtctccggggtgcggaggtctgctcagagcattactctatttctgagcgggactcagctgaggaggccatgcaagatgccgcacggcgtgcgctttcgcactactgcttagtgctcggtggggtggccgatggtcttaacctgaggtattacccccgtcgtccatctggcagaacaggaggcatggttgtctcgcctgttggtgaggacaatcctaggttgagcagcacagtcaacctagccgtcgtgctaaacacggagctggaccatgccttagatgagctgagtagggctcatgctgagatcacctag

SEQ ID NO: 4560 - DNA, 864 bp, Zea mays
  Peptide Sequence Number=SeqID_47935
atggaggcccaggcccacgcgtcatgcaaccggcgcgccgaatgcttcgtgcatgcaactgcaccgccacttgcgccaccaccgcgcctcctcgactgcgcgggcaggagcagcagtcacgtcgtcagccaagctcacgtcccatccgggggcagcgagagaaccctctctcacggcgtgaagacaacgcgcccgtgttccgttcctcgaacggctcgcgcacgcacaacggccgccccgcgaaccactcgccccgtcgcattaactccgcggcgggacaggcggcgcctctggcaggagaagcaggcgacgcttcaccttcgccataataaccgcgtcaaaaaagccgcctcagatcgtgtgggccctacacccactactggtgagaggttcgaaggccagcccctcggaagggttccacggtcgcctcaggctactcgggctccgcgcccattactgatcaagggttcgaaggctggtccccgaagggttcacagccgcctcagacgccgagcgagggatgaccatgggtacgttcgatacataaccaaggctcgggctgcgctcccgagctcaccggagacaccatgttcggcgcccatcgagggcaacatggcgctttcccccctcctccttgcggaaaggcgacgcaggggcgtatgtaaaaaagccgagtctgtccctgatcgccctctcgccctgtgcagaggctcgggggctgctctcgcaaaccgggctccgaccgaaccgttgacagcgtcaacataccagcccgagaacttgggacccgatcgtacacccaggctacggccagctcgcatgagggaacaaccagaccggccgaagcattacgcgaggcattaa

SEQ ID NO: 4561 - DNA, 522 bp, Zea mays
  Peptide Sequence Number=SeqID_47936
atgtctttcgtgctttttgactactacgaaaagtggatcctgaaaacgacggagtacacgagacacacgctacaagacaatccgatcctgcaggctcgggtcttgacgctggaaggggacagcagctccctcggcatcgacgacaccttcggcgagggtcttctccgggaatccggcccgagcaggcggctcggccggtcaccccggggcctcggccagccgtcctccaaggacgtcagctcgacccgaggcctcggctggtcaactccggcgtcggtcccgctaacggacgacccgactaggctccggccaaccaggtttccttttcgagccaactctgcctctgttcatgctgataccgctacccctggcctcggctcatcgaagagcggccaaggggtccctttaactaagctagagaagcctcggacaacaaggccgaccgagccgagggattcctacgcctccgggatacggatacctcactcatcacctttacacggggcgactcacgcttggtga

SEQ ID NO: 4562 - DNA, 336 bp, Zea mays
  Peptide Sequence Number=SeqID_47937
atggacagagccgatgactccgcgggggcagaaagggcacgggcaattgcggttggctgggggtctcgagagaacgagggagagagaaggggaagtccggcggagaaattcacctcgggtgaggcgcaatcgacggtggaacttcgcatggcggtggcagagctcggtcagggatggcgagcgagccttgccgggggcggaatcgggcgtagggagcctgatgactggggagctccgtctgtaaccctgctttatgggaatattccggggatgacctgggcgtctgagggcacatgcgtccttaatccaagacgctgggcactcaggcacctataa

SEQ ID NO: 4563 - DNA, 453 bp, Zea mays
  Peptide Sequence Number=SeqID_47938
atgggcaagaacaacaagcgcaagcgtgagccgactcctccatcggaggagtttggtgactcggaatactcagaggaggagttctcctctgagtccgaggggtctccggctcccatccccctacgtgagtcgtctgatgactcagacgactcccaggggcttgcggcggaggtctggacgtacatccgggccgtcgagcgctccgggctcgagggctcggatgagtctgagttctcctcggacgaggaggactcggacggcggcgaggacgaagatgacgacgacgacgacggtggcgacggcgacagtgatggcggcaacggcgacggaggcagcggcggcaagggtagcaccagaggcggcagcagcacgggcagcaccagaggcggcagcagcaagggcagcaccaagggcggcggcggcaagggcagcggcggcaaggccagtggctaa

SEQ ID NO: 4564 - DNA, 192 bp, Zea mays
  Peptide Sequence Number=SeqID_47939
atgcaggaaactgctctctggtcgaggtacacaatgtttgctaacgtcatcgactcgagccaggtgagggttcagcgtggaggttcgtcgaggtctgctgctcgtagctcccgtcgctccactcaagatccagcagaagtggagcaactgcgagaagaacttaggcgacaacaggatcaacaagctgcgtaa

SEQ ID NO: 4565 - DNA, 252 bp, Zea mays
  Peptide Sequence Number=SeqID_47940
atggtcgccttccaagagggtcaccctccttttaaaggcgactctccctacttgcgtccccagccgtcgtgggctgagtcttctccaacacgctccaaggtcttcccctacggcgcgggggctgggtcccacacgtcatgcaagccggctcagagcagaagaagccaaaccgccgtgcgtgggaccgggaaagggggataccccgaaaaggatccttccccgaaggaaccaggctccgagcctccctactga

SEQ ID NO: 4566 - DNA, 672 bp, Zea mays
  Peptide Sequence Number=SeqID_47941
atggatgcggcgctggaggttgctgtgggttcggagacaactcaactcaccggcatggagaacgctcaacaggctacaactgctttcccagagctaggggagccggcccctaccactgtggcatccttcatcagcaaccacacctgccctgctgcaccaccgctgctccaggagctccatcaagcgccaccaaacctgaagaaaaagaagaagcaagagtccaggccgacccgcaggagcatgcggctggcggcgatcgcatggccatgtgggaacatccaggaacgcgcgcgccaggtcctgctgaagcgcctgggcttgctgcctaaggaaggccagccgtctgatcaggttgctgcaagtgccgcgctggagacctgcatcaacctcttcaagggcccgttgtcgtccttggtgctgcaagcgctgatggacctctgcggaatccttccaccacagggccctgcggcacaggaatcacggcagcagccaggggccttcaattgctgcgattctgctggaccactcagcttagccgtcgtcgttcgtcgtcacatgtgcttgtctgtctactatctgcagtgttctgggaacttcaaggttcatgccactgtctaccgatgtctcaacataactgcaaattttgagctggaatctgcgtgggctcaatga

SEQ ID NO: 4567 - DNA, 570 bp, Zea mays
  Peptide Sequence Number=SeqID_47942
atggaggtttcttggcaccatgtcatcaagccaactgtcatgccagaatttggctgtcttgccatctccaacggtgacgatggtggaggcgctaaagaggagccttccgaaggagcggcggatcctgtcgatgcgtttacgggcccatgtcgcgaggggaaagaccgacaagtgcggcctgctcctacgcccagcggccaacagtggatgtggatgagtgcacgagctcccgacggccaacgcctttctttctctcgtactcccgacgaccagcagcggatgtcggatgagatcctgcgcagccgctcggctggacttctggagaccgctgggcgctgggcgctggagcgcagccgcagtccgcagcgtccacgagctggactgctggagcgcacgcactgcgcagccgcaggcgcagcgtccacggcgacaccttctccgtctgcgtcgcgtcttggactctgcgtcctctgtgtgctgcgtgccgtgcctgggccagcacggcccgatggaagcccgccgtgctttagggccgtgctgggccttatttctactcaccaggcccggtaa

SEQ ID NO: 4568 - DNA, 2466 bp, Zea mays
  Peptide Sequence Number=SeqID_47943
atggcatgctgtctccagctccaccatcttcgccggccgtcccctgctccgctccctgctcgggtcctcttcctcctctcgaccccgcgcctgcgccccgtcagagcgtctcccggctcgtccccgcccaactccttcgctggctggtcctccgactccgacagcgcggatgacggcgccgacaaatctactctagggttcggccgagcaggagggcttcttggacctggacttgctgcctttttcttcctcgccggcattacctttgctgccgtctctatcagaagcagtggcacccacgcagctggaaaattgcaaaacttgcctacagagactgctgccacggaatcttaccctgattatcactcccacaaagaggatggtgctaccagggaagcttccttaccaacggattgggacgaagaagactatgacaacctcgataaaaaagaagatacagatgaattcctgacgcctctacagtcaaacgaggttcctggggtgccagctgaaggtgaagtggggcacctgttgcagaacactgagcctgttactgatggtgaccatgttgtcggtgaagaagcgaatcagtttgacaatctcattgcatccgatggtaatcaagatccaccaccacctttgcccatactcgatgctgcaggcccctcggaggaaattcctgatgtagaagaaacatcagatcccaaaatggatttgccagaaaaccagcatttcgatgaaacattaacttcagatgcaatggtgctagattcagatgttgtgcccatccaggacatctctgaaggtgccattgctgctgcatttcacccagaagacaaaggtgtcgagcagaacccacaaactcttgacaaagatgaactttctccatccggattgcctgattatatggaacatgtgcccgcagggccgattgtggttccagcttctgttgacccaacccaggaaaatgctatagctgcattgcagattctaaaggtgatcgaatccagtgctcaagctggtgaattgtgtacccggcgtgagtatgctcgatggttggtagctgcgagcaattgcctttcaaggaacactttctcaaaagtgtatccagcaatgtatattgataatgtcactgaacttgcatttgacgatgtcacacctgaagatcctgattttccattcatacaaggcctagcagaagctggattgatttctagcaagctttcaagatctgatatgaatatcccagaagatgttcatgacaatcatatcttgttttcccctgagagtcctttgtcacgtcaagaccttgtgagttggaaaatggccctggataagagacaactgcctgaagttgacagaaattgtttgttcaaactatctggctacatagacatcgataagataaacacagctgcctggccagctttggctgcagacttggatgctggagaccagagcattacagctcttgccttcggtttcacaagacttttccaaccgaacaaacctgtgacaaagggacaagctgccctagcattttcagctggtgattctggcgaagtggttctggaggaggttgcccgtatcgaggcagagaaaatagctgaagcagctgtaaatgcacatgctgcattggttgctcaggtcgagaaagatcttaatgcaagttttgaaagggagcttaaggaggaaagagaaagggtagagacccttgaaaaagtagctgaagaagctagggtggagctagataggttgagggcagaaagagaggaagagaagaatattctggtcaggggcagagctgctgttgagtctgaaatggaagttctgttgaagttgaggagtgaggtagaggaacagctgcagaacgtactgagcaagaaggtggaggtgtcgttcgagaagagtaggattgagaaactccaaaaggaaattgagagcgataactcggctgttgtgcaacttcaggcttgggcagaggaggaagccaaaaaggcccgggagcatgcacgcgcccttgaggaggcccggaaccaatgggagcgtcaaggaatcagagttgttgtcgaaggagaactgaaggatgacgcctcagctggggtgacatgggctaacgctggcaaagaaaacgcagtcgacgagtctatcaaccaggcagaagctctgctggagaagctcaagacaatgtctggtgagatggaggtgaggtctcggggtgcggtggagagagtgatgcagcatgtgaggtccttcatcgcaatcctaaagcagcaagctgcagatgcaaggcagtggtgtaccgagtttggggcttgtgctgcttccagggcaaacgaggtatcagcacaagtgaagggaagcgtatctgcgtttggtgcaacccttggagacaagtcgaagagggcaatggaagagtgcaaggacggcctggagaggatttcacacagattcaagacagactag

SEQ ID NO: 4569 - DNA, 903 bp, Zea mays
  Peptide Sequence Number=SeqID_47944
atgtgcccatggttgaacaaagtgcaaatcacaagtaaaggaagaagaagaaaagaagtggagagtggctgtgtacagccaaaggctgtttcgggctggggcaccggactgtccggtgtgcaccggacagtgtccggtgcgccagaccagcgcggagcaaaccagccgctctcaggtttttctccggcgacttcggctaaaattcaccggactgtccggtgtgcaccggactgtccgtcttgtgtgcgttgctcattcccaccttactccgtgcctctttgtgaactcaattgtaagggcgagagactccaagttgtggagattcctcgcaaacgggaaaagatcaaaggaaagaaaaacaccgtggtgctctcaggaagtcgttcggccgaggccagggcggagtccgagccctggggtcgggcgaagcggagtttcgtcgtcttccgggcgttagcccgagtccgagccctggggtcgggcggagcggagttcgccgtcttccgggacttagcccgagtccgagccctggggtcgggcggagcggagttcgccgtcttccgggtcttagcccgagtccgagccctggggtcgggcggagcggagttcgccgtcttccgggtcttagcccgagtccgagccctggggtcgggcggagcggagttcgccgtcttccgggtcttagcccgagtccgagccctggggtcgggcggagcggagttcgccgtcttccgggtcttagcccgagtccgagccctggggtcgggcggagcggagttcgccgtggcgcctttggcaaggcctgactgcctgtcagactcactctgtcgagtggcactgcagtcggagtggcgcaggcggcgctgtccttctgtcagactggccagtggagcggtggagtga

SEQ ID NO: 4570 - DNA, 1251 bp, Zea mays
  Peptide Sequence Number=SeqID_47945
atgacggaaatgactagaagcaaggacagtttacggatcagcacgaattttgacccaattttctccaagtgttttctctcatttctaagcagtttcaagggtatgtcccttactagagattactcccccaacattggtctccaagtttgctacagaaactacagcctaaaaacaaaggcagggcgacgtgggggtttctccgaagccgaggttgagtctgcctcccgttgccgtggccgagcccgagccaaggggtcgggcgaggcggaagtgaaagggaaatgtgcctttgggccatttctaagtattttggtgattgagtgcaaacacaggtgcttaaatgtgaaaatgtgcccatggttgaacaaagtgcaaatcacaagtaaaggaagaagaagaaaagaagtggagagtggctgtgtacagccaaaggctgtttcgggctggggcaccggactgtccggtgtgcaccggacagtgtccggtgcgccagaccagcgcggagcaaaccagccgctctcgggtttttctccggcgacttcggctaaaattcaccggactgtccggtgtgcaccggactgtccgtcttgtgtgcgttgctcattcccaccttactccgtgcctctttgtgaactcaattgtaagggcgagagactccaagttgtggagattcctcgcaaacgggaaaagatcaaaggaaagaaaaacaccgtggtgctctcaggaagtcgttcggccgaggccagggcggagtccgagccctggggtcgggcgaagcggagtttcgtcgtcttccgggcgttagcccgagtccgagccctggggtcgggcggagcggagttcgccgtcttccgggacttagcccgagtccgagccctggggtcgggcggagcggagttcgccgtcttccgggtcttagcccgagtccgagccctggggtcgggcggagcggagttcgccgtcttccgggtcttagcccgagtccgagccctggggtcgggcggagcggagttcgccgtcttccgggtcttagcccgagtccgagccctggggtcgggcggagcggagttcgccgtcttccgggtcttagcccgagtccgagccctggggtcgggcggagcggagttcgccgtggcgcctttggcaaggcctgactgcctgtcagactcactctgtcgagtggcactgcagtcggagtggcgcaggcggcgctgtccttctgtcagactggccagtggagcggtggagtga

SEQ ID NO: 4571 - DNA, 567 bp, Zea mays
  Peptide Sequence Number=SeqID_47946
atgacgccggcgctgctcgcccctgccggcgctttggcggatgaggccaccgccggtacagcagcgcctatgctctcagttctcgttgttgttgtgtccatgcttgctggctggctggtcggcgtcggcgaggccagcggcatcaactccgtcacggcgttctaccccgagcaggccgccgccgactccaacgtcagcgtcgccatcaccgggatcgggccggacttcaccagcctcaagtccttcggcgacgtcgatgccttcgccgagggcctgatacgcctgtactacctggaatacacgctgcagaaccccggcgagcggcggcggcacatcgtctcggccatcgggatggccttcaacggctggtacaaccgcctccactgcgatgggccagcgacttttgaatataatgggagaactttcccatatgcctttggtgatgttctgaatggacgtacccctgggaaacaatttgtcaagaaatttcagggaagcccgtacttgtttgttaagatggaccaatgcaaggctacgatctacggatcggacctgacaaactactga

SEQ ID NO: 4572 - DNA, 675 bp, Zea mays
  Peptide Sequence Number=SeqID_47947
atgacgaagatggcggagggcgtgttagtgggggtcgtggctcccgtggccatagcctgggccatgtcatgctttggattgtcattttacatattgtctaagagtcttcttgtctccaatcaaatgacagacatcaccagcatgggcgatgggaagaggtgctggaagcaaggatcagagtgcttgaagtgtgtggaaaaaatgattactcgcatgcatgctagccgttggcgtaacacccagctatgttgtagggaagagagcttgcagtgttgcgtcaaaaaggcacaataccatcaatcagtcttgagggaacaattggagtaccagaggcaacaatctgaataccagagacaacaagccgagtatcagaagaagagggatgagtattatgcaagcctccaggcccaaaaccaagctcttctctcgcaactagcccaacaagcgggcgtcccgatgccgacatatgggatgccgcctccggactttgcactgccaatgccaatgttggcgcctccacctccgtcacaattccctatgggatttcagacaccacccgcttcagttgccgcacctggagatgggtctgatcaagacgacacaacacattcgtggatgaacaaccttttcaacacgcatagtccatccggaggaggtggcgatggatatgagtga

SEQ ID NO: 4573 - DNA, 261 bp, Zea mays
  Peptide Sequence Number=SeqID_47948
atggcgctgtggaagaagtggaacctaggatctgtttggtccgactcgttaatgactgataaaagtgttctgcgcaagctcatcctgcccttctactccttcacgctcttctgcatcgtgctgccgctgaccatgttcgtcccggactgggtggtgtgctacgtgccggcgctcatgtcgctcctcaacgtgctgccggcgcccgtctcgttccctttcgtcgtcccgtacctgctgttcgagaacaccatatgtccgtga

SEQ ID NO: 4574 - DNA, 417 bp, Zea mays
  Peptide Sequence Number=SeqID_47949
atggcgagagcttgcaaccacgcgctgagactgctgcccaattccatcgccacgcagctggcatgcagcggaggcagcaccagatgcagaaacctcagcgtccacgcgcagctttccacccaagacgatgcttacacgaccgagccgccactgaagaaagcgcaagtcacacagagcctccggaggacccgccggagggcacccggcggcgcgcggcagagcctgatctccgtcgggacgtcgtgcggcggaggtgatcagtggagcagcgacatcgcactgacgttgcggcagctgcgactagacgacctggtcgaagacgggcagagggacgctgatgtgctcgtgcaccttcttgtccagcaggttccgcacatacgcggaggcatccagtcatatatatatttcaacaactga

SEQ ID NO: 4575 - DNA, 198 bp, Zea mays
  Peptide Sequence Number=SeqID_47950
atggatatctttttctggataaatggtctgacaccattttcatcgtattttgcatttacaaactcggtcattagagagcaagcatgtcttagaggacgctttatgatgagaggctaccctcttaaggtactctttggcagtttcaaagtctggtactctggagagctgcgtattattgaattaagaagaggggtctaa

SEQ ID NO: 4576 - DNA, 1635 bp, Zea mays
  Peptide Sequence Number=SeqID_47951
atggcgtggcgcggaggcgtgaatgacggggcgcgaaggatgtcgggggcggacgggggcatgaatggaaaagtggttctagtacagagttgtcttgaggccccgtcgctgtctgtctcctcacgcttgactgctcgccggcggcgccactgtcggtggcagctactaatcgccgcgtccggtggccgcgttgcagcgccggggcgtctcttgttctgctgcagcggattgtcgcggactggacgcggtgaggcggacatccctgtgcggaaggcgtgctcgggcagggccagcccaaccgccgttcgtgcgctagagttcctcgctcaggctcataacttctttatggtgtttgatattggaagaggtggtccaatggtggaatatgagaggagaatagcatcaggagagctagtagacggtgatagctttcaggttgatacaattcaacaattacaaaggctctatgaggagttgattgagaatgaagaagactgtcagctggatagatataaatcatctgagaaatcaggccggagtcgatggctatggtcccgcctcattactcagccttctacgtatgctcctattaagggcctttacctctatggtggtgttggtacagggaagacaatgcttatggacttgttctatgaacagctgccatttaattggagaaaaaaacgtattcactttcatgatttcatgctgaatgtacatagtcgtcttcagatgcacaaaggtgtttcagatccccttgatgttgtagcagctgagatttcagatgaggccatcatattatgtcttgatgagtttatggtaactgatgttgctgatgctatgattctgaaccgtctgttcagacaattgttcagcaaaggcgttattcttgtttcgacttctaaccgtgctccagataagctttatgaaggtggcttacaacgggaccttttcttgccatttattgacaccttgaaagaaagatgcatcgtgcatgccattggatctgcggtggactatcgtcaactgggttctgctgaacaaggtttctattttgtcggaaaacattacagtacgcttctgaaacagaagctccagtctttaattggagatgagaaacccagcccacaaactgttgaagtaattatgggaaggaaattacaggttcccctaggagcaaatggttgtgcatattttccttttgaagacctttgtgataaacctttaggtgcagcagattactttggactctttaaaaaatttcacaccctggcacttgatggtattccaaagcttgggtctagtaacagaacagcagcttatcggttcgtcacactgattgatgttatgtacgagaacaaggcaaggctgttatgtacagccgaggctggaccagtaggactgttcgagaatatcgtgactgttgctgaagcacggaaggtttcaccaagatcttcacgctcacagaaaagcgacgacactgacctatgcgtggacaatgagcttggatttgccaaggatcgtacgattagcaggttgacagagatcaacagcagagaatatttggaggacttcgaaatgagattgaggcaacagcagcagctgcccttgcaaggtctagataaaaggtggtga

SEQ ID NO: 4577 - DNA, 154 bp, Zea mays
  Peptide Sequence Number=SeqID_47952
atggcgcctaagcggaaagcctcgagttcgtctgctgccgtcattccccccatcgatcccaacagtcagttgcctttcgcagcttttcttggcatcctgccacactttggaatgtggaaatatttgtatcactgtcgccctgggatggccggag

SEQ ID NO: 4578 - DNA, 573 bp, Zea mays
  Peptide Sequence Number=SeqID_47953
atgagcaagaacacaagagacacaagatttatcccgaggttcggtcacaccaccaaggtgccctacttcctcgttgaggcgcccacaaagagctgggtctctttcaaccctaatcctccctttgccgaccacaaagatttgaaatgggagaggcaagagatgtgtgagagagagtgggaggtgttcttcaagttagaaatggagtttgggtcgtgctcttgtgtggggagagaggaccggttgaaccgcccctgggaccggttcaaccgcctggggcaggctgacagtcaatctgccagtcagactggcagactgcaggtcatactgcaaaaacaggtcctgacaccggttgaaccgcccctagggccggttcaaccgcctgggggtcagactggcagtcattctgccagtcaggaggtcagaccgctgaagaagctcagctcagctgcagtcaagttcagctggaaagctcagctgcagctgaagaagctcaactcagctgaagtcaagttcagctggaaagctcagctgcagttgaagaagttcagctgcttttcaacaagaacactctag

SEQ ID NO: 4579 - DNA, 579 bp, Zea mays
  Peptide Sequence Number=SeqID_47954
atggggtctcttggggttgagaacttcatggctcctttactagctctcatgcgggcccagcaagagaagaaaggaaacccgcggcgctctcgaattctgatttctgcagcctgcgccgccctttgctttgctgccatcggtggaagagatagagagagagagaacaaaggggagcggcaggcggcaggcagcccgtacggcggtgcggggggagcggcgtactaccgtatcccaccaccacccccaccggcacggggccgcgtttaccggtggggggcgattggtcaaatcgcagacagtgtctcggacgtcgccgtgcttggtccggtcatcctcatactgttgcagcttctcatggttaaacgcgattcttgggaagccctgtacctgactactggatccactaccaagctcttcaagttccaggatccattcctctttgtcgggcaagagctcttggcctctgtggattatcagcctgattcacaactctctgcaagaattcgagcgcagatgggccaagaaagcgcggctgacgcgattcctggtttgatggtttctgttggtgtttcgggctaa

SEQ ID NO: 4580 - DNA, 1140 bp, Zea mays
  Peptide Sequence Number=SeqID_47955
atgcggcgggagaggctggtccctttgccccaacccgatggcatggcacagccgccgcaaaagtcaaattacacagtggcgcgcgttgaaaatgatgactcacacacacacatcctgccttcctcagtcctcactcggtcactccccccaagaagagaagccaagccaaacctgccaaagacgacatttttcatggacgccggcgcagcaaccgccgcccgggagcgcccggcgccgccctcgccggtgccggtgccgcaggcgtcgccggacccgtccaaccccttccccaccacgttcgtgcaggccgacaccacctccttcaagcaggtggtccagatcctgaccggcactccggagaccgcggcggccgcggcgtcgggcgggacgcaggcgtcgccgccggccccgcagaaggcggcgccggcgcccccgggccccaagaagccggctttcaagctctacgagcggcggagcagcatgaggagcctcaagatgctctgccccctgctcccggccgccgccgccttcgccgccgcgggcggctccgccggcgccggattctccccgcgtgggttctcgccgcgcgggctcgaggtgctgtcgcccagcatgctggatctcccgtcgctcgcgctcgggagccccgtcacgccgctgccgccgctgccgggctcccaggaggccgccgccgccgaggaccgcgccatcgccgagaaggggttctacctccacccgtccccgcgcggcaatgccggcgccggcgccgacctgcagccgcctcccaggctgctcccgctcttccccgtgcagtcgccgtcgccgaccggccggtctccccatgttgtaatcttggtgtttgtaacagtgattcggcgcataagagagggattaattgatcaccgaattccagtgctcttgctagtccctgatgaactgtatgtagcagattttagcttggcattttcacctttccttgctttatccatgtgcttgcttttgacatggtttggtgggggcaagcttgtagatgaagctgtcaaaactcagctcggcgtgagccaagccaagtggacactgaagttgacattgtctattgcagaggtttggttagagaaaggtgtcatttctatcagatga

SEQ ID NO: 4581 - DNA, 2025 bp, Zea mays
  Peptide Sequence Number=SeqID_47956
atggagcgcccgacaatggaatccctgattggcaagtccccttttcccgccacccctggcgcccgggcaacagccgcggccgccgatgtctatgtggcgctcgaccgcttcttcctcatctctggcaacatggagcgcctgacactggaatccatgatgattggcaagcccacttctcccaccacccctggcgcccgggcgacagccacggccgctgaggtctatgcgacgctcgaccgcttcttgatcctctctagcaacatggagcgcccgacactggaatccatgatgattggcaagcccacttctcccgccacccctggcgcccgggcgacagccgccgaggtctacgtggcgctataccgttttttcctcctctctggcaacatggagcacctggcactagaatccccgatgattgacaagcccactcctcccgccacccctggcgcccgggcgatagccgtcgaggtctacacggcgcttgaccgcatcttccacctctctggcaacatggagcgcccgacactggaatccctgatgattggcaagcccattcctcctgccacccctggcgccctggcgacacccgccgatgtctacgcggcgctcgaccgcttcttcctcctctttggcaacatggagcgcccgacactggaatccctgatgattggcaagcccactcctcctgccacccctggcgcctgggcgacagccttcgaggtctatgcggcgctcgaccgcttcttcctcctctctagcaacatggagcgcccagcaccggaatccctgatgattggtaatccctctcctcccgccacccctggcgctgcctgggcgacagccgccgaggtcgacgcggcgctcgaccgcttcttcctcgcccgcaccgacctcctgggcatcgtttcccagattgatgaattgatatcagatgcctttaaatgccaaaccgtgtccgaaagagcaacaaaagagatagagttcttcagtggcttcttaacggatactaaggcttccttcaagcactggtcttccagactgaagcaagcactagagaccggtctagtgaaaaccgaggctttctcaaaaaacacacccgggatgtgcttaaatattgctgcaaaagacccatcagacagtccagttccaagtccagctatgagtgacagtgatgaaatcttaaaggatctgtcatcaagatatgatatttatgggctcaatgaatccaacactgaagatcctctcgagtggagtggatcttcaacaagttcaattgcccgatcaactatctcccgggcgacagccgctgaggtctacgaggtgctcgaccgcttcttcctcctctctagcaacatggagcgcctgacactggaatccatgatgattggcaagcccacttctcccgccacccctgccgccgaggtctacgtggtgctcgaccgcttctttctcctctatggcaacatggagcgcttggcactggaatccctgatgattggcaagcacactcctcccgccacccctcgcgcccgggcgacaggcgcctatgtctacatgacactcgaccgcttcttcctcctctctgacaacatggagcgtccggcactagaatccctgatgattggcaagcccactcctcccaccacccctggcgcccgggcaacagccgttgaggtctacgcggtgctcgctcgcttcttcctcctctctggcaacatggagcgtccggcactggaatccctgatgattggcaagcccactcctcccaccacccatggtgcccgggcaacagccgtcgaggtctatgaggcgctcgaccgcttcttcctcctctctggcaacatggagtgcccagcactagaatccctgatgattggcaatcccctcctcccgccacccctagcgctcgggcgacagccgccaaggtcgacacgacgctcgaccgcttcttcctcgcccgcaccgacctcctgggcattgtttctcatgttgccccctcctttaggatcccttgctctctaa

SEQ ID NO: 4582 - DNA, 624 bp, Zea mays
  Peptide Sequence Number=SeqID_47957
atgtccaaaagagcaacagaagagatagagttcttcagtggcttcttaatggatactaaggcttccttcaagcattggtcttccagactgaagcaagcactagagactggtctagtgaaaaccgaggctttctcaaaaaacacacccgagatgtgcttaaatactgttgcaaaagctaatgtcaagttgatcggctgcagcagcaagctccctgatatagatcctctccagtggtttatgtcgccactcaagactatggtcttaacagacccatcagacagtccagttccaagtctagccatgagtgacactgatgaaatcttaaagtatctgttatcaagatatgatatttatgggctcaatgaatccaacatcgaagatcctctcgaatggtttctgtcaccactcaatactatggtcttatcagatccatgtccagtgaggagtgacatggagggagatgaaaaccccatccaaacccctgttgtgcatagcaagaccttgcttgccacccatttggaaagcatggaaagcacgaagcagaagggaagattggccggagaaagtaccctcaagaaagaactgtggactcgatttgaggcggcttcggccaatgagttgtag

SEQ ID NO: 4583 - DNA, 624 bp, Zea mays
  Peptide Sequence Number=SeqID_47958
atgtccaaaagagcaacagaagagatagagttcttcagaggcttcttaatggatactaaggcttccttcaagcattggtcttccagactgaagcaagcactagagactggtctagtgaaaaccgaggctttctcaaaaaacacacccgagatgtgcttaaatactgttgcaaaaggtaatgtcaagttgatcggctgcagcagcaagctccctgatacagatcctctccagtggtttatgtcgccactcaagactatggtcttaacagacccatcagacagtccagttccaagtctagccatgagtgacactgatgaaatcttaaaggatctgttatcaagatatgatatttatgggctcaatgaatccaacatcgaagatcctctcgaatggtttctgtcaccactcaatactatggtcttatcagatccatgtccagtgaggagtgacatggagggagatgaaaaccccatccaaacccctgttgtgcatagcaagaccttgcttgccacccatttggaaagcatggaaagcacgaagcagaagggaagattggccggagaaagtaccctcaagaaagaactgtggactcgatttgaggcggcttcggccaatgagttgtag

SEQ ID NO: 4584 - DNA, 660 bp, Zea mays
  Peptide Sequence Number=SeqID_47959
atggagcgcccgacgttggaatccctgatgattggcaagcccactcctctcgccacccctggcgcccgggcgacagccgtcgagattgacgaattgatctcagatgtctttaaatgccaaaccgtgtccaaaagagcaacagaagagatagagttcttcagtgccttcttaacagatacaaaggcttccttcaagcactggtcttccagtctgaagcaagcactagagaccggtctagtgaaaaccgaggctttctcaaaaaacacacccgatatgtgcataaatactgctgcaaaagcacattaccttcctatccctcgattttttctcgagcaaggctgggatgacccggtcgtgctaggtagtccttgtcgtctgccgacgagccgtggctgggtgcgcccccaacgctttgcaatgggacccccggttggttcgggcagctctgccttggacttctccgttggtatttgcttccaggagtggatcttcaacaagttcaattgctcgataacctatctcccaggcgacagccgccgaggtctacgaggtgctcgaccgcttcttcctcctctctggcaacatggagcgcccgacactggaatccatgatgattggcaagcccacttctcccgccacccctggcgcccacttctgtag

SEQ ID NO: 4585 - DNA, 540 bp, Zea mays
  Peptide Sequence Number=SeqID_47960
atggagcgtccggcactagaatccctgatgattggcaagcccactcctcctgcctcccctggcgcctgggcgacagccgttgagattgacgaattgatctcagatgcctttaaatgccaaaccgtgtccaaaagagcaacaaaagagataaagttctttagtggcttcttaaaggatactaaggcttccttcaagcactggtcttctagactgaagaaagcactagagactggtctagtgaaaaccgaggctttctcaaaaaacacacctgggatgtgcttaaatactgctgcaaaagatccatgtccagtgaggagtgacatggagggagatgaaaaccccatccaaatccctgctgtgcatagcaataccttgcttgtcaccccttgggaaagcatggaaagcactaagcggaaggaaagattggccgggaaagtaccctcaagaaagaactgtggactcgatttgatgcggcttcggccaatgagttgtacttttgataagatatgcttaaaatgttttctagacaagcttgaatag

SEQ ID NO: 4586 - DNA, 231 bp, Zea mays
  Peptide Sequence Number=SeqID_47961
atgtctgtcaccttcggaaccccagagaactacaaaactgagttcctgaggttcaaggcagaccgcgtaagactatcaaaaccattaagtctattttcgttctactggtttgagtgttgcagggctaaagttgctgcaatgaagcatattgtgcttgcacgctttatgaaagcaacaaatcctaaccatccactgaacaacttgggtaatggtaatatactgctaggctga

SEQ ID NO: 4587 - DNA, 678 bp, Zea mays
  Peptide Sequence Number=SeqID_47962
atgcccgacagagttcttgaagtccctgcagttccgtatggtatggtgcatgttcttgtggtacggacactgggcatcaaggatttcatccagtgtttgtacccctccgcggggtgcgccgcgggctcgagcgacgagtggaccggcggtgcacacctcctcgcggggcctcttctcccagcgcctatcaggcggctggttcgcatcgcaccatggcgcgggtggtgcgggtttcgtgcctctaatgaggtcctgggcacgttcatccgtggtgatgtagaggtctgcctaccagaacaattgttcgaaggtggcaggcgctttctggagtatggctcggacaaaggccgagtcgttggatccccggtagaagtcttcaatcaccgctgcctcgacgacttcggggatgcggttcctcatggtctgaaacctcttgaggtacgaccagagggtttcatcgctccagcgcctaatggatttgaggtcccatggctacgccggcttgtcgaagagggactggaagttggcgatgaagcaccgactgaagtcgttccaaccgttgatgcagtgtggggtagatgtaggagcaactatagcgcatcttgccctaggacaatgggcaagtacgccgtcatgacgtccttcgtcaccccggcggcccgagcggcagtcgtgtag

SEQ ID NO: 4588 - DNA, 573 bp, Zea mays
  Peptide Sequence Number=SeqID_47963
atgagcaagaacacaagagacacaagatttatcccgaggttcggtcacaccaccaaggtgccctacttcctcgttgaggcgcccacaaagagctgggtctctttcaaccctaatcctccctttgccgaccacaaagatttgaaatgggagaggcaagagatgtgtgagagagagtgggaggtgttcttcaagttagaaatggagtttgggtcgtgctcttgtgtggggagagaggaccggttgaaccgcccctgggaccggttcaaccgcctggggcaggctgacagtcaatctgccagtcagactggcagactgcaggtcagactgcaaaaacaggtcctgacaccggttgaaccgcccctagggccggttcaaccgcctgggggtcagactggcagtcagtctgccagtcaggaggtcagaccgctgaagaagctcagctcagctgcagtcaagttcagctggaaagctcagctgcagctgaagaagctcaactcagctgaagtcaagttcagctggaaagctcagctgcagttgaagaagttcagctgcttttcaacaagaacactctag

SEQ ID NO: 4589 - DNA, 603 bp, Zea mays
  Peptide Sequence Number=SeqID_47964
atgggtgtaggcaagggatggcttgtggccgtggtaggaggtgagcggttgcctccttcttctataaatagtgttcttgtttccccgacattttcacatctcttactgctctctactgcttgctctcttcttcctccttcctttccaccatgggcaagagtaagaagggtagcagttctttgcctcgttctggtgacaagcgtaaacgtgagccgactcctccctcggaggacttcggcaactcggagtactcggaggaggagttctcctccgagtctgaggggtctccgggcccccgtctctcccccggcgtcgtctgatgattgggacgactcccaggggattgccgcggaggtctggacctacatccgggccatcgagcgcgccgggctcgagggctcggatgagtcggagtactcctcggactcgtccgaggagggcagcggcggcgatggcggagacgacgacgacgacggaggcgacagtgacggcggcgacggcagcggcaagggcggtgacggcagtggcaagggcggcgatggcagcggcatgggcggcggcggcaagggcagcagcaggggcagcaaccaggccagtggctag

SEQ ID NO: 4590 - DNA, 426 bp, Zea mays
  Peptide Sequence Number=SeqID_47965
atggcgaacgaggcggcaacaattgaggcgaagaccatcattatcgtgcaaagcactatactggaccagggcgtgagcctaaaccagtataaccccactatcttaaacccacgttcgagcctcaacgattcaccattcggagtgagcctatgctatcatccccacagaacacaaatcctattgtccctaatttccaaaaccacgacagttggcacactaggtagggggtcgttagcatgccagtatacatcttccactccgatggcccgatcctctatgttcgctagaggggagacttttgctcctagagggcgcatcacatttggctccctcgacttcctcgccaccaccgccagcgaactcacctcaccaaccccgacataccactgttgcaggcatggaacctgcacgcttcaacaaaagtga

SEQ ID NO: 4591 - DNA, 1341 bp, Zea mays
  Peptide Sequence Number=SeqID_47966
atgcatcgcgtccttccaccttccgagcccccggatggggagcgcccgtgttgctttcgtcttgctgttgttggaggaacgcaacttcgtggaagttggtacctttcagccatcgctcggcttcaaggattttcatcaggtagtccggctgcatccccttgccgatggtcacccaagacggtgaccaccagtttgatggtggggagaagcgagccgggctgcggcctctgccccgccctcagcttcaaggatgttcatcatccgtgctggggcggagggcgagctgagccggagctctacctcccgcatgggttcgtgggtcaccctctccttcagcattcaggggagagggcgctcaccggcctagcggaaggggcagatttcgacaacgcggggccgagcggtcgcaagcgtcatcagctccagcatgcctggttcgctggctcagctggctctggcacggcttccggtgccacctcccaccgctgggtggagtgcggctatcattcgtcacgagccgggctgaggtcctcgggggacagctgggcgcaggtggctggagaagtcctcgtcgccgatgggatcgctgctgccatctgcgctccgggcctccggctctttggctttgatagcttgtccttgcccctcgagtggggacgtgggcgagggccttgtcgcagcagcgtctgccctgaggtcattgctgctgctgtttggccgcccggagcggaggtcgttgtcgctgctgccggagcggacgtcggcgagccacctgagattttgtcgtcccgcaggccctccaatgtggggggttgttcgtacctgcgggagtggaaccggagttccgtttgtaatggcaccttgagtgccgaggcagcggtgtcagcatggacagaggcggagttggctcgaaaagaagcttcgtcggtcggagcctggccgggccgtccactggcgggaccaacgctggagtcgggttgccaggccatgagccgggctgatgtcctcaggggacagctggctgaggctacggagcggcacgatgctgacatcttccttcgaggtggagatccttcgaccgtgtcgccgtccgaggctgggtcagattccgccgaaggtggagtcgatgccgagggtgttgctgctccccctattgatgacttgttcatcggtaacagaattgtttatccgagcgagagttactttccacggaaggtgatgagtgagaaggtgatgagtgaggatcccactatcgaagtagtcgaaaagcacgaaagatgttctggcagaaagattttttccgaggaaaattttgacgcagagggggttccccccttctag

SEQ ID NO: 4592 - DNA, 1110 bp, Zea mays
  Peptide Sequence Number=SeqID_47967
atggaggacatctgggagttgaactctcccagctggcgctgcatgtcggcgagcatcgtggtgatcaactccaacgatggcggcaccgtggcggaggccaaactatcgccggcgttggaccctggcatatccgataccaggattccactatgcgttggtgcctctggaggggtcttagttggacatgtccaaaccaaggttcttaaggcgataaacggcgcatgcgaccacgtaggactgcttccagaggtcgaactggcagtcaccaagcttcttctcgtcgtcgatgagcgacgccaacgcgagcgcctcctgctagtagtgtttgttcggggtttccaaatcttctgtgagcaaaggggccaatggaaggcaacaacccaatctcaggagttccttcgaacccttcaacgctactacaataacgcctacactgatcacgagaagcaggatgctataaacatgttcttaggtcatttccaacctcagcaagggaaacctgcattgtggaagctggactcagatcagcattacaacattgggaggcaaggaactttaaaagaagagattggaagatcattcataaagaggtcactatcagatggtaacatactgttggagagcagcttgcctgtaactatctgtaacaatgaaacagacaacacagaattgctcccagtgcaacagctggatgatattagagaagcttctgattctgcgccagagatctccatatgcgaacctaacctgtgctccagtatgaactatggcacagtgcctggaagacactccatgtcagaagagcggcagagttatttgaaaagattaggttaccctgaattgcactcttcaaatttctttgaccttgatttgttgtcatcttcaggaaattcgtttgacgaggaagtttttgagaggtcattactgatcaattcacctatggatgtgatcagtcctgaatcatctatgtcatacagtgaacaaggacacactgatgagggaagagatgacacggatctttcccgttctagcagccagctctcagacattcgggactactctgaccactttgcgcagtgggtcgtgaatggagacacgctttgctactag

SEQ ID NO: 4593 - DNA, 1845 bp, Zea mays
  Peptide Sequence Number=SeqID_47968
atggccgttggaagactgttgtcgcatggcgcaccggacattccggtgtgccaccagacactgtccgagtcgagtgccctggtgcaccggacactgtccgatggtgcaccggacagtccgctcccgcctccgcgtgctgctaggccggagcctcggcgggagcctcactgcccgatgatcaaggtggtggctcaccctgtctcatccagaagagcgctgaggccctcccctgacgctgagggctgggtcgaggtttgttctcggtgtcgtcttcgcgggcctcagcctccccgtcgagcgatccctcaggatctccggagaaggtgtttcaactgcatggctccctctcacaaggtggctgagtgtaggtgcccggtgcgctgcctcacctgcaggtccttgggacatcgtgctgcctggtgcccagcccgcctcgactgggcgcccctctgcaagaattctatgtcggtctgggatcgtctcggtccgttgctgatcgaagccaagcctcgttcggttaaggtttggagggaggtcccctctcgtggcgggacggtcgagggtgctggggcgccggatcctcaagctttgatgcccgctgaggaccaagcctcccttctgtcccaggttgaagatgattggtcaccaaatcgcggcctcaggatggctcatgcggaggtggttttgttcccctctttggtcatggttgagttcggaggaattcccgtgcacgcgtgggagctggctacgacgcaaaatctgttccgagatttctgctctgaggtggagcttcatcccgacacagtcaattgcctcgatttttcttcattcaaggttttcgaatggtgccgccggccacagctcattccgggctcgtttgagctcctcatcccggagcgggtgatgagttcgggaggccctccagcggtgagacgcctgctgtcctattcggtgacggcctctgtctctcgtgttccccaggcggatgctgctatttcgccttcgtctctgacgtctgatggtggcaaccgggagacaggttctcgccggcgcaggctggaccagtgtgcgctggagaggcttggtgtttcagcttcagtccggccgaaggcccgctgcggtcgggttgtccgggggatctgcacaccaccaggtgggctggctcggccgctgaaatctgatgggtcggtccggcctttggaaattggtgggccgaacgttgtttcaccttcgagggggcccatcgtgggctctggtggcctgcccaccgcttttaagggtgtcaaagtccctccgccgccgtctgtcggtgcttctcctgtggcgtcggacgctggctgggtccttgttgtggatggtcccctatcgctctcccatgctggtggtggtggtggggacttggtctcttcaccggtcgtgggggagtcgcaggggctcggctccagtgtccccttgcccgatgacgggtctggggatcctcctttgtcgccggccgcgccccctgcggagttggtcgggatgaagtcgcccatgaagatgttggctccaggcatgagggcgggtttcattgaaagaatgtcaaagactgttgattccatcctcggcgttcctaagaagcgacagcaacgttccaggccccaagctggcagtgccttccctcaccgcagcaggcgtcttgccggggctggagtggagaaactgttagtccctcagcgtgttcagaagggcaagctgaggattgtgaaggagctgggtcttctgcaggctgatcatgacgatgtgttgtctccaagtgttctggatgattacgctaaggtttttgtaaagcggcccttagatctgtag

SEQ ID NO: 4594 - DNA, 969 bp, Zea mays
  Peptide Sequence Number=SeqID_47969
atgatgccaaacggcggaagtggtggtagtagcaagggcatggggggctatgctagtgggggaagtggagggcaagtgaagggagtagagtgggtcggagctgtcgcagcgagcgagcacgacacaagtggaaaggtggcatatgggtcaggaagagcggcggtggccgttgaggatagagaggggagcgccgttgagaggcccaaggcgggaaagaagagggcgagatggcgcaaggggtcaacgcaggctgagtggcagcgcagagccacgacaaggggcagtaccagagagcgtggagttgccgacaggggaagggagcagtccggctgctggagagggcagcaggaccgcagaagcgccgtgaaagagggcgttggtgtggagggcatgcgcaagggagtggccgcactgggtggcgacgcagagccacagcaaggggcggcaccagggatcgtgggggtcgccggcaggggaagggagcagcccgactgcgagagagggtaccaggagcgtcgtggaagagggcgctggcgtggagggcgtctgcgggaatgccgacgagttggcccggcgtcgagggagacgccgcccatgcgaagcaccggcggcagcagacataggccatggtcggtgatggggctgcaccgcgcatgtgcgcgctggggcgtggccacgccgacgagcgagggggtggggccacgccagcgagggaaggagagagcctacgcagggcgcttgagggacgttggcgaggtcgaccacgggcagggcgcgaccgacagctcactttggccgagcagggacgataggagcttgaagaagactctgggggagcgcagacctgagggtgcagccgccggtggccgtgcagagaggtcgtggagggcgtcgcgattggaggcgcggccaccggggggcgcggcgtcgggggcgcagccgtccagcgggaagcacgcgccgtcgtag

SEQ ID NO: 4595 - DNA, 471 bp, Zea mays
  Peptide Sequence Number=SeqID_47970
atgaccaccaccacccccagactccgcacctcccctagtcgcaggcgggtgggacgacgcgtggaaccaaaggtgggagggacaaacgagtgcgaggatgagcaccccaaggtgtgggtggaggaggcggtagtactcattgacgaagaagtccccctggatggaagtccaaaagacaacatcgaggtggagcacacgggcttcatgattgccgagaaagtgctccttaatggtaacctaggcctgacaagttgtgccaccgcgctcacgaatgatgtcctgcagctcgacagtgatcgtccccgagttctaggagaggaccacattgtcctttcatcgtcgggatgggatagtgagggacatcgcatcggtgagaacatggttgtccaaagcgtagcgctgcagcatgaggacgaggtcgcaccagcggtcgtaggtggtggagaccgtgttgaggaggataaggactag

SEQ ID NO: 4596 - DNA, 300 bp, Zea mays
  Peptide Sequence Number=SeqID_47971
atggggggcctcgggaggcacacaagccaaccgaggaaggccaaacaccccaaagaaacccaaacggagttgagaagagtcacaaaagtatcagacttcaacgcaaaggaaaagtccatcaagaaccatcagataatatttataacccaaaacactggtgacatgagaggtccacaagtcacagtgtatgcgatcaaaattatgcacggcttgagaggagctagagaaaggaaggcaaacatggacctagctaacaggcatgacaaagatgctcagaagcgctccgagtacaagaaatga

SEQ ID NO: 4597 - DNA, 183 bp, Zea mays
  Peptide Sequence Number=SeqID_47972
atgggtggatgtacgccgaaggacggtcccctaaaggtaccgacgaatccgcttgaccgcaatcaagtgcggctcacggggatcatgcctgtaaagacaaacctgttggacgacatacacaatgtcgagcaggtgaaggaggaccgagaaagcgacagtgggcacgatgtcatcaacatttag

SEQ ID NO: 4598 - DNA, 207 bp, Zea mays
  Peptide Sequence Number=SeqID_47973
atggatctagagcacaatttccatactcctttattttctcagaccgctcaggaatatcttggtttccacaagcttgtgtttgcaagctctgtgccaccaatcaacaaaggagagctcggactggttaggtgcacgggaagcaagacccaaatgattaagaactttaaaccagaattcccggatgaaaacacagttagtaagtgctga

SEQ ID NO: 4599 - DNA, 1068 bp, Zea mays
  Peptide Sequence Number=SeqID_47974
atgaagagcagtctgagcagaggcggtggactgagtggcacattcattggggaggggagcggaagcacgagggccgcgttattgctggcggccgcggagaagagagcggcgatgcaccaactagtggtcgtgctcgcgccggcggctgtgcgcatgccagctgctgcgcccacgccgcagcgaaaggaggtggtggcagcagccagtaaagcaggggacactgcggcagcgacttggaggaagggggggagggtggtgttcgtggtggagaagcccgacggagcttgctactttgcttctattgcaacacagattggagaggagcttggtgatatatatgattatgttgcaccatgctttccttctagatatgaaattttccagctcatggtaaacctatacactgagagattcattcagatgcttcgacttctcagtgatagagcaaacgatattcaaaatataaacatcttgaaggtgactagttgggtcgtacaatatcaagaagatttgattggtcttggtgtggatgaatcacttgcccaagtttgttctgaaagtggtgcattggatcccctcatgaacatgtatgttgagcgtatgcaggcaacaaccaagaaatggtacaataacattttggaggctgacaaaacacaaccaccaaagagtagagaggatggaaaactatatacacctgcagcagtggatctattcagaatattgaccgagcaagttcagatagttagagacaacagcacatatgtcatgctatatcgcatcgctcttgcggttattcagttggagaatggaaaccctaaccctaatcagggttggaagggtatatatagcatgttatgggccaaggcccattacaaggaagatgttgagattgcagcgaaactcggcgaaaacactcgacaacagctccttggtgaagatgtcggcaaactgcaacgtggtggggaggctgagaatctgaacgtcaccagcggcgactcgctcgcggacgaagtacaggtcgatctgcacgtgcttcgtgtgctaatgctgcacgggattggtggatag

SEQ ID NO: 4600 - DNA, 321 bp, Zea mays
  Peptide Sequence Number=SeqID_47975
atgggtgacttgtcgatcaacataagggctgatctcgcaaagatgcaagccacgctccagaaggttgagcaagggctgctgcaaatcaaggtagcagtgcaacatgagcagcaccaactggcgttgtccgcatggctccagacgtcggcggttgtgggcatacaagctgctgctcgtggcttccttgcacgacggagagtgcgggacatgcgccggcagatgctcgaggcagccttggtgacggttgacctcggcacacgggggcgcaacctcgccttgtcgggacggccatcagcagcggcaccgggctgctacctctaa

SEQ ID NO: 4601 - DNA, 468 bp, Zea mays
  Peptide Sequence Number=SeqID_47976
atgacggatgtggagaaggaggtagcaacagaaagacgaatggagtcgccgcctcgatgcgattgcgaagatcgtgttgtcatcgatgaggacactgcgaagtacttcgtcgccttgatgctcccatctgccaagcagtctcggatgaagtggtacctcacccggattgtctctcccgaggagatcaccgagcagtcgagcaagtcagagcgcttgagtcgaagtggtggaggctcctatgtactcggcctcacagctagacatggccaccacctgttgcttgaccggttgctagctaatgagacacttgtcaaggaagaagaagatcccactcgtactcttgctggtgtcgatgtcgccgacgtggtcgctgtcactgtacccgacaagatgtgcatccctagggcacctcgggtagtaaagaccgtggtcgagagtccccacaacatagcggacgatcctctttag

SEQ ID NO: 4602 - DNA, 438 bp, Zea mays
  Peptide Sequence Number=SeqID_47977
atgtggggccactgcgtcagccgtcttcatgccaacaacccgcacggatctccattgtcgccggccgggaacacctgccgtgggttgttgcgacttcctcggtcggactcaggtgtatttatatccctaatcgcagctgcccttcccatccaatcctccgcatgcgcccggccggaagccataactttgccgtcgggagctgaagttttccatcgcggtcaggaagagacgattcagaccgtcgcgcgcgttcttaactcgccgtcgtgtctggaggcatcacctggggtctacggaagtcggcgtgcaaaacacccgtacctagggccttggtcgctggacgaatcgctcgtcggagcgctatgtccgacgtggcgctgccgcggaaccgttgtgcggcgtgggtggctgcgactgcacccggaatcgtggtggtaa

SEQ ID NO: 4603 - DNA, 717 bp, Zea mays
  Peptide Sequence Number=SeqID_47978
atggcggcgatgaatggggagggcaacggggcgggtccagccgagcaggggcctgcgccggacctggcaaggggtgttgacggcaccgtgacgggagaagttcgaagggtggagctacaaggtgctgctggtcgagccatccccactgaagcggttggtagggggcctgaagggagaaagatattcaaggaagatgaacaactacaactttttaataatcagattgaagaggatagaaaaattatgatttcgaggcataaccttgttaaattgcacaaggtgcttgaggagcatgatctttcttgtgtggagcttttggatgtgaagttggatggtattgttttaacaaaacaaaaagcggagaaggccgttggttgggctagaaaccactatctgtcatcaacaactcttccttctatcaaaggtgacaggttaatcattccccgtgagagtctggatatatcaatcgagaggctgaaggaacagggtataacagctaagaaatcctctcaaaatctgaaggttttggctaaagatgagtatgagcgcaatttcatttctgctgttgtgcctccgaatgaaattggagtgaaatttgacgacatcggtgcacttgaggacgtgaagagaacattggatgagcttgttacacttccaatgaggagacctgaacttttttcgcgtggaaatttgttaagggtatggcttttctgctag

SEQ ID NO: 4604 - DNA, 1770 bp, Zea mays
  Peptide Sequence Number=SeqID_47979
atgcggctgcgctgcctcctcctgcaccctccgatgtggagtaattcgagctccctcggcatctctgccagcggcgtcagtagaggttccttcgtcaggaggttcagcgcgctcggggcgccgcggccgcctggtcctgcccgacggctgtgtcggttttacggctccaagggcggcgtcgggagcgctgaggcgaggggcgccgctgcgtccccggcggcggcggggagcagcggcaggtgcttcgagcaggagcacgcgcggctcggggaaagggaccagcaggagtggctgagcggcgagaggtttctcaccggctgcaagcgacgggagtcgacgttcctcaccaggcgggagaggttccgcagagagttcctgcgccgcgtcgtgccgtgggagaaggggtcgctctcgtggcagaatttcccctactacgtcaatgacaatgcgaggcagctgctgagtgagtgtgtggcgtcccacctgcgtcacaagagtgtcacatcagaatatggctcacgtttggaatcctctggagggcggatattgctccaaagttctccaggaactgagctttacagggagagatttgttagagctcttgcacatgagttgcaagtgccgctattggttctggacagcagtgttcttgcaccatatgattatggggaggattactcagaaagtgaggaggaggatgagcatgctgagtcagaggatgaaggttcagaatctgaaatggaagacgatggtgatgaagattggacaagcaacaatggaaaatctggtgaaagtgacgatgaggatgctctcaaatctgtggaagatctgaagaaatctgtggatgacctaaaaaagttggttccttgtactatcgaggaatttgccaagagaattgctggtgctgaagaaagtacggcgtcagaatcttctgaaactcctgagtcaccagaagaagagaaaaggcctttccaaaggggagatagggtgaagtatgttggaacctctgcagtcgttgaagcagatcagaggaaggtgaagcacaaagtcaagatgaaccattggatgaggatcattttggggaaaatacctactcaagatggctcaaggagtgcctatacttttattagtggaaggtggattacgaagaggaacatttctaactcgaataatcacaggggtctatcaaatggacagcgtggggaggtatatgaggttaatggggatcaggttgctgtcatatttgatccttctatagagaaatcacacaatgcccatgaagatgtaactaacaaggaggaaaatggatcagcaactgtttactgggttgattctcaggatattgcacatgatcatgataccgaatcagacgattggcatattgcacttgaagcactttgtgaggttttgccatctctacagccaataattgtctactttccagacagttctcaatggttatctagagcagtttcaaaatcagatcgcagagagtttgtgcaaagagttgagaaaatgtttgaccggcttaccggaccggtagtattgatatgtggccagaacttactggcagcagcacccaaggataaggaacaagcgtcaaggagccccgccagggaggccgacggcagcgcacacatctacgccggtcagggtgtccgcgcccgttgcagagtagaaggggtatcagtggatccggccgggaaggccacagcagcgacgaatccaaccatgaagacggcgatccggccaaagggatggcggatctag

SEQ ID NO: 4605 - DNA, 240 bp, Zea mays
  Peptide Sequence Number=SeqID_47980
atggcacagacacgcatttcaggtgtccagaagacagaccacctaaagcacctcgagatcagccccaaagattgccatcgaaatccaggtgagggtaacggcagcggctgcatcatgtggaaagataacatcgttgatgtcaagtacaaagaaaatgggcaggatctttatattgggctggcaaactctgaaacagctacaaggaagaagatggggcgtgtggcaaagatctcggtcccg

SEQ ID NO: 4606 - DNA, 177 bp, Zea mays
  Peptide Sequence Number=SeqID_47981
atgccacagccagtgttgggggccttcgtcctccgaaggtaccttcggactcagaattacgaacatgaagtgcggtcaggacgaagcctgaaccagacgaaggacgggctgattaccaagctccacgaaggatggtgcacagccgaagctgtgcgcagggaagcttcgtcgcgatag

SEQ ID NO: 4607 - DNA, 744 bp, Zea mays
  Peptide Sequence Number=SeqID_47982
atgacttctcacgattcctcggaaggagggaacgcacattcccacacggacggacttgcacgagagggttttccccgcatcttgtgggaggtgctgcagggagccggttatacgacatctcccctgtacgcggtgcagctgttcgaggagcaccgggtaccccgttgtagggtgaggatgaccttggagcctcatcccctgcatccaggctggcgtttgttggacttcgagtctttcggataccgggctgaagacaccatcgaggccattgctctccacgggctgatgaccttttgtggctttcaccccttggagctgtccacccaccccattgggttgttccccacagaaaaggaggacgacccgatgtggaaggatagagtggagcatgccaaggatgctaccatgatcaccctggataacagggaggaacttgtggtggacctatcaactgagatggtggaaaaggacctccaggtggagcagatggccacccagattcaagagcttgaggagatagtgggagctagggagaacaccattgaagttctcgaggatcagcttataaacactcaacagcaacttgatgaagccaaccagcacttggatatgcaccatcaggagattcaggacatggtggacgacgaggatgttgacatcgagggaagagtggagccggagcctgcatccagtctggacactgctggctcagggagaccaagcgttgcctcatttgctcactag

SEQ ID NO: 4608 - DNA, 801 bp, Zea mays
  Peptide Sequence Number=SeqID_47983
atgaagcaaaccatcggcaacaagggcctccagattgtccgtcgtgacgggaccgggaaaggggatactccgaaagggatccttctccgcgaaggaagcgggcctcgagcccccctactgatcagaggttcgaaggctggcccctcggaagggttcgacagccgccttagagcactcgggccccgagccctcctactaatcagaggttcgaaggctggcccctcggaagggttcgacagccgcctcaaaacactcgggctccgcgcccaccactggttagggattcgaaggctggcccctcagatgggttcgacagccgcctcaggacactcgagctccacacccactactgatcaggggttcgtaggctggcccccgaagggttcgacagccgcctcagagcacgtagagcgagggatgactctgggtacatccgatacatggccgaggctcgggctacgctcccaaggtaccctaggacattttcgagaccagcaggagcgattctgtaatggaatcccatcagagggaggcatcgagccctcgaaccctaccaaacgggaccgggtcaaggctcagtccactcaagggacacgatctcgcctcgcccgagcccagcctcgggcaaaggcagccgaccctggaggatccacgtctcacccgaggggcccatcaagcaacagacgcaccttcgactcgaccgaggcccagctcgggcaggcttcgcggagaagcaaccttggccagatcaccatgccaaccgaccgcatcgcaggagcatttaatgcaaggatcgcctga

SEQ ID NO: 4609 - DNA, 225 bp, Zea mays
  Peptide Sequence Number=SeqID_47984
atggcagtcgggatcaatgaggcattgtacgccaaggcgctagtgtttttggcaaccaaaccccacagccaaacagctgcatgtctagaggtagagaggagtagactcctcacaccgggttctttggatgacatggttgctggagtgacttggccgtccatcttgccaccgggttggactgtcgagtgggaccccgcctcggctgaggaggagcatgaggagtga

SEQ ID NO: 4610 - DNA, 438 bp, Zea mays
  Peptide Sequence Number=SeqID_47985
atgtccggcgaggggcagggtttgctccaggaggtcctggcggtcacaacggtgtacggctcgacggcgggggtggccggaatcgttcggtccacgcgcgcaggcgggtgctctcgtcggcggcgggtgctccggccaaaccacggtgatctagttcaatccaatggcacagaatcgaagaatggagcagaggattacccggtctacgctcgccggcggtcgggtggagtccggcgaccgtggactggcctctccggcgaagcaaactccgattcctcgctcggggagcttcaccgaggtgtgcacagtcttctccgagggttggacggggttgggaagggtccctgctggcccggtctacgggtgggcggggagatcggggcggcccgcgggcacgccgtgccgcgggcaaacgccggtgggtttgggctccggtga

SEQ ID NO: 4611 - DNA, 747 bp, Zea mays
  Peptide Sequence Number=SeqID_47986
atggctcgtattagatgcacgacaccatccactgcgtcgcatggtgccaggtcagtccagtcacctggagagactgcatcatcgcctgcacgaggagcagcagtgccgacaccaggagcaggagcgggaccaggagtagcaggactcttgcccctcgcctcagcaggaggtggagtctgggaggccaccttcctctacacccaagccagagatgcccctgcaccaccacagggcatcccagctgctggaggagaccctgacagagacggagacgacgacgacgctggtggcagttcgagccacgaggccttctcagagcactattctattactgagagggatactgccgaggcagccatgcaagatgcagcacgacgggcactttctcagtattgctcgttgtttagtggggtagctgacggccttgacctaaagtactacccacgacgttcgaccggcagtgctggaggtgtgattgtctcgccagttggtgagagcaatcccaagctgaacagcatggtcaacctggccgccgtactcaacccagtgctagatcatgcccttgatgagttgggcaaggttcgggcagaggttgcagaattgcgtgctgagtgcgcagcacgccactatttggatggtggttctccttcccctgtcgggattcagcacccttaccgttcaccgccccatggtcgcttcgagtatggtacccctaactgcagaacccagatagatttggatccatag

SEQ ID NO: 4612 - DNA, 1062 bp, Zea mays
  Peptide Sequence Number=SeqID_47987
gtggctgacttcgccaaccgcacggcgtcgggggccctcacggcggttgtgtctgccgaagtcgagagacttcggacacaacatgctgacgccgtccgagagaagtcggccgccgacagcaagtgccgcaagctggcggacagggtggccgcgctggagggagagaaggctgacctccggcgccaattggcgggggagaggagggagaccaacgaggccctcgtccaggcgcaggctgcgcaggcggaggccaagctggcccgggcggagggcaatcttgccagggagcgcgccgagcagctgcaggagcggctcatcgccctggagagccgcgtggagcgggccgaggccgcgatgcacgcggaggccgaacggacgcgcacacagcttatggatacatatcgtgagctgggtgcgcggaccggcgacttcgatgtaccggaccgagagcccgggcttcgctgtctggaatgggtgcaggaggagctgcaggaactccccactgtcgtgggggggtttatgtcgtacgcctccctggtcacctgcgagggggcgatgaacgggctctctcgcgaagggtgccggcacttcgaggtcttcgaccaggctgatgaagattttgatcgagatatctataaggctgaagaccccgtagtgaaggagtctgccagggctatctatgaccggatgtggggtccgcacggtcaggaggtggtcagggagcgggccgagacggcgagggctcaggcggtgcgtggcgagcgggtggacgacttcggggcgttgaacagcgcgctgcctgacccggagccgacctcggcggaggccgtgtctggggtcgccccggagccaaccctggagactgcgccggatgctcccacatccgccgcggccggcgaagacctgcccccacgggtggccgaaggcgcgcctgatgcccccgcagctgctgtgccgagtgctgaagatcccgcggcggtggcggcggaaacagcagcggaagcgacggcggggccaacggcggaggctcccgcaacgtcagggccttcgcaggtggcgtag

SEQ ID NO: 4613 - DNA, 351 bp, Zea mays
  Peptide Sequence Number=SeqID_47988
atggattctcaggcgccaacgaactcagatggtgaccaaggaagtttttcagcagagactgttaagttgaacttccgcctagaactccaagttacaccaacccacaacttggacaatggactatgccttgaattgcaagttttgcgtgaattggtttcacttgaagtcatgaccagtacttggctaccagtagtccccttctcgggtggagcatatacgtcgtactccaagttcataaggatagctggtattggtttctcaaccaccggcaagtccatcaagagttcacgcaaccattctgcctcaacggttgctgtgtcaagtgcagctagctcggctttccatggttga

SEQ ID NO: 4614 - DNA, 444 bp, Zea mays
  Peptide Sequence Number=SeqID_47989
atgggcaagaacaacaagcgcaagcgtgagccgactcctccatcggaggagtttggtgattcagagtactcggaggaggagttctcctccgagcccgaggggtctccggctcccgtctctcccccggcgtcgtccgatgactcggacgactcccaggggatagccgcggaggtctggacatacatccgggccgtcgagcgcgccgggctcgaaggctcggatgagtcagagtactcctcggatgaggaggactcggacggcggcgacgagggtgaagacgacgacgacgacgacgatgatgacgacgacggcgatgatgacgacgacggcgacggcagcggcagaggcggcggcgacggcagggacaacaccaagggcagcagcaggggcagcaccaagggcagcagcggtggcagcggcggcaggggcagggccagtggctag

SEQ ID NO: 4615 - DNA, 1107 bp, Zea mays
  Peptide Sequence Number=SeqID_47990
atggccccaagctctttgaccccctgctctgcgctttctattcatgtaataaataagaacggcaatgaggatgctttgcctgtctgccttgaagcgaggcctgtagaacgtggtgctggagatatgattggtgttgatcgtatctctggaaaggttactgtcttggctggcaatgcaaatttctgggctgttggttgcgaagatggtttcctgcaggtttacacaagatgtggagtgcgagcaatgccagcaatgatgatgggatctgcagctgtttttattgattgtgacgactcctggaaattgcttcttgtcacaaggagaggtctaatgtacatatggaacctttatgacagggcctgcattttgcatgactccttagcttctttggttgcatctccagatgagtcatctgcaaaagatgctggtacagtaaaggttatatctgccacattctcaagatgtggatcacccttagttgtccttgccagccgtcatgcttttctttatgacatgagcctgaagtgctggttaaggattgctgatgattgttttccagcatcaaattttgctagctcgtttagtttcccacaaggtggggagctaggcaagttgcagattgacataggcaagttcatggcgagaaagcctatttggagcagggttacagatgatgggttgcagacacgtgcccatctggagaaccaacttgcctcttctttggctttgaagtctgcacaggagtaccgtcaatgcctcctatcttatgtacgatttttagcaagagaagcagatgaatctcgtttacgtgaagtttgtgagagcttcctaggtcctccgatgggcatggttggttcggcatcacctactgatcccaaaaatctagcgtgggaccctgatgttcttatggcaactctacagggaatgaagaagcacaaacttcttaaagaagatatacttccttcgatggcgtcgaaccggaaagtgcagcggctgctcaacgagttcatggacctcctgttagaatatgaaacggatgtcacactgataccgcaacctggaacagaaggcaatggcaatggcaatgacaaggtgatgacctcgtag

SEQ ID NO: 4616 - DNA, 225 bp, Zea mays
  Peptide Sequence Number=SeqID_47991
atgactggtgccgaaattcgtcaacagatagatgggctcgtggccaatacagaaggtttttggacaaatatggtgggcagtaattggctgaggaggaggagcaggacggcggacgaggtagagcaggacgaggcacagcaggcggcgcagcaggacgaccttgtccagcagcaggcggcgcaacaggacgacgacgaccagcagcaggatgacgatgaagcttag

SEQ ID NO: 4617 - DNA, 600 bp, Zea mays
  Peptide Sequence Number=SeqID_47992
atgaccgcgtcaaaaaagcgggccccgagccctcctactgatcaggggttcgaaggctggcccctcggaagggttcaacagccgccctacagcactcgggctccaagcccattactgatcaggggttcgaaggctggcccctcggaaggagcgagggatgactctgggtacgtccgttacatggccgaggctcgggctacgctcccgagtgggcgcaccctcggctcgaccgagacccagctcgggcaggcttcgtcgagaagcaaccttggccaaatcgcctcaccaaccgaccgtgtcgaaaacagcgccgctcacctcgctccgactgttgtgccagccacccgggcaaggctgacaacagcaagttcagcctcgggcgcaacaggaagctccgcctcgcccgaccttaggcctcggcctcgggaggaggtctccgcctcgcccgaccccaagactcggcctcagcctcggcctcgggaggaatcgcgtcctcacccgaccccggcctcgggctcaggagaagtctccgcctcgcccgaccttgggttcggaccgaccgcgccacaggggatacatcattaccctacccctagctag

SEQ ID NO: 4618 - DNA, 618 bp, Zea mays
  Peptide Sequence Number=SeqID_47993
atggctagtggtagaaaccgtagccatgcgaggatgacggagttcctcgtgacttcttttgacgggaacagaggggaaacaaatccttattttctcataaggagtggcagagctcctggtggtcatgtgaaaacaaaaggcacaatttacctgtctaatataaggatggtgtttgttgccaacaagcatgttggcaacttctttgcttttgatatgccactgttgtttgtgcacggtcagaagttcaatcagccaatatttcactgcaacaacatctctggattcgttgagccagttgttccagacaaccagaacagggccctgtactcaactcacaccttcaaggtcttgttcaaggacggcggctgtggtactttcgttcctctgttcctcaacctgactgcatctgtgcggcgctacaaccagtttgaaacccagtctgctgctagcatggcacctcgtgtggaccctctgcaagctgtgcagactcctgttgatgacatgatgcgtcatgcgtatgttgacccaaacgatcctaccaagatcttccttcagcaacctgcgccagaatcgcagctgaggaggaggaactaccacggcccagctgatgcaaattag

SEQ ID NO: 4619 - DNA, 174 bp, Zea mays
  Peptide Sequence Number=SeqID_47994
atgaccgtcgtagctcctcaaccagtaagtgccactcatacccttgagagtcttttccttagtcgggtgaggaagcgacaaacttttgttgcttttgctccaaggtggttcccaaggaagaaaaacaagagtgaagccgcaggaggacttggtcctccatatagacttttgtga

SEQ ID NO: 4620 - DNA, 752 bp, Zea mays
  Peptide Sequence Number=SeqID_47995
atggccggttctaaggatcacaccaagatctccactaccaacatcatcaagccggccatagaggcgctcccagctgatgaccaaaggccctttgaagacctcgtaatgcgcgatgagaaggaggtgatgcggcaatggaacgaacaacgcgacaaggaagaggcggaactgctgcataaactctccgaacggcgcaaggaggcggcagacaagtacttgtcacacttcacggtggatcgccaccagaagatcgtccgtcaaggggagatcgatatggaatctctcctacctccactgcagggtcccgctccgcaaccactaggcacgcggcaggtactggacgcgaccggaccgtccgagcatcatctcagacagtccggttataccgcggaccgtccggcgtatttcgccggaccgtccgaccagatgcaggcccgcacacaaaacactcaggtcgcaccgtacatggccggaccatcagggtacaaccctgaacacttcggccccatcacggaccgtccggtgcatcacgccggaccgtccggatatgttgcggaccgtccgccatcttacgccggaccgtccggatatggcatgaaccggccgacgtattacgctggaccatccgactctacacgagtccatacgcagactgcccaagtcacgccatatatggctgatccatccgggtacagccctggaccattcggcccgatcgcggaccgtccagttctttacgatagacggtctgg

SEQ ID NO: 4621 - DNA, 270 bp, Zea mays
  Peptide Sequence Number=SeqID_47996
atgacgcgacgggggcccggggcgacggtggcggacctcccgcggctgcacggggaacggtggattctcccgaaccattttgatattctcttcggcttcaagcaagatgtcggggccaaacacctgtctctctccaggctggtcccaatgcagcggagtcctacaactccgcccgtagagtgcctgaaacggcgacatcttcaagctggcctgataactattgttgtaggagaattctgcataaggtatgaaatgggccacctttgttaa

SEQ ID NO: 4622 - DNA, 594 bp, Zea mays
  Peptide Sequence Number=SeqID_47997
atggcgcaccggacagtccggtgcgccaccggtgcgccaacggtgcaccaccggggcctagatgctttcaggtacctttcagccatcgtttggcttcaaggattttcatcatgcagcccggctgtatccccccgccggtggtcacccaagacggtgaccaccagttcctgggtggggagaagcaagccgggctgcgatcttggtcccaccctcagcttcaaggatgttcatcatcctcgctggggtgggggccgggctgagccggcgctctacctcccgcgtgggttcgcgggtcaccctctcccgcggcgctcgggggagagggcgctcactggccctgcgggcggcccggactttgacaacacggggtcggtcgtcggcgggcatcgtcacctccagcgtgtcgggctcgtcggcttggctcccggcggcccctcccaccggagggcggctgccgcgccgtgtgcacgggagggccacccaagatgtcgcgcgccgctagggcggcgttcgtgttatggggtggtcctgcctttgcaccgggatggcgccctcgcgcggaggccggtgccccactcgcccgggaggatttga

SEQ ID NO: 4623 - DNA, 744 bp, Zea mays
  Peptide Sequence Number=SeqID_47998
atgatgaccaccagcttcgtggtggggagaagcaagtcaagctgcggcctctgccccgccctcagcttcaaggatgttcatcatcctcgctggggaggggggcgcaccgagtcggggttctacctcccgcatgggccggcaggccgcctcttccttcaacattcaggggatagggcgctcaccggccttgtggagggggcgaacttcgacaacgcgggaccggtcaaccgcaagcgtcgtcagctccagcgtgcctggctcgctggctcagctggttctgtcgtggcctctgacgctgcctcctgccgcttgatctgggcgtggccgtccgtccaccgcacgggcgactgttgcgccgcgcgcagcgaaggatcgtccaagacgccgtacgccgcatgggcggcgttcgtgttcttggattgtcttgtccttactctggcacgacgcctccgcgcagaggctggggcggccgccattcgttggcgtagcgctagcgcgcaggtggccgctgtcgtcgatgctgaggtggtggtcgccagaggaggtttctccaccgatgagaccgtcggcgccacccgcgaacctcggtcgctctgcgatgagctgaagccggaggcagcggtgtcggcgtggacagaggcggagttggctcgaaaagaggcttcgtcggcccgggagcacgtggcttccctggccgaggaggtgcagcagcagcggctggagcttggccaggccgaccgctag

SEQ ID NO: 4624 - DNA, 318 bp, Zea mays
  Peptide Sequence Number=SeqID_47999
atggttgccatccaaggaggtcaccctccttttaaaggcgactctccccacttgcgtcctcagccggcgcagactgagtcttctccaacacgctccaaggtcctccccctacgacacgggggctgggtcccacacgtcatgcaagctggcccaggacagaaggagccaaaaccgccgcgcgcgggggtgaaagggcagaccgccatgcaggcagcatgcaaccgcaccaagggggcacaccctttcgacttcgaagcgtccagcatggaggcccaggcccacacgtcatgtaactggcacaccggttactacgtgtga

SEQ ID NO: 4625 - DNA, 1080 bp, Zea mays
  Peptide Sequence Number=SeqID_48000
atggccggttctaaggatcacaccaagatctccactaccaacatcatcaagccggccatagaggcgctcccagctgatgaccaaaggccctttgaagacctcgtaatgcgcgatgagaaggaggtgatgcggcaatggaacgaacaacgcgacaaggaagaggcggaactgctgcataaactctccgaacggcgcaaggaggcggcagacaagtacttgtcacacttcacggtggatcgccaccagaagatcgtccgtcaaggggagatcgatatggaatctctcctacctccactgcagggtcccgctccgcaaccactaggcacgcggcaggtactggacgcgaccggaccgtccgagcatcatctcagacagtccggttataccgcggaccgtccggcgtatttcgccggaccgtccgaccagatgcaggcccgcacacaaaacactcaggtcgcaccgtacatggccggaccatcagggtacaaccctgaacacttcggccccatcacggaccgtccggtgcatcacgccggaccgtccggatatgttgcggaccgtccgccatcttacgccggaccgtccggatatggcatgaaccggccgacgtattacgctggaccatccgactctacacgagtccatacgcagactgcccaagtcacgccatatatggctgatccatccgggtacagccctggaccattcggcccgatcgcggaccgtccagttctttacgatagacggtctgggtacgagactacccacgtagcaccatatacggctggacaatccggatataccttcagaccatttggccaggtcgcggaccattcggcctcttacgccggaccgtccggatatgcatacgcagagccaagagctgcgcaatacgcacagttcccacattcatcgcagcaacattatggtgccccaccagcaacacattataatcatgccataccacctcatggacatagggctgaatactattcggccacaagagagcctgatgggtatagggcaggagctggtgacattaataggacacctaacacacacctcaaacatacctggtga

SEQ ID NO: 4626 - DNA, 438 bp, Zea mays
  Peptide Sequence Number=SeqID_48001
atgtggttgtcaaggaccctgctgaggtgtcaagatctcaggatgctgctgatgtgcgtactacagaggtatgagcttggccgccagcctgctaacaccaaactgtctagcaataagacagtgaggagggtccgtgtccgtggaggcaacacgaagtggagggctcttcgattcgatacatgtaactactcgtggggaagtgaggctcttacccgcaagactcgcatcctggatgtggtctatattgcaacaaacaatgagcttgtgaggactcagactcttgtgaagagcgccattgtacaagttgatgctgctccattcaagcagtggtacctcactcactatggagtggacatcggtaggaagaagaaggtgtctgtcgctaagaaggatgacactaaggtatattcattcaatttaaggtttaatgaggattaa

SEQ ID NO: 4627 - DNA, 456 bp, Zea mays
  Peptide Sequence Number=SeqID_48002
atgacgaacggaactttcggcatggagacgtctcgtcgtcgcagacgcagaagctgttcgctgcggcttgctgcggctgcaatccggctgcggctgcggcttctacagtatttttctctctatggattgcagctgcagcagtccaaacagctgcaacagtgtcagcttgtagccagccgaacacgccctggactgctggagcgtggaatcgaacggcggctttcccaagcggcttcgcttgaactgggtcggaacctgcccggctcgattcgttttgggccaaacaacgcggatctcagcgtgggctacacgcttccggttccagatggcgcgtccagtgcactccggctccgagtatccacggcgtgtcaaacgagtggtggtcgtcaaagtaaaattccatattgcttgcacgtagaccatgacgttgaattactgtggatagtaggcaactag

SEQ ID NO: 4628 - DNA, 432 bp, Zea mays
  Peptide Sequence Number=SeqID_48003
atggccatgatgggttcaacatcgaaaaagatgtacctctgccagcaggtgaggaagtggcaaatttttgctgcttttgttcaaaggtggtgcccaaagaagaaaaccaggagtgatgcttcgggaggaaaggatcctccgttaaaaacttttgttgatgtttatcgggaggggtttttgcctcccaggcgagggcggagcgcctccctggccaataggcagcgaccacctgagcggcaagcgttgtgtgctgagtgcttcttctctatttggcctggggcgttatttttacggagctccgccactgatgtgaaccttgcccccagccaagttagaaagctggcttctatggccattaagtttgatattgttttggctcacagattggaagccaatgtcatctttaatgataaagcgtttcctaatatttga

SEQ ID NO: 4629 - DNA, 1935 bp, Zea mays
  Peptide Sequence Number=SeqID_48004
atggatcaggctttcgtgcaaggaagaaatgttggggaatatgacgccccaacaggggaagcggcgcccacgggcgtcgccgtcgccgaggctctcgcccaagaagcccccagcaccaatatgtcgccgagcaccctgccaccgccaccaccaccttgcgccgtcctggccaccgtccgacgccacccctcacaaacgtgcgacctcaagcaccaccacgccgacgccgaagcgtcgagccaccaccatcacaacttcacacagccacacaccgaggccacaaatgaccaacgtcgtcggcctcgacacctgccgatgttgccgccatcatctgcctgcagccacaggacgtgtgccccacaatctcgggcgccgccccctgccccgaggccactggatctagatggaaggccccaaaaccggtgtccctgcagacgttgccgcctccaagttgaccacaaccgtgagcaccaccctgggccgtcgccaaggccaccgcccgaacaccacgggccggtcagccgaaaggaggttgtcgcccccaccacagtagcagtcaaggccgtgaggggagaggtggcaaagaagagagcgccacgcaacacctgcacaagccccaaccactgccgccaacgcaaccgccaccggccgccaccgcacctactgccagctgctgaggcagatccggtcgacaagaccatttgtgcaccatggttctgcctctctctcgccgacaggtggacccatgtcagcgttcgctcgcactccctcgcgcttgcgtcccaccaaaatccaactaaccacgtatctccagcgcctgccgctgccgcctctacatctagggtttcctcaccatacgcttcaccgccgcggcatgggtttcctcaccatacgcttcgccgacggcggccttgcatggcaccggagagggcggcccctacgcggacgtggcccccggcttcagccccgatggcagcgtgctgccccaccggccccccggcgcgagcgggcgcggcgcggcccccacccgacggcgcgggcgaggcacgcgggcctcccggcggggcggacgcggcccctggccacagcggcggcgggcggacccctgaccccggcgtcggcgggcgcactctcctctccaaatctcgccgtctgcgcgcgtccaaattgaggaatccgcctccgctatggaaggagaccgcctccgctgcgccccgactctcggtcgacatcatcgtccgcgtccgctgcgccctggctctcggtccttcgcgcgcgcgcccttcatcgacctctctgccttctcccacctcgaggcccacacccacgtcggcggcgacgcccacggacacgcccaccaggaaacgccctatgcgctacgccccaagaaacatgcttccctggacgacgaccgagaagacccggcgagccccgcttggcaccttcatcttcgtgatgatgttgtccttcaggctgaagtgccacacagtgctaggcattttgggaggtggtgagcgcctcgcttggcaccttcattttcgtgatgatgctgtccttcaggctgcagtgccacatagtgcgaggcattttgggagggacatcatcatgcccaacttgaagtcgtccgtggccacaacagcgagcgcggtggagtacagggatgaagtcggtagccttgaggtggcagctaaagctaaagaagccgatgtagatgggatcattattcagggacgtgaggcagggggtcatgtaattggtcaggtggctttctctgtatttgctggtgttggagaacgtacccgtgaaggtaatgatctgtacaaggaaattattgaaagtgttgtcattaagctaggtgacaagcagagtgaaagaaagtgtgctcttgtttatgggcagacgaatgtgcccccgggcgtgctcgtgttggattga

SEQ ID NO: 4630 - DNA, 114 bp, Zea mays
  Peptide Sequence Number=SeqID_48005
atggcgagagtagcgtgtaccctctgtggcaagaggctggacggtggtgtatctgtgctctcagttggcgtgaacccgccttaccttgactccctcaagccagcatatccttga

SEQ ID NO: 4631 - DNA, 123 bp, Zea mays
  Peptide Sequence Number=SeqID_48006
atgccgagaaatatggtaaatcggttctctggaggatatagttgctggagtgacttggctgtctaccttaccgccgggttggacagtctagtgggaccctacctcaacaggagaggagcatga

SEQ ID NO: 4632 - DNA, 531 bp, Zea mays
  Peptide Sequence Number=SeqID_48007
atgttcctgatttcttggtccagctcgtcctcctggggcgttggactagtggccttcctcttctggcttcgggcctctcgaagagaaagggtctcctggtttggatccagcggctgcagagcggcagcccctgttgctgaagctttctttggcggcatgacgaaggtcgatgcttgccgaaggtggtcgaaaagggttcaccggagaaatagaaatgatatcatattacaagtgtaccttcggctcaagggaagttggttccctttcctgctatcacgccgaagctcttctgcgcgtttcttcgactctgcgtcatccttcgtattctttatgcttcttcacactgtggttttgattcatgtccgaaggttccaagtccgcaggtacctgttcatgtattatactccagaaacattgttaaatcatgtttttgaggaccttcggaagccgaaggcccccaacaagaaggattttggagatgagtttcataggacttatcttgatttgaagttctgtccgagagatagataa

SEQ ID NO: 4633 - DNA, 675 bp, Zea mays
  Peptide Sequence Number=SeqID_48008
atggacaaaaaccaaaatttagcctatgctccttacattatggctctcatcaaagccaaggccagatttgaagggctctgtgagatagttcatacaccctttagacccttcaagaatgaaattgggttcctcactaggccactcactcccttcccagatgatgaggaagatcctggttatgatgcaggagaagctcctgaagctgaggcagagcagatgcctcctcctccacctcctcctcagcctcagcagtactggcagcctggtccaggctattttgacccatattttcaaaacatgcagcaagggcttctgacccacatggataaccgcttccagggactgatgacacatatggaccagcgcatggatgccatgaaatctcgttttgatgataactgggatgcgttaaacactgagtactctgaatttcgcagtcacattcaagatcatgtcactgatcctatcatgaaaagactcaataacatgcagcagagttttcaggacaacatgggagctctgtctagtcaatttgacaatctctctaccaatgatagcatgcaagagataagtcagaggcaacaacaactccagcaagactttggccagttctcctctctctttgacaccttcagcactcactactatagcatgcatcctccacccggtgattag

SEQ ID NO: 4634 - DNA, 1563 bp, Zea mays
  Peptide Sequence Number=SeqID_48009
atggacaggctcgacgcgaatccgcccaactccctgcccgctcacgccgctgggcttcctggagcgcaccgccaccgtgtacggcgactgcccctccgtcgtctaccacggacaccgtctacacctggtcccagactcacccgacgctgcctccgcctcgcctccgcgctcgtctccctcggcgtctcccgcggcgacatcagatactttggtacaggtggatatgagattgatggttttgatcatggttatggtgctgctagtccactacagccaaacaggatacttgctgagtatgttgatgtgtactcacccttgctctacacaccaacccccccccccccccaggttgtcagcattgcaaccactgctcaggcgaagatgaagccgtggaaggagacttccaggagttccaagactacgacgagttctaggtgtgggttagcggcaacccccagtcggctgcctgtgaaggccgcgttatctacgtttcttttccgcactttgatttattgtaagacttatatggacgtctcagacatggctcgacttagacacactgcacgaaagtcagtcatccccttcttaccctcccgccttgctgagcgtccgcttcgccgtcccgtggccggacagtccagccacttggagagactacaccaccgcctgcgtgaggagcaggagcgtcgacgacaggagcagcagagctcttccttctcgctccaacaggagatagagtctgtgaggagctgctcccctgtgcttcctctggagccgccccctgcaccaccactgggcgccccagcttctggagtagctgctggaggagacccagacgacggagatggcgacggcagctcgagccacgacaccgacttctctgctaatcctgagccggaaggatgggttgctcgacccatcactcgcgacgctgctcgcgggtgtcacttccacgatgcgctcgacaccctgctacgtcgggcatttgaccggcatacttggtccgtcgagtatcgctgtgtggtctaccagcatagtcgcggggtctacccggaccgctgggaggcaacttgcttggtgcgctgcccggagaacagtcttcagggtgcagaggcatgttcagagcactattccatctctgaacgggactcagctgaggcagccatgcaggatgctgcacgacgtgcgctttcgcactactgctcggttttcggtggggcagctgacggtcttgacctgaagtattacccccgccgtccatctggcagcacaggaggcgtgattgtctcacctgtcggtgagggcaatcctaggttgagcagcacagtcaacctagccgccgtgctaaacacggagctggaccatgcattagatgagctgagtagggctcgtgctgagatcgccctgctgcgggctgagcgcgcggaacgtcgtcacttggatggtggttcccccgctcccgtcgggactcagcacccgtaccgctcacctcagcgtggacaccagtcttatggcaatcccgccctgcaagaccaagataactctagaaccatagatcgttag

SEQ ID NO: 4635 - DNA, 117 bp, Zea mays
  Peptide Sequence Number=SeqID_48010
atggtgcttgcggtcgtggtgctgttgggcgccgtggttgtccttgtggtggtgctgctgctgcagccccgcgtgcctggctactcttcttacctcagttccatggcccgagcgtga

SEQ ID NO: 4636 - DNA, 1800 bp, Zea mays
  Peptide Sequence Number=SeqID_48011
atgcacagtaagggtctaatatccactgttgacattcaacgctcgactgacattggagaccctacaaatacgcagtgtgatggtgatcctccgcatcatagaaagaggagtgttgctgccgatgctaaaaagattcctatgcctaatgtggatgatgatgatgactttgagccaccaaaaaagaagtgcaatatcacaatggatgccccaaataaggcgcagaagctagaccccagagacatgactcttcgtattggtccagacaaagaactcaaaatcaccaagcagattgtccatctgatattgggtcttccaaattcgggtggtggaaagccacttaatattgatgaagcgaatgctgcggcaacacttcggtcctccttgaatattactagctggtcgatatctttcaatgaggttctacttacagaagaattggagcggttacctcaaattgattggtgccatctaatttttagtgacctatgtgaagctgcccagaaatggcacaatatgagcaccaataatgtgtcggcgacgatatatggctcttccatcgttgttcttctgtattatttggaccacttgcaccatgccgcagctcccaacaacagaagtggcactccgtgcataaagtatttcaataagaatatcataagggcgttgtcaatggctgataagcgtaagcctcgccagggaggcgaaccatttgatgtttgccctttttggagcagcagtgagacttgttatgtctcaaaatcgccatctactggtcagcttgagtctacaatgaggccagaaacagttgatgaagacccaaatgaacatggccgacttcccaatataaacatccaactgcctcttatgcaagacctgatggcaactaagatccagatgcttcctgtacatcaacgccagaagttccaagctaagttgattgattatgacttagaggttggcaaaatagttgacactatgaatcaatgtttgaataacattggtcagacagtgccaggtggcatagttgaccatgactctggcccagtatttgacaagactcctattgggagtgtttgtgcatcaggcatctttctatctgaattagaatgtgctcacgctcttcgggcctacttgtgttctaaggtcattgaattggacagaaatataattgactttggtgaacatcgtgccaattatcgtgacatacaacaatcttttgttgatggcgcgtgtctcgacaatgtgtttattcaatgcttcattgagtgtgtccacgatgactgttctaaatatattcctccattgaatgctcaccaactcattctagatgttaatgttggggctatattgaactttgaggagcacgagcaacataataatggtacccatgctacgctctggacattggacattatgggtgggactatctggaagaactaccattgtatacctatggatatgggtgataggaaggtttcatgggcgaggttaataatgagttggctcaatctagccatacaaaatgctcgaccaagatcagccctccctgcttttttgaagtaccctattgaactcctgaataactgcccaacaatgaaattggggtctaatgattgtggattctttgttatgagatatatgcagcactacgactacatggatggagctatgaatgcagtcattgatctggataattcagaggacattcgctctcttgtactgcagtacataatattctatcgactaaacagaaacaactccatggtttcacatctagatagattcaagttctctcagtag

SEQ ID NO: 4637 - DNA, 795 bp, Zea mays
  Peptide Sequence Number=SeqID_48012
atgaacaaaaaacactggcattcgaagtgccattacgtacggaactccggttccccctccgcgggtacgaacgaccccactccatggggaaggcctgtggagcaacagaagaccgacgggcggctcgccgccgcccgttctaactacggcaacagtgggccggcgctgctgcgatcttgccctcgcccccgccgacgctcgagggacgaggacaagcatgccggcacggtggcccggggcgtgggtggtggcagtgatcccgtcggcgacgaggacttcttgagccgcctccgccttggcgccaatggcaggggacaccagccccccggcagatccccactcaaatcctcccagacgagtggggcaccggcctctgcgcaagggcgccgtcccagtgcaaaagcaggaccaccccagaacacgaacgccgccccaaacagcgcgcggcatcatgggtggtcctcccgtgcacacggcgcggcggtcgcccctccggcaggaggggccgccggaggcccggccgacgactccgacacgctggaggtgacggtgcccgccgtcgaccaggcccacgctgtcaaagtccgcgccgtccgcagggccagcgggcgcctccacccccaaacgccgcggaaaggggtgacccgcggacccgcgcggaaggtagagcgccggctcagcgtggcccccaccccagtgaggatgatgaacatccttgaagctgagggtgggaccaagatcgcagcccggcttgctcttccccacccagaaactggtggtcaccatcctgggtga

SEQ ID NO: 4638 - DNA, 159 bp, Zea mays
  Peptide Sequence Number=SeqID_48013
atgcgtcagcgtggtcggaccctccgtgaagccgtcgcggccaactccggcttcgcggactctaacccgatccgtctcgtcaccgaccgcacggcctccgcgctcgagtccatcgtcttcgtcgcgcccggcgtgctcatcttggcggcttcatggtga

SEQ ID NO: 4639 - DNA, 471 bp, Zea mays
  Peptide Sequence Number=SeqID_48014
atggcggcgttggtcggggtcggcacggcagacgctggtgacgaggtaggagacataactgggcgcagatctagggatgagcgaggcggcggcaggctcggcttctctgggtctaagacaacgaggagggcgtactcggaggatatgatgcatgcggatctcagcgacgtggaggagggcgagaaggcggagcacggggaggagacgacgacggtggagggcagcgccgaggctaggcgcgaggtacaggctatcgcgagcggggtagcgcaggcgagatctgcggagacgggggcatggcgttgccctccttatagccatttgtcacacccggattttaggggtcaaaaacccgggcgcgaacataaacaccaggtgggagctcatgtgaagtgtaaggcttaccaaagaggatggctgaagctgagcattgcttttaaagttggtcaaaattttattagccattactaa

SEQ ID NO: 4640 - DNA, 639 bp, Zea mays
  Peptide Sequence Number=SeqID_48015
atgggcgagtgggggctatggaacttcgatccaacggggcgaggtgacgaggaacctgacgcccaacttctggggcagcatctggactacaagcccgaggtcgggcgaggcggtgactccttcgaggtcgaggttgagttcgagccctggggtcgggcgaggcgaagaccgtcttccggggttgaggttgagtccgagccctggggtcgggcgaggtggagaccgtctttcgaggtcgaggttgagtccgagccctggggtcaggcgaggcggagatcgtcttctggggtcgaggttgagtccgagccctggggtcgggcgaggcggagaccgtcttccggggtcgaggttgagtctgagccctggggtcgggcgaggcggagaccgtcttccggggtcgaggttgagtccgagccctggggtcgggtgaggcggagcttcctatggcgcctgaggctagacttggctgctgtcagcctcaccctggcgggtggcacagcagtcggagcagggcaggcggcgttgttttcctgtcaggtcaagaacaggtaccgccaagatgaggagcatgaaggatgtcgcgatgagttcgtgagaggtctaggtcgtcgtctcccagtcaattatggttgtggatga

SEQ ID NO: 4641 - DNA, 402 bp, Zea mays
  Peptide Sequence Number=SeqID_48016
atgggcaagaacaacaagcgcaagcgtgagccgactcctccatcggaggattttggtgactcagagtactcagaggaggagttatcctctgagtctgagggacgactcccacggctcgcggcggaggtctggacttacatccgggccgtcgagcgctccgggctcgccggctcggatgagtcggagtactcctcggacgaggaggactcgtccgaggagggcggtggcggcgatggcgatgacgacgatggcgacgatgacgacgaaggcggtggcggcgacgacggtgatggcggcggcaggggtagcagcggcggtggcaagggtgacgacgacggcagcagcaggggcggcagcggcgctggcggcagcagcaagggcagcaacaaggccagtggctaa

SEQ ID NO: 4642 - DNA, 1140 bp, Zea mays
  Peptide Sequence Number=SeqID_48017
atgacgggtgtcctagtatttgaaactatagtcctgtgcgtccaacaacctggaggtccggctttgaagaacagacacttgtctcctgcgggggaatggactacattgcaccaacgggagtcgcgctgggagttggcgccggacagctccaccaacggcggcgaccacctctgcaccagcagcgacaacgacctccgcctcgggcaactagacagcagcagcgatcgccccagggcgagcgctactatgaaaatgtcctcgccccatcctcctacggggggtgacaacgaggccattaaagacaaagagtcggggactcagcggcagatggctctgatgccctcaccagcagaggcaaccacctctgcaagaggtagcctcaccagcggcggcgaccacctctacaccggaggcaacgtcggaggcggcaccagagccatccagccccaaagggccagacacactatagctgacagcctgcagtcggccgacccatgtagccaaggtctgcccctcccgcaggattgggaacacccttcccctctgaatgatggaggaagaagcggcctggcatgcttctccccgccacaaggctggtggtcatcctcctgggtgaccgtcggtgggggactgcagccgggctgcgtgatgaaaatccttgaagccgaatggtggtggaaggatgccaacccccatggggttgcacccctccaacgacagcaggaagaagacaagatcggcgacaccaccacgagtgcacgctctccgacggtgaagtcgccggaagagacgaacttgacgcggatccctccagagaacaccggcgcaccccatctggaggcccggaaggcgaaagggcacggtggtcgcaagagaggcgaggcatcggtcaaagaggtgacccgtcgtgcaagaggcatgcaaccgtcccacggctgtgcgccccatcagctccgccacaactggcggtccaactcaggggcccaagcccacacgtcatgctcgcatcctcccatgaagcgggaccgggggccactgtcggtacccaaaatcaggggcggaaacccgctgcttgtggcccatgacataagctaccgggccaagcctgacgagaagtcgtgcagatcctgcatttattga

SEQ ID NO: 4643 - DNA, 130 bp, Zea mays
  Peptide Sequence Number=SeqID_48018
gcaacagatgtcgcactccagcgcgtccttctccatggatagtgtcacagtcgcctcttcctcatcctccaaccccgcctcttcctcattctccaccaccaccttggctttctttggagtgccgccgtag

SEQ ID NO: 4644 - DNA, 663 bp, Zea mays
  Peptide Sequence Number=SeqID_48019
atgcgtgcggaggctgaacggacgcgcgctcagcttatggatacatatcgcgagctaggcgcgcggaccggcgacttcgaggtgccggaccgagagcccgggcttcgttgtctgcaatgggtgcaggaggagctgcaggaactccccactgttgtgggggggtttatgtcgtacgcctccctggtcacctgcgagggggcgatgaacgcactctcccgcgaagggtgccggcacttcgaggtcttcgaccaggcagatgaagattttgagcgagatgtctataaggtcgaagaccccgttgtgaaggaatctgccggggccctctacgaccggatgtggggtccgcatggtcgtgaggtggtcagggagcgggccgagactgcgagggctcaggcggcgcgtggcgagcgggtggacgacttcggggcgctgaacagcgcgctgcctgacccggagccgacccctgcggaggccgtgcctggggtcgccctggagccaaccccggagaccgcggcgatcgcgacggctgcccctacatctgctgcggccggcgaggacctgcccccaaaggtggccgaaggcgcccctgatgcccccgcggctgctgtgccgagtgctgaaggttcaagattttgggcctgcgcacgcaaccgctactactga

SEQ ID NO: 4645 - DNA, 864 bp, Zea mays
  Peptide Sequence Number=SeqID_48020
atgccttcgcactcccttcatgcatcgcgtccttccaccttccgagcccccggatggggagcgctcgcgttgctttcgtcttgtcgtcgttggaggaacgcaacttcgcggaagttggtacatttcagccatcgttcggcttcaaggattttcatcaggcagcccggctgcatcccctcgccggtggtcacccaagacggtgaccaccagttcgagggtggggagaagcaagccgggctgcggcctctgcccctccctcagcttcaaggatgttcatcatcagtgctggggaggggagtgcgccaagttggggcctgtctccgcgcgggcagcggcccgctccttccctcagtgatcggggggaagggcgttcaccgtccgtggcgctggcagctgccgcgtgtctggctctccggcctgagcggcttcggcgccgcttccggtgccacctcccaccgaggcagccggaagaggtttctccgccgacgagatagtcggtgccacccgcggactgacctccagctctatggccttggtagcttgtcctcacccctcgagtggggacgtgggcgagggccttgtcgcagcagcgtctgccctgtggtcatcgctgttgctgtttggccgcccggagcggaggtcgttgtcactgctgcaggagcgggcgtcggcgagccatctggggtcttgtcgccccgcaggccctccaatgtggggggttattcgtacctgcgagggtggaaccagagttctgtttgtaatggcaccttgagtgccggtgtttgttcattgtggttgtcggggcctgaacatgtaggtatttttgggtgtaataccgtgttttttcctcgtttcgagcactag

SEQ ID NO: 4646 - DNA, 90 bp, Zea mays
  Peptide Sequence Number=SeqID_48021
atgacgaaggcacaggacgcagcctgtgagaaattacatttatgccctttatatttactattgacttatggacaactctatgaggactag

SEQ ID NO: 4647 - DNA, 492 bp, Zea mays
  Peptide Sequence Number=SeqID_48022
atgggcgcgattaaggtcaaggctcagtccactcaagggacacgatctcgccttgcccgagcccagcctcgggcaaaggcagccgaccccggaggattcacgtctcgcccgagggccccctcaagcaacggacaaaccttcggctcgcccgaagcccagtcttcgcagagaagcaaccttggccagatcgccacgccaaccgactctaagtccagcctcgggcgccataggaagctctgcctcgcccgaccccagagctcgggctcaaccttgatgctgaacgacggactccgcctcgctcgaccccagggctcggacacagcctcggcctcggaagacggtctccgcctcgcccgacctagggctcggactcaacctcgacctcggaagacggactccgcctcgcccgaccccagggctcggactcagcctcgacctcgaaagacggactcgacctcgacctcggaggagcctccgcctcgctcgacctag

SEQ ID NO: 4648 - DNA, 585 bp, Zea mays
  Peptide Sequence Number=SeqID_48023
atgcagtacaatggatcaagcagtctcattagctgcgagaagcagacgattcgaatcgagtttttatccttgcaagtgaccgcacttgtacccaccataaccggaatgggagaccacgtctcaggtcgcgtgaggggcaaagtctgcgggcaggcaggtcctctggtgcaggctctggtgctggatctggggccacctcctgagcagctccttgctctggtcctcggttcaagcttgagtaagcttcacggcctcaccaggaagctatctgaaggcttggatcgaacggaggaggacgggaaaggggctggccatggtggttgctctcgggcggcactggcgggtcgcggggaggtcgtcggagctaaaggctggctcgaggaagtcaggcgaggtacggaggaggcaacggggaaggcagccgagcactgggacgagctttatagccgtggcacgggcgtggtcacgggcggccgcgggcgcgcgagggttcgcgcacgggcgtgctctgagcgcgcccccgggtgtcagcccgcgtcgaacacgtgggagctcgcttctgccatggttcaacggcggatttga

SEQ ID NO: 4649 - DNA, 405 bp, Zea mays
  Peptide Sequence Number=SeqID_48024
atgcccccgcctgtatcccaaccgtccgattgcgtccatccccaccgtccgatcccactcccgctaccgcagccgcccccacttccatccccgacacttcttccccgcgcggccgcccccacctccttccccgcgcaacgcgtaaccacccgcgcctccgcctccttccccgcgcagccgccttcttccccgcgcagcccccccccccccacgcagccgctcccacctcgttccccacgcagccacccccgtatctgctctgtgcgtgttaatagtatctgctctgtgcgtgtgatggggaaaaccgcatccgctccaaggggagttgatcgagaagcgttggtggacatgggtcaaatccagtactccgagaagtacttcgacgacacctacgagtacaggtga

SEQ ID NO: 4650 - DNA, 240 bp, Zea mays
  Peptide Sequence Number=SeqID_48025
atgccccgctgcgattcgcgtcgacggcgtccagattcgtgctcaagtagacggataacgtcgcggggtaagggaatcttcaccgccgaaaacgaagaagagattgaagtgaccgaagagaagacactaccaccttcggattctcaggccgggaattgtttctatttcgatatctgcgggaccgagcctgactcacctactaacgaaggcaagccccggtgcatttgccactttccttga

SEQ ID NO: 4651 - DNA, 330 bp, Zea mays
  Peptide Sequence Number=SeqID_48026
atgatagttcaaagatacttaataagaagcacaataggaagaaaaaggggaattttgggagaactagataatgtacaactaaaaccttctaagaatctcatgaaacttaaagatgtaattaaagattgtaagttcattcaaaaccctgagaatgaagactgtagtctcgctgatggggaatacatcctcgctccggagcaaggagttgctcaggaggtagcccaggagccagcaccagagcctgccatcgaggatctgcctgccccagctttggaaggcaagccccggttttatgcaaacctattctatatgctattttactacacttaa

SEQ ID NO: 4652 - DNA, 2040 bp, Zea mays
  Peptide Sequence Number=SeqID_48027
atgagcctgtcaccgctcgactcctcctccccgccggccgcggctgcggctgctgctacggaggtgcccctcgccccgggcttccgcttccaccccaccgacgaggagctcgtctcctactacctccgccgccgcgtcctcggccgccgcctccgcgtcgacgccatcgccgagatcgacctctaccgcctcgagccctgggacctcccctccctctcccgcatccgcagccgcgacgcccagtggtacttcttcgcccgtctcgaccgcaaggtcgccggcgctggcgccgggggccggggcggtcccggcaacaggaccaaccgcgctacgccgagggggtactggaagaccacgggcaaggaccgcgaggtgcaccaccgcggcaagcccgtcgggatgaagaagacgctcgtcttccacgccgggagggcgcctaagggcgagaggaccaactgggtcatgcacgagtaccgcctcctcgatgcagacggacctcaggttgttttacccttccttccaaatcaatcaaccagcccagccatcctcagtcgatatcaattagagtgttcatctaatcaattaggaatcttccagaagcatgggtctggaccacagaacggtgcgcagtatggtgcaccatacatggaagaggaatgggaagaggatgatgatgctattgagaatggttctacccacgatgcatctggtcaaattgctgcaaccacctgtgctgtagatgaggagtcaaatgaggacgatgagaatgcatattgtgaaacaaacagacctgctcgagtagaaccatctcatctgccttcggtccatgaaatgctcaatccaccagagatggctcctctccaaggtcaagattctaaagagacaagcgatggaagttgttctgatgttgctatttctctggaagagattttgcaggaacctttgtcaaatattagtgtggagaatatgcatagacttgaagggcagaatgccactgatgataacatcagtgttgataacttgttatcagcatatcccacgaaagataatggctacgtaggccagtataacactatgaatgggagtgctccagcagatgaagctcacgcacgctggcctttgagaacatatagtaatcagaattatgtcaatggccctcttgctgatgagttctttgacacagggaatgataccaatggggttgcatattccaggcagcagcaagctgatggcttcccagcacctcgccaagttgatgaaagtatggtattttatgatgccccatctgattacaacttggtggatggaaaagatgacttcgtatatctgaacgacattctgaatgagccacttggaaatgaatcgctctttgatggagatgatatgatggcttactttgatgccacagagaatgatttcaagtatgacattttgggctctggtcagggtttggattatccacttgcagacatgccgttgaactttgcccaaaagagtgacaaggaagacaagtttacattcgaagggatctctgaggttccggaagcaaatcctcagtacggtgcatcctcatctggttcacatgaagatctgtatactgatactgaatttctaggtgtaccaacagatgacactgctgataaaacttacggaaatcgcctggccagcatgttaggctctatcccagctccacctgcaatggcctcagaattcccgccgtcaacagggaaatctgctgggatgctttcggctgtcagctcgagctcaattcgttttactgctggtatcatccaacttgatggcctcactttcagcagcggctccggtcagtggcccttgcagaagaatggagacttgagtttgcttgtctcttttgctgtggagggcgacgtggcatccaagctccctgttggtcttgggcgtgctactcggattagcaccgttcccatggtgctgcgcagtggtttttaccttttctttatgtcggccatgattctcttgtttagctacaaagtagggtcgtgtatctacagcaggtaa

SEQ ID NO: 4653 - DNA, 1314 bp, Zea mays
  Peptide Sequence Number=SeqID_48028
atggaagagatccttctccccgtggccgcccacgacgcggcagccttcgtgctgtcccgcctgccccaccccggcacagcggccgccgacgctgccgccttcgtagacgccgccacgggcgcaagcctctctttctccgcgctccgccgggccgcgctgtccctcgcctccgcgctccgcctcggcctcggcctccgccgcggcgacgccgtcctcgtcctcgcgcgcgactcgctcctgctcccgcagatactcctcggcgtcctcgccgccggcgccgtcgtggcggtcaccgacacggacgccacgcccgccgaggtcgccgccgccgcgcgcgcctcggccgcggtcatggtcgtcgctgcgccggacctggccgccaagctctccctcgacgccggcgccgccgtgggcctgccgccgcttctcctcacgtcgcgctcgccggaggatcccgcggcgctctcggccgaggagctcatcgacggcggtgaccctgtcgctgctgaggcggtggccgtgtccgactccgatgtggcgttcctggcctacccgtcggcgagagcgacagccgccgtcgcgatgacgcacgccgacctcgtcgctgctatggcccacgtcgtcgcggacgacggccgggtgtgcctggcgtcccttcccatgtgcagcgcccacggcctgccgctagtcgccctcgggctccccgctgccggagtcacgacggtgctcatgcccccgccatcgtcgcagtccggtacgaaggcggcgagagaggctgtagccgtgcacgccgcgacggacttcgtggcgactcctgaggtggcggtggcagctctcaccgctcccgtgccgctcgacgggaagctctcctcgctgaggagggtaatcgtggcgcctacaccgttggcgccaggggcacgggaggagttccgccggaggctgccgtgggtccagctgacgcagctgtccggcacgccggagaaccaaacagagatgctatcactgccacctgaggtgatcacaccacctgcaggcgcagccgttatacagcaaaacagcctgccagcagatcaagtatccgcgacaaacgaggctgcctccttgactgcccaggaaaattttctaccaggtgccaccaccgaagaagataaacaagattatttcgggagacatattttcgagatcaaccatgagcaagaccttgaggaagcacccggcaactggcaacagacaagctgcctcaaaactgtagcagatcctccgcttacgtttcctgttcggaagctgcttgtcaacctgatgaagcatgattag

SEQ ID NO: 4654 - DNA, 462 bp, Zea mays
  Peptide Sequence Number=SeqID_48029
atgagtggtggtggtagcggggcccatgcaacttgtgagtggcttgccgaagtaactgatgttgtgggttgttggttgcccacatactcaaggataagcttctccgaagtttgtggggggcttcttggcaaaataatgcactattggtcctggtcggagccccttgatcattggctcaatgacaatctcatttggcaccgttggcgcatgagctctgatacgcagaaacctttgtacataagcctgcaggcttctcgtagaggaagcccttcttggttgatgtccagtggtgcaagggcagcccttggcgctattgccttcattagcggcatggcaaaggtggttgctcgagctgttgtcaaaggtggtcatttgagttcagcggaggtgggcaacaatgttgatcactcattctcaaaagctgtgaatcaagaacaaggcaacacaattgttaaagattaa

SEQ ID NO: 4655 - DNA, 420 bp, Zea mays
  Peptide Sequence Number=SeqID_48030
atgaccgttggtggaggctgtctgtcgtatggtgcaccggacagtccggtgcacaccggacatgtccggtgcgccagccatgtcaccaatgccgttggattccgaccgttggagcttctgtcttctgggcccgcctggatgtccggtgcacaccggacagcggagcagccgctgcgttttcccgaggcagacgagttccggaggccgctcttccttggagcaccggacactgtccggtgtacaccggacagtccggtgaattatagcggagtgcctctgaaaattcccgaaggtggcgagttcgagttggagtcctctggtgcaccggacactgtccggtgtacaccggacagtccggtgctcccagaccagaggtgccttcggttgcccttttgctcctttgttgaatccaatacttga

SEQ ID NO: 4656 - DNA, 225 bp, Zea mays
  Peptide Sequence Number=SeqID_48031
atgaccgttggtggaggctgtctgtcgtatggtgcattggacagtccggtgcacaccggacatgtccggtgcgccagccacgtcaccaatgccgttggattccgaccgttggagcttctgtcttctgggcccgcctggatgtccggtgcacaccggacagtcggtccgaggccgaggtcgggcgaggtggagacttctcctgaggccgaggatgaggtcgggtga

SEQ ID NO: 4657 - DNA, 624 bp, Zea mays
  Peptide Sequence Number=SeqID_48032
atggaggcccgggcccacatgtcatataaccggcacaccggttactacgtgcaaagaaactgcaccgccacttgcgccaatgttgtgtcttctcgggactacagaactagtgcaacgactcgaggcagccccgcgcatgacccaacagtgccaattaagtgcgacggtcacgggtcgggatcggaaaaggggatatttcggaaggatccttctcagcgaaggaaacgggccccgagccctttactgatcaggggttcgaaggttgcgccctgcggggttcggcaaccgccccagagcacctgggctccgagccctttactgatcaggggatcgaaggctggcccctctgaagggttcgacagccgccccagagcatgtagagtcagggatgatcctgggtatgtccgttacatggccgaggctcgggctacgctcccaaggtaccctaggacatttccgagccaagcgggaatgatttgtaatggaatcccaccggagggaggcaccgagccctcagaccctatcaaatgggtccgggtccagcaaatcacctgcagaggctcggaggctgctctcgcaccaggctacggccaaattgtcgaccacgtcgacaaaacagcttga

SEQ ID NO: 4658 - DNA, 1380 bp, Zea mays
  Peptide Sequence Number=SeqID_48033
atgtcaggcccatctcccacgcgagctccaactgagctccgctggtttgtcgcccgcggcagcagaaaaccaggacccagcttgccgagagaccacgagaaagccaaccgccgcaagacttcggccatcaccaacgaaacagcgccaccccgcctctacaccctcaaacgccgcaccaggaacttcgcacggtggcacggagggtgcgcgaagcctcaccttgggcggattgtgcttgtggcctccggaatttctcgccgttgggggaactccgccgcggatcatggccatcccgtggccagtagtctgtatcgcaccaattccggcgcggtggcggattcgctggtcatggcgccgccgttagggctagcggtgtcgccgtcgggatggtttaaggaagaagatgggtggaccgttgattcggctatggatggatcacacctggtgattatgttcgcgcccgggtttgggacccctgaaatccggcccggctgcagtcccccgccggcggtcacccaggatgatgaccgtcagccttgtggtggggaagagcgagccgggtcgtggcctctcccttgccctcagcttcaaggatgttcatcatccgtgctggggatgaaggcaagccgagttggtgtcttgccttccgtatgggctgacgacccgcttcttcctccagcattcgggggagaagggcgtttaccagccttacggaggaggcgaactgccacctgctgcctggtcgaggtgtggctgtctgtccaccgcacgagcgacggtcgcgccgtgcgcagggcggtgtccgcatccccggatggtgttttcctccctcccgtagcgaggatgggagtgaggtcctccttgtgcgctggggcggccgccattcgccggtgcggcgtcggcgcgcaggtggccgctgtcgtcggtgctgaggtggtggtcgccataggtgaggcttcccactgcagaagtggtttcctccgccgacgagaccgtcagcgccacctgtggccggacctccggctctttggctttaatggcttgtcctcgcccctcgtgtgggggacggggaatcacttatccgagcgtgagctacctttcgcggaaggtgtgagtgaggattctgttatcgacgcagtcgaaaggcacgcccaagctatggccttacagcagcgtgcccgggctgaagggctcgaggcggctcttaacgagtccgtcgagaattgcaaggcgcttgcccaggcggctgagcagaaggaggccgatcgcatggccatagtcacctgcgggccttgggcggccatgtgcgcagcagactccgcggggcgctgcaccacagcgttaggcgggccttcgagcgtcaaggcgccgaacccctag

SEQ ID NO: 4659 - DNA, 429 bp, Zea mays
  Peptide Sequence Number=SeqID_48034
atggccatgatccgcggcggagttcccccaacggcgagaaattccggaggccacaagcacaatccgcccaaggcgaggcttcgcgcaccctccgtgccaccgtgcgaagttcctggtgcggcgtttgagggtgtagaggcggggtggcgctgtttcgttggtgatggccgaagtcttgcggcggctggctttctcgtggtctctcggcaagctgggtcctggttttctgctgctgtgcgatcaagaagggagagggaaggggaggactcggcaacccatttatgtgccacgaacaaggggccaacggacacacaggttcggatcggctcgaatccagggagtagttccgccatgcgcgggattgaaggtgacggcggctacagaataagctggagacccgggaagcgaaggacgcgtggagttcgttag

SEQ ID NO: 4660 - DNA, 2706 bp, Zea mays
  Peptide Sequence Number=SeqID_48035
atgtcaccaggtcgttgggttctgaccgttggagcttctgacaactgggtcaccggacagtccggtggtgcaccggacaggtcctgttcactgtccggtgcgccttctgacgcctgctctgactctgcgcgcgcagtcggcactgttcctgttcactatagccattgcagacgaccgttggcgcttggagccgttgctccgcttggtgcaccggacagtccggtgaattatagcggagcggcctcccgaattcccgaaggtggcaagttcagagttgggttccctggtgcaccggacagtccggagcgtcggcgcgtgcagtgtggaatcgacgccgagcgcctccagtcggtgcaggaatgcgcaaatgcacgtctgaatgaagcctggttggtggtagagccgatggtggtgggaacggcgccgtgcggggtctccgtctcctccgtgtggatcctcctgctcctttcctccctgctcctctcgccgtcggcggcgtccgtcgatttcggccactgcggctgcgacgacgccgacgacggcgccctctcgagcacctacaacatcctgcaatgccagaaggtcagcgacttcctcatcgccgcggcctacttctccatcccgctcgagctgctctacttcgccacctgctccgaccttttccccctcaaatggatcgtgctgcagttcggcgccttcatcgtgctctgcggcctcacgcacctcatcaccgtgttcacctacgacccgcactccttccacctcgtgctcgccctcaccgtcgccaagttcatgacggcactagtctccttcgccacagccatcacgctgctgacactgataccgcagctcctgagggtgaaggtcagggaaaacttcctggtgaacaaggcacgtgagctggaccgggaggtggggatgatgaaaatgaaagaagaggcgagctggcatgtgcgtatgctcacacaggagatccgcaagtcgctcgacaggcacaccatcttgtacaccaccatggttgagctctcgaaagcgctggaactgcagaattgtgctgtctggatgcccgatgaaaccaggagcgagatgatcttaactcatcagccaagggaaagggatataatggaccagcagaactgctcgattcctattgatgatccagatgttcaagaaataaaggctaccaaggacgcaaaagttcttgggccagattcggcactaggggttgctacccgcaagcttgacgtggggcctgtggctgcaataaggatgccgatgttaagggtgtcaaatttcaaaggagggactccagaagtgatgcagacgagctatgctatcttggttctggttttgcctaatgatggttcattggggtggggtagaagagagttggagattgttgaagtagttgctgaccaagttgcggtcgctttgtcacatgctgcactcctagaggagtctcagctgatgcgagagaaacttgctgagcagtatagggacttgctgcaggcaaagcatgaagccatgagggcaggggaagctcggaattccttccagactgcaatgtacgacggaatgcgaaggccaatgcactcaatccttggtcttgtctcaatgatgcaacaggagagcatgaatccagagcaaagggttgtgatggatgccattgccaagacaagcagtgttgcgtccacactgatgaatgatgtgatgcaaacatcgacaatgaactgtgagcacttgtctttggtgaggaggccgttcaatcttcattcttttattaaagaagctgttggagtggtcagatgtctaactggttgcaagggtgtagagtttgagtttcaagtggataattctttgccagaaaggatcattggtgatgagaagagagtcttccacattgtcctgcacatggtaggcaccctaataaaccgatgtaatgtcggctgtatctcgttatatgtcaatggtcataatgaggttgaagagaggcataatcatgactggatgctgcggagaacaaacttctctgggggctatgtttgtgtgaaatttgagattaggattagaaaatccaaggactatcttttgagttcaaacggtcagataagtcatgggtccaaaccaaacaattctgagatggggcttagcttcaatatgtgcaagaagattgtgcagatgatgaacggcaacatttggtcagtatcagattctaaaagcgttggagaaaccatcatgctggtcctccagttccagctgcagcctctgactgcggtctcctccgcggcgtcttcagacttgagccgatcgtccgcaatccccaacttcaacgggctcagagtcctcctggcggacagcgacgacaccaacagagcagtaacacacaggctcctggagaagctcggctgccgggtcctttcggtcgcctccggtgtccaatgcacgagctccttcgccgccgagccgtccttccagctggtggtcctggacctcgccttgcagaggacggacgggctcgaagtggcccgcgcgatcaggaagttcagtagcaatagctggctgccgctgatcgtcgccctagctgcgaggatcgatgacaaggtccgagacggatgccagaggtcggggataagcggcctgatccagaaaccggccacgttagctgcgctgggagatgagctgtatagggtccttcagaacagttga

SEQ ID NO: 4661 - DNA, 249 bp, Zea mays
  Peptide Sequence Number=SeqID_48036
atggaaagcttcggcctcggcttcgtcatcctgtatgtaaatattataagaaaaattcaaattcaaaggaaaaggaaagccagacttcaggaaggcaacagctgtgccccgagaagctaccagggcacagaagtcaccatgtccagcaatgacttcgtcaagatcatcaatttcaccttcgatatgttcgaaggcacccgacaggtcttcagccgaaggagtaaatttttcgatgctggctccaactga

SEQ ID NO: 4662 - DNA, 258 bp, Zea mays
  Peptide Sequence Number=SeqID_48037
atgatggtagactacacaacggggggatctctagctgaggtgcaggggaaggcggcctcccagactccaccttctgctgaggcgagggggaagagttctgctgctcctgctcctggcgtcagcgctccggctcctcgtgcagacgatggtgcagtctctccaggtgactggactgacctggcaccgtacgacgcagtgggcactttgccaagcgagaaggcaaaaaagggatcattgacttacgtgcagtgcatctaa

SEQ ID NO: 4663 - DNA, 174 bp, Zea mays
  Peptide Sequence Number=SeqID_48038
atggggctcggtgtatgcggctcgctctgccaagatgatgatgaggatgatggttttgattatgattatggtaatggttgcctttggtgcaatctatgctctggtaaagaaaaggagaacggtgtcgaggcggatctccgggagttccaggacttcgacgagtttgaggattag

SEQ ID NO: 4664 - DNA, 132 bp, Zea mays
  Peptide Sequence Number=SeqID_48039
atggttcgtttacagatgatgatgaggatgatggttttgattatgattatggtaatggttgcctttggtgcaatctatgctcaggtaaagaagaaggagaacggtgtcgaggcggatctccgggagttctag

SEQ ID NO: 4665 - DNA, 357 bp, Zea mays
  Peptide Sequence Number=SeqID_48040
atggcgcgtacaggaggtcagtccgcggtgaactgtggcacgacgcggttatcgcaccttggtgaagaattccgcttgttgcacgcctctattggttccgcagcggcgccaatctcactccctagggcgcggcgaaggtcgttggccaaccacgcgccccaattttcttcaacggtgaagaacgggtgcagcagcggctgcctcccttcacggtccgcagcgacgctccaacaggttattcacagggatggtgaaacagggcaagagcgcacacgtggtcagggaagggaatgtgaagatttatcctcaggtagcgccatcgggtgcaacaacctccacttcccccgcccgcggtga

SEQ ID NO: 4666 - DNA, 477 bp, Zea mays
  Peptide Sequence Number=SeqID_48041
atggaggcccaggcccacgcgtcatgccaccggcgcgccgaatgcttcgtgcatgcaactgcaccgccacttgcgccaccaccgcgcctcctcgactgcggaaccaatgccgcgactcgaggcgacccagtgcacgacccagcagcgctagcctggcgcgacggtcaatgcggccaaaaatgggccggaccgggaaagggggataccccgaaaaggatccttccctgtgaaggaaccaggctccgagcctccctactgatcagaggttcgaaggctggccccccggaagggttcgacagccgcctcagatcgcgtgggctctacacccactactggtcagaggttcgaaggccggcccctcggaagggttccacggccgcctcaggctactcgggctccgcgcccattactgatcaggggttcgaaggctggcccccgaagggttcacagccgcctcagacgccgagcgagggatga

SEQ ID NO: 4667 - DNA, 1326 bp, Zea mays
  Peptide Sequence Number=SeqID_48042
atgcccatgtatgccgtgagtgggactccgccgagagctccaccgactcctcctccgatgaggacgctgctgtcacacccggatttcagggcaccaagacccgggcgcgaacataatcaccagacacaatcaatccccgagcaggaccgcgggttgattaccactaaatctagggactcatatgtaaaaactgcacaacgaaaggatggccgagcggccttcttccccaacggcacaggcccggcggcgcagcacaccggcgatcgccgacccagcaacccggtgtaccaaacggacaacggcaaggccatacatgatgcggaggtggaagcgaagcggctggtgaaattcttaccgggatttgaggtatggagggagcctgcccacgacgcaggacccgaccacggtggcaaaacggacacggtgagaaattggaacgaccctggggctcctttctaccagcagatgccacgggagcacgcggtgcatcagggagagtctcacatgccatacggagtggcccgagcggcggctaggggagagacgatagcaccggtttatatacacgcgacaagggaatcccagggccaactactgcgcgcggattccgcggatcttgttgccagcagtgagtccgatttgaggaagaagacgactgacgaggtggacccaccgacacaatcaatccccgagcaggaccgcgggttgattaccactaaatctagggactcatatgtaaaaattgcacagcgaaaggatggccgagcggccttcttccccaacggcacaggcccggcggcgcagcacaccggcgatcgccgacccagcaacccggtgtaccaaacggacaacgacaaggccatacatgatgcggaggtggaagcgaagcggctggtgaaattcttaccgggatttgaggtatggagggagcctgcccacgacgcaggacccgaccacggcggcaaaacggacacagtgagaaattggaacgaccctggggctcctttctaccagcagatgccacgggagcacgtggtgcatcagggcgagtctcacatgccatacggagtggcccgagcggcggctaggggagagacgatagcaccggtttatatacacgcgacaagggaatcccagggccaactactgcgcgcggattccgcggatcttgttgccagcagtgagtccgatttgaggaagaagacgactgacgaggtggacccaccggtcagtggctcggccgccaacatcgccgtcaccaagggccttctcttcccaaacgtcggccacaagtgcctcatggcaaaggacgacaaaaggaagaag

SEQ ID NO: 4668 - DNA, 300 bp, Zea mays
  Peptide Sequence Number=SeqID_48043
atgaagaagagcaagagggatttagagatgaagcacaaaactgtagctctcaagctcactcaaagatttctctccaaagatttgaaatgggagaggcaagagatgtgtgagagagagtgggaggtgtttcttaggttagaaatggagttcaaatcatgctcacttctatggggagagagagagtttaggagagaaaaccccagctcaactgcctggagacaagttcagctggtgtatggtcaaagaggttcacagctgaagttgagttcagctgaagttgagaaagctcaactcagctga

SEQ ID NO: 4669 - DNA, 153 bp, Zea mays
  Peptide Sequence Number=SeqID_48044
atgacgcgcgggcctgacttctgcgcgctctggcgcgcatttaatgcgcctgcagcggagcagccgttgcaaattcccgaggctgccaagttccagagccgcgtcctcttggagcaccggacactgtccggtgtacaccggacagtccggtga

SEQ ID NO: 4670 - DNA, 768 bp, Zea mays
  Peptide Sequence Number=SeqID_48045
atgcagccgggctgcctgatgaaaatccttgaagccgagcgatggttgaaaggtgccaacttccgcgaagttgcgctcctccaatggcagcaagacgaaggcaactcgggcgctccccatctggaggctcggaagacagaagaagccaaactgccgcgcacggagcgtgtaaccgcccagtggttacaagcactcctccgtcttcgcctaaaccagcgggtgaaagggcggactgccatgcaggcagcatgcaaccgtgccacggggatgcaccctttcgactccgatgcgtccagcatggagtcccaggcccacacgtcatgtaaccggcacgctggttactacgtgcgaaaaactgcaccgccacttgcgccagtgccgcgccttctcgaccgcggaaccggtgtcgcgattcgaggcaaccctgcgcatggaccaacagtgccagccaaacacgctggtcatgggtcagtcagccatgggagaaggcgcgacggtcgatatggccagaagtgggccgacagtaatggcggcagcaggcgagcggaagcggcggtcaaatcgtctgcaggctcatgtcccctcctggagcagcaggagagccctctcccaccgcgtgaagacgacgcgcctgtgttccgttccttgaacggctcgcgcatgcacaacggctgccccgcgaaccactcgtcccatcgcattaactccgcggcagggcaggcgacacctttggcaggcgaagcgggcgacgcttcacctccgccataa

SEQ ID NO: 4671 - DNA, 603 bp, Zea mays
  Peptide Sequence Number=SeqID_48046
atgcctccgcgcggaggtcggtgctcgtccgtccgggaggacttgagtggggatctgccggtaggcaggtggctgccgtcgtcggtgctgaggtggtggcagctagagaagtcctcatcgccgacgagatcgtcggcgccatgtgcgctccgggcctccggctctttggctttgatagcttgtcctcgcccctcgagcgaagacacgggcgagggcctcgtcacaacagcgtcggccctgaggtcattgctgctgttgtttcgccgcccaaagcgggggtcgttgtcgctgctgtcagggcggttgccagtggaggtccttttgctcgagtcgtcttccgaggccgggcctagttccgccgagggtggaatcaacgccaagggtgctgctgttccccctgccgatgccagaacctgcaggaacagtttgtctatagatttgcttgtcggtagcagaatcgtttatgcgagcgagagttacttatcgcggaaggtgatgagtgaggatcccactattgacgtagtcgaaaagcgcgaaagatgttctggccgaaagactttttccgaggaaaattttgacgcagagtgggttccccccttctag

SEQ ID NO: 4672 - DNA, 657 bp, Zea mays
  Peptide Sequence Number=SeqID_48047
atgtgttgtgtggctaatgcaaatgatagcggaagcacaaatgaggatgaggaggaagaaagaagccttgtgcaactgtacgctcgcctaagccaagaagataaggcggtcatgctcaagcttctagaaagagcaagagagcaaggcgaagctcgtcaaaggctagaaagtattctctcaatgaagatgcaatgctttgacgagttgactaaagaacatgaggagctaaaatgctctcatgttgatttggtccaaagcatatcttcttttgagctagaacttgcaggaacaaaaaatgatacatatcaaaagctcaaagaagagaatgagaggctaaagatgagcttgacacaactaaaaggaaaatgcattgcccaaccttctcaagataaccgtgatcacatggtgaagaagcttgagacgggaacaaccgtggcatgcactacatcccttgaagaaaatgtcaaggatttgaggattgccaagaggaagaaacaaaagatgaaattcaacacctcctccaaaagcctcaaccacgcctccacaaaaggtaacatccaaggcaacccaaagttgcaacttgtgctagaaagatatagagagatatttcatgttcttaaaggaataaggtgtcatgtaaggaattcaaatccttag

SEQ ID NO: 4673 - DNA, 249 bp, Zea mays
  Peptide Sequence Number=SeqID_48048
atgaactcagatgatgctgcggctcgggtcttcggcgggttgcgatttgggccggggaaatccgccaattgctcgccggagggagtgcttcaccaccgcgtcgtacttcctcgtggtcggactcctccgtcgcgctggtcatccgtggacgactcggcctgcgcttcttgcggcgactcgatcgggtggcccgtgttggtcgatatcccttcgcaggacgtattagcaaaagagcccttccagtattga

SEQ ID NO: 4674 - DNA, 105 bp, Zea mays
  Peptide Sequence Number=SeqID_48049
atggccaacaaaattataaatagaaatgaaaaagaaacccatgatgctcgggaagaagctaagcgagccaaagaggctgccgagcgcataaggcatatagaatga

SEQ ID NO: 4675 - DNA, 909 bp, Zea mays
  Peptide Sequence Number=SeqID_48050
atgtcctccaaggaagggaagcttcttgtagaagggataacacagtgcgctgcttggcatgggtgcactgttcgccagcagacccagcaggcacgccgcctgctggatgaccttgacgccgcctgccagcggatgggacgggacacattaaatgctaagagggcacgccgcccgtcagcgcagtggcaggcggcgccgtcctccgtgtggcctggagatgtcgcctgggtgcggcgtcttcatgctgtagaagaggttgctgccggtcccgccctatgggttacgcccgacggccatgccccgtttttcacggttgacccggcccttttccgcgacggcgctgaggagtcaaggcattggcgcgagtggcggtgcgacttttccgcacccagtgacctgcgcgccggttgcatgacatgtgggcctggaccccatgttggaccgccggttgcagcgaagctgagggggcgcataaccgcggggcggtttaaccatgctttgctcctctcgccttcatcgcgcccttccgccttccaggcctccagatggggtgcgccggtgttttctagagaggtccacgtcagggccaccccctccggcgacctcaccgccggagagctcgcgcccgtggtgcccggtcgcaacctccggccggtggtcatccacaaggatgactaccagccttgtggtggagagaagcgagccgggctgcggcctccccctgccctcagcttcaaggatgttcatcatccgtgctggggaggagggcgagccgagtcggggctctgcctttcgcgcgggctggcggcctgcttcttcctccagcattccggggagaagggcgttcgccagccttgcgaaggaggtcaacttcggctactcggggttggccgtgtgaggcaccgttag

SEQ ID NO: 4676 - DNA, 660 bp, Zea mays
  Peptide Sequence Number=SeqID_48051
atgggggcggcgtcggcgttcttggatggtcttgtcctcactcctgcagtgagtacgggagcaaggacctctttgcacgcgcgctggggcggtcgccattcgccggtacggcactgtagcactcaccctgaggtgatcgctgctgctggcgagccgctcagagcggaggtcattgtcgctgctggtgcagaggtggtcgctgtcgccgatgatccgtcgatgcagaggtggctcacggtacgggaccaggctgagcggctacatggtttccggaccccccaggagacaagtgcccgttcttcagagccggacctccagaagtctggacccgtgggggacccagaatggtttccggaggaaggcaggcttcagctccgtaggccgggggacatggggtcccgccggtgccgcgactacctcgccgtcgttgacgttttccttgccagggcgacgacgaggtggggagccatccttggaagactgctcacgccactcgctgatgcgttcgctgacgtgtttcgcgagatcaatgatctcgcggcactccgcggcgctgtggcgaccattggggtgtacagggcacgagccgccgctacccctttgaggccgtgggcgtttgttgtggtcgccccggcccccggtcgtagctgcaacgactag

SEQ ID NO: 4677 - DNA, 396 bp, Zea mays
  Peptide Sequence Number=SeqID_48052
atgtcccaactgatgggactagtggagtctaccaagatcaccctggataacagggaggaccttgtggtagacttatccactgagctggtggaaaaggacctccaggtggagcagatggccactcaaatccaagagcttgaggatcaggtagaggccagggagaacaccatcgaggttttggaagatcagctccagaccacgcagcaacagcttgacgaagccaaccagcatttggatctgcaccatcaggagattcaatacatggaggcagaaggagccgatgaggatgtcgacatcgagggaggagaggagccggagcctgcatccagcttggacactgctggctcagagagaccaccttcccccgagtctagcgttgcctcgtttgcccattag

SEQ ID NO: 4678 - DNA, 366 bp, Zea mays
  Peptide Sequence Number=SeqID_48053
atgccaggaagagatcttgcacaagacattttcgcacgttttggagctctgctggcgcaagaactcgggcagatgaacacgacaacgtgttcgacgcgccctagcgtgccagagcatgccctcggcgctccgcccacgcgcgaagcccagtgccgtgccaaccccgcgtccgcggctataaaaaacaccccgagctcgaccgtacacccccgcgcgtccctgacccaactcgagctcaagttcatcggcgtttgcccagagaacggcgtgccagcggccgcgcaagccacgaccaccgtagaccggccaaaccagccactcctcgtcccgtccgaccctcgggttagcttctgcggacctcggtga

SEQ ID NO: 4679 - DNA, 324 bp, Zea mays
  Peptide Sequence Number=SeqID_48054
atggacagggagctaggcagccagggaagggagggagctccctgcgctgccgtgtgggaggaggagcgcctccatggaagaagaaagggggcgctggggaggggatggagcagcggcgtagtggatctcgggcgtgtcatggggcttgtgctcgcgcgcagggaatccccggcgccatggctgctggccggagctggagaagacgactccctgctgcagccgctcgccatgaggaggagcagggagggcgccatggcagaagaacgcaagctccctgctggttgctgttactgccgtggggagaacagagaggaagaaacgtga

SEQ ID NO: 4680 - DNA, 795 bp, Zea mays
  Peptide Sequence Number=SeqID_48055
atgacggtggcaggcggatgggagcagcagtcacgtcgtcagccaggctcacgtcccatccagggacagcaagagagcctcctcccacggagtgaagacggtgcgcccgtgatccgttcctcgaacggcccgcgcacgcgcaacggccgccccgccaaccactcgccccgtcgcattaactccgcggcggagcaggcggcgcttccggcaggagaagcggacgacgcatcgccttcgccggaccgggaaagggggataccccgaaaaggatccttccctgtgaaggaaccgggctccgagcccccccctactgatcagaggttcgaaggctggccctccgaagggttcaacagtcgcctcagatcgcgtgggcccgacacccactactggctggcccccgaagggttcacagtcgcctcagacgccgagcgagggatgaccagggaatcccatcggagggaggcatcgagccctcggaccccgtcgccaggggatcgggtccggcagatcacccgcagctcaccggagacaccatgttcggtgcccatcgagggtaacatggcgcactcccccccctcctccttgcggaaaggcgacgtaggggcgcctcaacaggggcgccatagggaactccgctccgcccgaccccagggctcggactcgggctactacccggaagacggcgaactccgctccgcccgacccagggctcggacttggtctaagacccggaagacggcgaactccgctccgcccgaccccagagctcggactcggactaagactctgaagacg

SEQ ID NO: 4681 - DNA, 150 bp, Zea mays
  Peptide Sequence Number=SeqID_48056
atgaagctcgtgcactcggcagaagccttcgacaaatggttccaccccttggcttcggagagcccagatataaacgtgttgggggccttcggcttccgaagggggagaagctcaaagaatacgaaggttgatacagcgccgaaggagtga

SEQ ID NO: 4682 - DNA, 84 bp, Zea mays
  Peptide Sequence Number=SeqID_48057
atgggagaccacgtctcaggtcgcatgaggagggcaatctgcgggcatgttcactcaggatttagtaaacattatgctaagtga

SEQ ID NO: 4683 - DNA, 478 bp, Zea mays
  Peptide Sequence Number=SeqID_48058
ggccgttcgatctgggatagacgacggggattgggtggccggcttctgtcttcccctccggctagcagaggcggtggcgcccgttcccgcggcggagaactcgccggagacgaggggcgcggggggctctgcgggtccttgggacgccctgggtgaccggggaggttggggagagcgtggggaaccctctgaggaggttccttacctcaaggcgaaccccggggactcctcggtggcggcgaaggcgcggcgatggctcgggtcgacgatggcggacctcggcggctgcgcagagaacggcagaaggcagggtggggctccaacgacgacggagaaacgggctcatgcggcggcggttaatggcggcggcactttggcgtgcgagcagcgtgggcgaggtggaagggaggagcccgagcgctctgaggcggctgttgaacccctccgaggggccagccttcgaacctctgatcagtag

SEQ ID NO: 4684 - DNA, 1695 bp, Zea mays
  Peptide Sequence Number=SeqID_48059
atggaaggcgtctgtggtgctcgcatcatccctaaaccccgctcggtctccatggaagggtcctccacctccgccccggatctgcgtcccagccatcctccgccttggatccgcggggagaagtttccatccaaatatctggggcagacctcctcgccccgcatctcccttgccatccacggatctggcctcgccccggattctgctcgcgttaagggccagtactcgacgcgggtggcccagagcgtggcactggtcgtgtactggtgcctcagcggcagccccaagaaccggccggacatgtccaccatcatccaggcgctggagcccctactcgaccttgacgacgacatgcctgtggcacccctaggccacgccggccccgtcatgctattcgtagcggccaccgcagaggagaagaaggagcgagccccgaggaaggacgtcctcggccaccggcgtaggcccttgtcaccgaaggcgagccctaggaagcaccccagcgccggcaccaaggaggagttctgggtgtggcatctgccggccgaccagaagacacgtccaagcttgggcggcgttgtgcaagcgccagtgggtagcagcgaaggcgaagacgatagctatgggatggagattcagttgcccatggacgtgcaacatgtggcgcacatcacgttcgatagtgtcgacgtttcgaacctgggggggtccctggaccgacgtgtaaattgtcgccgcgtgccccagcccagatgggtcggcgcgagacggagcgtgaaggggggaagaagccggagggagacaggcgtaaaaggggaaacccgcggcctttgtgtttatcccgcgcccaggtcgggtgcgcttgcagtagggggttacaagcgtccacgcgggagggagcgagcggcttacgcgagcgtcatcccgtccttccccgcgcggccaaccctctataagagggctctggaccttccttttataggcagtaatgatggcgcctcctatgacgtggtcggtccgagccctgggttgggcgaggtggaggctcctccgaggtcgaggtcgagtctgtcttccaaggccgaggtcgagtctgagcccctgggtcgggcgaggcggagaccgtcggctgaggccagggctgagcccgagccctgggtcgggcgaagcggagttcgtcgtcttccggggccaagcccgagtccgagccctggggtcgggcgaagcggagttcgtcgtcttccggggccgagcccgagtccgagccctggggtcgggcgaagcggagttcgtcgtcttccggggccgagcccgagtccgagccctgggtcgggcgaagcggagttcgtcgtcttccggggccgagcccgagtccgagccctagggtcgggcgaagcggagttcgtcgtcttccggggccgagcccgagtccgagccctgggctcgggcgatgcagagttcttcgtcttccggggccgagcccgagtccgagccctggggtcgggcgaagcggacctcactctgtcgagtggcacagcagtcggagcggtgcaggcggcgctgccctcttgtcagactggtcagtggagcggcgaagccacctttgcattaaatgctcctgcgatacgctcggttggcgtggcgacttggccaaggttgcttcttggcgaagactgggcctcggacgagccgaag

SEQ ID NO: 4685 - DNA, 2352 bp, Zea mays
  Peptide Sequence Number=SeqID_48060
atggcgatcctctcggcgctcgccaccgaggtgctcatccccgtcgccgccgtcatcggcatcgccttcgccgtcgtgcagtgggtggtcgtgtcgcgcgtgaagctctccccggccgcgtccggcggcagcggcggcaaggccggctacgccgactccctcatcgaggaggaggaggggctcaacgaccacaacgtcgtcgtcaagtgcgccgagatccagaacgccatctccgaaggagcaacatcgtttcttttcaccgagtaccaatatgttggtatcttcatggctatcttcgctgttgtgatcttcctcttccttggttcggttgagggattcagcacgaagagccagccctgcacatatagcaaggacaagtactgcaagcctgcgctgttcactgcactctttagcactgtgtccttcttgcttggagccatcacctctctggtctctggtttccttggcatgaagattgccacatatgcgaatgccagaactaccctggaagctaggaagggtgttggcaaggcttttatcactgctttccgctctggcgctgttatgggtttcctgcttgcatcaagtgggcttgtggttctgtacatcacaattaatgtatttaagttgtattacggtgatgactgggagggtctttttgagtccatcactggctatggtcttggtgggtcgtccatggctctcttcggaagagttggtggaggtatctacacaaaggctgctgatgttggtgccgatcttgttggaaaggtcgagaggaacattcctgaggatgatcctaggaacccagctgtgattgctgataatgtcggtgacaatgttggtgacattgctggaatgggatctgatctctttgggtcatacgcagagtcttcttgtgctgcccttgttgttgcgtctatttcatctttcggaatcgaccatgatttcactgggatgtgctacccactccttgttagctctgttggtatcattgtctgcttgatcaccaccctttttgctactgatttctttgaagtcaaggctgtgaaagaaattgagcctgcacttaagaagcagctcatcatctccaccgtcctgatgacttttggtattgctctaatcagctggttggcccttccagctaagttcaccatctacaacttcggtactcagaaggaggtttccaactggggtttgttcttctgtgtttcaattggtctgtgggctggtttgattattggttttgtcacagaatactacactagcaatgcatacagaactggtgctgccactaatgtcatttttggtcttgctcttggatacaagtctgttatcatcccgattttcgctattgctgttagcatctatgtcagtttctccattgctgcgatgtacggcattgcagttgccgctcttggtatgctgagcacaatcgcaactggtcttgctattgatgcttatggtcccatcagtgacaatgctggtggtattgctgagatggctggaatgagccacagaatccgtgagagaactgatgctcttgatgctgctggcaacacaactgctgctattggaaaggggtttgccattggttcagctgctcttgtgtccctggcgctttttggtgcctttgtcagcagagctggagtgaaggtcgtcgacgtcctctcccccaaggttttcattggtttgattgttggagccatgcttccgtactggttctctgccatgaccatgaagagtgttggaagcgctgccctgaagatggtggaggaggtccgcaggcagttcaacaccattcctgggttgatggagggaacagccaagcccgactacgcaacctgtgtgaagatctccactgatgcttccatcaaggagatgattcctccgggcgctctggtcatgctgactcccctcatcgttggaaccctctttggcgtcgagactctctccggcgttcttgctggtgccctggtttctggagtgcagatcgccatctctgcttccaacaccggcggtgcatgggacaatgccaagaagtacatcgaggctggtgccagcgagcacgcgaggaccctcggtcccaagggatccgactgccacaaggccgctgtgatcggtgacaccattggtgaccccctgaaggacacctccggcccgtccctcaacatcctcatcaagctcatggccgtggagtccctcgtgtttgcccccttctttgccacccagggtggcctgctcttcaagattgctgctgctgttcgcattcaatctttgggcctcccggagccgccggaggcgcgttttactgttagccttactactcttactccctgtagctccacgtag

SEQ ID NO: 4686 - DNA, 78 bp, Zea mays
  Peptide Sequence Number=SeqID_48061
atggatatggtggcatgccccacatttgatttgggacatatggcggagcctgacctggcgctgctcatgaatgggtga

SEQ ID NO: 4687 - DNA, 780 bp, Zea mays
  Peptide Sequence Number=SeqID_48062
atggcgcctcctgtgacgtggtcggtccgagccctgggttgggcaaggtggaggctcctccgaggtcgaggtcgagtctgtcttccaaggccgaggtcgagtccgagcccctgggtcgggcaaggcggagaccgtcggctgaggccagggctgagcccgagccctggggtcgggcgaagcggagttcgtcgtcttccggggccgagcccgagtccgagccctggggtcgggcaaagcggagttcgtcgtcttccggggccgagcccgagtccgagccctggggtcgggcgaagcggagttcgtcgtcttccggggccgagcccgagtctgagccttggggtcgagcgaagcggagttcgtcgtcttccggggccgagcccgagtccgagccctagggtcgggcgaagcggagttcatcgtcttccggggtcgagcccgagtccgagccctggggtcgggcgatgcggagttcgtcgtcttccggggccgagcccgagtccaagccctggggtcgggcgaagcggagttcgtcgtcttccggggccgagcccgagtccgagccctgggtcgggcgaggcggagtttcctacggcgcccgagaccggacttggctgctgtcagcctcactctgtcgagtggcacaacagtcagagcggcgcaggcggcgctgtcctcttgtcaggccgcctccatgtcgtagcaaggttgctatggagcgtcgaccacctcgacctacagctcaaaggttgtgcatactttccagtttatcatgacttctaa

SEQ ID NO: 4688 - DNA, 2019 bp, Zea mays
  Peptide Sequence Number=SeqID_48063
atggcggatgaatcatggaggattcctatgttagtgcaagaactggcggccaaggtgcagcaaccaccaagcaggtacatgcagccggagcagtatcatcctgtcagcctagacgttggtgccgagacactggagcccatccctgtgatcgacctcagccggctgtcgactgctggtggtgccgacgacgacgagagcggcaagctccggttggccctgcagacctggggggctcttcctggcaagtggatgggtcttttacatgagtacacattgaactgcaagagaatcaaggactgtatccttgggacaacagccaagactttagggcttggcgaagactgtttcgccagatttaactactacccgccgtgtccaaggccggatctcgtctttggcgtgaagcctcactcggacagtagtggtgtccttaccattcttctcatcgacaaagacgtcagtggactgcaagttctcagggatggcgtgtggcacaataatgtcccagctagtcctttcatgttgctgattaacgtaggagacttcatggagataattagcaacggggtcttgaggagcccggtgcacagggcggtgagcaacgcggagaaggagaggatctcgttggccatgttccacggcctggatcccgacgaagagattgagccggcgcccgctgctcttttaagcgagaaccagccggcgcggtacaggacactgaaggccaaggagtacctgctggccgggttctatgaacattttttttgtagattcatcgagtctgtgaagatccatctaaacgagggctcggactcgggctcggccccggaagacgacgaactccgcttcgctcgaccccaaggctcagactcgggctcggccccggaagacgacgaactccgcttcgcccgaccccagggctcggactcgggctcggccccggaagacgacgaactccgctttgcccgaccccagggctcggactcgggctcggccccggaagacgacgaactccgcttcgcccgaccccagggctcgggctcagccctggcctcagccgacggtctccgccttgcccgacccaggggctcggactcgacctcggccttggaagacagactcgacctcgacctcggaggagcctccaccttgcccaacccagggctcggaccgaccacgtcacaggaggcgccatcattaccctaccccaagctaactcaggctacagggaacaagaccggcgtcccatctggctcgctccggctccagtgctcctccgacggccatgacaccacacgaaccaggtgccaaaacctctccggctgccacgatggcatccgccttctccgcgcccacgtcacgcgtggagctcgcaaccgccccgcccctggccacttgagccctgagccccactcgccctctccccctcccccatttgcgctccagcagacccctcttccacctctccctcgctgcgcgcacgctagagcgccgccgccacaaatccctgccgtcccgagctcgtttcccggccgccgttggagctacgctgtgtccgttgccacggtgagcttcgccccggcgtccgcaacccgggacgcgccccaattccctctccccctccctatttctctctgcccgcgctcacccgccgttccccgtgcagccgcggaggtccgccaccgccgccccgggccaccgtcgcgccattgccgccgccgaggagtccccggagcccgccttgaggtaaagaacctctcccgcccctatcgacccgcgtattgccttctgccgtgtgtaattcctcgccggagtagatttatgccgccgccgagccgctccgccgtggaccgcccccctccggtgcccctgccccgacccagaccccaccagaggactccccgtgccctccccaaccttcccggccgctcaggtcgcctcggaggcccgccaaacgcccgcgcccctcgtctccggcgagtcctccgccgcggggacgagcgccgccgccccagctag

SEQ ID NO: 4689 - DNA, 519 bp, Zea mays
  Peptide Sequence Number=SeqID_48064
atgggggttgacatggtagtgattggaagattatgtgcttctagccatgatgaaataataaatgaatgtgttgctccagtatcaaataacacttctacaatatgggagtcgactggaaacatacctactgtcatgtcggggtttcttgaactgcttcagcctccaagtgattcagtctcccatggttatagcgtggctgagagcggttgcctgctccaggctgagacacattctgctttgctggggcactggggcttgactgcatctgggctgccttcttcggacattgcatcacccaatgaccttgctctccacaatggaaacatgctctgcttccgtcttggactggggctgcttgactgttctggttggttgctggggcgggaagacgaggtgcctactgattctacctctggaactgacctcctcctgactggttgttctggcgattctgctactggtgctgagggtactgcctttgaaactgctactgctgaggtgggcgctggttctacttga

SEQ ID NO: 4690 - DNA, 222 bp, Zea mays
  Peptide Sequence Number=SeqID_48065
atgtttctgatttcttggtccaactcgtcctcctggggtgttggactagaggccttcctcttctggcttcgggcctctggaatagaaagggtctcctggtttgggtccagtggctgcaaagcggcagtccctatcgctgaagctttcttcggtggcatgacaaaggtgagcttcagcaagatttgcttcggcagcctcgagcctagagttcttctcccctag

SEQ ID NO: 4691 - DNA, 477 bp, Zea mays
  Peptide Sequence Number=SeqID_48066
atgtccctgatctcttggtccaactcctcctcctggagtgttggattggtggccttcctcttctggctccgagcttctcagagagaaagagtttcctggtttgggtccagtggctgcagtgcagtagcccctgtcgctgaagctttcttcggcggcatgacgaagtcgagggagaaggaaattggaaaagatgctgaaggtgggagcataagggttccttcggcgaccagggtaagtgttaagaaaaaacggcatatgatggccgtcatgaggactgtacacaagacaaccccaccggtcgcaacagaaaagattgttcctctcgctgctgccgaagctactgaagcagagcctgaagccaaaaacattggagtcccgctcaggaccacgctatcagagatcggcagaattatagctaatgtggttcccgagagggaaatgggtgaatacattgttgtcgaggctgcgacttcgtag

SEQ ID NO: 4692 - DNA, 330 bp, Zea mays
  Peptide Sequence Number=SeqID_48067
atgtccttaaatccgaagctcaaaagctcagaaaacttaagaaacaaagcaactgttggaaagcaaaagctaagaaatcaagcaaagaaaagaacaggtaccttcggactcggatcagaaccacaatatgaagaagtacaaagaatgcgaaggttggcgcagagccgaagctatgcgcaggggaccttcggcgtgatgtcagaaaagggaactgacttaaaagggaaaaggctattcagacctcgatggatttcaatagagtcattagcaaatgtaaagggcatgagtgtaattttacatgggttgcgtcccgtgcctataaatagatga

SEQ ID NO: 4693 - DNA, 1527 bp, Zea mays
  Peptide Sequence Number=SeqID_48068
atggatatgcagttcacttttgttggtgctggattgcctggttcttgccatggcatggcagtgctcaggagttgtatggaagaagcgaactatccacacccaccagcagggagctacctcgtcgccttccggcgccgtaccaggtgcatccgtgtcgtggctaggtacgcggaaagggaaggcaaggtcagaccgtcggtgctgcgtgtggcgaagcctccaaccactaagcagggagaatacccgccgccccgtgtcgttcgttctccagctccagctgcaggctgcaggctgccagctggggtggcggttgcctacgcgcggtcgtcacgccgaagctgtggccgcgtgacccggaagatgaacgggcggctgtcggccgagtaccgggggctggaggtgaaggtgccgaacctcttccggtgccccatctcgctggacgtgatgcactcccccgtgagcctctgcaccggcgtcacctacgagcgcgcctccatccagcgctggctcgactccggcaacaccacctgcccggccaccatgctcacgctcccctccaccgacctcgtccctaacctcaccctgcgccgcctcatcgcgctctgggcgtccacggccgcgccctcctcctcgtcgcccgccgcgtccgccgtcgggcccacgccggccgcggccgcggccgagctcctccgccggatcgctgaccccggcgcggacccctgccccccgctccggaagctcgcggctttcctctccgacgacgacgtggacgagttcgacaagaacgcgctggcgagggccggcggggcggacagggaggccgcggaggccgccgtgcgcgtgctcgcggcgatcgcggcgtccgactgcatcgaggaggagagcaagaggcgcgtggccgctgcgctcgccgccgacgcgccgtccgcggccgcgtccctggcgcgcgtgctgcggagccgggacctcgctggaggcgcgcgtcgacgcggcgaggctggtggagtcgctgctccgcaatgcggcaccgggggcgcgggccgcggtggcggagtccgaggacctgcggccgtcgcggcgacgcggcgtgcccgcgctgcgatggttcggctgggcgccgtggccgccgcggtgcgcgtcctggaagccgacgccgggcccccgggccaggcgctccgcgtgctggaggccacagtggggtgcgccgagggccgcgccgcggtgtgcgagtccgccctgtcggtggtgcccgcggtggtgtccaagatgatgaaggctggggtgggcggcgcggaggcggcggtgtcggtgctctgggcggtgtgccaccggtaccgggaccggcgcgcggtggaggcggcggcggcgtgcgagggcgggctcaccaagctgctgctgctgatgcagagcgggtgctcggcggctgcgcggcagatggcgtcggagctgctcaagatcttcagggtgaacggcaagagctgcgtcgcggggtacgactccaagactagccacatcatgcccttctga

SEQ ID NO: 4694 - DNA, 624 bp, Zea mays
  Peptide Sequence Number=SeqID_48069
atgccccctacaccaccacaaggcatcccggctgctggaggagactctgacagagatggagatgatgacgacgacgctggcggcagttcgagccacggcacagagctctcggaggagctagagccggagggatggatcgctaaacccaccactcgtgacgccgctcatgggtgtcacttccatgacgctctcgatacccagttgcgtcaggcttttgaccgacacacatgggatactgccgaggcatccatgcaagatgcagcacgacaggcactttctcagtattgctcgttgttcagcggggtagctgatggtctcgacctaaagtactaccctcgtcgttcgaccggcagtgctggaggtgtgattgcctcgccagttggtgagggcaatcccaggctgaataacatggtcaacttggccgccgtgctcaacacagagttggaccacgcccttaacgagttgggcaaggttcgggcagaggttgcagaattgcgtgctgagtgcgcagcacgccactatctagatggtggttctcccgcccctgtcatgattcagcacccttaccgttcaccgccccatggtcgcttcaactgtggtaccccagactgtagacccagatag

SEQ ID NO: 4695 - DNA, 240 bp, Zea mays
  Peptide Sequence Number=SeqID_48070
atggagtctctccaggtgactggactgacctggcaccgtgcgacgcagtggacgctccgccaggcgagaaggcaaaaagggaatcacagacttacgtgcagtgcacctaagacgagccatctacagaagacatcgtccttacggagaggtactcagataaaaggcctgagccccttaaggttgttgctcagggaggtctccaacaacacactcaggaacctcggactgctcgttgtctaa

SEQ ID NO: 4696 - DNA, 453 bp, Zea mays
  Peptide Sequence Number=SeqID_48071
atggcgagcgcggagggggccgaactgatagggcaggcccatggcacagagaaagaagaaaggggcacgcagggcaacggctcggcgactggcgatccaggcccacgagacagagagagagggggcgcgcgggtgaagaaaaccggcgccgacagggtcctcggacatcaggcccacatcagcacagtccttaagcgacttagacggagacactacaccgagacttccttctcgtgcaagtcactcgcccagtctcagctttattatttaaaacccaaagtttggtacttggcagaggttggtccgactgacgacgtcgtcttgcggagatgtccaatctctgcattatcttggggtcgactcgggtcgtcttccgcatcacgcgatcaactagcgcacctaatgagatgcattatgcacatgtatgaataccaaggaatagcacataaataa

SEQ ID NO: 4697 - DNA, 192 bp, Zea mays
  Peptide Sequence Number=SeqID_48072
atggccatgatgggttcaacatcggataaggtgtacctctgccagagctttgcctcgggcaaactaatactaggaaggccaacacgcaatgggagtggagagatggcgagagtagcgtgtaccctccgaggcaagaggctggacggtggtgtatctgtgctctcggttggcgtgaacccagtttggtcttaa

SEQ ID NO: 4698 - DNA, 366 bp, Zea mays
  Peptide Sequence Number=SeqID_48073
atggcgcaggggccatctctggttcgagctcgagctggtgagccgccgtcgctcatggccaacgccctgctcagtcaaacagggagcgatgggaccatggtcctatccactttcaccaactacgaggacgcatgcacgagaataatggccactgctcccctactacggtcattattcccgaacaactctggatgggatatgcacacgcatgggcacagcctcaccctcggagagaactcggcctcgcccaaagacggattctgcctcgggagaagtctccgcctcgcccgagcttggcctcagccaactgccctggcaacaactgcccacgaatcccgcaaggacctctctaacagactatactaa

SEQ ID NO: 4699 - DNA, 486 bp, Zea mays
  Peptide Sequence Number=SeqID_48074
atggagaagatggcggcgcggggggcaggaagggcggccagggcgaaaccgtttccagcacgccgcctggaccggacgcaggattcgaaaagcgcgaagcggcacagccgttcctcgaaacggctcgcgcacgcggaccgggaaagggggataccccgaaagggatccttctccgcgaaggaaccgggctccgagccccccattactgatcaggggttcgaaggctggccctccgaagggttcaacagtcgcctcagatcgcgtgggcccgacacccactactggctggcccccgaagggttcacagtcgcctcagacaccgagcgagggatgaccagggaggctcgggggctgctctcgcaaaaaccggctccggccaaatcgttgacagcgtcaacataccagcccgagagcttgggccccgatcgtgcacccgggctacggccagttcgcatgagggaacgaccagaccagccgaagcgttaa

SEQ ID NO: 4700 - DNA, 375 bp, Zea mays
  Peptide Sequence Number=SeqID_48075
atgtcgaaaatcgacagacttatatcaaatgtggttgctaagaaagatgtagccacagtgccttctgataaggggaagagaattgaagagacctcttcagaagatatgaatttcaaccttcggaacttgggcggccaacagctttccgaagaggacatatcagaattgaaggaatttgccatatcctgcggctaccaacctagatcgatgctcttcgacgagagtctattgctaaacaaagccttgaagatgcagcaagatgacgaagaaaaagacagccagctgcgttcagctgaaggctcacttgccgaagcctgggctcagaatgaaaaattaagcaaagagctgaaggaaactcaaacatttttgaaatag

SEQ ID NO: 4701 - DNA, 804 bp, Zea mays
  Peptide Sequence Number=SeqID_48076
atgcagcctgggacacctctttctcccccactcatcctctttctcccccactcctcttctttctcccccacaagtttctccaaccctaatcgctaccgccgggacacaaccggcgtcgacgacctgcctcctcgaccaggagatactgatgatgatgacactgaatcttatgagcagccacaacccctgcaattaaggtgctccttctctcttcaaagtagtggatggcaaatagttgcattgcatttcattgtttttaatctgtatcctagaagtgctacaaacacaacccgtgcttcaaagaagaagacaaaccccaacatggctctaggaattaggttcagcaagagagaaccaacagatgctaatgatgacataccaaacagccctactacacctggacttgctgatcatttcagcagagctgcagaggaagacatggcattcactgctcatgacagtacagctcctacacagcgagcaccaaggagacccagggcagcaactaagggaaaacaactggataggatgactaaagttatgcaaaggagactgcccatagctgttgaggaaggcaaaaaaaggacacatgaacctgttcaagctgtcaagtttgcatcagaggctggtatcattattcgggaaaccatgcctatcctaactcgttggaaagattacaaggacgaccagaaatactacaacaactttgtgtcacagctaaatgggcgcttgtccgttaacactgagattcttttatggggggaaggatgtaacacccctggtgttactgccactaaaacttga

SEQ ID NO: 4702 - DNA, 441 bp, Zea mays
  Peptide Sequence Number=SeqID_48077
atgtccaccaaagatgacgttgacttctccgtcgacgcgcgggaatgctccgcctcctcccccttcctgctgctggggttgccgaggttctccgggtcctcctcgtggtgggggaggtggcagacattggaagggttggtcgttcccgacggagtgcttgaagtctctacagttccgaagggtgtggcgcatgtccttgtggtacagacattgggcgtcgaggatgtcgtccaatgtccgttcgcctccgcggggtgcccctcgggcatgagagacgggtggtccggcggcgtggatttcttcgcgaggcctcttctcccaatgtttgtcgggttgttggttcgtgtcgcgtcgtggtgccggtggtgtaggcttcgttcctctgatgaggtcctgagcccgtttgttggtggtgatgtagaggtccgcttccctaaatag

SEQ ID NO: 4703 - DNA, 714 bp, Zea mays
  Peptide Sequence Number=SeqID_48078
atgggcgtgcctgacttctgcgcgcgctggcgcgcattcaatgcgctgcaggtagccgttggcgccgagacgaagaaggaactctacatcgcatcgcggatccttcggagagaaagccttcctcaacaatctccggaaaagccggagcgaagcaggaaaaagcgcaacctccagcgctccgagcaaagactacctcctgcaagccaggggcagagggtccgtctacccggagaactccgttgtccacctcttccacagagaaatggacacagatcactaggagaaaggaggcgaacaaggtcaaggatcgtcaaactgctcttctggtacctccgccctcaaaggagaacaggaagaagctcgtcactacgacggttccattctaccccgacgtcatcttcatcgggggaagagtcgaatcaactcccgtctctgacgatgaaccagccgcgccgggagaagaacctcttcagcgggaatctcgccgatgaaggaaccgacgccgaaatattcggcgacatcacaaaaccagagagcgggacccggcgcagcctgtgtcacgagatgaaatctcggagatgggagaaactccagaagaacgggtcttcagggaaagaaggtactcccgacgacgtgatcgtcggcaagctcaagagcaggctgagcaggaagcaagacagcgccgagagaatcctcttttcggacgaaacctga

SEQ ID NO: 4704 - DNA, 321 bp, Zea mays
  Peptide Sequence Number=SeqID_48079
atggatgctcaatatgatgtgactcaagaatggcttgatagggtgaagatagcaaggaaagggcttcgaggaactaggcgaaggggcttggctaccggtggccgggcgacgtgccctgcctgggacctgtacgccggagtgatggacttggacgccggtggctgggcggctagcagtagcagcttgggatatgtctgggcccggtggccggctcctaccttggagtgcagtgacgcaagggcaaggagccaggtgctagggacgcagtgtcctagggtcgctcggtgcctcggcttgatgcctactgctggcggatggtag

SEQ ID NO: 4705 - DNA, 1023 bp, Zea mays
  Peptide Sequence Number=SeqID_48080
atggcctcgccgtcgacagaagccccacctctcccgaccctccgagacgtcatcgcccacgatgacgacgacgaccacttcatcgcagaagaggaggaggatgaggagtgggacgacatgagcaagcgcatgtcgcgcctgtccatggaaggttccgaggcgggcgacgccgacgacgaggacgacggcggagaagatgagggggaggaggacgacgacgagttcgacgacgtgcggtcggacgtgaacgccgccgccacgtaccgcgcgtggcctccgcgcgacgagccgcagcaggccccgtcggcggcgtcgctcccgggcacgccggaccgcggcgcgcaggcgccgtggtggcccgggccgagcgccaaggggtacgcgagcgagacggaggcgcggtggccgcccggcgcggacgggcgcggcgggaggcggcagcggcagcggatggcggcgcgggaggtgtggctggagcgcgcgtggcggacgcgcaagcagcggcgccagctgcaggaggaggttcccgtgcccgtggtggtcctcggcggcggcgggggcgactcaccggcgagccgcggcgtggcgatggacatggaggaggtccgcgcgtgccgggacctgggcctcgaccttccctgtgactggaccgtggagatcccatcctgcgcgctctccgtctccggcgtcgacaccgccagcagcggcggcaactcgccggcctccggcagctggcgcatctccagccccggcagtgcactggaacgaaccaaggtgcggtttggttcaagaaatgtaacgcaaagcggctgtgggtgtggaatggaattggactcgtggcgatcaaccaaggctgcgccaacgctgcttcccttgccccgcgggccgcgccttcgtgctatctgcggcactgttctcacactgctgcccgtcacaggggacgatcccaaggacgtgaaggcgcggctcaaggtgtgggcgcaggcggtggcgctcgcgtccgcatctcgtctcggttcctga

SEQ ID NO: 4706 - DNA, 363 bp, Zea mays
  Peptide Sequence Number=SeqID_48081
atgatgactgtgaaaatcatggttattaaggcgtcgctaaagcgggtactggtgggagaagtatttatggtgaatgctttgatgatgaaaattttacacacaggagcttacaggaaactgattctgaatgaagttctgttgaattgcaaaaatgtcgatgtgtctggtgccatttcgctagttctcaaactgagaggttctttggcttactttgttgcagtgaagcatgttggccctggtgtgctaagcatggcaaatgctggccccaacacaaatggaagtcaatttttcatttgcactgtgaagcgaaatgctcttggtgagtttgaacctgaggtaccgcgaagtcttctcttacgttag

SEQ ID NO: 4707 - DNA, 147 bp, Zea mays
  Peptide Sequence Number=SeqID_48082
atgatgaagagctttcgagaacaaggaccaacgttggcgcccacctccagtgaactcattcgaccaccttcggcaagtatcgactttcacaatgccgccgaagaagacaatggtgtcaagggctgccctgcaaccactggacactaa

SEQ ID NO: 4708 - DNA, 264 bp, Zea mays
  Peptide Sequence Number=SeqID_48083
atgaagaaaaaggggactttgggagaattaaataatgtacaaccaaaactttccaaagatctcatgaaacataaaaatataattaaagggtgtaagttcattcaaaatcccaatggtgaagactgtaatctcgctgacagggagtacatcctcattctggagcaaggagttgctcaggaggtagcccaggatccagcaccagaatctaccatcgaggatctgcctgccccaactttggaaggcaagccccggttttatgcataa

SEQ ID NO: 4709 - DNA, 375 bp, Zea mays
  Peptide Sequence Number=SeqID_48084
atggagccctcggaccccgtcgacaagggactgggcccggcagatcacccgcagctcaccggagacaccatgttcggcgccctccgagggcaacatggcgcttcccccctcctccttgcggaaaggcgacacaggggcagccgaagtgaccgtagtcacttcgccgctccactaaccagcctgacagaagggcagcgccgcctgcgccgctccgactgctgtgccactcgacagattgaggctgacaagcagttaggcccggcctcaggcaccatagggaactccgctccgccagacccagggctcggactcgggctaagccccggaagacggcgaactccgctccgcccgacccagggctcggactcgggctaa

SEQ ID NO: 4710 - DNA, 456 bp, Zea mays
  Peptide Sequence Number=SeqID_48085
atgcaggcggcatgcaaccgcgccaagtgggcgcacttctccgacttccaacacgcccacgcgtcatgcaactggcgcgccggtcgctacgtgcaagcaactgcaccgccactcgcaccactaccgcgcctcctcgactgcggaaccagtaccgcgactcgaggcgacccagcacacgacccagcagcgccagcctggcgcgacggtcaatacggccaaaaatgggccggcagtaatggcggtggcaggcgggcaggagcagcggtcacgtcgtcaaccaggcttacgtcccatcctagggcacgggacaagcggcgcctctggcaggggaagcgagcgacgcttcgcctccgccataatgaccgcgtcaaaaaaggccactcgggctccgtgcccactactgatcaggggttcgaaggctggccctcgaagggttcacagccgcctcagacatag

SEQ ID NO: 4711 - DNA, 420 bp, Zea mays
  Peptide Sequence Number=SeqID_48086
atgatggtcctcgcctcagttgccaccacctcgttcgccattctacttcttttctctctcccctcgtgcctccacctccgcgccaccccattctcggctgagggcgtaggagcatgcgcctcctcctcgtatttgtctgacaccagccccgacaccgactcgcgcagtggctattgtacgtccacgaggacgtttcacatcatgcgtgcaccatcgttttcgctgtcgtcagacgtcccgttcgtcttcccggccttcgccctgttcttcctccccaacctgttgcccccgcccacggtcgcagtcgtgacccaaccgacgcttgtcgacgcgggtacgaggcgagctgagtcggtcatgctcctggcctttctctgtgcgtgccatcgaggaggacatggtggcgcctgccacacttag

SEQ ID NO: 4712 - DNA, 1554 bp, Zea mays
  Peptide Sequence Number=SeqID_48087
atgaacagacaccggcactcaaggtgccattacaaacagaacttcggttccgtccccgcgggcggcgctgacggcctcgacggtggggaagcttcccccagctgccaccacgtcagcatcgacggcggcatccgcctctccaccaacgccgcaccggcgaacgcgggccgctccaaagcgcaccggcaggacgcctcctccgcagagctggaggatggtttccaccaccagaagctggaagaggaggtggccagccgacccgtgcgagaggtagagccccggctcacgtcgctctccgcctcagcaaggatgatgaagatccttgaagctgagggcgggaccaagatcgcagcccggcttgcttctccccacctaggggctggtgaccagcgggtgaaagggcggacagccatgcaggcggcatgcaaccgcgccaagtgggcgcaccccttcgactccaacgcgcccagcatggaggcccaggcccacacgtcatgcaaccggcacgccgaatgctacgtgcgagcaactgcaccgccactcgcgccactaccgtgcctcctcgactgtggaaccagtaccgcgactcgaggcaaccctgcgtatgacccaacagtgccagccaggcacattgatcatgggtcagtcagccacgggaggaggcgcgacggtcgatacagccaaaaatgggccggcagcaatggcggtggcaggcgggcggaagcagcagtcgcgtcggaccgcgaaagggggatactccgaaaaggatccttcttcgtgaaggaaacgggccccgagccccctactaatcagaggttcgaaggctggcccctcggaggggttcaacagccgcctcagagcgctcgggctccgcgcccactactggtcagaggttcgaaggtcggcccctcggaagggttcaacggccgcctcaggccaccgggctccgtgcccactactgatcagggcgggaacgatcttgtaatggaatcccatcagagggaggcatcgagccctcggaccccgtcaaaaggggaccggctcaccggagacaccatgttcggcgcctccaagggcaacatggcgcttttcccccctcctccttgcggaaaggcgacgcaggggcccaagtccggcctcgagcgccataggaagctccgcctcgcccgacccatggctcggactcgggctcagccccggaagacgacgaactccgcctcgcccgacccagggctcggactcgggctcagccccggaagacgacggactctgcctcgcccgacccagggctcggactcgggctcagccccggaagacgacgaactccgcctcgcccgaccccagggctcggactcgggctcagccccggaagacgacgaactccgtcttgcccgaccccagggctcagactcagccctggcctcagccgacggtctccgcctcgcccgacccaggggctcagactcgacctcggcctcggaagacagactcgacctcgacctcggaggagcctccgcctcgcccaacccagggctcggaccgaccacgtcatag

SEQ ID NO: 4713 - DNA, 447 bp, Zea mays
  Peptide Sequence Number=SeqID_48088
atgggcaagagtaagaaaggtagcggttcttctcctcgctctggtgacaagcgcaaacgtgagccgactcctccttcggaggacttcggcgactcagagtactcggaggaggagttctcctccgagtccgagggatctccggctcccgtctctcccccggcgtcgtctgatgattcagacgactcccaggggattatcgcggaggtctggacctacatctgggccgtcgagcgctccgggctcgagggctcagatgagtcggagtactcctcggatgaggaggactcctcagacttgtccgaggagggcagcggcggcgatggcggtgatgacgacgacgacggaggcgacggtggtagcggcgacgacagcggcaggggcggtgacggcggcagaaagggtggcaatggcagcggcagcaagggcagcaacaaggccagtggctag

SEQ ID NO: 4714 - DNA, 201 bp, Zea mays
  Peptide Sequence Number=SeqID_48089
atggagcctagcggagggacagctgtcggagcggttgagtccttgctgacgtcctcttgcttctgtaagggggccgagagccgctgccgtcacaggaacgactccgttctacttgattcttcaaccaaacgctacctagggctgagcccaagtccgagccctgggtcgggcggagcggagttcatcgtcttccggggctga

SEQ ID NO: 4715 - DNA, 309 bp, Zea mays
  Peptide Sequence Number=SeqID_48090
atggcgcttcccgttgacgtggcgggcctgtgccctaggtcgggcgacgtgggggctcctccgaagccgaggtcgaaggccagggcggagttcgagccctggggtcgggtgaagcagagttcgtcgtcttctggggctgagcccgagtccgagccctgggtcgggcggagcggaattcgccgtcttccgggtcttagcccgagtccgaaccctgggtcgggcggagcggagttcgccgtcttccgggtcttagcccgagtccgagccctgggtcgggcggagcggagttcgccgtcttccggggcttag

SEQ ID NO: 4716 - DNA, 1092 bp, Zea mays
  Peptide Sequence Number=SeqID_48091
atggaggtccgctgccaaaccagcttttgccagaatgaagatggtttccccaagttgttgaaagcatgcacagtttgcctcagaatcaggagccagccagagtatgatggtcgtgaattcgtcgagcatggcacagagaaatgtgtcgtgactgtgtacattggatccagtccgcaccatgtggaatggagtgtcactgctgctgggcacagattcaaagacacctgtcaagtcgtcgctcgcaaggcattgagggccctgtgtcagatctatgaagaagaagtggccgacaccccactcagattctttccgccctttcagagagaccgtcccgcttggatggccaggatgcgtgcattggaagagcagcaggtgcttgaggacgaccccacagtcgtgtacctcactgcatacctgctcacccttggatgcccaatgattgctcgagcagaagatacagagaagctcaactgtaagctccatgtggatctcacctcagctcaagcccgtgtagctgccttggaaagtcgtgaagccattgctgttgaagccctgaagcaagccaaggatgagcatgtccagaagctgatggaggcctacttggtaacccataaccaacgtagagccctgcggatccaagagcctgcttcatccaaccctgttcaacccaggagagctaaagatccccatattcttgaaggtcaccgggtctctatcagaggaaagaagaagatttgggaactcccgaaaggagccatagtcttggaagggattccagtcttccctcaggctatggataagcaagagcaccccgagtcctcccaagatcccctgccagagttgtttgagcccctcaccatgaagaagattctagcatcgtcccgtgagatcaaagaagaagctgcaagcaccccaccagcaccgccgccctctgaggagctacaagagccagttccgcttgaagaagagttcaacctgaaagggaaatgtgcccttgggccatttctatgtattttggtgattgagtgccaacacatgtgcttaattgggaatttatgtacatggatgaacaaggtgaaaatcatgaagtaa

SEQ ID NO: 4717 - DNA, 633 bp, Zea mays
  Peptide Sequence Number=SeqID_48092
atggacaagagcgtgcggcggtggaaggagtatcatgtcgtagccgccattgtcgttgtcgcgcggcggtggaaggagtatcatgtcgtagccgccgtcgaaggacatgaactcaagactcccgaaacggagcaccgtcccaggccggagaggttgctggagactgcccatctggagcttgacgggaagctgttcgtcaacacgcagcaggcccctacctggcgcgccaactgtcggcgtttcgagaccgggggatccctgagccgacgaggggttacaagcgtccacgtgggtgagggaagcgagcggccccaagagagcgcctgtcccgtcctcgtccccgcgcggccaaccttctctaagaaggccctggtccttccttttataggcgcaaggagaggatccagggcggagtccgagccctggggtcgggcgaagcggagttcgtcgtcttctggggctgagcccgagtccgaaccctgggtcgggcggagcggagttcgccgtcttccgggtcttagcccgagtccgagccctgggtcgggcggagcggagttcgccgtcttccgggtcttagcccgagtccgagccctgggtcgggaggagcggagttcgccgtcttccggggcttag

SEQ ID NO: 4718 - DNA, 438 bp, Zea mays
  Peptide Sequence Number=SeqID_48093
atgggcaagagtaacaaacgcaagcgcgagccgactcctccgtctgaggacttcggcgactcggaatactcggaggaggagttctcctccgagtccgaggggtctccggctcccgggattgccgcggaagtctggacgtacatccgggccgtcgagcgctccgggctcgagggctcggatgagtcggagtactcctcggatgaggaggactcggacggcggcgaggacgaggatgacgacgacgacgatggcgacgacgacgacggtggcgacagcgacggtgacggcagcggcagcggcgggggcatcagcggcggcgacgggagcaagggcagcaccagaggcggcagcagcaagggcagcaccaggggcggcagcagcaagggcagcaccaggggcggcggcggcggcggcagcagcagcaaggccagtggctaa

SEQ ID NO: 4719 - DNA, 405 bp, Zea mays
  Peptide Sequence Number=SeqID_48094
atgaagctgtggaaggagacttccaggagttccaagattacgacgagttctaggtgtgggttagcggcaacccccagtcggctgcctgtgaaggccgcgttatctacgtttcttttccgcactttgatttattatgctaagcctacacaggcagctgactgggggtttgccactaagaaagaactagaactcgtcgtagtcctcaaactcctcgaaatcttccatgttgccagcatcacctccggagtactgagtatagtggggacaacctggggtgggtggtgtgtaaagcaaggaggttgtacactttacccacaagtcgtgatccctttatgccttgggttgatcaaaccctcaaaacactaccaaggtccttacggagaggtgctcaggaaaaagacatga

SEQ ID NO: 4720 - DNA, 378 bp, Zea mays
  Peptide Sequence Number=SeqID_48095
atgtcaggaagtgacaagctgatatcagatatggtcgcaaaggaggcagttgcgaccaagaggaaattgtggtcgcggtgcctggcgaagataaagaagttgctgatacttcgtcaaaaggaaaagaatttgaccttcggcacgtggggggtcaagaattgtctgaggcagagaaagaggagctggaagaatatgcaaaatcttgtggggtaccagccgagatccatgctcttcggtggagttgatgaggaaatcctgggcggcaacatatcgtcggcagcctcttctgctctaatttcaaggatggcggtgccaaaggttgataatccaaagcacattccgaaggttgctgagctgaagcttccttttatgtcttag

SEQ ID NO: 4721 - DNA, 783 bp, Zea mays
  Peptide Sequence Number=SeqID_48096
atgtcttcgcgctcccttatgcattgcgtctttccaccttccgagcccccggatggggaacacccgcgatccttctgccttgtcgttggaggaacgcaacttcgcggaagttggtaccttttcagcccatcgttcggcttcaaggattttcatcaggcagcccgaccgcatcccctcgccaccaccagcccctgggtggggagaagcaagccgggctgcgatcttggtcccgccctcagcttcaaggatcttcatcatccttgctggggcggaggccgggctgagccggagctctacctcccgcgcgggttcgtgggtcagcctctccctcagcattcaagggagagggcgctcaccggcctagcgggagggtcggactccgacaacgcggggccgatcggcggcgagcgtcgtcagcttcagcgcgttgggctcgctggctcagctggctctggctcggctcccggtgccccctctcgccgcgagggcggttgtcgtgccgcgcgcaccggaggaccgcccaagacgtcgcgcgctgctagggcggcgttcgtgttctggggctgtcctgcctttgccccggtacggcgcctctgcgcggaggtcggtgctccgtctcgtccgggaggatccgagtggggatctgccggtgggcagacgactcctgtcgtcggtgctgaggtggcggcggctggagaagtcctcgtcgccgacaggatcaccgccaccatccgcgctccgggcctccggctctttgtacttgtcctcgcccctcgagcgtag

SEQ ID NO: 4722 - DNA, 927 bp, Zea mays
  Peptide Sequence Number=SeqID_48097
atgccgtcctcttcctcttctactgccgctacgccgccggccgacgcgccgtctgaggagacgctgagcaatgtggcggcagaggagttgcgcgccggcgacacggtggatttcggcgcatcgcggatgtcctcgaaaaggatgattggaaataagattgctcaatttgagtcctgtacatttacgccgaagaccggcaagacttcgatggaggtcgttgaattggttccttgcgctcgcaacaaatggggcaactggcaagacattgtcgaccgccgtgggaaaaagccggcggcggagactgaagatgactccgcgccggcggccgccccatcctccaagaagaggaagctaggatcgggcgaggggcaacttgttgttgttccgcccgcggtggcgcccgtggtatctgccgcggtgcctggggcgaagggtagcgctctcagcgctggcagtgagatttcggcgctcgctgctgtcaaggacgaggcgggcgctgtgtcgcgccggctgaaggaggcgtcacagcggctaagccaggcggctgacttcgctgaccgcgtggcgtcgggggcccttacggcagttgtgtctgccgaagtcgagagacttcgggcgcagcatgctgaggccgtccgggaaaagtcggccgccgatagcaagtgccgcaaactggcggagaaggtggccgcgctggagggcgagaggactgagctccggcgccagctggcggaggagaggagggaagctaatcaggccctcgccaaggcgcagtctgcgcaggcggaggccaattacgcgcgggtggagggtagcctcgcccgccaacgcgccgaggaatgggaggagcggctcaacgctctgcaggcccgcatggagagggctgaggcttctacgcgctcggaagttgagcggacgcgcaagtag

SEQ ID NO: 4723 - DNA, 429 bp, Zea mays
  Peptide Sequence Number=SeqID_48098
atgaacgcgctgtcccgcgaagggtgctgtcactatgaggtcttcgaccgatctgatgaggatttcgagcgcgagatttacaaggttgaggaccctgtggtgaaggaatccaccggagccctctttgaccggatgtggggccccccacggtcgggaggtggtcagggagcggtggcacgtgacgagaaggtggaggacttcggggctttgaacagcgcgcggcctgaggcggagtcgaacccggtggcggctggcaccgaggtcgccccggcgccgcccccagaaaccgtcgaaggctccctcgatgcccccgcggccactgcggccggtggaggctcgtcgccaaccgctgtgccgagggctgagggtcccccgaagacggcgacggagctggcagcggaggatcccacggcggctgggtcttcgtag

SEQ ID NO: 4724 - DNA, 321 bp, Zea mays
  Peptide Sequence Number=SeqID_48099
atggaagcggaggggacgaggtgcgcggttttctcttctctctgtctactctctcaagttgcgaaagcaaaggcagaaggcaaggacggaagcgcaaatggcaagggatcgggaaaggagatatttcgaaagtgtccttctcagcaaaggaaacgggccccgagccctcctactaatcaggggttcgaaggttgcgccctgcgggattcggcaaccgccccagagcactcgggctccgagccctctactgatcaggggttcgaaggctgccccctcggaagggttcgacagccgccccagagcatgcagagtcagggatga

SEQ ID NO: 4725 - DNA, 846 bp, Zea mays
  Peptide Sequence Number=SeqID_48100
atgaggccgctgctccccacgacgggccaaggatctgcgcgcctcgcgaccgaggcatcacgtccctctgcagccgacacatcgggcctctcctcggtcaaggcgacaggcctctgctcaccaacctcggcgacaacggccgccccctccccatggtcaaaaacgggggaatcagggatgaccaggaccgaaggagccggaggcggaggcacctcagccatctcgacatcggcggcggcgggcggctccgtgggcgcaccagcggcggccccggcaggaatcgacgtcggcgtcggcaacgaggaaggcgggctcgaggccgtagtcgtgtcaacggcctcccttggcacgatagccactccaacaggggggtcaaccttggaggcttgccccatgacagcccgtgcctcctgggccccccaccggagggcgccttgcgcggaggccaaccaacaagcatggcgtgccgcaactccggctgaagaggtcggccccgtcttaagggccttcgtgggggtcagaccagtcgagccctgcctccgcttgctgaaaggaagaaaagacaaaatcaagatacacagaaaaatggctgaaacaagggtacccttagatacttacccgctccggggcaaggccaatcgtgcctacggggagacctctcggaccccggtctctgcagacgctaccgagggttggccagcggtcggcttcgacgccgcctccgcctcggacgcccgaggcaccaagggggcggcctgcccgggcgatgtcacgacagccgagggaacaacttctcgcacgggtggcacaggcacttgctctcagggggcatggaggtcggcctaa

SEQ ID NO: 4726 - DNA, 459 bp, Zea mays
  Peptide Sequence Number=SeqID_48101
atgttcggcgccctccgagggcaacatggcacttccccccctcctccttgtggaaaggcgacgaaggggcgtatgataaaagccgagtcagtccttggccgtcctcttgctctgtgcggaggctcgggggctgctctcgcaaacccggctccggccaaaccgttgacagcgtcaacataccagcccgagaactcgaaacctgactatgcacccgggctacgacaagacaaagctatgtccgctcaagggacacgatctcgcctcgcccgagcccagcctcgggcaggaacagcggacccaggcatattcacgcctcgcccgagggcctcctcaagcaacgggcgcaccttcgactcgcccgaggcccagctcgggcaggcttcgcggagaagcaaccttggccagatcgcctcgccagccgaccagatcgcaggagcattcaatgcaaggatcgtctga

SEQ ID NO: 4727 - DNA, 1128 bp, Zea mays
  Peptide Sequence Number=SeqID_48102
atggccggagaggcgggaaaagacccccaagcgtggctagccgccaacgagacggcgtcggccttcctctcccgttcactctcctcgcggccccccatcaccctcccgccaccactgcaccgcgcgcctctccgcccgggcaacgtcgtcgagatcgccggcccgtccaactctggcaagtcccacctcctcctcatggctgcagtgcagtgcatattaccaaaggagtgggagggaatctactttggggggctggggagggcggtcatgtacttggacttggactgccgatttgatgtgctacggctggctcaaattctgaggaatcgtattgcagagggctgccgtttagcacaccttagaaatggagaccctgaaaatgatgtcactaaagatgagtttcagtgttctcttcaaaatacactgttttctgattgtatgcagcgcttcttgtatgctcgatgttgcaaaagtcctgaattcatagatgctttgaagtgggtcgtttctggatgttggagaaaattaatcactgcagtgccaaaagaaatgtgtaagggcctcagctccttgatgatcttggtggcgtgggaggtctggaaacaccgaaatgatagtgtgtttgagaatttgagtccaagtactcaggctgtgcttaggtcaactgtacagtctcaatcaaggagggaagtgtccggcgctggtatatattttgttatgatagacaggaaaacactgcaaagcatttttgaaagtgttgtccacgagttacgcaagattttgcaacttgaacctgcattggttttggtcacaaaggcatccgtttatggggaaggcaccacaacagcaaatgacttcaatcggataaaccttcaagtagaagcagaagttccctctgtgctggaaagtgaggtgcttcctttgcatacttctgagtgggtgcaaccttgcctcaaaatgaaggagaagttttctattatggatctgcagcagtccaaacagctgcaacagtgtcggcttgtagccagccgaacacgcccaattgctattttgaagtttttgataggcttgcagtattatgagccaggtgctgtaaatcatgttttcatgatacttgaagattattaa

SEQ ID NO: 4728 - DNA, 630 bp, Zea mays
  Peptide Sequence Number=SeqID_48103
atgggtgcagaggtgcaaagtcatggcagttctgatagggcaccctacacaaatctggagtttgaacacacgacagggctgatgcccgactctcatctcagcacttccatcattgcaatgtgccaaaacaccgaagccatatcatacatgatcacctatggcttcgccgctgtcatcagcacaagggtgtccaacgagctgggagcccggaacatcgccaacgccaggaaggcgctcactgtgtcgctggcgctgtccctgatgctgggggtggcgttcctgctgctcctgggcctcggccacgacctctggcgccttcgcctccatgacgccgctgctcatcggctccgtcgtgctggactccacgcaggggtactctgcggcgtcgccaggggctacgggtggcagcacctggcggcgtggaccaacctggtggccttctatgtcatcggcttgccgctcgccatcctcttaggattcacgctcgccttccaaaccaaggggctgtggatggggcagatatgcagcctcctctgccagaactgcgtcctcttttttatcaccctgcgaaccaactggcaggagttagacctgaccatattcaacaaggacaacgattttgtctgctag

SEQ ID NO: 4729 - DNA, 903 bp, Zea mays
  Peptide Sequence Number=SeqID_48104
atggactcctacgcctccgggatacggatacctcactcatcatcttccgcgataagttcagacgtcaataggggcagcagcagcaccctcggcatcgactccaccttcagcgccgactccgcctctgtccacgctcacaccgatgccttcggctctggctcattgcagagcggccgaggcagcagcgttggtcccggggcggacgctaccgctggaaggctctcgttcgcgtccctactcgagggacgagaaccagacattaaagccaaagagctggaggtaggtccgcgggtggcgctgacggtctcgtcggcggagaagctttctccagctgccaccacctcagcaccggcggcggcgtccacctgcccaccaacaccgcaccagcgagagctggccgccccaaagcgcaccggcaggtcctcactcccgtcctcgccacgaaaacaagaatgggaccgtcccagaacacgagtaccgccctcgcggcgtacgacgtgttgtgagaccccccggtgcggctggccaccgtcgcccggacagaggacaaaatgttgcaccctagactgggcggcaacagttcgccttccccgacatggctggagggcgcctcctccgcagagctggaggatggtttccacccctagaagccggaggaagaagcgggacgccagcccgcgcgaaggcaggccccgtctcacctcgccctcctccccagcaaggatgatgaagatccttgaagctgagggcggggcagaggccacagcccggcttgcttctccccaccatcgaactggtggtcaccatcttgggcgtcgcgggctaagtttccaccaacgcgctcaaaggtcctccccctacgacacgggggctgggtcccacacgacgtgcaagctggcctag

SEQ ID NO: 4730 - DNA, 678 bp, Zea mays
  Peptide Sequence Number=SeqID_48105
atggcgcttcacgtctggcgcctccttggagaggctctccaggtcggcgatgagggcctcggattcggcgagggcctcggcgtactccacgcactccacgtcacattcgtacgcgtgtcggaggaggtctgcgccggattcatggcaagattcgcacgtttgcgatctctggagacgtttgaacaatggaagaaactcacctccacgtgttcgacgccttctgcccgcaccagagcacgcccgcgcgcgcccccgcatgcccagcgccgcgcccgagccaaaccagcgccgtggcccgcgcccgagcttataaagccctcccaggcttcggctacactcttccgcgcaccctcaaaacctcaccggagtctagctcgccgccgtttgcccgtgcgcagcgagtccgcggccgcccaatccctctgtcaccgtagaccggccaatagagccattcccaaccccgtccagccctcagagaagactgtgcgcccctccgtgaagctccccgagcgaggaatcggagtttgcttcgccggagaggccagcccacgctcgccggagctctcaaccccgccagagtacgtggaccgggaggtagtcccagatccagcaccagagtctgcaccagaggacctgcctgccactgctttggaaggcaagccccggttttatgcataa

SEQ ID NO: 4731 - DNA, 141 bp, Zea mays
  Peptide Sequence Number=SeqID_48106
atggccattggtgaaggcttctgtcgtatggcgcaccggacagtccggtgcgccaccggacactgtccggaggcccaaggctacctatggagttatctgaccgagagcatggcccttgcatggggctccaacaaggactag

SEQ ID NO: 4732 - DNA, 438 bp, Zea mays
  Peptide Sequence Number=SeqID_48107
atgggcaaaaacaacaagcgcaagcgtgagccaactcctccatcggaggattttggtgactcggagtactcagaggaggagtcctcctctgagtctgaggggtctccggctcccatccccctgcgtgagtcgtctgacgactcagacgactcccaggggctcgcggcggaggtctggacgtacatccgggccgtcgagcgctccgggctcgagggctcggatgagtcggagtactactcggatgaggaggactcgtccgaggaggacggtggcggcaacggcgaggacgacgacgacgacgacgatgacgaaggaggtggcagcggtgacggtgacgacagcggcaggggcggcagcaaggatggcgatggcgacagcagcaggggcggcagcggcggtggcgacagcagcaggggcagcaacagggccagtggctag

SEQ ID NO: 4733 - DNA, 285 bp, Zea mays
  Peptide Sequence Number=SeqID_48108
atggcggctatcaacccgcccgccggtggcggaatcgacgacgtcttccccacgtggcggaagagcaacatccgggtctgtcccgtcaccttccccgccgacggaggaggaggcggggcaggcatggccaagcaggaggcggcgcctcgtcggttgtcgagcaagtcgacgacgctggcgccccagcaccgccgtcgatccccgccgcctgtgttcgtggccaggggagctccgaccacctctgacgccgacccgcacatcgacgtgaccgtcgcgacctcctga

SEQ ID NO: 4734 - DNA, 141 bp, Zea mays
  Peptide Sequence Number=SeqID_48109
atggcgcgacgacagcccgggtcgacggtggcggacccctgcggcggcacggagggcggcggatggctgggaggcagcgtcgtggccagaatgagcgcgttcctccaccgccgccaccgcctcccactctgcaggagctaa

SEQ ID NO: 4735 - DNA, 918 bp, Zea mays
  Peptide Sequence Number=SeqID_48110
atggctaccactcggggggtcgatccctttttaaaggcgactctcctcgctcgcgtcctcaggcgtcgcggactaagtcttcaccaacgcactccagggtcctctccctacgacacgggggctgggtcccacacgacatgcaagctggcctgggacagaagcatccagaccgtcgcgtgcgcggagcgtgtaaccgcccagcggttacaagcactcctccatcttcgcctaaaccagcgggtgaaagggcggaccgccatgcaggtggcatgcaactgcgccacggggatgcaccctttcgacttcgacgcatccagcatggaggcccaggcccacacgtcatgtaaccagcgcgccggttactacgtgcgaaaaactgcaccgccacttacgccaatgtcgcgcctcctcgactgcggaaccggtgccgcgactcgaggcgaccctgcgcacggcccagcagtgccaaccaagcgcatcggtcacggcagggaagccctctcccacggcgtgaagacgacgcgcccgtgttccgttcctcgaacggctcacgcaacggctgccccgcgaaccacccgtctcgtcgcattaactctgtggcagggcaggcgacacctttggcaggcgaagcgggcgacgcttcacctccgccatgatgaccgcgtcaaaaaagggaccgggaaaggggatactctgaaagggatccttctctgcgaaggaagcgggccccgagccctcctactgatcagaggttcgaaggctggcccctcggaagggttcgacagccgcctcagagcactcgggctccgtgcccactactggtcagaggttcgaaggctggcccctcggaagggttcgacagccgcctcaggccactcgggctccgcgcccactactgctcaggggttcgaaggctag

SEQ ID NO: 4736 - DNA, 975 bp, Zea mays
  Peptide Sequence Number=SeqID_48111
atggaagaaacacacctccacgtgttcgacgctttctgcccgcgccagagcacgcccgcgcgcgcccccgcatgcccagcgccgcgcccgagccaagccagcgccatggcccgcgcccgcgcctataaagccctcccaggcttcgactgcactcttccgcgcaccctcaaacttcaccggagtttagctcgccgccgtttgcccgtgcgcagcgtgtccgcggccgcccaatccctctgccaccgtagaccggccaatagagccattcccaaccccgtccagccctcggagaagactgtgcacacctccgtgaagctccccgagcgaggaatcggagtttgcttcgccggagaggccagtccacgctcgccggagctctcaaccccgccggagtacgtggaccgggtaatccactcaaccatccttcgattccttgtgcacacggtcactacgttaccccgtgaagctcaccgtgcccttggattgaaccagttcgccgtggtttggccggtacactcgccgccgacgaaaacacccgcctgcgcgcgtggaccgagcgattccggccatccccgacgtcaagtcgtacctcgacgtgaccgccagagtctccccgagccaaccccacccttcgccggaccttcctcgccgtcggtaagccgcgccacccttttctctcccacggttactgtttacattgggggaaggactgcggactgtaaccttgctgacggagagtacatcctcgtgccggagcaaggagctgctcaggaggtagccccggatccagcacccgagcctgcaccagaggacctgcctgccactgctttggaaggcaagccccggaatcctgttgagatgaatactagttctctggaggaaatggttgctggagtgacttggtcgttcatcttgccaccgagttggactgtcgagtgggaccctgcctcggctgaggaggagcatgaggagtga

SEQ ID NO: 4737 - DNA, 573 bp, Zea mays
  Peptide Sequence Number=SeqID_48112
atggaagaaacacacctccacgtgttcgacgcttcctgcccgcgccagagcacgctcacgcacgcccccgcatgcccagcgccgcgcccgagccaagccagcgccatggcccgcgcccgcgcctatgaaaccctcccagacttcggctgcactcttccgcgcaccctcaaacctcaccggagtctagctcgccgccgtttgcccgtgcgcagcgtgtccgcggccgcccaatccctctgtcaccgtagaccggccaatagagccattcccaaccccgtccagccctcggagaagactgtgcacacctccgtgaagctccccgagcgaggaatcagagtttgcttcgccggagaggccagtccacgctcgccggagctctcaaccccgccagattcgtcgtggtttggctggtacactcgccaccgacgagaacacccgcctgcgcgcgtggaccgggcgattccggccatccccgacgtcaagccgtacctcaacgtgaccgccaaagcctccccgagccaaccccacccttcgccggacctccctcgccgccgaaactttgaaaatccataa

SEQ ID NO: 4738 - DNA, 1365 bp, Zea mays
  Peptide Sequence Number=SeqID_48113
atggaagaaacacacctccacgtgttcggcgcttcctgcccgcgccagagcacgctcacgcgcgcccccgcatgcccagcgccgcgcccgagccaagccagcgccatggcccgcgcccgcgcctataaaaccctcccagacttcggctgcactcttccgcgcaccctcaaacctcaccggagtctagctcgccgccgtttgcccgtgcgcagcgtgtccgcggtcgcccaatccctctgtcaccgtagaccagccaatagagccattcccaaccccgtccagccctcggagaagactgtgcacacctccgtgaagctccccgagcgaggaatcggagtttgcttcgccggagaggccagtccacgctcgccggagctctcaaccccgccggagtacgtggaccgggtaatccactcaaccatccttcgattccttgtgcacacggtccctacgttaccccgtgaagctcaccgtgcccttggattgaaccagttcgccgtggtttggccggtacactcgccgccgacgagaacacccgcctgcgcgcggggaccgggcgattccggctatccccgccgtcaagccgtacctcgacgtgaccgccagagcctccccgagccaaccccacccttcgccggacctccctcgccgccgttccgccacacattaactctacggcaggacaggcggcacctttggcaggcaaagcaggtgacgcttcacctccgccataatgaccacgtcaaaaaagggaccgaaagggatccttctccgcgaaggaagcgggccctgagcccccctactgatcagaggctggcccctcggaagggttcaacggccacctcaggccactcgggctccgcgcccactactgatcaggggttcgtaggctggcccccgaagggttctgatagccgcctcagagcacgcagagcgagggatgaccctgggtacgttcgatacataaccaaggctcgagctacgctcccgagggctcgggctcaacctcgacgctggacgacagacttcgcctcgcccgaccctagggctcgggctcaacctcgacgctggacgacgaattccggctcacccaaccccagggctcggacacagcctcggcctcggaagacggtctccgcctcgcctgaccctgtgcttggactcgacctcgacctcggaagacagactccgccttgcccgaccccaggggtcggactcgacctcgacctcggaagacggactccgcctcgcccgaccctaggggtcgaactcgacctcgacctcggaggagcctccgcctcgcccgacctagggctcggaccgaccacgtcacaggggggccatcattaccctacccctaggtag

SEQ ID NO: 4739 - DNA, 333 bp, Zea mays
  Peptide Sequence Number=SeqID_48114
atggcgccgttctccttgctcctgctgccgcgagcccccgtcattgctccccgcttggctgccgcagcgttgggaatcgtgcagccgccggcgtcgggtccctgtggatcagcccagggacatccccaagtagtctggaagggtgtcgcgtcgtccgcgggtggagacagtcgctgggcaagacacgatggctcaccggtcttcactggagctttagaattcgctctcgccgcgggtagcctccccgcaaccatccctggcttcatagttcataggatcgatgggatttgggaattggaaaccagagctcgagtattgactgaactccggtga

SEQ ID NO: 4740 - DNA, 330 bp, Zea mays
  Peptide Sequence Number=SeqID_48115
atgtcctcctcgaaggcacgcacggagaaaggtcaggagcatgaccgactcgccccgtacccgcgtcgacgagcgtcggtcggctcgcggctgctaccgtgggcggggcagcaggttggggaggaagaacagggcgaaggccgggaagacaaacgggacgtccgacgacggcaaaaacgatggtgcgcgcatgatgtgaaacgtcctcgtggacgtgcaatagccactgcgcgagtcggtgtcagggctggtgtcggacgaatacagggagtaggcgcatgctcctacgccctctatcgagaatggggtggcgcgaaggtggatgcatga

SEQ ID NO: 4741 - DNA, 2688 bp, Zea mays
  Peptide Sequence Number=SeqID_48116
atggaggtagttgagttggttccttgcgcccgcaacaagtggggcaactggcatgagttttggttctacgtcgcggagggcacagtcgaagaccatccggggctccacgtgtccgagatgtgctcgcattattactcagcatacccgccgtttgaagtggtggaggaggatgcggacgaaggggcccttcggtgcgccgccggcctgagcagcgggtgcgatttggttgaggagtttgtggcgtacggggtatggcctttggcgcatggctgggcgttgggcgaagtatgccctcgccagatgccttcccatggtgggaagctggtgcgaagtcccgccttcgcgctggatctgcatagccgcgatccggccgcctttgtgcgtgaggcggaggatggggcgatgcggatcgtcgatcggtacgtgccgaagacagagggccagcgtagctgggatattcgcgggtccaatgaccgcttgaacagggttttcgagttgaaccgtctgccgtatggcggttatcccggccaagacgatgtggatcgtcgcgggaagaaaccggtggtagagactggagacgaccccgcaccggcggccgccccgtcctctaagaagaggaaactaggtattgctatgggaggtctgggggtttctgatggttttgctagggagttgatgaggacatgcgcggccccggggggaaggatgtcttcgcccgagctccgggagtcttcggcgcggatgctgagggttaccgggggttggtggcctaagaatgttcctatcccccgcgcggccggcgaagacttttttacatctcgcatggttcgtgattggaaagtgtttccttacgggcggaatatcgctgctgttgtgtcggcagtgatggacaaggatcgtcagggagctgcgcagaagcgccaggcggtcgtcaggcttcatgaggccagaccgaagaggcaacggggggttgtgaaggctgctgcccccagcggaggccaaccgccgttggcggcgaagtcggccgtccctgcatccagcagggcgccggaggctgcgaaggcggctgccgccggtggttccaagtctgtgaaggccgcccctgcgtccagcagggtgccggaggctgcgaaggcggcccgagagttgccgccgccgggcaagcgcgtcgccgacttcgccaccgacattagtgtggaagattatcttgttgggtcggacgaaggccaacttgttgttgttccgcctgccgtggcgaccgcggcggctgccgtggtgtccagggcgaagggcagtgctcttagtgccggcggtgagataccggcactcactaccgtcagggacgaggcgggtgctgtgtcccgccggctgaaggagatgcaggaggcactaagtcaggcggctgacttcgcagaccgcgcggcgtcgggggccctgacggcagttgtgtctgccgaagtcgagagacttcggacgcaacatgctgacgccgtccgggaaaagtcggccgccgacagtaagtgccgcaagctggcggataaggtggtcgcgctggagggtgagaaaactgacctccggcgccaactggcagaggagaggaaggaggctaatgaggccctcgccaaggcgcaggctgcgcaggcggaggccaatttggcgcgggcggagggcagtcttgccaggcagcgcgccgagcagttggaggagcggctcagcgctctgcagagccgtgtggagagggctgaggcctcgacgcgctcggaggctgagcggacacgcaaacagcttatggattcataccatgagctgggcgcgcggaccgctgacttcgaagtgccggaccgagagcccggactttgctgcctcgagtggatacatgaggagttgctggcgcttcccgccatcgtggaggggtttatgtcctatgcctccctggtcacctgcgagggggcgatgaacgcgctctctcgcgaagggtgccgacactatgaggtcttcgaccaagctgatgaggatttcgagcgcgatatctacaaggttgaggaccctgtggtgaaggaatccgcgggagccctctacaaccggatgtggggcctccacggtcgggaggtggtcagggagcgggccgagacggcgaggggtcaggcggcgcgtggcgagagggtggatgacttcggggctttgaacagcgcgctgcctgacccggagccgaacccgacggcggctgtgtccgaggccgccttggagccgcctctagaaaccgccgaaggcgttcctgatgcccccacagccactgcagccggcggaggcccgtcgccaactgctgcgccgagggctgaggatcctgtgaaggtggcggcggagccgacagcggaggatcccgcgacggctgggtcttcgcaggttcaagattttgggcctgcgcacacaaccgctactactaattttttggcggcttcgaccgtggatgatggtaataaatcggatgggtctgcatctaagttttctgattttggtgactctgagagctcggttgagtggactgaggagtcgtcggatgaggacttggactactttgcggccttggatgtggcagcggcggaggcttcgccgcatgctgcggatgctgaagttgtgcctggtccgagtactgggcgtaggcggcgaagggcggttgccaagcgtaga

SEQ ID NO: 4742 - DNA, 492 bp, Zea mays
  Peptide Sequence Number=SeqID_48117
atgggcaagagcaagaaaggcggaggctcctcgcaccattctggcgacaagcggaagcgagagtcgactcctccctcggaggacttcggcgattccgagtactcggatgaggagttctcctccgagtccgaggggtcgccagtccacgcctctcccccggcgtcgtccgatgactcggacgattcccaggggatcgctgctgaggtgtggacatacatccgggccatcgagcgctctgggctcgagggctcggatgagtcggaggtctcctcgtacgaggagaactcctctaactcgtccgaggaggggagcgacggtgacgacgacagtgatgacaacggcgatgacgggggcgacgacgatggtgacgacgacagtgacgacaacgacgatgacgggggcgacgacgatggtgacgacgacggcggcaagggcgacggcaagggcggcagcagcggcggcagcggcagcggcaaagcgccgctggcttag

SEQ ID NO: 4743 - DNA, 345 bp, Zea mays
  Peptide Sequence Number=SeqID_48118
atggccgaaaggtgccaaaggttcatctatatctatactaaatcgactgtccggaataccgtagattattccggacaggagaagctttttggaaaaacaggccaagcgcggaccgtccgggcccttgcggcggaccgtccgcgacacgaggatgtcactcggccagaaccaatgcaaaaatccaagtctgtgctatggactgtccggaggaaaaacagaccgtccgagcccttgtgcggaccgtccggcctctggcgcggaccgtccgccgttgatctacaggggcggaccgtccgcaccaggagggcggaccgtccgcgctcggcagaaaggcccaacggctag

SEQ ID NO: 4744 - DNA, 1014 bp, Zea mays
  Peptide Sequence Number=SeqID_48119
atgtcttcgcgctcccttatgcatcgtgtctttccaccttccaagcccccggatgggggatacccgccgtcttttcgcctcatcgttggaggaacgcaagtccgtgggagttggtacctttcggccatcgttcggcttcaaggattttcatctcacagcccggttgcacccctccactggtggtcacccaagatggtgacctccagctcctggatggggagaggcaagccgggctgtgatctcgatctcgccctcagcgtcgagggtgttcgtcatcctcactggggcagggaacgaggcgagccggggctctatctcctgcacgggtcggtgggccacctcttcttccagcttctggtggtagcaatcgccctccagccctgcggcggagacgtcctccagccatgccggggaaggcgaactgttgctgcccagctaggacgcaacattccgccctctccctcgcattcgcggcgaggacggcagcgaggacctgccggtgcgcttgggagcggcccgctctttggctttaatagctggttcgcgtcccttgagcgggaacgcggacgaaagccctccggcgggcgcgtccacccgggaccatggctgctgctgcagaggtcgctggcgggtctcccgacgttcgtcgccccgcaggctcgaggttgctcatacccgcggggacggaaccagagttccgtttgtaatggcactttgaatgccagtgtttttgttcattgtggctgtcgaggcctgaacatgtatgtaattttggcacggagccgtgttttttcctcattttcgagcactaagacttcgcctgttggttgcctgaaccgcttcaccaagcgtgagtcgccccgtgtcaaggtgacgagtgagagcggagatcctcggaccacgtcgccgtccgaggctaggtcggatctcgccgaagatgtcgtcgatgccgagggtgctgctgcccccttccagcgtcaagacccgagcctgcaggatcagattgtcttgtag

SEQ ID NO: 4745 - DNA, 336 bp, Zea mays
  Peptide Sequence Number=SeqID_48120
atgcacaaccaaggaaaacagaaaagaggctcgcagtggtttataattgaagaacatgcaaacatagtacaagggtgtcggtgttttgggtccgaccgcactcctggggttgcccctcaagtgggtatgggaaacccgttgggtacccgaaacccgcatgggtatgggtttgggcaaaatttcatacccgtcatgggtatgggttttttagcgggcgtattttttcttcgcgggtatgggtttgggcaagtaatacccagcgggtttttacccattgccatctctacatggggtgcactggaggtgcacccaatgggtgtagcccccgacctttaa

SEQ ID NO: 4746 - DNA, 7140 bp, Zea mays
  Peptide Sequence Number=SeqID_48121
atggcggcggccccgcctccccctggcacgacggtgcccggggcaggccaacctccgcccccgccgccgccggccggggcgccgttgggcggcaagccgctgacgccggccgagctcgaggctcagctggtggagaaggcccgcaagtggcaccagctcaactccaaacgctacggcgacaagcgcaagttcgggttcgtcgaggcacagaaggaggacatgcctcctgagcacgtccgcaaaatcatcagagaccacggagacatgtcttccaagaagtacaggcatgacaagcgtgtttatcttggtgcactcaaatttgtgccccacgctgtgtacaaacttctagagaacatgccgatgccttgggagcaggttcgccatgtgaaaatcttgtatcacatcactggggctatcacttttataaatgaaatcccatgggttgttgaaccaatatacctcgcacagtggggtacaatgtggattatgatgcggcgagagaaaagggataggcggcattttaaacgaatgcgctttcctccatttgatgatgaggagcccccactggactatgctgataatttgttggatgttgaaccacttgaagctatacagttggagttggatgaggaggaagatgcagctgtctatgaatggttctatgatcacaaacctctaatgaagacaaaacttataaatggtcccagttacaggaaatggcatctatctcttcccataatggcaacactatatcgccttgctggccagctgctgtcagatctgatcgataggaattatttctacttatttgatatggagtccttctttacagccaaggcccttaatatgtgcattccagggggtccaaagtttgagccattgtaccgtgatatggagaagggtgatgaggactggaatgagtttaatgacataaataagctcatcatacgtcagccacttcgaactgagtacaggattgctttccctcacctgtacaacaacaggccaaggaaagtgaaacttggtatctatcatacccccatgataatgtacatcaagactgaagatccagacttgccagcgttctactatgatcctctgataaatcctatcacttcaaccaacaaggttgatcgtcgggagaggaaagcagctgaagaggaagatgatgaagatttttgtctcccagaagatgtagagcctctcttgaaacagactgaactctacactgatacaacagctgctgtttcggctattactgctcagctgactgcatttttcttgacacctcttttcagccctccagcttatcctgtgaaagttcgtgtgagttatcagaagctattgaagtgttatgtgctcaatgagctacatcataggcctcccaaggcccagaagaagaagcatctgttccgttcactccaagcaactaagttcttccaaactactgagcttgactgggcagaagcaggcttgcaagtttgcaagcaggggtacaacatgctaaatttgttgattcacaggaaaaatcttaactatcttcatttagattacaatttcaatttgaagcctgtaaagactcttacaacaaaggaaaggaagaaatctcgttttggaaatgcattccatttgtgtcgtgagattttacgacttacaaagttggttgttgatgctaacatccagttccgtctgggaaatgttgatgccttccagttggcagatggtctgcaatacatattttctcatgttgggcagttaactggtatgtataggtacaagtaccgattgatgagacagattaggatgtgcaaagatctgaagcacttgatatattatcgtttcaacactggccctgttggtaaagggcctggttgtgggttttgggctccaatgtggagagtgtggctcttcttccttcgaggtattgtcccactattggagcgctggttgggcaatcttctggcacgtcagtttgagggccgtcattccaagggtgtggccaaaactgtaacaaagcaacgtgttgagtctcactttgatttagaacttcgtgctgcagttatgcacgacgtcctagatgctatgccagaaggcatcaaacaaaacaaggctcgaactatattacaacatcttagcgaggcatggcgatgctggaaggcaaatatcccatggaaagtccctggtctacctgtgcctattgaaaacatgattcttcgttatgtgaaatccaaggcagattggtggacaaatgttgctcactacaatcgtgagcgtatcaggcgtggtgctacagttgacaaaactgtttgtcggaaaaatctaggaaggttaactcgtctgtggctgaaggcagagcaagagaggcaacacaattacctgaaagatgggccatatgttactcctgaagaagctgttgctatttatacaacaactgttcattggctggaatcaagaaagttctccccaattcctttcccgccattgtcatacaagcatgacactaaacttcttatacttgctctagaaaggctgaaggagtcatacagcgtagcagttagattgaaccaattgcaacgagaggagcttgggttgattgaacaagcttatgataatccacatgaagcactgtcaaggataaaaaggcatctccttactcagcgtgcttttaaagaagttggtatagaattcatggacttgtacagctacttgattccggtatatgaaattgaacctcttgaaaagatcactgatgcataccttgaccagtacctgtggtacgagggggacaaacggcacctcttcccaaattgggttaagcctgctgattcagaaccaccacctcttcttgtttataaatggtgccagggtataaataatttactggatatatgggacacaagtgatggacagtgtgttgtgatgctccagacaaaatttgagaagttctttgagaaaattgatctgactctgttgaacaggcttctgcgcttggtcttggatcataacatagctgactatgtcactgcaaagaacaatgtagtgttgtcttacaaggacatgagtcacacaaattcttatggtctcattcgagggcttcaatttgcatcttttgttgttcagtattatggccttgtgctggatctcctgattcttggtctaactcgtgcaagtgagattgctgggccacctcaaatgccaaatgagttccttacatatgctgacacaaaagttgagacaaggcatcccataagattatattctcggtatattgacaaggtgcatatattgttccggttcacccatgaggaagcacgagatctaattcagcgttacttgacagaacatcctgatcctaacaatgagaacatggttggttacaataacaagaaatgttggcccagagatgcaagaatgaggcttatgaaacatgacgtgaatcttggaagaagtgtgttctgggatatgaagaaccgccttccaaggagcattacaactttagaatgggagaatagctttgtctctgtttacagcaaggacaatccaaacctgctttttagcatgtctggctttgaagtccggatactgccaaagatacggatgacccaggaggcattcagcaacacaaaagatggagtatggaatttgcagaatgaacagacaaaagaaagaacggcaattgccttcctgagggttgacgatgaacatatgaaagtgttcgagaaccgtgtccggcagattctaatgtcatcagggtcaacaacattcaccaagatagtcaataagtggaatacagctctcattggccttatgacatatttccgcgaagcaactgtccatacccaggagcttttggatttactggtcaaatgtgaaaacaagatccagactcgtataaagattggcctgaattcaaagatgcctagtaggtttcctccagttatcttctatactcccaaggagattggaggtcttggaatgttatcaatgggccatattcttataccgcagagtgatcttaggtatagcaaacagacagatgttggtgtaacacattttagaagtggtatgagccatgaagaggatcagcttattccaaacttgtatcgctacatccagccatgggagagcgagtttattgattcacagcgtgtttgggctgagtatgctttgaagaggcaggaagcacaatcacagaacagacgattaactcttgaggatcttgaagattcatgggatagaggtatacctcgtatcaacactcttttccaaaaagaccgtcatacactagcctatgacaaaggatggagagtgagaacagattttaagcaatatcaagtgctgaaacagaacccattctggtggacacatcagcggcatgatgggaagctttggaatctaaataactacagaacagatgtcatccaagcacttggtggtgtagaaggcatcttggagcatactttatttaaagggacttacttccccacttgggagggtctgttttgggagaaggcatcaggtttcgaagagtcaatgaaatacaagaaactgacaaatgcacagcggtctggtctcaatcaaatccccaatcgaagatttaccctgtggtggtcaccaaccatcaatcgtgcaaatgtctatgttggtttccaggtccagctagatcttacgggcatattcatgcatggtaaaatcccgacattgaagatttctctgatccagatcttccgtgcacatctgtggcagaagatccatgaaagtgttgttatggatctttgccaagttttagaccaggagttggatgcacttgagattgagactgtgcagaaggagacaatacatcccaggaagagttacaagatgaacagttcctgtgctgatatccttctctttgctgctcatagatggcagatgtccaaaccaagcttagtttctgagtcgaaggatgtatttgatcagaaagcaagtaacaagtattggattgatgtgcaactgcgttggggagactatgattcacatgacatagaacgttatacaagagccaagttcatggattacacaacagacaatatgtccatatacccatcgccaactggtgtgatgattggaatcgatctagcgtataatttgcactctgcttttggcaactggtttcctggatcaaagccactacttcagcaggcaatgaacaagatcatgaagtcaaatcctgctctgtatgtcctgagggagagaataaggaagggtctgcagttgtactcttctgaacccactgaaccatacctgtcttcacagaactatggagagatattcagcaatcaaatcatatggttcgtggatgatacaaatgtgtatcgagtcactattcacaaaacatttgagggtaacttgaccaccaaaccaattaatggtgctattttcattttcaatccaagaacgggtcaactttttcttaaggttatccacacaagtgtatgggcggggcagaagcgtcttgggcagctggccaagtggaaaaccgctgaggaggttgctgcattggttcgatctcttcctgtagaagagcagccaaagcaaattattgtgacaaggaagggcatgttggatcccttggaggtccatctacttgacttccctaacattgttattaagggcagcgagctgcagcttcctttccaggcttgcttgaagattgagaagtttggtgatcttatactgaaggcaactgaaccacagatggttctttataatatatatgatgattggttgaaaagtatatcatcatacacagcattctcccgcattgtgcttattctacgtgcacttcatgtgaataatgagaaggcaaagatgttgctcaaacctgacaaaacaattgttactgaaccacatcatatatggccatctctgaatgatgaacagtggttgaaggttgagtgtgcactaagggacctcatcctttctgattatgcaaagaaaaacaatgttaatacttctgcactgacacaatctgaaatgcgagatatcattcttggagctgaaattgctccaccatcacagcagaggcaacagattgctgaaattgagaaacagtcaagagagactactcagttaactgctgtaaccacaaggacgacgaatgtgcacggagatgaactcattatcacaaccacaagtccatatgagcaacaagcattcgcatcgaagactgattggcgtgtcagagccatctctgccacaaacttgtatctacgtgtaaatcacatttatgtcaattctgatgatataaaggaaactggctacacttacattatgccaaagaacatattgaagaaattcatatgcgtagcagatctgcgtacacaaatcgctggattcttatatgggctgagtccacaggacaatcctcaagtcaaagagattaggtgtatagccatccctccgcagcatggaacacaccagatggtgactctgccatcaaatcttcctgaacatgagttccttaatgatcttgaacccttgggatggatgcatacacagccaaatgaagctccacagctatcaccacaggacctgacatcacatgccaagattctggagaacaacaaacaatgggatggtgagaagtgcatcattctgacatgcagcttcaccccaggatcttgctcgttgactgcttacaagctgacaccaagtggttatgagtggggacgcagcaacaaggacaacggaagcaacccacatggatacctcccaactcattacgagaaggtccagatgcttctgagcgaccgcttccttggtttctacatgattccggataacaccccttggaacttcaacttcatgggagtgaagcacgacccacagatgaagtacaacatgaagctgggcatgccccgggacttctatcacgaggaccacaggccgacacacttccttgagttcagcaacatcgaggagggagaggtcgctgaagggcatggaccttatggaaacataggaacgacgttatctttaatagaggggtcccgcatctctcaacttctgtctccaatgctggagaggaagcttggtgttggagtaaagctagtgctaaaggcctccagcttcagttggcgcaacatgatgatgatgtaa

SEQ ID NO: 4747 - DNA, 444 bp, Zea mays
  Peptide Sequence Number=SeqID_48122
atggagctctacttcgacctgacactagagaaccagacgctcaaggctgctcttggtgggctcgccgcggattttgaagtgcttcagctggctgaccgcgtttttcggttttcggtttcttcgatggcggtgggttttcacatttataacttgggttccattgagcgtaaggagttcagagccttcttcaacctctggaatcgtggtggacctaattggaagcatgaattcaggctttttttggatgaggaagctgcctcttggtcgaaggtccgggtcaggaattctccgtcatatgcggatgtggttaagctccctctcaccggtgccaatgctgttccgattcgtaaccctaccaggtcgcctggtggtgctcagcatgctgcttgggctggttcttcggttttcaatcgcttgggccgtcctttcactaatcatgcctag

SEQ ID NO: 4748 - DNA, 216 bp, Zea mays
  Peptide Sequence Number=SeqID_48123
atgggatacacaacttgtgggtacagggtacaacctctgcagagtgtaaaactgatggtcaataccaggaagggtggtggaattgatctacctccgaatcgacacagtcggaggatatttagacaaccacaacaacaagaagagatggatcctccaaatcctccaccagtcggagctgatcccgcagtcatagcccagatgcggataatgcaatag

SEQ ID NO: 4749 - DNA, 990 bp, Zea mays
  Peptide Sequence Number=SeqID_48124
atgcgggcggcatgcaaccgtgccaagtgggcgcgcttctccgactcccaacacgcccagcatggaggcccaggcccacgtgtcatgcaaccggcgcgccgaatgcttcgtgcatgcaactgcaccgccacttgcgccaccaccgcgcctcctcgactgcggaaccagtaccgcgactcgaggcgacccagcgcacgacccagcagcgccagcctggcgcggcggagaagcaggcgacgcttcgccttcgccgtaataaccgcgccaaaaaagggaccgggaaagggggataccccgaaaaggatccttcccagtgaaagaaccaggctccgagccaccctactgattagaggttcgaaggctggccccccggaagggttcgacagccgcctcagatcacgtgggccctacacccactactggctcgggctgcgctcccgaggtaccctaggacatttccgagaccagcgggagcgatcttgtaacggattcccatcagagggaggcatcgagccctcggaccccgtcgctaggggactgggtccggcagatcacctgcagaggctcgggggctgctctcgcaaacccggctccggccgaactgttgacagcgtcaacataccagaccgagaacttgggacccgaccgtacacccgggctacggccagctcgcatgagggaacaatcagaccagccgaagcattacgcaaggcattaagacctcgaaggagtaaaaccactcctccgaggcctcgggggctacacccggtgggtgcgctcgcgcgcacccaccggaacaaaatgcaaccgagaaaggctggtccccttgcaaaaaagtgcgacgaaagcctccaagcgagtgctaacactcccttcgaggctcgggggctactgtcggggaccataattaggggtaccctcaaggctcctaattctcagctggtaacccccatcagcataaagctgcaaaggcctgatgggtgcgactaa

SEQ ID NO: 4750 - DNA, 1011 bp, Zea mays
  Peptide Sequence Number=SeqID_48125
atggcctccgcgatcaaggctgcatcgacctcctcccagtggtcttcttccccggcggcagtccactcgtcgccgttatcgaagcggctaccagctgcagtggccatgccgggacggcggaggtctgtggccactgtaagggccgtcgccgcggtagctccgggtgccccggccaagctcaccgccggtgccggcggccgatgcctgccggtgtcgcagaccatgtccaggctcagggcgcagggcaagacggcgttcatcccgtacatcaccgccggcgacccggacctggcgacgacggcggaggcgctgcggctcctggacgcctgcggcgccgacgtcatcgagctcggcgttcccttctcggacccctacgccgacgggccggtcatccaggcgtcggcggcgcgggcgctggcgagcggcacgacgccggacggcgtgctggcgatgctgaaggaggtgacgccggagctgtcctgccccgtggtgctcttctcctacttcaaccccatcgtgcggtggggcctggccgacttcgccgccgccgtcaaggaagccggcgtgcacggcctcatagttcccgacctcccgtatgggaactcgtgtgctctcactctcaggaccgaagccatcaagaacagcctcgagctggtgctgctcacaacaccatctacgccagcggacaggatgggggagataacacgagcttcacgaggattcgtctatctcgcgaccgtcaatggagttacaggtccacgcgcaaacgtgaacacacgtgtccagtctctcattcaggaggttaaacaggtcactgacatacccgtggctgtcgggtttggcatatcgaaacctgagcatgtaaagcagattgcagagtggggtgcagatggtgtgatcattggtagcgcaatggtgagacagttaggcgaagcagcctctcccaaggaaggattgaagaggctagagaaatacgccaggagcatgaagaacgcgctaccatgccagtga

SEQ ID NO: 4751 - DNA, 852 bp, Zea mays
  Peptide Sequence Number=SeqID_48126
atggccaacggcggcgctgcggccggcaagctcaccgtcgccgagaccttctccaacctcagggagcaaggcaaggtgccacagtgttcattctcaacaaagagtgcattcatcccgttcataactgctggtgatcctgacctggtaaccacatcgaaagcattgaagattctcaattcctgcggttcggatgttatagaggttggcgtaccatactcggatccactggctgatgggccagttattcaggcttctgcaacacgggcgcttaagaaaggcactacacttgattctgtcatagagatgctgaagggggttacacctgagctttcttgccccattgttcttttcacatactataatccaattctgaaacgtggtgtgggaaacttcatgtctactatcaaacaagctggcatacatggacttgtagtgcctgatcttcctttggaggagacagcgttgctgaggagcgaggccattatgcacaacatagagctggtgctgcttacaacgccaaccacgccgacagatcggatgaagggaattgcacaagcttcagaaggatttctctatcttgtgagcgctgtaggggttacaggtgcacgctcaaatgtaaacttacgtgtagaacaccttcttagggagatcaagaaggttacagacaaaccggtagctgttggtttcggtgtatcgactccagagcatgtgaaacagatcgtgggctggggagcggacggtgtgattgttggcagtgcgattgtgaagcagttgtgtgaggctgctactcctgaagagggtctggaaaggctcgaggagtacgccaggagtatgaaggctgctatgccgtga

SEQ ID NO: 4752 - DNA, 540 bp, Zea mays
  Peptide Sequence Number=SeqID_48127
atgtacgacaagcttcggcgcagccgccgcttggacgcggtgcagagcggctgctccgtgttgtccatcgtcaagcagggggacctcatggtcgtcgccaatcccagccaagagtcatcaatactcggtatgtcgcgcgcgttcgacgactactatatcaaggactgtggcgtcatcttggcgctagaggtgacgcatgggaggaccgacaacaatgaccagtttgtcatcctcgccaccgttgaggcgtcgcttggacgcggtgcagagcggctgctccgcgctgtccatcgtcaagcaggggacctcatggtcgtcgccaacgtcggcgactctcgggttgttctgggcaccacattcgacgacgacgccatcacgtcgtccagctcattcggtcaggggtactaccttgctgatgagcccggggtgcactttgttttacagtccaaccaagagtcatcagtactcggtatgtcgcgcgcgttcgacgactactatatcgaggactgtggcgtcatcttggcgccaaaggtgacgtag

SEQ ID NO: 4753 - DNA, 402 bp, Zea mays
  Peptide Sequence Number=SeqID_48128
atggctgatgttgctaggttgctggctgtcaatacgcacgacctccttgcgcacatcgccagctttgattaccggcccgagatgatagacgagctcgacgtgcagatgaggttcgtcgtgggcggaaccattctcatgctactcactgtcgtcttctatgagattcaggcgctagccgccatcgctctcacccaagccacaaccaagaaccaacctcagtgccctcaagtcattgcgcccagcggcagcaggtcctcgctcgccatcactgcgcgtctgaaagtggagagggagggaacagaagagaggttcacgaggtggaacgtggaagtactgccctactggtatggcgaggcggagggcggaggcggagccgcggaggctgcggtgccagcagattaa

SEQ ID NO: 4754 - DNA, 1035 bp, Zea mays
  Peptide Sequence Number=SeqID_48129
atgaggatggttatgattatgcttatggtaatgatggctcgacttagacacactgcacgaaagtccgtcatccccttcttaccctcccgccttgctgagcgtccgcttcgccgtcccgtggccggacagtccagccacttggacagactgcgccaccacctgcatgaggagcaggaacgtcgacgacaggagcagcagggctcttctttctcgctccaacaggagatagagtctgtgaggagctgctcccctgtgcttcctctggaggcgccccctgcaccaccactgggcgccccagcttctggaggagacccagacgacggaggtggcgacgacagctcgagccacgacaccgacttccctgctgaccctgagccggaaggatgggttgctcgacccatcactcgcgacgctgctcgcgggtgtcacttccacgatgcgctcgatgccctgttacgtcgggcacttaaccgacgtacttggtccatcgagtatcgctgtgtggtctaccagcatagtcgcggggtctacccggaccgctgggaggcgacctgtttggtgcgccgtccggagaacagtctccagggcgcagaggcctgctcagagcactattctatctcagagcgggactcagctgaggcagccatgcaggatgttgcacggcgtgcgctttcgcactactgctcggttttcggtggggtagccgacggtctcgacctgaagtattacccccgccgtccatctggcagcacaggaggcgtgattgtttcacctgctggtgaggacaatcctaggttgagccgcacagtcaacctagccgccgtgctaaacacggagctggaccatgcactagacgagctgagtagggctcgtgctgagatcgccctgctgcgggctgagcgtgcggaacgtcgtcacttggatgatggttcccccgcccccgttgggtctcagcacccgtaccgctcacctcggcgtggacgccagtcttatggcaatcccaactgcaagaccaagataaatctagaaccatag

SEQ ID NO: 4755 - DNA, 246 bp, Zea mays
  Peptide Sequence Number=SeqID_48130
atggccgcgcccaaatcctctccctccctgttcggattccgccagacctgcgtagctccctgctctatatacgtcaccccctgtgtcgtcatcgttccacgcgtcagcaagaaattccaagagtcgggtgaagacgaagctaacaacacgatattccccaagcgctcgacaaaattgcctgaatcggaaaatcgctaccgatctcggagattcgtgttagctgtggaaacggttcgtttaatctag

SEQ ID NO: 4756 - DNA, 756 bp, Zea mays
  Peptide Sequence Number=SeqID_48131
atgtcaagaaaacagttggggcgtaaccctcttagcgacgtgccatatcgaaagtcgggtatgatgttaaatgggagacaaaatgtaagggcaaaaagcgaaggaggtggagaacactggtttcaaactatggtttgtcttagtgagagcgagaagatgaagttctggaaagacttagatgacatggtcagagcggtacccaccaatgagaagcttttcataggaggatatctcaatggtcatgtaggttcaacaaatgtagattatgagctagctcatgcaggcttcgggtatggtagtaggaatcaagaaggagatgatattttggactttgttgtagcctacaacctattgatagccaacactttctttagaaagagagattctcatttggtgacttttagcagtggccatcgttcgagccagatcgacttcgtgctcacaaggagagaagataaacaagcttgtttggattgtaaggtgatacctggagagagtgttgagccccaacataatcttgtggtggctgacttctgttttcggatcagtacccatagggttaaacaagccaaaattgcgaggacgaagtggtggaaactcaaaggggagacatccgaagtttttagggaaagagtttttgtggagggcgcttggtccgaagaagaacatgcaaacatcatgtgggtgaagatggcaacttttattaagaaggtggcgtcacctcgtgttttgagtgaccaaagggagcagcggtga

SEQ ID NO: 4757 - DNA, 591 bp, Zea mays
  Peptide Sequence Number=SeqID_48132
atggaaaaagagccacttgacatggttgagagctcagttcgagtcatcgagacacatgttgacatcattcgcagtctagtgactgatggggttgtggatactagtgaaccggaatcagtgtacacacttaagaccactttgtttcaaattggagatgtatgcgacatgcttgagaagtgtgctctgtccatcaaaaagtatgttgactccaagagggctaaaattattcaagatgaagccctgcaatatgctgaagatgatgaagctgcagatgatttggaggaactcccaagcccagatctccttactcaagccgacatattggaaaaatattttggaattgagtatgatagcgaccagtcaagggttagacagagaaggcatggctgtgatgttataatgctgaaggaccccaaaaagagattaagccctgtagtctaccacctcccgttatttgtgggcttcaccgatggctggaaacatttggtgatagcaaacgaccttcgggctgaagacgtctgcgagcttgttaaggggccagacgatggtgagccggtgtactatgtccggatgtgtggtcacaaaatttaa

SEQ ID NO: 4758 - DNA, 579 bp, Zea mays
  Peptide Sequence Number=SeqID_48133
atggcgcttcctgttgacgtggcgcccgagtccgagccctggggtcgggcgaagcggagtttcgtcgtcttccgggtcttagcccgagtccgagccctggggtcgggcggagcggagttcgccgtcttccggcccgagtccgagccctggggtcgggcgaagcggagtttcatcgtcttccgggtcttagcccaagtccgagccctggggtcgggcggagcggagttcgccgtcttccgggtcttagcccgagtccgagccctggggtcgggcggagcggagttcgccgtcttccgggtcttagcccgagtccgagccctggggtcgggcagagcggagttcgccgtcttccgggtcttagcccgagtccgagccctggggtcgggcggagcggagttcgccgtcttccgggtcttagcccgagtccgagccctggggtcgggcggggcggagttcgccgtggcgcctttggcaaggcctgactgcctgtcagactcactctgtcgagtggcactgcagtcggagtggcgcaggcggcgctgtccttctgtcagactggccagtggagcggtggagtga

SEQ ID NO: 4759 - DNA, 519 bp, Zea mays
  Peptide Sequence Number=SeqID_48134
atggcgcacgacaaagaggttgaggatcttggcgatctagacggcacgctgcccgaaagcatgctccccgaggcatcgggggtggagctggcgccgccatccgatgcgtgcaagggcccctcggcgacccctacgtcgaccgcgccgactggagctggcgaagaccccacgccagcccttgcgctgacgggtgaggacgcttcgaaggcgatgggtgaaccagctaccggagaccctgcggcggcggcggccgggccttcacagtgttttgagtctgatggtgaatctgggagttcatttccttggacggaggagtcctcagatgaaggcttggattattttgttgcgttggatgtggctgaggcggagacttcgccgcgtgtggaggatgtcgggatcttcctagtgcgagtactgggtgtaggcggcgaagggtggtgggaaaccatagcgtgggtgaattttcgcgaagtggcaggcaccgttgtatggggatggagcgtggccgtctccgagtag

SEQ ID NO: 4760 - DNA, 1074 bp, Zea mays
  Peptide Sequence Number=SeqID_48135
atggagaaggatcatcaagatgcagcgcggaagcgtcgggcggtcactagggtcggggaccctttccgtgaggcgaagaaggcgcggggaggcgcgaagtttgccgcccctagcagtagcaaaccacaaccgactgtgaagccgcccgcccccgagcccagcaagtcttcggcgggtgcaaaggctgctgcttctggtgcgggcaagctgccctcggccgagcccgcgaaggagcgaaggctgccgtcgccggcgcgcactgacgtggcggcgacgcgtgttgctgactttgacacggacatctgcgtggagaattatctcgttggtcctaaacaagatcatggtgcagggtcggatgtgggacaactggctgttgtctcgactccggtggcggccacttcgccgacggtggcggttggtgcgaagggtgcttcgaaggacccatggtccaacttctgcgcgagcggcgagatttcgtcggccgccaccgctaaagatgtggcgggctctgtgtccctgcagctgaggcatgcgccgcagcagctgaagcatctagtggaggagaggagggacgcgaacaaggccattaccgatgcacatgctgctcaagccaaggccaaacttgcacgggcggaggccagtctcacccgccaacgcgtcgaggagctggaggcgaggctcaacggcctgcgcaaccgcgtggacaaaaccgaggcctcgacgcgtgcggaggtcgagcggacgcatgcgcagctcgtggacgcgtaccgggagctgggtgcgcggaccgccgccttcgaagcgcccgaccaagaggtgggcctctgcttcctcgagtggctacaagaggagttgggggtgctcccgacaatcgtgacgggcctcatgtcctttgcctccctcgtcacttgcgagggggttgtgaatgctctgtcccgtgaggggtgcgggcacttcgaggtcttcgaccagtcggatgaaggcttcgaacgcgaaatcttcctggtcgaggacccggttctgaagctgtcggcgagggcgctctttgacaggatgtggggccctcatggctga

SEQ ID NO: 4761 - DNA, 294 bp, Zea mays
  Peptide Sequence Number=SeqID_48136
atggatacagcggaggaggctgggcaggaagtagtcagcgctgttggggaggatagtatcccggaagctgccgcctgcagcagggaggagaggaaggaggaagaggaggaagaagtggaggtgagcttcgatgaacttggcctggacgagcagctgaagagggcgttgaggaagaagggcatcctcaaggccaccccgatacagcgggaagccatcccgctcatcctgtccagacgtttggcctctgctatccaatcagcttcaaggcctgggtctggtggtgtttgcgaatga

SEQ ID NO: 4762 - DNA, 1251 bp, Zea mays
  Peptide Sequence Number=SeqID_48137
atgcgcgcggcggttaactcgtcccagatctcggcgcggcacggcgcctccctcccggccctgccggcgagagcggggtccgatgaggcggcggccgttcctggaccagctacggccatctttcaagcaccggtggcagcagcagccgtggtgggtgcgcctcttgctctccctcctcctcgccctcgcatgcgtcctcctcctcgctatcctccttggctcccccgaccccaacacctcgccgtccacctccgccgcgtcctccggatggtggccgagtaccgccaacccttggtgaagatcgagggcgccagcctcagcatcacgcaggtggccaccggcgctggcgaggcccgggtcaagctggacgagtctgcccgtagtcgggtcaaggcaagcagcgactggatcatgaacagcatgatgaaccgcaccgacagctacggcgtcaccaccggcttcgacgccatgtcgcacaggaggaccaaggagggcggcgctctccagagggagctcatcaggttcctcaacgccggcgccttcggcaccggcacggacggccacgtcctcccggccaaggcgacgtgcgcgaccatgctcgtccgcatcaacaccctcctccaggggtactctgggatccgcttcgagatcctcgaggcgatcgtcaagctgctcaacgccaacgtcacgccgtgcctgccgctgcgcggcacggtcactgcgtccagagaccttgtgccgctctcctacattgccgacctcgtcactgggcgtgagaactttgttgcgctcgccccagacggcagcaaggtcaacgccaccgaggcattcaagattgccggaatccagggcggcttcttcgagctgcagcccaaggagggtcttgcgatggtgaacggcacgaccttgggctctggcctcgcctccactgtgctcttcgaggctaacatccttgccatcctcgccgaggtcctgtctgccgtgttctgcgaggtcatgaacggcaagccggagtacaccgaccacctgacccacaagctcaagcaccacccgggacagatcgaggctgctgccatcatggagcacatcttggagggcagctccttcatgaagcttgccaagaagcttggcgagctcgaccccttgatgaagcccaagcaggaccggtacgcgctccgcacgtcgccgcagtggctcattcgttcagtatttagtaatgtcagcaaatgctgcgtatggagtataaagtaa

SEQ ID NO: 4763 - DNA, 333 bp, Zea mays
  Peptide Sequence Number=SeqID_48138
atgcaggaatcccttgcaggaccgccatcgcagcaaatcctcccgagggctccctacactgaccactcccctactgcccttgccctttcggcggtggtgtccgagctaggaacgagggttggagttgcgagcttcgcggtcagccgttgcgacgaacgcggcgggcagcgcaattctgttatgcgcgagtttgttgagagggggaagaatgcgctgacaagatgggtccccagggcagtgagatcgagggcgcggcaacaacctgatccacaaggatttgcggcggccgcaaccaccaacgccgagatccccggctggaaaaatgcacagtag

SEQ ID NO: 4764 - DNA, 546 bp, Zea mays
  Peptide Sequence Number=SeqID_48139
atgcctgcgggcccaccagccaggggtggcgtggagacggagcaggtgcgcgagctcgcgcatggcggcaactgcagccgcgctctgcgtgtcgatgggagtggtggaaaaaaatgggccgacgggggcgcgctacgcgctgggccgagcgacctgggtggatggcacccatgcgaccagggttggacacgcgagcgcctgcggggagagcaacgggtgggccacgtaatgggccttgaggccgtgggagggaaaggaggggagggcgtgcgctgggttgcgcggcaggtcgagcaggctggtggattggcgctgggccgcacaagcggggaggggggaggaagagcggggtgggcctcgcggtggcaggccgaggggagatcgagtgggctgcgggagcgggccacgaggccgagctgggctaaggggagggttttattaatagctataactagagtaaaatttcctattacttggaaagaaataaataaaggagcaaaaagaaagaggaacaagaaagtaacacctgaatttggtggagattag

SEQ ID NO: 4765 - DNA, 1437 bp, Zea mays
  Peptide Sequence Number=SeqID_48140
atggcccaaaggcacatttccctttcaatggtcgccttccaagggggtcaccctccttttaaaggcgactctccctacttgcgtccccagccgtcgtgggctgagtcttctccaacacactccaaggtcctcccctacggcgcgggggctgggccccacacgtcatgcaagtcggctcagagcagaagaagccaaaccgccgcgcgcggtgcgtgcaaccgcccagcggttgcaagcggctctccacttttgcccagaccaacgggcgagagggcgagcagccatgcaggaggcatgcaaccacgccaaatgggcgcacttctccgactcccaacacgcccggcatggggacccaggcccacgcgtcatgcgaccggcgcgccgaatgcttcgtgcatgcagctgcaccgccacttgcgccaccaccgcgcctcctcgactgcgcaaccaataccgcgactcgaggcgacccagcgcacgacccagcagcgccagcctggcgcgacggtcaatacggccaaaaatgggccggcagtaatggcggtggcaggcgggcaggagcagcggtcacgtcgtcggcccagcctacgtcccatccaggggcgacgagagaaccctctctcacggcgtgaagacaacgcgcccgtgttccgttcctcgaacggctcgcgcacgcgcaacgaccgcctcacgaaccactcgccctgtcgcattaactccgcggcgggacaggcggagaagcgggcgacgcttcgcctttgccataatgaccgcgtcaaaaaaggctccgagcctccctactgttcagaggttcaaaggctggcccctcggaagggttcgacagccgcctcagatcgcgtgggctctacacccactattggtcagaggttcgaaggtcggcccctcggaagggttccacggccgcctcaggctactcgggctctgcgcccactactgatcaagggttcgaaggctggcccccgaagggttcacagccgcctcagacacagagcgagggatgaccatgggtacgttcgatacataaccaaggctcgggctgcgctcccgaggtaccctaggacattccgagaccagcgggaacgatcttgtaacgaaatcccatcaaagggaggcatcgagccctcggaccccgtcgccaggggaccgggtccggcagatcacccgcagctcaccggagacaccatgttcggcgcccatcgagggcaacatggcgctttccccccctcctccttgcgaaaaggcgacgcaggggcgcaccataggaagctccgcttcgcccgacccagagctcggactcgggctaagccccggaagacggcgaactccgctccgcctgacccagggctcggactcgggctaagccccggaagacggcgaactccgctccgcccgacccagggctcagactcgggctaa

SEQ ID NO: 4766 - DNA, 972 bp, Zea mays
  Peptide Sequence Number=SeqID_48141
atgaagtgttcgcttgagagcgcagtgaaaaagcttcaactatggttggaaggtgaaccgccaaatcgcccttacccgctgaacggtggaccactcgtcgcttggaaggtgaaccaccagatcgcttctgaagataaggttattggggctgttctgacgcaagtgactggaggaaaggagcatgtggtgacctacctaagtcggaggctggtggatgctgaaacaaggcattcgacgagcacaccggcaaaggtgagcctgggcacttgccccggtaagctgggctctggctccgccactgcatgtcggcgtcgcgcacgcgacctccagctcgccgttgtctcactgcttccgctggtgacgcatgtcggcgttgcgcacacgctcgtcaacatggtcgtcatggcttcccttcggtgctggcacccgttgtcgaagccacccttcccccgtcgccccctccacaccctcacgtccctcccctcggatgcggagcaggcagagggcatcgtccctagcgccaccggcagaacacggaggcacacatatctgagtgatcaggaggccccagttgcagttgaggcaccaaccccagttcttggagagccaatggacttgatgactgcgctgcagctggtgatgaagaagtcaagtgctcatgatggacttgtgaagggtcttcgcgaggctgccaaggccattgagaagcatgctgctcagctttgcgttcttgctgaggactgtgaccagccagattatgtcaagctggtgaaggcgctctgtgctgaacacaatgttcaccttgtcactgttcctgctgctaagactcttggcgagtgggctgggctttgcaagattgactccgagggcaaggcaaggaaggttgtaggctgctcctgtgtcgttgtcaaggactacggtgaagaatctgagggccttaacatagtgcaggagtatgtcaagtcgcactag

SEQ ID NO: 4767 - DNA, 504 bp, Zea mays
  Peptide Sequence Number=SeqID_48142
atggctccaggctgctttacttcggggggtccgggttgtgcgcataggggtcctgcgccttctgggcctgatggcgttgtctccgagaacgccacctttaactgctcacgagataccccctggggctgtttctccgcgtggctaagggtagctgcgcaggcatcgtgcctttataccgtagtaaggggtacccctaatccagagtaccgacatatacctatctccatttccatacacatactcatacccatcatgggtataagattcatcccatacccatccccattcggttatcgagtccccaatgtgtctccatcctcgacaacaaaaatccatatccctgctgacttgtcatttaccttctcaactgatagattcaactcatggtgggggatttgggagtctcatgcttttccgagggctttggggccactgttgcagaagattgatgtcgaatacgaggtcctagatggggacgtattgttcttggccatcctcttttga

SEQ ID NO: 4768 - DNA, 939 bp, Zea mays
  Peptide Sequence Number=SeqID_48143
atgagggaggaggaggaggccagctggttcgcgcgcggcgaggagcagcagctcctgcggccggacgagctgatgcctctcacgcaaacgctcatcacgccccatctggccgtcgccttcgacatcacgacgcacggcgccggcgggacgggcgcggcggggggcgcaggtgcggggcccggcgcgggcggccccgacatcaacggcggcggtgcgtcgtcggcagcgggttccagcggcggcggcgggggcggcggcggcgacgagccggcccggacgctcaagcgcccgcgcctcgtgtggacgccgcagctgcacaagcgattcgtcgacgccgtggcgcacctcggcatcaagaacgccgtgcccaagaccataatgcagctgatgagcgtcgacggcctcacgcgcgagaacgtcgcctcccacctccagaagtaccgcctgtacctcaagcgcatgcaggggctgggcggcggcggcggcgggggaggaggcgggggcgcggggggaagccactcctccggctccggcactgacgccgccaccgagcacctcttcgccactgggcccgtccccttcctcccgccgggtcaccgcgcgcccgccgccgccgacagctacccgcccttctcccccatgggcggcgcgcaccaccaccagcaccaccagatcggccacttccaccaccccgccacgcgcccgctcgcccactacggcggcgccgctgtgggcggtttcgaccacggcttcctgagccgcgtcgggccacccgccgggccgcccgggatgcaccaccgcatggtcggcggcggcgccgggatggggatgatggcgcccgcctccttcgccgacgagatggacctcggatcccgaggcggtggcggcagcggcagccgccgcgagctgacgctgttcccgacgtccggggaccactga

SEQ ID NO: 4769 - DNA, 1128 bp, Zea mays
  Peptide Sequence Number=SeqID_48144
atgaagctgactatcgtcggaaagactttggctaagcggtgtatacacaataacgtagttaggaagcttcggttacgtaagctggacatgcaatggcaaggaaacaagggaagaaaacccagtgacttgggtaacattagggatggcaatgggtacggtgggcaggcgggtaacgggtatccgctggatagcggatacccggcgggtacggatatgggtagagatccatacccacgaacgtttatagatacgggggtaccaccaagactcctaaactcggctggtaaccaccatcagcacaaagctgcaaaggcccgatgggcgcaatacaggtcaaagctccgcccactcaagggacacgatctcgcctcgcccgagcccagcctcgggcaagaacaacagacccaggaaaacagcgccgcctgccctgctccgactgctgtgccacccgccagggtgaggctgacagcagccaagtccagcctcaggcgccataggaagctccgcctcgcccgatcccagggctcggcccccgccttgcccgaccccagggctcggactcaacctcgacctcggaagacggtctccgcctcgcccgaccccagggctcggactcaacctcgacctcggaggagtcaccgcctcgcccgaccttgggctcggaccgaccacgttacagaggggaccatcattaccctacccctagctagctcaggctacggggaacaagaccggcgtcccatctggcttgccccagtaaacaggtgccaaaggttcatctacaactatactaaatcgactgtccggaataccgtagattattccggacaggagaagctcattggaaaaacaggccaagcgcggaccgtccgggcccttgtggcggaccgtccgcgacacgaggatgacactcggacagaaccaatgcaaaaatccaagtctgcactatggaccgtccggaggaaaagagcggaccgtctgagccctcgcgcggaccatccggccacaggcgcggaccgtccgccgttactgctgaccgttgcgttttcagccgttgatctacaggggcggaccgtccggaccagccgggcggaccgtccgcgctcagcagaatggagcaacggctag

SEQ ID NO: 4770 - DNA, 159 bp, Zea mays
  Peptide Sequence Number=SeqID_48145
atggatggacgccgccgcgtcacatccagtcccttcgtcgccgtggacatagtgaacagaacggagcgtgactgtgagagcgggattggaacggagcagctccgtcccattgattttttggagtggaatggttccggatttgaggagaattttccctaa

SEQ ID NO: 4771 - DNA, 1146 bp, Zea mays
  Peptide Sequence Number=SeqID_48146
atgacgtcaacagatcatattacaagtaatctggacaagctagcagttcagaacaaggggacaaattggacctcacagccagcagggcaggatgctattgatgctatgctccaagatttgagttcagagattgcatcgaaggacctaagacaactccattacttccttggaattgaggcctactttgactttgccagtacttcagaaaagttaagaactggtgaagttctacggatggaactggatatacaaaactttatgcagaaccctcagctgcaggagtttgaattccagaactttccgacttcttacctccgctgtgctgctcatcgtgttgcacaacattatggcttagagactatagtagcagatagtttagtagaaggctcagttagcaggattgttgcaagaaaaacagcagaaagcaggtatcctgcaatttttttatcagaagttcctagcaatcaagcaagaaatgatcatgaaacagctgagaagcttaagtttgtcatttatcaaaggcccaaagcattccaaaatggaagcgctgattctagaaacaagagtggtgtaccaaaaactgttgatgagagaatagaggaatataataaagcacgagcacgcatcttcaatggttccatttctgcagattctgatgctgcaagtattatgggaactctttctactggcaaagatgaaccagtaaatgttgacccttctgttgatgaaaccaaagtcagcacaatgaacagtcgttccagagttgctgtttttaaggatactgaaaaggatcgtagtgacccagactacgatcgaaactacaaaaggtatgttaggagctcagtgcctggcttcaacttgagcccaggtgtttttaactttgttgtgcctcagtttatgcagtatgacattggttatgtgcaatctcctggcatgtccacaaaccagcatactatgtactttggccagcctgatctaacaatagggtcttctggagctgctgtttatcgacattggccaaccccaacaatgatgtatccccattgctatgataatgttagtccaatgatgtctcagaatgtgatattccaccacttttcaaagttatcatataaggctatctcaaattcatggggcgagagatga

SEQ ID NO: 4772 - DNA, 753 bp, Zea mays
  Peptide Sequence Number=SeqID_48147
atgggcggatgggagaaggggtccaccgccgtcatgggcaatgatgcaggagccaaagagttggaactcaaggctttgagtctttacctatgcatggatcagtccacaaggttctttcgtgctcatgggaggaattgttatttgcgcctccttgacatcctgaaccatgtttatgaggttgtggagttcgggccaaaaggctgtttcggtctggggcaccggactgtccggtggtgcaccggacagtgtccggtgcgccaggctgcctcgggcgaagaggccgctctcgggaatttgccgacggcgtacggctataattcaccggactgtccggtgtgcaccggactgtccggtgagccaacggtcggccgggccaacggtcagccgcgcgatctgcgcgagacacgtggccgagccaacggtcggaatggggcaccggactgtccggtgtgcaccggacatgtccggtgcgccaacggctcccagatcttcaacggtcagcaacggtcagctgcgctgtttatggaaataaatcgggcaccggacagtgtccggtgtgcactggactgtccggtgcgcccgacgacagaaggcaaggatggccttccagatttgttctcaacggctcctagctgccttggggctataaaagggacccctaggcgcatggaggaaaacaccaagcattcctacaacattcctaagcaccaagacattgatctcacgcattcgtttcattgtgatagcatatag

SEQ ID NO: 4773 - DNA, 756 bp, Zea mays
  Peptide Sequence Number=SeqID_48148
atgaccaccaaccttgtggtggggagaagcgagccgggctgcagcctccccctgtcctcagcttcaaggatgttcatcatctgtgctggggaggagggcgagccgagttggggtcccgccttctgcatgggctggtggcctgcttcttcctccagcatttgggggagaagggcgctcaccagccttgcggaggaggcgaacttcgggtacgcgggaccggccgactgcgggtgccgccggccgccgcgtgcccggttccccggcttggatggcctcggcgccgcctccgacgctgcctcctaccgtttggttggggcgtggctgcccgtccaccgcacgagcgacgtccgccacatccacggcttctcccgcgccggcggccgcaccgggggggcgtacaagacgtcgtacgccgcgagggcggcggccgtgttcttggatggtcttgtcctcactcccgcagtgaggacgggagcgaggacctcttcacgtgtgctgaggcagccgctgccaaccggtgcagaggtgcccgctgtcgtcggcgctgaggtggtcgccaccggtgaggtggccgccgccgtcggtgctgaggtggtcgcctccgctggtgagccactcggagctagctatcccgcggccctactggctggataccagttgtcggggaccataattaggggtaccatcaagtctcctaattctcagctggtaacccccatcagcataaagctgcaaaggcctgatgggcgcgattaa

SEQ ID NO: 4774 - DNA, 552 bp, Zea mays
  Peptide Sequence Number=SeqID_48149
atgcaagatgcagcacgacgtgcgctttctcagtattgcttgttgttcagcggggtagctgacaacctcgacctgaagtactaccctcgccgttcgaccgacagtactagagatgtgattgtctcgcctgttggtgagggcaatcccaggctgaacaacatggtcaacctggtcgccgtgctcaacaccgagctagaccacgcccttgatgagttgggcaaggttcggacgaaagttgcggaattacgtgaagactgtgtagcgcaccactatttggatggtggttctcccgcccctgtcgggattcagcacccttaccattcgcagccctgtggtcgctttgattatgaacgaaggctgcgctggcagaccccatcggttaggtcgcagacgtcatccatgcgaaggcccaagcgccgctcttcgctccgacaagccgaggcgaagacccacgaccactacaagggtcgagagaccaaggccgcgaagaccacaggtcgcgtccccctcagcgctgggaggggctcatgtgcaattcggtccatgttgtag

SEQ ID NO: 4775 - DNA, 201 bp, Zea mays
  Peptide Sequence Number=SeqID_48150
atggccgaccattctagcctctaccgcctcccccaccgcgaggagagcctggcaagcccaggcagcctcagcagcaggaagggggagggggtggagcttttccacgcgttgacagggagaaatatctcaggttcagcccccctcgccgccgacgaccctgcgttcggattcgcgccagcgccgcgattcacgctctgttaa

SEQ ID NO: 4776 - DNA, 297 bp, Zea mays
  Peptide Sequence Number=SeqID_48151
atgcaggcggcatgcaaccgcgccaagtgggcgcgcttctccgactcccaacacgcccagcatggaggcctaggcccacgcgtcatgcaaccggcgcgccgaatgcttcgtgcatgcaactgcaccgccacttgcgccaccaccgcgcctcctcgactgcggaaccaataccgcgactcgaggcgacccagcgcacggcccagcagcgccagcctggcgcggcgggaccgggaaagggggataccccgaaaaggatccttccccgtgaaggaaccaggctccgagcctccctactga

SEQ ID NO: 4777 - DNA, 117 bp, Zea mays
  Peptide Sequence Number=SeqID_48152
atgggagaccacgtctcaggtcacgtgaggggtaaagtctactgccaggttcaatcaggtgggcactcaaggggttttgctggtctggttaggggtgggtttgaactacaacagtga

SEQ ID NO: 4778 - DNA, 777 bp, Zea mays
  Peptide Sequence Number=SeqID_48153
atggagttgatcagaccccatacacctctacctaggaagcgaggcagggtaccactacgaggcctttacaaagttccactagcttcagaaaatccgctacagtttataggaagttccagtgcaggaatccctcgcctgaccaccatcgcagcaaaatcaacccaaggaccaccctacactgaccactcccctactgcccttgcccctttccggggttatagcgtaaaagaaatcgagacacagaaactccgaggggaggaccgcgggttgttttcaatatttggcgagtcctcctactctcacattaccgagcgacggccgacagccagggcagcggcgccatcatcggcgaaccctcgggcacgccaggaaggctctatgtctaacgtgattcgatgcaaaatgaagaggggaaggtggcgagcacaatggtggaaactttaccgaggattaggtcaccaggaggcacgcccacggcgcacggcggaagtttgtgggtctacgacgacggtgagcaatttgttgcctggtgatcccaatcaacgcaccaactgtggcggggaaacgagcgacgaacaccagggatcacacccctactatgaattggggctcgagagctgtaattcccggagtcaaccacggcgaccggtcaccattgccttcactgcccgcgatgaaggaccagaggatggggtggctggcggcacacgcgaaattgaggaggagagaggagagaggttgcggccggctcttatgggcgtgcagggattgtcttga

SEQ ID NO: 4779 - DNA, 486 bp, Zea mays
  Peptide Sequence Number=SeqID_48154
atgcaggctgccaagaggcaaacagttgctactggatcaccgaccccagggcgcactgcatgggttggcaagggaacagtaacagcactaatgataatctgcaaaatgaagacgcaaatgatgcttctaggtggccatatccctggtgctttgttctttgatgttgatggagtggcccatatccctggtgctttgttctttgatgttgatggaatatccgacagaacatctagtttaccacacatgctgccatctgaaaaggcattttcagttgctgtatctgctcttggcatctacaacaaagatgggatagtagtttatgatggaaaggggatgttcagtgctgcttgtgtttggtgggttaagaacgtgggtacccacgttcttaatgttaagaacgtgggtaccgtcgaacttattgtgcagtcctcgcagacccacgcaggacacataagttcgacggccacgtggccccgtcgaacttaa

SEQ ID NO: 4780 - DNA, 531 bp, Zea mays
  Peptide Sequence Number=SeqID_48155
atggtgaccaccagttcctgggtggggaagagcaagccgggctgcgatcttggtcccaccctcagcttcaaggatgttcatcatcctcgctggggtgggggccaggctgagccggcgctctacctcccatgcgggcctgcgggtcaccctctcccgcggcgttcgggggtggaggcgctcactggccctgcgagcggcgcggacttagacaacgtggggctgatcgacggcgggcgtcgtcacctccagcgtgtcggagtcgtcggccgaactcccggcggcccctcctgccggagggcggctgccgcgccaggccggtgccccactcgtctgggaggatttgagtggggatctgccggggggctggtgtcccctgccttcggcgccgaggcggaggcggctcgagaagtcctcgtcgccgaagggatcactgccaccatccgcgccccgggcctctggttcttcgtacttgtcctcgcccctcgagcgtcggcgtgggcgagggcaagattgcagcagcgcccgccctga

SEQ ID NO: 4781 - DNA, 396 bp, Zea mays
  Peptide Sequence Number=SeqID_48156
atgtccggcttcgggcgccataggaagctccgcctcgcccgaccccagggctcggcccccgtctcggcctcggacgacgaactccgcctcgcccgacccagggctcggactcgacttcggctccggaagacgacgaactccgcctcgcccgacccagggctcggactcggcctcagctccggaagacgacgaactccgcctcgcccgaccctagggctcggactcagcattggcctcagacaatggtctccgcctcgcccgacccgaggctcggactcaacctcgacctcggaagacagactcgacctcgacctcggaggagccaccgcctcgctcgacccaaggctcggaccgaccacgtcacaggggggccatcattaccctacccctagctag

SEQ ID NO: 4782 - DNA, 636 bp, Zea mays
  Peptide Sequence Number=SeqID_48157
atggacttaggaaccccgtggagcctgattacttccttcatatacaagggaaccaattgtgaagctgaattggtggtcttcatgggaatacagtgtgcaaacttagttaagcgatccactaccacccaaatagcatccctgccccgaggagaacgagcgcgccgcccagcacgtcgcccgccctcgccaccccaaccgccgccgcagccgccgcccgatgtgccctcgtgcacgagacctctcgaaccctctcagaaggcggtgcgatccggtttgggtcgccgtgccgagcccaatgtgcccgacgcgcgcgcggctgagtcaaagccgaaactggcgctcggagacgacgatgataggccgccccttgaggagaagcaccgctgcagcggtgagggcggattcatcttcctctgcgcccttgttggacacaccgaggctatcggtgggatttctatgccgtctggttcgaacaagctctactccggcagcgtcgacggatctgttcgcatctgggactacaattccggcaaggctaccaacaatctctttgattatggacgagtaacgggctgcttccacggaggttccagtgaggaggttgtcattgttcgtggtggttcatgtgctgattag

SEQ ID NO: 4783 - DNA, 936 bp, Zea mays
  Peptide Sequence Number=SeqID_48158
atgccggggaaggcaaactgttgctgcccagctaggatgcaacattccatcctctgtcctcgcttttgtggcgaggacgggagcgaggacctgccggtgcgctttggagcggcccgcgcttgttggtgcggcgttggtggacaggcggacgccgccgttggtgctgacgtggtggcagctggagaaagcttctccgccgtcgaggccgtcggcgccgcctacggaccgacctccggctctttggctttaatgtctggttcgcgtcccttgagtggggacacgaacgagaaccttccggtggctgtgtccgtcctgggaccatggctgatgctgcagaggtcgctggcgagtcacccggagcttgtcaccccacaggctctccggtgtggaggttgttcatacccacgggggcagaaccggagttccgtttgtaatggcacctttaatgccggtgactgttcattacggctgtcggggcctgaacatccgaagccggaggcagcggtgtcagcatggacagaggcggagttggctcgaaaagaagacttcgtcggccggagcctggctgggccgtccacttgcaggaccagcgtcggagccgagttgccgaggccacgagccgggctggtgtcctcggaggacagctggctgaggcttcggggcagccggccgaggcgtccgctcgggctggattcctggaggaggccctggcggcgatggcccgggcgtggtgctgacgtcgtccttcggagtggagaccctccgaccgtgttgccgtctgaggctcggtcgtacttcgccgaaggtggagttgacgccgagggtgctgctgctccccctccgtcgacttctgagcctgcaggatcggttcatcttgtagtgtgcgtatgttttctgcggccgccgaggcccaaacatactgtcgtcatgttgtaa

SEQ ID NO: 4784 - DNA, 567 bp, Zea mays
  Peptide Sequence Number=SeqID_48159
atggagagtcatgatctccgggcagaaagggaatcacggcttgtgggtggcaatgagattgatggttctggttatgactatggtgctggtaagtggtattctttccgtttggaaaggatggctcgtcttagacacattgcacgaaagtccgtcatccccttcttaccctcccgccttgctgagcgtccgcttcgccgtcccgtggccggacagtccagccacttggagaggctgcaccactgcctgcatgaggagcaggaacatcgacgacaggagcagcagggctcttctttctcgctccagcaggagatagagtccgtgaggagctgctcccatgtgcttcccctggaggcgccccctgcaccaccactaggcgccctagcctctagggtagctgctggaggagacccggacgacggaggtggcgacgacagctcgagccacgacaccgacttctctgctgaccaggaaccggaaggatggggttgctcaacccatcactcgcgacgctgctcgcgggtgtcacttccacgatgcgctcgacaccctgctacgtcgggcacttaa

SEQ ID NO: 4785 - DNA, 333 bp, Zea mays
  Peptide Sequence Number=SeqID_48160
atgaagctgtggaaggagacttccaggagttccaagactacgacgagttctaggcgtgggttagcggcaacccccagtcggctgcctgtgaaggccgcgtttatctacgtttcttttccgcactttgatttattatggctcgacttagacacactgcacgaaagtccgtcatccccttcttaccctcccgccttgctgagcgtccgatgtcagagaacaggcgcagaggaggaaggcgtgctcagcaggagcgagccgctcaacaagaagaggtgccccagcagcagcacctgccgcccccgccaccgatgtccatcgagcagatgtttctga

SEQ ID NO: 4786 - DNA, 411 bp, Zea mays
  Peptide Sequence Number=SeqID_48161
atgccctgtttccaacctgagctggtgctgcctgattgttctgctggtttgctggggcaggaaggcgaggtgcctgctgattctgcctctgaaactgacctcctgactgattgctctgacggttctggtactgatgctaaggatactgcctttggaactgctgatgctgctgaatggcggccaaagtctgaccgatggcttgaactgcctgagtctgcatcagaaacatctgctcgatggacatcgggggcgggggcggcaggtgctgctgctggggcacctcttcttgttgagcggctcgctcctgctgagcacgccttcctcctctgcgcctgttctctgacatctgcagaatgcaaccacacatcagaactgatctggcaaatcttgcagcataagaaaagagtatag

SEQ ID NO: 4787 - DNA, 405 bp, Zea mays
  Peptide Sequence Number=SeqID_48162
atgggttctccgatcaaggaccaaggattagagcccgagcacatggacaagagtgttcctcaagaacaatccggtagtgaaggatatcaaacacctagcgatccttgtcctagcatagatagggccgctcgccgtgagttgcaacgggaccctagttatgatccacgagaggatgaggtcttgtctcaatttcatgcgatactcgatgaagatgaggcacgatatcaagacgcaccggaaccaaccgatacaatcaccgagaggtcaatgaaaaggaagcagagcgatcagaaaagagatgtgagcccgaaaggtcagcacctagctttagaagaggcattgcctaagtttcggaatgcacttgggttcttagttagagataatcttgacatcacaatccgatag

SEQ ID NO: 4788 - DNA, 291 bp, Zea mays
  Peptide Sequence Number=SeqID_48163
atggcgcctcctgttgacgtggctggtctgcgccctaggttgggcgatgtggaagctcctccgaagctgaggtcgagtctgtcttccgtggccgaggtcgagtccgagcccctggttcgggcgaggcggagaccgtcggctgaggccagggcagagtccgagccctggggtcgggcggagcggagttcgtcgtcttctggggctgtgtcacacccggtttttagaaggcaaaccgaatgtgaaccatgtacgtgccaggatcagttattcacgtacacagcagttacataa

SEQ ID NO: 4789 - DNA, 2061 bp, Zea mays
  Peptide Sequence Number=SeqID_48164
atggcgtcctcttcttcttccgctgccactacgccgccggccgccgcctcgtctgaggagacgttgagtagcttgatggtggaggagttgcgcgccggcgactctgttgattttggtgtgtcgcggatgacgtcagcccgcgttgaagatatgcagcggttgggctactttggcggcggagttgctcgtgctccggggacggaggaagtccccgagccggaggtggcagaggaggatgcaaacgaaggggcccttcggtgcgccgccggtcagagcagtgggcgtgatttagttgaagagttcgtggcgtacggggtgtggcccttggcgcatggctgggcgttgggcgaagtgtgccctcgccagatgccctttcacggaggaagggaggtgcgaagtcctgccttcgcactgaatctgcgaaaccgcgacccggccgcctttgtgcgcgatgcggaggacggggcggtgcggctcgtggggcgttacgtgccgaggacggaaggccagcgcagctttgatatccgcgggtcaaatgaccgtttgaacagggtcttcgaattaaatcaattgccgtacgacggctatcctggtcaagatgaagcagaccgccgtgggaagaaaacggcggtggagactggagacgaccctgcgccggcggccgccccttcctcaaaaaagagaaaattaggtactgcgatgggaggacttggggtgtctgatagttttgctagagagttaatgaggacgtgtgcggccccgggggaaaggatgtcttcgcccgagctccgggagtcttcggctcggatgatgagggttaccgggggttgctggcctaggaatgttcctatcccctgcgcggctggcgaggactgttttacatctcgtatggttcgtcagtggagagtttttccttacgggcggaatatcgttgctgttgtgtgggcagtgatggacaaggatcgccaaggtgcggcgcaaaaacgccaggcggctgtcaggctgcatgaagctaggccgaagaggcaacggggggctgcgaaggcgggcgcctctgcacctagcaaggcgccggaggcaacggcgggcgccggaggctccaagttaacgaaggtggtgccgccggccagcggagtggcggaggcttcgaaggcggcccgagcgttgccgttgtcgggcaagcgcgttgcggacttcggcaccgatattactgtagacgactatcttggtgggtcggacgagggccagcttgctatggttgcgcctggcgtggagatcgcgacggcggccatagtgccgaaggcgaggggcgaggcccttgacgccggaggcgaggtgtcggccctcgcggtggtcagggacgaggcgggcgcagcgacccgccggctgaagggagtgacggaggcgctgagtcaggcgacggaggcgctgagtcaggtggctgacttcgccagccgtactgcgtcgggggccctcacggcagctgtgtctgccgaagtcgagagacttcggacacaacatgctgacgctgtccgtgagaaatcggcctccgacagcaagtgccgtaagctgacggacagggtggccgccctggagagggagaaggctgacctccggcgccaactggcggcagagaggagagaggcaaacgaggccatcgccaaggagcaggctgcgcaggcggaggccaaactggcgcgggcggagggcaatcttgccaaggagctcgccgaacatctgcaagagcggcttactgccctggagagccgcgcgaagggggccgaggccgtgatgcgtgcggaggctgaacggacgcgcgctcagcttatggatacatatcgcgagctgggcgcgcggaccggcgacttcgaggtgccggaccgagagcccgggcttcgttgtctgcaatgggtgcaggaggagctgcaggaactccccactgttgtgggggggtttatgtcgtacgcctccctggtccccttggaaggggcggaggacccccttttcccgggaagggtcccgccatttggagttcttggaccagccagagaaagtttttga

SEQ ID NO: 4790 - DNA, 621 bp, Zea mays
  Peptide Sequence Number=SeqID_48165
ccgacgtacgacggcgaagccctagattggaagtatggaagtagccagctagcaataggacgggacgaggacgacctcaaatgtccaggaggccgctatggcactcgtgttaacggtatcagtctgtggccagtcgtcgtctccagctccgacgcctgctccagccccggcgcctgcaacgactcctgctttagccccaataatgccagcgccgactcctgctccgacgcctgcaacgactcctcctgcttcagccccaacggcgccagcaccgacaccagcgccaacaccatcactgacaccagcgccgactcctgccccggcgccatccgaaaaccgattaggcccgtaacacaaaggcggccacgcagggcccgttacaatgggccagatcacacgtgggcctcagagctgaacgaggccgcgctgcgggatggcgtcgccgcaggccttcgtctggtgccgaatggagcgaaaggtgtccccgcccgttttgtctctgtcggaccagcgactgcagcgaaggcctcgagcgaagggtggcgtctttgccttcgccccaacatttgccctccgagggaccagttcgacaaagtcacctggtgccgaagacgtcgctag

SEQ ID NO: 4791 - DNA, 1347 bp, Zea mays
  Peptide Sequence Number=SeqID_48166
atgtgccgtgatgttcctgttcgagggccccttcggatccgtcctgcacatcgccgactgcctcagtgccctgacgccccacctcgcccgccgcatcgactacctcttcctcgcgcggtgctccctgcgcttccccgccacgcaggactccatccgccaggaggacgtcctcgtctcgtcggggtgtccaaggcattcgggtccaagatctacgtcgacagggagaagaactccgactggcaccagaggctggcgcatgtcacgccggagatcctcgccgccaacgacgccgcaccctccacccgcttccacgtcctgtcgttctcgcggctgtcggagcaggccacggagatcctcgcgcttgcgcgcgccgcgcgccagctgaagcccctcatcatcaggccctcctcgcagtggtacgcgtactacgacccacctccaccggaggaggcatcgacgcagcagcagcagcagaaaccggtgctaacggaggccatgtgcgacgagttgggggtctggcacgtctgcttgtcaatgcactcctcccgggaggagttggagcaggcgctggggatcctcaagcccaaatgggttgtttacaccatgtcgtcgtgcatggcggtggaactcagctatgcagtgctgctgacagtagaagctgtcgagaagctcgaggaagtgttcaacgcttgtgctccctctaatgatatcagccaggcactggaggagggtgcagaagcaacagtggttgatttcgagaactatgagtatgagagtgtcgagatcattggtgacgatgagcttgaagccaaggattttgcaaatgagcttgagttttgtaggcatagtaagcctattcaagtggttgggttaactgaagctgcaacaagggaacagaatccggtctctgatgaatctgagctgctgaacgacatcaaatctgatggcggagtagaaagactaaacatgatagagggaacagagaggctgaactggggggcgcaagaacagaacctgaatgctcgtgctcgtttgacggtgggagtttgcaggcataaggtgattgctgacaaaggtacggaagcgattgaagggatggtctcagctgcgcatgttccagaggatggcaccactgttacactaggaacagggaggagcactgatcatcagtactctgaaagggcgagcgattcttcaaccactttcggatcatcgaagggcctcaacgcgagcctgaggaggctgtacaggtcgatgaacgtactggtgtcgcgccccctaccatcgctcgtccaactgatggtggcctccaagcggcccagagtctctcaaactgcgcagtcgtag

SEQ ID NO: 4792 - DNA, 470 bp, Zea mays
  Peptide Sequence Number=SeqID_48167
atggatgaatacatccgagctgacaatgatttccgccagagtagggaggaagcctacagcaaacttcctataggtcaccagccccgagaggcagaggagggaggaacttcggaggaaggagaagtctccgcctcgcccgaccccagggctcggcccccgcctcggcctcggaaggtggtctccgcctcgcccgaccccagggctcagcctcaacctcgacctcggaaggtggtctccgcctcgcccgaccccagggcccagcctcaacctcgacctagggaggaatcacgtcctcgcccgaccccggcctcggcctcaggaggagtctccgcctcgcccgaccttaggctcggaccgaccacgccgcaggggccccttacggaagcaaggagacgtcagcaaggtcccaacagccccgacagctgtgcttctacagggctcaaacgctcctccgacggccacgacaccgc

SEQ ID NO: 4793 - DNA, 291 bp, Zea mays
  Peptide Sequence Number=SeqID_48168
atgaagcagtttgcgatcaatttcaaaaactggaggtctgagatgaatacaaagtttgcaaagaaagacctagacccgacaaacaaatataaaatctcagcaggtgaaagagcccaaaatggccttgcctacacccatgcgtacaggtcaggacggcgttgtgcagccaaccaaacgcgcgtgcaggaaactatttcaacatgggcacaagtcgagaaagcccctaccctacccatacacagcatcaccatagcccatgtgagaaaaatcgcaaccatggtcgggccttag

SEQ ID NO: 4794 - DNA, 624 bp, Zea mays
  Peptide Sequence Number=SeqID_48169
atgcaggtggcctgcaaccgcaccacagagacgcaccccttcgacttcgacgcatccagcatggaggcccaggcccacacgtcatgcgagcggaagcagcagtcaaatcgtctgcagcctcacgtcccctcctggagcagcaggggagccctctcccacggcgtgaagacgacgcgcccgtgttccgtctatcgaacggctcgcgcaacgaccgccccgcgaaccacccgtcccgtcgcattaacttcacgacagggcaagcgacgcccttggcaggcgaagcaggcgttgtttcacctccgccatgatgaccgcgtcaaaaaagccgccccagagcactcgagctccgcgcccgctactgatcaggggttcgaaggctggcccctcgaagggttcgacagccgccccagagcatgcagagtgagggatgactctgggtacgtccgatacatggccgaggctcgggctacgctcccaagcctcaggcgccacaggaagctccgcctcgcccgaccttgggcttcggcctcaggagaagtctccgcctcgcccgaccccagggctcggcccccgcctcggcctcggaaggtggtctccgcctcgcccgaccctagggctctgtaa

SEQ ID NO: 4795 - DNA, 291 bp, Zea mays
  Peptide Sequence Number=SeqID_48170
atggcgcctcctgttgacgtgactggtctgcgccctaggttgggcgatgtggaagctcctccgaagctgaggtcgagtctgtcttccgtggccgaggtcgagtccgagcccctggttcgggcgaggcggagaccgtcggctgaggccagggcagagtccgagccctggggtcgggcggagcggagttcgtcgtcttctggggctgtgtcacacccggtttttagaaggcaaaccgaatgtgaaccatgtacgtgccaggatcagttattcacgtacacagcagttacataa

SEQ ID NO: 4796 - DNA, 567 bp, Zea mays
  Peptide Sequence Number=SeqID_48171
atgggtgtgggcaagggacgacttgtggccgtggtaggagatggacggttgccttcttcttctataaatagtgttcttgcttccccggcattttcacatctcttactgctctctgctgcttgctttcttcttctcccttcatttccaccatgggcaagagtaacaaacgcaagcgcgagccgactcctccatcggaggacttcggcgactcggaatactcgaaggcccatctctcccccggcgtcgtctgatgattcagacgactcccaggggattgccgcggaggtctggacttatatccgggccgtcgagcgctccgggctcgagggctcggatgagtcggagtactcctcggacgaggaggactcttcggactcgtccgaggagggcagcggcggtgatggcggagacgatgacgacgacggaggcgacggtgacgacgacgacgacagcggcggtggcggtgacggcggcagcagcaggggcagcaacggcgtggcagcagcaagggcagcaacaaggccagtggctagatgccactggtctttagatgttagtatagattag

SEQ ID NO: 4797 - DNA, 234 bp, Zea mays
  Peptide Sequence Number=SeqID_48172
atgaaagtaggccgtgtacgtgtcggtggtggccaagggcagggccgtggcgccggtggacgaggcagtggtgatggccgtggaggcggcgatggcggtgggaggcaagggcgcggttggaggcaagaaactcaagtccacgatagtgactccggcgaccctaagccgggcacgaggttgcgcgctcacgacaagcccacgcaggttatctccagcaaggatttgcattcttaa

SEQ ID NO: 4798 - DNA, 768 bp, Zea mays
  Peptide Sequence Number=SeqID_48173
atggaggcccaggcccacgcgtcgtgcaaccggcgcgccgaatgcttcgtgcatgcaactgcaccgccacttgcgccaccaccgcgcctcctcgactgcggaaccaataccgcgactcgaggcgacccagcgcacgacccagcagcgccagcctggcgcgacggtcaatgcggccaaaaatggaccggcagtaatggcggttgcaggcgggcaggagcagcggccccatcgagaagcgggcgacgcttcgccttcgccataatgaccgcgtcaaaaaagggaccgggaaagggggataccccgaaaaggatccttccccgtgaaggaaccaggctccgagcctccctactgatcagaggttcgaaggttggcccctcgaaagggttcgacagccgcctcagatcgcgtgggctctacacccactactggtcagaggttcgaaggccggcccctcggaatggttccaaggccgcctcaggatactcgggctcctcgcccactactgatcagggcgggaacgatcttgtaatggaatcccatcagagggaggcatcgagccctcggaccccgttgccaggggaccgggtccagcagatcacccgcaggcaccataggaagctccgcttcgcccaacccagggctcggactcgggctaagccccggaagacggcgaactccgctccgcctgccccagggctcggacatgggctcagccccggaagacggcgaactccgctccgcccgacccagggctcggactcgggctaa

SEQ ID NO: 4799 - DNA, 369 bp, Zea mays
  Peptide Sequence Number=SeqID_48174
atggcgtcggctggcctttggcgcgacgcggggcacgcgaggtcgggcgtgctctggcgcgcgcagaacgcgtcgaacacgtggaggtgttcatctgcccgtgttcaaacacttgctgagatcgcaaacgtgcgaatcttggcaaaaatccggcgcagacctcttcctggcacctatggctatctctcatatatgaacagtaacaccgtactgttcacgctgacttgtaatcgctcgcacgtcattctcggacttctaccttctgtcaagccgaagaagcttcggctcaatgcaagaacgatgatgaaggatgaaactgacataaaaggaaaagactattcagtcctcaacagattaccttttagctaa

SEQ ID NO: 4800 - DNA, 159 bp, Zea mays
  Peptide Sequence Number=SeqID_48175
atggcgagagtagcgtgtaccctccatggcaagaggctggacggtggtgtatctgtgctctcggtgaagaagcagcaaacttttgttgcttctgttccaaggtggtgccgaaagaagaaaatcaagactaaagctgcgggaggaaaggtcctccattaa

SEQ ID NO: 4801 - DNA, 756 bp, Zea mays
  Peptide Sequence Number=SeqID_48176
atggcccacgcccgcgcctataaagcccccagggaccttaaccgtacccctccgcgcacgctcgacctcaccggagctcaaactcaccggcgtttgcccgtgcatggcgtgtccgcggccacccaatctccctgccaccgtagaccggccaaccgagcctttcccaaccctgtccgaccctcggagaagactgagcacacctcggtgaagctccccgagcgaggaatcggagtttgcttcgccggagaggccagtccacggtcgctggactccatccgaccgccggcgagcgtagaccggataagcctctactccattcttcgattccttgtgcgcacgacctctacgtcaccccgtgaagctcaccgtgccattggattgaaccaggtcgccgtggtttggccggctcacccgccgccgacgagagcacccgcctgcgcacgtggaccgggcgattccggccacccccgccgtcaagccgtacaccgttgtgaccgccagagcctccccgagccaaccccgcccctcgccggacctctctcgctgccgactttacccctcacgcgacctgagacgtggtctcccattccggttatggtgggtacaagcgcggtcactgcacgacggcagtcggggtcagtgaggcattgttctttggaggacatggttgctggagtgacttggccgtccatcttgccaccgggttggactgtcgagtgggaccctgcctcggctgaggaggagcatgaggagtga

SEQ ID NO: 4802 - DNA, 768 bp, Zea mays
  Peptide Sequence Number=SeqID_48177
atgaggtcaatcttcaatttgccgaagggtaaatgtccagatgagttggttaaaatagtatggaataataatatgtccagttggatagaggccccaaccgtctctgaagttgtcgaggcaaaaatcttgctagctgaaattgttgttttaaaggacaagggtctgaccgctaaagctatgagttctttttctgagtttgtgtctaacccacctatctgtgaagagggttgcagttctaggaatagaatgtggccttctttggacaagccagtaatcgaggccaagctgaacccagatgatgacgtggttgatgctggtttggaggatgtcgtggaaggtggacatggggtgaaaacgactaggtttgtggtggatgtggaagatgaggaggaggaagagggtttatctatgtcggctgtcgatggtatacttgaagagggcgttcatgaggagctactgcttgagttacctgaaatcaatgttattgatgtctgcatagattacccggatgaagtaccttccacttgtttgatggctgggccagaggtcatggaattaccactagacgcgcagagcagcggaagacgtctcgatgtagacgaacacgtcgagcagtgtcgtgcagtcgtcggcgtccttcacgtcctcgcacggttcgtcctaatgctccagatgcagcaccttcgaggtatccacacgtacagggaggaagcgccgcgtaccgaactgctaggttcgcgacggcggcttggcgagggcgagaggtga

SEQ ID NO: 4803 - DNA, 117 bp, Zea mays
  Peptide Sequence Number=SeqID_48178
atgaccgaggcgcaagcaggggcgatgttctacggcgacggcgacggcttcctcacattccgcttcaattccgacgatgctggagctttgcggatagaagatgcctttaaagcatag

SEQ ID NO: 4804 - DNA, 1701 bp, Zea mays
  Peptide Sequence Number=SeqID_48179
atggagatcagcgccaagcccattgatgtggttcatgaaatctttcttgttatctgtctccttccacaccaaggttctaaactcatggtgaagctatggcgcattggcctcacgcacccgttggaccccgatgtcaggcggtatggagcatatgattgtggcaagcgccaggtgatcgtggcagtagacaatatcctcgccttcctctggctcagcagtgcaccaccatcatgtgacctccaagttcacccggaactcttctccggcattgatcgtggttttggcgaggatgaaccaatcaccacgagctatcaagaacacgcgctggtcgcccccggcgtccgccggtgcgccttggcttggtgccccccagcacatggccatgggggccctcaggcggagtctgtgggtcttcttcaatctttcgttggtggcaaggcagacttattcagggtctcacaacttgcggatcgggtctttcgtttttcgctttcttgcaagatcgttggtttcacagtttatcagttacgctcctattcctgctccgtgttcaaagcttatctgcacctttggaattctggcggccctaattggttcattgagtggcaacgttattcagtggaagaatctaaatcttggaaactggtttcacatcgccgttcttccacgacatcgttcgctactatggctcgaaagccagctctgtcaggtgcaaatttggttcctttgggtcgaccgatgaggtctattcgttcttcctcaggattgaagcagcggcactcggttttcgatcggatttccttcccccttcacactgtcagtgatcatggagttgatgttcgtccacattttcaaaattattcaaatcgcagaatcggccgcaaggattctgtccccagccttaatggctctgctgtcccagcggcgtcgggccaccatcatttttgggatctttctctcccaggaaataaatcacaattatttggtctctcgggacagaagtgcaatcgaccggttggctctttccccaataagtttgcgaatgcctcctggggcggttctttcgagtaccaacgcttcgccttccatggaacttgcactgttcacaaaaccccattccgctacgctgccctggaagaatccgtcgccatcaacctctctactgagtgtgattggggcattgtgcttgttcaacctttgccggagcatgaggtcaacttccacatttttgatgatatcatccgtgagtatcttgtggaggcccgacgtgttcaagtcaggagcattcagcgctcccatttgggacaggctttggtgcgattcagggagtctcttggactgttcaatgtgacatcgtgcaacaatttatgcttggtgcccaacctcaagataaggaccccgtgcctccctaccctcatgatggacaccagcttccagttgagtttttttggaatgggtcagccagtgcccaattttcagtttgatctcaatattcctcccatggaaggggtcaatgctgaggaagatgttgcaattaatgctgatgaaggttgggacccttggccagttcagcaggctcaaccccctgcgccagtggtcattgcaaataatgcaaagggagtccagtttcagcaggaagaagccccggtgctggctggagcagttctctcctttgcctgctttttcctcccgaaaacatga

SEQ ID NO: 4805 - DNA, 552 bp, Zea mays
  Peptide Sequence Number=SeqID_48180
atggcggtgacgtacacctgcaggaactccgacgggttcgacgttccgtcgtacttttccggcagatgcggccggaacttaggtggtcatgacgccgcgcagagcgaagtcttgatcgaggttgcgaccaccgatgttttggcggcgctcgcgcgccctttccaaggagactcgggcatcctctcccgcacgcctgcggtcgagttctgcccggaggtagaatgcgccataccgagtagtcggtcgacgtcgtcccgccattgcttcatggaccctggtgaggccgtggagcttggagggtgtcgcaacaactccctggctactgacaatgctcgtggggtcgccctcgatggagtccgggacgtctgtgcagccgtgtgctgccgtgcggcgtgcacagcagcagtgcctggcacatggcgattgggaacctgtggtgtggaagaggcagcttctccctccaccgcgaaatctaccgaagtctcggcacggtgctcaacgatttgcaccatcatgctcgagcaaggaaacaagcaaaaacctaatgcctag

SEQ ID NO: 4806 - DNA, 387 bp, Zea mays
  Peptide Sequence Number=SeqID_48181
atgagcgcgagctctccggtggagagaccgccggagggggcggccctgacgcggatccctctagagaccaccgacgcaccccatctggaggcccggaaggcggaagggcgcgatgaatgcaagaggagcgagacatgggctactgcccgggagatcgacccctttttaaaggcagatttccccactcgtgccctgaagcgtcaaggggcaaagtctccccccgacgtgcaccagggttcccaccctatgacacgggggctaggcccccacatgtcatacagaccgacccgaagcacgaagaaggcgaaccaccgcacaaggagcgtaaaaatcgcactgccgctcgcgccaatgccacgtcttctcggggccgtcatggaagactga

SEQ ID NO: 4807 - DNA, 852 bp, Zea mays
  Peptide Sequence Number=SeqID_48182
atggccacagccaaaggcgagggctcccgtgtcaaatgcagtggggacccagggtcgggacctagccctatggcaagtaccaaaccaagaagggctccgcaactctcccccagctgggaaggacccttcaaggtaacgggaatgcaccgactcgagggcaaccatctagctacgactgaaggagtgccttaccccgatgccggaacatctcttactcttgagtaccttacaaaaagcgaaagtattacatctgtttccaagcggagccctagctccatctctactctacaggtggcactgatggtctcgctagcagaggcaaccacctctgcaacgggcagcctcactagcggcggcgaccacctcagcaccgacgacagcggccacctctacaccggtgggcggcggctacctcagcacgcgcgaagaggtcctcgctcccgtcctcctgcgggagtgaggacaagaccgtctaagaacgtggtcgccgcccccacggcgtacgacgtcttgtacggccccccggtgcggccaccagcgcgggagaagctgtggatgtggcggacctccacacggcgcgaccgtcgcccatgcggtggacggacagccacgccccgaccaagcagcaggaggcagcgccagaggcggcaccaaagccatccaggccaaggagccagacacgcggtagctgacggcgcctgcagccggccgaccctgcgtagccgaagttcgcctcctccgcaaggctcgtggacgcccttatcccccgaatgctggaggaagaagcgggtcgccagcccatgcggaaggcaggaccccaactcggctcgccctcttccccatcgcggatga

SEQ ID NO: 4808 - DNA, 582 bp, Zea mays
  Peptide Sequence Number=SeqID_48183
agccacggcggcgttcggttgggccccgttagacagagccctgatcacggtggtccccaagaaggagttgggcctcgggtggtgcctcacgaggcgctccgcgtataagacgtcgcgcccggggcccgcgcagaatgcgacggcgcggctggcggcgaaggggtccttggcgaggcccggacttgacgagcgccgcgtggagctggcgcaggtgtgccatggagacgcatcgcgtgtggaggagcgtgagggcagggtcggaggcgatgaaggcggatatggaggcggaggaggggaggagatgaggaggaccggtggtcgagagagcactcggcaaagaaaagcggccgttacggcgccgagtgacggagacgacggctttgccgagtgtcttccaggcagcactcggcaaagccgctgtctttaccgagtgccaaaggggacactcggcaaagagcctgccagggagggtcccattgtcaagctctttgccgagtgttctgtgcggcactcggcaaagaggtcggctttgccgagtgccagcgacataacactcgggaaagaacctaagccggtgcccag

SEQ ID NO: 4809 - DNA, 765 bp, Zea mays
  Peptide Sequence Number=SeqID_48184
atggctgaaaggtaccaacttccacgaagttgcgttcctccaacgacaaggcggaaggattgcgggtgttccccatccgggggctcggaaggtggaaagacgcgatgcataagggagcgtgaagacatggtcgcctttcaaggggatcaccctccttttaaaggcgactctccccacttgtgtcctcagccatcgcgggctgagtcttctccaacacgctccaaggtcctcccctacgacatgggggctgggtcccatgcgtcatgcaagctggcccagggcagaagaagccaaaccgccgcgcgcggtgcatgcaactgcccagcggttacaagcattcctccacttttgcctagaccagcgggtgaaagggcggacagccatgcagtcggcatgcaaccggccaagtgggcgcaccccttcgactccaacgcgcccagcatggaggcccaggcccacacgtcatgcaaccggcgcgccggttgctacgtgcgagcaactgcaccgcccctcgcgccactgccgcgcctcctcgactgcggaaccagtaccgcgactcgaggcaaccctacgtatgacccaacagtgccagccaggcacatcggtcacgggccagttagccgcaggagaaggcgcgacggtcgatgcggccaaaaatgggccgacagtaatggcggtggcaggcgggcgaaagcagcggtcacgtcgttagccaagctcacgtcccatccagggacagcaagggaaccctctctcgcggcgtga

SEQ ID NO: 4810 - DNA, 447 bp, Zea mays
  Peptide Sequence Number=SeqID_48185
atgaacaagacaccggcactcaaggtgccattacaaatggaactccggttccgtccccgcgggtatgaacaacctccacaccggggagcctgcggggcgacaagctccgtgcgactcgccggcgacctctgcagcagcagctatggtcccaggacggacgcagccaccggaaggctctcgttcgtgtccccgctcaagggacgcgaaccagacattaaagccaaagagccgaaggatgcctcttccgcagagctggaggatggtttccaccaccagaagctggaagaggaggtggccagccgacccgcgcgggaggtagagctccggctcaccccgctctccgccccagcaaggatgatgaggatccttgaagctgagggcgggacagagaccgcagcccggcttgcttctcccaaccaaggagctggtggtcaccgtcttgggtga

SEQ ID NO: 4811 - DNA, 144 bp, Zea mays
  Peptide Sequence Number=SeqID_48186
atggacgagtctgaaaaaggagatcggcctcctgggactagtaattgtatcacatttgagtcccagaggattggggacgcttcaccagtctacttcatcagtgaggtactatccgagaccaagatccgctacccacaaaattag

SEQ ID NO: 4812 - DNA, 471 bp, Zea mays
  Peptide Sequence Number=SeqID_48187
atgaagaacgaacggcgcgacgtcggttcctgcggggtgtcggggcgtctggcggttcggcttcctgggccatggcgtggtcagcagctgcaggcgcgggtcgctcggctcctagcgcgggggagggctgctcggtcgcggcgtcggctcgggtgtggctcggccgggcgtcgggtgcagggcgtgcgttgggtcctggcgtcggtctgcagctgcgtcgcacgctgggcgcggtcgtgctggttcctgggagcggcggcaggagatttcgaggaggcagaggagcggcgacggcctgtaggggagcgaaggagccaggcagtcgtgggtgtgaagagatgtggcacggcggctagttcagaattgacgagtagagatgaacaaaaagctgcgcgagggaaggagatgacgcgcatgacgagggggtcccacctgttaaaaaggaaggcacacgaggggccggctacctag

SEQ ID NO: 4813 - DNA, 324 bp, Zea mays
  Peptide Sequence Number=SeqID_48188
atgcggagttcgtcgtcttccggggctgagcccgagtccgagccctggggtcgggcgatgcggagttcgtcgtcttccggggctgagcccgagtccgagccctgggtcgggcgaggcgaagcttcctatggcgctcgaggccggacttggctgctatcagccgcactctaccgagtggcgcagcagccggagcggcgcaggcggcgctgtccttttgtcaggccgcaatgctcagctctaaccatcctctttggtaagccttacacttcacgtgagctcccacctttggcgagttcatgcacattattccccacaacttgttga

SEQ ID NO: 4814 - DNA, 579 bp, Zea mays
  Peptide Sequence Number=SeqID_48189
atgaacaaagatggagatttgcagaatggaattggggttcagatgggtcagattcaagtgatagaaatcaaggagaccgcggaaaaagggggaaataggaagagcaagaccgcggagaagaaaaggaacataaacaatggattcgtgggtgtcctctgttggaacagtgaccccgtggcaaatccgccaagaacagagctccttcagaggaagaactccgatggacacgagatggagaaggtcagactcagaaacaacagacatatggttacctacgaaaggcaactggctgttgggattgatggggggaatgacagcaacggacgaactggaggctttccgcttgggcgccatctcaacctcgccggcgagcggagcggaagcagaatcgcaaaagggcagagagggcctggatgcaggaaagcaagaactagggcacggaaagcagaggcgcgcaactatgcagtacatatgggttttctcaggccagataccgtttccaaaaagtgcccagtcatcacccggcagttatttctaaaacgctggcgtgccatgtcgtcactcagctgctatttctaa

SEQ ID NO: 4815 - DNA, 465 bp, Zea mays
  Peptide Sequence Number=SeqID_48190
atgggcaagagtaagaaaggtagcggttcttcgcctcgctctggtgacaagcgcaaacatgagccgactcctccctcggaggacttcggcgactcggagtactcggaggaggagttctcctccgagtccaaggggtctccgactcccgtctctcccccggcgtcgtctgatgattcagacgactcccaggggattgctgcggaggtctggacctacatccgtgccatcgagcgctccgggctcgagggctcggatgagtcagagtactcctcggacgaagaggactcctcggacgaggaggactcctcggactcgtctgaggagggcagccgcgacgatggtggcgatgacgacgacgacagaggcgacggtgatggcggcggcgacagcggcaggggtggtgacggcggcagcaagggcggcaatggcggcggcagcaagggcaacaacaaggccagtggctag

SEQ ID NO: 4816 - DNA, 867 bp, Zea mays
  Peptide Sequence Number=SeqID_48191
atggagttgatggggacgtgcgcagcccccgggggaaggatgtcttcgcccgagctccgggagtcttcggcgcgaatgctagaggttaccgggggtcgatggcccaagaatgttccgatcccctgcgcggctggcgaagacttctttacgtctcacatggttcgtgacttgaaggtttttccttacagacggaatattgctgctgttgtatcggtagtgatgaagagggaccgtcaagatgctgcgcagaaacaccgggcggtcgtcaagatcgcggatcctatgcgcgaggcaaagaaggcgtgggggagcgcgaaggctgctgcctctggcagtagcaaaccagtgccggttgcaaaaccggccgccgtcgggcacaacaaggcgtcggcgagtgcgaaggctgccgcctctagcaggaggttgggtgaggggcaactggctgttgtcccacctccggtggcaaccacttcaccgacggtggtggttggggcgaaggatgccgcgcgggacccgtgggccactttctgcgcgagcggcgagattcagtcggccgctgccgctagggacgtggcggtcgacttcgccgaccacgtcgcgtcgggtgccttgacttcggacgttgctgtcgaggtcgaaagtctccaggcacagcatgcggatgttctggcggaggagaggtgggaggcgaacaaggccatcactgatgcgcaggctgcgcaggccgaggccaaagtggcgcggacggagggcggtctcgcccgccaacgcatcgaggagctggaggagaagttcaacgccctgcgcagccgcgtggacaaggccgaggcctcgacgcgcgcggaggtcgagcggacgcacacgtag

SEQ ID NO: 4817 - DNA, 318 bp, Zea mays
  Peptide Sequence Number=SeqID_48192
atgaccgttggtggaggctgtctgtcgtatggtgcaccggacatgtccggtgcgccagccacgtcaccaattccgttgggattcgaccgttggagttctgacttctgggcccgcctggatgtccgatgcacatcggacatgtactgttcaatgtccggcccctcggcgacccccgtgccgactgcggccggcgaaatccccgcaccaccccctgtgccgacgggcgaagacgcctcgaaggtggtggccgagctggcagccgagccggcggccgaagaccccacaaccgcggccgggccttcgcaggtggctgaatag

SEQ ID NO: 4818 - DNA, 183 bp, Zea mays
  Peptide Sequence Number=SeqID_48193
atgcaggcggcatgcaaccgtgccgagtgggcgcgccccttcgactccaacgtgcccagcatggaggtccaggcccacgcgtcatgcaaccggcgcgccggttgctacgtggaccgggaaagagggataccccgaaaaggacccttctccgtgaaggaaacaggctccgagcctccctactga

SEQ ID NO: 4819 - DNA, 447 bp, Zea mays
  Peptide Sequence Number=SeqID_48194
atgggcaagagtaagaaaggtagcggttcttctcctcgctctggtgacaagcgcaaacgtgagccgactcctccttcagaggacttcggcgactcggagtactcggaggaggagttctcctccgagtccgagggatctccggctcccgtctctcacccggcgtcgtctgatgattcaaacgactcccaggggattgccgcggaggtctggacctacatccgggccgtcgagcgctccgggctcgagggctcggatgagtcggagtactcctcggacgaggaggactcctcggactcgtccgaggagagcagcggcggcgatggcggtgatgacggtgatgacggaggcgacggtggtggcggcggcgacagcggtaggggcagcgacggcggcagcaagggcggcaatggcaacggcagcaagggcagcaacaaggccagtggttag

SEQ ID NO: 4820 - DNA, 405 bp, Zea mays
  Peptide Sequence Number=SeqID_48195
atggcgacatccgtgaagcgcagccacagctgcagatgccaagtactcttcctgcttgcgttggttcttctggcattcgtctctgcgagtcctacacccatcagcggcaacccgcccgtcgtctgggtcgtcgtcgagcccgccgccgacgcgcccgccaccgccgaggtgctccgcggcaccgacatcatgtacaggcacctcgccttcaagcccgaggacaacttcaccaccgccgacaccgaggctcacgtgcagcggaacgccgcgctcgcgcacgtcgagaagcaccgactcgccggcgtcctgcacttcgccgacgcctccggcgtctacgacgtcggcttcttcgaccagatccgccagatcgacgccagattgataaactgtcacacccgtctttaa

SEQ ID NO: 4821 - DNA, 1563 bp, Zea mays
  Peptide Sequence Number=SeqID_48196
atgactttgcttggccatcccgaccgctttcagttcgaggaggcactcaacctagtgcgcggcctgcttggatggagcgcgccggggctcaccggaagaatccgtgccggcgccgtcccccacggcaatctcgccgccggggagttcattttgttcacatcctacatctcctgcgggttggcgatgccgatctcgccattcttcctgctgctgctggaggagttcgggcttcaacttcagcacctcatgccccactccatcctccaagcggaagaccagagaccacatcggggcctactacttccagacgaggccagatccggccgtcgtctacatcccacccttggtggagcgaggtgggagaactggcgaagcgactgggtgatcgccagcgccgaggccaacgaccgcctcgtcctgccatccgatgggccggctctcgaccgcaagcattggaggaccaagccgtccctggcactggagttccagcccgtactggacaggatcaagggcttggctacgggcggcctgacgttgatgcacgtgggcatccctgcactctgcgacgacccagggctgaggacgacaatcttggccacgctgccgaccctcgacgagagcggcgtggcggttcgccagaccggcggccgggacccccaccgggggatctggatctcaaacacaccggctggaggtccccagcccgctggtgcggccccaatgccccgccgcggcccccagccccttggacaagggggcaccagcagcagcaacaacagcagcagcaacagccacaacggcagcattagcaacaacaacaacagcgatcgccccgcttccagggtcgctggaaagtccagggccccaaccgctgcccagacagcgccagcggcttctcatgttctagccgggggtccggcggcagcggcgccagcatcaggcggcgtcgcagcgacagaggaggtcccgactgggggatccacacccgcctccgacatcacgcccactcccgacgttgggggtgacaccggaggtgcgtccagctccaaccccccgcctgcaccgaaggagatggaggtggtgttcgggcgacggctctggtcaggtgtcgaggaagaagatgcgccaatccccctcccccgcaatctgtcccgcgccgaccatgtccttagtgacactggggcagcaattttgcgggagtgggaggtgcttgaggctgagcaccagcgcctcagcgactggtgcacccaactggaggagcgcaccaggacggcgtctcaccagttcatctccgagcggtcccaactagagtgggaccgcaaggagtacaagaaggacctccagaaggtgtatgccagggagctggaggcgcaccagagggagaagaaggtggccaagagggaggaggccttgagccagagggaggccctcacaacagagctccgggccaagctgaatgccttggaccagaccctggaagcgcagcgggtccagcaggtgaaggttgtggagaggctacaacagtggcagcatgtgatacccaattttcttaaaagaagttaa

SEQ ID NO: 4822 - DNA, 576 bp, Zea mays
  Peptide Sequence Number=SeqID_48197
atggtgaatggcagcactgcggtcacgccgaacttcggtaaggaatttgtgcccccccggggtggacagagcccccgattcgcccccgtagatggaggtgaagctggtaacatggaggactttgaggagttccaggactacgacgagttctacgtccactgcgtcacacggtgtcaggagcaggagctagagcagcaggactctcccaccttgcctcagcgggtggtggagtttgagagaccgccttcccctgcacctcagccagagatgccccctgcaccacctcagggcatcccagctgctagaggagaccctgacagagacggagacaatgacgacgctggtggcagttcgagccacggcacggagcgctcggaggagccagaaccagaggggttatacccggaccagtggaaaggctacttgcttggtggtgccgtccggacgatgatctcctcggtgcagaggccttctcagagcactattctatcactgagagggatactgtcaaggcagccatgcaagatgcagcacgacgagcactttctcagtattgctcgttgttcagcggggtag

SEQ ID NO: 4823 - DNA, 468 bp, Zea mays
  Peptide Sequence Number=SeqID_48198
atgcccgagccaaagttcaccggactttgcctcgagcacgccgcgccactgcccgccgagccacccgagcctcggccactgcggccagctccctccagtcacttccaagtcgcgccagtcactcggccgaattcctcttcactgacgagctcccccgcctgcgcacgtggaccgacctactccgaccaccacagccaacgatccgcacctcgacgtgatcgccagagaccctcggacctcacccgacccttcaccggagtaacctcgccgccgatcaccatttcgtactgtaggaccctgaacttcattgggtgcaccgaagattgcaatctcgctgatggagagtacgtgctcatccctgagcaaggagctgtccatgaggaagaccaggagcaagctcccgagactgccatcgaggatctcctcgcagccccagcatttgaaggcaagtcccggttttatgcataa

SEQ ID NO: 4824 - DNA, 351 bp, Zea mays
  Peptide Sequence Number=SeqID_48199
atgcaggggcactacgtccccacacacatcaaccgtccccatcgattccccgtcagcagatcagggctcaccgccttggcgtacaatgcctcactgaccccgactggccgtcgtgcagtgaccgcacttgtacccaccataaccggaatgggagacctcgtctcaggtcgcgtgaggggcaaagtctactgccaggttcaatcaggtactaggcttaccgatttaccatatttctcggttatgcataaaaccggggcttgccttctaaagcagtggcaggcaggtcctctggtgcagactctggtgctggatccgggactacctcctgagcaactccttgctccggcatga

SEQ ID NO: 4825 - DNA, 384 bp, Zea mays
  Peptide Sequence Number=SeqID_48200
atgaccaccagccttgtggcggggaaaagcatgccgggctgcggcctctctcccaccctcagcttcaaggatgttcatcatcctcgctgtggtgggaggtgggttgagccggggccctaccctccgtttgggtcggtgacccgcttcttcctccagcattcggaggggaagggtgttcaccaatcctacgggaggggtggaccttggctacacggggtcggccgactgcaggctgtcagctacagcgtgtctagccctttggggctggatggctctggtgccgccttcgacgctgcctcctgccatctgggcgcactaggggttttagtctgggtggccaagttgcgtttccggacccccttgggtcgtggttctagatattag

SEQ ID NO: 4826 - DNA, 1215 bp, Zea mays
  Peptide Sequence Number=SeqID_48201
atggaggaaggcaaaactgtcgatactttggagggagcaaacccagccagcttagccaataaggttgcaaaagtagctgggcctgctagtgttgctgagtctgctgtacctgctagccttggagttgctgctggacctgctgtacttgaaaacatccaaaagatggcacagcgaaatggatcttctgctgttgaaagcataagctctggtagcacagaagatgcattgaataagcgattggagcagcttgtcaattcccatcccgtgtttttatttatgaagggaaccccagagcaaccaaggtgtggtttcagccgtaaagtgattgacattttgaagcaggaaggggtgaaatttgggagctttgacattcttacagacaatgatgttcgcgaaggcatgaagaaattctccaactggcccactttccctcaactctactgcaaaggtgagctgcttggtggatgtgatattgttgttgctatgcacgaaagtggtgaattgaaggatgtttttgaggagcacaacattacccttaaaccacagggaagcaaaaatgaagaagcaggtgaacctgagtctgcaactgagaagggcagtgcagtttctgaatcaatcaagcttactgatgctcagaaaactccgttggaaagccttattactcccagcccgtgtgggttcagtgggaagctggttcacatacttaagcaagagaacattcctttctccagttttgacatcctttcagatgatgaagttagacaggggctgaaggtcttctcaaactggcctagttaccctcaactgtacataaaaggtgaactggttggcggctcagacatagtgatggagatgcataagagtggtgagctgaagaagatactatctgagaaaggggttcgtcaaaaaggaaatctggaggacagattgaagtccctgatttcctctgccccggtgatgcttttcatgaagggcaccccagatgctccacgttgcggcttcagttcgaaagttgtgaacgccttgaagaaggaaggggtcagctttgggtcctttgacatcttatctgacgaggaagttcgacagggtttgaagacatactccaactggcctaccttcccccaactctactacaagtcggagctgattggtggctgtgacatcattcttgagatggagaagagcggagagctgaagtcgaccctgtcaatgtag

SEQ ID NO: 4827 - DNA, 258 bp, Zea mays
  Peptide Sequence Number=SeqID_48202
atggctcaactaaccggtccttgcgcctatatgatgggagggttccccgaccgcgctgaccataccctgaaccaccgagccaagtccctgcgtcggtgtcaaccaaggagatcggggatcatcggctcagcggcaattcctcgccgttgcttgttcgtggccgcaaacccgcgcgacgaacaagccactgtggaatctgaggttcaacaagtagagatagcggagcaggagctcattgaaggcaagttgtgtccttga

SEQ ID NO: 4828 - DNA, 948 bp, Zea mays
  Peptide Sequence Number=SeqID_48203
atgacttcccacggatcctccgatgacggaaatgcactgacccacactgacggacttgcacgagagggctttccccgtattttgtgggaggtacttcagggggctggatacacgacaccccctcagtacgcggtgcagcagttcgagaagcaccgagtgcctcgctgtcgggtgaggatgaccttagagcctcatcccctgcagccgggatggcgctctctggactccgagtctttcggataccgggcagaggacacgatcgaggcgatcgctctgcatggatttactaccttctgcggatttcatcccttggagctggctacccaccccattggcttgttccccgctgagaaggaggacgacccaatgtggaaggatcgggtggagcatgccaaggacatctgggccatctacccaggtcagactgcgcacttgacagtacggtgcatgaatgctctgtaccgtctgcaggtgatgcgcggtgaggcaatgtcccatctgatggcactgctggaggcaacaaagatcacgttggataacagagtggagctcatggttgatttatctcaagaaatggtggagaaggacttgcaggtggaacagctatccactgatgttcaggagttggaggagctggtgggcaccgaggagaacaccatcgaggtcctagaggatcagctcattaacactcagcagcagcttgctgaggctaacaagcacctggacatgcatcaccaggagatccaggaccaggaggccaacgaggacgtcgacattgaggggggagatgagcctgcctccagtgtggacactgctggctcgggaagaccaccttccccccgagtcgagtgttgcttcgttcgctcactaggtgttcaggataggcttagaagttggatagtcggactcctcgcagctagcttagcttttgcacccttggggtactag

SEQ ID NO: 4829 - DNA, 234 bp, Zea mays
  Peptide Sequence Number=SeqID_48204
atggagagtcatgatctccgggcagaaagggaatcacggcttgtgggtggcaatgagattgatggttctggttatgactatggtgctgattgcaatctcgctgacggagagtacgtgctcatccctgagcaaggagttgtccatgaggaagaccaggagcaagctcccgagactgccatcgaggatctccccgcagccctagcatttgaaggcaagccccggttttatgcataa

SEQ ID NO: 4830 - DNA, 300 bp, Zea mays
  Peptide Sequence Number=SeqID_48205
atgaggtctcccattccggttatggtgggtagaagtgcggtcactgcacgacggccagtcggggtcagtgaggcattgtacgccaaggcggtgagccctgatctgctgacggggaatcgatggggacgattgataaactcagctagtgcttttggcaacccaaccccacagccaaatagctgcatgtctagaggttctctggaggagatggttgctgggataacttggccgtccaccttgccaccgggttggactgttgagtgggaccctgcctcggctgaggaggagcatgaggagtga

SEQ ID NO: 4831 - DNA, 147 bp, Zea mays
  Peptide Sequence Number=SeqID_48206
atggcggggagcgtccgagaggagccagaagtggagcaccacttgcgcgtggagaaggcccacggctatctacggagttactcgaccgagtttaagggaggcacatacaaggatgctgagccccagcatgtgggcccaggagcataa

SEQ ID NO: 4832 - DNA, 264 bp, Zea mays
  Peptide Sequence Number=SeqID_48207
atgggagagtgctggacccctggatatacagtccggacctccaaggttggtccaggacctccacgtgtgcaagtcggacccctggaatgggatctggacccctcgtatggggtccgggccgcccacaatggggtcccaaggcggcatgctcagtccacgatacgtgggccgagctattactcaccattacttgcacgtttcggctatcaatgctgcatggactgctgtcatcaagactcccggtggttgctcaggcattactag

SEQ ID NO: 4833 - DNA, 816 bp, Zea mays
  Peptide Sequence Number=SeqID_48208
atgcggtttcatatccttagaggtatgaaggcagaagtcatccttgcatttgcagacatttgcactcatgagtttgatattattttacttgctgagatgtgtcatctcactcttgtattactcaatgcagtagaattccggggtgtttgtggaccccggggtgttacacagcaggagctcgagggcaaggccagtgaggccgccctcgccgaggagaacctcaaggcgaagggagagtccttagataggcgagagatggacctcgctaggtgggagacggatctcggcttcagggaggaaatgctcacgcagcgaggcgagctgctagccgagcacgagctcgaggcagagaagaaagaaaaggagttggaggagcagggttcccaagaggtggaggccaccaggaaggcccttgaagatctccagacggagcaccgcagcggggtccagcgcatcgccgcgtcggccggcgaggcgagcacggcactggtgccgctagggataagccccatcccggtgtcggagctgcctgcgtcgatctctgaggcgctcctggtgctggactccgccgctaatcgcctccaacacctggaccagatcctcggcgcccgcctagaggtagagggcagcaagctctgctgggcggtgattgagtatatcttgacatgcttccgaagtcacgacccgaccatatctttggagctggtgatcgctggtccggtggccaccactgaagacgccgcccgagagagcgtacaagacgccatggagctggtgggcgagcgcttccagcgcgaccctactgatgacgagtag

SEQ ID NO: 4834 - DNA, 507 bp, Zea mays
  Peptide Sequence Number=SeqID_48209
atggaggccaacgaggatgtcgacatcgagggaggagaggagccaaagcctgcattcagcttggacactgctggctcagggagaccaccttccctcgagtcgagcgttgcctccgtcaaccgccacctcagcactatggtggtggtgaccaccatcagtgtcccccagcagcagctacttatcaggagttcctcagggaatcgcactgtgttgcagtacgctcaggccttcaatgacctgtgtcagtatgccggatatcatgcagacactgatgagaagaagagggataggttcaggagggggctcagcactaagctccgcgaccgtctcaacaccatcagggccaacaattacaatgagttagtcaacatggccatttcccaggaggactgcatcacatcccgtcagacagcaaagaagagaaagacccctgtggcaggatcatcagctcagcctcagcgcttcagaattgtattcgaccctcagaacaggggacctcagcagtag

SEQ ID NO: 4835 - DNA, 1110 bp, Zea mays
  Peptide Sequence Number=SeqID_48210
atgaggatgatccgcaagattaatctaatgggtgtgcccctgcaggtagaggatattctatttaacattgacaggaaaaagcaaagaaagagagaatgcttcacatgtggggagaagggccacttcagggacaactgtccaactatggccgaacccaaaaaggggaggagtaaaggcaaggcgctaacaagtgtcaaaacttgggatgattcttcaagcgaagatgaacctccaaggatgcgcagccaccgatcctcatcacgttcatcacgatcatcacacaaatgccttatgtcaagagcatttgcaaatttaaactgtgagctatcaactaaaattgagcaactagagtctagtgctacatccacagctaccgatgatagccttattaaaaggaatgaaaaacttaaggctaagttagctagctctcaagaatctattgaaaatttgctagggaaaatggaaattcttagcatacacaataatgagctaactactaagctagaaaacattggtagcaccccagaagtatctttggttgaaatacctgaaattattaagaaagatgcttcctcttcctggtttgatttaattgatgattctaactcttgcaaccaagttcttgttgagaatattgttgtagaaacatgttcgaatgaggttgcaaaggaaaatgagcaattaaagcaagaagtggatcgccttggaaaagccttgtatgacaagaaaggcaaagccaaacaaatccaacctccacaggataacaccactgcgggagtgaacaagcctgtggagggcgaatctgtgatttgtaggctatgtcacaaagaaggacacaagtctttccaatgcaaagcgaagaccagggataaacaaaaggaaaagctcaagcaaaatccaacaagcaaaatctacaacacctacatcaaaaaggtggataaaaaggttgctacaccatatttgatcaagaaaaagaatggaaaggtgatagcaatcaaggccaacaagcaagccaataatgggaaaggggccaaacgcatctgggtgccaaaggaaataatttcaaccatgaaaagcaccaagaaggtttggatcccaaaagggaagtga

SEQ ID NO: 4836 - DNA, 1803 bp, Zea mays
  Peptide Sequence Number=SeqID_48211
atggggaacagtgggacaggcgaagggatagggttcggggacttgcctagaccctggagagaggaagctgctgatgggacgtcgagctcggcacgcgagttcgcctatccggtgagccggaggggaccgccgaggatgttttactcgcacacgatcctcgcgcggaagagcccgctgggcaccgtgtggatcgccgcccacctcgagcgcaagatcaagaagccgcagatcgatggcatcgacatccccacctacgcagggatttttggaagcatctggtggagggttaaaggtgcggtgttccctgtggcgcattcggtgcaaataactgcgtatatgatattcccaattagggttcgctgccggtatttccgtagtgattatgaatttcccgatgccagagtagagcaatcaggtcctgctccatcattacacatgggacctacagcaatcgaggatgagacgtcccctccatttcatgatggttttggagctaataacgatcctaatgaagaagctcccatagatcgtcccataggcaattcaccagtgaattccaacatagcaaatctgacagatggagcactagatccacctgaaaaaatgcgtgaagctccacatgagtttcctcacctgaaattaacagagtccatccttggaaatgatgaccccatggatttggaccatgattcttcaccttttgtgcaaaacaaggctatcacccctccagttattgatgaaacaacttctgctggtcgacaaacattcagttacctgaatttcggcttgagccatctccacgtccagtacaagagaacaaggataatagaagaccaaaagcacaactgtatgagaaagcaaattgatggtgctgaactagatgagttgatctgcaagaggagaaaattaccccagacagcccttgatgtgtggagattcagcagaactaacagacagggcagcttcttgcttgaacctctgctgcatgggacgtgcagtgatcttcaagaaacctatgagagaaacttcccttgtgtcagtggccttgatgctgagtgtagcaatgtggctggtgtagcaaatgatgatccggatgcatcacttgaacggcagctaagcccaaatgttcctagaactgcggagctgtcttaccatgagctcaccccaacgtctccaggaaatgcagaggcacagcctgaaccacctctgccaaccctaaagtcaccaggagctgcaggtgcagtgccagacgatgatatgttgcctgagttgccccggttctcaccaatagatgtgccatcttcaataagaggaaatgatactccttacaaaactcctggcggaactccatcttggctcggaggatctgctgtttctgaaataccatcatctgatgggaactattcattacctggacaaagtactcgtgactctgataacatgtcattcctttttccaatcaatgaagatgatgaacacccagagatccctggtctcatgagtacacctggaggggtatctagtgtagctactggaactaccggattaggaagcatgtcggctaggacaagggctgttgcacttttctttaaggatcatgcgtcttcaccctcagatgatcagcctggaaaattcagtttgaacaaaattttggaagggaaaacaaggaaacaggctgcaaggatgttctttgagacaacggttctgaagagttataattacattgatgtgcaacaagaggatccatatggagccattgaaattttagttaaacccttgctgtcagctgccaaactgacataa

SEQ ID NO: 4837 - DNA, 750 bp, Zea mays
  Peptide Sequence Number=SeqID_48212
atggccgtgatgggttcaacattggaaaagatgtacctctgtcaggtaccaaactttggattaaatgataaagctgagaccgggcgggtgaggaagcagcaaatttttgttgcttttgttccaaggtggagcctaaggaagaaaaccaggattgaagcctcgggaggaaatatgccgccacgcacgaggaaaactgcgcgtaagttcactggaccgattggcatgcctcgccatcagctggctccaaggcatgaggagagcagcagcggcaacaatgaccacattggagatctagaagcccaggtggagcagcttcgaacggagttacgtcacagaaacagtgtgtgggttgaggatggtcagcgtataaatgagttaagaactgacatccgacatctgcaagacgagcttgccgaacgggatttggcactcgactgggctgtcaactcatgttccattgtttgggaccgggaagccaaagctcgagcccatgtggaggagcttagcacggccatcgataacttgcaggtgtactgcaatacattacatgagaaagttcatgaattgtattcgcgactgcaccccaacgtacctgctgaccctgtcggaatgggagtcagaccttctggaacagcagatgaagcacttggtggggaattggaccttttcaagccccctccttctatgaacctggctgacaaatggtcccctacaaccgacaacgaagctactaaggatgataaatactag

SEQ ID NO: 4838 - DNA, 75 bp, Zea mays
  Peptide Sequence Number=SeqID_48213
atgacaaagaaaaatagaaatggtaacaaattacaaatgtaccttcggcttgaaaagaaggtacaacatccataa

SEQ ID NO: 4839 - DNA, 462 bp, Zea mays
  Peptide Sequence Number=SeqID_48214
atgggcaagagcaagaaaggtggtggctcttcgcatcactcgggcgacaagcgcaagcgcgagccgactccttcctcggaggacttcggcgactcggagtactcggaggagttctcctccgagtccgagggctctccggctcctgcctctcccccggcgtcgtctgatgattcagacgactcccaggggatcgccgcggaggtatggacttacatccgggccgtcgagtgcgccgggctcgagggctcggatgagtcggagtactcctcggacgaggagaattcctccgactcgtccgaggagggtggcggcggcgacggcgacggcgacgacgacagaggcgacggtgacggtggcggcgacagcggcaagggcggtgacggcagcggcaagggtggcagcggtgacgacagcggcggcagcaagggcagcagcaagggcaacaacaaggccagtggctag

SEQ ID NO: 4840 - DNA, 243 bp, Zea mays
  Peptide Sequence Number=SeqID_48215
atgcgcgcgtcatcagtcttcgtagtgccactattccctgatccacgctactatctgtcgaggaaaagatcttcagcaattgattaccgaagaaaagaagacccctggatgacgtcaaccggaaaccatcgtcgtgcttgcgactatcgcgtcgaattagtcaggagtatctatcttatactcgttctacttgtgctcatacatgtgcatcgtgcatctcatgaggtgataggagttgtgtga

SEQ ID NO: 4841 - DNA, 759 bp, Zea mays
  Peptide Sequence Number=SeqID_48216
atgatgaccgcgtcaaaaaagcctcaggcgcaacaggaagctccgcctcgcccgaccctagggctcggcctcaacctcggcctcggaaggtggactccgcctcgcccgacaccagggctcggcctcaacctcggcctcgaaaggaggactcggcctcgctcgaccccagggctcggcctcaaccctgacctcaggaggaggtctctgcctcgcccgaccccagggctcggcccccgcctcggcctcggaaggtggtctccgcctcgcccgaccccagggctcggtctcaacctcgacctcggaaggaggactctgcctcgcccgaccctagggcttggcctcaacctcggcctcagaaggaagactccgcctcgcccgaccccagggctcggcctcaaccccgacctcaggaggaggtctccgcctcgcccgaccccaaggctcggcccccgcctcggccttggaaggtggtctccgcctcgcccgaccccagggctcggcctcaacctcgacctcgggaggaatcgcgtcctcgcccgaccccggcctcggcctcaggaggagtctccgcctcgcccgaccttgggctcggaccgaccgcgccacgggggatgcatcattaccctacccctagctagctcaggctacggggcaacaagaccggcgtcccatccaggctcgccccgccccgacagctgtacttctacagggctcaagcgctcctccgacggccacgataccgcgtacacagggctctag

SEQ ID NO: 4842 - DNA, 2016 bp, Zea mays
  Peptide Sequence Number=SeqID_48217
atggggctcctgctaagtgttgagtcagatgggcagatgttggttttgggaggacccacgggcgaagggcgtgtcactttcatgcggtatagtgttgcgttcctccaatctgttgggtttcagggtcccatgttgatttttgggaggacccgcggcttcccaaagcggcatggtcagttcgagctcgccctggggatgccgccgctctgcccatcgcagacgccgtggagcatcgacggcgacgtcgcaggacatgaggtcgcctaccagctggtgacccgaaacacccaggcggcccgccgccacgtcgagataacggccctgacggtgccgacattttggggcagcgggcattgcccggagccgctcgtcatcctaagaaagggcagcacggtggcctgctacggctacccccggagccactcgtcgtccatgaaaagggcgacgaactggcctggcaagatctggcggcgcggggatcgaatggacggacgacaagagcgagcgaagaagtcctggcggcttggtgagaaaatggtggcgctgggggcgatgggaacggaggtgcggatggtggcagcagtggagaatgaagcgacggcgacgtcgagactgattgtcgtcgtccgcggccatggggcggagcaccttccggagaagtcgagacttatacgattaaaaaagcctcaccgacggcgacggcgacctcacctcaccgacggcgacggcctcggcgacggcgacaacgatccccaattctcttcgcgacctgaccgtctccacttcggggtgaagaagaaagccaacatgccacaggggaagagtaagaagaacgtggtgaaggagaaagccaaaaagattaagaagaacgcggaatcgagagccaaagttcatgaaaatacagatcaaattgagatcaacattagagaaggtgtttcaatttggataacaaaggctgcagtgcaaaaatgttttgagtttccccctggtacagataagaagctgccaatagatccaactacaaaaacatttgattcactctacagagtattgagtgtttcagaaaaaaaaatcaatgtaaagaagaagaagatgaaggagaatatgaaggagaagcaggttgaggaggagaagattgagatgaacatggaggagaagaagcagaatctggttgaggatgaaggtagtcaacaggaggaaagtgaagaggaggacggtgaagatggggaaattggagaggaggaaggtgaagatggggcaattggagatgctaaagtggggggagatggagacaaggaaagtgctaaaaggggggggataaaggttgctgtcagaagaaatgttttgactcctttgaacatcaatttgatgttacagaacatcaacaacgatgagattctcaaacttcttgttaaaagaaatgaagacactgatggtacagaaccgaatcttgacattgacctgattgtcagatgtttctttgcggtgagcagtgttgctgagtttggcaaggataagaagaaactgatatcagggtgtacaactgtgctaatggttgttttcttggaccatctcgtggaaaaccctttggatcctttgaccatccctaggatcaacttgtatacttcagattttatcgcagacctgataatggtacccaaggatagccctggccctgaaaaaaagcgtcgtaagcaagaactgattcatcaagatattggagttaaggagctggacaaggaacttactgcagaggttatgaacaaagtggatctgaagtatttggataataaacacaactttgacatgtctaactacactgaccatgtgccacctgttcagcatcaaaaaaacaaaaagaagctgggtattacattgaaaagaaaacttcctggtatacttgatcttactattgaaggtgagaggagtgaatctgaggctgcagtgataattgaaatagagaacagagatgataagactctagaggatgaacatatttcagttgagaaagagtaa

SEQ ID NO: 4843 - DNA, 819 bp, Zea mays
  Peptide Sequence Number=SeqID_48218
atggataccatatccagaggcctagatgttgattgctatgagtggtccaagaactgtagaaggtcaaatgagttcaacatcaagctcaatttagaaaatggaaagaatatgccaagaaaaggagacctcatgttattttcagaaaggggattggaatcaagagagaaaattatcaaggctggctccttttgtaccatcctagtggttaatcatccaacttcaatggttttcttgatgtcacactcaccatatgggggcagtttaaatgaccaaagttcttacaaagttatgcacccgtgtaatctgacaacttttgcatgtagttgggcagtcatgaagggaggttgccaagacaatacagaaataatcaatctcatattgactaaaaataaggagaatgtggataatatgctgcaggctgatggagattatggacagttcacatgtaaggattttggattgaacaatcacagaaagatggagtggcaggatgcatttcagcctctaaaagtccaaagaaattatctgtttgtaggaaatcagcaatttgacaacttggttattgatgaggcagcaaacttaaaagaatgtgaatcactgatccctctcggtattggtgggataaaacatgtggtgcttatgggggatgacaagcagctacaatcagtggtaatgagcccgatgcatgggatcttatgcagttcaaggtttgataatttagcatgggatcttaaagttgcaaatgttgagctatattacaaggcagttcacttctattttcaagagaaccctgatctcatcaatgatatgctggattaa

SEQ ID NO: 4844 - DNA, 291 bp, Zea mays
  Peptide Sequence Number=SeqID_48219
atgcgcgtccctgctctccccccctctcgcgcgcgtgtcttggcggcctggcccctcggcgccccgcggcgcggtctccctggccccggcggtgcggcctccctggcccccggtggcgcggctccccgacccctatggcgcggcctccctggccccggtgatgcgctttgggaatttggaatttgtggaaaacattcacctgtggtgaacttccggatcgtacttagggatttgcccaaacttccggtgaaggcaagtaaaacagtgatggttattccatctgttaattga

SEQ ID NO: 4845 - DNA, 189 bp, Zea mays
  Peptide Sequence Number=SeqID_48220
atgacttcgtcttctcctgagcagtggttgcaacgtggacaacctggggagtttggtggtggactagctttatgtggggttaaagtccagcagttacttttagttggtcaggaaggcagagtgattgcttatggctcaaggcagttgaggaagcatgaggggaattatccaactcacgaatcaagctga

SEQ ID NO: 4846 - DNA, 633 bp, Zea mays
  Peptide Sequence Number=SeqID_48221
atggaacctgccgcggagctatgttcccagaagctgtccgcggccgttgatgccgcccgtgacacaatgaaagcttcatctaccgcctgtatggttgctggtgattattgcgccacattttccttaggtaacgatgtggtttctactcttgatgttcttgaatccgctgtggcggcggaaaaaattgctatgagttcttacagccaggcgagtgcagccgtcgattgtgctaaggagactattgccaaatattctgaggttaaccaaaaacttgcgcaagcactcagatattctctgtctctaatgagtgatgcagctaagaaacttcaagatactgcctctttgtgctacacagatgaagatgttgtcgacggtttcaagctgactcaagtggctcgttccttggacgagttagctgaaacgctagaagttactgcaattgactgtcaggtctcgatgatggatccaacaactatattagaagctggctatggtagcgaagatagtgtggtgtgggaggacgtattccgtgaccgagaaataatgaatcagccattggaagcggagacactagctgagcactgtgctaagtgggggctgaattacaatgagatcagggatagatctgtgtaa

SEQ ID NO: 4847 - DNA, 495 bp, Zea mays
  Peptide Sequence Number=SeqID_48222
atgcacctcgcggctctcctcaacgctttcgcgcgcttgcctccgctccctctcagccgcctccacctcccgctctcgctccccacggcctcccgcctcgtcgcgtccttccctccactcctgctcctcgtctgcttcctccgcgcgctccacctcctcccctcctcgccgtcgcgcccctttgactcgctcatcaagtcatatgcggaggctgtgagatccggtagacgtatgagcttctcgaggaagggggtgaagacctcgacgaggcgctggtcggacttcagtggggatggcggcggcgcagcatccgcggaggctgtgagatccggtagccacggtcgtgatgcactaggtggatccggatctgggcggggtggttgtctggatcggggagtggggttcggaggcgatggcggcgtgagtggaggtacaactgccgccactgaaaccctatttttcttgcacacagccgctgtcggaaaggttggatag

SEQ ID NO: 4848 - DNA, 630 bp, Zea mays
  Peptide Sequence Number=SeqID_48223
atggaggatttctacagggagatttatgccgtcgatggcatcactggcatcaagttccctgatcattaccctgtctcacgcctccttggctgtgttgaggtggtaggctgcctcaggtctgaagagcttgtttgctgggaacatgtgcctgagtctgtcaggcttgaagggctgactgacttttgttggctctgtgaaaatccacagaagttggtggttccattcgagatgcgtggttaccagggtgtctacaatttagaaagaaggatctatgatggggctgtgaggggccttttacctgttcaaggtccactgcctgtcaagttccctcttccagatcccagagaccccttctccttgaagccaggatctcttacatttgctgcttccaaacccactctgcaaaaatctgaaagtgttgctgcagcaatagccggggctcgagctgcagccactcaattctcaaagaaggatcgcaaagctgctgctagtagtgaaattggtacagaagagcaatcctggggaagccatggcggtagcagttcagttgattgcaatgtggcactgagtgaactgaagcagttaagcttgagcaagaaaggaacaggacaagcagttcccagaagctga

SEQ ID NO: 4849 - DNA, 417 bp, Zea mays
  Peptide Sequence Number=SeqID_48224
atgggcaaaggcaagagaggtcgaggctcgccccgccatgccggcgacaagcggaagcgggatccaagccctccctcggaggacttcggcgattcagagtactcagaggaggaggggatagccgcagaggtgtggacgtacatccgctccgtcaagcgcgtcgggctcgaggggttggatgagtcagaggtctcctcggatgaggaggactcattcggctcgtccgaggagcgaagcggcgacgacaacgacgatgagggcggtggcggtggcgacgacaacgacgatggtgacggcggcggaggcgacgacgacggtggcaggagtggtgaaggcgacgacgacgacaatggcggcggtggcgacaatgatggcagtggcggcggcaaggccagtggcaaagtgccactggtttaa

SEQ ID NO: 4850 - DNA, 162 bp, Zea mays
  Peptide Sequence Number=SeqID_48225
atggtgggtacaagtgcgatcactgcacggcggcagccggggtcagcggagcattgtatgttgcaggatatggttgatggtgtgacttggcctaccaccctgccaccgggttggacggccgagtgggatgctgcttccatgggagaggagcaggaggagtag

SEQ ID NO: 4851 - DNA, 363 bp, Zea mays
  Peptide Sequence Number=SeqID_48226
atgtggtgtaaccgtgtgagccacgcgaaggacgtgtgggcaatgtatcctgacttggttgggagggtcactgttcagtgcatgagtgcgttgtactgccttcaggcccttcagagcgatgctatggcacatcttgctaacatcgctcaaactaccaagctcacccttgatagccgagaagattttgtggttgacttgtccaccgagttggtggagaaggatctacagatggaggctaatgaagccggaatcgagggagaagacgctcccgaggagttaggaccagcccctggtgcaaatgggactacctctgcgatgcccccttcacccgcatccagtgtcgcatccaccgctcagggttga

SEQ ID NO: 4852 - DNA, 63 bp, Zea mays
  Peptide Sequence Number=SeqID_48227
atggcaaatgcaatatatggcgtgtgggcgaaataccgaatgcaaattacagggcgaatgtaa

SEQ ID NO: 4853 - DNA, 567 bp, Zea mays
  Peptide Sequence Number=SeqID_48228
atggcgagctcgctggcccgcctgggagcggcgctgccacgcgccgcggcccgcgccctgccaccggggcggtgggccgccgcggtgctcggcatcggcgcctcccgccgcgccgaacggtgccaagttcattccgacattaaagtagcccctacatcagacgtgaaggacgatagcaaatctgaaactaggaggatcaagatgctctatgacggtgattgccctctctgtatgcgtgaggtaaacatgctgagggaaagaaacaaatcatatggggcaataaagtttgttgacataagctctaaagattactctccagatgacaatcaaggccttgattatgaaactgtcatggggaagatacatgccattctttcagatggaactgttatcacagatgttgaggcatttagaaaattgtacgaggaagtaggactcgactgggtttatgctgttagactgtctccagcaacgtcctctatatacatcctctatatccgtcctttacagtcttctttaaaagattccatctcctatatctactttctcttcaacaacgtcctttaa

SEQ ID NO: 4854 - DNA, 351 bp, Zea mays
  Peptide Sequence Number=SeqID_48229
atggccggttctaaggatcacaccaagatctccaccaccaacatcatcaagccggccatggaggcgctcccggctgatgaccaaatgccctttgaagacctcgtaatgcgcgataagaaggaggtgatgcggcaatggaacgaacaacgcgacaaggaagaggcggaactgctgcataaactctccgaacggcgcaaggaggcggcggacaagtacttgtcacacttcacgatagatcgccaccagaagatcatccgtcaaggggagatcgatatggaatctctcctacctccacttcatggtcccgctaggctgtttcggatcgcatcctcttcggccatgtctacctga

SEQ ID NO: 4855 - DNA, 1347 bp, Zea mays
  Peptide Sequence Number=SeqID_48230
atgcacgcagcatgttcgcgcaattgcttgagcgacctgcttcactgccagaggcattggcgatgccgatgcccgtaccagctctctccggcacgaggcatgacgcgtggccgcagtgtgaaggaccggagcaagaagaagcgcgtccacgcgctcgaggtagccaccgagcgctggaaggttctctccaaagtgctcgccgtcgtcgacgcgctcaagaaggaggatgagcacgtcaccccgctcaagcgcctcgagatcctgcggccgcagctcggcctcgtcaagccgcacaaggtggcccacttcgtgcgtcgctcgccgcacctgttcgaggtctgccgcgacagccgcggcgtcatgtgggcaggcctctcgccgcaggcagaggcgctcgtcgaggaggaagcgcgcctgctagaggatcactcccctgtggccgtgcagtacgtcaccaggatgctcatgatgtccgtggaccggcggctgccggtcgacaagatcgcccacttccggcgcgacatgggacttcctcatgactttcgaacacggtgggtgcacatgtttccggagcatttcaggctggtcagattggaggatggtgagtatttggagctcatctcttgggacccaacctgggcagtcactgagcttgagaagaaggcgtctgtgtcgactggcgatgccattgccagttcgccaggagagctgtcgcttccgtttccaatgaaattcccaccaaatttcactacttactacagatttcgaggaaaagctcatcattatgtgaaaatgggcaataccgatcagtttcagaaggtcacctacctgtccccttatgcagaggcaaagggattgactcctggatcgccagagtttgataagagggctgttgcagtgatgcatgagatactgagcttcatgctggaaaagaggctggtgactgatcaccttacacatttccgtcgtgagtttgtaatgccacagaagcttatgaggttactattgaagcattatggcatcttttatgtttctgagaggggaaagaggttgagtgtgttcttaactgaggcatatgatgggaacgaactgatagagaagtgtccgttggtgcggtggagggaaaaactccttcaacttactggttacagagggagattgaagaatcttggtaaagtcgacgtgtgttctgattcagatgagtacttattaggccatgatgatgatgatgatgtattggatgttgaaagtgaaaatccagatgacatcttagatgactgttctatttcagatgattctgagatggatttaggggatgcagatgcagatgaattttgcagagactga

SEQ ID NO: 4856 - DNA, 54 bp, Zea mays
  Peptide Sequence Number=SeqID_48231
atgctaaggcggaggtacatgtcaacctgggcgacgctgataggagtacgctga

SEQ ID NO: 4857 - DNA, 642 bp, Zea mays
  Peptide Sequence Number=SeqID_48232
atgaacgtaaatggaaatttgcagaatggaattgggattcagatgggtcaaattaagacgatagaaatcaaggaggccgcggaaaaagtgagaaataggaagagcgagaccgcggagaagaaaaggaacataaatcacagattcgtgggtatcctctgttgggacagtgaccccgtggcaaatccaccaagaacagagctcctttggaggaagaaccccgatggacacgaggtggagaaggtcgggttcagaaacaacagacatgtggttacctgcaaagggcaactagctgttgggtcgatagggggaatcaccgcagcggatgaactcgaggcttttcgcttaggcgccatatcaattccaccggtgaaccgaacgggagccgaatttcaaaaggacagaaaggatctgaaggcaggaaagcaagaactagggcgcggaaagcagaggaggctgaaagcgcagcacttatgggatattcctgagtcagataccgtttccaaaaagcgcccagtcacccggcagttacttctaaaaacgccggcgtgccatgtcatcacccgacggttacttctaaaacaccagtatgccacatcatcactcggctattgtcctcaaagtggccgacgcagcccgttctaa

SEQ ID NO: 4858 - DNA, 399 bp, Zea mays
  Peptide Sequence Number=SeqID_48233
atgggcgcaccctcggctcgcccgatgccaagctcgggcaaactttgtcgtgcagcgacctcggccgaatcgccttacccactgaccgaaaacagcactgttcgccccgctccggcaactatgccagccactagggaaagactaacaacagtcacggccccgagttcggcctcgggcgcaaaagggagctccgcctcgcccgaccccaagcctcggcctcagcttcggcctcgggagaaggtctctgcctcgaccgaccccgacctcggcctcagcctcggccttgggagaaggactccgcctcgcctgacctcggcctcgggagaaggactccgcctcgcccgaccttggcctcggaccgactacgctacaggggatacatcattaccctacctctag

SEQ ID NO: 4859 - DNA, 999 bp, Zea mays
  Peptide Sequence Number=SeqID_48234
atggcggaagtgacggagaggagaaagcgcgccgcagtcgtggtactgggcgacatcggccgcagtccgcggatgcagtaccactccctctcgctcgctaaccaggccagtatggaagtggacattgttgcaaatggagaaaaagtgcagttaacaggaatttcaaagatatcaggtgcgctggcacttctacttaaagctgctgtccagttcattttgctagtttggttcctttgttttaagatccctcgcccttatgtctttgttgttcagaatccaccctctgttccaacattggctgctgtaaaactggcaagctggctgagaggtgctaaatttattgttgattggcataagtttggatatacattgctggggttgtcgcatggcagaagtcacatcattgtcaaaatatatttctggtttgagaagtactttgggcagatggctgatggtgccttttgtgttacaaaagcaatgcaacatgaacttgctcaaaattggggaatcaggctagggaattccatctgtagtgctatgggcaatgccaaatgcatatcagtggaggaagtatgggaagacatgagcattactgtcttcgccactttaggtgaagatgattcaacagatgaggagcaactttggattgatatcaagaatgggaagcaatttgtctacccaagattactgtttattgttacaggtaaaggacctgataggaagaaatatgaggttcagataaaaaggttgaagttgagacgtgttgccttgcggacgatgtggcttgcatcagaggactaccctctattgctcggatcagctgatctaggagtgtcgttgcatacatcttcgtcagggctggacctaccaatgaagatgctctttaaggggtttccagaagaatgcaatgccttgaaatccctcaaagaatgtgccatgaagtcaccatcatcttcgaaatggtcacagaatgggaaaccaacgccctaccgttggtga

SEQ ID NO: 4860 - DNA, 390 bp, Zea mays
  Peptide Sequence Number=SeqID_48235
atgaagtcttttgctcgtagtttgcttgggtcgaggagtagctcgaggagcagctcgaggggtgaggattcagtttttcagggcacaggttctaccatgagcagacggagagcgctggcagaacatttgcctccacaagatgatgctgaaattgaggaaccagtggtagaggatcatgcaagagatgatgttgaagatgatggtggagataatgtgggagatgatgctagagacgacgttggtggggattctggggctggggattctggagctggtggagattccgcagctgggtctggacttctcgagttagagacgaggaagctgcattttgtgacactcagagcttcacccgaatctcgggttgataaagctagtgaaagtgagtga

SEQ ID NO: 4861 - DNA, 456 bp, Zea mays
  Peptide Sequence Number=SeqID_48236
atgctggtagactacataacgatactcgatggaccaagtgtgtcggtcgaaggcccgacgcaacagggtatcgagagcgtcttggaagtgacacccgcgagcagcgtcacgagtgatgggtctagcaatccatccctccggctccggctcctccgaacgcttcgtgccttggctcgaactaccaccggtgtcatcgtcgtcgtctccttctccgtcaggggggcatctctggctgaggtgcaggggaaggcggtctctcagactccacctcctgctgaggcgagggggaagagtcctactgctcctgctcctagcgtcggcgctcctgctcctcgtgcaggcgacgatgcagtctctccagttggctggactgacctgacactgtgtgacgtagtggacgttctgccaggcgagaaggcaaaaaagggatcacagacttacgtgtggtgcacctaa

SEQ ID NO: 4862 - DNA, 477 bp, Zea mays
  Peptide Sequence Number=SeqID_48237
atggagctgctcagggcttttcgcctgtcacgttccggtgcccagacgtggagcggcgcgggcctgcaccggtacttggccttccaggttcagattcagggcggggatttcgtccctggcgatgggaaacataagaaagactttctggcttcatgctgtagccctgtaggagggatcatcaccgatccttgtgagcatgagtggatgcaaacggtggagactacttcaaggcgccttgctgacaggaagaccgcaaagttccagaagaacatcaccaggaggggttctgtgcctgaaaccactgtcaagaagggaaatgactaccctgttggccctctagtgcttgggttcttcatctttgtcgtcattggatcatcttctggccaccaaaagctgttgcggactgtcaaacgctcagtttttgagccagcttttataaaatttattgggggtaaaaatcattcaaaatcaacataa

SEQ ID NO: 4863 - DNA, 477 bp, Zea mays
  Peptide Sequence Number=SeqID_48238
atggcgattgacatcacatatttgactcttggctcaggtgtcactgttccagcgcgatcaatattagtagttcctctgcatctcgtgcaaatggatgcttctgtttggggtgatgatgctgaccagtttaatcctcatcggttccttaaaagggacattgatattggagctttatcgaaaacaacaacatcaataattgaatgtgtcctaaggagggatccccatgaagctgaatatatacagtcgatccaggaggtggttcattccttagaacctgttttggtgaagaatgcccaatctctatttcttatatatcttatctctgctattcctttcacctctctctcctctcccacatttaaacgtgtagtggctctgacattcgacaaagtacctgacatggggacccctctggcggattctttgccgagtgctgtcaggcagacactcggcaaagtttacacattcaaagaataa

SEQ ID NO: 4864 - DNA, 3228 bp, Zea mays
  Peptide Sequence Number=SeqID_48239
atgctgcagcaggaaatatttggaccgccgggacggtttgcaaattttaggacttcattcttgtgcgttaaccaggagcttgctgaaggactcaacacacattgctacatcatgcgtacggaggttatcctggcagacaccattgaagcagctgcagaacgaattctgattgagatcagtagcgatgacacacatactgagagaagcaatgtgttctacttcgatggttgggacgggctgggcgcatctgctgtccttagagctgttgcccagcgccttgccacagcttcagaagccccggcaggcctcaagtttgatcaggtcatcaacatcgactgctccaagtgggtgagcaggagagctatgcagagagtgatcgcagaggagctggagcttcccgctgagtttatggagatgatagagacgcgtgatgaggaggacgactaccgtggtgaagaccagagctcccgtgatgtgattccacaagtcatcaacagggagatctaccaaagattacagaaccgtaggttcctggtgatcttttacaacggaagcagtgaggagattgatctagccaatcttggcttccctctgcaggacttgggcttccatttgtactcaagcaacaaggtcctatggacatttcaggggagtttccggctcatgcccatgacaaaagtcaccagggctctagggaccaccggtgttttcctatcagcaacctcaagccaagtgggtcaagacccacatgtgttctggtcctaccttgtgctgcaagaggctgcacagattgttgccagcaaggataacactggtggcagcatcatcggtgatccagcgcaggttgccgagtgcttcttgtacttactggatctatgtctcatgggtcatcacttcatagtggactatgacctggaaactcatggctgcaactactggatatgtgacggcatcatacatgtacaacatgggcagagagaggttgaccgcgacattggattgtggaaagctgttgaagctctgcagcgtgagatgcgaatggatgtggattactaccaccaccatgaccaccaagatatgcctactcacattgtcaagtgtgccgacttcagtccacgctggacttctccaacgtaccgtgtcgttcagatccttgagagggccacgcctgtcagatgcagtcttgatcattatgacaaacttggtgtcctcaagctatcctactgcacatttagcttctcatcgcctccattcctgtgctgccaaagccttagattcctatggctcgaccactgccaggacatgctggagagcggcccagatggagcggcacagatgtgggaggcagatggcatccagcagtgcttccaaaggctgtgggtgctggatgtgcgctacacatgctgtgatcagatcttgtctggacggatgctagagttcatgactcagctgagggtgctaaatgtgatcggagccgaggattgggacatgcgccagttgcaggggcagcttcctaatatctgcaaacttggagtagcaaagtctacaattgaatgtggtacaactctctggaatggtgacttgttggcagggtcgaaacacttgcggtttcttgacctctctggtaacgaaataatcagtagtggaaagagttgcatatctgccacagaaaaaagctgcagcctggagaccatcgtcattcatcaaggatgtgctggactagagaagatctcattggccgggtgtgctcagctagagaatgtactcttgacaggatcattcaatgagctcgtgagccttgatatctcaggatcagctgtgaagaggctggatctcagtgcgatgataatgctgaaacttaatgagctaattctactagactgcaacatgctacgtgcaatcctatggcctccggaaggaagagagagagaatatcctggcaagctgcgcattcgaacaaaaaaggagactaccataggcagtgctactgctccatcaggattgacaatgatgtttggtagtctagtccccgccgaatatttgtggtggtatatttcagtatacgatgaaaggctgctctggtcacttttgcccttaaaacagtatttcagttaccactttgtacatttcgagatttcctctcctggtcgccgaccagatggcttggcatgtacaagtgatgaaatgatcctagaagtgacaaccccagaaggttataacacgtcaatatatgtagacgtcgccaagggccaactgctacatgtgaagggagatgaaggtgattctcctatatccttcacaagggtatggccctgcccacgtgctcctgatttagtcccatcaaactgctacctgcacatacaagactggccacagggaagaaaaccacaacgaactagtcaaaaaactgctaccattactattccagatactatatgcaacaggactggcagcatacatgtgcacgatagcttgtacatcactcggatgccagacccagcaccttctggtgcaatctgggctaatcttttttggtgccgagtggagcgttgccctaaaatggattgtgtattcacaagttcgtccatggtaggtgctgagaacagggacgacaggatcttttggagactggcaacgctatgggtgtcccagcttcccaaggcacggttcatatggagctcgaggaaacacgagatcagcggttattcgtttctggacctagacttcgtgcatgtggacttctgcccccggttgacacatgttcttcccttgtccatggcattgatcagaggaagtggcctggacagtctaacaaccctagagattgtgtggtgtggagatctgagggcagttttccctttggacactgatgcccagagctaccaagatcatcggcgaaaccaggcaatcaccgtggaatttccttcccttcagcgtattcacttgcacgagtcaccaaagctgcatggcttatgtggccgtggaaggatgtacgcaccaaagcttgagagcatggtgatcaggggctgctggaacctcacacgcataccatccgttggcgatggcggcgaccgcattaccaagaaggtgaagtgcgactgtgagaaggagtggtgggacaggctcgagtgggactggcttgaagaaagacaccatccatccctatatgagccaactcatccaaaatattacaagaaaaccttgctcaggacctccgtgctcagatga

SEQ ID NO: 4865 - DNA, 237 bp, Zea mays
  Peptide Sequence Number=SeqID_48240
atggctcaccggagtttctccggcccgcccgagaccttctcaccgtcgttctcccctctctacccatggattcatggcctcttccctgccatcgagttcgccatggcgccctctccctctctgcccaactcaggcgaccccggagccaccctagctcacgcctgcctcaactccggcgacctcactgccgcggagaggagcgacgccgcatcgcgcatgtctgtttctccggtctga

SEQ ID NO: 4866 - DNA, 291 bp, Zea mays
  Peptide Sequence Number=SeqID_48241
atggcgcctcctgttgacgtggcaggtctgcgccctaggatgggcgatgtggaagctcctccaaagccgaggtcgagtccgtcttccgtggccgaggtcgagtccaagcccctgggtcgggcgaggcggagaccgttggctgaggccagggcggagtccgagccctggggtcgggcgaacccgagtccgagccctgggtcgggcggagcggagttcgccgtcttccgggacttagcccgagtccgagccctgggtcgggcggagcggagttcgccgtcttccgggacttag

SEQ ID NO: 4867 - DNA, 504 bp, Zea mays
  Peptide Sequence Number=SeqID_48242
atggggagaggcaagtcgggctgtgatcttggtcccaccctcagcctcaaggatgttcatcatccttgctggggcggagagcgaggcgagccgaggctctacctcccgcgcgggccggctggacacctcttcttccagcttctggtggtggcaaccatcctccagctctgcggaggagacgtcctccagtcatgccggggaaggcgaactgttgctgcccagctaggatgcaacattccgccctcttcctcgttttcgtggcgaggacgggagcgaggacctgccggtgcgctttggagcggcccgctctttggctttgatgtctggttctcgtcccttgagcggggacgcgaacgagagctttctggtcgccgcgtccgtcctgggaccatagctgctgctgcagaggtcgctggcaagtcgcccgaaacttgtcgccccgcaggctccccggcgtggaggtcgttcatacccgcggggacggaaccggagttccgtttgtaa

SEQ ID NO: 4868 - DNA, 1275 bp, Zea mays
  Peptide Sequence Number=SeqID_48243
atggacgtggactgcgtctcgctgcccgacgccccggcgggcgacgtggatggcggcgccgcccggccgtggcccaaggccgtgaccaacggcggcgtccacgagctgctggagtgccccgtgtgcaccaactccatgttcccgccgatccaccagtgccccaatggacacacgctgtgttccacatgcaaggccagagtacacaaccgttgccctacctgcaggcaagagctgggcgacatcaggtgtctggcgctggagaaagtcgccgagtcgctggagctcccctgcaggtactactcgctggggtgcccggagatcatgccttactacagcaagataaagcacgaggcgcagtgcggcctgagaccgtacaactgcccctacgccggctccgagtgcggcgcggccggcgacatcccttccctcgtctcccacctgagggacgaccacaaggtggacatgcacagcggctgcaccttcaaccacagatacgtgaaatccaacccgcgggaggtggagaacgccacctggatgctgacggtgttccactgcttcggccactacttctgcctgcacttcgaggcgttccagctcgggatggcgcccgtgtacatggccttcctccgcttcatgggggacgagaacgaggccaagaactacagctacagcctcgaggtcggcgccaacgggaggaagatggtgtgggagggcaccccaaggagcgtccgcgacagccaccgcaaggtgagggacagccacgacggcctcatcatccagaggaacatggcgctcttcttctccggcggggaccggaaggagctcaagctcaggatcaccggacggatctggaaagagcagcagacaccagacggcgcatcatacaggaagcgtgtcgcgctagccccagggagaggaaaccgtcttctctgcactgcatctggcgcctcttcttcttcttctgtggtggtgaccaaggagcaggaggaaggatctcctgagcccgaaatctttagctacaaagacgaccccaacttcaggggctgcaagggctgcggcagggacgagcttcagaggggctgcaatggacaaggccggatccagggcggcatagccgccgtcccgggcttcggctggtggcccatcaaggcgtaccggccgtgccccggcttcgtcgcgtccggcggccgctaccggcgccagggccaaagcatggacgacgttgcatccggcagggggaaaaagaaaccctctcccgccaaaaaacaagcttaa

SEQ ID NO: 4869 - DNA, 246 bp, Zea mays
  Peptide Sequence Number=SeqID_48244
atgggtcggcgcgaggccgagcgcgaagggggaagtgaggtggccggagatgggcatgagagaggtctgcgccctaggttgggcgatgtggaagctcctccgaagccgaggtcgagtccgtcttccgtggccgaggtcgagtccgagcccctgggtcgggcgaggcggagaccgttggctgaggccagggcggagtccgagccctggggtcgggcgaagcgaagttcgtcgtcttctggggcttag

SEQ ID NO: 4870 - DNA, 543 bp, Zea mays
  Peptide Sequence Number=SeqID_48245
atggcgatggcttccacagggcgaggtgaagcagccagctccgcccaccacccccacccctccccaaaactcgcgcggccgaccgcctccgacggaggcaagttcgatttagcagaaatgcttgaggatgctgacaaaacatatctccactcacctagaattgtcattcaaacgacagtctccacttattgcttagaatcttcagagatcaaattagataacctacaacttctaaccggaaaagataatttccaaaagagactgaagtacaacagagaaagtctttatactaaaaagaatttgaaagggaaatgtgcccttgggccatttctaagtattttggtgattgagtgtcaacacaagtgcttaaatgtgaatcaatgcccatggatgaacaaagtgcaaatcaagagcaaagttccctcccttactccgtatttctttgtgaatctcaagtgtaagggcaagagactccaagttgtggagattcctcgcaaacgggatattgaaaggaaaagcataacactgtggtattcaagttga

SEQ ID NO: 4871 - DNA, 2142 bp, Zea mays
  Peptide Sequence Number=SeqID_48246
atgcgcgcctgcacggcgcacgagttgccatccctcagcgattcggtgccccgacccgcttttgttgcgtccaaagggggtggattcaagaaaacaatccatcattattactcgacatggcttatttatcccgttcctgtattcacccacccaccctccaggtcacagaaagccagacctatggacttccacaacatcgatgattattttcatgaaaacagcccggcacaagggggcgaaggagctgcagaggctagcgccgaggcaattctggaaagggtgtaccgtgacaccgcgtttggatctgagaagctgctcaatctagacatgctggtcatggagatcgctcgccgagcctctgatatcgagcctctcatgtgggaccctcgttccatttcttccgagtcagttggcaaggctttcgaattcgatgtcctgcacggtattgtagattcggaagtcagcgagttggagaagctagctgcctctattcagacagatattggcaatgctgaaaccaaggcattggggggagaacccgggagcagagtgaccgatgagctgtgcgcgcggaaggagtccttgaagcagatgcaagatgtaatttctgatattagaacacagcttgcaacctttgagaatgccatacaaccttcacatggcaaacaaggaaatagtgagggtatgggatatgaaaatggtcatatatcaggtcacactgctatgcaggctgaggaccagagaaatgtactgcagatgttacaacagtcgatagcaagcaagctagatcttgaaaataagctacgtgattcgcagtctgttgtggaagacctcaaaatgaagctgcatcacgcagaacaagaatcatgtttcttggaggaatccatcaaagagctttatgaaagaacgttgtcggcagaaaatgcttcccaattgcttcttggaacttcaaaggaactcgttgccaaatttaataccacccagtcctatttaagtgcttcaattcgcagggaagatgatcttaaatcaaagttagacgaaaacttgatgaagctaagtggcaacaagagcaccagggagacagtgcttggagacagtgacaacaatgctaaccaggagcctgtgcagatgcgggtgctatcacgtcctgagttccagaatttatggaataaggttcagcagctggaggaattgttgagggactctggctctcaactgcagcaatcatctctttcaagaggggcagatgaagaagagcaggatacagcgcaatctgggataagcgcgtttgggaatgttatcgctgatttcaagcttgccatttccaatgcagaaagtagagcacaaaatgctgagacaaggtgtacacagctcactcgaacgaatgttcagcttaatggggagttgaacactcttaaaagtcagggatcagatagggctggcttattggagacgaaacttaaggaatcagacactcagttagagcatgcaagagcatcggttgatgctattgttgaacaacagggtatgttaagatcctccatgtctgatatggaactggtgattgaagatatgaaggaaaagtacttgaaagctgaaaccagggccgagagtgctgaatcaaaatgtgcattgttgacagataccaatttagaactcagtgaagagctgtcatttctgagaggccgagtagaaaggctagaaaactcactgcatgaagctaaccaactaaaggtgtccagtgcaaaagacattgctagtaaaactaagactatcatggacttggttgcaaaactttccttggaaagagaacgccttcatgttcaggttgttacgctggcgaaaaagaacggggcgttggctcaaaagtgcaaagaaaatgttagcgagcgcacattgctgtgcaagaatgttaccacaggcgaaggtgtacttaggcccgttcaagtaaaagaggaggttgaagccgatgaggtggtgattccagacgaatgcacagtgcgatctatcgagccgacgacgatgacgatggtaaactggaagtacatttccgcggcagtcctggccttgctggctgccgccgtcgtgttccagctattacgtgccaatctgatgatgacgacggcggttaacgattgctga

SEQ ID NO: 4872 - DNA, 324 bp, Zea mays
  Peptide Sequence Number=SeqID_48247
atggctcgtgttaccttggctggggtttgggggccgccgctgcggaggtggggacgctgcaggctcggtggggcgtcggcgtcgcgatcccccggaggtggagaggctgttgatgccgctcgtgccgccgctgttgctgcggcggaggcaagatgcgcggctgtggtggctgagaaggaggctcgagcggcggtccaatctgcgacaattgccgccgataaggttggactagctgtcgaagctgtcaagtatcgaagatttgtcgaagaaaactccctggtgactgattttctatttcccttcctttggccccatgtggaatga

SEQ ID NO: 4873 - DNA, 1068 bp, Zea mays
  Peptide Sequence Number=SeqID_48248
atggagagtgccataactctgtacctacagggccactaccatcccactgatcaggccgaggccaagagaggtgcaggcaaccaacaaaagcttcccttcccctccagcctccactctcctctccttttcttccgctgttccgcatcgcatcgcatcgcctcgcctcgccgccagcgcaactccagccctggccgggatctctttcacccccccctctctctccgccgcttcgctcccccgtctcggggcctgcctcggatgctcccggcctcgcatccgctgctctacgcctgcgtcttccgcgacacccacctcgtcgccgagctcgaccacgcccactcccactcccagagcaccgccacctccgccgaccccgtcgcttccgacgccccctcccccgcccctgacgacgacctcccggcgctcgccgctgcgctcgtcgccgccgctccgccgcaccaccgccacctcacacacacagccgccgggcgtgcgcacgcgctgctcctgtccccgccgctcgcactcgccgccgtctcgcgggcgccccacctcccggcatcgcagctcctgctcttcctccgccgcctgcgatgcctccccgaggcccggatgcgggacgagatgccgcgcctagcgctgcgcttgccactcccgccgggcgacgacgcgcgcgaggcgaacgaggtcgccgccgcggaggcccacgcggaggaggaggccgcgcggagggacgctgacctagccgcgcggaccacgcccaagagggaccgagcctcgcaccgggggcgggccggacccagctggacgtggaggcggcagctctggatggtcatccttgcggatctcctcctcctcacaatcctcttcgccgcctggctcgcagtctgccggggattcagctgcattggtcgaaggctgaggttgtctatcctgctggatgctgcgagtgcgagctgtgtccccacctccagcgcaaatcttgcggcacagttggttaaggttgcttcttctgatggcaaaatggctgcatccatagctggacatgatgacagcaactgtatatga

SEQ ID NO: 4874 - DNA, 1194 bp, Zea mays
  Peptide Sequence Number=SeqID_48249
atggggtgcgcgagctccaaggccagcggcgacgtcgcggtggccgacgtctaccgcccgccgcccaccagcgtttccctcttcgacatcagcgccgtcgaggagccctggctcatcgccaagcagaacaaagccgctgatgacgacgacgacgacgaggaggaggaggaggaggaagagacgaccgacgacgacgaaaagcagcccgccgccaagaccgtggtgccgctccctctcctcgacaagctcgagggctacgagctcgctccggcgtcgtggtccgaggtcagcaaggccctggaggacatgaagcccgtcctcgactccaagtcgccgcctgctcctgctccttctcccaagaagaaaaagactaagaagaagaagaagaagaagactaagacgaagcagcagcagcagcagccgatgcagcccgtggtgcctgctgccacggacgacggcgacgctgctgctggtggcaagaaggcgccggcgacgtcgtccgtcgacgacctaccagacagcagcaggcccgcgccgccggagctcgcgggtcggcgcgtcgtgaaggacaacccgttcctgacgcgcgaccgcgagagcaacaagggcgccggtggtgacggcggcccacggtggaagcggcgggacccgttcgagggctgccccgagcgccggcccccgggcgccgcgggcggcggcgtggtgctgtacacgacgacgctccgcggcgtgcggcgcacgttcgaggactgcgagcgcgcgcgggaggcggtggaggcgtgcgccgcggcggcgggcgtggaggccgtggacgagcgcgacgtgtcgctgcacggggagtacctccgcgagctgcgggagctgctgcccggcgacggcggcgcggcgcctccgccgcggctgttcgtgatgggacgctacgtgggcggcgccgaggagtgcgccaggctggccgagtccggcacgctgcgggagatgatgcgctgggtcaaggcccgcggcgaggcgtgcgcggccaaggacggccgcggctgcgagggctgtggcggcgcgcggttcgtgccgtgctgggagtgcggcggcagctgcagggtgctgctgccgccgccggacggagggacaccaaccaccaccacggagaggtgcgccaagtgcaacgagaacggcctcatgatgtgccccatctgccactga

SEQ ID NO: 4875 - DNA, 421 bp, Zea mays
  Peptide Sequence Number=SeqID_48250
taaccgcggcggaagaaagggaggaggggcttaccggcggcttgattgcttcggtgaagtggtcgaggacgtaggggaggtctcggggatcacaacgagaggttcacgggatgccagagaagatatgggtgcaaggaatcagacggagactcatcggttagctctatccacgcgcggcggcggaagactgaagtccggtgaggtcgatctcgggcctctggtgaagtccggcctggtccgagggcttgaaaagcttcacaggccactggcggagctagccgaagcactggctcgacttgggggtggctggagtgggctggccatggtggccgaagctctggcggcaatcgcgggcggaattgagctcgccggagctaaggagaggtggctggccggtgaaggtgagcgtggggtgaagtga

SEQ ID NO: 4876 - DNA, 1354 bp, Zea mays
  Peptide Sequence Number=SeqID_48251
atggcggtggcaggcgggcggaagcagccgtcacgtcgtcagcaagctcacgccccctcctgggacagcgagaggaccctctcccacgacgtgaagacgacgcggaccgggaaaggggataccccgaaagggatccttctccgcgaaggaagcgggccccgagcccccctaatgatcagaggttcgaaggctggcccctcggaagggttcaacagccgcctcagagcactcgggctccgcgcccactactggctggcccccaaagggttcgacagtcgcctcagacgtagagcgagggatgaccctgggtacattcgatacataaccaaggctcggactacgctcccgagccgaagtgaccgcagtcacttcgccgctccactgaccgacctgacaagaagacagcaccgcctgcgtcgcttcgactgttgtgccactcgacagagtgaggctgacagcagccaaggctcggactcggcctcggctccggaagacgacgaactccacctcgcccaaccccagggctcggactcggcctcggctccggaagacgacgaactccgcctcgcccaaccccagggctcggactcggcctcagctccggaagacgacgaactctgcctcacccgaccccagggctcgaactcagccctggccttagccgacggtctccgcctcgcccgacccgaggctcggactcgacctcgacctcggaagacagactcgacctcgacctcggaggagcctccgcctcgcccgacccagggctcggaccgaccacgtcataggggggccatcattaccctacccctagctagctcaggctacggggaacaagaccggcgtcccatctggctcgccccggtctctcttacggggaggttggccgcgcgaagaggacgggacggcgcgtgcaggcctctcgccccctcccacgcggacgcttgtaaccccctaatgcaagcgcacccgacctgggcgcgggacaacacgaaggccgcggggaccccccggggtcgaaacgccgacaacatgctaaatatgacgtgtgacactccgcaaagagggctcggcgaacagtacatcggcaacggcttctttgccgagtactttttatcgagcactcggcaaagactttgccaagtgtcatttggtactcggcaaagaaaagtcgtcgtcacggtgactggtaacggagacggagcctttgccgagtgtactcagcaaagggtccaccagcggggccctttgtcagtttctttgtcgagtgctctgggaggcattcggcaaagcttgcttctttgtcgacaagcaggggcacagcactcggcacagaagctttatcggtacccag

SEQ ID NO: 4877 - DNA, 1407 bp, Zea mays
  Peptide Sequence Number=SeqID_48252
atggactgggacgattcaggagcattggagaatttcgaggccgcaaaggagaggttcggggcaaaatatcatggggaacctttcgaggatcctttgctagatcctgatatgtacatcgatgaggtcgaccacctatgtgaagtcgacccagagttggtagctgacctggataaggtacctgacgtggataaggtagttgagctacaattggtagccaacctgggttgtggtgagccggttgctgatctgcgccgcgcccatcgcgtcgccccaccgcagcggcgcccccggcccgccgcgccgccccaagcccccgcagcgccggccgtcgccccgcagcgccggccgtcgcccaccacgccgttcgacgcgcttgcagcgccgcccgctcgtgcccccgacgtgccgccgccaagcccgacgccttgccagccgacgccaccgacgcgccgtcgaccacgccgcgctctgccccgtcccgtcaacctcgccttcattaagagacgctatcgtgtggaacctgaggctcaagagcatgcagaccgagtattagagaaaaatgcgaagaaggtgtgcagggatgcattttccaatgctcgtctacaggttgtgaacgcgtacatgaagcgtcgaggtcattctatcaacaactttcgacaatattcagatgtctacttgactgtagaccagtacatggagcgccatcagcaggacgaggacgatgatgaggtcgtagtcaaccatacctatggggctgatggacacattcggttggctaagcgaatggagacatacgggcaagagatggttaagaagtatggagaagactacgattggcgaggagcgcctaccatcgacgctgaagttgtgcattcacttggaggcaaggcgcatggacgatattctatgtttaccggtgttatcgattcgacggagttgcgttctcgtggcggctctttgtcgcaggcgggctgtggtagtagcagccgtagtcgccgctctgtatctagcatggaggaagctatgagggagcagcaagaaaagtttcgtgaagagctgcggcaacaacaaatggcatttctccaacagcaattagagtacatggctgcttacaacgcacaggcgcaacaagcaatgaaccaggcacagcagcaaccatttgttttccctcaatttcagccgctgatgcctcagtggggattacatgctccgccacctccacctccatatcagggattcggggtcatgggccacaacacgccaccaccgatcataccagcaccaggaggagcttatgcaggggagggagcttatgcaggagatgatccaaacccgtcacacgacttcgtcaaccagttcttgacttctggaggtagtggacacaactccaacgaccccgatatgtga

SEQ ID NO: 4878 - DNA, 246 bp, Zea mays
  Peptide Sequence Number=SeqID_48253
atgaagataaacagtaaaagcgtactgttcacgctggatggtaatcgctctagcgtcactctcacattttcaccttctgctaagacgaaggatgaggtgcaaaataagaatgacttagtaatacttgaaggcaatgacattaatgacgaacttgcgccttcagatggtgttgactataaactggttgatagtgatgatgagagttatgatccagctaacgccgacacatatgaagattatttttaa

SEQ ID NO: 4879 - DNA, 87 bp, Zea mays
  Peptide Sequence Number=SeqID_48254
atggcgtgcggaattgagctcgccagagctaagggaaagtggttggccggtgagggatgtgttcaagggaatttggcacgactttga

SEQ ID NO: 4880 - DNA, 492 bp, Zea mays
  Peptide Sequence Number=SeqID_48255
atgtcttcgcgctcccttatgcatcgtgtctttccaccttccaagcccccggatgggggatacccgccgtctttccgcctcatcgttggaggaacgcaactccgtgggagttgcttcaaggatgttcatcatccccgctggggtggaggccgggctgagccggagctctacctcccgcgcaaattcgtgggtcaccctctcctgcggcgttcgagggagagggcgctcactggccctgcaggcgggtcggacttcgacaacgcggggctagttgacagcgggcgtcgccagcctcagcgtgtcgagctcgtcggcttggctcccggtgccccctcctgccggagggcggctgccgcgccgtgtgcacgggaggaccgcccaagatgtcgcgcgctgctagggcggcgttcgtgttctggggcggccctgcctttgcaccagtatggcgcctccgcgcggaggtcggtgccccactcgtccgggaggatctga

SEQ ID NO: 4881 - DNA, 645 bp, Zea mays
  Peptide Sequence Number=SeqID_48256
atggagctcccttcagttctcctcaagcacgccgcgcctggctcaccggcgttcgggccgcggcttcctcctccaactccggtcggccaagagcccagctgccccttgcttctctccctccatctcccagcagcgccctgtcgaagcccttccatggcgccgttctttcctgtgcttgagctccgtcctccccagccatggtgctctgcgcgccgagctcggcctctgttcctctgcgccctgctcctgctcctcgagctcgccctgcgctcgtcttcttctccatggattccccagccgcacccttcagctcgctccctctctgttcgcggcgcccagctcagatcccgcctgctccactgcgtcgccgcccgactcgagttcgtcctggtggccgttgattgggagcagactcggtcgcgcccctacacctcccatcgccggtcatggctgccgcgagcgtcctttccttttccccatcctcgccgtggccctctgctcgattcgctagagctcatctgtgctccccttccatggctgctgtcttcaaggacatcttcctttggcctggagtcttgctgcgctgctggcatctccaaatcccttgcgagctcgccggacctctgcctcaccgtcgtccattga

SEQ ID NO: 4882 - DNA, 948 bp, Zea mays
  Peptide Sequence Number=SeqID_48257
atggagctcccttcagttctcctcaagcacgccgcgcctggctcgccgacattcgggccgcggcttcctcctccaactccggtcggccaagagcccagctgccccttggttcttgttagggactgtcggcccaaacggcccatgccagcccagattcgttcgatcctcggagtttctacctcgatctgtcttcctcaacttcaccgcatcgacatgtcactcgacacgaagctcatcctcggcgctatcggcaagctgttcgatgacttcgacgctcgttgggagcgccgtcttcccaagttattgaccacacaggaggcctctccggtcatctccattctgaccccgactgtgactgttggggccacagtcatcgccgacaactggggcgggggcttcaacgaaggcgagtacttgttcgagcagtactgcgcggcgccgtacatcgtcgccgacaattggggcggattcttcggtggcgaggacgcggctaccaacgccgagttcgccatcgatccgccaggcgaccccgagagattcgtcctccccaatacctccacctcccagcagcgccctgtcgaagcccttctatggcgtcgttctttcctgtgcttgagctccgtcctcctcagccatggtgctctgcgcgccgagctcggcctctgttcctttgcgccctgctcctgctcctcgagctcgccctgcgctcggtttcttctccatggattccccagtcgcgcctttcagctcgctccctctctgttcgcggtgtccagctcagatcccgcctgctcaactgcgtcgctgcccgactcgagttcgtcctggtggccgttgattgggagcagaatcggtagcgcccctacacctcccaatgccggtgatggctgcgacgagcgtcctttccttttccccatcctcgccgtagccctctgctcgattcgctag

SEQ ID NO: 4883 - DNA, 627 bp, Zea mays
  Peptide Sequence Number=SeqID_48258
atggcctcagggcaaacactactgaaaaggccctcgctcacgtcccctcatgagggacgagaaccagccattaaagccaaagagccggaggtccggagtgcaggtggcactaacggtctcgtcggcggaggcaaccgcttctacagaggaagcctcacctatggcgaccaccacctcagcaccgacgacagcggccacttgcccaccaacaccgcaccggcgaacggcggccgccctaaagcgcaccggcaggtcctcactcccgtcctcgccgaggctgtcccagaacacgagtaccgccctcgtggcgtacgacgtgttgtgcgaccccccggtgtagccgacggcgcatggaggacctggacgtggccggcccgcgcacggcgcgaccgacacccgtgcggcggacgggcagccgcgctccgccccagcggtaggaggtggcaccggaagcagcgccagagccgctcgggccggggagccagacacgcggcagctgccagcgccacggacggcgaacacccttctcccccgatcactgagggaaggagcgggccgctgcccatgcagaggtgggccccgactttcctcaccctcctccccagcatggatgatgaacatccttga

SEQ ID NO: 4884 - DNA, 1509 bp, Zea mays
  Peptide Sequence Number=SeqID_48259
atggcgttgagggtgtcccccgtgtcgcatggcgccgcggcagcgccgctgccgccgctcgcccggaggaggatggcccgtggggtggtggtggccatggcgtccaccatcaacagggtcaagactgtcaaagaaccctatactcctccacgtgaggtacatcgccaaattacccattcactaccacctcagaagcgggagattttcgattcacttcaaccttgggccaaggataacctattgaacctgctgaagccagttgaaaagtcatggcagccacaggacttcctaccagagccgtcttctgatggattttatgatgaggttaaagaactgagggaacgggcaaatgaaatacctgatgagtactttgtttgcttagttggtgatatggttactgaggaagccttaccaacctatcaaacaatgcttaacacccttgatggagtccgggatgaaactggtgcaagtccaaccacgtgggcagtttggacaagggcatggacagctgaagagaacagacatggtgacctccttaataagtacatgtaccttactggacgggttgacatgaaacaaattgagaagaccattcagtatctgattggttccggaatggatcctgggactgagaacaacccgtacttgggtttcctttacacatcatttcaagaaagagcaacatttgtatcacatggaaacactgcaagacatgccaaggagtatggtgatctcaagctggcacagatatgcggtacgatagcagctgacgaaaagcgccacgaaacagcctacaccaagatagtcgagaagctcttcgagactgatcctgactacacggtgcttgcattttctgacatgatgaggaagaagatcacaatgcctgctcatctcatgtacgatggcaaggacgacaacctgtttgagcacttcagtgcagtagcacagaggatgggtgtgtacactgctaaagattatgccgacatcctcgagttcttggtccagaggtggaaagtcgcagatctcaccgggctgtctggagaagggagaagggcgcaagatttcgtctgtaccttggcaccgagaatcaggcggttggatgaaagagctcgggcaagggcgaagcaagcaccggttattcctttcagttggatttatggccgcaagagcgaaggcgaacacgcttcccttcgctctacgacttcgtcttctcatcgcgcagatgaaggccacattcacagaacacgtcagaacaagccgaaggcgccgaccggacggagacctgtgcggtcccccttcgctctcgtgttgcaagacgaaggccttgccgaagtctacgggactcccgcgtcgtcaccgccaggagaggcccatatgggatcggtccatggtgatggggcccgcgaggacaagcgcgataagggtcgtgtctgtaataaggtttaccttagggttgatttggtgacaaggggatcacgggaggattggaggggattgagggggaaataa

SEQ ID NO: 4885 - DNA, 339 bp, Zea mays
  Peptide Sequence Number=SeqID_48260
atggcccccaagcgagctaattcgaaggctgccccatccattgacgacgcggcgaaggcagtgcttctggcggataagaaaggcaaggccctcgcggacaccaccccccaagaggccttcgaagacgacgctatcaacagcaaaagacagcaccaagaccatcccacccctgacggcactatacgcacgtgcagttccgaaggcgcgccacaagcaccaccgccaggcttcgctccaccagagggcgaagacaccatagaggacggagaagtcatcgacatctcagccaaagaccagctaaagctgcgagctctgcgcatcaaaaaccaccacctctag

SEQ ID NO: 4886 - DNA, 444 bp, Zea mays
  Peptide Sequence Number=SeqID_48261
atggtggttcggcgaagtcttcctgtttgggtgcttggtggtggttgtggtgtggtggatttgggtgatgcagaggcagtggtggtaagacctgcacctcttgatggtgctggatttggccattgtggtgtcgtcccctctgaacgatgcgacggctacctggtagctcatgatgtactgagccgggtcggtactgccgttgtatttggggtaggtgccggccctgaagttggcgggccaaggcgatgcttggagttgtggagccaggggccttcgctcatcgaggtagttgatcccctggaaagctgtggtggtggggccgcactgtggtatgaatgggtctccggcttggacgtactgctggagaggcgcaggcggtgcaggcggtccgcgctgcaggttgtactggacttcgccttgcatgagcgctatatcttgttctag

SEQ ID NO: 4887 - DNA, 1002 bp, Zea mays
  Peptide Sequence Number=SeqID_48262
atggccatgatggcgaatgatgaagaagttgatgactttggcggcttggagagctcagggacccgggcagaagatgtgaggacgggggttggagagcaaccggcgccacctaccggcgctggcgaggaccctgcggcagccgccgtgccggatggcgaagacactccggtggcacctgcgcaggctgccgaagacccagcagcgccggctgcccctttgcaggttccaacgtttaggcctgcacaagcaacccctactgatgatattaattttgtggcggttgcgaatgcaatgcctgttaatgaaaatggggacttcgcttgccgcaacaatgtgtgggcttttgcttggatgacttgtcgtaaagacttcgtacgacgcactcgtaatcctgtaagcactaggggatgcctttgtcttgactatgtgcggcccttcccacttcggctcgagcttgccccggcactctgttcgtgtggtccttacaagtacgaggtccccttcgctgatttctcttgggacgactgtgttgtcgcgccatgctttggtttggacctggtacttgttgagggcctgcagggcgagaacatggtctccgtcgatgagatctttggagatccatacatcaagcggaagggtgtgaacccggttgctcgtcactctgtcgtattcagggcccatacgacttcagatcttgccattggcgcgttcgacgacaccgttggattgtgggtggtatacagaggcaaagacaggcttggtgccgatggaactgcagaattccctgaagtcttggctgtcgaactgtttgccgttgtcgacagtgagttcggacgggactccgaagcgacagacgatgttttgcaagaagaatttttgtgcagtcttcgatgttatggtggagattgccctagcctcaatccactttgtgaaatattcaacggcgacgaaggtgaacttgaggttcccttgagttgtgggcagtggtccaacgatgtctag

SEQ ID NO: 4888 - DNA, 435 bp, Zea mays
  Peptide Sequence Number=SeqID_48263
atggggaagcatgtcccatcactcctcatgctcctcctcagccgaggcagggtcccactcgacagtccaacccggtggcaagatggacggccaagtcactccagcaaccatgtcctccagagaacctgtaaaattatgccacaaatcagggctcaccgccttggcgtacaatgcctcactgacaccgactgccgtcgtgtagtgaccgcacttgtacccaccataaccggaatgggagaccacgtctcaggtcgcgtgaggggatatgtctgcaggtttggcataaaactggggattgccttccaaagctggggcaggcagatcctctggggcaggctctggtgctggatccggggctacctcctgagtaactccttgctccggcacgaggatgtattctccgtcggcgaggttgcaatctatcgaatgcaatga

SEQ ID NO: 4889 - DNA, 432 bp, Zea mays
  Peptide Sequence Number=SeqID_48264
atgggcaagagcaagaaaggtggcggctcttcgcatcactcgggcgacaagcgcaagcgtgagccgactcctccctcgaaggacttcggcgactcggagtactcggaggaggagttctcctccgagtccgagggctctccggttcctgcctctcccccagcgtcgtctgatgattcagacgactccgaggggatcgccgcggaggtatggacttacatccgggccgtcgagcgcgccgggcttgagggctcggatgagtcggagtactcctcggatgaggagaattcctccgactcgtccgaggagggtggaggcagcgacggcgatgacaacggaggcgacggtgacggcggcggcgacagcggcaagggctgtgacggcagcggcggcagcaagggcagcagcaagggaagcaacaaggccagtggctag

SEQ ID NO: 4890 - DNA, 702 bp, Zea mays
  Peptide Sequence Number=SeqID_48265
atgggctgcgtgaaagggaaatgtgcccttgggccatttctaagtattttggtgattgagtgccaacgcatgtgcttttgtgttaatctatgcaaagtggtggacaaagtgcaaatcatgtcaaaagtgctagaaacaggaaaagaacaattggaaatgtcttggctcgagcagccaagactttgctcagtctgggagcaccggactgtccggtggtgcaccggactgtccggtggtgcaccggacagtgtccggtgcgccaggctggctcgtgcgaactcgctgctctcgggatttcatcggcggcgtacggctataattcaccggactgtccggtgtgcaccggactatccggtgaaccaacggtcggccgggccaacggtcggctgcgcgatctgcgcaagacacgtggccgagccaacggtcgggagagggcaccggactgtccggtgtgcaccggacagtgtccggtgcgccaacggctcccaggcgccaacggtcggcttcgccaggaaaggaaagaaatccgcaccagacagtgtctggtgtgcaccggactgtccggtgcgccaggcgacagaaggcaagatttgccttccaggaatgctctcaacggctcctagctgccttggggctataaaaaggacccctaggcgcatgaaggagcacaccgagcattctctaagcattcctaagcactaa

SEQ ID NO: 4891 - DNA, 258 bp, Zea mays
  Peptide Sequence Number=SeqID_48266
atgtctttgagcttctgccatgaagtgatagttcttggccgaagagaagaataccatgtctgggccacattcttaactgccatgacgaaggatttggccatgacagctgttgggggccttcggcttccgaaggtacctttggacttaggtcaaaaccacagggtgaagaagcataaagaatacgaaggatggtgcatagccctatgcgtagaggagcttcggcatgatagtagaaaaggaaaccgacttaaagagtaa

SEQ ID NO: 4892 - DNA, 420 bp, Zea mays
  Peptide Sequence Number=SeqID_48267
atggtgggtggggccgaagtctccatggatatttccgtggaggactaccttgtgagcggggtcgcgattttcgacgcccacacacggcgaggacctgtcagtgagttttttttgaatgggggtcagggtttctggcgtgaccatggtgcagggtcagagtctaggcaactgactgttgtcccggcgccgacggcagctgggtcggtggctgtggcgactggggcgaaggggtcttcgcaggacccatggtccaggttttgcgcgagcggcgaaattgcttcggccaccaccgctaaggacatggctggctcagttgcgcaacagctgaagcatgcggtcgccttcgctgagcacattgcgtcaggggccctgacctcggagtttgctgccgaaaggcgacgactcgagggggaggattga

SEQ ID NO: 4893 - DNA, 798 bp, Zea mays
  Peptide Sequence Number=SeqID_48268
atggcgaacgccatccgtttgtatccaccagatatgcaacctgaaattcctgcatttggggattgggaaaccactggaaacacaccttacacacaaaagttcgaggatgcacggaagaacaagaaaacaggaattcttgcacaaccaaatgatccaaggagggatctggaacctcctcgcaagtcgcctttgcacccaacggtctacaaaactaatcctcaagaccaaggtccaaggaacccaccacatcgaccaagacctgaacttgacaaccaacgacactctgaccggcctactcaccgtgagtctgcaccacgaagacattcaaatcttcagagagaacaagggagtaatgctgggacaccaagaagcccctacagaacagctgctgggtctgcttcaccaatgcagccaaacaaccaatcaaagccaaagcacaggtcaactggaatgcagactccagagaggagggcatcttcagaggggcttggccagcatacacctggaaggagcaggatgaagccgggtggctatgagcctgaagaagtggctgtaccaccctttggcgaatgggatgatgcaaatgcagcatcaggtgaaaagtacactggtatcttcaacagggtgagggatgataggttgtcacctacctcttctgctaggcaaccgtctactactcgtagtgaagagaataaggtgcaacagcaagtgatcaacaagctaccagtaaaaattaattgtctggtaatcaactgtgacatccagctatccgaccttgaatcttggtctgattactaa

SEQ ID NO: 4894 - DNA, 330 bp, Zea mays
  Peptide Sequence Number=SeqID_48269
atggtgctcttctttctgtcctcctttgagggcgaagtgatccgtgtccactcctttatgggcgaggtggacagtggagttttcgggcggatccaccacgcggtgcagagttccctcttcatccactatgcacgagatggttccaaagcagaacatagctccagggcgaagggccatcttgcacttgaaggccgcgttgagaggcgtaataccctacttcctaggatggatctatatgtggagtacatccgaagtttcttgcgacttagagcccaggcgccaacagtgcctaatgagattgtcatcgaagccatgatcaaggggctctga

SEQ ID NO: 4895 - DNA, 867 bp, Zea mays
  Peptide Sequence Number=SeqID_48270
atgacattgacctcccagtcaacgcgcaggaaagacccacccctcccccttcctgctactgaggctatctgggctcgccatgctctgctcgtggcgggggcggctgtagaggctggaatgtgtctgtacccctctgcggggtgcgccacgggcccgagctgcaggtggcccggcagtgtgcacctcctctcagggcctcttctcctagcgcttgtccagctactggttcgcatctcgccgtggcgcgggtttcatgcctccgatgaggtactgggcccattcatccgcagtgatgtagatgtctggcaccaggaacaattgctcggaagtggctggtgctttttggagtatggcttggacgaaggccgagtcgttggatccccgacaaaagtcttcaattactaccgcctcagcgacttcggggatgcggttcctcatcgtctgaaacctcttgaggaacaatcggagagtttcatcattttggctcctgatggatttgaggtcccatggctgcgccggcttgtcgaagagggactggaaattggcgatgaagcatcgactaaagtcgctccaatcatcgatgcagtgccgggtcgtgtagatagccaaccagccgcccagatcctgcttggggtcgtacttgtcaatgttggagaccttgaagttgggaggccactggatggcccggagacgcagatcgtgcgaagcgttgatggagctccacgtgtctcaccgactgttgatggtgtgacgcaggagtccgtcggctatctgagccagcacctctccgacttcactcggcgtgttcattgcactagcaaagttggggtacaggttctgagcgaagagagggttctctcgccatag

SEQ ID NO: 4896 - DNA, 243 bp, Zea mays
  Peptide Sequence Number=SeqID_48271
atggtggcgaacgcactatggctccgcggaaggctcggcgcaggggagcacgctgcagacaacgacgggcctgcggactatagcgtcgggcgaagctccaagtcggtggcggcagcaaatggagcagagggcgcgaagcgagcagaatgcacgagggagaatgcgcggggaaggaggagagcgaaccatgaccaatttttttatagcgaggaggagggggctcagcgaacatttgaggagtaa

SEQ ID NO: 4897 - DNA, 519 bp, Zea mays
  Peptide Sequence Number=SeqID_48272
atggggcagaggcttacccggtctacgttcaccggcggtcaggtgaagtccggcgaccgtggactggcttctccggtgaggcaaagtctgattcctagctcggggagcttcaccgaggcatgcacagtcttttccgagggtcgggcgtggctgggaagggctctgctgggccggtctacggtggcggggaatcgggtggccgcgggcacgctgtctgcagggcaaacgccggtgatctctggctccggtgaggttgagcgtgcgcggaggagtacagtcgatgtctatgggggctttatagacgcgggcgcgacaacggcgccggctcggctttggcacgacgcggggcacacgggcgcgcgcacgagcgtgctctgggaaggtcagagagcgtcgaaaacgtggctctttgcttctgttcgtgttctaccctctgctgagcggccaaaacgtgcgaatcttgacctaagacctgtgagagatttcttccctgcacctagggctacctttttgatgtga

SEQ ID NO: 4898 - DNA, 1044 bp, Zea mays
  Peptide Sequence Number=SeqID_48273
atggatcctggcacacatatgttatgcgctcggttctaccccctggaaccaagtgtgacagaagtggtatcagagctacgcccctcagccccggcagatcccggtctacccagtggtagtcgaggaagttccagcggatctccctcccatccgagcggagaatgtagtcatcctggaggacagctcagaggaacagctaccgacgcccaccccgttgcggagtccctggccttcgcagctaggtcatcgatgtcagcaccgcctgcaccagccttccaagcacctgcacccggaggcgacgaccccgacgactccggagacgacgatgacgaggatgacgacgacgaagaaggtggagacgaacacgtccacgaggaagctgactacgcccagcaggacaacttcatggggtttggtcctgttgtcgaacattatacatcaatgttcgagacggggcatttccccaacctgctgcaagaagtgctgcacacgctaggcacctacgtctgccccctgtacgaaacaaggcgagtgagcgagcctccccgggcttgctattacaccactcgcattcacatcagggtgatggatgcatgggacaggggattcaggactctgtctgctcacgagtccctaacaccactgtccacctacgctgcctcggtcagcgatgctgcccgtcagaccctgtggtcgctcagccacacctaccggcagcagctacagaacacgaggttcaggcatcttcctcagcgtctacgtggaggaagtcagaccagcatcgtcccaggtgaagctggtgaggatcgcctcaacaccctagctggtgtagtggccggtctcaacaccgacctggacagtgccaccctggatctctatagggtgcatttggagctggagaatgcccatgccaggattgcagccctggaagcccaactgcaaggactggatccgcccgaagctcaggtccccgccatggcgttgtctcctccccgcaagaggctgcgctatggagagcccggatccgtcactaggctactttag

SEQ ID NO: 4899 - DNA, 966 bp, Zea mays
  Peptide Sequence Number=SeqID_48274
atgaggaagactttgacaaagatgttgatgagtactgagtctagcgactcgtcggtcatcttcctgtgggagatcgcccatgttatatccgatatggtgtgtactgtccaaaccacccgcgtaaacaccaacagtattcctacacccaggcaggctcatgtctacccagttgtggtggaagaagtcccagtggagctacaccaccttcatgtggagagtggagtgattttggaggacaggtcagaggagattttggcaacacccaccccgttgtcagaatcacatgcctttgtagttggagcttcatcttcagcaccgccaatgccagtagctcgagcccctgctcctggaggcgacgatccagatgattctggtgatggtgaagatgatgacgatgaggcagaagaagaagaaaacaacaatgaagaagccaacgatgagcaggaggacaactttgttgggatatggcctgtcactaagcattacacctcaatgttcgagatgggacacttcccaaacatgctacataatgtactgcatgctctagcaacctatgttcgacctctatatgacacaaggcgagtgtctgagcctcctcgggcttgttactacctcactcgggtgcatatcagagtgatggatgcaggagacagaggttttaggactctatcagcccatgagtctctgatgtcactgtctacctatgctgcttcggtgagcaatgctgctaaaagagctatgtggtccgtcaaccacacttatcggcagcagctgcacaacacggagtacatacatctccccctacatccacgtggagaaagtaagaccagtgttgttccaggtgaagctggagaagatcgcctcagtacccttgtaggtgtggtggcaggtcttaacagtgatctagacagtgctaccctggatctcttaagggtacatggagaacttgaagaagcccatgtctag

SEQ ID NO: 4900 - DNA, 366 bp, Zea mays
  Peptide Sequence Number=SeqID_48275
atgaggtacttgatacatgttgggaatgaggggagtagcagcacgtccactttcactctcataataacgctgcccagagccagacagatagacaggcagcagcacaccaccaacgacgagctggagaagacgtggtgcatcgccaagccgtcggcgtcgaacgagatcctggcgcagaacctggactacgagtgctccgaggtgagctgcgccgtgatccagaagggtgggccgtgctactacccggacagccctgtgtcccgcgccgccgtcgccatgaacctgtactacgcctacagcggcaggcaccccctggaactgctgcttcaacaactccgcgctcgtcgtgcagtccgacccaagtag

SEQ ID NO: 4901 - DNA, 708 bp, Zea mays
  Peptide Sequence Number=SeqID_48276
atggcgatgtgtcctatggcgagcacgtggtgtgagattcgagttgaaagtcgtttcaaatcctacataaagagtatggataaatcatggatcacaagccgcccaggcacacagcagagtagcagacagccgcggtcagctacgtccagctaccagccgctaccagccgcggtccagtccagggaggcagggacttctactgccagctaccagctgcggtccagtccaggactccagggactacaggccatttcaatcgggtattcagggaggaatcttgttattgaccaatatgatgtacctaaagtaattaattatggtgtcacaattgccaaggctatagagctcccaaatgcacttgagcatgcaggtgccacgctacttcaagaagtttatgttctttcaactctagcaagggacaattcacagtacttgaatgctatacagacaaatgcacaccatcttattaggtatctagctactgcagttgttgtcaacaaaaggagaaggaatatgcttaaagagttgattaaggtcattcaacaggagcaccatagctacaattatcctgtaactgaatttctggaatgcttatatgttaactgtgattttgatggtgctcaagagaaactcatagagtgtgagcagtatgacgacttacggttggttgctaaatctacagtacaacaacccacggttggtcgctaa

SEQ ID NO: 4902 - DNA, 879 bp, Zea mays
  Peptide Sequence Number=SeqID_48277
atgcctccacctatccaccaccccattctcgagggcgtaggagcatgcgcctcgtccccatattcgtccgacaccagccccaacaccgactcgcacagtggctattgcacgtccacgaggatgtttcacatcatgcgcgcaccatcgttttcgccgtcgtcggacgtcccgttcgtcttcccggccttcgccatgatcttcctccccaacctgctgcccccgcccatggtcacagccgtgagccgaccgacgctagtcgatgtgggtatggggcgagtcagtcatgcttttggcctttcttcgtgtgtgccgtcgaggaggatatgctggcgcctgccacgcttaggttatcttgactatgaggagtctaggtctgagatattggaccaccaaggttgggctgggaagacactcgcattctctcgcgcttctcggattgatgcctggtgcgggtgcctctcggtttggagcagctccgactgggcttctttctccgcttgtgtgctctctccctatatatctagcggtatactacctatgtcgcctccagatgcccaggtcttcgtcgtgtccttctccggcaacgaacagggttctaaggcgatcgaaaggggtcagggaggttcaggggaatgtggcgaacccggccatgagcatggcaccagcataggagcattggaaggtgctggtccacgacgaggtgcctcggcggcggcacagctctactccgacgagcaatcgtgcacaaccgagggcagacaaggggaaaataggggcgagggtaggttggttacctcgagagaaggctccagggcccttgaacggtgcccgaggcacggtgggatctcaggtcgacagtggcggaggaagggccagtga

SEQ ID NO: 4903 - DNA, 372 bp, Zea mays
  Peptide Sequence Number=SeqID_48278
atggctgcgattgggcagcgttattatgagagtgaaggtggacgtgctgctacttccctcttttccaacatgaatcaagtcagagatcaagtctccactgttcggggatataacggcgatccgaatcgatttactcagttgaggatctctaaccacacgacatatgtagcactcaacccttgcatatgtcaaccgttcccacagatcctccacaatgtgaaccggtccgcgctacccgagagcacagtactcctccgtccagcctctagccaggagggtacacgctactcccaccatctcccgcgcccagtgcgcggttatcttttcacgtatggaatagccgggttcaagcttaccctgtcccatatctag

SEQ ID NO: 4904 - DNA, 984 bp, Zea mays
  Peptide Sequence Number=SeqID_48279
atgacggatgcggagaaggaggtagcaacagaaagacggatggactcaccgcctcgatgcgattgtggagactgtgctgtcatcgacgaagaccatgagaagcagttcgtgtgtccgaacattgattatcgatacgggtggcgtaagtgtcgtttcagagagtggttgtatggtcctttgtcccattggccagagccagaggagacggggaaatgcagttgggagagttacgatgacaaaggagaggtgatgcgcacaatagagtccaagagactaatgggacagaagatgcgttgtggatctcagctcgtcgattcgtatattaacgatcgcatacgcgacatgcgtaggtacgcaaaatctgccttttatgatagcccgaagcgtgcagagtataggaggttgaaggcggcagatgagaagagagcacaggatgcaagggaatgggaagcggctcgagccgagaaacagatgttggataatcttgctgatcgccttaagggaaagattggatgtggcgtaaactatttggccgatgaggcgcatgcaagatatgttcaggataaaatggcgacggttgagctgatggaggaggaggaggacgacgacacatctagattgagtgagcttattgctctcgcagaggcaagattacatggagaagaggaggacgacacatcaaggttgagtgagctcatcgcactagctgaggcaggattacgggctcaagaggaagaggacgagtttatgtctcaggccaccgaagaggtagaggcggcttattacaagcagaagtctgatgaggctgaggctgaggatgagctattctcccaagctgcagatgaagcagaagccaattattacaagagaactgttgacaagtgtgatgcaggacaatgcagcaagtggaatgaggttgtcgttgaggattgcgcgacggatggctccaaagatgagttacttatagattgtgattctgattga

SEQ ID NO: 4905 - DNA, 759 bp, Zea mays
  Peptide Sequence Number=SeqID_48280
atggcgctttcccccctcctccttgcggaaaggcgacgcaggggcagccgaagtgaccgcagtcacttcgccgctccactgaccggtctgacaagaggacagcgccgcctgcgccgcaccgactctgagccactcgacagagtgaggctgacaacagccaagtctggccctaggcgccatgggaaactccactttgcccgaccccagggctcggactcgggctcagccccggaagacgacgaactccgcttcgcccgaccccagggctcggactcgggctcagccccggaagacaacgaactccgctccgcccgaccccagggctcggactcgggctcagccccggaagacgacgaactccgcttcgcccgaccccagggctcggactcgggctcagccccagaagacgatgaactccgctccgcccgaccccagggctcgaactcgggctcagccccgaaagacgacgaactccgcttcgcccgaccccagggctcggactcagccctgacctcagccgacggtctccgcctcgcccgacccaggggctcggactcgacctcggcctcggaagacagactcgacctcgacctcggaggagcctccacctcgcccaacccagggctcggaccgaccacgtcacaggaggcgccatcattaccctaccccaagctgactcaggctacggggaacaagaccggcgtcccatctggctcgctctgctatgcgagtaatgatggcgccccgcacgctctatga

SEQ ID NO: 4906 - DNA, 522 bp, Zea mays
  Peptide Sequence Number=SeqID_48281
atgcaggcggcatgcaaccgcaccaagtgggcgcaccctttcgactccaacacgtccagcatggaggcccaggcccacacgtcatgtaaccggcgcgccggttgctacatgcaagaaactgcaccgccactcgcgccactaccgtacctcctcgactgcggaaccagtaccgcgactcgaggcaaccctgcgtatgacctaacagtgccagccaggcacatcgatcacggggaccgggaaagggggataccccaaaagggatccttctccgcgaaggaaacgggccccgagccccccctactgatcagaggtttgaaggctggcccctcggaggggttcaacagccgcctcagagcgctcaagctccgcacccgctactgttcagagcttcgaaggccggcccctcggaagggttcaacggccgcctcaggccactcgggcttcgcgcccactactgatcaggggttcgtaggctggccctcgaagggttcacagccgcctcagacgcagagcgaggaatga

SEQ ID NO: 4907 - DNA, 843 bp, Zea mays
  Peptide Sequence Number=SeqID_48282
atgcggggcgtcatcattacctgtttaccggggcgagccagatgggacgccggtcttgttccccgtagcctgagttggcttggggtagggttgggcgaggtggaggctcctccgaggtcgaggtcgagtctgtcttccggggccgaggtcgaggccgagcccctgggtcgggcgaggcggagaccgtcggctgaggccagggccaagcccgagccctgggtcgggcgaggcggagtttgtcgtcttccggggctgagcccgagtccgagccctgggtcgggcgaggcggagttcgtcgtcttccggggccgagcccgagtccgagccctgggtcgggcgaggcggagtttgtcgtcttccggggccgagcccgagtccgagccctgggttgggcgaggcggagttcgttgtcttctagggctgagcccgagtccgagccctgggtcaggcgaggcggagcttcctatggcgcctgaggccggacttggctgctatcagcctcactctgtcgagtggcacgacagtcggagtggcatgggcggcgctgtcttcttgtcaggctggtcagtgaagcgacgaagtgacggcggtcacttcggctcagtcgacttaaaggcgcacgtcaggataaggtgtcaggccacctttgcattaaatgctcctgcgatacggtcggtcggcgtggcgacttggccaaggttgcttcttggcgaagactgggcctcgggcgaaccgaaggtgtgtccgttgctggagggggccctcgggcaagacgtaaatcctccggggtcggctgcccttgcccgaggctgggctcgggcgaggcgagatcgtgtcccttga

SEQ ID NO: 4908 - DNA, 207 bp, Zea mays
  Peptide Sequence Number=SeqID_48283
atggggattcgtgtcgcggggggaatgggatttttgctgaccttggaaaagatctccttgccgatggtagctctgggcacccgtggtgctcatcgtggcagcaaattgatctattcagatgagatcaactgggaacgtgagctcgacgccccggtttccgccctgagcgtgggcagaacactttcttggagcgccattcgaaattga

SEQ ID NO: 4909 - DNA, 1350 bp, Zea mays
  Peptide Sequence Number=SeqID_48284
gatcagatcaacattgaaacaaaaataaaaaatatacggtttattggggagttgtgcaagttcaagatggctcctccagctcttgtttttagctgtttgaaggttcacaaaggaaagtacagccaagttcatctgattgctcttctcactgctagtctcagccgctatcatgatgactttgctgtcgcagtggtagatgaggttttagaagagataagggttggattggagttgaatgactatgggatgcaacaaaggcggcttgcccacatgcggttccttggagagctatacagctacaagcatatagattcatcagttgtttttgatacactgtaccttatcattgtgtttggtcatggaacacctgaagatttatttggagagctacgaccaaacatgtctaggtatttatcaatcgaggaacttgttgctgcgttagttgagcttgaagaaaatgagcgctcagccccagtagaaaaggttgaaaatgaaagacactcggacaatgaatctcataaaagacaggcacgagatgctggtccatctgtgaatggtggaagcgctgcaaatggaattgaggaaaatggcaaggatcatgaaatagcagatagtgagagctattcagatagtggcagcattgatggacgggaagatgaggatatattatctgaggataaatcaaatgatggctcagataatgaaggcgacgatgaagatgatggcattcctgttggttctgatgaagatgaaaatgttgaggttagacagaaagttatgaaggttgatcctaaggagcaagaagactttgatcgagagctcaaagcccttcttcaggagagcttggagtcccgcaaatcagaggcccgttcaaggctccctctgaatatgatggtaccgatgaatgtccttgaaggttcatcaaaagactcgagggccacagaatctgagagtggagaagaaacagtagatgaagagggtggcaatgctgggggtagcagcaaggtgcgcgttaaggtgctaatgaagaaagggcacaaacaacagacgaggcaaatgttaattcccgctgatagttcaatcgttcgaagcacgaagcagcaagaagctgccgagcttgaggagaagcagagcattaagcggaggatccttgaatacaatgaaagggaggaggaagaactgaatggagcatcacaaatggggaactggggtcaaggagctaccaacaccagcagtatcagatcaggtggccggggcagctgggatggttcagcacggggaggtggtcgacaacgacaccacatcgccggttctggtggtttctatcacagttatggcaggagaagatga

SEQ ID NO: 4910 - DNA, 1023 bp, Zea mays
  Peptide Sequence Number=SeqID_48285
atgaagaggaggtgcaggagcttacaacaatggagaaatgtgcggcagggatctgaatctagcgctggggaaggactggtggctctggactctggagaggacgacgtggaggaggaggagctcctcgccacccgttttcttggctcgcggcggggtgggaatcacgccgagcgccggctgtctcccgtggccaccatcaccgcctgcgtgcttgcgctagagctagctagggttgcagaaacgggaaaagtatgtgcgaaatctcacctcggtcttctgctcctcgagtttctgctgctcgatctgggtggcgagctcctccgcggtatgcgtcgtcattgtctcggtgtcgtgggaggggatatgagggcagagggatggcgacggcgatcgtgggagctgaacgggggctctttgctcgcgccggacggttgcgagctggcggcggaagagagggtgggagaggctgcgtcggcggcggcggcggttccctcgggcgtgcgaggaggcgcccgtgagcaggagagccccggccgccgcggcgctctccagccggcggattggcggtcgtggagggggcgcgaggaggagcctcagcgtccgcgtcggtacagcttcaggaggcaccggtcgggcgcagcggagtgggcggcggtggtgctgttcatggtgcttgcggtcgtggtgctgctgggcgccgtggccgtccttgtggtggtgctgctgctgcagccccgtgtgtcgtatgtggtggtgtgggcgggcctggcggtgctctgcgcctacccgttccgcgtgcccgccaggggcgtcctctcgctggccgccgccatggaggccgcgctccgcgacggcgtggtgccgttccgggtggatgtggaggcccggacgcgatggaaggtcgcggggatcatcggcgtcgaccagtggacgcgcctggcgtgccagctccgcttcttctggcccaacggcaccgtgctccccttcagatgcatctccaagtccaagttcttgttcttctga

SEQ ID NO: 4911 - DNA, 1080 bp, Zea mays
  Peptide Sequence Number=SeqID_48286
atggagccaaagtcgaacatgccggacaagttcatttttctgccatcagatttctacaattggaatacaattgttataaggtactgcgctggagcatcacttgctggggacgtagacggggaagacctgatagggaaaactaaggtattcctaagagctggtcagatggcagagctggctgctcgaagagcagaaattttggctaatgccgcgcgactaatccaaaggcgtataaagacacatcttatgcgaaaggaattcatcaaattaagaaaagcctcagttcaatctcagaagttctggagagcacgactagctaaaaagatttttgagtatatgaagagagacgttgcttcaattaggatacaaaagcacgaagcaagagagaccggcgcacttaaagaagcaaaagacaagctagaaaagagagtagaagaactgacatggcggttagacgtcgagaagcgtttgagggctgaccttgaagaagcaaagagccatgaaattgaaaagttgcaatctgcactgcaaaaaatgcaagaaaatctcaaggaagcccatgcagcaatagtaaatgagaaagaggctgcaaagttagcgattgaacaggcaccaccaaagatagtagaagtgccggttattgacaatgcaaaacttgaggagttgacaacccaaaataaagaacttgagatccaccaaatttgtctcaaggaggaactaagtacgtttaaacagaaggctgaggatcttgaaaataagcttattgagttccaaaaacagtctgatgaactgtcacaggagacacaagaacaagcatccaaagttattcaacttcaagagctggtcgaaagattggaaagcaagatcgccaccttggagtcagagatcgagttgctccacaacaattctgcactagctattcaggccgtggttactcctgaaatgaatcagacaacaataattgaggaatttgacaagggacaccagcttgaagaagttaaaacggtcaatgagcaagtggttgttcctcctgtaaagaatctaagcaaacaaaaatcccaacaaatccaagaagactaa

SEQ ID NO: 4912 - DNA, 591 bp, Zea mays
  Peptide Sequence Number=SeqID_48287
atgggggatacccgccgtctttctgccttgtcatcgggggaacgcaactccgcgggagttggtacctttcagccatcgttcggcttcaaggattttcatcagccggcctggctgtaccccccccccccccgccggcggtcacccaagacggcgaccaccagcccctgggtggggagaagcaagccgggctgcgatcttggtcccaccctcagcatcaaggatgttcatcatcctcgctggggtggaggccgggctgagctggagctctacctcccgcgcgggttcgtgggtcaccctctcctgcggcgttcgagggagagggcgctcgctggccctgcgggcgggtcggacttcgacaacgcggggctggtcgacggcgggcgtcgccagccccagcgtgtcgagctcgtcggcttggctcccggtgccccctcctgccggaaggcggctgccgcgccgtgtgcacgggaggaccgcccaagatgtcgcgcgctgctagggcgacattcgtgttctggggcggtccagcctttgcaccggtatggcgcctccgcgcggaggtcggtgcttcactcgtccgggaggatctga

SEQ ID NO: 4913 - DNA, 739 bp, Zea mays
  Peptide Sequence Number=SeqID_48288
atgggccgagtcttctccaacacgctccaaggccctcccctgcggcgcgggggttgggtcccacacgtcatgcaagccggctcagagcagaagaagccaaaccgcccagcggtgcgcacaaccgcccagcggttacaagtgaccctccacttttgcccagaccaacgggcgaaaggggcggcagccatgcaggcggcatgcaaccgctccaagtgggcgcgcttctccgactcccaacacgcccagcatggagccccaggcccacgcgtcatgcaaccggcgcgccgaatgcttcgtgcatgcaactacaccgccacttgcgccaccaccgcgcctcctcgactgcggaaccaataccgcgactcgaggcgacccagcgcgcgacccagcagcgccagcctggcacggcgcgggacaggcggcgcctttggcaggagaagcgggcgacgcttcgccttcgccataatgaccgcgacaaaaaagggaccgggaaagggggataccccaaaaaggatccttccccgtgaaggaaccaggctccgagcctccctactgatcagaggttcgaaggctggccccccggaagggttcgacagccgcctcagatcgcgtgggccctacacccactactggtcagaggttcgaaggccggcccctcggaagggtcccacggccgcctcaggctactcgggctccgcgcccactactgatcaggggttcgaaggctgccccccgaagg

SEQ ID NO: 4914 - DNA, 843 bp, Zea mays
  Peptide Sequence Number=SeqID_48289
atggagcaaaagtcgaacatgccgaacaagttcatttttctgccatcagatttctacaattggaatacaattgttataaggtactgcgctggagcatcacttgctggggacgtagacggggaagacctggaagcaagagagaccggcgcacttaaagaagcaaaagacaagctagaaaagagagtagaagaactgacatggcggttagacgtcgagaagcgtttgagggctgaccttgaagaagcaaagagccatgaaattgaaaagttgcaatctgcactgcaaaaaatgcaagaaaatctcaaggaagcccatgcagcaatagtaaatgagaaagaggctgcaaagttagcgattgaacaggcaccaccaaagatagtagaagtgccggttattgacaatgcaaaacttgaggagttgacaacccaaaataaagaacttgagatccaccaaatttgtctcaaggaggaactaagtacgtttaaacagaaggctgaggatcttgaaaataagcttattgagttccaaaaacagtctgatgaactgtcacaggagacacaagaacaagcatccaaagttattcaacttcaagagctggtcgaaagattggaaagcaagatcgccaccttggagtcagagatcgagttgctccacaacaattctgcactagctattcaggccgtggttactcctgaaatgaatcagacaacaataattgaggaatttgacaagggacaccagcttgaagaagttaaaacggtcaataaaatggccatcggtgtccctaaaaagcggaatgacaaatggatggctaatcagcttttgaagctacatctggagtaa

SEQ ID NO: 4915 - DNA, 767 bp, Zea mays
  Peptide Sequence Number=SeqID_48290
actttgacgagtgtcagccgatactcggcaaagaaaagtcgtcgtcacggcgacaggcactcggcaaagaagggcactcgtcaaagcttgcttctttgccgagtgtcaaggccacgacactcggcaaagaggctttactggtgcccaagtatgccttctttatcgagtgctatgaccttgacactcggcaaaagccctgggctctatttacctacaggaagccccgaccaggcgcccgtgagcaggagagccccggccgccgcggcgctctccagtcggcggattggcggacgtggagggggcgcgaggaggaggagcctcagcgtttgcggcggtacagcttcaggaggcaccggtcgggcgcggtggagtgggcggcggtggtgttgttcatggtgctggcggtcgtggtgctgctgggcgtcgtggccgtccttgtggtggtgttgctgttgcagccccgcgcgccgtacgtggcggtgcgggcggcgagcctgtacgcgctggtgtactggcagacgggggcgctggacgacgtgcagggcgccccgctgggcgacgccggcagcgccgccatggaggccgcgctccgcgatggcgtggtgccgttccgggtggagggggaggcccggacgcgatggaaggtcgcggggatcgtcggcgtcgaccagtggacgcgcctggcgtgccagctctgcttcttctggcccaacgacaccgtgctccccttcagatgcagctccaagtccaagctcttgttcttctga

SEQ ID NO: 4916 - DNA, 2571 bp, Zea mays
  Peptide Sequence Number=SeqID_48291
atggaccaaaggtccatgacacttggtatcagaaccaggttatcctcaccaccaccagccgcccatccctcaccaccatcagccgccgcgccatcagccgccgcaacgccctcccacccgccctctccaactccagatgcattcactcggctcgaagagagttttggccgtctcgcagagaagtgggatcagttcgttgtgatgttccaccgctacaaggagaagacagagaaggaactccaagcagcggtgcggcttcaggcggcagcgcgagggttcctggcacgccgccaggtacagtcccttcgtggggagaagcaccttgctgtggcctccagggccaccccatggccgtcatcacatgagcaggccgtggtgcgcctgcaagccgcagtgcgcggcttccttgttaggcgggcggtgcggaagctgcacttgctgatcagctcatcgctgcaccaactcgcagcctgcacgcccaaccaccaggtctcgtctacactttttgaaccccctgcagaagtcgagatctgggtcctgaatgatgaggattattatcctgagcgaccaggggaaccagattgtcctttctatgcaaaaacaggcaaatgtaaatttggtgccgtttgcaagttcaatcacccaaagctagaagatattaagacaccatctttgattgcaaaggaaaccatatatagagcaacaactgatgcagcagcgcacattggtgggacagatgattctgttccagcaaagacacatgcaccaattgccccagccgaggcacataatgcaaaggggcttccaataagaccacacccaaccatcgaccccctccaatccctcaccaattctccaatcccatctctagccataacaaatgaggagctgaccccgcctgcgggctacatcgtcaccttcgtgccttccacgagtggggttcggggtgccgacctgtcgctgcccaggccgcgacgcaacctcgtcgacggcatcaccggctacctctactacgggaaccctgacaccaatgccacacagtacgagcggcctgcgaccgtgcctctgccctcatgggtccttgggttcccgaccaggacggtgtacgagcccctggcgccgaccctcgctgcttctaccatgccggttgttaaggcccataaagcctatatattcttccgccgtcgtctcctcctgatcgctgtcgcggcttttctacggtcgccgtcgcggtcttcctccgccgccatcgcgacccttcggctggtatcgcggccctccaccttcctcccgcccgccgtcgcgactgtgggctcatcttgcgccgccgtcgcggccctccccgaccgccatcgcggctgccgtgcgccgtgcaaacctcgcaagtcgtcgcgcgtctacgtaagcggctaccatcgcggatcccgtccagatccgccgaccgccatcgcggctgccgtgcgtgcagattcggccgttgcccgtccgccgttgcggctgccgtcgcagatcccgtccagatccgcggccgtcatcgcggctgccgtgcgcgcagatccgaccgtcgcccgtccgtcgtcgcggtcggcttttccccttccctcctctgccgtcgtcgcggtttcctccatccccgcgggcggatctaagcttctgtgcctgcgtcgtccgccgtccgcacctttggcgtcgtccgcctggtgcgccctgctgcctgctgcacgccgcaagggctgcagatctagatctgcgccgccgtctgctgcgcccttcctcgtcgccatctgcgccggtggctgccattgcgtgcagagtcatcagggcagcagccgctatccaactcggcttccgcgcccaggacctccgtcaactcgtccaactcgggctgctgtcagctgcgcacctgttcttgcggatgatcgtcgcaatgctgctgatatcaaaacatggcagcttaatgatggtaaagtgatgactgctatggacagtggtgctctattacacactctcatgcagcagacacatgttattgaacaaaatgatatgagtattgatgagtactactcagcctttgatcgcctgatgagtgctttgacatctatggtgcctgcttgtattgttgatccgtgtccggctcataagtttattgagaagttcttcacttacaaatttgttatgggtgttcgggccgataatactcacaatgtgttggctgctgcccagaaacctaagagtgtttttaagccttgtgatcattatggcaagaccaatcatcgatctgagctttgctttgtcaagttccctgagaagttgactgatttccgtgcacgacgtgctgctcgtggtccaggaccatctactagaggctcagttgctgttgctgccactttgtccgcttgtacttcagagtcggcccgaatacttgattcaggagcctcctttcatgtcacatctgatcagtcaaagttggcttctactacacctgtcacagatggtgcttcagtgcaaacagctgatggtattctacccttgcttctgttgcgtcttttgcccagtggcatcatcgtttag

SEQ ID NO: 4917 - DNA, 582 bp, Zea mays
  Peptide Sequence Number=SeqID_48292
atggcggcggtcaacctcctcgctgagtccgccgcggtgcgcttgcgggcaccggcgccaccgggcgcgggggaggagctcgcggccaggctcacggagtgcgggttcctcaccacggcacgccgagggggagcggacgcgggggctggggagagcgcgcgcaagtggagggagatggcggccaggaaggaggaactcctgctgcggatctgggaccgagtcgcgttcgcattgccgaagagagggaccgatatgctggagctggagaggtcgagggagctcacgcggccgtccgcgtcgcacccgactccctgccagctgccgcacggcgatggcgaggcctccgaccatctgtcgtacgcgtcccggtttatctggttgtgcacccgcaggaaggccttgagctggatgagcaccgccatgtcgtcgtcgccggtgttcccgcttaccagttccgctacacagtgctctggtagcacgtccatatatataatcttactatggcatgtgtgggctggcgaaggattgcctacatcagcgatacttcagcaaggttgtttaaatgagaaattcctaggataa

SEQ ID NO: 4918 - DNA, 2166 bp, Zea mays
  Peptide Sequence Number=SeqID_48293
atgaagtccataaaggatgaggaagtcatggatcctcaccgaaatatcctttactacacctattggataacgtaccgattgggttcttgctgggtggtggtggcggcgggtggtgcaagcagtactcgttcacaagagcaagctgtttttgtgtgcgtggttttatgcctgcttgcttggcgaggggaagaggaggcggcggagtactgggagttgaagggtgcaggtaccggcattgctgaggcggcgtggggagatccggcgatgtcggaggccgaccggatacgccaccgcacggcggcactggtgctgcacgacgatgaggtaagagacaaaccggacgccaaggcgaacgtcttcgcggatctcggctcgccggtgtcgccgctgcgggcgcgggcgagcgtggcgacgtcctcgtcctcgtcctccgggtcggccaagtcgccggcgccgtcgaatgctgggatggcgggcgggaggagccactccggcgagctggtgggcgagtgcaatccgccgcggctgatggcgcacaggcggtccggatctggacagttaatattctctggcggcagcagccgggggagcggcggcggcggcggggaccgtgggagcacggcgagctcgccgatactgaatgcgctcccctccgggaacatctgcccttccggccgtgtcccggcaacggccgctccccctccgccgcgctcccgcccggacgtgctcggatccggcaccggccactatggccacggaagcatcatgcgcggcgccggcatggcccccgccaggagcagcattgactcctcttcgttcctcggacactcctcgaggtcgccggcaagctttccggcaagcagtgggagcctccaggaggtgacccgcttggggaacgagtggtacaaaaagggtaagtacggggaggcactgcggcactacgagcgcgccgtggcgctgtgtcccgagagcgccgcatgccgcggcaaccgcgcggccgcgctcataggactcggtcgccttgccgacgcgcttcgtgaatgcgaggaggctgtccgactcgacccggccagcggccgcggccacagccgcgtcgcaggcatttgcctccgattggggatgattgacaaggcgcggaggcacttcacccaggcgggtcatcttcagcagtcagaccccaccgactggcagaagctgcaggaggtggaggtgcatctgggaagatgcacagatgcaaggaaaattggggattggaagagcacgctgagggaggctgatgctgccattgctgctggtgctgactcctctcagttgcttcttgccttgaggtcagaagcacttctccaccttcacaagctggaggaggctgagtcgactcttgcgagctttctgaaattggacagtgcattgccctcatcattgacagcagcagaactctcgggcatgcttgctgagtcatacgtacatattgttcgagcgcagattgacatggcattggggaggtttgatgctgctgttgctgcagctgagaaggctagagatcttgatcccgggaatgcagaaatcgggatggttttgaataacgtgagactagttgcaaaagccagagagcaaggaaatgatctcttcaaagctgccaagttttcagatgcatccatggcttatggtgaagggctcaagtatgatccctcaaattcagtgctccactgcaatcgagctgcttgttggtcaaagctagaaaagtgggaaaaggctgttgatgactgcaatgaggcactaagaatacaaccaagctatacaaaagctctcttaaggcgagctgcatcatatgctaagcttgagcgttgggtggattgtgtgcgggactatgaggcgcttcggaaggagcttcccagtgacaaggaggttgctgaggcattgttccatgctcaaatttccttgaaggcgactcgtggtgaggatgtatcaaatatgaagtttggaggagaggtagagatagtttccagtgtagagcaactccgtgctgccataagttcacctgagaacgtgcggatagtcccgacgttcaagatatacaaaggaggggtgaaggtgaaggagatgatctgcccgagcttgcatgttctgcgctactccgtgcggcactattctgtatccagttcttga

SEQ ID NO: 4919 - DNA, 381 bp, Zea mays
  Peptide Sequence Number=SeqID_48294
atggctgaaaggtaccaactcccacggagttgcgttcctccaatgacgaggcaaaaagacggcgggcatcccccatccgggggcttggaaggcggcgcttctggcaggagcagcgggcgacgcttcgccttcgccgaaacaaccgcgccaaaaaagggtccgggaaagggggataccccgaaagggatccttccccgtgaaggaaccaggctccgagcctccttactgatcaggggttcgaaggctggccccccaaagggttcaacagccgcctcagatcgcgtgggccctacacccactactggtcagaggttcgaaggtcggccccccgaagggttccacggccgcctcaggctactcgggctccgtgcccattactga

SEQ ID NO: 4920 - DNA, 669 bp, Zea mays
  Peptide Sequence Number=SeqID_48295
atggttgttgctgccgcagccccaatatatactgcaagcatcatcttgtctcccaaggaaacgttgtacaacaaagaggagggcgcgagctggaaccacggaggtaaagacacaacagccttcggaggcgggcccgtggaggccgacattggtgttgcctgcagcaagtggatctcgtgcaacgcaacccctcatggtctcgcggccaccagtgcgcagagggtagtgtggctggagcagatgatggcgaggccagcagatccccttgtacgaaggagagtagtcgaggtaattgctcggtcgcctcaaatgtgggccagccggacggagcgatgcggaggtggacagccaccgcgttgcttggtcgcgctggtgcagctacgactccccccgcaatggagcacccccaacatttgcttcacccgccgacgtgctaggaagtcgcgtgctgcagcctgcaggtggacggtcgtcgccgtctgtcgcggagcaaccaccctctcctggacatcgctcttggggtcaagggtagaggttatggctgcccctgatgacgggggtggaggcggcgacgagggtgcggcaaacgtggcagcaaaagccacaactgctgagagggaaccaaagcgctgctggcacatgatctcgaactgtggccacgtgacctga

SEQ ID NO: 4921 - DNA, 378 bp, Zea mays
  Peptide Sequence Number=SeqID_48296
atggcgcttcctgttgacgtggctggcctgcgccctaggttgggcgacgtggaggctcctccgaagccgaggtcgaaggtcgtttggcggaggccgaagcggagtccgagccctggggtcaggcgaagcggagttcgtcgtcttctggggctgagcccgagtccgagccctgggtcgggcgaggcggaggtcgttcggcggaggccgaagcggagtccgagccctagggtcgggcgaagcggagttcgtcgtcttctggggctgagcccgagtccgagccctgggtcgggcggagcggagttcgccgtcttccgggacttagcccgagtccgagccctgggtcgggcggagcggagttcgccgtcttctgggacttag

SEQ ID NO: 4922 - DNA, 1161 bp, Zea mays
  Peptide Sequence Number=SeqID_48297
atgaaggggcgcttaatcgtggggaaattgcatgcccttgtgcggcggttcgccttcttgaccgctggttgccccgaaaatgaaggggtgcattaccgtggggtagttgcacgctgcttcttcggatggggtgcgtcggtgttctctggagggttccgcatcaaggtcgtcccttccggcgacctcaccgccggagagcttgcgctcgtggtggtgccgccgatcttgccttcttcttgctgctgttggaggaacgcaaccccgtgggggttggcgctcttccaccatcattcgacttcaaggattttcatcacgcaacccggtcgcaacctccggctggtggtcatccacaaggatgactaccagccttgcggtggagagaagcgagccgggctgcggcctccccataccctcagcttcaaggatgttcatcatccgcgctggggaggagggcgagccgagttggggccatgccctccgcatgggctggcgacccgcttcttcctccagcattcgagggagaaaggcgttcgccagccttgcgaaggaggcgaactccgggtacgcgaggccggccgtctgaggcgccgtcagctgccgcatgtctggctcctcagcctgggcggctttggtgtcgcctccggcgctgcctcctgccgcttgcacggggcgtggttgtccatccaccgcacgggcgacggtcgcgtcgtgcgcggtgaggacgggagcgaggacctctacgcgcgcgctggggcgaccgccattcaccggtacggcactggtgcgcaggtggccgctgtcgtcggtgccaaggtggtcgccgccgctgaggtggccgtcgccgtcggtgctgaggtggtcgcctctgctggcgagccgctcggagctagctatcccgcgacccttactggcccatggtacgggaccaggctgagcggctacacgggctctggaccaccccaggagactaatgtacggaaccaggctaagcggccacacaggctccggaccaccccatggaacggggtcccgttctctggagccggcccccaggctgtcggacctcccaactttcgtatagggggccctaaactgcaagcctggctgctcaattcggatgtcgtcatgtcagaacagattgaagtcgtatgggtgggttag

SEQ ID NO: 4923 - DNA, 178 bp, Zea mays
  Peptide Sequence Number=SeqID_48298
gcaaaggtctgccacttcctcaccttaaaaccaacgaaggggataaaccctgagtatggaatactccagcaagtcttaccccgactaaagaaaaagactctccaagggtatgctggttataatgggagtcaagaccgagagcacagatacaccaccgtccagcctcttgccacggagg

SEQ ID NO: 4924 - DNA, 867 bp, Zea mays
  Peptide Sequence Number=SeqID_48299
atggctgcgagcgggcaggccacactggcaggccacaagctgccgcgccggctagccgcgtgcaggctagccacgccgggccgccgcgacgccgactggccgcgctggccggccgctggccaccacaccggcgggccgcaccgagccgccgcgacgccgactggtcgtgcctgcgccgggcgagctccaggccgcgcgcgccggagagtcgagcccgcctaccgccggggccgagggccaccgcgccgcgcggggctgcgctgcgtgccggggggccgcgcccacgcaccggggggcgcccgcacgatgacgtgccggggccgctcctacgcgccgctgcggagggtcgcgcgcccgtgccgtgtgccggggcgccactcctgcgcccgggagggccgccgggccgtgcgcacagcgagggaagaagccacgatggaggagagagtgggagaaggggagagagagaggctgcgcaggggcggggaagacgagggcacgctggatcgcgggtgggccaagagaggggcgcgctgggccgccgagcaggccaaggggaactgggccacgcagggaagagggggaggacgcagagtccaagacgcgacgcagacggagaaggtgtcgccgtggacgctgcgcctgcggctgcgcagtgcgtgcgctccagcagtccagctcgtggacgctgcggactgcggctgcgctccagcgcccagcgcccagcggtctccagaagtccagccgagcggctgcgcaggatctcatccgacatccgctgctggtcgtcgggagtacgagagaaagaaaggcgttggccgtcgggagctcgtgcactcatccacatccactgttggccgctgggcgtag

SEQ ID NO: 4925 - DNA, 111 bp, Zea mays
  Peptide Sequence Number=SeqID_48300
atggtgacaaggatgatgggttttgactatggtaatggtaaagaagaaggcgtcaaggtggatctccaggagttccaggacttcgacgagttcgaagatttattaggctag

SEQ ID NO: 4926 - DNA, 117 bp, Zea mays
  Peptide Sequence Number=SeqID_48301
atggttggttttacagatggtgacaaggatgatggttttgactatggtaatggtaaagaagaaggcgtcgaggtggatctccaggagttccaggacttcgacgagttcgaggattag

SEQ ID NO: 4927 - DNA, 285 bp, Zea mays
  Peptide Sequence Number=SeqID_48302
atggaggcgctcgcgttggcgtcgctcatcaacgacgaaaagaagcttggcgactgccagttcgacctctggaagcagtactacgtgaccgcatgcgtcgctgtgttcggcaagctccggcgcagccgccgcttggacgcggaggcgctcgtgttggcgtcgctcatcgacgacgaaaagaagcttggcgactgccagttcgacctctggaagcagtactacgtgatcgcatgtgtcgctgtgttcggcaagctccggcgcagccaccgcttggacgcagtctag

SEQ ID NO: 4928 - DNA, 240 bp, Zea mays
  Peptide Sequence Number=SeqID_48303
atgtcgtgcgcgttcgacgactactatatcaaggactatggcgtcatcttggcaccagaggtgacgcagaggaggaccgacaacaatgaccactcgccatcgtcgggccaagagtcatcggtactcaccatgtcgtgcgtgttcgacggctactatatcaaggattgtggcatcatctcggcgtcggaggtgacgcagaggaggactgacaacaatgactactcgccatcgtcggggtag

SEQ ID NO: 4929 - DNA, 1170 bp, Zea mays
  Peptide Sequence Number=SeqID_48304
atggaggaggcggaagggatgaggttgcggaaaccaaagcagaaggcgagcgcaaatggcagggtaaagaaccaccgccggcccctcttctggggcaagcgacacctctggcaggcgaagcaggcgttgtttcacctccgccatgatgaccgcgtcaaaaaagggaccgggaaagaggatatttcgaaaaggatccttctcagcgaaggaagcgggccccgagccctcctactgatcaggggttcgaaggctggcccctcggaagggggttcgaaggctggcccctcggaagggttcgacagccaccccagagcacgcagagtgagggatgggtacgtctgttacatggccgaggctcgggctacgctcccgagtcacttcgccctttcaatgaccgacctgacaggaaaacagcaccgctcgccccgctccgactgctgtgccacccaccagggtaagactgacaacagtcgagttcagcctcgggcgcaacaggaagctccgcctcgcccgaccttaggcctcggcctcgggaggagatctccgcctcgcccgaccccaggactcggcctcagcctcggcctcgggaggaatcgcgtcctcgcccgaccccggcctcggcctcaggagaaatctccgcttcgcccgaccttgggctcggaccaaccgcaccacaggggatacatcattaccctacccctagctagctcaggctacgagggaacaagaccggcgtcccatctggctcgccccgggcttaggcacttctctgacggccacgttatcgcgtacccagggctcaagcacttctccgacagccacgttggcatggtcccccgggtccgaaacgccgacatcgttataattcaccggactgtccggtgtagcacaggactgtccggtgtgccaagcgaagcaacagttgtccgcgccaacggtcgtctgcaacgctacagtgcgcgactgcgcgcgcagaagtcagagcatgcgcagaaggcgcaccagacagtgaatagtgactgtccggtgcaccaccggactgtccggtggccccgttgtcagaagctccaacggtcggaacccaacggcctggtgacgtggctggcgcaccggacagtgttcgatggcacaccggactatccgccatcaaacctcatacaagagctctag

SEQ ID NO: 4930 - DNA, 795 bp, Zea mays
  Peptide Sequence Number=SeqID_48305
atggcgtccatggttcttcgtgccgctgccgccgctcgtcttccctccctccgtcctcgccgcaacggcagcggggtgctcaccggcttgaggatcgggacagggcactacggcgtgcggctcgcgctttcttcgtccgcggcagcttctcccaaagagttcgaggtcgcttgccttcctgtcgatgatagcagattgggcccgggggaagattatgtgtctgaccttcgcatggcagacgaggaggagttggaccatttctaccgtgttctcgccattaagactgacatgctgtttagagcctaccctgaacacaagccgtttgcagtttctgaagaggacaaggccgtgcaggagaggttgaaggaatttgcgaacgaatgcatcgacctcctggatgatgcgttgcgccgcatccccgcggagaaaaggcgcccactgttctcggtgtttggtaatgtgtaccaggtatttgcgtcagtaaagtggtatgcggagggggggtgtgcccagtggtggatggcgctgcagatcacggaggagcttgagatcatgcgcaagatggtgtccagcgcttgcggcggcacccctcttgacagagagacggtgttcgacaggaaggaggccctcaccggtgtcgacgttcaggcggcgctccgcggccacggcgtcgagagcaacttatcagttgagaacactttccccttttacctggtgatcttcgagctgatcgacaacatctacagcaatgtcaagtcggacatcgatgacatggtcttcgctttcactgcttag

SEQ ID NO: 4931 - DNA, 1716 bp, Zea mays
  Peptide Sequence Number=SeqID_48306
atgtctccaccttcgcgccaccccattctcgacaagggcgtaggagcaggcgcctcctccccgtattcgtccgacaccagccccgacatctcgcgtagtggctattgcacgtccacgaggacgtttcacatcatgtgcgcatcattgttttcatcgttgtcggacgtctcgttcgtcttcctggccttcgcgttgttcttcctccccaacatgatgccccgcccacggtcgcagccgcgagccgaccgacgctcgtcgacgcgggggaggcttcttgcggaagggatgacgagtacagtgtgctgcctggcacggtcgtactgttcgccagcagacccagcaggggctgcacgacttcacgtcaggttcggcccggtagcttatgtcatgggccacaagctgcgggggtccggtgtccttctgtgggggtccggacttactgggatgtgttgtctttccttgccacgtggcgccctttggcctgctcatgcggtggcgtcaggcgccgtcctccacgtggctatgagacgtcgcatgggtgcggcgtcttcatgctgtagaagagggtgggaccagagtctgattggcggttggaccgctgctcctgcgcttgttgctgcaattactgctggcccgcctatggccatgccaactgtcgcgcctattcccacggctgactggcccgtgaccatcactcccgcgacggccccgagaagacgtggcattggcgcaagcggcgcggagctgagggggcgcacagccgtgggacggttgtacgcttcttgcgcggcggttcgcctctttgaccgctgggcgcttaaccgtggggcggttgcatgccccttgcgcggcgggatccgcgtcaaggtcgtctctttcggcgacttcaccgtcggagagcgcgcgctcgtggtgcccggctgtagtcccccgccggtggtcatccagaaggatgactaccagccttgtggtggggagaagcaagccaggctgcggcctccctcctgccctcaacttcaaggatgttcatcatccatgctggggaggagggtccgccacacccacggcttctctcgcgtcgtcggtcgtactggtgggtcgcacatggcgtcgtacgttgcgggagcggtggccgtgttcttggatgtcctcactcccttagcaaagacgggagtgaggacctataagcgcgctgaggcagccatcgcccaccagtgcaggggtggttgtcgtcgctgggcggtggagcgtgcaggctcacggtacgggaccaggctgagcggctacatggtttctggacccccccccccaggcgacaaggcggtggagcgtgcaggcccacggtacgggacctggctgagcggctacacgggctccggaccaccccaggagaccaatgtccattctctagctccggtcccaaggcccacggtatgggacctagctgagcggctacacgggttccggaccaccctatggaacggggtcccgttctctagagctggcccccaggctgtcggacctccccactttcgtatcaggggccctaaactgcaagcctggctgttcaattcggatgtcgccatgtcagaaagatggaaaccgtacggaccaatagtccgggttcatgggggcagacccatcgggttgtcgtacacctcggacctgtggggtccggaagggtctccggaggaaaggcgtgctttcgctccatag

SEQ ID NO: 4932 - DNA, 429 bp, Zea mays
  Peptide Sequence Number=SeqID_48307
atggtgcctccatccgatgcaggcaagggcccctcggcgacccccgcgccgactggagctggcgaagaccccgtgccagctactgcgctgatgggtgcggacgctaagcaggtggtggctgaaccagctgccgaagacctagggccttcgcaggttccaacgttggggcctgcgcaagcaaccgctgctggtaatactgattttgtggcggcctcaaccgtagcgcctgtcgatgataatttgtttggctctatgtctgagtgttttgagtctgatggtgaatctgggagttcgttttcttggacggaggagtcgtcagatgaaagcttggattattttgttgcgttagatgtggctgcagcggagtcttcgccgcgtgtggagggtgccgggggtctccctagcgcgagtactgagtataggccgtga

SEQ ID NO: 4933 - DNA, 957 bp, Zea mays
  Peptide Sequence Number=SeqID_48308
atgtcatcttcttcctcatctgttgcgaatgcgtcgctggccgattcgtcatccgaagatacgttgagcaatttggcggcggtggagttacagccgggccacacggtggagtttggcgtttcgaggatttcctcgattcgcgtgcaggacatgcagcagttggggtattttggggatgaggtcctgcagaggtttgaggtccaggtccaccagttgacacctaacgccgtggtggccttggcgaagtatgtctggacggtgacttcgtatggcgaggatgatgaagacgaaggggccctccggtgcacagcccgcatgagcagcttgcgtgatttggttgaggagtttattggttatggagtgtggcccctggcgcatggctgggtgctaggcgaagtaagccctcgccaaatgcctactttaggccagcaactggtgcgaagtccgaccttctctttggatctgcgcggccgagacctggccgcgttcattcgtgaagtggaggacggggctgtgaggattgtggggcggtatgcgctgaggacggagagtctgcggagttgggatatccgagggtccaatgttcgcttgaatcgggtcttcgagttgaatcgtttgctgtacggtggttaccctggagatgacgctactgcggttgttgaccgccgcgagaaaaaaaccgcagtgatggacaaggatcgtcaagatgcggcgcagaagcattgggcaatcactagggccggggaccctatgcgtgaggtgaagcgggcgcggggaggcacgaagtccgccgcccctagaggcagcaaaccaccactggcggtgaagcctgccgtcctcgggcccagcaagtcttggcgggcggccgccttcgccgaccatgttgcgtcgggcgccttgtcttcggagttcgctgccgagaggcaacgactcgagggcaagatcgagcacctctga

SEQ ID NO: 4934 - DNA, 381 bp, Zea mays
  Peptide Sequence Number=SeqID_48309
atgggcacaagctctagggaacataagaagcatcacgaagagagggaagaaacgaacccagagcaaaaaggtgcacctccttcctattattcaacatatacaaagacaaagagccagcagggaggattggagaggggccttccagatgtctttaccttcaacacattgattgatggctactgcgagagattaaagctagatagtgcacttcagcttgttgaaaggatgtggatgtatggcattgctcctgatgttatcacatacaactcaaatttgaatgggctctgcaaagctggcaaagccaagaaagtcaatgatacattcgaagagatgtacttgaacttagtgattcgtaggggatcaaaccagctattggaatga

SEQ ID NO: 4935 - DNA, 165 bp, Zea mays
  Peptide Sequence Number=SeqID_48310
atggggcgcgcctgccatctgcgcgcgctgccgcgcgcatttaatgcgccgcaggtggtggtgcggtccttttgctttgggctcatttctccccctttttggcatgaatcgccaaaaacggaatcattagagccctcgaagtgctaccttcccctttggttatga

SEQ ID NO: 4936 - DNA, 618 bp, Zea mays
  Peptide Sequence Number=SeqID_48311
atggacgtggatggtgtcgcgcgcgtcgttcgacaccaaccgcagcagcgtgcgtgtggccacggcggcgcctgggctcatgtccgtggaccacaacctagactcgatgaccaccgcctccatctgcgcgccctagcaaggtcgatgccgcgggctgccgccggcgaggcggccatccttggcatccgtgacatcacatcaatcgtcaaggtgaggggacgacaaggccgaggggttgccgccgatgtcgttattggtgaggttgatggtggtgatgtcgtggatgctggagtggcgcttgtccttgacgctagagttgaggcggatgatgtcgcagtgcagtgtgctgaggagctagggagaccgcaacctgatgggctatcattgtgcctctgtagcaccgagttccaggttagcaactacatgccatacgagccggtgaagcagatcatcccctacctcattacgtgcatcgaggagaacaagggcctcctctctgcatcctccttagacatgcctcgtgccagaagaagttgggggtattatgattgtcctggactcatttttgaagtgacagccattttcacgtctagcgccaccgacgtctacaacctctag

SEQ ID NO: 4937 - DNA, 177 bp, Zea mays
  Peptide Sequence Number=SeqID_48312
atgggcgacgacgacgaccacaatgaggggctgagggcggggccgacggcgtcgtggcggctcaacgtcagcgacttccacatgccggagcggcccaaggagccgcccttcgtcgccagggtcttcctccgcagccacgattgtaccatatccgtgactatcagctataaaaaataa

SEQ ID NO: 4938 - DNA, 675 bp, Zea mays
  Peptide Sequence Number=SeqID_48313
atggccggttcaagggatagctctgatatttctccaagcaacatcatagagccgacttgggaaaccttgccggccgacgagcagctccagttcgaggagcacaaggagcggatgatccaggaggcgaaagcaaagttcttggccaacttcaaagtggacaggaacaacaaggtcgtccgacatcgggcaacggatccggcttcgctccaacccacgccagatatccccaatccacgatgtgcacaacgttgtatgtatgacgtgcggcccccacatgtcatattcatccccgtcaccctcgcgaccacctgcccacctccgcacccgccggccggatttaccgggtccacgccgcggattccgtttgggaccccgggctataaggggggaaggattgagaggacccagccatgctgccgtgacaccgtcgcgtcatcccctcgttcaccacttccagccgccaacaaagaagccgggtgggtgaaaggaagccgccgcgggggaatctccgattcaatcgtcgtccgcaccgtcgagggtgcctggggtcttcctcgggctcggggaaaggctgccgtggccgcttcaccaaggattggacgcttgtggtgccggaattgctcaccggagctcggcatccgccgctcgccgtgggcggagctgctgtgtgattaa

SEQ ID NO: 4939 - DNA, 1413 bp, Zea mays
  Peptide Sequence Number=SeqID_48314
atggctaaaccagaggggccaaccattggcgtgaagctgttcgtggacaaagagaagaagaaggtgctctttgctgagtccgacaaggagttcgtcgacgtgctcttcagcttcctcaccatgccgctcggcaccattgtccgcctgctggacaagcagtctcagatggggtgtctcgaccagctgtacaagagcgtggaggacctcaacttggagtacttccaaaccagtgcttgcaaggcgatgcttctgaaaccgctcaacgcggcttccggccactgccgtcgcctcaagatcaacgtcgatggaagcgttccaagggtggtctatgtctgcaaggacacgtcgtgcagcgcactcagcgacaacgcgttcagttcgttccctggcacggtctgcaaatgtggaaaggtcatggagtccattggacagtgcccaaaatacgatggtgacactgaaaccgccgccgccgccgcttgttcagaggatggagtttttgtgaaaggttgcttgaaatttatcgtcacccatgatctccaggttgcgccagcaactacctctcttatgatgtctctcttcgagaaatttggtgtgcttgatccagctgtcctagagcagcaggttctgcagttcagttcagaaaagataacatgcttgctgaagagattgttgacgtccaagcaacctctcactgatcattatttcgaagctcctgttccacaagatgatgcaagcctagaagcgcttgttcagaacttacatcctaaacaagaaagcgaggaccaggaaatgccaggtaacctgaagatcagggtccttcagacgaaggacgattccgccctgttgtatgctgaagttggtgttgattttgtggactctctcttcagcttattaagcattccactgggatccgcaattaagttatatggccagtgctcggcaaaaggctgcctcggtaatgtttacaggagcatagatggtagtgtccaagaattcgtcagagaggagtgccagagtcttcttctggacccaaagttgccacccttctttggttgctgcgcttctaagatccttcagtgcggaaatatggtgaagtccattaaactttgtgaggcgaatccaaaacaaaaaggtggatgcgagaaaggcgaagtatatgtaagccggaaggcgaatttcctggttactgatgacctgcgtgttcttccactctcattagcatccactgttaagattgttagtgattccaaaatccagacctcgaatcttgtggtcaaagaaatcacattaacaaagtccaaggttatggagctacagagggctgtcctgctgctgagtcgcaacatactcagctccgtgcttctgcatcctaagaagaacaagaagctgcaccattaccatcgcatgtattag

SEQ ID NO: 4940 - DNA, 1170 bp, Zea mays
  Peptide Sequence Number=SeqID_48315
atggcgcttgtgtgccgtgccattaccgatccggggcacctgctcgccgtttttactaattcgttctcggagccggagagcttgagagctggttttcgacttgcggattatgctccagtgatagccgcatctccccagcctgtcatggtagcaaagaaacatgggtttgcgattaaaatgatattgggcctattatctatttttctacttggttatgctcaaagatttaggacaagcatgcttagtaccgtgaaggtgagcaatgtatcactgaaagcagcacaacgtgatataaaggaattcttttccttttctggtgacattgtgcatgttgaaatgcagagtttcgatgagctttctcaagttgcctacattacttttaaagacaaacaaggagcagagacggcaatgcttctcacgggggccaccatagttgatatggctgtaatcgtcacaccagcaaatgattatgagctaccatcttctgttttagctgctcttgagcccaaagacacaaaaccttctgcccttcaaaaggccgaggacattgttgggaccatgctggcaaagggatttatcctcggtagggatgcactggacaaagcgaaagctttggatgagaagcatcagctgacgtcgactgccacagctagagtatcttccttcgacaagagaatcggtctaagtgagaagatcagtgttggcacttcagttgtaaacgataaagtgaaggaaatggatcagaaataccaagtctctgagaagacaaagtcagcactggcagctgctgaacatagtgtctcgactgctggatctgctatcatgaagaacaggtatgtgctaaccggagctgcatgggtaactggtgctttcagcaaggtcaccagtgcagccaacgaggccggtgcaaaggctaaggaaaaaatagcagtcgagcaggagcacaagaatgctgagggtggacctgcacaagcgaacatctcagagacccatgaagcgcacaggggtttggacggcggattctcaaggctacatgactctgaaacccctgaagatatccccatctctactgcgagtgtcccagctgttacggatgaggagcccagcaaggcttctccaccagctggtgttcctgaaaagccagaagctgcgcacgaattggtactataa

SEQ ID NO: 4941 - DNA, 264 bp, Zea mays
  Peptide Sequence Number=SeqID_48316
atgcccagaaatccaagggtcgaatctgcgcacacacacacacggaaggctacccataaatttcttaatcaaggcaattcgacaaggacgatggccgcgggcgaggtgtaccgtggacggacgacaacgcggtggaggggcgacaactgctgcctagtggccgactccgcgcctgagcgaccccagcacaccgcacctgggaatcctgcagccctagccaccagagcgtgtgggattgccgatgattgggaaggagaagaatag

SEQ ID NO: 4942 - DNA, 1365 bp, Zea mays
  Peptide Sequence Number=SeqID_48317
atggacgccggcctcgcttcctcggtcaccgcgctccggacttgcaccgatgtcgcgcacctcgcgcacactgccccgctcgcccgcctacctaagcccgcccgccgcggccgccgcaaacgccgcgacctgcacccccgcccgccgcggccgccgcgaacgccgcgacctgcactcccgcccgccatccagcccgccccccgccatccagcccgcaagccgcaattccgccgcggccgcaggagccgccgtgaccccgcccgccgcaatcccgccacggccgccgcgaacaccgcgaactacccgcccacaagccgcaattccgccacggccgaagcaacctcccgttcctccgcgacccagcgacgcctccgcggccgtccgatcgccctatctgccgccggggcgccgccgcttcccaccaccaccacctccgccagacgttccatgtcgtcgcctgctgacccctgcccaccgccttcgccgaccgccgcctcgtggcccgggttaccaggccgagcattccttgccccaacagtacattcacgcgttcaaagacggacaatttacgacatctccagtgtctcattctggggcttgattcaaggtaacccactgcacaacccgctgctccgcctcgagcgcatgtgctgcgggtggctcggcgtcatcttcgagtgggagggggtcatcgttgaggatgatgccgaattggaaaggcagtattgcgagtcatggagtagagatgatgctcaaaggcagtacattgtagaacttggtataccagaagaatggatgcatgaagctctggctctttatcacgaatactatggagataaacagggcgcactggagaatttgattcagtgtggcaactggaagaaagctcatactattttcgtgacttctgttgctcattctatgtttctatcatctaaccatcaggaggtctggaggatcacaagtgcattggagaaccacaagtatgaaattgttgactgggaccttggtgccggaatatacatagacttctacgttctgaagaactcaatgcaagaaagaaatgccatggatgattcgggttcactcgaggagatgagtgaatcatgcagaagtttctttggccgattaaacgagtcgttattagtctggggaagcaaattacctgttgagtcaagggcatgctactcgaagatggcagaggagctatgcgcgcttctggtggacaccccaagcgagacgctgaacctacccatgggatgtcttctaacgatgctcaacgctccagttccggatgagagcaggtcgtcgtacctgcaggacgcactctccgtcttcaccgaaatcctttgcagcgatccgtag

SEQ ID NO: 4943 - DNA, 717 bp, Zea mays
  Peptide Sequence Number=SeqID_48318
atgggggcatcctcaccgtcggcaggcccaggcagcactgagttgcgctctgctgcggccgctacttccagcgttgttgctgctgctgtagccaacctgcctatggatggatttgatcaaacagtgaatgtgaaggttgtaatggcaactaatagggcagatactctagatcctgctttgctgtggccaggtagacttgacacgaaagttgagttcccttgtcctgattggcggcaaaagaggcttgtgttccaagtattgctattaagggtacttatgtcctgtgctggccaaagctctcaaaaccatgaaaaggcaaagaaggtgctccttatagtaaagccacattatggatttggtgagaagggtagaccaacagttggagaggaaggtgttgtgatgagcatcatcttgttctacatcatcactaatgaactggttgaacttttggttgctttgggtatgatactgagaattaatctttcaatacttaagctaacagtgttagtatggggggattcaatgggtgacttgatgtcaaatgttgctttaccagtgaatggaggcgacggcatgcagattgccatgtccggatgttatgcgggacctatgtttaatacacttgctggtttgggtgacatgcagcctaacaagatacttggagttggcctcatcgctctttactcaaattttctttttattagagttttcaagtga

SEQ ID NO: 4944 - DNA, 150 bp, Zea mays
  Peptide Sequence Number=SeqID_48319
atggcagaggaagaaaatggacttgaggaggaggaggggagcgttgccgcgcaatattctcgccgacgagtaccggcggtgatccggccgcgctgcgctactactggcctatgccatgccaggatgattcagcaggatcttgtcgagtga

SEQ ID NO: 4945 - DNA, 372 bp, Zea mays
  Peptide Sequence Number=SeqID_48320
atggccaccccctccctcagccatggcgggtgcactccctgtctgcttgcactcgccctcagctcccaggcatggagctcgcccaagctccgtctcccagcgctctccctcacagccgcgctctcctccacctgcagctcgcccccatctcctcctctccccatggcggctccccctgaatccctccctttgctgtatacttatcctggagatgataaggaggaatgtcttattggaacctggtttgggaaaaagagtattaaggaggataggctaataacagtttcacttgcaagcaagatggttgaatctgctaagtttcaggctgtccagctgatagcagatttttacgcagtataccgaattgcataa

SEQ ID NO: 4946 - DNA, 471 bp, Zea mays
  Peptide Sequence Number=SeqID_48321
atgacctgcggcagaacgtcccccgtcgttgctgccgtcctggtggcgctcgccgtcgtcgccgcggccgtcggcccggcgccgaagcggagaggccaggagatccacctgttcgaggccacggtccgcttcccggacgacggcgtggacgagctcgactacaactaccgcctgctcgccaaagtgctcggcaggtcgcatgcatggctcatggacctctccattctccattctcctccaagactcaagcaactttatctccctgttttttaccctgtgttttttttgctggacgacctcagcgtcgaagcagcgcggagagcaacgtacgacagtgagctcggggtattcagcgcgctcatcaccaacaaccagggccgtcggctgtcaagtgagctaaatccgtatcagtccatatatgctactgttaattatataacaattttggatataaaagaactgacgacgtga

SEQ ID NO: 4947 - DNA, 144 bp, Zea mays
  Peptide Sequence Number=SeqID_48322
atggcgagagtagcgtgtaccctccgtggcaagaggctggacggtggtgtatctgtgctcggtgagaaaacagcagacttttgctgtttttgcactaaggtggtgcccaaggatgtggtgcccaaggacgaacctcaacagtga

SEQ ID NO: 4948 - DNA, 546 bp, Zea mays
  Peptide Sequence Number=SeqID_48323
atggcgcagcaaatgctatcgttgcaggttcctatgtatatgcccagtgcattgcaacttggcgggccctacatgtcattgactttcgctattctagcgaagggaaggtcgtcaaaacgccggcggtgggtcggatgtctggatcccagctcgcggcgcggtggttgcaacggaatccgggattccagggtggtggattgcaacggcgggcgcctcgggcctttatgtgctgaccccgcgaccgtcttccccatcctcgcgcctcgattaggaaagcatcaacgtgatcagagggttgggaaaagcttggcattccgccaatcgggtgccgccgccgtgggaatctcatcaacgcgagctcccgtgcggccacctcagggtggtggtgcggaatcaccgttgtgttcgggtctcctacaaggtttacggagctgggaagaagcgattggggtcgaagggagtctggaattcttcgctccgctatctcctccgtcgcagtcagctcggttccgtggctggagaattattctgcgccactacaggtaa

SEQ ID NO: 4949 - DNA, 339 bp, Zea mays
  Peptide Sequence Number=SeqID_48324
atggccagagtaagatccattgccagagtgtcccgtgagggagatgaaactgaaatgactgagacagcgcccatatcagaagtgatgagacgctcaggtctggttgtgcaggagggagcaactgccaaaggataccaaggtcccatgattggctaccacactaaatggccgactgggtggactaatgaatggttttacatgaaagttgatggagagggagaagctcatgaccatggtaatgagtcccctaaagctgagcttcgtcatgactcggtctttgtgcaacatgcagctagggtccccctgccaactggccttggaattcagggtggtggatga

SEQ ID NO: 4950 - DNA, 189 bp, Zea mays
  Peptide Sequence Number=SeqID_48325
atgaagcatttgagaacaagtaaccaacacctggtttatctaaaatatacttatcactatagggatcaatttggcgagccggatgacgaatggcttgaggccattgaggcggctagtgacgagttgttgggtgtgtacaccaaggctgaagatgaagctatgggtctgtttggttcggcttttttctga

SEQ ID NO: 4951 - DNA, 115 bp, Zea mays
  Peptide Sequence Number=SeqID_48326
acattatggtacaggtggctatgagatcgatggttttggttatgactatggtgctggcgaagatgaagctgtggaaggagacttccaggagttccaagactacgacgagttctag

SEQ ID NO: 4952 - DNA, 321 bp, Zea mays
  Peptide Sequence Number=SeqID_48327
atggcgcctcctgttgacgtggctggcctgcaccctaggttgggcgatgtggaagctcctccgaagccaaggtcgagtctgtcttccgtggtcgaggtcgagtccgagcccctgggtcgggcgaggtggagttcatcgtcttttggggcggagcccaagtccgaggcctgggtcgggcggagcggagttcgccgtcttccggggctgagcccgagtccgagccctaggtcgggcggagcagagatcgccgtcttccgggacttagcccgagtccgagccctgggtcgggcggagcggagttcaccgtcttccgggacttag

SEQ ID NO: 4953 - DNA, 669 bp, Zea mays
  Peptide Sequence Number=SeqID_48328
atggcgagagtagcgtgtaccctccgtggcaagaggccggacggtggtgtatctgtgctcttggttggcgtgaacccgggttgtccaagagatatgccgcgtacgaggaaaaccgcacgcaagttcactggacctattggcgtgcctcgtcatcagttggctccaagacatgaagggagcagcagcggcagcaacgatccaatcggagacttggaagcccaagtggaacagcttcggacggagctacgtcaccgaaacagggtgtgggcagatgacgaccaacatattaatgagttagtagctaacgtcagacgcttgcaagacgagctttctgaacgagatctggcggttgactgggccatcaaatcacgttcaattgcttgggaccgcgaagccaaagctcgtgctcgtgtggcagagcttagtgcggcccttgacaacttgcaggtgtactgcaatactttacatgagaaagtacatgtactgtattcgcgactgcacccggacgtgcctaccgaccctgttgcaatgggagtcggtccatcagggacaacaggtgaaggaactgatggggagctggacctttttaggcctcctccttccatgaacctggctgacgatcggtctcccacgactggcaatgaagaaaccaaggacgatgaagaatag

SEQ ID NO: 4954 - DNA, 1149 bp, Zea mays
  Peptide Sequence Number=SeqID_48329
atggcgcctcctgttgacgtggtcggtctgtgccctgggttgggcgacgtggaggctcctccgaggtcgaggtcgagtctgtcttccgaggccgaggtcgagtccgagcccccaggtcaggcgaggcggagaccgtcggctgaggccagggctgagtccgagccctggggtcgggcgaagcggagttcgtcgtcttccggggctgagcccgagtccgagccctggggtcgagcggagcggagttcgtcgtcgtccgaggctgagcccgagtctgagcgctgggtcgggcggagcggagttcatcgtcttccggggctgagtccgagtccgagccctgggtcgggcggagcggagtttcctatggcgcctgaggccgggcctggctgcttgtcagcctcactctgtcgagtggcacaacagtcggagcggcgcaggcgacgttgtcctcttgtcagaccgctttgtgctgatgggggttaccagctgagatttaggagccttgaggagtttcatgctgccggtggacgaagaggtgatgacgttgaggtcttattccccgggtccaatgtggttggcattggcagtgcaactgcaagtgattttgttcctcccgtgacctcaaatgttgatagcacaggccctgcttcggcattatcagctggtgcagactcaaaaagccttgctgaaaaggctattgcagcactccctcctgagcttagtgcacaagcaactgacccaaaaagaaaggcaaggtcacaggacccaggatggaagtttgggtggtggccagacacaacaaagaaggattttgttcagtgtattttctgttcgaagattgttcctccgaaatcaaaaggttcaagcagcatcttgtcggtgctaaaggttcaacacaaaccaataaaaagatcaaagttagggttcaaaggaaaggagcaaaagaaaccgaagagaaccctggtctggcgcaccggattgtccggtgcaccaccggacagtgtccggtgcccaaggccgtacgacttcaaacttgccaccttcgggtttcagaagagccactccgctataattcaccggactgtccggtgcaccagcggagcaatggctaggcagcgcaacggtcgactccaatggtcgcctgcattgtga

SEQ ID NO: 4955 - DNA, 177 bp, Zea mays
  Peptide Sequence Number=SeqID_48330
atggcacaagtagtgtatcaagtgcagtcggtgtaccttcggactcaggttaaaagcatatacaatgtaaagagcatggtcgtgacgaaggctggtgttcctccgaagctacgcgcaagggagcttcggctcaatggcggaaaaaggaaccatcttaaaggggaaaagactatctag

SEQ ID NO: 4956 - DNA, 756 bp, Zea mays
  Peptide Sequence Number=SeqID_48331
atggcagtggccctgactcctttcggtataaccgttaagaaaaaggagatcggcctcctgggactagtaattgtatcacatttgagtcccagaggaccgggacgcttcagcgagggacctgacgaacgttggtatcgcactcggagcatcagcgacaacgcgcagcatcccaacaccgactctactggctcctcctcctatggcatggggagctcccacttcgccggctccccataccatagctcgagtcacgccagctttgccgacttccccacctacggttgggaggcgccagctttgtcaaggcaggagatgtcagctacgtcagtggctagggaagaaccatcagtgttcaaccatatcccctttcaaccgagattcgacacaagcgcctttaccagcatgtatgctgatctccccttcccatcggggtgccttgactccgaggaggacggttcgggccctggccgggacttctccgagcttcgtgacccagaggctatgctgcatctcccattcgcgtgcgacaaactcctctctgatggctccaacaactacaacaccaacgaggagggtcacgacccaactcgagagtgctttcacgcggggcacgaggagcatgacgaaagaaaccaactcggcatgccctgggaagacgacgcaccgcccccacacaccggggaaccaagggagcagggtgatgctcagacccctagggagtcacatggcccacctcgagcatgccccaaccggtga

SEQ ID NO: 4957 - DNA, 1146 bp, Zea mays
  Peptide Sequence Number=SeqID_48332
atggacgacgacgatgcgggcgaggagcggggcagtgtgtcgacggccgggggcgggcgccgggcggtgtcggctatggcggtggggggcgaacaaggcggcgcggcggctggctggcgaaaagtccctgggcgcgggggggtcggcgccaagatctatggcgccgaccccctgacacgtcacgtccagcgaggcatccccgtcaggcagacaggcgccaataagattggcgccggcacacagaagctcggcgccaatgatgacggcgccgagctaaggccttctgtctcccctctttctagaatgccaacatcagctatacaatatatgtggggttttgcatcaaatgcttgggcatccgggctggggaagaggagtcccccaaattgcacctcttcgagtgctgcttgttccgatgacgaagcatcctcgtgcacgagcagggaagaaggcctggaatgcccaatatgttgggagtctttcaatatagtggagaatgtgccttacgtgctatggtgcggccacaccctttgcaagaactgcgtcctaggacttcaatgggccgtcatcaaagttccaactgtgccgatgcagctacccttcttcgtttgctgtccctggtgcaacctcctgtcgcttcgcatactttacaaagggaacctcacgttcccacggaagaattatttcctcctctggatggttgaggggatgaatggtgagcgggccagatcacgcccagctactcacagcgagcaacatactccatggctctcaagcagcagcagagcaaatggaaatgcaggctgttcaaatcccacaagacgccaccttccgctgccaccgccggttgacactacttcgcccaccaatgcaaatcatgccaaccatggggtccctgtccctctgctgaacgcagagagagtacaagcttcgctgcgcaagtccttgtcgttcctggttcacctgaccgccaagtttcccctggtgttcatcttcctcctcatagtgctctatgcgatccctgccagcgcagcagtcttgctactgtacatccttatcacggtgctgttcgcgctcccctcgttcctgatactgtatttcgcgtatccgagcctggactggcttgttagggaaatctttgcctga

SEQ ID NO: 4958 - DNA, 2925 bp, Zea mays
  Peptide Sequence Number=SeqID_48333
atggccgccgcgccgccgctgtccgccgacgtactctccttcctaacctccgcccccgccgcgccgacgccggtcgtagccgcggcgtggggcgcggcgagggcgggtcctgtgaggggtaaggcggcactaaggacgacgagaggaggaaggggcggggtgctggctccgctggtcgggaggaggccccgccggacgccgctctcggtgcgctgcaacgccaccagccgggacggcaggattacacaacaagagttcactgagatggcgtggcaagcaattgtctcatcccccgaggtggcaaaggagagcaaacaccagattgtggagaccgaacatctgatgaaatccctgctggagcaacggaatggccttgcccgccgtatcttttctaaggcaggagttgacaatacaaggcttctcgatgccacaaagaaattcatccagaggcagcctaaggtattaggtgaagaacctggatctatgttggggcgtgacttagaagctctgatacaaagagcaagggactttaagaaagagtatggtgattcatatgtctcagttgaacatctagtccttggctttgccgaagataagcggtttgggacacagctgttcaaggattttcagattactgtgaagaccttgaaatcagccattgaatcgatcagagggaagcaaaatgtaattgatcaagatcctgagggtaagtacgaagctttggataagtatggaaaggatctgacagctatggcacgtcaagggaagcttgatccagttattggaagagatgatgagattcgaagatgtatacaaattttatcacgaagaacaaagaacaatccagttctaattggtgaacctggtgtagggaaaacggctatagctgaaggactagctcagaggattgttcaaggagatgtcccacaagctctgacaaaccggcgactaattgcacttgatatgggtgcattgattgctggtgcaaaatatcgtggagagtttgaggatagacttaaggctgttctcaaagaagttacagattctgatgggcagaccattcttttcattgatgagattcacacagttgttggagcaggtgccacaaatggtgcaatggatgctggtaatcttctcaaaccaatgcttgggagaggagagctacggtgcattggtgcaacaacccttgatgaataccgcaaatatattgagaaagatccagcactagagcggcgcttccaacaagtttatgttgatcagccttcagttgaagatacaatttcaatactccgaggactaagagagagatatgagttgcaccatggtgtacgaatatctgacagtgcccttgtagctgcagctgttctttcagaccgttatatcagtggacgattcttgcctgacaaagctattgatctggttgatgaatcagccgccaaattaaaaatggagataacatcaaaacctactgctctggatgagatcgatcgtgctgtcctaaagattgaaatggagcgtctctcacttacaaatgatacagacaaagcatcaaaggacagactatcccgtcttgaagcagaactatcactcttgaaggataaacaacgtcagttgactgagaagtgggagcacgagaaatcagtgatgactaaaattcaatctatcaaagaagagattgacagggtaaatgtggagatacagcaggcagaacgtgagtacgatcttaatcgagctgctgaactgaaatatggcagcctgaatgccttgcagcgccagcttcaaacgacagagaaggagcttgatgaatatcagagttctgggaaatccatgctaagggaagaggtgacccaagacgatattgcagaaatagtgagcaggtggacaggcattccagtttctaaactaaagcaatctgacagggagaaattgctgtatctggaggaagagctgcacaagcgagttgttggtcaggatcctgctgtaaaagcagttgcagaggccattcagagatccagagctggattatctgacccaaaccgtcctattgccagtttcatgttcatgggacctacaggagttggcaagacagagttagcgaaagcccttgcttcctttatgttcaacactgaggaagctgttgtcaggattgacatgagcgagtacatggagaagcattcagtctcgaggttgattggtgctccaccaggttatgttgggtatgaagagggtggtcaactgacagaggctgttcgccgtaggccatattcggttgtcttgtttgatgagattgagaaagctcatttggatgtcttcaatgtcttccttcaaatattggacgatggtagggttactgattctcaaggccggaaagtgagcttcaccaactccatcattatcatgacgtccaacgttgggtcacagtatatactaaacatggatgaagaagatggatcatctgattcagcctatgagaacataaagaggagggtgatggatgctgcaagatcggtgttccgtccagagttcatgaatcgtgtagatgagtacattgttttcaagcctctcgagagagaacagatcaacagcattgtcaaattacagcttgcaagagtacagaagaggattgcagatcgcaaaataaagctcgatgtctcgcctggagccattgaattcttgggaagcctcgggtatgacccgaattatggcgcgaggcctgtgaagagagtgattcaacagtatgtggagaacgaactcgcaaagggcatcctcagaggtgatttcaaggacgaggacagcatcttcgtggacacccaggttacggtgccctccaatggccagcttccgctgcgaaagctagtttttcagaaagtgggtgagcaatcgaagcctgctgctgaaggcgagaagttcttgccggctgtttga

SEQ ID NO: 4959 - DNA, 741 bp, Zea mays
  Peptide Sequence Number=SeqID_48334
atggcgacactgtcgtcgtcgctttgctccagctttgcctccctgcggaccgcctccatcggccaccctcgcgtcatcatgtcatctacgcccaggactgcataccagttaggttcagactctgtaaacaaaggccaataccctatcagcacaactcacactgctccaggtatatgcacaatgttaccagtgaagtataatttcagacaggcattgccagaaatagctcaaaagattacacggttggagaatgagataccttgcttgattcttctggcgagacttgcacattttcttttacatactgatcttgctgaacatcacaaattggggcttgatatatctgaactggagaagaaaatcatttatgagatgatgagaccagagaggactttgttgtatttggttcctggaaggctggttagggtgagggatggttcaacagactggggatggggtgtgctagctggtatcacatttactggtgatcctgctaagaataagaaagatctatttggtgctattgcaatggtattgagagttgtaggaggcaagaattcacaattatctttgcctacacgctattctctgaacacaatatttacgagcttgataggtctattttggaatacgaattatgagtttggcaagaagaggaagcatgctagaatcattgacaagaagattgccaagaagaagtctgaggctgtcgagtaccaaaagcttcttcctataggctga

SEQ ID NO: 4960 - DNA, 99 bp, Zea mays
  Peptide Sequence Number=SeqID_48335
atgtctaaccgtggtaaatatgctacacaaagtttatggaaatttaggaagggtcgtttgaccggatctgccttcgacaaaactgccaatggaaagtga

SEQ ID NO: 4961 - DNA, 558 bp, Zea mays
  Peptide Sequence Number=SeqID_48336
atgaacagacaccggcactcaaggtgccattacaaacggaactccggttccgtccccgcgggcggcgctgacggcctcgacggtgggtatgctttctccagctgccaccacgtcagcaccgacggcggcgtccgcctgtccaccaatgctgcaccagcgagcgcgggcactccaaagcgcaccggcagcaacagttcgccttccctggcatggctggaggacgcctcctcctcagagctggaggatggtttccaccaccagaagctggaagaagaggtggccagccgacccgtgtgggaggtagagccccggctcacctcgctctccgccccagcaaggatgatgaagatccttgaagctgaaggcggggcagagatcccatcgcgggctgagtcttctccaacacgctccaaggtcctccccctacgacacgggggctgggtcccacgcgtcatgcaagctggccaggggcagaagaagccaaaccaccacgcgcggtgcgcgcaactgcccagcggttacgagcattcctccactttcgcccagaccagcgggtga

SEQ ID NO: 4962 - DNA, 1092 bp, Zea mays
  Peptide Sequence Number=SeqID_48337
atgccttcgcactcccctcatgcattgcgcccttccaccttccgagcccccggatggggagcgcccgcgttgctttcgtcttgctgctgttggaggagcgcaactttgtggaagttggtacctttcagccatcgctcggcttcaaggattttcatcaggcagcctgctgcatcccctcgtcgatggtcacccaagacggtgaccaccagtttgatggtggggagaagcaaaccgggctacggcctctgccccgccctcagcttcaaggatcttcatcatccttgctggggcggagggcgagctgagtcggagctctacctcccgtacgggccggcgggccacctcctccttcagcattatggggagagggcgctcgccggcttagcggaaggggcggactttgacaacgcagggttgatcggccgcaagcgttgtcagctccagcatgcctggttcgctggctctggcgcagcttccggtgccacctcccaccgctgggcggagtgcggctatctgcccgccgtacgggcggctgttgcgccgcgcgcaccgggggaccgcccaagacgtcgcgcgctgctagggcggcgttcgtgttcttgggttgtcctgcccttgctccggtacgacgcctctgcgcggaggtcggtgctcgctcgtccgggaggacccgagtggggatctgctggtgggcagatggctgccatcgttggtgctgaggtggtggcggctgaagaagtcctcgtcgccgacgagatcgccgccaccatctgcgctccgggcctccggctctttggctttgatagcttgtcctcgcccctcgagtggggatgtgggcgagggccttatcgcagcagcgtctgccctgaggtcatcgctgctgttgtttggccgcccggagcggaggtcgttgtcgctgctgccggagtgggcggcggcgagccacctgggattctgtcgtcccgcaggccctccaatgtggggggttgttcatacctgcgggggtggaactggagttctgtttgtaatggcaccttgagtgccggtgtctgttcattgcggctgtcggggcctgaacatcgaggtatttga

SEQ ID NO: 4963 - DNA, 726 bp, Zea mays
  Peptide Sequence Number=SeqID_48338
atggtcggtccgagcccaaggtcgggcgaggcggaggctcctctgaggtcgaggctaagtccgagccctggggtcgggcgaggcggagaccatcgtccgaggtcgaggctgagtccgagccctagggttgagtccgagcccaggggtcgggcgaggcggagactgtcgtccgaggtcaaggttgagtccgagccctggggtcaggcgaggcagagcttcctatggcgcctaaggccggacttggtggctgtcagcctcaccttgacgggtggcacagcagtcggagcagcgcaggcggcgctgttttcctgtcaggcgatccttgcattgaatgctcctgcgatctggtcggctggcgaggcgatctggccaaggttgcttctccgtgaagcctgcccgagctgggcctcgggtgagtcgaagctttgtgctgatgggggttaccagctgagattaggagtcttggaggacggcaagaaaaagaagaaaaagaaccgcggcaacgagaaactgcactccgccgctctggtcgtggcagctgcgactgggggccggggtgaccgcagcaaacgctcacggccaccaaggggtaacggcgacacatgccccgtgcactccaacggtcaccacgacgccgtagaatgtcgcgagatcatcgacctcgtgaaacgtgtcagcgcgcggcacgagcagtcttccggggatgactccccacctcgtcgctga

SEQ ID NO: 4964 - DNA, 321 bp, Zea mays
  Peptide Sequence Number=SeqID_48339
atgtggtcgttggaaggctgctgtcgcatggcgcaccggacactgtccggtgcgccagccacgtcagtcggtcgttgggttctgaccgttggagctctgactggtggggcctctgggctgtctggtggtgcaccggacaggtcctgtagactgtctgtttttggtccatatgccccagttgagaggatcgctagagctgatgtacctatgccctatgctgtcaaccttgagagaatggctgctccacagataaactacgcttatgctcgtgacaatgaaacactatttgatattattagtgtaaagatcccttcgttttga

SEQ ID NO: 4965 - DNA, 2934 bp, Zea mays
  Peptide Sequence Number=SeqID_48340
atggcgtcgttcgctgtgtccggcgcgaggctcggggtcgtgcggcccggcggctcggcgcgatctggtggggagcggaggagtgcggtggacttgccgtcggtgctcttcaggaggaaggacgctttctctccctgcaaattggtggtttcttggttcttatcagtggagctcgctttggaatttgcaggcaccgttctgagctgcgctggtgctcctggaaaggtactggtgcctggaggtggcagtgatgacttgctttcctccgcagagccggtcgtggacactcaacctgaagaactacagatacctgaagcagaactgactgtggagaagacatcctcctcaccaactcaaacaacatcagcagtggctgaagcaagctcaggagttgaggctgaggagaggcctgagctctcagaagtgattggagttggaggtactggtggaaccaaaattgatggtgcaggcatcaaagccaaagcaccactcgtggaggagaaaccacgagttatcccaccaccaggagatggccaacgaatatatgagattgacccaatgttggaagggtttcggggtcaccttgactaccgatacagtgaatataagagattacgtgcggctattgatcaacatgaaggtggtttggatgcattttcacgcggttacgaaaagcttggatttactcgcagcgctgaaggtatcacttacagagaatgggctcctggagcatactctgcagcattagtaggtgacttcaacaactggaacccaaatgctgatgctatggccagaaatgagtacggcgtttgggagattttcctgcctaacaatgctgatggttcccctgctattcctcatggctcacgtgtaaagatacggatggacacaccatctggtgttaaggattccattcctgcctggatcaagttttctgtgcaggctccaggtgaaataccatacaacggtatatattatgacccacctgaagaggagaaatatgtattcaaacaccctcaacctaagcggcccaagtcactgcggatatatgaatcacatgttggaatgagtagcccggaaccaaagataaatacatatgctaacttcagagatgaggtgcttccaagaattaaaaagcttggatacaatgcagtacagataatggcaatccaggaacactcttattatgcaagctttgggtaccatgttacgaatttttttgccccaagtagccgttttgggactccagaggacctaaaatctcttattgataaagcgcatgagcttggcttgctagtgcttatggatattgttcatagtcattcatcaaataataccttggatggtttgaatggtttcgatggcaccgatacacattacttccatggtggtccacgaggccatcattggatgtgggattctcgcctattcaattatgggagttgggaagttttgagatttctattgtcaaatgcgagatggtggcttgaagaatataaatttgatgggtttcgatttgatggggtgacctccatgatgtatactcaccatggattacaagtgacattcactgggaactatggcgagtattttggatttgccactgatgttgatgcagtagtttacctaatgctggtaaacgatcttattcgtgggctttatccagaagctgtatccattggcgaagatgtcagcggaatgcctacattttgtatccctgtccaagatggtggtgttggttttgattatcgtcttcatatggctgtcccagacaaatggattgaacttctgaagcaaagtgacgaatattgggaaatgggtgacatcgtgcacaccttaacaaatagaaggtggcttgaaaagtgtgtcacttattgtgaaagtcatgatcaagctcttgttggtgacaagacaattgcattctggttgatggataagcttggttctgaaatatctaggagtcccttgagcatagatcttgtaggtctactggccgaggatatgtatgatttcatggctctggacaggccttcaacgcctcgcatcgatcgtgggatagcattacataaaatgattaggcttgtcacaatgggtttaggaggtgaaggctatctaaatttcatgggaaatgagtttgggcatcctgaatggatagattttccaagaggtcctcaaagtcttccaaatggctccgtcattcctgggaataacaatagctttgataaatgccgccgtagatttgaccttggagatgcagattatcttagatatcgtggtatgcaagagtttgaccaggcaatgcagcaccttgagggaaaatatgaattcatgacatctgatcactcatatgtatcacggaagcatgaggaggataaggtgatcatctttgagagaggagatttggtcttcgtgttcaacttccactggagcaatagctattttgactatcgcgttggttgtttcaagcctgggaagtacaagatcgttttagattctgacgatggccttttcggtggatttagtcggcttgatcatgatgccgagtacttcactgctgtaagtcctggttctgagtattgcggcagtcttggttctgagtattgcagcacacagtctgcttctcttattttattgcccccctacaacatcttagtagataacgacccatttactgattcttattacaggactggccgcatgacaacaggccgtgttctttctcggtctatgcacccagcagaacagccgtcgtatatgcacctgcaggtgcagaggacgaatagggcacaacagcggttgttggggaagaacttcagagggatgtgctgctggtggactgacaccactgccacgcgcgatgctgccagatgttgccctcgagaccacgtggcaggacgatcagctattcaggtggataggttagcttaccgatga

SEQ ID NO: 4966 - DNA, 375 bp, Zea mays
  Peptide Sequence Number=SeqID_48341
atgaagttgcgaagagaatctcaaataaacaacctatcgagcttaaatttattcatcacatcctttttgggaggcttgaaaaggcaacaaatattatcactttgtatgatgtttccaatatctagcacatttgtttgttgctacaggtatagtaaaggttatatctatcacgttctcaagatgtggatcacccttggttgtccttgccagccatcatgcttttcttatgacataagcctaaagtactggttaaggattgttgatgattgttttccagcatcaaattttgctagcacatttagtttcccacaaggtggggagctagggaagttgcaaattgacataagcaagttcatggcgagaaaaccaggttag

SEQ ID NO: 4967 - DNA, 2286 bp, Zea mays
  Peptide Sequence Number=SeqID_48342
atggctgaaaggtaccaactcccacggagttgcgttcctccaacgacaaggcggaaggattgcgggtgtcccccatccgggggcccggaaggtggaaagacacgacgcataagggagcgcgaagacatggtcgcctttcaagggggtcaccctccttttaaaggtgactctccctacttgcgtccccagccgtcgtgggctgagtcttctccaacacgctccaaggtcctccccctatggcgcgggggctgggtcccacgcgtcatgcaagctggcccagggcagaagaagccaaaccgccgcgcgcggtgcatgcaaccgcccagcggttacaggcattcctccgctttcgcccagaccagcaggcccacgcgtcatgcaaccggcgcgctggttgcaacgtgcgagcaactgcaccgccactcgcaccactgccacgcctcctcgactatggaaccagcgggcaggagcagcggtcacgtcgtcagccaagcttacgtcccatccaggggcagcgagagagccctctctcacggcgtgaagatggcgcgcccgcgtttcgttcctcgaatggctcgcgcacgcgcaacggccgcctcgcgaaccactcgccccgtcgcattaactccgcggcgggacaggcggcgcctttggcaggagaagcaagcgacgcttcgccttcgccataatgaccgcgtccaaagagggaccgggaaaggggataccccgaaaaggatccttctccgtgaaggaaacaggctccgagcctccctactaatcagaggttccaaggctggcccctcggaggggtttaacagccgcctcagagcgcgtgggccccgcacccactactggtcagaggttcgaaggccggcccctcggaagggttcaacggccgcctcaggctactcgggctccgcgcccactactgatcagggcgggaacgatcttgtaacggaatcccatcagagggaggcatcgagccctcggaccccgtcgaaaggagaccgggtccggcagatcacccgcagtcgacagagccgaagtgaccgcagtcacttcgccgctccactgaccggtctgacaagaggacagcgccgcctgcgccgctccgactgttgtgccactcgacagagtgaggctgacaggcagccaggcccggcctcaggcaccataggaaactccgcttcgcccgacccagggctcggactcgggctcagccccggaagacggcgaactccgctccgcccgacccagggctcggactcgggctcagcccctgaagacgacgaactccgcttcgcccgaccccagggctcggactcagccctggcctcagccgacggtctccgcctcgcccgacccaggggctcggactcgacctcggcctcggaagacagactcaacctcgacctcggaggagcctccacatcgcccaacctagggcacggaccgaccacgtcaacaggaggcgccatcattaccctaccccaagctgactcaggctacgaggaacaagaccggcgtcccatctggctcgctccgccagacaagctccagcgctcctccgacggccacgacaccacacgaaccgggtgccaaaacctctccggctgccacgatggcatggccctcttacagagggttggccgcgcggggaaaaggatgggacaggcgctcgcgcgaggccgctcgctcccttccgcgtggacgcttgtaaccccctactgcaagcgcacccgacctgggcgcgggacaaacacgaaggccgcgggatttccacctctctctctctccggctgcctccccccttcgcgctccgtctcgcgccgacccatctgggctggggcacgcggcgacaatttactcgtcggtccagggaccccccccccgtctcgaaacgccgacaggcggatttatgggcgcggccgcgaggtcggagctcgggagggctcgtcggcgctcgaggacggggctgcttcggcgcttggggatggggtcggcggggtctgcgggaatggcggctgcggggtcgggctgcggggtctgcgggatggcgggtgcgaggtcagcggggatggcgtctgggggggtcgggctgcggggtcgacggggtctgcggggatgacgtctgcgggtcgacagggtctgcggggatggcatctgtgggtcgacagctgcgggaatggcggatgcaggcgaaaatgcggtgtgcgaggtccatttccttcaccagtcactcgaaagcgagagctcatcggtaagctaacctatccacctgaatag

SEQ ID NO: 4968 - DNA, 609 bp, Zea mays
  Peptide Sequence Number=SeqID_48343
atgaacaaaagaccggcattcaaggtgccattacaaacggaactccggttccacctccgcaggtacgaacaaccccacacgattggggggcctgcagagcaacagaagaccgacgaacggctcgtcgtcgcccgctccagcagcggtgacgacgacgacttctgctccggggggccgaacagcagcagcgatgacctcagggcggatgctgctgccatgaggccctcgctcgtgccctcactcgtgaggcaaggacgggcagaaggccgtagagttggaggtcggtccgtgggcggccccggctatctcgtcggcggaagaacctcttccagctgccgtggcggaaggcggcgccgggagcggcttcgaagccactcgggtcagagagccaggcacgcggcagctgccagcgccacgagcggcgaacgctcttccccccgatcactgagggaaggagcgggtcgccgcccgcgcaggggccgaccccaactcggcacactcccctccccagcactgatgatgaaaatccttgaggctgagggaggggcagaggccgcagcccggcttgctttcccccgccatcgaactggaggtcaccgtcttgggtga

SEQ ID NO: 4969 - DNA, 1317 bp, Zea mays
  Peptide Sequence Number=SeqID_48344
atgccagatgggtatcgccacaagaggctttatggagaatatatagtttcgatctgcatggtcttaaacaaggataacattgacaaatcgatgttaactgagtactttagagcaaatcagttgtttgattgggcatcaaactacttatatagggagttccccgaggtggcaaggtggtggccagacaacagcatcgatgagtgcttaactgaggcatcaggatttcatatgccaccttctcttagaaggctatttacgatgatcctggatttctgtgagcctactgatgtggttggtctatgggacaaacatttggaggcaatgtctgatgacttctatcgaacccatagtaactcgcatgtagttgagcagttagtgttgatggatattagagatatgcttcaaacaatgggtaaggacatcaggttattccctctacctgcaataaaggacgagcacgataatatggcagatgttgttagagagatatttgaaaagatgtctattctagaagaccttgaggctgaatttgtggtttcatctctcaaccatgagcagagacatgcttacgacgtgatattatcatcgatggagaatattagtggaggtgtcttctttgtggatggtctaggaggaacaggcaagacaattctgtacaaagctttgttggcaactgttcgacgctctggaaagatagctattgctactgcaacgtcaggagtagcggcatctattatgcctggtggtaggaccgcacattcaagattcaaaatcccattgaacataaaagaaggtgacgtgcgtagattcactaaacagagtgggacatccaaaatgttacgaaggtcatcactgatcttatgggatgaggccacgacgactaaacgacaagcaattgaggcacttgataagagaatgagagatataatggatagacccgatttgccttttggagggaaaacagtggtatttggtggtgactttagacaggtcctttcggttgtacggaaaggtacaagggcccaaatcataaactcaacgttgcatagatcttctctatgggatagtatgcaacatcttagacttgtgcgcaacatgagggcacagtcagatcaatggttttcaaactatctactacgtattggtaatgggatcgaagagacatgcaacgatgctaatgtgagattacctgacgagatatgcattccttacactggtgaagatgatgatgttgatagattaattgaagaaatatttccatcgctagagacgaacatgcataatcgagattacatcacatctcgagcgatcttgtga

SEQ ID NO: 4970 - DNA, 321 bp, Zea mays
  Peptide Sequence Number=SeqID_48345
atggaggtggatggcgggttgattcttaaatattacgggggctcttatgcaaaccacacgatcatggatccacggtccagatcagatcgcacgaagtccacttcgccgcgaccgagcgccaaggatccggcggcgacgacccgagtccgccgttcgagtccctgttatacggcgcggaatgttcttcgcctcccactacccgtcaagctcggtgccaagccttcctctacggactgctcgagactacgtgccatccagtggcaagtcatccccccgacagcgcctggagcattgccccaccgcatccacgccagtgcctag

SEQ ID NO: 4971 - DNA, 1626 bp, Zea mays
  Peptide Sequence Number=SeqID_48346
atggcgggcgggcagaacatgcaggtgctctcggcactggacggcgccaagacgcagcggtaccacttcacggcgatcgtcgtggcggggatgggcttcttcaccgacgcgtacgacctcttctgcatctccctcgtcaccaagctcatcggccgcatctactacaccgtcgacggctcgcccaggccgggcagcctgccgccgcacgtgtccgcggccgtcaacggcgtggcgttcgtgggaacgctgtcagggcagctcttcttcggctggctcggcgacagggtgggccggaagagcgtgtacgggatgacgctcctgacgatggtcgtctgctccgtcgcgtcaggcctctcgttcgggcgctcgccggcctgcgtcatggccacgctctgcttcttccgcttctggctcgggttcggcattggcggcgactacccgctatcggcgaccatcatgtcggagtacgccaacaaacggacgcggggcgcgtttgtcgccgccgtcttcgccatgcaggggttcggcatcctggccggcggcgccgtcgccataggcgtcaccgcgctgttccggagccgtttcccggcgcccccctacgacgtcgaccccgcggcgtccacgccggccgaggcagacctggtgtggcgcatcattctcatgttcggcgccgtgcccgcggcgctcaccttctactcgcgcatgaagatgcccgagacggcgcggtacacggcgctagtagccaggaacgcggagcgcgccgcggcggacatgtccagggtgctccaggtcgacatcggcaataaggagcagccgggggcagaggaagaagcgacgacgggtacagaggcgcggttgcgcggcgaacaggaagaagcgacgacggggccgccgttcgggctcttctcccgcgagtttgcgcaccggcacgggctccaccttgtgggcacggcgtcgacgtggctcctcctagacatcgcctactactcgcagaacctgttccagaaggacatcttcagtgcggtggggtggatcccggcggcggagacgataagcgcgctggacgagctgttccacatcgcgcgcgcgcagacgctgatcgcgctgtgcggcacggtgcccgggtactggttcactgtggcgttcatcgacatcgtggggcggttcgcgatccaggcggtgggcttcctcatgatgacggccttcatgctggggctggccgtcccgtaccgccagtggacgcgcccgggcaaccagacggggttcgtggtgatgtacgcgctcaccttcttcttcgccaacttcgggcccaacgccacgaccttcatcgtgcctgcggaaatctacccggcgcggctccgcgcgacgtgccacggcatctcggcggcgtcgggcaaggtgggcgccatcatcgggtccttcgggttcctgtacctggcgcagagccaggacccggccaagacggcgcacgggtacgcgccgggcatcggcgtgcgcaactcgctgctgctgctggccgggtgcagcttcctggggttcctgctcacgttcctggtgccggagcccaagggcaagtcgctcgaggagatgtcgcgcgagacggagccgggcgccgccgagccgtaa

SEQ ID NO: 4972 - DNA, 1107 bp, Zea mays
  Peptide Sequence Number=SeqID_48347
atggagcttgacgaggagacgacgttcttggacgagctcatgtcgctgcggcgggaggcggcggcggcggcgtccgcgcagtggcaagcagctgccgcctacacgggcggcggcggacaaggcatgatgatgggcgacctcctcttctacggcgggacgacggaggccgccgcgactgccaccagcggcggcggcatggaccagctctcgccgttccaccagcaggagccgctgcaggtgcaggcgcccccgcaccctcactcgcacgaggagttcaacttcgactgcctcagcgaggtttgcaacccgtacaggggcggcggcgtcgccgtaataacgggggccgaggccgccgcggtgcccggaagggcgctcgccgctctccacgacgccatggtggaggacgagacgagcggtcacctgcaggggcagcaatatggagccggcggctccccgacgttcgtgttcggcggtgccgccggcgagagctccgagcagacgcccgtcgtcgtcaggggtgccgccggcggcccccaccacaggagcaaggtccacggcggcggcgcgccgtccaagaatctcatggccgagaggcggcggcggaagcgcctcaacgaccgtctctccatgctccgctctattgttcccaagatcagcaagatggacaggacatccattctcggtgacaccattgactacgtgaaggagctgacggagcggatcaaagtcctggaagaggagatcggcgcctctgcggaggacctggacctcctcaacaccttgaaagcttcttcgtccagcggcagcaacgagatgatggtgaggaactccacaaagttcgacgtcgagaggcggggcaacgggagcacgaggatcgagatctgctgcgccacaaaccccgaggtgctgctgtccacggtaagcgcgctggaggtgctgggcctggagatcgagcagtgcgtggtgagctgcttcagcgactttggcatgcaggcctcttgctcacaagaggaggaggacggtaataataagaggcaagttctaagcaccgacgagataaaacaggccttgtttcggagtgctggctacggagggaggtgcctctaa

SEQ ID NO: 4973 - DNA, 618 bp, Zea mays
  Peptide Sequence Number=SeqID_48348
atggcgcctcctgtcgacgtggctggcctacgccctaggttgggcgatgtggaagctcctccgaagccgaggtcgagtctgtcttccgtggccaaggtcaagtccgagcccctgggtcgggcgaggcggaggccgtcggctgaggctagggcggagtccgagccctggggtcgggcgaagcggagttcgtcgtcttctggggctaagcctgagtctgagccttgggtcgggcggagcggagttcgccgtcttccaggacttagcctgagtccgagccttgggtcgggcggagctgagttcgccgtcttccaggacttagcccgagtccgagccctaggtcgggcggagcggagacttagcccgagtctgagccctgggtcgggcggagcggagttcgccgtcttccgggacttggcccgagtccgagccctgggtcgggcggagcggagcggtgctgcccttctgtcaggccagtcagtggagcggcgaagtgacgacggtcacttcggctctgtcggctggggggcgcgcgtcaggataaagctttatgctgatgggggttaccagctgagaattaggagccttgagggtacccctaattatggtccccgacagtag

SEQ ID NO: 4974 - DNA, 612 bp, Zea mays
  Peptide Sequence Number=SeqID_48349
atgaacaaaaacaccggcattcaaagtgccattacaaacggaactctggttccccctccgcaggtacgaacaaccccactcgatgggggagggcctgcggagcaacaggagaccgacgaacggcgcgccgtcgcccgctccagcagcagcgacgacgacgacttctgctccggggggccaaacagcggcagcactgacctcagggcggatgatgctgccaagaggcccccgcccatgcccaaactcgtgaggcaaggacgggcagaaggccgtagagttggaggtcggtccgtggccggccctggctatcttgtcggcggaagaacctcttccagctgccgtggcagacgccggcgccgcgagcagctccgaagccgctcgcgtccgagagccaggcacggtgcagctgccggcgccacggacgacgaccgcccttccctccgatcactgagtgaaggagcggaccaccgcccacgcaggggccgaccccaactcggcacactcccctccccagccctggtgatgaaaattcttgaggctgagggaggggcagaggccacagcccggctcgctttcccccaccatcaagctggaggtcaccatcttgggtga

SEQ ID NO: 4975 - DNA, 1143 bp, Zea mays
  Peptide Sequence Number=SeqID_48350
atggctgaaaggtaccaactcccacggagttgcgctcctccggcgatgaggcggaaagacggcgggtatcccccatccgggggcttggaaggtggaaagacacgatgcataaggaagcgcgaagacatggtcgccttccaagggggtcgccctccttttaaaggcgactatccctacttgcgtccccagccgtcacgggctgagtcttctccaacacgctccaaggccctcccctgcggcgcgggggctgggtcccacatgtcatgcgagccggctcagagcagaagccaaaccgccgtgcgcggtgtgcacaaccgcccagcggttacaagtgaccctccacttttgcccagaccaacgggcgaaaggggcgggcggccatgcaggcggcatgcaggcggcatgcaaccgcgccaagtgggcgcacttctccgactcccaacacgcccagcatggaggcccaggcccacgtgtcatgcaaccggcgcgccgaacgcttcgtgcatgcaaccgcaccaccacttgcgccaccaccgcgtctcctcgattgcagaaccaataccgcgactcgaggcgacccagtgcacgacccagcagcgccagcctggcgcgacggtcagtgcggccaaaaatgggccggcagtaatggcggtggcaggcgggcgggagcagcggtcacgtcgtcggccaagctcacgtcccatctgggggcagcgagagaaccctctctcacggcgtaaagacaacgcgcccgtgttccgttcctcgaacggctcacgcacgcgcaacggccgcctcgccaaccactcgccccgtcgcattaactccgcggcgggacaggcgacgcctctgggaccgggaaagggggataccccgaaagggatccttccctgtgaaggaaccaggctccgagccaccctactgatcagaggttcgaaggctggccccccgaaagggtttgacagccgcctcagatcgcgtgggccctacacccactactggtcagaggttcgaaggtcggcccctcagaagggttccacggctttctcaggctactcgggctccgcgcccattactgatcaggggttcgaaggctggcccccgaagggttcacagccgcctcagacgccgagcgagggatga

SEQ ID NO: 4976 - DNA, 1437 bp, Zea mays
  Peptide Sequence Number=SeqID_48351
atgggcagaccaaagggcgccacgtggcaaagagagacaacacatctcagtaagttcggactcccacagagggacaccggacccatatacataaaagtccggagcccccgggaggtccgaaccctagcagggtcccagaacaaggagaacccaggcggtgtcaaggtcatccagcaggcggcgcgcctgttgggtctgctggcaaacaggcgggtgcactccgccacccgaccggagacttcctctccgacatttggcgtgccaggctcccagtcgcccggcacgagtcactcctgttgtgcacgctgcacgccagtacacggtagcgcaaacatcccggactccatcaagggcgtctccgggggtgttgtcagcagtcagggagttgttgcgacaccctccaagctccacggcttcaccaggggccatgaagcaatggcgggacgacgtcgaccgactgctcagtatgacacattctacctcgaccagatcaaagacgcggtcatcccggcgccaacacgaggcatcagcatcagtgcgctcgccctcagtaaggggcgcatagaccaacgacctccgggcagaactcaaccgcaggcgtgcgggagaggacgcccgggtatccttggaaagggcacgcgagcaccgccaaaacatcgatggacgcgacctcgatcaagacttcgctgcgattacgccgcagacaccaatgggcacccggtcccaaacgggtgtccccttggccggagtgggctgcgccgcactggcggatcatctccgcgcggcgtcctggccacccaagtttcggccgcacctgccgaaaaaatacggaggaacatcaaacctgtcggagtttctgctggtgtacgttaccgccatcacggcagcaggtggaaacaccactgtgatggcaacatactttcatgtggccttgtctggacctgcacggacctggctcatgaacctcaccctaggatcagtctactcctgggaagaactctgtgcgcggttcgtggcgaacttcgccagtgcttaccagtagcacggtgtggaggcccacctccatgcagtaaggcaggagcccagggaaaccctccggaagttcatctcccgcttcaccaagcagcgaccggaggccagggcgaccgcaacaaacgcccgcgaccgcagaacgatagcagcggttcatgccctgtgcacccgcatggtcgccacagcgccgcggagtgtcgcgagatcattgaccttgcaaaacgcgtcagcgagcggcacgagcagtcctccaaagacggctccccgcctcgccgccgacccggcaaagagaaggtggacgacgtcgaggtagccgcggctgagcgggacctcgagtatcagtcgcccgagggggacctgaaggatatcttcacgagaggctcctacttcggtgaagacaactag

SEQ ID NO: 4977 - DNA, 972 bp, Zea mays
  Peptide Sequence Number=SeqID_48352
atggaaactgtttctcttctaatccctccaaagtgcctgccaccccctagtcaagagctgcatgtggagcaacaatcgccttctgcattagaagctgcctccaagcaaaaagagccaattatatttgaaacagaagttagaagaagcatacggcttcgagaaaaggcgaaggtcggtctgcccgagcctagacaactcctaggatctctcctccccgacggggtccctcccgggagcgagatccaggcgccgccggcgatcttccgccgcccctgcgcacgcgcggaccgtctggccctagggcgcggaccgtccggccgtcaggcagggaatcctagctcctgcaccaggtcgcggaccgtccggccctgtgctgcggaccgtccgcgtctgaccagggagcaccgccgcctcgcgccaggtcacggaccgtccggcccaggccgcggaccgttcgcgcctgaccagagagcaccgccgccggttcttttgagtgattggcgcctccaaaaaggtgtcaacatactttttggcgactccgctagggaagaggttgcaggtctacaaaatcaggcttacatggccgattctaaagatctcaacagtgcttctccaaacagcaacacaaggctgactaatttatcggccgctgagcatgaaagattaaaagatgacatgaagaaaatagacgaggaggtccagcgacaagcagatcaggtgctcaaggtggcagataagtggttcctctcgcacttcagggtagattgccaccagaaggccgtccaagagagggagataaacgccgagtacatgtcagtcgtgctgcaacagctccccacgataggtgatgccaggcgccaaaacaattgcgccaaatacatcgacaacaaatgggtttccccagccatattctggtatgccgatggactcatatccaggacgagcgtcaccaccatcttcgctaaatggtga

SEQ ID NO: 4978 - DNA, 1149 bp, Zea mays
  Peptide Sequence Number=SeqID_48353
atggcgccgagaagtgttaccttgtcaccatggcttatagagccgagaaaagagtccaaaaacgacattaagtcctttagggggtctaaacattggtatgttgatgttctattccctgactccaagacaaaccagctctgtcagcttgcttatgatctgttcgtgagttttaatgcttcattttttatggttgacatgtttctattccaaagccacttgactcattgtagtcatgcaccaaatttggtttgcagaatggttgcaagatatgcacctcctatctcttataactttctgaatctcatccgccttggtggcaatgctaaaactacatttgagaagagaatggggaacattgatgatgcagttcctttctttggcagaggcttcaacaagatctacccactgattatggttgtttatacgctattggttgctagtaatttctttggccgtgtgattgactttttgggaagctggaaaaggttcaagttacaacaggaagaagagaatatagatggtttagatccctctggaatgattattgtacaaaaagagagatcttggatcgaacaagggtgcaaagtgggtgagcatgttattccattggcaaggaatttcaatggcgtgaacacagatattgaatcacaaaatgtgccattggttggaaacacagtggagatgaaagtaggggcagcttcttccagaaatgatgggagagctggccagttgaaatatgcaaacagcagggagactatcgccagcaaatacacttctattagggaacagaaccggcagtcagggaaggcagtgaaaaaggaaatttcatcaaactctgtatctttgcttgaagaaagaagttctgagcagtggtccaatactggtataccaccaactggtgtgtctgcaacatgggcctcgatgaagataggttttcaaaatttcaaagccaatttgggttcgaagaagtttcttcctttgcgccaggatccaggatttgttctaaatttgagtgtctcttcacctgaatctcttgatgacatattccaaaggttgaaacgacggcctgcaaatgtgcttgtggattaccttgatgacgatgacaacaacaacacacgagatatggatgtgcatttccaggatcaatga

SEQ ID NO: 4979 - DNA, 534 bp, Zea mays
  Peptide Sequence Number=SeqID_48354
atggagcctagcggagcgacagctgtcggagcggttgagtccttgctgacgtcctcctgcttccgtaagggggccgagagccgccatcgtcacagagtatggggggcaccatcattgcctatctggcggagcgagccagatgggacgcagcccgagtccgagccctgggtcgggcggagcggagttcgccgtcttccgggacttagcccgagtccgagccctgggtcaggcggagcggagttcgccgtcttccaggacttagcccgagtccgagccctgggtcgggcggagcggagttcgccgtcttccgggacttggtccgagtctgagccctgggtcgggcggagcagagttcgccgtcttccgggacttagcccgagtccgagccctgggtcgggcgaagcggagcttcctatggtgccttcggccgggcctgactgcctgtcagtctcactctgtcaagtggcaccgcagtcgaagtggcgcaggcggtgctgcccttctatcaggccagtcagtggagcagcgaagtga

SEQ ID NO: 4980 - DNA, 1038 bp, Zea mays
  Peptide Sequence Number=SeqID_48355
atggcgctggaagcggtggtgttcccgaaggagcacctagcgggcactgccaaggcgcgctcggcgtcgtcactggcctgcggcttccgcaccgaggaggtcgaggacaacggcggtgtggttctgcaaggagaggccagcgatgcgcccggtgccggcgcggccaccacgtgggagtgctgggacgcggcgctctgcccgtgctccactccacctgctggtgccgtggaggagtgctgggacgacgtgcggcaccggctctccgcgtcccctccgctgccgccggcgccctccgccgccgtcgcagcgccatcgtccgggcacggcaaggcagctgccgcggcgcggcggagacggcggcaacgcccgaaggcggtgaagaacacggaggaggtggagagccagcggcgcaaccacattgccgtggagcgcaaccggcggcggcagatgaacgagtacctctccgtgctccgctccgccttgccgccctcctacccgcagcggggtgaccaggcgtcgatcgtggccggtgccatcaacttcgtcaaggagctggagcacctgctgcagtcgctggaggcgcagaagcggcggcgccaggggtgcaccgagccaccggcgccggcgccgttcgccggcttgttcacgttccctcagtactccaccgccgcgacgggtgtcgtcgctggctctggtgacggtgctggctccggcggcggcgcctgcgcggcgggggcgcggcggggcgtggccgacatcgaggtggccgtggcggagagccacgcgagcgtgaaggtggtcacgccgcggcggcccaggcagctgctgaggatggtggtggcgctgcagtgcctcggcctcaccgtgctccacctcaacgtgaccaccaccgccgaccagctggtcttgtactctctcagcctcaagatggaggaccagtgccggctgtcgtcggtcgacgacatcgccgccgcggtgaacgacatactcggcaagatctccgacgagcgcgccagccgtcacctactagccgcgtag

SEQ ID NO: 4981 - DNA, 738 bp, Zea mays
  Peptide Sequence Number=SeqID_48356
atggatagggcaacagatgtttgtttcttggaactccaggacaccatagaccttcctagaagttggcacatccctgatctggtaacccccatcagtacaaagctgcaaaggcctgatgggcgcgattccggtcaaggctccgtccactcaaaggacacgatctcgtctcgcccgagcccagcctcgggcaggaacagtataccaaggcaaattcacgcctcgcccgagggtctcctcaaacaacggacgcgccttcgactcgcccgaggcctagctcgggaaaacagcgtcgcctgccctgctccgactgttgtgccactcgccagagtgaggccgacagcagctaagaccgacctcgagcaccataggaagctccgcctcgcccgaccccagggctcggactcaacctcgactccggaagacggtcttcgcctcgcccaacccctaggctcggactcaacctcgactccggaagacgactcaacctcgacctcagaagacggtctccacctcgcccgacccctgggctcggactcagcctcgacctcggaaggcggtctccgcctcgcccgaccccagggctcggactcgacctcgacctcggaagacggtctccgcctcgcccgagccccagggctcggactcagcctcgacctcggaggagtcaccgcctcgctcgacctcgggctcggaccgatcacgtcacagggggggcatcattaccctacccctagctag

SEQ ID NO: 4982 - DNA, 297 bp, Zea mays
  Peptide Sequence Number=SeqID_48357
atggcgcttcctgttgacgtggcgggcctgtgccctaggtcgggcgacgtggaggctcctccgaagccggggtcgagtctgtcttccatggccgaggccgagcccgagctcctgggtcgggcgaggcggaggtcgttcggcagaggccagggcggagtccgagctctggggtcgggcgaagcggacccgagtccgagccctaggtcgggcggagcggagttcgccatcttccggggcttagcccgagtccgagccctgggtcgggcggagcggagttcgccgtcttccggggcttag

SEQ ID NO: 4983 - DNA, 1098 bp, Zea mays
  Peptide Sequence Number=SeqID_48358
atgcaggcggcatgcaaccgcaccaagggggcgcaccctttcgacttcgacgcgtccagcatggaggcccaggcccacacatcatgcgggcggaagcagcagtcaagtcgtcagcaggctcacgtcccctccagggacagggggagagccctctcccacggcgtgaagacgacgcgcccgtgttccgttccccgaacggctcgcgcacgcacaacggctgccccgcgaaccacccgtcccatcgcattaactctgcggcaggactggcggcacctttggcaggcgaagcaggcgacgcttcaccttcgccataatgaccgcgtcaaaaaaagggaccgggaaaggggatactccaaaagggatccttctccacgaaggaagcgggccccgagccccctactgatcagaggttcgaaggctggcccctctgaagggttcaacagccgcctcagagcactcgggctccgcgcccactactggtcagaggttcgaaggctggcccctcggaaggattcaacggccgcctcagaccactggggctccgcgcccgctactgatcaggggttcgtaggctggcccccgaagggttctgacagccgcctcagagcacgcagagcgagggatgaccctgggtacgttcgatacataaccaaggctcgggctacgctcccgagtcacttcgccgctccactgaccgacctgacaagaaaacagcgccgcctgcgtcactccgactgttgtgccactcgacagagtgaggctgacagcagccaaccttggctccggaagacgacgaactccgcctcgcccgaccctagggctcggactcagcctcggctctggaagacgacgaactccgcctcacccgacccagggctcggactcagcctcggctccggaggacgacgtacttcgcctcgcccgagcccagggctcggactcagcctcgacctcggaagacggactcgacctcggcctcggaggagcctccgcttcgcccgacctagggctcggaccgaccacgtcacaggaagggccatcattaccctacccctaactagctcaggctacggggaacaagaccagcgtaccatctag

SEQ ID NO: 4984 - DNA, 1620 bp, Zea mays
  Peptide Sequence Number=SeqID_48359
atgagttccaccgccgctgtggcccttaatcgccgcactcgcagccgcccgccgtcggccgcatcctcccgcaggtccgatgatcccacggccgccgtcgccagtaccgccaacggcaacggcaatgtccccaccaaggccgcctcccccgatcacgcctcaggggagaggacggtcaagaagctgcggctgtccaaggcgctgacgatcccggaggggaccacgatctcggaggcgtgccggcggatggcagcgaggcgggtcgatgccgtgctgctcaccgacgccggtggcctgctctccggcatcgtcaccgacaaggacatagctacaagggtcattgccgaggggttgcgggttgagcaaacaatcatctccaagattatgacaaggaaccctttatatgtcatgggggacacacctgctattgaggcactgcagaaaatgatccaaggtaaatttagacaccttccagttgtagaaaatggtgaggttattgcgatgttggacattacaaaatgcctctatgatgcaatatcaagactggaaaaggcagcagagcaagaaagtgcactggcagctgctgtagaaggggttgagcgacagttaggtggcaacttctcagctccacacaatctcatagagactatgagagaacggatgtttaaaccttctttgtcaaccattatcacagagaacacaaaagtagcaactgtttccctttcagatccagtttgtgtagcagcacggaaaatgcgtgagttacaagttaattcagtcattattactgctggaaatttgcttcatgggatctttaccccaagggatgtgctgatgcgtgttgtggcccaaaatctttctcctgagttaactctagtagaaaaggtaatgactgcacaccctgactgtgctacattggacacaacaatccttgatgcactacatatcatgcatgatggcaaattcttgcatattcctgttcttgatggagatgggcgggttgctgcttgtttggacgttctgcaacttacccatgctgcgatttcaatggtctccctttccatggctcatgccctctctttcttaatccatcttagtaatcttagtccatctgaaatggttttccctctgaaggttgaaggaggtcctggtgctgcaactgatgtggcaaacacgataatgcagaaattctgggaatctgcacttgctctagagcaacctccagaggaggattttgatagtcacagtgaattacctttagtgatgccatcagatgccagggatggcagtagtagtatttatcgtcctgctgttgataatttatttgtctttaagcttcaggacaagaagggacgcatgcatagattcacttgtggctctgaaagtttagatgagctgatatcgtctgtaatccaaaggttaggcatggttgatgagaagagggtgattcaactgttgtatgaagatgacgaaggcgacaaggtgctgttgacaaccaattctgatcttactggtgctgtgttttgtgcgaaatcatctggattgaaggtctttcgcttctctgatgtggaccccttttgttcggttataccatatttatcgcactgtggggctatttag

SEQ ID NO: 4985 - DNA, 375 bp, Zea mays
  Peptide Sequence Number=SeqID_48360
atgggtcggcgcgagacggaccccgaaaggggggaaggagacaggcaaaaggggaaacacgcggccttcgtgttgtcctacgcccaggtcgggcgagcggaggctcctccgaggccgaggtcgagtccgtcttctgaggccgaggctgagtccgagccctgggctcgggcgaggcagagttcgtcgtcttccggagccgagctgagtccgagccctagggtcggcgagcggagttcgtcgtcttccggagccgaggctgagtccgagccctggggtcgggcgaggcggagttcatcgtcttccggagccaaggctgagtccgagccttggggttgggcgaggcggagttcatcgtcttccggagccgaggcttag

SEQ ID NO: 4986 - DNA, 711 bp, Zea mays
  Peptide Sequence Number=SeqID_48361
agggagaaagctgacctccggcgccaactggcggcggagaggagggaggccaacgaggccatcgccaaggagcaggctgcgcaggcggaggccaaactggcgcgggcggagggcaatcttgccaaggagctcgccgaacatctgcaggagcggctcaccgccctggagagccgcgcgaagggggccgaggccgtgatgcgtgcggaggccgaacggacgcgcacgcagcttatggatacgtatcgtgagctgggtgcgcggaccggtgacttcgaggtgccggaccgagagcccgggcttggttgcctgcaatgggtgcaggaggagctgcaggaactccccgctgtcgtgggggggtttatgtcgtacgcctccctagttacctgcgagggggcgatgaacgcgctctcccgcgaagggtgccggcacttcgaggtcttcgaccaggcggatgaagattttgatcgagatgtctataaggttgaagacctcgtggtgaaggattctgccggggccctctacgaccggatgtggggtccgcacggtcgcgaggtggtcagggagagggcggagacggcgatggctcagcggaggctacgccacatgccgcggacgcgccagacgtgtcaggtcctagcaccgggcgccgacgacgaagggcggttgcaaagcgtagggttagcgcggaggaaggggctcggcttcgtgtga

SEQ ID NO: 4987 - DNA, 438 bp, Zea mays
  Peptide Sequence Number=SeqID_48362
atggccggaatgccaacagtgttccctggtacccgaccccctcgtaacccggatgcaaaacgaaattgggaaggtagcgaacttgggacatgtgttctcaccacgattcctgtcgtcaccaggtccgcccacgacgatccgcggatttgcaatggcggcgtcgaattcccggcgccacagtcagggattccgcctggcttcgcgacgaaccgacccgctacaccagggaggaccaccacagcgtacccaaacggtgaaaatgtggcccgagccggcaacccgaggagtggcgcggcgatgtttctaccgacggtgtggattccgcggcgcgggtatgtggaaggttcacgggagcgcgcagcacaggggaggaggaaaagtcagcacggggcatggtacactttatacccgcggtgctgggacttgtcgtcggcgtaa

SEQ ID NO: 4988 - DNA, 312 bp, Zea mays
  Peptide Sequence Number=SeqID_48363
atgaagaaacaggccgcgcgtggacagctcaccagcggcactgctctgggcttggtgtgcggtccaggaaagtcgactggtccccaggaagaagttcatggccacgtcgggcgcgattgggtggcgtcgatgcaggaattcctcgtcggagtctggacatcgccgccgtccgctgctcttcgtagacatcaccactacaacctcggagagtcgcaatgctcagctctaaccatcctctttggtaagccttacacttcacgtgagctcccacctttggcgacttcatgcacattattccccacaacttgttga

SEQ ID NO: 4989 - DNA, 237 bp, Zea mays
  Peptide Sequence Number=SeqID_48364
atggtggtgcagggggcatctctggctgaggtgcaggggaaggcggcctctcagactccacctcccactgaggcaagggggaagagtcctactgctcctgctcctactcctggcgtcggcactcctgctcctcgtgtaggtgacgatgcagtctcttcagctggctggactggcctgacatcgtgcaacgcagtggacgcttcgccagaggttgcacactttacccacaagccgtga

SEQ ID NO: 4990 - DNA, 204 bp, Zea mays
  Peptide Sequence Number=SeqID_48365
atgggcggcgcagcgggccgtgggctgagctgtgggggcggcgcgacaggctgcgcgacggggtggcgctgttgggcggcgctgtcggggcgacgcggcgaggtgcggcgtggcgggggcggcgcggttgggcggcgctatgggggcggcgcgtggggcggcgcggcggggatgactctcgagaactacgcgctcttgctctaa

SEQ ID NO: 4991 - DNA, 51 bp, Zea mays
  Peptide Sequence Number=SeqID_48366
atgcagcagcccatcctcgacgccgtcaaaacccttgatatatgtgtgtga

SEQ ID NO: 4992 - DNA, 738 bp, Zea mays
  Peptide Sequence Number=SeqID_48367
atgtcgtccacctcggtgagcggcggtgtcggccgaaagaggtcgcgatcgggctccggcatcatcgccgacacgacctgcgggcaccacatcctcaggattgacggctattcccacaccaaggtggttccaaccggcgcgtacctcaagtcccaaccttttaccatcggcgatatgccaccgcgcacgaggaaaaccgcgcgtaagtccaccggacctatcggtgtacctcggcatcagctggctccaaggcatgaggagagcagcagcagtaacgaccccattggagacctagaagcccaagtcgagcagcttcggacggagctacgggtgtgggtagaagatggtcagcgtataaatgagttaagagctgacgtccgacatctgcaagacgagcttgctgaatgggatttggcaatcgattgggctgtcaattcacgttccattgcttgggaccaggaagccaaacctcgagcccgtgtggatgagcttagcacggtcgttgacaacttgcaggtgtattgcaatacattacatgaggaagttcatgaactgtattcacgactgcacccagacgtacctgccgaccctgttggaatgggagccggttcttctggaacagcaggtgaagcacttggtggggaattggaccttttcaagccccctccttctatgaacctagctgatgaacggtcccctacaatagacagtgaagcaaccaaagacgataaatactag

SEQ ID NO: 4993 - DNA, 636 bp, Zea mays
  Peptide Sequence Number=SeqID_48368
atggcgtgttgctactctaaagaagagatgataggaagtagcgacaaggtcgtcaagaccacctggcacgatgtctcctgccagatcaccaagatcaacatgtacaagcatcagaggcttcgtaaagcagctctgaaggaggaagagcatctatttgtttcagtcaacgggactataactctgttgggcttaaccgattcaatgtcaagtgacaatgctggtggtattgctgagatggctggaatgagccacaaaatctgtgagagaactgatgctcttggtgatactggcaacacaacttctgctattagaaagggatttgccattggttcaggtgctattgtgtccctggtgttgtttggtgccttcgttagcagagctggagtgaagttctctaccatgaccatgaagagtgttggaagtgtcgccctaaagatggtggaggaggttcacaagcagttcaacaccattcctaggttgatggagggaacaggcaagcccgactatgcaacatatgtgaagattttcactgatgcttctgttggtccttgttctcagatgctatataccaagaacaaagcaacacaattgttaatgattagagacattcgtccttcgaagcattatttcccctag

SEQ ID NO: 4994 - DNA, 483 bp, Zea mays
  Peptide Sequence Number=SeqID_48369
atgggctgctgcatcgcgcggcttgctgcgcattttgacgaacagccggcgggcaccacgacgaacagcgaggagggggctcacggtttagggagggggaaccgagcaaagaaggtcgctgtgcagggggcgtggccaaaggtgaaaggggtgctgtgcatagggagtagaaggccggccaccgaggcgccggccatgggtggaagaaaggggcacctgcttgctcgaggaagaagaaggggaggagtgatggacgccatggaaggagcttcagcgcgccgaggaagaagggcgcggctccctgcacttgggctcaagggaaacaaagagggggggacagcgctgggcagaggagatgagctgggcgcagggaggtggaggcgccatgggagggagcttgctgctgcgccagggaagaaggagctgagctccctgctgcaaccgcgaggaagaagagacagggaagaaggaagttgtgcgtga

SEQ ID NO: 4995 - DNA, 399 bp, Zea mays
  Peptide Sequence Number=SeqID_48370
atggtgcttcctggtggcggcggcgttttcctggtgacggcggctcaaggtttgacttggggtggttgggaacatggaataggtcgcggcgccccggctacgaccccttttatggccgcccgagactggttcgtgcacgccctcaacggattccgccccgtgcgcctgaccgagttcgcccgagccgagcggcgaagaaagagggagaccctgacagagcgggccccgcgtggaagtggaagacggagtgagctgagcgcgcgtgccagtgaccgacaagctgggcccgcttgtcagcgccaagctctgagtgggctgcgcggcggtgtgaaggcactgggccgaaaagagattcaaacttttgtggctcatcatttacaaattttatttgtgcactaa

SEQ ID NO: 4996 - DNA, 246 bp, Zea mays
  Peptide Sequence Number=SeqID_48371
atggtgcttcctggtggcggcggtgttttcctggtgacggcggcgcaaggtttgacttggggtggttgggaacggggaataggtcgcgacgccccggctacgaccccttttatggccgtccgagactggttcgtgcgcgccctcaacggattccgccccacgtgcctgaccgagttcgcccgagctgagcggcgaagaaagagggagaccctgacagagcgggccccgcgtggaagtggaagatag

SEQ ID NO: 4997 - DNA, 261 bp, Zea mays
  Peptide Sequence Number=SeqID_48372
atgagggtggaatggggtgcccttagccgaataattagaggatctgggtgtagttcgcttagccgtcgtgccgtcaatggggctcggtctagtccactacagccaaacaggatacttgctgagtatgttgatgtgtactcacccttgctctacacaccaaaccccccatccccaggttgtcagcattgcaaccactgctcaggagaagatgaagccgtggaaggagacttccaggagttccaagactacgacgagttctag

SEQ ID NO: 4998 - DNA, 258 bp, Zea mays
  Peptide Sequence Number=SeqID_48373
atggaggttcgctgccaaaccagcttttgccagaatgaagatggtttccccaagttgttgaaagcatgcacagttcgcctcggaatccggagccagccagagtatgatggtcgtgaattcatcgagcatagcacaaagaagtgtgtcgtgactgtatacattggatccagtctgcaccatgtggaattgttgggtctatgcttcgtcgccgaaggtcttatagaaagaagtgatcctcggatgaagctgtttgtataa

SEQ ID NO: 4999 - DNA, 303 bp, Zea mays
  Peptide Sequence Number=SeqID_48374
atgggcgctgacaggcgggccaggggcgtcgggcgcgcgtgcacgaagcggtatccgcgatctggttcatgcgatcaagatcggacgagggagatcagaccagggagggataaacggctgcgggcggtgctgctcttctccgcggcgagctcggggtggcttggtgcggtctcccgcgtgctagatggctggggaagcgggtgcgggtctccagcgacgtctggcggcgtgggcagagcgcgagagagggcggagctgtgtgaaatgaggcggggaagttttccaattccaaattcaaattag

SEQ ID NO: 5000 - DNA, 273 bp, Zea mays
  Peptide Sequence Number=SeqID_48375
atgatgctggtagactacacaatagtactcgatggaccaagtgtgtcggtcgaaggcccgacgcagctgggtatcgagagcgtcgtggatatgacacccgtgagcggcgtcacgagtgatgggtctagcgatccatccctctggctccggctcctccgagagctccgtaccgtggctcgaactaccaccggcgtcgtcattgtctctgtctccatcagggtctcctccagcagccgggatgccctatggtggtgcagggacatctttggctga

SEQ ID NO: 5001 - DNA, 336 bp, Zea mays
  Peptide Sequence Number=SeqID_48376
atgggcaagagcaagaagggcggaagttcatcgcaccattctggcgacaagcggaagcacgagccgagtccccctcggaggacttcggcgactctgagtactcggaggaggagttttcctccgagtccgagggacgaggagaactcctccgactcgtccggggaggagagcggcagggacggcgacgacgagggcgacagcggcgacggaggcgacgacggtggtgacggcgacggcgatggcgaggacgacggcgatggcggcaagggcgatggcggcagcggcgagggtggcagtggcagcagcaaggccagtggcaaagcgccactggcttaa

SEQ ID NO: 5002 - DNA, 174 bp, Zea mays
  Peptide Sequence Number=SeqID_48377
atggcgggcggaaatacgctcgccggagctaaggaacggtggctggccggtgaggagatatggagccaggaaatctggtctgtctccctgcccaaacccgaggcaaatccagggtttgtcgtgtctagggctcgcgtcccaatgccatcttctggcacacgacagaggggttag

SEQ ID NO: 5003 - DNA, 462 bp, Zea mays
  Peptide Sequence Number=SeqID_48378
atggccgtgatgggttcaacatctaaaaagatgtacctctgccagggtgtgcctcgacatcaactagccccgagacatgagggaagtagtagtggcagtaatgacccgattggagacctggaagcctgggtagagcaacttcggtcaaagttacgccacaggaatagggcacgtgagcaggacagtcaccgtatagcggaattgtcagccgaagtcagtcgcctgcagtacgaaatctcggaacgggatacaaccattgattgggccgtgaactcgcgctctttcgtctgtgactgcgaagcgagagctctagctcgtgtggcagagcttggtgcatccctcgaaagcctgcaagtgtactgtaatactttacatgaagaagtgcatgtattgtatgctcgactgcacccaggcgtgcctccagacgttgctgcaatgggagctagaatcgggaacagctaa

SEQ ID NO: 5004 - DNA, 66 bp, Zea mays
  Peptide Sequence Number=SeqID_48379
atgacgccatggctgatcgggccgaactcgagttctaagattcttgaattttcctttaggatttaa

SEQ ID NO: 5005 - DNA, 510 bp, Zea mays
  Peptide Sequence Number=SeqID_48380
atgtggaaggatcaagtggagcatgccaaggatgtgtgggctctttacccagggcagactgctcacctgacagtgcgatgcatgaatgccctgtaccgcctacaagcggtgcgaggagaggcaatgcctcagctaatgggcttggtggaggctaccaagatcaccctagataacagggaggacctggtggtagacctgtccactgagctagtggagaaagacctccaggtggagcagatggccacccagatccaggagcttgaggagctagtaggagctagggagaacaccatcaaggttctcgaggatcagcttatgaacactcagcagcaacttgaagaagctaaccagcacttggatatgcaccatcaggagattcaggacatggaggctgacgaggatgttgacatcgagggaggagtagagctagagcctgcatccagcctagacactgctggctcagggagaccacctcccctcgagtcaagcgttgccccgtttgctcattag

SEQ ID NO: 5006 - DNA, 306 bp, Zea mays
  Peptide Sequence Number=SeqID_48381
atggcgaagtatgagttacggagtggaagcctttgtcttcgccgaagactccaattccctttcaatacacctatgacttggtttgagatacacttgcaaaacatattagtcatagcatatgaaagagatgtgatcaaagtcccgcagggtttgcctcatccaaagcaattgcgcgcaacaattgacctgcggcaatgtactcggcttcggcggtggaaagagcgaccgaattttgcttctttgaagcccatgacaccaaggatcttcccaagaactggcaagtccccgatgtgctcttcctattaa

SEQ ID NO: 5007 - DNA, 942 bp, Zea mays
  Peptide Sequence Number=SeqID_48382
atggctcgaggaagatcccaaaagaacaagaagacacctccgaaggaaaataatgaggaagaagaagaaaatgaacgttggagaccaaacgatgaatccacctctccaaaaggtttgtcttcccatttcggttcccacatatgttgtgtggctaatgaaaatgatagtggaagcacaaatgaggatgaggaggatgaaagaagcctcatgcaactctacgctcatctaagccaagaagataaggcggtcatgctcaaatttttaaaaagagcgagaaagcaaagcaaagctcttcacatgctagaagatattctcaacataaaaatgcaatgctttgaagagttgactaaagaacataaggagctaaagtgctctcatgttaatttggtccaaagtaattcctcctttgagctagaatttccaggaacaaaagatgatacatgtcagaagctcaaggaagaaaatgagaggctaaggacaagcttgactcaactaaaaggaaactacactacccaaccttctcaagataaccgtgattacatggtgaaaaagcttgagacgggaacaaccgtggcatgcacaaaaccctttgaagaaaaagtcaaggacttgaggattgtcaagaggaaggaacaaaataagaaaatcactacctctgccaaaagcctcaaccatgcctccacacaaggtaacatccaagataatgatcaagccatacttcgcgctaagaaaataatctacgagtcattctttgacagaacctcccgagtaattaggcccacctacagttgtccttgtctaacagacatcagacaccctgtagatgttcctaagtcacttgacaagctcggtatctttccttaccttaccaggaacgtttcacccgtcttgcagacattacagaacatcggagataaagaaatgcggaagcgaattacataa

SEQ ID NO: 5008 - DNA, 372 bp, Zea mays
  Peptide Sequence Number=SeqID_48383
atggcggcggttccagggacagcgcgagcgggttcggcggtggtttctgggaacggcgtgcgcgacggattatgccgcgcccagtgccggcttgtgcggcggcgggtggccgggctttgggacggggcgtcagcgctcggggacggggatggggatggcgcggccgcgaggtcgaggcgcgacggatttctgggctcggggacggggcgtcggcgctcgggatggggacgtgctgcagggatggcgcggtcatggtcggactcggggctcgtcgaggctcggggatggggcgttggcgcttggggacggggtgtcggcgctcggggacggggatggcggtggcggggagggctgagggatcggcggggatag

SEQ ID NO: 5009 - DNA, 474 bp, Zea mays
  Peptide Sequence Number=SeqID_48384
atgcatctggatgctgagaaggagatgatgtcacagcgtgtgactcttcttgggaagtttattgcagtccgggagccaaacattcgatacctcggtctggaaaacatgactaggatgctgttagtaacagacgtgcaggatatcattagaaggcaccaggcccagatcattacatctttgaaggattcagatatcaggaaaacttcatgttattttgcagatatattccttcaggagtgggatgctctcatgctttctaatttttctttggagcagcagctacacacagcaagacaagaacttagtcatgtgctctaccaggttctttcacaggactgcttgaaaagagctatggaggttgaactgaagtcaattcaagaaaatcagacctgggagattgctgatctgccaagggatcacaaggctataggactcaaatgggttttcaaaattgaagaatgtactgccgtgtaa

SEQ ID NO: 5010 - DNA, 684 bp, Zea mays
  Peptide Sequence Number=SeqID_48385
atgtgtgatgatgtccaaatatgtaatcgttgtgtacttcttgttgagaatgttgttatggaaacatgttcaaatgaggttgcaaaggagaatgagcaattaaagcaagaagtggctcgccttggcaaggctttatatgacaagaaagtcaaagccaaacaaatccaaccttcttatgataacaccaccgcgggagtgaaaaagcctttggggggcgaaactgtgatttgtaggatatgccacaaggaaggccacaagtcttgtcaatgcaaggcgaagaccagggataagaaaaagcaaaagctcaagcaaaagccaacaagcaaaatcaccaacacctacatcaacaaggtggacaaaaaggctgctacaccatatttgatcaagaagaaaaagaatggaaaggtgatagcaaataaggccaacaagcaagctaacaaaggaaaaggggccaaacacaaactgggggccaaaggagattatctcaaccatgaaaagcaccaagaaggtttggatcccaagaggaaagtgagaagtccgaaggacttcggggaattttgtcacacccgggtttcaggggcaccaaaacccgggcgtgagataatcactaagtgtgctaggaccaagtctcacacatatgatgactcatggtacagaaacgaatatcacgtcatttatatataa

SEQ ID NO: 5011 - DNA, 204 bp, Zea mays
  Peptide Sequence Number=SeqID_48386
atgcccctcataaaagtttacaacaatgactcagacccttatggactaaaaggtcattctatctttaagtcggttcgacccttcatcttcggatatgctgtaataccgaagcttcatgaatggaccttcggcgacgaagcatggtcccaacagtacaggatgacgaagtcgaagaccaatgatccgaagcttgatggatactga

SEQ ID NO: 5012 - DNA, 618 bp, Zea mays
  Peptide Sequence Number=SeqID_48387
atgatgatgggcgagctcgactgcctgtcggaaaaccccaagttgatggggataaagctggaggagcaggagtacttcagcaggagccttgttgagaccaagaagatgcaaagagatggtccggctgagaggtatccagcgcttaaacgttcttcttcctacaatgcagaaagtaaccgcggcggaagaaagggcggaggggcttaccggcggcgagattgctccggtgaagtggtcgaggacgaaggggaggtctcggggatcacaacgggaggtccacgggatgccagagaagatatgagcgcaaggaattgggcggggactcactggatagctcggtccacgcgcggcggcagaataccgaagtccggtgaggtcgatctcgggcctccagtgaagtccggtcgggtccgagggcttggcaagcttcacgggctactggcggagctagccgaagcactggcttgcccagaggatggctggagtgggctggccacggtggacgaagctctggcggcaatggcgggcggaattgcgctcgccggagctaagggaaagtggctggccggtgagggtgagtgcggggcgaagtggggcgcgcctgggaaggctttatag

SEQ ID NO: 5013 - DNA, 2181 bp, Zea mays
  Peptide Sequence Number=SeqID_48388
atggtgttcctgcagcgcagccgccccgtcaacccccgcaagcgcccggcaccgccgcccgagctcgagcccgagcccgagccccccaggcccggcccggacgcttcatccgccgtcgacgcggcggcggcgctgctcgcggacgcgggctgcacgctcctcgtcccgccgcaccagccgccgtccctcccctcgccgcactccttcgctgcccgcctctcccgcaagctctccgccggcggggacgcctcctcgccctcggcccccgcccggcgcctcctcgagggcctcgccgccttcgcggcctcctcccccgcgcggctccgccagctgctcctcccgacggcgccgcacgagccgagccttgcccgcgcgctcctctccgtccccgcgctccagccgggcctgctcgcgctgctcctcgagaagctgcccgagcacttcggcggcgacggcgcgctcgacggatcgccgctgcaggacgacgtggggaggctcatcgtgtcgcagttccgctggctcgatttcctcgccgacgccgacgccttcgtcgacaagctcgtggaggtgctctccgtggccccgcaccgcctgaagaaggagatcatcggctcgctcccggagatcgttggcgacaagagccacgccgccgtggtcgccgcgctcgagaagctcctgcaggaggactccgaaatcgttgtcgccgtgctcgatgtgctgtcggatcttaacctcaacgaggagctgcaggagcaggcagtgactgttgcgatatcatgcatccggacaattgctccagaccagacgcctcatctgctcaggttcttgctgttgtcggctacaccagtcaatgctgggaggattatatcgcagatacgtgagcagctcaagtttgttggtgttgtcgatccacgggctgcacggagtaagaagctcaaagggaaggcatcagctaatagcactgatggggcaatacttgatacactgagatcaggcctacggtttaagaatcacagtactgcagattggggaagctctccccttaaacttttcgaaatcatttttgccactatgttcaagatgctttgtgaggctttcctgaaggagctgaagtcagttgaccacccgagggatcacaaagtgattgatgtttggctcatcatgcttatctatgccaatggtggtgctctagagaaggctgcaaagaaaatactgaagtccaagatcttacatgagtgcataagagagacactgtttgatcaatgtattcatgggaacactgaactggtaaaggaacatttcatgtcatacctctcagttagcgattacttgttggcttgcaaggaagagaaagctagagagtttgcggcttatttgttcacagcactatttgaagagttcactgatacatactccaggcaagagcttgtgggttcattggtcactcatataggatctggggttagttacgaagtttcatctgctctggatatcatgatttctttaacatccaacaattcggaagaactgattcctatatcttcacacataactggaatattggattacttggagagttttggcgaagataatcttcggaaggtttatgatatcttctgtcgtttggcactggctgctggcttcaatactggttcaggtggctcttcagttgctaacgaggttctaatggtggtgaggaagcaggttagtaatccagacatgaagtatagacggatgggaataattggggttttaaggatagtttctactatcgcttccactgatgtcaatgctgctgtgaactgttcatcatctcagcaaccaaattgtgaggaggccctagaattgctgaagatgtctgtcaactcatgcaaatttgtgacattactcttgatttttctatatgatgaattagctgctttgctggatagcaaagttatccactcttcaattcatgactgggtaggagagcatgttgcagagttatttgagacaccttttcttgccgatcttgaaaatggtgaactaccagagaaatatctatgtgatggcatagaaggagaattatggatgaagttggatggaaatatctctccaatcccaatcctgcttgcagatccttatgtcccaattttcacttttaacaacattctaaattgcttgggtgtggaatacttctaa

SEQ ID NO: 5014 - DNA, 2172 bp, Zea mays
  Peptide Sequence Number=SeqID_48389
atgcagctcaatgctttcggcacacaggttgaaagtagggttgataatgtttcacagaaagcaaggaacgagacagcagtaaaacttctgaagcgtctaagaaatctgatattacttgaaggcttgctgaatgcatttctcaaagattatccattatctttacctgagttgcgatatcttggggattgctctggatcagcaagcaccagcaaattcaacattccaaagaacatgggagaggagagcataaatggtgcttccagcaaaagacagaagggttgcaagggcaaagtctcagaaaaagtgaatcctgatgataaactcaagcaacctacaatactggatgctttcaaaagagcaggagtaacagtcagtcaagcaacaaataaagcttcttcacaaccatcatcaagtggaatgatgtcaaaggatatcgaacaagatgctactgatcctggtgaacttgggcttatagatttaatggcagcaccagttaaactagatatgcaaagatacaaattcagaactatccgtgcaacgtgcttgtctttgttgaactactcagagtgtcaaggttcatcttcttaccttcaaactgagttaccaacatatctatatcttctccgtgatctgcataacaaattagataatctgaatccttcaatcaagccttttcttagtacttctaaagcaaaatatactcctactcattgccataagagtacacaagattttcttgacaaaatccagccactattcttagttttaaggaagcatctggatggagcagtttcaatgatcaaagatgaatcagagagctgttcagatgactggagttcacattcatcttctgctggcaacccagacataccatatgtggttgtctccaagtcatcaattgtgactgctgtatgcaaggagattcttggctgctacaggaagttacttggcattcctgatctgttgaatcaaccaaacatgtcaattctgaagcaacttttgcagactttacagccaactgaaaattttgatgatgttctttccgagttccaaccatctcttgctccttgcaatgttgattacctgtattgtggagcatgtaaaatattggaggatattatggattcagtgtcctcattttcataccttctgtcttctaatgtgttaattactatacaatcaattgtaaattctgttgttgtgttgttggacaaatctggggaaccaaatgggaaaaatatacacatgggatgctccaaagcaatcattccctttctgcgaaagcgtcttggatactcagctcataagctgctcagtgctgatttccctagcgaagatgctggaaaaggatggcagagtaaaggtgatcttatacagaagatattgcaaatataccttaggaatagtgactctacttcagatctacttgctgagataggtcgtgaattgcctaagcacgaggagaacacagggagtttaaacaagacgatcaaacaagcactgaaggctagaggatcagttgatactattcttcaagagattcagaaatcagtggatgcatttgtctctctaataggaatgtgcaagtcccacgaaaaggtttctatgcatgcaatggcagttaaacatggggggaaatttattgacacatttctgaaagccttcaactttctagagagacatttcgagcaacataatgacaccatagttaaaatggtaagggttagtcatgttccttttggtatcactgatgaattacaatggctggtcagtgtcgctgatgaaattatgctgatacagctaaaacaactccagaaaggaacaagaataatccaatccatatgttcagatgctaagggtaacaagcggacaatgatcacaagcaaagtacctcctgcaaagagatccatggagcggttcttgttccaggtcaaggcgctgctacacagctgctccgccgagaaggaatttcagatgggcaatttgaagcacaaggacttgcaaggccatgtggtgagctctcaggcgtatgggaacgtggatgaggaagatgaggagcagacggaggtcgactccgaccttccagctgatgagcacgataatggcaatgccatggaggaggatgctgtggaaggtagcaacgagacgccgatggaggaggaagaggaatag

SEQ ID NO: 5015 - DNA, 324 bp, Zea mays
  Peptide Sequence Number=SeqID_48390
atgcagttgtgcatcaggcagagcagggccgtggaggggagcgacgaaaacggtgatatctgtgcaaggattagaaatgcggcagcatccgctagggttcgcgaaggcaatggaaagcagggatgggtcatcggcacagtggagcagacgcgagactgctcaccgagtgtgaatcgtggcaatgtccgcaagaagcaagcaagcaaaaaaacctcagatctaaaacatgaggatggctcatacctgttcgaagtagcgcctcaaaatggaagaagcgagaggagaaatgctggagcaagtgtctcttcgacattatctagctag

SEQ ID NO: 5016 - DNA, 258 bp, Zea mays
  Peptide Sequence Number=SeqID_48391
atgacgaggaccctcctcgcccctttaggcaggtcaaggggaagattgtgcatttggagtagcaggaaggccgcaagaagcggcgtctggatagagcagcacgagcagcggcagcagcggcaacagtcgctgagcagagagaccatgcagcggcaactccattcagcatcagattcagagtctttctacagagcacagttgtccgctcagattgctctgcgagcgcacgggctattggatctccctgccttctgctag

SEQ ID NO: 5017 - DNA, 222 bp, Zea mays
  Peptide Sequence Number=SeqID_48392
atggccggctcggccgcgctgcctccctgcccggccggtggttatgagattgatggttctggttatgattatggtattgactgtaatcttgctgacggagagtacatcctcgtgccggagcaaggagctgctcaggaggtagccccagatccagcacccgagcctgcaccagaggacctgcctgccactgctttggaaggcaagccccggttttatgcataa

SEQ ID NO: 5018 - DNA, 369 bp, Zea mays
  Peptide Sequence Number=SeqID_48393
atgggcaaaagtaagaaaggtagcggttcttctcctcgctctggtgacaagcgcaaacatgagccgactcctccttcggaggacttcggcgacttggagtactcagaggaggagttctcctccgagtccgagggatctccggctcccgtctctcccccggcgttgtctgatgattcagacgactcccaggggattgccgcaaagggcttggatgagtcggagtactcctcggactcgtccgaggaggacaacaacggcgatggtggtgatggcggcgacgacggaggcgacggtgatggcggcggcgatggcggcagcaagggcggccatggcagcgacagcaagggcagcaacaaggccagtggctag

SEQ ID NO: 5019 - DNA, 798 bp, Zea mays
  Peptide Sequence Number=SeqID_48394
atgtgctatggcacctctgaccctcctcgtcgccctcacggcggagttgctcctggtacagctcacgtcgcggctttgttccgaccgcccttctcagatgggtcgcgacgttctccggcagacttcaccacagcggccaggtttatatatcagctcataagacggacgcttctaccacggatgggttacagggaggctgccactcatattcagctttggctccttggtgccctagtttctcactcagagtttgatgttgtggattttctcatttgtgagatcgaggacaccgtactggatggtctacgtgctcgtcgacagctgccttatgctcactatctgtgtcacatctttgctcagctgatttggcccccacagttccagggtactcttgaggcctctcgcctcatctttgggtcgtaccgtccagctccagaggatcctgtgtcggcacctgctccagtgattggtactcaggccgaggataccaccttccatcagtttgagactcagggcgcaacagtccatgatgatgatgatgatgatgatgatgatgactttggggttccacctccgccttcgcctcctatgcctcctcgcactcatgatcatgaggttgggagttctagtggtgctgcccctcctaccattgaccctgctcttgcggtgatcctccagactctcactcagcagcaggctcacttggcagccgttcaacagcaaatgtccgagagaatgctctcgatgtttcagacgattcaggacaggcaggatactctacagcagcagcttctctag

SEQ ID NO: 5020 - DNA, 459 bp, Zea mays
  Peptide Sequence Number=SeqID_48395
atggcccccgggcccacctcaggggaggatacgagcctgcaggaaccggcgtccaaggaggctgactcgtgggcccgggcccccgcgtcagagactgggccgttggtttcagcggaggtgaagaggcggtctaccgcgggcggcggcacgctcctctcgcggcggttctccttcttcgcacacacggagaccgacgcccaaggaatgaagaggcagtctaccgcgggcagcgacacgctcctctcacgacggttcgccttcttcacacacggagaccgacgcccaagaagatctgctgtagaagctggagctagtactgacttagacggaagctgcgctgcaggagctgtcggagccgaagaagtcatagacaccgccacaacggtagtggagcctaaagaggtggaggcggtgctgactgaactgggggaatcggtacaccagtatgctgaagcatga

SEQ ID NO: 5021 - DNA, 744 bp, Zea mays
  Peptide Sequence Number=SeqID_48396
atggcgcaccggacagtccggtgcacaccggacatgtccggtgcccctgccacgtcatcagtgccgttggaatctgaccgttggagttctgacttgtgggccacccttgatgtccggtggcgcaccggacagctcctgttcattgtccggtgcgccagtatgggcaaacctgacgtctgcgcgcgctgcggcgcatttaatgcctctgcagcgcgagagcccctggaaattcccgaaggtggcgagttcgagctggagtcccctggtgcaccggacactgtccggtggcacaccggacagtccggaactaggtgtaagcctaattccctttcagcagcgaaggcagcactgctagctgagaaaaagggcaaggccctcgccgacaacacccaccgagaagcctgcgaagacaaagcactcagcaagagacagcgcaacgatcaacccactcccgaaggcaccctccgcacctgcagcttcggaggacaaccacaagcaccacccccaggcttcgctccactagagggcgaggacgcaacagaggacggcgaagtcatcggcgtcttagcagaagaacagctacaggtacgggccctgcgcatcaagaaccgcaacctccaaaagcataaagaaatcctcgaggccaagtgccaacgtgtctccgcgcaagccaaggtgcaccagatgatacgagacgaggagcagagggctcgggaactcgagcaagagattgcgctcatgtag

SEQ ID NO: 5022 - DNA, 1941 bp, Zea mays
  Peptide Sequence Number=SeqID_48397
atgaggccaggccaaagaggcagcgggggggggggggctgcgaaggctactgcccctagcggaggccagccgccgctggcggcgaagtcggccgtccctgcatccagcagggcgccggaggctgtgaaggcggctgccgccggtggttccaagtctgcgaaggctgcccctgcgtccagcagggtgccggaggccgcgaaggcggcccaagggttgccgccgccgggcaagcgcgttgccgacttcgccaccgacgttagtgtggacgattatcttgttgggtcggacgaaggccaacttgttgttgttccgcctgccgcggcgaccgcggcggctgccgtggtgccaagggcgaagggcagtgctcttagtgccggcggcgagataccgacactcactgccgtcagggacgaggcgggtgctgtgtcccgccggctgaaggagatgaaggaggcacaaagtcaggcgactgacttcgcagaccacgcggcgtcgggggccctgacggtagttgtgtatgccgaagtcgagagacttcggacgcaacatgctgacgccgtccgggaaaagtcggccgccgatagtaagtgccgcaagctagcggataaggtggctgcgctggagggtgagaagactgacctccggcgccaactggcggaggagaggaaggaggctaatgaggccctcgccaaggcgcaggctgcgcaggcggaggccaatttggcgcgggcggagggcagtcttgccaggcagcgcgccgagcagctggaggagcggctcagcgctctgcagagccgcgtggagagggccgaggcctcgacgcgctcggaggctgagcggacacgcaaacaacttatggattcataccatgagctgggcgtgcggaccgctgacttcgaagtgccggaccgagagcccggacttcgctgcctcgagtggatacaggaggagttgcaggcgctccccaccatcgcggaggggtttatgtcttatgcctccctggtcacctgcgagggggcgatgaacgcgctctctcgcgaagggtgccgacactttgaggtcttcgaccaagctgatgaggatttcgagcttgatatctacaaggttgaggaccctatagtgaaggaatccgccggagccctctacgaccggatgtggggcccccacggtcgggaggtggtcagggagcgggccgagacggcgaggggtcaggcggcgcgtggcgagagggtggaggacttcggggctttgaacagcgcgcagcctgagtcggagtcgaacccggtggtggctgcgcccgagaccgccccggagccgcccccggaaaccgtcgaaggcgttcccgacgcccccgcagccaccgtggccggcggaggcccgtcgccaactgccgcgccgagggccgacgatcctgtgcaggtggcggcggagccggcagcggaggatcccgcgacggctgggtcttcgcaggttcaagattttgggcctacgcacgcaaccgctactgctaattttttggcggcttcgaccgtggatgatgggaataaatcggatgagactgcatctaagttttccgattttggtgactctaggagctctgttgagtggaccgaagagtcgtcggatgaggacttggactactttgcggccttggatgtggcagcggcggaggcttcgccgcatgctgcggatgctggagctgcacctggtccgagtgctgggcgcaggcggcgaagggtggttgcgaagtgtagagtgagtgaggcggatggcggtcggcttcgtgtgagcagggctggcaggcaagaactgttgtccttgccggccactgtgagttcaggtgagggggagctgcgaagtttttttgcgggtgaggagctgaggataatgctgtttaactatagggagatgggaattattccgaaggttgagccgatgtaa

SEQ ID NO: 5023 - DNA, 885 bp, Zea mays
  Peptide Sequence Number=SeqID_48398
atgtgcccctccactaggcgcttcgctccgcgtcgccaattgccaacaaccaccgagatccagcgtaggaaacgagataatctggcggcgagaaacaaaggcaaggtcgtgcccctgctcaggtgccccacaccacgcgttaccctaaacccttcccctgtctggcatgctgtccccgccctccttgagcccgaggtagctcccgctcgcccgccacttctctccaccaccaccgcatcccgtctctcgcgcacgcacagagatttacataaccacctcggatttaccctgaaactgcctccaaaaattctggatgcaacatcaaatactgccacatatgacctgttagttgcatgtatcaattgtggcataaaccatttatcaaatctgatattgtctcatgttaccaaagaaaagagactgagagaccgcaccgagccagataagaggcatgctcatttctctaaaggatttatttattgttcttgggatgcttcttggttgtatagtggcactaggttggtgttacatgtatgcctccagcacaccattatgtctcatgatgggaattggaatgtgctggtcgttttagtttttctagatgcagggcgacaccgatggaggccgacgaagcgggcggacgtggactacgctagggtggggtggttccaggtgtggcacattgcacaggcgaagccccaagaggccacagccgcagaggtgtgtgtcgtgcgtggggattatgatatccggattatggtatcttcggaatcagatcatgagtatacaagagcacagtcaggacgaagcctgaacgagacgaaagatgattatgacgaaggtctagatgatcatgaagctatgcgcagaaaagcttcggcatga

SEQ ID NO: 5024 - DNA, 807 bp, Zea mays
  Peptide Sequence Number=SeqID_48399
atgtcaggccctccacccaccaccacctcgccttcggcatccactgtgccaccaccggccgcctcagcccctgccctcgcgtcaccggtgacggcgccgaccctcaccctggaagtcatcaccgccttcctatccaccaatttttcaccgccagggcacacgtcccataccacccttccatcgccgctgcatgcattgctgacgccaccgacatcggccccgctcccccttccaggctcgatccgcccacctagtgccccggcggcaccatgcctgcccattcatatgttgcccatgccgtcatcgccttcccctattccatcatacgccatggctatggggggacccccagtacaccatgccttcgccgcaaacacagattgcaacatcaggcgcagtcatccctcagggaggttgcgcctttaccatatctccatgccaccatcgccaattccatcgtacgccctctcatcaacgatggtgcccgaattcacgatggcaacgtctccttcaccgaccccgtcgttcaccgcccccatgccaatgccgctacagtggcactgcgatgacgtcttctacggaagcatggatggcatccgggcatcgacgacgcagctacagacggtggaggtgcgccagcagatgctcgaggcagcctggtggcggtcgacctcggcacacgagggcgcgacctcgccctgtcggacggccatcggcaagcgcgagcatgcggagtcatcggaggggtgtagtgtcaaggcccaaaagtaccgctacagtgacgacggtactgtagcatacccttag

SEQ ID NO: 5025 - DNA, 933 bp, Zea mays
  Peptide Sequence Number=SeqID_48400
atggctcgtcttagacacactgcacgaaagtccgtcatccccttcttaccctctcgtctcgcggagcgtccgcttcgccgtcccgtggccggtcagtccagtcacttggagaggctgcaccaccgcctacatgaggagcaggaacatcgtcgacaggagcagcagggctcttctttctcgctccagcaggagatagagtccgtgaggagctgctcccctgtgcttcctctggaggcgccccctgcaccaccactgggcgccccagcctctggagtagctgctggaggagacccagacgacggaggtggcgacgacagctcgagccacgacactgacttctctgctgaccaggagccagaaggatgggttgctcgacccatcactcgcgacgctgctcgcgggtgtcacttccatgatgcgctcgacaccctgctacgtcgggcacttaaccggcgtacttggtccatcgagtatcgctgtgtgggtgctgaggtctgctcagagcactattctatctctgagcgggactcagctgaggcggccatgcaagatgccgcacggcgtgcgctttcgcactactgctcggttctcgatggggtagctgacggtctcaacctgaagtattacccccgccgtccatttggcagcacaggaggcgtgattgtttcacctgtcggtgaggacaatcctaggttgagcagcacagtcaacctagccgccgtgctaaacacggagctggaccatgcgctagatgagctgagtagggctcgtgctgagatcgccctgctgcgggctgagcgcgtggagcgtcgtcacctggatgatggttcccccgctcccgtcgggactcagcacccgtaccgctcacctcggcgtggacaccagacttatggcaatcccgactgcaagaccaagataaatctagaaccatag

SEQ ID NO: 5026 - DNA, 621 bp, Zea mays
  Peptide Sequence Number=SeqID_48401
atggatagccctgctctaccccgcgtcatccccgcccaggttcttgcgaacactattgtcgtgatgaatcaacaagaagctcctgctggagttggagagtttctacgagattttggtgttccagtggtcctgtggcgactacttcaagaagttggatataccgaagcacccaagtaccagtggtcacgcactgttcttagaggacaaccatggtatgaggtagtagtgcgtattccagaacgtgctagaaaaccatcttggccatattggatgttccatgccgaaggaatgactccttgggagggtgctcaggtagctgccttagaggtgttaacaaccatttgttaccagaaaagggaagagatacaagccacatctatgaggttgttccctgcagttgccttaagtgacccattggtgtatcatcaccaggcccgattaatggaaagcattcctattgggcaggattctgttgaatcggcatctgctcgagttttgatggccgtgctagagttgcaacttactcgagggcacagtcgtcaaaagtggcagcagttgtacactgggagttatgcagcatttaagatgatggaaacggccaagaatagggcttgtacctag

SEQ ID NO: 5027 - DNA, 126 bp, Zea mays
  Peptide Sequence Number=SeqID_48402
atggggggtttgggcgccaggggcgcgcaggccggggcgggccgggccgggcgttacaactgctcaggagaagatgaagccgtggaaggagacttccaggagttccaagactacgacgagttctag

SEQ ID NO: 5028 - DNA, 933 bp, Zea mays
  Peptide Sequence Number=SeqID_48403
atggggccagaccccacatgtcatacatccggcgctggcccgaagcgcgaagaagccagcggtcaagaagatgaactgccgcacaagaagcgtgcaaccgtcctgcggttatttgcccttccatcttcaccacaacctatggtcaaagaggcgaaccgccacacaaggagcatgcaaccgccccacggttgcgtgccccctcagcttcgctgcaaccggtggcccaacctctggcatgggggcccaagcccacatgtcatacatccggcgcgccggtccctgggtgcaggaaagccgcactgccgctcgcgccaataccgcgttttctcgaggccgtcgcagaaggctaatgagataaattttcaaaaccgatgcagcgactcgagccaccccgcgcatggcccaacaaagacattaaagtacggaggtcacgggccagtcaaccgtggggcaggcgtggcagtcggcatgaccataggcgggccggcagtaactgcatcaacgagtgcacaggagcagcgagccgatcaccagtcaaactctggccccacctgcaggctcgcatcctcccctgaggcgggcctgggggccactgtcgttatggtggcgttctcggaggcaacgtcgtcggacccagaaggcacgggacccctgctctatccggagcgcctccgctccccactcggccaagggtctaatactgccacatggcttattgtccatgacgcgatgtgcccccatggtatttattgcgtcctgtccattccactggcagacggcgccagggccaccctgcagacggcgcgcctgtctagtccattgccgaaacaggcacaagaagatggctccagcagaagatatcagtggctacctctgctatgttcctgggcccacatgtcagggctcagcactcttgtacatgttcccctttag

SEQ ID NO: 5029 - DNA, 918 bp, Zea mays
  Peptide Sequence Number=SeqID_48404
atggacccccaaggggaccccgtgcccccggtctatggggccgaagcctgccttcccccggaaacctttctggactccccacgggacctctctgtgaaagcaggagggcccgacagcctgggagccggctctggggaacgggaccctgttccatggggtggtccagagcctgcgtggtcgcttagcctggttccgtacccaaaagcctgcacactccactactctgtgacgggcctaggtcccaatcgaggctacctcctgggggccaccgccaaactctttcttaggtatgctggtctacagcctcgacaaatcgagcctacataccagggggcgggtggtgctggtggtctcgccagtggaggcaaccacctctgcagcgggcagcctaaccagcggcggcgaccacctcagcaccaacgacaacagccacctccgcaccggtggcttaccggcgatggtgaccgccccccgccacgcacgaataggtcctcgctcccgccctcctatggagtgaggacaagaccatccaagaacgcgaccgccacctccgcagcgtacaacgccttgtatgaccccttggggcggcgtcggagcagtgcgccacggatgcagcagacctgcgcacggcgcgactgtcgcaagtgcggtggacgaacagccgcgccccgcttggcggcggcaggcggcactggaatcgtcgccacagccatccaggccaaggagccagacacgcggcagctgacggcgcccgcagccggccggccccgcgtagccgaagttcgcatcctccgcaaggctggtgaacatccttctcctccaaatgctggaggaagaagcgggtcaccagcccatgcggaaggcaggaccccaactcggctcgccttccacccgagcgaggatgatgaacatccttga

SEQ ID NO: 5030 - DNA, 705 bp, Zea mays
  Peptide Sequence Number=SeqID_48405
atgtcgtgggggcacatcgcctgtcagaagggcagacaggcggcgcgtcctctccgcaataaatgcggagattgtgcggctcagagcccttacgtcatgcaccgtccgctggcctacgtcacggacaataagccatgtggcagtattagacccttggccgagtggggagcggaggcgctccggatagagcctgaacacgcgtcaataccggacccatgcctaggtcacgacacttcttctcccgggtccttgttacgggtggtccggagctcacttgatggggtccgaaccctatccaatggctccgggctactttacttcgggggtccgggttgtgcgtacaggggtctcgtgccttctgggtccgacgatgttgcctccgagaacgccaccataactgctcacgagatacccctggggttgttctctgcgcggttaagggtagctgcgcagacatcatgcctttatactgtagtaaggggtacccctaatcccagaaccgaaggtatagagctgatgaaggaaatacatgcagcttcatcaccatccgccaaaagcttcggatcattgctcttcagcttcgtcgtcctatacataacaaagcgttataaggtaaactcaagtttcaaggaaaagggcacagaaatcgccgtgcccagctataacttcaagagcatcaacttcgccctcaatgtcttcaactga

SEQ ID NO: 5031 - DNA, 390 bp, Zea mays
  Peptide Sequence Number=SeqID_48406
tgctgcgtgctccggtggcattcggagtcctcccctcccccgctcggcaagctacccatccctccccggccccgcgcggcgctacctagaccgtccgaccccgcggaggcgaccgcccgtaccggcccaatggcggcgaccgcccgccacagctcctcccctgttcacacgcagcgcggacccggcgcgcccctggcgtggcccggcacgcccccggtggccccctgctcgccggcgcggacccggcgcggcctccggcccccggcgtgtccccggcgcggcccctggccggttcaaccgccccggccccggctcggctgcccgttcccccgtcccggcctcgcccgaccgtatcttcgctcgcccgcgctcgcggtgattattcgttaa

SEQ ID NO: 5032 - DNA, 181 bp, Zea mays
  Peptide Sequence Number=SeqID_48407
atgacgcggggtagagcagggctatccatgtctttggtctgtggtggcgtacttctgttccagccagcagtcaacggtagagttgaagaaacgagctttgtgagtttcactgatcgatggagatcacagaacatggcttacatgggtgagcaatccactaaactgacctggccacagcgag

SEQ ID NO: 5033 - DNA, 498 bp, Zea mays
  Peptide Sequence Number=SeqID_48408
atggcccccaagcgacctaattcgaaggatgccccatccattgacgacgcggcgaaggcagcgctactggcggaaaagaaaggcaaggcccacgcgaacaacacccctcaaaaggccttcgaagatgacgctgtcaacaacaaaagacagcgccaagaccatcccacccccgagggcactgtacgcacctgcaactccgaaggcgcaccacaagcaccaccgccaggcttcgctccaccagagggcgaagacaccatagaggacggagaagtcatcggcatctcagccgaagaccagctaaagctgcgggctctgcgcatcaaaaccaaccacctccagaagcagaaagaaattctcgaagcgtgcaaggtgcaaggcaaccaagaccagcaatctgggtttctcatcatggactttgtccgtcgaaaaattaagctctttaacttcaatagagatgaagagaatgctcaaacaaaaacgtcgatctcaaccaactag

SEQ ID NO: 5034 - DNA, 360 bp, Zea mays
  Peptide Sequence Number=SeqID_48409
atgtcgaagcagcgaaatcagcagagtcgacgaggtcagaagatcacgagcagtcgcgtgaggacgctttcgaaaaaccttattcgccctctcccagtgcaggatctaaaagacgaagggttccggagacttgctctcctgatcgcagatgcacgtctgcgtgtttcagcagagactgttaagttgaacttccgcctagaactccaagctacaccaacccacaacttggacaatggactatgccttgaattgcaagttttgcgtgaatgggtttcacttgaagtcatgaccagtacttggctaacagtagtccccttctcgggtggagcatatacgtcgtactccaaggtctcttcatga

SEQ ID NO: 5035 - DNA, 822 bp, Zea mays
  Peptide Sequence Number=SeqID_48410
atggtcggccggagcctggccgggttgtccgttagcgggaccgacgccgtaattgacctgccgaggcctcgggtcgggctgatgtccgcgggggacagccggccgaggcctcggggtgaccagccgagccgcctgcccgagccggattctcggagaagaccctggcggcgatggcccaggcgtggcgatgacgtcgtccttcagagtggaggtcttcggaccgcgtcgccgtccgaggctaggtcggacctcgccgaaggtgttgtcgacgccgagggtgctgctgctcccttcaagcgtcaagatccgggcctgcaggatcggattgtcttaaatgtttgtgcgagcgagagttgcttctcgcggaaggtgatgagtgaggtatccgtatcccggaggcgtaggagtccctcggctcggtcggccttgccgcttacgcgcactcttacccgtccatggggttctgtcaccgacgcagtcgagaaggctcgaagaatcgcttcggcagaagagcttccgaacgtgaagacttgttcggtccgcggaatcacttatccgaacgtgagttacttatcgcaaaaggtgatgagtgaggtatccatatcccggaggtgtaggagtccctcggctcggtcagccttgggtgcttacgtgtactccgtcattttcaggatccactttcgaagtagtcaaaaagcacgaaagacattctggcagaaaggatcttttttcgaggaaaaaattcgacgcagagggggttcccaccttttagcccccgagggagggtcgggctttgccgaggcgaggccgacccttccttga

SEQ ID NO: 5036 - DNA, 699 bp, Zea mays
  Peptide Sequence Number=SeqID_48411
atgaataaaaacactggcattcaaagtgccacacgtcatgcaagccggctcaaaacagaagaagccaaaccaccatgcgcgatgcgtacaaccgcccagcggttacaagcggctctccactttttcccagaccagcgggcgaaagggcggacagccatgcaggcggcatgcaaccgcgccaagtgggcgcacttctccgactcccaacatgcccagcatggaggcccaggcccatgcgtcatgcaaccggcgcgccgaatgcttcgtgcatgcaactgcactgccacttgcgccaccaccgcgcctcctcgactgcggaaccaatactgcgactcgaggaaaggcggcgtctctggcaggggaagcgagcgacgctctgccttcgccataatgaccgcatcaaaaaagggaccgggaaagggggataccccgaaaaggatccttccccgtgaaggaaccaggctccgagcctccctactgatcagaggttcgaaggctggcccctcggaagggttcaacagccgcctcagagcgcgtgggctccacacccactactggtcagaggttcgaaggccggcccctcggaagggttcaacggccgcctcaggctactcgggctccgcgcccactactgatcaggggttcgaaggctggcccccgaagggttcacagccgcctcagacacagagcgagggatga

SEQ ID NO: 5037 - DNA, 468 bp, Zea mays
  Peptide Sequence Number=SeqID_48412
atggccggattcagccttccggcgatcccatgccccatatcgaacgctctcccatactacatggttctgagaccaaggcggattggtctaggactttcttacctggaaacaaggcgtagagagctccgcccacggctaggggtcggccggcccgagcctagacaccacctaggatctctcctccccgacggggtccctcccgggagcgagatccaggcgtcgtcggcggtcttccgccgcccctgcgcacgcgcggaccgtccggccctagggcgcggaccgtccggccgtcaggcagggaactcgggctcctgcaccaggtcgcggaccgtccggccctgtgccgcggaccgtccgcgcctgaccagaaagcaccgccgcctcgcaccaggccgcggaccgtccggcctccgcgcgcggaccgtccgcccctgtgcagagagcaccgccgctggttctcttgagtaa

SEQ ID NO: 5038 - DNA, 732 bp, Zea mays
  Peptide Sequence Number=SeqID_48413
atggttttggcgcagtttgacctcgggaccagacattctgacactggcaccttggtgacgctacaactccctgtccctagcctaaaaccgcgcgacgtccatacacaaaagacaaagcaaggccggactcctcgccgccgacgagctcccccgcctacgcacgcagaccggccgactccaaccatccccgacggcgacccgcacatcgtcgtgaccctcaggacctcccctacaccctcggccacctcatcggagcaatctcgccgccgtgggaccccaaaaataagcctgccacttaacttagccaaggttgatccaatttaccaagtataccacccaaaggtctcgtattataatctcgccgacggagagtacgtgctcatccccgagcaaggaactgtccgagaggaggaccaggagcaagcttccgaggctgctatcgaggatctccctgcagccccagctattgaaggcaagccccgctatggtgggtacaagtgcggtcactgcacggcggcagcgggggtcagtggagcattgtatgccaaggcggtgaggcctggacgcgaatggggaatcgatggggacagttgtcatgtgcggggtcggagtaccctgacatgccgtgcgcttcaggatatggttgatggtgtgacttggcctaccaccctaccaccgggttggacggtcgagtgggatgttgctccggcaggagaggagcatgaggagtag

SEQ ID NO: 5039 - DNA, 396 bp, Zea mays
  Peptide Sequence Number=SeqID_48414
atggcgccgtcctaccggccctggccacctctccctcacgcgtggctcggcctcggccccatctcggcgcggcgccctcccccgcggcacggcggctccccggcctcggcccccgtcccgattacaggtggcaatgagaatgatggttttggcattggctatggtaatggtaagtggtattctttccatatggaaagggttgtcagcattgcaaccacggctcaggagaagatgaagccgtggaaggagacttccaggagttccaagattacgacgagttctaggcgtgggttagcggcaacccccagtcggctgcctgtgaaggccgcatgtatctacgtttcttttccgcactttgattattgtaaagactatgtggatgtctcagacatatga

SEQ ID NO: 5040 - DNA, 117 bp, Zea mays
  Peptide Sequence Number=SeqID_48415
atgagggtggaatggggtggcaatgagattgatggttttggttatgactatggtgctggcgaagatgaagctgtggaaggagacttccaggagttccaagactacgacgagttctag

SEQ ID NO: 5041 - DNA, 216 bp, Zea mays
  Peptide Sequence Number=SeqID_48416
atggggaagcctgtcccatcactcctcatactcctcctcagccgagcatggatcaagcagtctcattacctgcgagaagcagacgattcgaatcgagtttttatccttgcaaggtttgaggttttgcctagggaaaagcataatggattaagacttggattgccccttaatgttttagtaggcactcaaagggttttgctggtttggttagggtaa

SEQ ID NO: 5042 - DNA, 762 bp, Zea mays
  Peptide Sequence Number=SeqID_48417
atgccccctgcaccaccacagggcatcctggctgctggaggagaccctgacggagacgacaatgacaacgccggtggcagttcgagccacaacacggagctctcggaggagcagatgctggagggatggatcgctagacccatcaatcgcgacaccgctcacgggtgtcacttccatgatgctctcgacaccttactgcgtcgggccttcgaccgacacacttggtctatcgacgctgctcattgtgtagtctaccagcattgtcgcgggttatacccggaccagtgggaggctacttgcttgtattacccgttgttgagcggggtagctgatggccttgaccagaagtactaccctccccgttcgaccgacagtgctggaggtgtgattgtctcgccctttggtgagggcaatcctaggttgaacattatggtcaacttggtcgtcgtgctcaacaccgagctataccacgcccatgacgagttaggcaagatgtctgagaactggcgccgagttgcaaggcgtgctccgcaggagcagcaagacccccaggaggaggcagctcagcagcagttgccactgccacccccgatgatgatcgagcagatgttcctgatgcagacccaagcagtccaagcaaatggtcagaccctagcaccaatgcagcaatgcagcaggtgcagtagcaaccacccccacctcaaccccaagtgcaagttcatatgccacaggtgcctagagacaagtgggcataattcatga

SEQ ID NO: 5043 - DNA, 474 bp, Zea mays
  Peptide Sequence Number=SeqID_48418
atggctaggatcaggtctactgccagactaacaaacgaaggtgaggatactgaagcaactgaaacggcctcgatctcagaagtaatgagacgttccggacttgttgttcaagagggagaagaggttattccggagaaagctcatgctattaccgaagctgctagtgatgatgatgaggatgatggcattttgagtccaagcaaacctaaagaaataattccaaagccaagagatgacgaagttgttgtttttaagagcttcttaaggcaagggctttggttccctttgtatgaaatggtataccataccccacttgaagtgtgtcaaattaccactttagtggatgatcaagctgagagtgttgaatcaggagccaccatacccaaggatcgcccgactaccaaacagttagggcgtaccatccatcatgggtcatctcatcgtgtccccttcactcatcaaccacactattag

SEQ ID NO: 5044 - DNA, 387 bp, Zea mays
  Peptide Sequence Number=SeqID_48419
atggctggccaagcgagcagaaaaccacggcgtgggaggagcaaggcgagcagggagatccgggctggggaaaatggaggctgggcgggatctacacgggaaaacacgcccaacagagggccaagccgagctggggtagacaaccatgggaggtcagggacgagcaccaggcgagtgcagggagcttcgacggctcggcgcgcaggggaaagaaccagggacacagggaggatggaggagcacgcgtgggaggagccgttcggctggacgcggtccgagcagccgaacgcctgggtgggagaagatccaggcgcgcgcaaggaagctctgggctggccagcgcgtgtgagacaggaagcaagggcgcgcgacacgcaggagaactga

SEQ ID NO: 5045 - DNA, 345 bp, Zea mays
  Peptide Sequence Number=SeqID_48420
atgtacggctcgacgacggggatggcccggaatcgctcggtcctcgtgcgcaggcgggtgttctcgtcggcggcgggtgtgccggccaaaccacgacgacctagtccaatccaacggcacgtgattaacccggtccacgcactccagcagggttgtgaactccggcgaccatggactggcctctccggcgaagcaggcttcgattcctcgctcggggagcttcactggggcgtgcacactcgtctccaaggatcggacggggttgggaaaggctgggctagccggtctacagcggcaggggctcgggtggccgcgaacacgccgcgtatgggcaaacgacggtga

SEQ ID NO: 5046 - DNA, 270 bp, Zea mays
  Peptide Sequence Number=SeqID_48421
atgaacaacggacgaggtgcatcaacgtgcaaggtcgacatcgcggttgagcattgtgttgagcgggtggcatgtgcggtggagcagcagcatcgctatgtttgggtcgcgggtggtcgatggagctggagggctcagtggccattgccagtgctgaagggctactgggcgctaggctcctgcccatggggcttcctgcgcgtgcgcttgagggagcagtggccagagatggcgtctgccctgaacaagatcgagcatggtcctagatag

SEQ ID NO: 5047 - DNA, 465 bp, Zea mays
  Peptide Sequence Number=SeqID_48422
atggcaccaccccttctccagctccctctatttcccatggtggtgctcagccaggccacagcctccccttgcttgcgcccaagcccctccatggctcaggttcgagctcccccttccctgctcgctggacactggctagggacgcagtgcctagcccctgctctcccatggcacacagggcccttgccgtcagttttggacgtcgacccttctaaagttgtcgcgttcgacctcatccaggccccgcgccgttcctgccctcaccggctgtcgtcctccagctccagcatccggtctcctccgcacagcgatggtcgcgcctcctgcctctgtcaggctgaggctctcacctctaggactaggattgggcgttcgggttacccaaaaatttcgggtcgagtaattcggataattaaaatttcgggttttaggaagtcatacccgaaattgtatcgggtattatag

SEQ ID NO: 5048 - DNA, 72 bp, Zea mays
  Peptide Sequence Number=SeqID_48423
atggggataactgtcttctccggcgaggttatacccctctgccgcaggcttggttctaaggcctatatatag

SEQ ID NO: 5049 - DNA, 246 bp, Zea mays
  Peptide Sequence Number=SeqID_48424
atggcgccctcatccctggcgggtacctggatctttgacctggtggggggggggggggggaccgccatcgcagcaaaatcctcccgagggcctccctacactgaccactcccctactgcccttgcccctttcggatcttcatccaacgacccagggaccgcccacacctccaccctatcgcagctgcatgccaacgatctaacggtccagggcgaggcgtcgaaccgatttccacttcaaatttga

SEQ ID NO: 5050 - DNA, 1122 bp, Zea mays
  Peptide Sequence Number=SeqID_48425
atggagcccaagctgtcttcggtcggcgttcgcgaccttcgccgtgtcgtcatgcccacccctgtcctcgtcgtcctgctcgacgcccgccacgacctccatcgtgtcatcatccccacgcccgtccggacccctatcgccagcatcgcagtgcctcccgcacgaggtcgctgcgcttgtcgatctgatggcggcccccatggcaaaggagcaggtcagtctcgtcccctagcctttcccgactccccctccaagcaagcacccgctccagatctccaactcatgtgtcgattcccagtgagcgagacccctcgcgtgtgcaactgcaggagatggacgatgaagcgttggatcaaggagatggaggaggtggccgccatggccaccaattccaggtcgattatgccctctagggccatccacaagggcaagccgttgtcggtgtccttggcatcgagaagaagtccacccctaagctctagaactccaggatccgtcatcgatctggcagagggtagagagagaccggggaaggaaacagttggatgccagagggagattgggagagatgcagggtcaacggcgtcgactcttgcccgtgtagtcgctcggtgtccgcggtgttccctgggtagttcgccgtcgtgtgctcggcgggtgctcggagttgtcggagttgggggcaagttggagtgctgccaatttcttgacggagctggcgcggccgcggtgccgcagaccatcgtcgaccggatcctctgcgataacgtcgtcggtaagatctcatccctcgcattcgccatcctcgcctcttcgtgtagcataggttggagaaagggctggtgcacttggctgagagaacggtgttcgccggcgggtctccgccgtgagggcactgcgccgccgccctgccgcccagaggaagaagaagtgactctggtcgtccgaatcgtgatgaacgaacgagatcatatctacgcataccggttcgacgcctcgccctggaccgttagatcgttggcatgcagctgcgatagggtggaggtgtgggcggtccctgggtcgttggatgaagatctgacgaaccacaaaacgtaccggttcgctgtagccggcttttaa

SEQ ID NO: 5051 - DNA, 552 bp, Zea mays
  Peptide Sequence Number=SeqID_48426
atggaagaaacacacctccacgtgttcgacgcttcctgcccgcgccagagcacgctcgcgcgcgcccccgcatgcccagcgccgcgcccgagccaagccagcgccatggcccgcgcccgcgcctataaaaccctcccaggcttcgactgcactcttccgcgcaccctcaaacctcgccggagcctagctcgccgtcgtttgcccgtgcgcagcgtgtccgcggccgcccaatccctctgtcaccgtagaccggccgatagggccattcccaaccccgtccagtcctcggagaagactgtgcacacctccgtgaagctccccgagcaaggaatcggagtttgcttcgccggagaggccagtccacgctcgccggagctctcaaccccaccggagtacgtggaccggcacactcgccgccgacgaagacacccgcctgcgcgcatggaccgggcgattccggccatccccgacgtcaagctgtacctcgacgtgaccgccagagtctccccgagccaaccccacccttcgtcggacctccctcgccgccggtaa

SEQ ID NO: 5052 - DNA, 528 bp, Zea mays
  Peptide Sequence Number=SeqID_48427
atgacccgctgcctccactttcagacgcctttcctgccagctattgggcagaccctaaacactgccactcatctcctcaatcgccttcccaccaaggagctagttctcacagtcgatgttgtgccggacacctcaccggtcccctcctctgttcgtgccgctctcgtcgatccccactggcgccgcacaatagaggagtacgcggtgcaggtgggcaaccacacttgggacctgatgtcgtccaccaggcaccaacgtggtcactggcaagtggatcttcttccacaagctgacctcggatggctcgctcgaccgctacaaggcccgttgggtccttcgatgcttcactcagtgccccggagtggactacgacgagaccttcagcgcacgatcgtcgcccttcagcgcgagttcgcaatgaagaatctggagcctctccaccacttcctcaggatcacctatcgaagcctcacaggcgctctccagtacctaacattctcatggcccgacatcgcctacgtcgtctag

SEQ ID NO: 5053 - DNA, 1017 bp, Zea mays
  Peptide Sequence Number=SeqID_48428
atgtcgagcggtagtggctcgtccgggcgcgcagccctgttgtgcgcgccgggagactcgtcgctgcccaagccgtggcacggcctcgtggactgcatcaccggctacctctactactggaacccctacaacaacgtcacgcagtacgagcggcccatggcctcgcctctgcctctcatgggtccttgggttcccgaccaggcgtacttcgacgatctgtttgcgaggctcaatgcaatcagcatggcgctctccagcaacatgccagcaccagcggtctggccgttatcgctcgctccggcacctacattttcgtgggcggcgatgcctaccaattgcgtgcgccctcagggtcgtcttcatcaccagctgcatggccgacgacgccaggggcaaccataccaggaccggtcaaggttggcatcattggatggaattgtgccttctactcacggctttatggttgcacacactcttcttagcataatagatcctgttgacaggcagccattttcaagcacacaaaaaagagtttttgtgttcacaaaaatgctccaaagtgcagttcctcagtctctgagttcaatgactcatgttcctgcttctctgtcacgaaatttacctgccaatgagaatcaggatgctggcgaactacacaaaaaagattcactttcttgcccatcatccactgaatggactagtgatggccttgaaaaggacctgtatattcaatcaaattctgttactgttttagccatggatggcaggagaagatggttagatattaaaaagctgggatcaaatggcagaggacactttgtttttgtaacaaatcttgccccttgttctggagtaaggattcacttgtggccagaaaaacatcattcgcctgtgcaaaatgaattacctgccagtaaaaagatagtggaagttacatcaaagatggtccaaattcctgcaggacctgctccaaaacagatggctcagctgataactataggcattgtcttctcctaa

SEQ ID NO: 5054 - DNA, 204 bp, Zea mays
  Peptide Sequence Number=SeqID_48429
atggcgaatgcgagggatgagatcttaccgacgacgttatcgcagaggatccggtcgacgatggaaggggaaaggactgacaacgcgggcccacgcggcagtgccagacttaggtgcgcagacgcggtagctctgctgttaagtgggccccacaagtcggcgttccctcccacacggctgggcagcgggacccgcatccagtga

SEQ ID NO: 5055 - DNA, 129 bp, Zea mays
  Peptide Sequence Number=SeqID_48430
atggcgggcagaattaagctcgccggagctaaggggaggtggctggccggagaggagatatggagccaggaaatctggtctgtctccctgcccaaacccgaggcaaatcccaggttttgtcgtgtctag

SEQ ID NO: 5056 - DNA, 498 bp, Zea mays
  Peptide Sequence Number=SeqID_48431
atggagcatcgtcccgggttggagaggttgctggagactacccatccggagcttgacgggaagctgtttgtcaacacgcagcaggcccctacctggcgcgccaactgtcggcgtttcgaccccggggggtccctggaccgacgagggtcgggcaaggcggagtccgtcttccgaggtcgaggtggagtccaagccctagggtcgggcgaggcggagcttcctatggcgcctgaggccggtcttggcggctgtcagcctcaccctgacgggtggcacaacagtcggagcagcgcaggcgacgctgttttcctgtcagcgatccggccaagattgcttcttcgtgaagcctgcccgagctgggcctcgggcgagtcgaaggtgcgtctgttgcttgaggagaccctcgggcaaggcatgaatctgcttggtctactgttcctgcccgaggctaggctcgggcgagatgagatcgtgtcccttgagtggacggagccttga

SEQ ID NO: 5057 - DNA, 636 bp, Zea mays
  Peptide Sequence Number=SeqID_48432
atgtcttcttcctcccttatgcgtcgcgtctttccaccttccaagcccccagatggggggtacccgccgtcttttcgcctcatcgttggaggaacgcaactccgtgggagttggtacctttcagccatcgttcggcttcaaggattttcatcatgcagcccggctgtatccccccgtcggtggtcacccaagacggtgacctccagcttgatggtgaaggaaagcgagccgggctgcgatcttggtcccaccctcagcttcaaggatgttcatcatcctcgctggggtgggggccgggctgagccggcgctctacctcccgcgcgggtccgtgggtctccctctcccgcggcgttcgggggagagggtgctcactggccctgcgggcggcccggacttcgacaacgcggggccggtcgacggcgggcgtcgtcacctccagcgtgtcgggctcgtcggcttggctcccggcggcccctcccgccggagggcggctgccgcgccatgtgcacgggagggccacccaagatgtcgcgcgccgctagggcggcgttcgtgttctggggtggtcctgcctttgcaccgggatggcgccctcgcgcggaggccggtgccccactcgcccgggaggatttga

SEQ ID NO: 5058 - DNA, 69 bp, Zea mays
  Peptide Sequence Number=SeqID_48433
atggcctacggcaatatactcggcttcgacgattcgttagtagacccaaatataatatcatcaacataa

SEQ ID NO: 5059 - DNA, 114 bp, Zea mays
  Peptide Sequence Number=SeqID_48434
atggccatgatgggttcaacatcggaaaaagatgtacctctgtcaggttatgaaacagccgagttcagttgtttctgcttgaaggtggtgccaaagaaggaggcaaatcagtaa

SEQ ID NO: 5060 - DNA, 1137 bp, Zea mays
  Peptide Sequence Number=SeqID_48435
atggcgcagaggctcacccggtccacgtgctccgacggggttccgaactccggagagcacgattgcgctattctggtggcgggggtcctcgattcaagctcgggcaagcttcacggcctcccagtggagctatctaagggcttggatcgagcgaaggagggcgggaaagggttcggccacggtggttgtcctcgggcggctctggcgggtcgcggggaggtcgccggagctatgagcgagctccagggagtttggcgcggtaccgaggatgcaacggggaagctagccaggcactggggagggctttatagccgtggcgcgggcgtggtcacggggcggccgcgggcgcgcgaggggttcaacggccgatttgagcaccttagcgtacagatcttggaaaaacccccatgggccggcagcatccatgtccagggcatgggcgtcagccgagcctgtccccatccctgcctcggcggaagaggcgcggccgtggaggaggaggtcgccccttccctcggaagccgtcgtggcgcctgcaagcgtgcatgttgggactccctagcgatcaccgactgtggggaatatggaggagcggcccgtcacccctccccacgcagtcgttccgtggcccgtagtggccccgaccatcgttccgcctcaggcccctgccacgaggcccatagaagagagcgctaccgctccatcgccgatgttcgtggcgaggcatcagagatcaaggagcaggaggccgaggcctgccatcctaccaaggcggttaagcgcagtgccgaggcatatgcggggtcttcgtcctgcccccactgtacccaagagaccacccagaagggcgttgaggtggtccagcccactcctatggcaccggttgagcccggcactgtcgcggccgaggtggttctcacgcgccccacttcgctaacgaagtccatcaccatctccttcgggaaggagacggaggcaggtgatacttcatcgggctcagcatcgcccatggtctccgacctcttgcgtgccatccccaatacccctaaagttgtgccgagctcgtgggtgagggttaacgaggaggtcggtccctcggagccacctagggggtcgtttgaggagatcattatctag

SEQ ID NO: 5061 - DNA, 870 bp, Zea mays
  Peptide Sequence Number=SeqID_48436
atgacttctcacggatcctcggacgaagggaatgcacagtcccacacggacgggcttgcacgagagggtttcccccgtatcttgtgggaggtacttcagggagctggttacacgacgcctccccagtacgcggtgcagctgtttgagaagcaccgagtgccccgctgtaggatgaggatgaccctagagcctcatcccctgcagccaggatggcgttcattggattcagagtcttttgaatacagggctgaggatactatcgaggcgattgctcttcatggactgaccacattatgtggtttccaccccttggagctgtccacccaccccattggtttgttccccgcagagaaggaggacgacccaatgtggaaggaccgagtggagcatgccaaggatatatgggctatctacctaggtcagactgctcacttgacggtgcggtgcatgaatgccctgtatcgtctgcaagtgatgcgaggagaggcaatgtctcatctgatggcactgttggaggctaccaagatcaccttggataacagagaggaacttgtggtagacttgtccactgagatggtggaaaaagacttacaagtggaacaattgtcaaatgagatccaagagcttgaggagctagtgggaaccagggagaacaccattgaggttctcgaggatcagcttatcaacactcaacagcaactcgcggaggctaaccagcacctggatatgcaccaccaggagatccaggacatggaggccaacgaggatgtcgacatcgagggaggagaggagcctgccttcagcttggacactgctggctcagggagacctccttcccccgagtcgagcgttgcctcgtttgctcactag

SEQ ID NO: 5062 - DNA, 597 bp, Zea mays
  Peptide Sequence Number=SeqID_48437
atggctcagcagaacgagattctgcgacagttggcacagcgtcagccgccacctcagcattatgttggtggtgatcatcagagtcacccggtggcagccacttatcaggagttcctcaatacccagccaccgttgttcaccagggcagaggacccacttgatgctgatgtatggctgagggtagtggaatccaaattcccgctactccatggagtttgttcagagtatgccgggtatcatgcagacaccgatgagaagaagagggataggttcaggagggggctcagcactaagctccgcgaccatctcaacaccgtcaaggccaacagttacaatgagttagtcaacatggctatttctcaggaggactgtatcacagcccgtcgggcagagaagaagaggaagacccctgtggcaggaccttcagctcagtcacagtgctttaggattgtatctgacacccagaataggggaccccagcagcagcaaggacgttgggtgattcgaccccaacagcagcagcaggcacccaaccgctctcaaccccccagtgcagaggaacaaccagcagcagcagctgtaccgtcaggcaaatga

SEQ ID NO: 5063 - DNA, 576 bp, Zea mays
  Peptide Sequence Number=SeqID_48438
atgggtagaggcaggaggggtcatggttggccttgccgcgctgatggcaagcgcaagcgtgctccgagtcctccctcggtggacttcggggactcggagtactcggaggaggcctcctccaagtctaatcgttcgcctgctccggcttcttccccggcttcatccgagtactcggatgactccatggggctctctaccacggcccgggcatactggcgctccatcaagcgcgtcgggcttggtgggttggatgagtcggggatctcctcggatgaggcagactcctccgaggagtggagccgcggcaacaatgacgacgagggcgacgacagcagcggcagcggcgacgacaagggcgacggcggcaaaggcagcggtgacgacgacagcgtcgacgatagcaagggcgacggtggcgacggcagcagtgacaacagcaagggcgacggtggcaacggcagccgcgacggcggcaagggcgacggtgacggcagcggcgacagcaacaagggcgacgacgacaatggcgatggtgacggcagcggcaaggccaatggcataatgccactggtttaa

SEQ ID NO: 5064 - DNA, 429 bp, Zea mays
  Peptide Sequence Number=SeqID_48439
atggcacccaagagagctagctcgaaggcagccccatccatcgacgaagcagcgaaggcagcactgctagccgagaaaaagggcaaggccctcgcagacaacacccaccaagaagcctacgaagacgacgcactcagcaagagacaacacaacgaccaacccactcccgaaggcaccctccacacctgcagctccggaggacaaccacaagaaccacccccaggcttcgctccacaagagggcgaggacgcaacagaggacggcgaagtcatcgacatttcagcagaggaacagttacagctacaggccctgcgcatcaagaaccgcaacctccaaaagcagaaagaaatcctcgaggccaagcgccaacgtgtctccgcgaggccaaccgcccacagtagggtcctcgaggccaaccgcccacagtag

SEQ ID NO: 5065 - DNA, 945 bp, Zea mays
  Peptide Sequence Number=SeqID_48440
atggaggctctatggagttgggatatctgtggatccaacgttcgcctgaatagggtctttgagttgaatcgtttgccatacggcggctatcccggggatgacgctgccgtggccgtcgaccgccgcgggaagaaaccagtggtcgtgactgaggaagtcccctcgcaggaggctgtcccaggcactaagaagagaaaaatagggtcggatgtggggcaactggctgttgtcccgactccggtggtggccacctcgccgacggccacggcggccgacttcgtcgaccatgttgcgtcgggtgctttgactttggagcttgctgccgaagtcgagcgtcttcaggcacagcatgcgaatgctgtctgggaaaagtcggctgtggaaagcaaaagccgcaggctgatggagaggttggccgctgcggaggccgagaagggggaactccggtggcagttggtggaggagaggagggatgcgaacaaggccattgccgacatgcaggctgctcaagccgatgctaagcttgcgcgggcggagggcagtctcgcccaccaacgcgccgaggagctagaggcgcggctcggcagcctacgcaaccacgtggacaaagccgaggcctcgacgcgcgtggaggttgagcggacgcatgcgcagctcgtggatgcataccgggagctgggtgcgcggaccgccgccttcgaagtgcccgaccaagaggaggagctgggggtgctgccgacaatcgtgaggggcctcatgtcctttgcctccctcgtcacctgcgagggggccgtgaatgctttgtcccacgaggggtgcgggcatttcgaggtcttcgaccagttggacgaaggctttgaacgcgaaatcttccgggttgaggacccggtgcttaagcggtcggcggaggcgctcttcgacaggatgtggggtcctcacagctga

SEQ ID NO: 5066 - DNA, 378 bp, Zea mays
  Peptide Sequence Number=SeqID_48441
atgcgacctggcaaggtcctagcgactagagcatggaggcagtggtccgggctggggcgtggcaagaagcatggaccgccggcgagcgtcaaggaaggaatgatagccactaaggctgacctagggcatcggtgtggagtccatgttggatctgaagaagaggcaggcaagggcggagtggcttggacaaaggttgaagatgatgtgcccaccaaccggagcataagaaagagaagctcggaggggaaggagacaagcaccagggaagcaagcactgcaggtaccggaaccaaggctgagcacaaccaggatgcacacgcgcgacgatcagagagctatgtaatggagaggagaagcagtagcttggtgcatccttga

SEQ ID NO: 5067 - DNA, 936 bp, Zea mays
  Peptide Sequence Number=SeqID_48442
atggcccaagggaacgttccgattccccgtgcggcgggcgaggacatatttacgtctcgtatggccccagtgatggacaaggatcgtaaagatgcggcgcggaagcgccaggcaatcactagggtcggggaccctatgcccggggtgaagtgggagcggggaggcgcgaagtccaccgcccctagcagcagcaaaccaccgccagcagcgaagcctgccgtccccgggccagcaagtcttcggcggctgaggcatgcgtcgcggcagctgaagcatgtggccgccttcaccaaccatgttgcgtcgggcgccctgacttcagagttcgctgccgagaggcaacgactagagggcaggatcgagcgcctccgggcgcagcatacggatgctgttcggaacaagtcccctacggaaaacaagagccgcaggctggcggagaggctggcggctgcagaggccgagaaggaggatctcaggcgtcggttggcggaggagaggagggacgcaaacaaagcttgtgctgaggcgcagtctgcgcaagccgaggccaagcttgcacgggcggaggctagtctcgcccgccaacacgccgaggagatggagacgaggctcggcagcctgtgcgaccgcctggacaagacggaggcctcgacgcgcgcggaggtcgagcggacgcacacacagcttgtggacgtgtaccgggagctaagtgcacggaccacgcctttcgaagctcctagtcagaaggtgggcctctgcttccttggatggctacaggaggagctggaggtgctcccgaccattgtgacgggcctcatgtcctttgcctccctcatcacctacgagggggccgtgaatgccttgtcctgcgtggggtgcgggcacttcgaggccttcgaccagtctgacgaaggcttcgagcgcgaaatcttctag

SEQ ID NO: 5068 - DNA, 513 bp, Zea mays
  Peptide Sequence Number=SeqID_48443
atgggacgaagggtgagcctgcccgttgtcttgtctccgttggtccagcgattacggcgaaggcatcgagcgaagggtggcgtcttcgccttcgccccaacagttagcattctgaacagacaggccatccagtcagtcaaggaagaccagaaggccatcaagaagcagaaaattgtagtcgagccgaaagattcggctcctaagaaaggaaagttcgccaggatatctcctataaagacgaaggtacaagatgtgccagataaagctacaggcgctgtttcaccttcttttgctgatatttcggaaattatgaaggtaatgactgaacccatcccatttgcactactaagtcctctaagatcagatctgactagcctattgcagtcaaaggagaccgctttggctaccgagcggaaagctgggggacagaagaaatggtggatgatgaacgtgacgcaagctattgaacagaccccgcccctagcttcgatgaaaaaaagctattatgcatga

SEQ ID NO: 5069 - DNA, 354 bp, Zea mays
  Peptide Sequence Number=SeqID_48444
atgtccatcttcgtggacaactgccacaattccctacagaaggggcgaggacggtgggatgtacagacgcctatcatagaggaccatgttgtcagccactgcccatggagcagcgcgtgtgcctacgttgacttcatcgtggatggtagccagggcggggtcactggcctgggcatggcggagccggctgatgaagtcgaacggggcgccaagattgcctatagagccctcgtgttgtcctctttggtgccgcggcgcgagagggcatcgagcaccgtgttcgttgcgcccgacttgccgctagagagcgatggcggggcgtcgactgaagaaggcgatcgaatgagcctctga

SEQ ID NO: 5070 - DNA, 492 bp, Zea mays
  Peptide Sequence Number=SeqID_48445
agtgacagctcggccaaggcatcggtgtctgggcggtacccttggaagttaagcagaaacttgtctcggagacttcgccaggagtcgatggacaatgggggcaacctggtgtaccaggtcaaggccggaccctcgaggacgatgatgaaggacttggccattgtggattatggggaggctacactagcgcaaaacaaaattttcaaccccataaaaccaagaactactgcggttataggtcatgggattaccactagacgcgcagagcacggaagacgtctcaatgtagacgaacgcgtcgagcagtgtcgtgcagtcgccggcgtcctccacgtcctcgcacggttcgtccaagtgctccagatgcagcacctccgaggtatccacacgtacagggaggaagcgccgcgtaccgaactgctaggttcgcgacggcggcttggcgagggcgagaggcgagcggcggctgctggtttgcaggtggcgaattag

SEQ ID NO: 5071 - DNA, 759 bp, Zea mays
  Peptide Sequence Number=SeqID_48446
atggtcgcctttcaagggggtcaccctccttttaaaggcgactctccctacttgcgtccccagccgtcgtgggctaagtcttctccaacacgctccgaggtcctccccctacggcgcgggggctgggtcccacgcgtcatgcaagctggcccagagcagaagaagccaaaccgccgcgcgcggtgcatgcaaccgcccagcggttacgagcattcctccgctttcgcccagaccggcgggcgaaagggcgggcaaccatgcaggcggcatgcaaccgtgccaagtgggcgcgcccctccgacttccaacgcacccagcatgggggcccacgcccacgcgtcatgcaaccggcgcgccagtcgctacgtgcaagcaactgcaccgccactcacaccactgccacgcctcctcgattgcggaaccagtaccgcgactcgaggcaaccctgcgtacgacccagcagtgccagccaggcgcgacgggaccgagaaagggggatacccgaaaaggatccttctccgtgaaggaaacaggctccgagcctccttactgatcagaggttcaaaggctggcccctcggaggggtttaacagccgcctcagagcgcgtgggctccacacccactactggtcagaggttcgaaggccggcccctcggaagggttcaacggccgcctcaggctactcgggctccgcgcccactactgatcaggggttcgtaggctggccctcgaagggttcacagccgcctcagacatag

SEQ ID NO: 5072 - DNA, 837 bp, Zea mays
  Peptide Sequence Number=SeqID_48447
atggcgctttccccctcctccttgcggaaaggcgacgaaggggcgtatgataaaagccgagtcaaggctccgtccactcaagggacacgatctcgcctcgcccgagcccagcctcgggcaggaacagtagacccaggtggattcacgcctagcccgagggcctcctcaagcaacgggcgcaccttcgactcgcccgaggccaactcgggcaagctttgcagtgaagcaaccttggccagatcgcctcgccaaccgaccgtatcacaggagcattcaatgcaaggatcgcctgacaccttaccctcacgcgcgctcctcagtcggcagggccaaagtgaccgcagtcacttcgcgcctccactgactgacctgacaggaaaacagcgccgcctgccctgctccgattgctgtgccacccgccaggggctcggcctctgcctcgacctcggcagacggtctccgcctcgcccgaccccagggctcggcccccgcctcgacctcggaagacggtctccgcctcgcccgacctcagggcttggcctcaacctcgacctcggaagccggtctcctcctcgcccgaccctagggctcgacctcaacctcgacctcggaagatggtctccgcctcgcccgaccccagggctcggcctcaacctcgacctcagaggagtcaccgcctcgctcgaccttgggctcggaccgaccacgccacggggggggccctcgtacgagggggtggccgcgcgggaggatgggctgacggacaggctctctctctccctcgcggacgcttggactcccccccccccagggtcgaaacgccaacagactgtatga

SEQ ID NO: 5073 - DNA, 360 bp, Zea mays
  Peptide Sequence Number=SeqID_48448
atgaccgttggtggaggctgtctgtcgtatggtgcaccggacagtccggtgcacaccggacatgtccggtgcgccagccacgtcaccaatgccgttggattccgaccgttggagcttctgacaactgggcccgcctggatgtccggtgcacaccggacatgtactgttcagtgtccgcggagcggcccgctgcgttttcccgaggctggcgagttcctaaggcggctcttccttggcgcaccggacactgtccggtgtacaccggacagtccggtgaattatagcggagtgcctctagaaattcccgaaggtggcaagtttgagttggagtcctctggtgcaccggacactgtctggtga

SEQ ID NO: 5074 - DNA, 168 bp, Zea mays
  Peptide Sequence Number=SeqID_48449
atggtgatgaacctggacgtagcggtggacggggaggtggtggctggtggtggtggtgcggctgaagggctgggggtggtggttggggatcgccgacttcctgataccaggttgtcaagggcgtcgggcccgaggggggtatataaagccataggccagggctactaa

SEQ ID NO: 5075 - DNA, 807 bp, Zea mays
  Peptide Sequence Number=SeqID_48450
atggtggggagaagtgagtcgggctgcgatcttggtcccaccctctacttcaaggatcttcatcatcctggctggggcagaggccgggctgagccggagctctacctcccgcgcgggttcgtgggtcaccttctccctcagcattcaagggagagggctctcaccggcctagcgggagggtcggacttcgacaacgcggggctggtcggcggcaagcgtcgtcagcttcagcgcgttgggctcgctggctcagctggctctagctcggctcccggtgccccctcccgccgcaagagcggttgtcgcgccgcgcgcaccgggggaccgcccaagacgtcgcgcgctactagggtggcgttcgtgttctggggctgtcctgcctttgcaccggtacagcgcctctgcgcggaggtcggtgcttcgctcgtccgggaggattcgagtggggatctgccggtgggcagatggcttccgtcgtctgcgccgaggtggtggcggctgaagaagtcctcgtcaccgacgggatcaccgccaccatccgcgcttcgggcctccgactctttggctttgatagcttgtcctcgcccctcgagcggagacgcgggcgagggcatcgtcgcagcggcgtccaccctgaggccgtcgccgctgcagtttggccacctggagcggaggtcgttgtcgctgttgctggggcgggcggcggtgagccacacggagccttatcgccccgcgggccctccaatgtggggggttgttcgtacccacggaggtggaaccggagttccgtttgtaatggcaccttga

SEQ ID NO: 5076 - DNA, 1311 bp, Zea mays
  Peptide Sequence Number=SeqID_48451
atggccacgcttcctatggcgtcccccgccgccgccatcccctcctccgccacccgccccgtcgcctccccttcttcgcgttctcaccgccccctcacccgcttcttctccgtcgcgccggcgccggtcggggcgaaagggctccgagcggcggcctccgccgttgaggtgggcggcgtaaagatcgcgcgcgaggatgttgtgaaagaagatgacccaacaaacaacgtgccagacactatctttgcgaagattggcctgcagctgcacaggagggagaaccatccccttgggattctgaagaacacaatttatgattactttgacaagaacttcactggacagtttgacaagtttgatgacctttgcccccttgtttctgtcaagcagattcgtacatcttcagggacaatgaattttgatgatgtcttggtcccttctgaccatgtaagccggagttacaatgacacatattatgttgatgatcaaacagtcttaaggtgtcataccagtgctcatcaagctgagctgctaagggatggacgtacacactttcttgtaactggagatgtttaccgtagggattccattgattcaactcactatcctgtcttccatcagatggaagggttccgtgtgttctctcctgatgaatggtcaggttctggcttggatgggacagcatatgcagctgcagaactcaagaaaacactggaaggattggcaagacatctatttggtgctgtagagatgcgatgggttgacacatacttcccatttaccaacccatcctttgagctcgaaatatattttcaggatgattggttagaggttttgggctgtggagttaccgagcaggaaattttgaaaagaaatggcaggagagatcatgtggcatgggcctttggattgggattggagcgtcttgcgatggtccttttcgacattccagatattcgactattctggtcgaatgataaacggttcacgtcccagttctcagaaggcaagcttggtgtcaagttcaagccattttcaaagtttcctccttgttacaaagatatgagtttctggatcaatggtgcatttacagaaaacaacttatgtgaggttgtcagaggaatagccggggatcttgttgaggaggtaaaacttattgataatttcaccaacaagaaaggcatgacaagtcattgctacagaatagcatataggtcaatggaacgttcgctcacagacgaggagattaacaatcttcagttgaatgtcagggaagctgtgaaagataaattgaaagtagagttgagatag

SEQ ID NO: 5077 - DNA, 879 bp, Zea mays
  Peptide Sequence Number=SeqID_48452
atggggagcacccgcattgccttcgtcttgttgttggaggagcgcaacttcatagaggagggtgaccaccggttcgatggtggggagaagcaagccgagctgcgacctctgccccgccctcagcttcaaggatcttcatcatccttgctggggcaggggcgagctgagccggagctctacctcccatatgggccagcgggccacctcttccttcagcattcaggggagagggcgctcaccggcctagcggagggggcagacttcgacaaagcggggccgatcggccgcaagcgtcatcagctccagcatgcctggttcgctggctcagctggttttggtgtagcttctggtgccacctcccgccgctgggcggagtgtggctatctgccccgccgtacgagcggctgttgcgccgcgtgcaccgagggaccgcccaagacatcgcacgccgctagggcagcgttcgtgttcttgggttgtcctgccctcgctccggcacgacccctccgcgcggaggtcgccggagaaggcttctccgccgacgagaccgtcagcgccacccacggactgacctccggctctttggctttgatagcttgtcctcgcccctcgagtggggacgcgggcgagggccttgtcgcagcagcgtctgccctgaggtcatcgctgctgttgtttggccgcccggagcagaggtcgttgtcgctgctgatggagcggtcggcggcgagccaaccagagttcgttgtcccgcaggccctccggtgtggaggttgttcatacccgcgggagtggaaccggagttccgtttgtaatggcaccttgagtgccggtgtctgttcattgtggctgtcagggcctgaatatccaggtatttga

SEQ ID NO: 5078 - DNA, 1551 bp, Zea mays
  Peptide Sequence Number=SeqID_48453
atggccaaggtccaccccaacgccgcggagtccgtccaggcagaggccgagggagagctgcccacggtgctgacggtgtggcgcaagtcgctgctcttcaactgcgacggcttcaccgtctacgacgcccgcggcgacctggccttccgcgtggactgctacgccggctcgttccgccgccggcgccgcgccgacgtcgtgctcatggacgccacggggaagccgctgctcaccgtgcgccgcaagacgcggttcggcttagcggagcgctgggtcatctacgacggcgacgccgacgacggcacgacggccggggccacgccgctgctgtccgtccgccgccgccgcataggcgcgtgctgcaagacgctggcgctcgcccgcccccgcccccgctccgccgccgcgggaaccgacgcaccgtcgtacgtggtggagggttcctacggtcggcgcgcctgcgcggtgcgcgacgcccgcgggggcgccgtcgtcgcggaggtgcagaggaaggaggccgtcggcgacgacgtgttccgcctcgtcgtggccgggccacgcctcggcgcgccgctgtccatggcgctcgtcatcgccctcgacgacatgttccgcggcggctggtcggcgcggtcgctgctgcgcatgagctcgccggcgtacaacagccgccgcgccattgagaagatctccatcgctgtccgcttccgccctcccaacctggtggtcgctaacacctccccagccagttccggcgaaggcagcgaccgcgagtggcgtatcgatgacacccgcatttccctccaccgcgccgccggccccgtccccggtgcctccttcgccttcaaccacgtcttcgacggtgcggcgaacaacgagcagatctatggaacggtcgtccgggaactcattggcgctctcgtcggtggattcaacggcactgccttcgtctacggccagaccagcagcgggaagacattcaccatgaacagctccgatgccgacccggtcatcattcctcgcgcggtccgcgacgtctttgacaccgtgcgccaggctgacgaccgcgagttcctcatccgggtgtcctacatggagatctacaatgaggaaatcaacgacctcttgacacttgaaggccagaagctgaagattcatgagagcttagatgtaattgagagcagtggtaaggaccagacagacggtggagatgttatccgcatatctgttttgaatttggtggatcttgctgggtcagaaagaatcatcaagacaggggcaacaaggggccgccatgcccccagtggcgctgccctgcaaggaggttgggtatttgggggagtatcggcgaagcatcatggcttccgaggaagcagggctgcgaccagcgcgctggacgttgctggggggccgcttgatgttggcggctgctgctgcctggggacatcggcagagctcatgatcgtcgagacctttgataccagattggtagaagctgtgttccctatgctaacgatatgtttctgttgcaacgcacgggcacccacctag

SEQ ID NO: 5079 - DNA, 750 bp, Zea mays
  Peptide Sequence Number=SeqID_48454
ccgcccccgcttccatccccgccatgcgcgcagccgctcccgcctccttccccgccatgcgcgcagccgcctccttccccgctcatgtcgctccgcttcggctccttccccgtcgtcgtgggctcctccgccaaggtggccgaggtcctcgtcaagacccaggacctggcgtacctcgaccagtcccgcatggcctgcgacaagcacacagtgtacaactactccggcatgctgtggtcgcactacgagccctactggcgccagctccgcaagctgtgggtcacggagctgctcagcgcgcgccagctccacctcacggagcgcgtgcgcgccgaggaggttcgcgccatgctgcgtgacctgcacccggccacgagcactagcacggcggcggtggtgctcaaggaacgcctactcatggcgacgctcaacgtgatctcgcgcatggtgctgggcaagaagtatgtgggcgaggacggcgccgggtcggacgccgcggccacgcccgaggagttcaggtggatgatcgaggagatcttcttcctcaacggcgcgctgcacgtgggcgacatggtgtcgtggctcggctggctcgacgcgcacgggtacgtgggcaggatgaagcggctggcgcaaagttcgaccggttcatcgagcacgtgctgcgcgagcacggcgagcggcggcgacgggagggcggcgtgttcgtgcccggggacatggtcgacatgctgctgtatctgtgtttaa

SEQ ID NO: 5080 - DNA, 258 bp, Zea mays
  Peptide Sequence Number=SeqID_48455
atggcgcttttatttggtgggttttttttaaaaaaaggaaacgacaaggagaaacaaaaaacaagaacaaatcgaagatttaggtcgtatttgaatgcacaatttagttggcccacacctgcatctcaggtccctccaggaaacttgctaactccgggaaatgaggactctgaagatgcggtcgcttcttttgtggacggtcttctaaacagcggaggagctagcggatcaaatcaacccgctccatttgatcaatga

SEQ ID NO: 5081 - DNA, 372 bp, Zea mays
  Peptide Sequence Number=SeqID_48456
atgagggtggaatggggcgcccttcgctttgccgttgtgccgtcaatggggctcggtgtatgcggctcgctctgccaagggtggattgccccttgggaaggagtgcggtgccaaaggttcaacacaaaccaatcaaaagaacaagttaggtctcaaaagaaaggagcaaaaagggaaccgaaggctgccctggtctggcgcaccggacagtgtccggtgcaccagggtgcttcagctcgaactcttcaccttcgggtttcccaggcgcagctccgctataattcaccagacagtgtccggtgtccaccggactgtccggtgcaccagcggagcaacggctatctgcgcgcaaacgtcgactctgcaaagtga

SEQ ID NO: 5082 - DNA, 465 bp, Zea mays
  Peptide Sequence Number=SeqID_48457
atggcggcccggcgaacggcgggcagctccggcgaggcgcaggtcacgggcgcggacagggacgcggtggtggacgaacagggcgcagctccggcgtgtgagcgagagaagagagcgcgaggagggagagacaactcgggcaggggagagaagggagctctagttgttggtttttatagagggagaggggaaaccgagagggcgctgagggagaagaacggacggtcatcaatggcggtcggcaatcaaattgccattgatggtgttagccataacgacgttcgttacggcttggaggagagggcagtggggaggagagggagagtcgggcgcggacggggtcaggtgtggacgtcgaaacggcgcggggtcgaaatggcggaggctgctcggttgtcgagcggcggcggcgcgagttgcacggagaagatgagccgtggggccatgtgggcccacacgcagtga

SEQ ID NO: 5083 - DNA, 837 bp, Zea mays
  Peptide Sequence Number=SeqID_48458
atgagccccgaccataaaatcactagcctttgtcgctggagcgtcatctttagcaccgccaacaccagcagttcaagccctgctcctggaggcgacaatctagatgacttacgtgacgatgatgaagacaacgacgaagaagaagaggaggaggagaatgtcaacgaggaagccaacaatgaacaggaggacaacttcgttggtatatggcctgtcaccaaacattatacttcaatgttcgagacggggcacttccctaacctactacaggatgtcctgcatgcattgggaacctacgtacgacccttgtatgagacaaggcaagtgtccgagccccctcgggcttgctacttcatcactcgcattcatatcagggtgatggatgcaggggatagaggtttcaggactctatcagctcatgagtctctgatgctgctatctacctacgcagcttcggtcagcaatgctgctaggcaagctttgtggtctctcagccacacttaccagcagcagctgcatgacacgaagtacaggcatattcctctacaccttcgtggagaaagcgagaccagcattgttccaggtggagctagagaagatcgcctcaacacccttgttggtgtggtggcaggtcttaaaaccgacctggacagtgctaccctggacctctctagggtacatttggagctggaggatgcacatgcaaggattgtagctctggaagctcaactggaaggaaaggacccccttgaagcccaagtccccgccatggctttgtcccctccccgcaagaggatctgctatggagaaccaagatccatcaccagtctgctataa

SEQ ID NO: 5084 - DNA, 1116 bp, Zea mays
  Peptide Sequence Number=SeqID_48459
atggctcgttccccgccgccgccacccccttccccggcgcaagggaacgggaacgggagtgggagcgggagcctcaccgccagagacgccctcgcctacatcaaggccatcaaggacaacttccaggataagcggcacatgtacgaacagttcctccaggtcatgcgtgattttaagagcaacaggctcgacagcgccggcgtgatcgcccgtgtcaagaccctcttccacggctacccggacctagtcctcggcatcagcgccttcctgcccaaggggcatgccatcaggcctcaggacctcagcgaggacaaggagcccgtcgattatcccagggccatcaaccttgtcaacaggattaagatacgattccagcaggaggaacatgtctacaagtcattcctgggaatcctcagtatgtaccgcatggataacaaacccattcaagatgtttacgacgaggtcaccttgctgttccacggccatccagatttactcgaggagttcactcatttcttgcctgatacgcccatacctcctccggaggcaggcactacctctaaagttaggaatgatgacaagaatgctataacgcattctgccatgagagctcagacagttcagagggagagagctcttccatcagctgctgattcggactccagtgttgattgccttgatcttgagcatgatattcaaaaagagtgtattgagaaggacaaagtccataatgcctgccatgatcagcatagaggagattataaaaggaacaggaagaatgacgaatatgaaaacgaagatttggattcagaacaatctggtctcaaatctcaaagaaaggtggagggtactggtgatgatacaccagggattgctaccatgtcctcattcaattgtaatgagggggacaacgatcctgaggaagagtctaaagttaggaatgatgacaagaatgctataatgcattctgccatgagagctcagacagttcaggcatatccttttagggacagtcttccacaattgcgataccctaagaaaaatcttaaatttcctttgtttgtggatctattgatggcacttcttttcttgacacactggaactgtaataggtga

SEQ ID NO: 5085 - DNA, 888 bp, Zea mays
  Peptide Sequence Number=SeqID_48460
agggagagagctcttccatcagctgctgattcggactccagtgttgatcgccttgatcttgagcatgatattcaaaaagggtgtattgagaaggacaaagtccgtaatgcctgccatggtcagcatagaagatattataaaaggaataggaagaatgacaaatatgaaaacgaagatttggatgcagaacaatctgttcccaaatctcaaagaaaggtggagggtaccggtgatgatacaccaggggttgctaccatgtcgtcattcaattgtaacgagggggacagcgatcctgagaaagagtctaaagttaggaatgatgacaagaatgctataatgcattctgccatgagagctcagacagttcagagggatagagctcttccatcagctgctgattcagactccagtgttgatcgccttgatcttgagcatgatattcaaaaagggtgtattgagaaggacaaagtccgtaatgcctgccacggtcagcatagaagggattataaaagaaataggaagaatgacgaatatgaaaatgaagatttggatgcagaacgatctggtcccaaatctcaaagaaaggtggagggtactggtgatgattcaccggggattgctgccatgtcctcattcaattgtaacgagggggacagcgatcctgagaaagagagatataatgaaagggaaaaatttgaaagagtattgaccttcaattctaaggaaggagcagctcatgaagctagtacattccctagcaaagagaagtataacttatgcaaaccaatatcagagcttgatctgtcaaatttatccagtaccttctgcaagcaaaaggactgtgtcaaggacctggaatccccgacttgccggaccacggctacgtag

SEQ ID NO: 5086 - DNA, 1176 bp, Zea mays
  Peptide Sequence Number=SeqID_48461
atggagaaggcttcgattgccgcagatagagctgtcgctgttgctagacgtgctgaactgttccatcgtttgcggtgctcctattgcgactacggggatgtgggaccgcccccgcccccgaaaaccacgcgcctgctccatggcagcccgaccccggccgccgcaaaccccgctgcgccgcaaaccgcccgctcgaccccggccgctgcaaaccccgcccgactccggccgccgcaaaccacgcgcctgctccacggcagcccgaccccgaccgccgcaaaccccgctgcgccgcaaaccgcccgctcgaccccggccgctgcaaaccccgcccgactccggccgccgcaaaccctgccgcaccgcaaaccgccgcgcccgcaaacccaccgcacaaagtctgcgcccgatgccctgcaaaccccgcaaaccaagccgcgagttcccgtgcccaaggagggtcttgcgatggtgaacagcacggccgtgggctccggtctcgcctccactgtgctcttcgaggctaacatccttgccatcctcgctgaggtcctgtccgctgtgttctgcgaggtcatgaacggcaagccggagtacatcgaccacctgacccacaagctcaagcaccacccgggacatatcgaggctgctgccatcatggagcacatcttggagggcaactccttcatgaagcttgccaagaagctcggcgagctcgaccccttgatgaagcccaagcaggaccaaagcaagaccaacttacagcaaataggtctcaagggaaaagcaaaatcaccgaaacaaccatataactcttttaagcatgcaccagctcctgaagcaattccaaacgtcattggttggattgcgatctcctttgcaaaaggaacaaaaatggtctacaagcatttggccacactatactttgtttttgtctttgatagctctgagaatgagcttgccatgctcgacctcgtacaagagatggaggagtctggattcgccatcaccagcatcaatggaaggatcaacatggctgtttgggggccactaaacaggaccatcgtcactgctagggtggatgctaccattcgcatatgggactcagaggttaggataacatggtattatgtccctacaaatagtattgatggccgctataatttggttatctag

SEQ ID NO: 5087 - DNA, 867 bp, Zea mays
  Peptide Sequence Number=SeqID_48462
atgcccctggcgcccccacctcccatgtgcgccccctccctctctatctcaatttgtttcccgcgcaacaacctcctcccacccttctcccacctcctttgccctaagtgtgatccggtggacggttgccgcgaccatccaagcccaaagcctcgaccgttgttttctcgttctcgcttaattgtagatgcaagtccgaaggagttgcagatggctcgtcttagacacaccgcacggaagtcagtcattcctttcttgccttctcgtctcgtggagcgtccgcttcgccgtctggtgactggtaagtctagccatttggagaggctacaccactgcctgcacgaggagcaggagccggagggatgggtcgctcgacccatcactcgtgacgccgctcgcgggtgccacttccacgatgcgctcgacaccttgctgcgccaggcacttgaccggcgtacctggtctatcgagtatcattgtgttgtctttcagcacagtcgtggggtttacctggaccactgggaggtgacttgtttggtgcgccgtctggagaacagtctccggggtgcggaggtctgctcagagcattactttatctctaagcgggactcagctaaggcggccatgcaagatgctgcatggcgtgcgctttcgcactactgctcagtgctcggtgcggtggccgatagtctcgacctgaggtattactcccgccgtccatctggcagcacaggaggcgtggttgtctcacgtgttggtgaggacaatcctaggttgagaagcacagtcaacctagccgtcgtgctaaacacggagctggaccatgctttagatgagctaagtagggctggtgctgagatcgcctag

SEQ ID NO: 5088 - DNA, 84 bp, Zea mays
  Peptide Sequence Number=SeqID_48463
atgaaggacgccaagcccatcaagacacccatgggaactaatgggcatcgcgacctcgacacgggaggtatatttctatgctaa

SEQ ID NO: 5089 - DNA, 636 bp, Zea mays
  Peptide Sequence Number=SeqID_48464
atgaaagggatggctaatgctcttggtgaccttggcaaggtcatcagcgtccgcaccctcatcctcaacgtgttgcatgacctgaacgagaaatttgcccacatgaaggtccacatcaagcgctccatgtcgttcccctccttcgacgatgttcgcgccgacctcatccttgagattgactccagcgtgccaaaaccgccaccgacaaccgccattgtcgttgctctgccatcgggaaatgaggaaaggtacccaagatctaaaacggttttcgaaaattgggcagaagaaaaagccatcctagtgcacaaacgactgaattccctactttttcttatatttggtgctcatgtggtccatgttccttctgcagtccaacagtcacaacgttctcgagctcatggagccaaggatgagctggataaggaacgtggtgcttcaggggagtattctgctaaaatagcctaccaacgtttcttggctggttctgtggaatttgagcttgtggcaccagggctagagacatcaatgttccaggattggtggagtatggctgaaggtcttgtgccagttttgcacagggaaagatccatgaggatgccaggctttgggaattggcaggtgctaaggctctga

SEQ ID NO: 5090 - DNA, 2022 bp, Zea mays
  Peptide Sequence Number=SeqID_48465
atggcggggagcgtccgagagatgccggaagcggagcaccacttgcgtgtgaagaaatctcgtggctctctacggagttacttgaccgtggtgcttggccctcatgtgggctaccctttgcgaagggacaccaacgaggacgtccacaatacatatggtgcacggttctgccaggagtcgaggcgacgccaaggcccacccgtcataaggcgaactcgaggccgcacctcaccacatttcccaagcgtgcaggggacaccaccgcccgtcatccgcgcgccgaggatctcctaccccgctatcaacgccctcctctatcaacggaaggtggccgaggatccgccccaccctcctccccacgccgtcgtcgatggaaggtgcgatctcctacccatctgctccaccatcaacgccctcctccatccccttccattgttgccgctccgccaccacaccacgtttcccaaacgcgcagatccgaggatccgccatcaacgctgcgcccaccctcctccccctctgctctgcgatgccgacatcaatgccctcctccccacgccgttgatggcgcgtgcagatccagtctcctttaggcaacaccgcgccaacagcggagtctccttctgccatcagcagaaggtgccgaggatcttgggcaagcaagagagggggagaggaggccaaggacacaaccgcgaagccaaactcatccaatctggccccttctgccgaccgcaccttgacggcttcaccgtgccgccgccacatcgcgaccatggcgaaggagcaggctggctagccctcggttcgcctcagcccgccaccaggagagataaggtaagccacccacagccgccgccgctgccctactcccgccccatctctcccccatccggaggcttcgtgtgcggcctgcaggcggggggcgccacgctcttctgctggccgtccacgccggcgccgcagtgggggcagctccggcggatctacaacaggcctgccccgctcgcggacctcgccgtcggcaccgaccacgtcgcggcctacgacgcctccgggaaggtggtcctatggtggcgcggcgggggccggttccccgcgcgggccgacggcgcgttccgctccctcgtttccggggacgacttctcctgcgccgtccaggccaacgcgtccgccgccatccgctgctggggcccacagggtagcgccgtgcaggcggtgcccggcggcattaacctcgaacgcatgccgctccctggccaccaacctatcaacggggcctgctgcatcgcctccacctccggtctcgtcaatgagctggcgagcgactgcccagcgagcgcgtctccccattctttagcgctcccacctgacacaggcacgcagtccccactcctaagcttgaagcatatttcagttgttttccaagtaattgcaaatggtgttggcctgctagatcctggtgctgaaagtaactatggagtccttgcccttcgagccccccttgaaaagtacggcctcgacgaagagaaggcgtgcaacgagctcctgagcttttccgattacagtggctctccacaggaaaaaagcaatggccagtgggtaattagcaagagagtggatgctgatctggtgccgtcttctggtaacgaccatgaccattcaggatacgatgaaaacaaaaactgcatcactcactcaagcaatattgatgatacaaacattgcagatgaaggttataatttagagccagcaacaaatggttatcccatgacccatgtccacgatcttgactcttcatccgcagacgaaaatggtcctccaacatcaacagggcaggatatagtagttttgagtgactcaaatgatgatgttctcatggtgttgtctcccggtgctgtgaactgtggctcgatgcataacaacactggaaatctgtttccactcaccattgtattcacgtcgcccgtcgctaggactctaagtccattggaggctcgcaatttgtgttctgtggcatag

SEQ ID NO: 5091 - DNA, 81 bp, Zea mays
  Peptide Sequence Number=SeqID_48466
atggccatgatggattcaacatcggaaaagatgtacctctgccagctttaccttgactccctcaagccagcatatccttga

SEQ ID NO: 5092 - DNA, 81 bp, Zea mays
  Peptide Sequence Number=SeqID_48467
atggccgtgatgggttcaacatcggaaaagatgtacctctgtcagctttaccttgacgccctcaagccagcatatccttga

SEQ ID NO: 5093 - DNA, 276 bp, Zea mays
  Peptide Sequence Number=SeqID_48468
atgaaccaaccgcgccaggagaagaacctcttcagcgggaatctcgccgacgaaggaaccgatgccgaaatattcggtgacatcatgaggccggagagcgggacccggcgcagcccgtgtcacgagacgaggtctcggagatgggagagactccagaagaacgggtcttcagggaaaggaggaattcccgacgacgtgatcgtcggcaagctcaagagcaggctgagcaggaagcaagacaacgccgagaaaatcctcttctcggacggaatctga

SEQ ID NO: 5094 - DNA, 507 bp, Zea mays
  Peptide Sequence Number=SeqID_48469
atggcctcccccagactctggacgctgagggctatcggcggctgctcactcgggcaactaatcatcttctacctctcgctcatcctccaagtgatctacgacacgccatcaacagtcggcgggacgcgcggagctccatcaacgcttcacgcgaacgacgacacgagaacgagattcggcgccgagaagaatatgatcgggaccacgacatccctgcacggagtcagaccaccagaattgagtcggcaacggcttcgactggtggcactacccggggacggtcgagacaccacgacaacaactcccctccctgggacagacatcatcatcgacgacaggaggacacgtgtggagtatcggcgctcactccatgcctcagggccattcaatggccccctgtcttcaaagtctccaacgtcgacaagtacgagcctaagcaggatccgggaggttggctggccgtctacaccacccctgcctgagctgctggggcaactaaagatgtga

SEQ ID NO: 5095 - DNA, 222 bp, Zea mays
  Peptide Sequence Number=SeqID_48470
atggcgggcggaattaagctcgtcggagctaaggaacggtggctggccggtgagggattcgagttagggatcaaggtgaacatccctgatctttggctcaagaaaaccctaggtgacactggggtgtcacagccttccccccttaaaggaatctcgtcccgagattcgggccagagtcctcccagggtgaagcgaagggtgagacttataggaaatgggtga

SEQ ID NO: 5096 - DNA, 873 bp, Zea mays
  Peptide Sequence Number=SeqID_48471
atggtgacctccagttcgatggcgggggaaagcaaaccgggccacggcctctgcccctccctcagcctcaaggattttcatcaccagggctggggaggggatgatcggggggaagggcggttgttgtccgtggcgctggcagctgcccctgtgcctggctctcggacccgagtggcttcggagccgctctcggcgccggcttccgccacggcagctggaagaggttcttctgccgacgagatagccggggccgcccacggaccgacctccaactctacggccttctgcccgtccttgcctcacgagtttgggcatgggcgggggcctcctggcagcagcatccgccctgaggtcattgttgccgctgttcggccccccggagcagaagtcgtcgtcgtcgccgctgctggagcaggtgacggcgtgccgttcgtcggccttctgttgctccgcaggccccccccagcgagtggggttgttcatacccgcggagactcgcctgttgtttgtctgaaccgcttcaccaagcgtgagttgccccgtgcaaaggtgacaagtgagcatggacagaggcagagttggcttgaaaaagaagacttggtcggccggagcctggccgggtcgtccgttagcgggaccgacgccggaattgatctgccgaggcctcgggccaggctgatgtccttggaggacagctggccgaggcctcggggtgaccagccgagccgcctgctcgggctggattctcggagaagaccatggcggcgatggccctggcttggtgatgaagtcgtccttcagagtggagatcctcggaccgcgtcgccgtccgaggctaggtcgaatctcgccaaaggtgttgttaacgcctag

SEQ ID NO: 5097 - DNA, 474 bp, Zea mays
  Peptide Sequence Number=SeqID_48472
atggttgtactattatcccaggcggtcactccatgcgaacaggtccttacggagaggtactcaggaaaaaggcctgagccccctatggcgggacagggcgtcaggcgcacgtgcgcgaagcggtacccgcggtccgagccgttcgatctgaatcggacggaggggatcagatcggggaaacagacggctgcgggcggtgccgctcttctccgtggcggtgaagtcaccggagttgaggcttgtaacaccccagaccggggggtccctgagccgacgagtgaatgtcgtcgcgtgccccagcccagatgggtcgagcgcgagggcgagcgtgaagtggggaaagcgaggcggccggagaccggcgtgagagaggtgggaatcccgcggccttcgtgttcgtcccgcgcccaggtccggcgtaaggagaggatccaggtgtacaatggggggtatagcagagtgctacgtgtctag

SEQ ID NO: 5098 - DNA, 318 bp, Zea mays
  Peptide Sequence Number=SeqID_48473
atggcgcctcctgtcgacgtggtcggtccgtgccctaggttgggcgatgtggaggctcctccgaggtcgaggtcgagtctgtcttctgtggccgaggtcgagtccgagcctctgggtcgggcgaggcggagaccgtcggctgaggtcagggcagagtccgagccctggggtcaggcgaagcggagttcgtcatcttccggggctgagcccaagtctgagccctgggtcaggcggagcggagtttgtcgtcttccggggctgagcccaagtccgagccctgggtcgggcggagcggagttcgccgtcttccggggctga

SEQ ID NO: 5099 - DNA, 141 bp, Zea mays
  Peptide Sequence Number=SeqID_48474
atggccatgatgggttcaacatcggaaaagatgtacctctgccaggtgaagaagcaacaaacttttgttgtttctgttccaaggtggtcacaaaagaagaaaaccaagagtaaagttgcgggaggaagggttcctccataa

SEQ ID NO: 5100 - DNA, 513 bp, Zea mays
  Peptide Sequence Number=SeqID_48475
atggacgcagacgaccctgacagtaacgcgctcagggatgaagtgaaggtcgacctcgacatgcttcgtgcgctgatgcgggacagggttgacagagaggtagaaggcgctgacattgtcgcagtagaccagcgtgctcctagtgtgggaaatgtgaagctcctagagaagctgacgcaaccagctcgcctcagccatgccattagcaatagtccggtattcggcctcaacatgacagggatcatgaatgtagagacagatctattggacaacatgcatgatgttgggcctggtgaaggtgagatactgaagagtgtcgataaagttgcggtagacagtggggtcactcataggagcacagtcaccagagagcttgggcatgcgtgtccaccggggtcaaacagggcttgcaatctagcatgccagcacgctcgaggatatctagggtatactgttgctgctggagaaataggcccagagcgacgctcaacaacaatccccagaaagtggtga

SEQ ID NO: 5101 - DNA, 270 bp, Zea mays
  Peptide Sequence Number=SeqID_48476
atggcggtggtcgaggagtctgcgtctctgcgggactgcttggaggcgtggacaactggagatggaggatgggagttgacgtctccgcgagataacgagaccgcgtctacgagatcgcgactgcttggaggtatggagacgaaggatgggagtcggctaggcgtcgtcgggtgtgggagatggcagatggggctcgagaggtgttctactattttccagggtttcaccgtgctgtcagctgtggcccatggcgtggatgatgccagttga

SEQ ID NO: 5102 - DNA, 510 bp, Zea mays
  Peptide Sequence Number=SeqID_48477
atggaacatgctgacaaggagaatatagcagcaaggttcgcacaaatgtggaatgaaattgtcaccagctttcgagatgaagatcttatagacaatagggagaaggagctgctacttgttccttatgtgtctgatcggacccttggtgtcgtgcagtggcctccatttttgcttgccagcaagatcccgatagcagttgacatggctaaagatagcaatggcaaagaccgagatctgagaaagaggcttgacaatgattattattttaagtgtgcaattgaggaatgttatgcatcatttaagaatatcatcaatggccttgtacagggtgaaccagagaaaagggtcataaataagatatttgtagaagttgaaaaatgcatctctgaggacaaagttattgcagatttgaacatgcgggccctgccagatctctacttcaagtttgttgagttggtaaactacttgatgctaaaggaggaaagtcaaaagactcctgctgtcctctag

SEQ ID NO: 5103 - DNA, 3096 bp, Zea mays
  Peptide Sequence Number=SeqID_48478
atggatagtgctagcgcagccccatcctccacgcgggaccttgccgagcgtctccttactaggaataatgaacttgaagaccagcttcgtaagtccgcacaatccaaagtcccatcagatcccaacatatggcttcagatgcgtgacaactttgagaagataattctcatagatcacgacctctctgaacagagagatgtagagtatctcctatggcagttgcattacaaaagaattgaggacttcaggaggaacattagtgcagctagctcacttgcatctcagagtgggaagagcaacactaacccagatcgagtcaagagaattaaatcagccttcaaaagcttcctttcagaagcaactggcttctatcatgacttgatgttaaagatcaaatcaaattggggccttccactcaattactttccagacagccttgacaatgcaaacaactctgtgcgagatgacatgaaaacagttcaattgaagaaagatcttgctcgttacaagagtttgaatggtgatggtgattctgctagtcgtgaatacacagcggcttctagttactacaaggaggcagcttctatctatccttccagtggcaaccctcatcatcagcttgctatactagcttcttactccggcaacgaggtggtggctgtttataggtacttccgaagcttagctgcagacactccttttgccactgcacgggacaacttgattattctttttgaaaagaatcgccaaagctatggacagctgccagacaacagcaaagttcctagcactaagacattacccccacggccatctgggtggggccgaggacggggagaagtaaggtttcaaccaaaagatgttaatgcagaaacagctgaaagggaacgcgagtgcaataatggtgatacattgaagaccttctatataagattcgtcaggctcaatggaattcttttcacgaggaccagtttggaaacattcggggagctgttttcttcagttagcaatgatttgcagattcttctttcttctggtcttgaagaggaccttaatttcggttctgatgctgcagaaaatgcattggctgctgttagacttactgtcatccttatattcacagtgcacaatgtaaataaagagcctgataggcagtcttatgctgaaattgtgcaacgcagagtactgctccaaagtgcgtttacggctgcttttgactttgttggacgaattctcagaaggtgttcagagctccatgatattgcatcaagcttctatctgccagccattttggtctatattgaatggctggcgtcccatccagagttggctgttgattcagagatggaggaaaagcatgcaaatgccaggtctttcttctggagccaatgcatctcatttatgaataagttgatccttaccaaccttgcatctgtgaatgatgatgatgacgaggcttgcttttctaatatgagcatttatgaggagggtgaaactggcaacaggtttgccctttgggaagatcttgaattgagaggttttctgcccttgcttcctgcacataccattttggatttctcaagcaaacacacatttggaagcaccaaggagaagaaagcacgggttcagcgaatttttgctgcaggaaagtcactgcttaactttgttcagattgatcagttgagaatttattttgattcatcatcgaagaagtttgttatggccaagaaccctcctgtttctaaaactaacacccctcttcacgaatctcctgatgcacttaaaacaagtggcactgaaatggattatgaggctgctagaagatttgattcagtttcttctaatatgggcacactgcagtctaaagtgcagttttgtcctgatggtgacgatgatgaagaaattgttttcaagccaacagcttccgaaaagtttccgaaagctccttcagatctgttggttaatggatacactcatcctgtacctatgtctactgctggctggccaaccaatgctagtttagtgcctgttcagagcactggatcaatgactgcaactggttggccacccaatggtgggtcaaatgcttttccaagtactgcatctctatcagctgctggtaattacaacattaaccagtcgcttcccaggtcttccgttggttgggctgtcaatggtgagcaaagtgttattcctagcattgctccaagatttgaactcgtgcagcctgttgaagagcctgtttccagctggacaagcagtggtgcacagcatgttggtactcagcacaagcacacaggtttaactttcccagatgttgtgtctgaaccacttgtatctgcatcaatggttcaacgtttcagtagcactgattattcgaaatttctcagtgaacaagaaatgctcttagtgaatggactgaatactgtcaacttaactggaaatggctatttaaagcagagactgcagcctggattgagtggtttacagtctatggggtattcatctcagacacctattgaacctggtggtaccactgcaaactcgatgcataatcatctgaaaattactggagagaatgtgccctctacacttgattcagttgtaccttcaatagctccattaggtggcatgccaatgaaattcacagaagcgccactaactgcttcaaagaagaaccctgttagtcgtccatcaaagcctgttgggccacctccaggatttgatcatgtagccccaaagcgccaagatgattctattccagttgaaaaactgcagatcccacaggttgatgattacagctggctagatggttatcagcaatcgattgatcatgttcacaacttaagaactgtttattctggtgtcagtgacagcactgcatttgccactccattccccttccctgggaaacaacagttatctgggatgcatgcacaaggggctacaaatgaaaagacatggcaagatttccgtctttttgagccttcaaaacagaacatgctccaaaattaccaccaaagaaatcagcaaaatggtcaaatagctgaacaagagccagcaaattctgtctggtctagcagttaccatgtgtga

SEQ ID NO: 5104 - DNA, 561 bp, Zea mays
  Peptide Sequence Number=SeqID_48479
atggagggggctcgacatgggggagcactcgcgcgcagtcaaggggtagcaagggtgcgtggtggctgcgacggccatggaggcggaggtgcggtgccgcggaggagagcagaggcgtcgcggatccaggcgtccaggagaggtcgccggacctgggacctagcgccgagcaggaagaccaaggaatggagctcggcggccatggagtttttgcccctgcgcacgtacaggaaacgtagaggagcatgtgcagaggaggccgaccatggggtggagaagggcaccgagcacatgggctctggacgccatggccgtagggggcggctccacgcgcgccatgggaggaagcttgcctgggcgtctgccatggaggagcttctgcgcacagaggaggaaaggatccctgcactaaacgccgtggagaagaggggcgctgggcagaggagatgggagcagaaagcttgggcgccatggctgggagcgcgatggagagggcagctcgctggtggctgttgctgccgtgaagcaaggaggaagaagctggcggctggaaatttttga

SEQ ID NO: 5105 - DNA, 489 bp, Zea mays
  Peptide Sequence Number=SeqID_48480
atgcacggatcccccggctggccgccatcgcagcaaaatcaacccgagaacctccctacaccgaccactcccctactacccttgcccctttcaggtaagatcataatccctactactattaagccaccagtgtgggcgctggcgcggccaatgcccccgcctcttctccacctaggcacctacgcgcagcctgccgactgccatgtggacccgcctcggcaacacatattcctactgccaactggacccacctcgactatccctcagcgcacatgcccgaccagccatgccaggcttgcagtgcagccgctcaaccagccaggccccggcaaagccttcctggcttcgcctatgtgcaccagcgaccaatcctttggaagccacgacaatggcgcccagatctgctttgccttcccctacgcgctgcacccacaaatttggcagacgcagcaatgccgcccaggaccccacatcgccttcccctactga

SEQ ID NO: 5106 - DNA, 1227 bp, Zea mays
  Peptide Sequence Number=SeqID_48481
atgtcaattcttggaatgtcaactacaagtgaggtcactaagtgcaaagaatacattgtgttggcaactcctccagctaaggatcagatggaacagttcaagaaggcgcatgctcagtttctacaagcaacatctcaagtggtagctagactccaacaagttgatttagcagaatttatagcacatgagcagactaccgataaccatatgacatcaaccacaacatcaccctcgatagttgacttagaaaagctgttacatgcacaagctcttgtaatacagaatgtatcgcaactcacctcctcataccagcaagtgttggcaagtcgaaacgtcactagaaatgaaacaactgatgaacaaaaggatgcacaccaacagacaaatgatcttggaacatgttgttgttgtgagtactatggaatcccttgtcgccagatcagtacgaacgaaagtgaaactacaaaacagaagaaccgaattttattttctggtataaaaagtcaatggtcttcccaagaacaactaacagcagatacactgtcagacgatgaagtgccaggttttccaaaaaggaaacatcacaaggatgctcagctccaaaaagaagcaaatgagtgttacattgatggatggactatcaccagcacacagcttcagcctcgtcgtcgcatcagttccaagaaacaaaagtggaaacatggaaaaagtcaagaaattacttcaagaaagtcttgctatcaatgtggtcgtgaaggtcattacttccgtaactgttctgaggagcgttcactatcggacactcccgagataaagctatctcagtctccaaacatggaatgtgagcaaaaatgcacagaaatttctaccaacatcgtgaagaacaacaaaaggaataggaaaatgtttggatatatgggtagtccaccccaaccacaagcaaaagccctgaaacacatggatacccaaatgggagaatcaagtcaagctcagccatttgagatacagacacccaatcaaccctcacccccggttggtcaagcaaagttgactcgcaaagaactcaaagcaagaggtgcttgcttctactgcaagaatgaagaacatattattcgtgaatgccccaagaagcgtctagaccgactaaagaagaagacggtgaagcaagacccaaacaataacccagaagaccaaccagctacaagtacgatgatgaagatcgcttga

SEQ ID NO: 5107 - DNA, 1215 bp, Zea mays
  Peptide Sequence Number=SeqID_48482
atggcggcgcgaagggcaggaagggcggttctctcttctctggctagatctctcgggttgcgaaaacctaaggggcaggcaggaagcggagcaaagaaccgtcaccgggccctcttcgggggatataaagaccaaggcgaggacggttccaatgttccgcccggaccagacgcgggattcaaaaacgcgaagcgaaacggccgctcctcgaacggctcgcgcacgcgcaacggcagccccgccaactactcgccctgtcgctttaactccgcgactggacaggcggcgcttctggcaggagcaacgggcgacgcttcgccttcgccgaaacaaccgcgccaaaaaaggctccgagcctccttactgatcagaggttcgaaggctggccccccgaagggttcaacagccgccttagatcgcgtgggccctacacccactactggtcagaggctggcccccgaagggttcacagtcgcctcagacgccgagcgagggatgaccagggctcaccggagacaccatgttcggtgcccattgagggtaacatggtgctctcccccctcctccttgcggaaaggcgacgtaggggcgtatgtaaaaaagccgagtctgtccctgatcgccctctcgccctgtgcagaggggcggaggctcgggggctgctatcgcaaacccggctccggccgaaccgttgacagcgtcaacataccagcccgagaacttgggccccgaccgtgcacccgggctacggccagttcgcatgagggaaccaccagaccagccgaagcattacgcaaggcattaagacctcgaaggagtgaaaccactcctccgaggcctcgggggctacacccggcgggtgcgctcgcgcgcacccaccggaacaaaatgcaaccgagaaaggctggtccccttgcaaaaaagtgcgacgaaagcctccaagcgagtgctaacactcccttcgaggctcgggggctactgtcggggaccataattaggggtaccctcaagacacctaattctcagctgggctcggactcgggctgggcctcggaagacggcgaactccgctccgcccgacccagggctcggactcgggctaagccccggaagacggcgaactccgctccgcccgacccagggctcggactcgggctaagccccggaagacagcgaactccgctccgcccgacccagggctcggactcgggctaa

SEQ ID NO: 5108 - DNA, 1404 bp, Zea mays
  Peptide Sequence Number=SeqID_48483
atgggcatagattcacatttaaacacttgtgttgacactcaatcaccaaaatacttagaaatggcccaagggcacatttccctttcagatgcccatcaagcccttcgtgagcgtgctggcatcatccgtcagctcgatgttggcgtgttgcggggaaacggcgctcgtcttcatctccgacgcgaggtcaacgcccggcgtgtcccccgctggggcgccggcgccgtcgactcgctcgacagccgacgagacccgagtttgggcgaggtggcaattcctctgaggtggaggttgagtccgagccctggggtcgggcgaggcggagttcgccgtcttccggagtcgaggtcgagtccgagccctggggtcgggcgaggcggagtttgtcgtcttccggagccgaggccgagtccgagccctagggtcgggcaaggcggagttcgtcgtcttccggagccgaggccgagtccgagccctagggtcggacgaggcagagttcgtcgtcctccggaaccgaggccgagtccgagccctggggtcgggcgaggcggagttcgtcgtcttccagagccgaggccgagtccgagccctggggtcgggcgaggcggagttcgtcgtcttccggagccgaggccgagtccgagccctagggtcgggcgaggcgaagtccatcttccgaggccgagacggggggccgagccctggggtcgggcgaggcggagcttcctatgtcgcccgaggctggacttagctgttgtcgacctcactctggcgagtggcacggcagtcggagcagggcaggcggcgctgtattcctgtcaggtcggtcggtggagcggcgaagtttctgcggtcacttcggccttgtcgactggagcgcgcgtcaggataagatgtcaggcgatccttgcattaaatgctcctgcgatatggtcggttggcgtggcgatctggccaaggttgctcctctgcgaagactgggcctctggcgagccgaagatgcataaggttcaacataaaccaagaaagaaattacattcggactcaaataaatttggagcaaaggacttgagagtgtgctgccagtggcacaccagacagtgtccggtgccccaggccgaacaacagtcaaaccaaccactcttgggtttctccagggcgcgctccactataattcaccgaactgtccggtgtgcaccggacatgtccgctacacgacaaagggttccaatgctcaagttgctccaaacccccaacggcgtgctgatgtggcacgcaccgaacagtgaacagtacctgtccggtgtgcccaccgacagcaaaaacagccaacgactagtgatcaaggaaggtaatcaagttcaaggaagattatactacatcgctcataaagaactaatttga

SEQ ID NO: 5109 - DNA, 339 bp, Zea mays
  Peptide Sequence Number=SeqID_48484
atggcggagcgaacgccgggatctcggtgctgttacgcctacctcgcctggagtccgagtcctcaggctatacaagccaacggtgcgcacccctgtgcttccccgaccacagacgcgaaccaaagcgccattgccgagaccgtccgttatcaccggggagtgcggaggagagagagtgtgagtgcacatcgccggccgttgtcgtcttctcgccttcgttttgtgagatcgctaggagtgcgggcgcggcgtgacttctcggggcgacggcggaggcggctagacgaatcggcgtctggaacctcggttaatccgtcacgcgtgaaggaggttggttag

SEQ ID NO: 5110 - DNA, 276 bp, Zea mays
  Peptide Sequence Number=SeqID_48485
atggaatgtcagcattcagcaacagataattccaaccgtgaaaaggttccttctgggactggaaaggctaaacttagagtgcatgagcaccagtcgatgctttccaggatcatacaaaagccattaagttgcttcacctggagtcatgtcatctcttttggaactatggggaatttggccgtcgatgtgggtcaacacgaaggcacagggcaaaccaagtctttggctctaatatatttctatgctaaagtcaagactgtcttagcacatgggtag

SEQ ID NO: 5111 - DNA, 498 bp, Zea mays
  Peptide Sequence Number=SeqID_48486
atggaagaagccttgtgggttgctcttgttggggtgtcagaggcaacagttctgccaggcgttgcagctgccaccaatgacttgacaaatggagcaagagcatgctttgaagattgcagcagtcggaacttctttaagtggtaccttacccttcccgagaggctccccctcctgcctctcgccaatcgcctcacgccctcgcctccggttctccgcacaccgcccggtgaccctgcgtcccctaccgcctccggtggaccatcgatagcgcctggccccggcggctgcgctgcacgccgcgcgcggccggctgaggcggcgtggggagggaggcacagagagggtgtcggacgaccgactgaggcggcgtggatgtcgggggcgcagagaggtgtagtttgggtgaagaggagatttcgtggggaagggagcacgatgtctgcggggctggtgggtgggatcggagagcggacgattgtgcgggatcggacggattag

SEQ ID NO: 5112 - DNA, 2649 bp, Zea mays
  Peptide Sequence Number=SeqID_48487
atgtcgctcgatacgaagctcatcctcaacgccattagcgagctcttcgacaagttcgacgcgcgatggtccatgagggatgccgcgcgggagacatccaggcgcgtccctgttcctacccagtgcacggttgtcggagccgatgtggtcgccgacaactggggcaacctcttcgacagtgccgtcgattccgacgagcagcgctacgaggaacccatcaacgccgacaattggggcggattcttcgatggagcagacgcgtctgccaacgccgagttcgtcggccactgggacaacccttcctccaaccccgacgcgactgcctatgtcacaccagaggttgcggtggaatcggtgcacccggccgcacgcggacgcttcttcaacgacgattcgggtgccccgcttgactcggacgacgacagctccgtccacggcggccacggatccgtgatgtcccatctcctggagcgcgaggccgacaccgccttccttccccactcggatcagcgggatggagttgaggcgtggttcatcctgcgccggtgcactcccgcctccttcaacgtcgcctccaccgaccccaacaacgaggtctcgagcgccgttaccgcggacgcgctcgctaaggccgcgcccgcgctcttcgcttcgagggcgcccagaccatcgctcaagtacctggagctgcttctcccggcagaaatcgacttcgaccacattgacctaccgactgctgccgccgcagggcacatcgtcgcccaggtcaccggcaacaacgcggtgtccgtggtggaggaccaactcaggtgcaccctcttgctcacgcgtaacttcctgtcaagccaccaccaggccgtcagcaaggagtgggacatggtcgccgtcgtgcacccagtgtgcaacctgggggaaaaggtggacgccatctgcactggccagatcgagcacctgctactgcagcacctcaagccttcacctacctcgattggtgccaaggcggtgttcgatgaaatgcagcaaagcaccaattccgcgacaacgacacccgcatcctcagctctgacaacaacaacgactacaaccatggctgcaccggccacctggctggacgcgcagcctgctgtgtcgacatgctcatcagcatcttctgctcaagaagatacaccaataccactcctcttccttcgcggtggactgggtatgatggataatgtcttacctgctaattctactttcctgtctaccaacatatcactcagcagcatggagtgtctgagagagtttatgcttcaccttaagctcggcaccgccagattcactatttgtgacgaaagtgtagtgaacctgtggtcgtcgccggtggagcgagttgttcagcaacaaacatggctacaacttgagttgacaaatagtggtcttgacctatggcctatctcatggcaatcgcaacaagtctattttggtactcaccatggattcgctgcatggcccaggagccatggcacaattcttgtcttcgattttagcaataccttgtcctggaacaactcaatgtcgattgctgcttcatgctcaaccaacaccctttttgccaaggatgatggagattctatgaaccggtgtttcagttggtgttggaagcctccatggttacatccaggagtctgccgttctctgcacatgattaataaattttctaagcaatactttgttggcctatctttgctaattacaagggaaaaatttatgtctgggagaataatgttggctcttcttccacttctgaagctatttacatcaggaggagcaaggattgtcaatgcttcctcacttgcgtcggagctgaagagaatgccaaatgagaagttgcgaaacgatttgagcaacattgacatctgggacgaggaccggatacaagcagtactcaacacattcttggaagacctgaggagcggtcggctggaagaggctgggtggcccgtgatgctaccagcctacagcctgtcgaaaatggtcatcaatctgtacaccaggatcatagcaaggaggtatccggagatgcgcatcaactgtgtgcgacctggatttgtcacgacggacatcagctggaatctgggggtcctgacgcctaaacaaggtgcgagagggccagtcatgctagctctcctcccagatgatggaccaacgggttggtacagagatgaaatgggcgataagatgggcagcctattatttttcaaaatggtcaagtattcatcactagtcgagggattttgtggtgtgcagttttcatttcctaatattcaattgtgcaagtcttggtcacaggagttagccaccaacacagaaagccatttactaccagaaatgctagaagcggccaatggttatatttgtcatgagcttcatcttatgcttacctctattggagtgacacatatgatcgattgtgttaaatatttgataggggttatcgacttgctaactccatgggatcctggcatagtggtcttcaacctcaagttcctgatgctttggcttgagggcaagccaaatcttaagaaggggggaatgtcagtactgatgagatggaaaacagtgtggtggctgatggcgggtcgcgtccgcctcgtgtgcatcatctga

SEQ ID NO: 5113 - DNA, 462 bp, Zea mays
  Peptide Sequence Number=SeqID_48488
atggagggtaggggcatgagcatattaaaggatggagctaaagcaatgattgtaaccaacaagggagagaatgcaaccaaggtcaggataggtaaaacaccattctcaaatcgagatggaaaagatgatatttcaaaaggtaggcataagataacatcatggaaagatctagagattacaaaggtaaggaaggtgaaaggcaaaaacacaccaaaagatagagttaggacaagacttgcaacacgacagaggaaaaaaaggaacgaacaagagcgggataggtgcaagataaagcatcatggtaaagatcaaggaatgacaagggttaaggtaataacagacaaacacaaccaaggatgtattttagacaaaacttgtgaggcatcaaagaaggggaagcaatcaatggtgaagtatgtgaggcattatcctcaaacagcgatgaaaaagaggtggctttaa

SEQ ID NO: 5114 - DNA, 837 bp, Zea mays
  Peptide Sequence Number=SeqID_48489
atggacaaagaaaagaagaggaacataaaagaaaaagcccagaattctttccccttcattttccccaatcgtggcccgttccccccccttcctgggccgctcggccaccccggcccacgcgccttcgccttccccccgcatcctgctcgcgctcccgggccgctgcgcgcgccaacggcccagctgccccgcgtccctggctcgctcctacagcgtgcgtggccggcccaccccgcgtggcccagcgcacaggcgcccacgcccaggccgccaggccagcgccccctccctggcccagcaaccgcgacccacccagtgcgctcgcgagaacgcgtctggccatcgtgcctcgctcccgcatgggcgagcgttgtgcctgccctagcgccgccgggcccaccggccaccctaagcaactgtgcatcttctttaggcactcttcgtgatgtgcgctcccattccgccaagaaccgcccaactgctccacagccgagatggcgaagggcgacgggcgtggatgagggccacggggacttcgaccggctgtccaagttcctggtggtctgcctcaacgctatccgggatgcggtggcgcccgagaaaggcggcggcagcatccatggcgccggtgaccggggcatggagctctggaggtgttgctccacccaggcaccgtccgacgtgctcgacgctagcggcgcgtgcgccacggtgacgcagaccgcgtggctcgtctccactgcctgcgacatcgtcgctaggaaagagaggcatgggatggtcgtgtcttgccccttcctgctgtacctcgtctcgtcacaggataaggccgcgcaa

SEQ ID NO: 5115 - DNA, 141 bp, Zea mays
  Peptide Sequence Number=SeqID_48490
atggagctcggtgtatgcggctcgctctgccaagatgatgatgaggagaatggttatgattatgctattgataatggtaaagaagaaggcatcgaggcggatctccaggagttccaggacttcggcgagttcgaggattag

SEQ ID NO: 5116 - DNA, 981 bp, Zea mays
  Peptide Sequence Number=SeqID_48491
atgcaggcggcatgcaaccacaccaagggggcgcaccctttcgactccgacgcgtccagcatgggggcccaggcccacacgtcatgtaaccggcgcgcccgttactacgtgggggaaactgcaccgccacttgcgccagtaccgcgccttctcgactgcggaaccggtgccgcgactcgaggcaaccctgcgcatggcccaacagtgccaaccaagcacatcgatcacgggtcagtcagccgcgggagaaggcgcgatggtcgatatggccaaaagtgggccagcagtaatggcgacggcaggcgggcggaagcagcggtcaagtcgtctgcaggctcacgtcccctcctgggacagcgagagagccctctcccacggcgtgaagacgacgcgcccgtgttccgttcctcgaacggctcgcgcacgcacaacggctgccccgcgaaccactcgtcccgtcgcattaactctgcggtaggacaggcggcacctttggcaggcgaaggaccgggaaagggggatactccgaaagggatccttctccacgaaggaagcgggcctcgagccctcctactgatcagaggttcgaaggctggcccctcggaagggtccgacagccgcctcagagcactcgggctccgcgcccactactggctggccctcgaagggttcgacagccgcctcagagcacgcagagcgagggatgactctgggtacgtccgatacatggccgagggctcgggctacgctcccgaggtcaaggctccgttcactcaagggacacgatcccgcctcgcccgagcccagcctcgggcaaaggcagccgacctaggaggattcacgtctcgcccgagggtcccctcaagcaacggacgcaccttcggctcgcccgaggcccaggcttcgcggagaagcaaccttggccagatcgccacgccaaccgaccgtatcgcaggagcatttaatgcaaggatcgactga

SEQ ID NO: 5117 - DNA, 1047 bp, Zea mays
  Peptide Sequence Number=SeqID_48492
atggcaaccacgtcttcgtactctcctcatgcattgcgcccttccaccttccgagcccccggatggggagcgcccacgttgctttcgtcttgtcatcgttggaggaacgcaacttcgcggaagttggtacctttcagccatcgctcagcttcaaggattttcatcaggcggcccggctgcatcccctcgccggtggtcacccaagacggtgaccaccagttcagtggtggggagaagcaagccaggcgcggcctctgccccgccctcagcttcaaagatgttcatcatccttgctggggcggagggcgagctgagccggagctctacctcccgcacgggttcgtgggtcaccctctccttcagcattcaggggagagggcgctcaccggcctagcggaaggggcggacttcgacaatgtggggctggtcggccgcaagcgtcgtcagcttcagcgtgttgggctcgctggctcagctggctctggcgcagcttccggtgccaccttccaccgctgggcggagcgcggctatctgcccgtcgtacgggcggctgtcgcgccgcgcgcaccgggggaccgcccaagacgtcgtgtgctgctagggcggcgttcgtgttcttgggctgtcctgcctttgctccggtacgacgctcctgtgtggaggtcggtgttcgcccgtccgggaggatccgagtggggatctgccggcgggcaggcggctgccgtcgtcggtgctgaggtggtggcggctgaagaagtcctcatcgccgacgagatcaccgccaccatccgcgctccgggcctccggctctttggctttgatagcttgtcctcgcccctcgagtggggacatgggcgaggggctcgtcacatcagcgtccgccctgaggtcatcgctgctgctgtttggccacccggagtggaggtcgttgtcgctgctgccggagcgggcgtcagcgagccacctggggttttgtcgccccgtaggccctccaatgtggcggggttgttcgtacctgcgggggtggaaccggagttccgtttgtaa

SEQ ID NO: 5118 - DNA, 645 bp, Zea mays
  Peptide Sequence Number=SeqID_48493
atggacgcgattcaggtcaaggctccgtccactcaagggacacgatcccgcctcgcccgagcccagcctcgggcaaaggcagccgacccaggaggattcacgactcgcccgaggatcccctcaagcaacggatgcaccttcggctcgcccgaggcccaggcttcgcggagaagcaaccttggccagatcgccacgccaaccgaccgtatcgaaaacagcgccgcctgccctgctccgactgttgtgccactcgacagagtgaggctgacagcagctaagtccagccttgggcgccataggaagctccgcctcgtccgatcccagagctcgggctcaacctcgacgctggacgacggactccgcctcgcccgaccccagggctcggactcagcctcgacctcggacgacggactccgcctcgcccgaccccagggctcggactcagcctcgacctcggacgacggactccgcctcgcccgaccccagggctcggactcaacctcgacctcggaagacggtctccgcctcgcccgaccctcgggcccggacttagcctcgacttcggaggagcctccgcgtcgccccgacctcggggctcggaccgaacacgtcacggggggccatcattaccctactcctagatag

SEQ ID NO: 5119 - DNA, 600 bp, Zea mays
  Peptide Sequence Number=SeqID_48494
atgggcctcgctgcgcccgcgactggtgcgcgagccgagcttggccgcgacctggggaaagaagggcgcctagggagctcagctgcgtgctggccggtggggaggccgcggcaggggcaagccgccgtgcaggggctcctagccgcgacgccgggcggggccgccggacttggccgcacaacggagggaaagggatccacgcgaggtctcgccgagaggaaacgaactgctcggccgggggacagagaggactactcgtcggggaaggagaacgacgtgacgcggggctgcagggagggtccgtcgagggggagagaggatggggaagggaagagaggggagaggactcaccgggaaccgccatgtgctgggacgacagcttctacgcgatttgatctggggaaggagactagaaattatgtgacggctgggtggttgtataaaagggaacatgggaggaggttgccaaactcatcatcaactgtgttgcgaccgagcaagagaggcgattgcgaatacgacgaggcactgttctgcgcatgggcgcaccagacagtctggtgcgccaccggtgcgccaacggtcgactccaacggctag

SEQ ID NO: 5120 - DNA, 2271 bp, Zea mays
  Peptide Sequence Number=SeqID_48495
atgtcaaaaacccccgcggaaccacttcgagcgagggcagcgtctccgccatctagcgacgtcttcggcaccagtcgctggtctgacagagacaaaacgggcagggacacccttcgctcgattcggcaccagacgaaggcctgcgacggcgtcatcccacagtgcgtcctcgtccagctcagaggcccactgcctggtccaccggacccagctgacgcactccctcgcctccgcgggcccaccctgccgcctccgcgggagatatttttcgccaccccgtcggggcagattccaaatatctcccctacctggcagcagaatctgatctccattttcctcccgcacccaacccaaccacggacgcacgccgaggagggagaaagcgggtgtggaggggcgggcggccggcctcgcatgtttgacgacgcgggggccgtggcggtgaagcggatgaggctgtgggaggaggacgaggtggaagtggaggaggaggggatggaggtggacgcggagccgggatggccgtggggaacgccggcggcggggctctccagggctgcggcgatcgtcgtggcggacgcggcggagcccgacttccccgtcatatacgtcaacgccgcattcgagtccgccacggggtaccgcgcccacgaggtgctcgggcgcaactgccgattcctgcaatttcgggatccacgagcccagaggcgacatccccttgttgatcccatggtcgtttcagagatccggcgatgcctcaacgaggggattgaattccatggcgagctgctaaatttccggaaggatggcgctccactttacaacagattaagtctcattccaatgcacggggatgatggctacgtgacacatgtgattggaatccaactattctccgaggcaaacatcgatctcagcagcgtgtcgtatccggtgtacaagcaacagaccaacaacaggcccagcattcaagatctgaactcagcttcccatgagcatgctccgaaagtccagagtgcagaccactgcggtatacttcagttgtcagacgaagttctcgcacacaacattctgtctcgcctgtcacctagagatgtcgcatccattggatccgtctgtaccaggatgcatgagcttaccaagaatgatcacctgaggaagatggtctgccagaacgcgtggggaagggatgccactgtcaagcttgagatgagcaccaagatggtaggatggggccgtcttgcgagagagctaactactcttgaggccgcctcgtggaggaagttcacggttggagggcgcgtcgagccttcccgatgcaacttcagtgcctgtgctgttggtaaccgcttggtccttttcggaggggagggtgtcaacatgcagcctatggacgacacctttgtgcttaacatggaggctgcaaggccggaatggcgccgcgtgaaggtttccgcctccccaccaggccggtgggggcacactctgtcgtggctgaacgggtcatggctggtggtatttgggggctgcggacagcaaggtttgctcaatgatgtcttcgtccttgaccttgacgctcagcagccaacgtggagggaggttgcaagcgagggtcctccactgccacggtcctggcacagctcatgcaccttggatggttcgaagctggtcgtctccggtggctgcaccgagtctggcgttctcctcagcgacaccttcctgcttgacctcaccaaggagaagcctgcgtggagggaaattcccacatcttggtcacccccatcccgcctcggccacaccatgtccgtctacggtacgactaaactgctcatgttcggtgggctggcgaagagcggctcgctccggctgcgctccagcgacgcctacacgatggacgtcggcgaagatagtccgcagtggaggcagctggcgacgaccggattcccaaacgtcggcccaccgccgaggctcgatcacgttgcggtgagcctgccctgtggacggatcatcatattcggtggctccatcgcgggactccactccccggcgcagctgttcctggtcgatccagcagaggagaagccgacgtggaggatcctgaacgttcccggcaaaccccccaagttcgcctgggggcacagcacctgcgtggttggcggcactagggtcctcgtcctcggaggccacaccggggaggagtggatactgaacgagctacatgagctctgcctggcaagcaggcccgacgacgacgacgatgaccgctactga

SEQ ID NO: 5121 - DNA, 447 bp, Zea mays
  Peptide Sequence Number=SeqID_48496
atggccaggggcgagccagccgagggggcatggacgggctggagccgcgccatgggcctcgctgcgcccgcgactggtgcgcgagccgagcttggccgcgacctggggaaagaagggcgcctagggagctcagctgcgtgctggccggtggggaggcccgcggcaggggcgagccgccgcgcaggggctcctagccgcgacgccgggcggggccgccggacttggccgcacaacggagggaaagggatccacgcgaggtctcgccgagaggaaacgaactgctcggccgggggacagagaggactactcgtcggggaaggagaacgacgtgacgcggggctgcagggagggtccgtcgagggggagagaggatggggaagggaagagaggggagaggactcaccgggaaccgccatgtgctgggacgacagcttctacgcgatttga

SEQ ID NO: 5122 - DNA, 1812 bp, Zea mays
  Peptide Sequence Number=SeqID_48497
atggttggtttacagatgatgatgatgctggttatgactatggtaatggttgcctttggtgcaatctatgctcaggaagtaaatggattggggcttactcaaatctcacaaccggatgttgtgaggaagattctcagtgtcctcccaatagacaaatatggacacattgtcactgtgctacatcaaatggatctttcagttaccacacctacacagatattgggaaagatcaattctcatgagatgtacatgcacattaatgacaaagatgagccatcttccaagagaaaggatttggctctcaaagcaaatcaagaaagaaaaggaaaagctaaaatacaaattgaggaagaatcctcaagtgatgatgaccttgatgctaacattgccttgatggtgaggaagaccaccaagatgttaaagaagctcaacagagaaggcatcaaatttgattcaagaaagaagaaattcttttccagcaaaagaaagcccatttctgagatggattgctacaactgtggagagcttggtcatcttgctcatcaatgtaacaagcccaagaagaacaagttcaagggcaagaaagaagatgacaacgatgatgagaataaggaaaagagattcttcaagaggaaggatgagaaggaaaagaggttccacaaaaagaaaaatagaaaggcatatattgttggtgactggctcactgacattgagtcttcaagtggatcttcttcaagtgaagaagagaatgatgaaaaagttgtcgccatcgccggggacttctcttcaccaccaccatcgccatcatcgacttctcacctatgcctcatggctagaggtgaacggaaggtacaaaatgatattgatattaccgatgatagtgatagtgatagtgatgaggaatttgcttcaccttcatatgatgaactagctgacttgcttaaagaatatactcaaatcattaggaagtcaaaagctaaatatgctaaggataaatgtgacaagttaaatgaagctaatagggagttgcaagatagactagtaaaaatcaagcaagactatactaagattaaatttgatcatgataatcttcttgttgaaaatgaacttttatcttgcaaaacacatgaggctattaaccttgttgttaagattgatgtagcaacctcatgtgatgatttgagtcaaggagagcaaactagtctacatgatgaattgaccgaaaaagttgaagtcttgactttagacaaccaaaaattgaagagatacttgactgatgcaactactagaggaaatgttgctattgagaacaatgatttcaacaatgagttggcagtggataatgaaaggcttaaaaatgaggtcaagaaacttaagagtgaaaatgaacatcttgcaacaagtgtgcaaaagttcaacaagggccaatacctccaaaatgagttgcttatgaacactgtcatgaaaaacaacaagagtggtattggatacaatgcttttgtgcaaaagaaagctactactcaatacaagccaaagcagactcacaagcctatcaaatgctttgagtgtagaaaagaaggtcactttgcccacaactgcaaagccaaaccaccaactcccttgactaagcactcaagaccatttgctttcaatgctcattatgttctaagaaaagttgcaaatggaaaggtcaaagttacattcctaggtccaccaaacaagagtagacctagacaaatttgggttgcaaagtccttgattgagagagtcactgatcctatgcaatatagggccctcagaactcaagcttga

SEQ ID NO: 5123 - DNA, 297 bp, Zea mays
  Peptide Sequence Number=SeqID_48498
atggcgaagggcgacgggcgcggaggagggccgcagggacttcgactggctgtccaagttcctggtggtctgcctcaacgctatccgggatgtggtggcgccgaggaaggcgacgacagcatccacggcgccgcggccaagggtgctccattgattagagatactttgatcagagatggtttgtttacaaatgatgatgaggaggatggttatgattatgctgttggtaatggtaaagaagaaggcgtcgaggcagatctccaggagttccaggacttcggcgagttcgaggattag

SEQ ID NO: 5124 - DNA, 1503 bp, Zea mays
  Peptide Sequence Number=SeqID_48499
atggattgctacaactgtggagagcttggtcatcttgctcatcaatgtaacaagcccaagaagaacaagttcaagggcaagaaagaagatgacatcaatgatgagaagaaggaaaatagattcttcaagaggaaggatgggaagcaaaagaggttccacaaaaagaaaaatggaaaggcatatattgttggtgactggctcactgacattgagtcttcaagtggatcttcttcaagtgaagaagagaatgatgaaaaagttgccaccatcgtcggggacttctcttcaccaccaccatcgccatcatcgacttctcacctatgcctcatggctagaggtgaacggaaggtacaaaatgatattgatattactgatgatagtgatagtgatagtgatgaggaatttgcttcaccttcatatgatgaactagctgacttgcttaaagaatatactcaaatcattaggaagtcaaaagctaaatgtgataagttgaagaatgaaaatgaatctttaaatgccaaatatgacatagttatgaaagctaatgctaaggataaatgtgacaagttaaatgaagctaatagggagttgcaagatagactagtaaaaatcaaggaagactatactaagattaaatttgatcatgataatattcttgttgaaaatgaacttttatcttgcaaaacacatgaggctattaaccctattgttaagattgatgtagcaacctcatgtgatgatttgagtcaaggagagcaaactagtctacatgatgaattgaccgaaaaagttgaagtcttgactttagacaaccaaaaattgaagagatacttgactgatgcaactactataggaaaagttgctattgagaacaatgatttcaacaatgagttggcagtggataatgaaagacttaaaaatgaggtcaagaaacttaagagtgaaaatgaacatcttgcaacaagtgtgcaaaagttcaacaagggccaatacctccaaaatgagttgcttatgaacactgtcatgaaaaacaacaagagtggtattggatacaatgcttttgtgcaaaagaaagctactactcaatacaagccaaagcagactcacaagcctatcaaatgctttgagtgtggaaaagaaggtcactttgcccacaactgcaaagccaaaccaccaactcccttgcctaagcactcaagaccatttgctttcaatgctcattatgttctaagaaaagttgcaaatggaaagattcacttctgcttgagaatcactcagattcactctattagagaatcaactcttggatttagagaatcatggaacagagctttgccaaacgagcccaacaagccaaacgccaccaaagatggcttttgcgtcatagcacttagtgccaagatggtggacaacgatggtgatggtgatggcaatggtcctgtttgtttgggcttttttaagcttcttgccaccaaaagctcctatggacgggtaaacgcctag

SEQ ID NO: 5125 - DNA, 522 bp, Zea mays
  Peptide Sequence Number=SeqID_48500
atgaagattgatgattggattaaggttaggcaatgtggaataagatactatctatctctcggagaccaaaggattgttgacaagtacttcataatccgtccaaaagctgagtttgagcatcctaggggcgcaagacctggcttcaccgtccgagttgatgtcccccacctgggccgtgtggatccagctccgcttggtgttggtatggatgtggcgccccggcttatggagcttcggtgtcctgatgtcacaacatctctggtcgagagtgcttcccaggagaccactgcatcccccctccctgagacacttgtcgccttgctctctgaggttccaacagtggagacagcacaatctggggtggcagtgcgaccagtgcgaccaggatcgacgaccaggcctactcctcgcctcccgacgcaagaaagtctcgacttcgcgtcaatcaccacctgctgtcaatcaccacctgctgaagctcctggttccccgcggcagagcctggcaggggatcatgcatga

SEQ ID NO: 5126 - DNA, 2187 bp, Zea mays
  Peptide Sequence Number=SeqID_48501
atgtcctttccgctcccgccccttccgcttccgtcccttccgctcccgtcccctgccctcccacctccggccgacgccccagcccctccaacccacagcctcacgccggtcatcctcccatggtcggcggccacccaacctgctaccccggcgtcggtttcctctcctctctccgcccagtctgtggctgatattcctggtggccgttcaaaggcgcagcgatggtgtgaacaggagtttccttcggctgcttcccggagtgatttacgtcgctcgtataaggaggcgctagtggatggaaggttcactgccagcggcgctgatgatggtgacggtggatgggtgaaggttgtgggacgtcgccgtcgaagtccctgctcccctcttcccctgcgcccccccagacccgttcctgctgatttacgtgggagatgcttcaactgtttctcgccgtcccaccatgcggctgagtgtggcagtttggtacggtgttttcattgccgcctgcctgggcatcgggtgcgcgcgtgcccacgccggaagaggactctgcatcacccagcgaaggtgttggtgtggcgtctagttcccaggaaggtcgagcgtgtggcgtccagttcccaggaaggtcgagcgaaggtgttggtgtggcgtccaattcccaggaaggtcgtcccggaggaagtttctctctgcgatatggaaggtgtttcgcgggtcggcgatgatggtgatggtatgaaaaagacgaagcgcactcgacgtggacagaggcgccgtagaatggaccgggaggatttaggtgcacctgctcggggctcatcgttggcttcctccttgccttcggtggtccccccccctcgttcgtatattcttaagcgttcaaggttgattgaccaggcggaggaggattttcatcgtgctctgttcgtcaatgttcttggccaggagggttctgactgcgccgttgtgattttggaggcgctcgcctcgaagtatggccttgaggctgatgcgctccaaatccgacgtgctgcgtccaactcgtacctggttttcttcccctccgtggatcatgttgttcgtgccttggctggtggaaattccatttccataccccccctccggctgcatcttaggaggtggtcacgtcaggcgtcggcctctggtggaggtgccctccctgtacttatggatgttgaacttggcggaattccggcacacctctgggggattgatacggcagagcatctgctcggtggacactgcattgttcagggattacatccggatgctgttgatgggacggatttgtcagttctgaaactgaaggcttggggtttctctatggattgcttgccttctcgctgcgatctccacgttgaagagccgacgtctattggagaagatggatcctgcttccctcgcacattgatttactccatttcggtgaaagtgactactccggttgttttgccggttgaggagcagcctctgttctcctccccagatgatgatgatgatcgggatagcaagcatcagcggcagaggcagcatgttacggatcatcagttctcttcggtccggatctctgttcatgcacggttgggaccacgtattactcctggtgggggaggtggaacagttgatgccgctcctctcccgaattcctcggttgatgagttgcaggcgcctgttccctccttccctggctgtcccccgtctcctgtgttaggggcgccatttattgataataccggactccttcctgcttcagttggggtttctgatgtttccaccggtggaaaggctgctgacataacattggagcctttttctgggaatgcccttgttcctttggtttcatcgtttaatttggaggagcaatctgcgtcaagaattctggtttcttcttgggactataagatcagggccaaacctccttgcttcaaggtttatgtccgtaaaaaaatcccggttcagatagcactgtctgaggagattggaacttctactcctttgcaaaaatttaaagatggaattacaaaacagatcaatggaatcctaccggcacctattcaaccagtcaaacggaagagaaagctgattcctagcaatttcaacctaaggcgtagcaggagggtggccaagataccacctgagttaggctctccctctgctgctaag

SEQ ID NO: 5127 - DNA, 759 bp, Zea mays
  Peptide Sequence Number=SeqID_48502
atgagggtgttgaggatccaagaaaggaccacactgtctatccggtaccaagaaggcacctgtgaacaaccgacgttgatgaggacgtggtcgttgtgggcatatcgttgcaagggtgagaaggataaggtcgcgctagcgagcgtaagcggagaaggctgggtcgaggacgattggaaccaacgacctcatgttttgaacatcggtcgcttgggcgtggaggatagtgacgacagaggcttcgtacgacgagggagctacatcgtcgtggtcgtaggtggtgaggggagcagccacaagctgccgctttgcctccgcgagctgagtacgatgcttaagcgacgctttaataaccatggcagcagcacattcttgctcccaaacaagatcagcagcccgttcgtgctctcgagcaacagcggtggtggacttggcggtggcgagagcagtatccagtgcagagtgtgcaacaatcagctcgtcaaggggcacgggcgggaagaacaccatcagcactgggcatgggccaatggtgggccggacagggaggcactagtcgtagagctgaccagagggggggggacgatagtggtgtcatcaccagtagcgcctgcccgagcacgcggctccttcgcctgcagcactcttgttcacgacagtggcacctgcgcccgcggtgatgatgaagaaaggagcaggggagggaagcatgccatggggaagggaggctcgctggtcatggaaaaggccccatactaa

SEQ ID NO: 5128 - DNA, 381 bp, Zea mays
  Peptide Sequence Number=SeqID_48503
atgaatgggttgaagaagaatctgatggtgataactaataacatttggggtgctgtggatgaagctctaggtgcaactcaaggtctccgggccgaaatttgcctaggactgctgctgctgcaggtgctggttcctcctctgactcagacacaaacctatgttagaaccagaaaacgttccagaaatgcagcagctacagctcaggacatacatgaagaacatgacaattctcctgctgaagatgaacaagaacaacaagaacaagagacagtaagacaaatgaatgatgatgaagatgaaggcgaacaagaatcaggtggaaggggagctgcagttggatacttggattggatgaacaaatatcttctctcaatttcttaa

SEQ ID NO: 5129 - DNA, 1188 bp, Zea mays
  Peptide Sequence Number=SeqID_48504
atggggcaagggcgtccactcggattacccaccagcagctcaccggagacaccatgttcggcgccctccgagggcaacatgaggctcgggggctgctctcgcaaacccggctccggccaaaccgttgacagcgtcaacataccagcccgagaacttgggacccgaccgtgcacccgggctacggccagctcgcatgagggaacaaccagaccagccgaagcattgcgtgaggcattaagacctcggaggagtcaaaccactcctccgaggcctcgggggctacacccggcgggtgcgctcgcgcgcacccaccagaacaaaacgcaaccgagaaaggctggtccccttgcaaaaaagtgcgacaaaagcctccaagcgagtgttaacactcccttcgaggctcgggggctactgtcggggaccataattaggggtaccctcaaggctcctaattctcagctgagccgaagtgaccgcagtcacttcgtcgctccactgatcggcctgacagaaggacagcgccgcctgtgccgctccgactgctgtgccactcaacagagtgaggctgacaggcagtcaggcccgacctcaggcaccataggaaactccgctccgcccgacccagggctcggacttgggctcagccccggaagacagcgaactccgctccgcccgacccagggctcggacttgggctcagccccggaagacggcgaactccgctccgcccaacccagggctcggacttgggctcagccccggaagacggcgaactccgctccgcccgacccagggctcagacttgggctcagccccggaagatggcgaactccgatccgcccgaccccagggctcggactcagccctggcttcagccgacggtctccgcctcgcccgaccctagggctcggactcagccctagcttcagccgacggtctccgcctcgcccgacccaggggctcggactcgacctcggccacggaagacagactcgacctcaacctcggaggagcctccacatcgcccaacctagggcgcggaccgaccactcttgtaatcgcttgcacgcgacacctggattattgccttctgttaagacgaagattaacgttgaaccagagatatggtcgacgaagcgaaaacatggagacgaagctctcgccaagccggtcacgacgacgttttag

SEQ ID NO: 5130 - DNA, 330 bp, Zea mays
  Peptide Sequence Number=SeqID_48505
atgcctgtgagaggccagattaacagaactattgtcatcttgcgcgagaacccggttaacgtcattgttcacccttgttggatccccttgcaactgagagcaagttccaacaacggcatcgcagcagctgagactccgagggggtggccaggtgcgggtaaagaatggggatccggtgggatcagcggccaaggcgagtggcgactagtgggggtagccccagagatggtccctactctaccaaccaagccatcaaccaaggagacgtcaaaaacaatcaagacgatgtgcattggtgatgagcgggtgcagaagtcaatgccacaatag

SEQ ID NO: 5131 - DNA, 663 bp, Zea mays
  Peptide Sequence Number=SeqID_48506
atgaacgcgctctctcgcgaagggtgccgacactttgaggtcttcgaccaagctgatgaagattttgagcgagatatctataaggttgaggaccccatagtgaaggaatccaccggagccatctacgaccggatgtggggtccgcacgatcgcgaggtggtcagggagcgggccgagacggcgagggctcaggttcaagattttgggcctgcgcacgcaaccgccactactaattttttggcggcttcgaccgtggatggtggtaataaatatgatgggtctgcatctgagttttctgattttgctgactctgggagctcggttgagtggactgaggagtcgtcggaggaagacttggactactttgtggccttggatgtggcagcggcggaggcttcaccacacgtcgcggacacagaagatgtgcctggtccaagtactgggcgcaggcggcggagggcggttgcgaagcgtagggtgagcggggcggagggtggtcgacttcgtgtgagtcgggctggtcggcaggaactgttgtctttgcctgccgccgcgagtacaggtgaaggggaattgcgaagtctttttgcgggtgaggagcttaggataatattatttaactatagggagatgagaattattccgaaggttgagccgatgtag

SEQ ID NO: 5132 - DNA, 78 bp, Zea mays
  Peptide Sequence Number=SeqID_48507
atgggaactaatgggcatctcgacctcgacacaggaggttccaagccgaccctaaggaggttcaccttagggccgtga

SEQ ID NO: 5133 - DNA, 378 bp, Zea mays
  Peptide Sequence Number=SeqID_48508
atgggtcggcgcgagacggagcgcgaaggggggaagaagccggagggagacaggcgtaaaaggggaaacccgcggccttcgtgtttgtctcgcgcccaggtcgggtgcgcttgcagtagggggttacaagcgtccacgcgggagggagcgagcggcttacgcgagcgctatcccgtccttccccgcgcggccaaccctctgcgtaaggagaggatccaggtgtacaatgggaggtgtagcaatgtgctaacgtctaagtacatgccatcgtggcagccggagaggttttggcacccggttcgtgtggtgtcgtggccgtcggaggagcgctggagcctggcggaaggacagctgtcagggctgtcgagtccttgctga

SEQ ID NO: 5134 - DNA, 189 bp, Zea mays
  Peptide Sequence Number=SeqID_48509
atgaagaatgattttgaagcaagatacgccacctacatagcaaatgcaatgcttaaatttcaagacagggaagctataatgcccccctacaactttaaagcatttaggttctataagtttaaaggtggaaagtacgacaagaccaaaaaatgtgttccactagacatccatcatcactggccggagtaa

SEQ ID NO: 5135 - DNA, 135 bp, Zea mays
  Peptide Sequence Number=SeqID_48510
atggggatgccgaaggtgctgctgctgctcgtcctcttcatccaaatcatcaacgtgctcaccatctctgcgtctgcgaggccgttcaaggcggaagccgggacgatgatccagatggctttttttctgcaataa

SEQ ID NO: 5136 - DNA, 363 bp, Zea mays
  Peptide Sequence Number=SeqID_48511
atggccgataaaggcaaaggcaagggtatcgtcatttgcgatccccgcatgtcagatatatcacaaaaggagattgctcgaaaggcgtcggacgagaaggctaaaaagtccgaagacactggggggcaggcacagttaatgaaccaaacacatcagcctagcccgaacatccagtgcgtgtgggaattggatcccgactgcttcttgtcgccgaacatgtccaccaccatctggatcgtcgtcgtccccgcttccgcttccgccttgaacggcctcgcagacgcagagacggttcctgttggagagcttggccttattggatgtgttgtcgcatgccggggccgctgtgtgctcattatatag

SEQ ID NO: 5137 - DNA, 498 bp, Zea mays
  Peptide Sequence Number=SeqID_48512
atggttgactgcgctgactgcaacgcagtcagtagagcagaagtcaaaagtcagtctgcaaagtcagaacgcaccggactgtccggtgtgccaccagactgtccggtgccgcaagaggacagaagacttcaacggtcaatagctccaaaccccaatggtcggctgacgtggcactcaccggacagtgaacagtgcagtgtccggtgcaccaccagactgtctggatatgggcttattagagacatgtattctcgtttgaatctgatcatcaatgagctcaattctattggcattaatgatctaggtaatgcggacattgtgagaaagattatccgcctactaccacaacaaagatacgggagcatcatcactattcttcacaacatggaggacttgaatacaatgaccccgaccattgtgattgggaaaattgcggcatttgagatgtcgcgaaaaaatgggtcgacaagaggagccaacttcttcaagaccatatga

SEQ ID NO: 5138 - DNA, 363 bp, Zea mays
  Peptide Sequence Number=SeqID_48513
atgtcgccaggtcgcggaccgtccggcccaaagctgcggactgtccggtgtgacgcagggaagacaccgctcctgcgcccaggtcgcggaccgtccggcccaaagacgcggaccgtacacgatgccgcagagggcaccgccaggcggtacagcacctattgcgttgtccagatcggcgccgcagagggcaccgctggggacgaggttgcagatctacaaaatcaggcttacatggccgattctaaagatctcaacggtgcttctccaaacagcaacacaagggtgagttacccccgacgacagaaggcaagggtggccttccggatttgctctcaacggcccctagctgccttggggctataa

SEQ ID NO: 5139 - DNA, 531 bp, Zea mays
  Peptide Sequence Number=SeqID_48514
atggacggtacctcttcatcgacgggtggtgacgaagtcgcgtcggggacggactacactgttatctcaggaaacgacgatcgtcttcgtattagacgcgaggtcaacgcccgacgtgtcccccgttggggcgccggcgccgtcgactcgctcgacaaccgacgaggtgctgcctcctgcttggccatgcctgccccgcctcctcctccgttggcggggaaggtgacgggacagacccggatgttgctcttccgccacgtggggaagacgtcatcggttccgccgccagcggtcgggctgacggccgccattgtcgttgtcgcgcggcggaggaaggagtatcatgtcgtagctgccgtcgagggacatgaactcaagactcccgaaacggagcatcgtcccgggctggagaggttgctggagactacccatctggagcttgacgggaagctgttcgtcaacatgcagcaggcccctacctggcgcgccaactgtcggcgtttcgaccccggggggtccctggaccgatga

SEQ ID NO: 5140 - DNA, 1401 bp, Zea mays
  Peptide Sequence Number=SeqID_48515
atggcggcgccttactacggaggtcctccggcggcgccggcccccgtggcggtggtgtccccgcagttctgtgcgccgtacgtggtgcccctgacggtgaccaagaaggccatcagcctctccgacggcgacttcaccgtcaccgacgccaacggcgccaccgtgctgcaggtcaagggcgccgtcttcagtatccgccaccgccgcgtcctcctcgacgccgccggccagcccatcctcaccatgctggagaaggtattcagcatgcacaacagatgggaggtgttcagaggggacagctcgaacgagagcgacctgctcttcaccgcgaagaaatcctcgatattccagctgaagacggagatggacatcttcctggcctccaacaccgcgcagcaggtgtgcgacttcaagatcaagggcagctacttcgagaggtcgtgcgccttctacctcggcaactccagcagcatgatcgcccagatgaaccgccagtttaccgtcaccaatgtgctgcttggaagggacacgtttggcgtcactgtgttcccgcacgttgactacgtgttcgtcgctgctcttgttgtgatactggatgagattcatagggaacggttattcttgtcaattatatactttccatttatcggggatcttgcgtcaggtgcaggacaggcacaagagaatagcggcatcgaaatacattgtgatgatgaagaggagggatctgagaatgcagaacataacaacaacttggaaagcccaaaggaagttgatgcaagtgttgaatcacgagaagcaaatggtaaatcagaagatctgaaagatgtaactaacttggacaaactgcaagagaagactggtagcagcagctctacagaagcaatcaaagccttagagggattgatggaaacaaacagggactttgaagaactaaaatatttgaatggaagctcagaagaattggaagaagagaataatggcaacatggaaaagctggtagagctcttcttggataagggattgttggatgaactgaagcccataaaagttgagtcccagcggcgggtacgtgcagcacttagcatcattgacaaaatgatgatctatcgggtagtgaagggtggtaatggtgcaaatgatattcatggaaacgatggagcacaacttacttctattgaagaggaaggaaggactgcagaagtgagtgatgacggagatccagctgaggttgagtcttgtgttgcagagaaggtggaacttggacatgagacaactcatgattctacatgtactgctttggatggaggcaatgatgggtcctactttccttggagggaggagcttgagagtgaaagggaaatgtgcccttgggccatttctaagtattttggtgattga

SEQ ID NO: 5141 - DNA, 3303 bp, Zea mays
  Peptide Sequence Number=SeqID_48516
atgatgtcagcgtgtccacctcagattggcacaagcctatcccgaatgcagaagtggctcacagaacctccaatcttgtcgctgatcagtggacgccgtcgttgtcggttgttgtcgttgccgtgccgcgagaatttttgcgtgctccgcgcaccaactgccatctatgttctcctgttgactttccctccgcctctcgcgttcctgcagctgcagtccttgattctggccaggacaggagcagcggcggcgatgggcagtgtcgaggagaggctgctgccaccgccgccggccaggagcgcagatgctggcgccggcggcgcgaagagtggcaagtgggagaagacgtacctggacgtgctgggcgtgtgctgctccgcggaggtcgcgctcgtggagcggctcctgaagccgatcgacggcgtgagggcggtcaccgtcgtcgtcccctcccggaccgtgatcgtcgagcacgacctcgccgccgtctcccagtcccacatcgtgaaggctctcaacaaggcggggctggaggcgtccgtccgcgcgtacggcagcagcggggtcgtcgctcgctggccgagcccgtacaccgtcgccagcggagccctgctgctggcgtccctgttcgcgccgctgctaccttccctgcgctggctggccctggcggcggcctgcgccggcgcgccgccgatggtgctcagggcgctggccgcggggctcgccctggacatcaacgcgctgatgctcgtggccgtggccggcgccgcggcgctcggcgactacgcggaggccggcgccatcgtgttcctcttcaccaccgcggagtggctggagacgctggcgtgcaccaaggccagcgccgggatgtcgtcgctcatgagcatggtcccgcccaccgtcgtgctcgcgcagacaggggaggtcgtcggcgtgcgcgacgtcggggtgggcgccgtcgtcgctgtccgggccggggaggtcgtgcccgtggacggcgtggtcgtcgacgggcagagcgaggtcgacgagagcagcctcaccggcgagtccttccccgtgcccaaacagccgcaggcggaggtctgggccggcaccatgaacctggacggctacatagccgtgaggacgacagctctggccgacaactcgacagtggccaggatgcagcggcttgtggaggcggcgcagaacagcaggtccaagacacagcggctggtcgattcatgcgccaagtactacaccccagccgtggttgctgttgcagctggcgtggctcttgtcccgctgctgctggggccacggggagcgcaggacccgaaacggtggttccagctagcgctggtactgctggtgagcgcgtgcccgtgcgcgctggtgctgtcgacgccggtggctacgttctgcgcgctgctgcgggcggcgaggatgggggttctcatcaagggcggggacgttctggagtcgctgggcgagatcagggtcgcggcgttcgacaagacgggaaccatcactaagggcgagttcagcgtccatgggttccatgtggttggggacaaggttggaatgagccagcttctttattgggtgtcgagcattgagagcaagtcaagccacccaatggcaaccgcactcgtcgagtacgctcagtccaaatccatccaacccgagccgacaagcgtcactgacttccgtatctaccctggagagggcatatccggagcgataaacggaaggcaaatcttcattgggaacacaaggatcatggcaaggtcctcctgctacgcagcaggagcaggtccggagatggaaggccagcaaggtgcgtcgatcgggcatgtgatcgtcgacggcgaccacgtggcggcgttttcgctctcggacgactgtaggaccggcgcggcagaggcgatccgtgagctgagatcgatgggcatcaggtcggtcatgctgacaggggacagcaaagcggcggcgtcgcgggcgcagcggcagctcggcggcgccctggaggaggtccactcggagctcctcccggcggacaaggtcgcgctggtcggggacctcaaggcgagggccgggccgacgctgatggtcggggacggcatgaacgacgcgccggcgctggccacggcggacgtgggcgtcgccatgggcctgtcgggctcggcggccgccatggagacgagccacgccacgctcatgtccagcgacctcctccgggtgcccgcggccgtccggctcgggcggcgcgcccgcgcaaccgtcgccgccaacgtgatcgcctccgtgggcgccaaggccgccgtcctcgctctggccgccgcgtggcgccccgcgctgtgggtggccgtgctcgccgacgtcggcacgtgcctgctcgtcgtgctgcacagcatgctgctgctctgggacccagctggcgcgggctggcggaggaggggtgggggtggggaccccgaggcgtgccgcgcgacggcgcggtcgctggccatgaggtctcagctcgccgaagcgtccaacggcgcggccggaaccgctcagggacgacgaccaggcggtgggaccaaagcaggctgccattgctgtcgggagacaagcgagccgtctgagcaggaccacacggcggtggtggtcgacataccggcaccatccgctgagcgtcctggtgttgtggcgccgaccgccgccaccggatgttgcagcagctccgcccgcgaagcttgtgctactccaaccaccgtgactactgtgaactctgcgccacgaggttgctgtggcggcattggcgaaggagacacccgcgagaatgcaaggacaagctgctgcaccgatgcccgtgactctcctaagaaggcagggcaacaatgcaacgcaagggcgccgatcactcaacaagaaccagtggcggtgctctctggtcaggcgcggacggggcagcggaggatcgccggcggcgcctggatctcgctcccgggagggaccccgtcgggaacctttggggccgagtggttcggcaatcttgctaggcctgtgctcgtggaccagattgaggggctctcaatcggtcttgtactggaggcgtcaacctgtcaagaacagatgtttggggtgccccccaggtggggtactgtggcatcccaaatggatatgatggtatgccccacatttgatttgggacatatggtggaggtacgtggtcaccgtggcttcttggcaatgtcggatcatccgctcgaatgctctggaccgtctggcgatgttacaaaccgtccgcgcctagacaccgtgaaagtcgcctag

SEQ ID NO: 5142 - DNA, 738 bp, Zea mays
  Peptide Sequence Number=SeqID_48517
atgtcaccgtctacagcgacagctcgacctcatctgcgcgaccaaaggcaccatggactgggttcagaagctcaagtgggacggcctcaacagtttcctgagctctcccagaacgcccatctactgcaacaagtaggggcagtccggcacccaggccttcgtcaagtcctacaagaacctcaacttctactggatactcgaagccgaacacatgatctccctaatggacgcccatttcctccactattcaactttaagcaggaaattgacgatgatgaaaaaattacagtgattgactttccgcagatggtgtctgtttctcaccgtaatgcccaaatgttttttgaccgagacattgaatgcatctacaagttctttaacaaaagattcaatctgaggtcagtgaaaaatgaagaacaagctggatttgaaaatgatgatgaaggaaacagcagaccttcctttttgtccgtggaaaagggtgctggttccttggacaaggaactagctgccagtggatttaccaggaaagagcaagtggatatggagaagtacaccgaggaagttgttgaagggcatgattccagttcagatgatgaggttggtgatgttgtgcctttggtttccttgaagatagaccaagacagttccgatgagcctgattgtgatcttacccaagtgattcagaggcgcctggaactttttctgaagaggttagttgtcttcccatcagaatga

SEQ ID NO: 5143 - DNA, 174 bp, Zea mays
  Peptide Sequence Number=SeqID_48518
atggagagtcatgatctccgggcagaatgggaatcacggcttgtgggtggctatgaggtcgatggttttgattatgactatggtactggttgtcagcattgcaaccactgctcaggcgaagatgaagctgtggaaggagacttccaggagttccaagactacgacgagttctag

SEQ ID NO: 5144 - DNA, 2826 bp, Zea mays
  Peptide Sequence Number=SeqID_48519
atggaggagcagccggtggctaaaattttggctggctccgcgggcgcacgtcgtttagcgtttccgctcgccttgggaccttgcccctggccctccgagatgccgggaccggccgtggaggcagcggccaggggcggcggctgctgcgggaagacggccggcaagtgggagaagacgtacctggatgtcctgggcatctgctgcaccgctgaggtggcgctcgttgagcggctcctggcgcccatcaacggcgtgagggcggtcaccgtcgtcgtcccctcccggaccgtcatcgtcgaccacgacacggccgccgtctcccagttccacatcgtgaaggttctgaacaaggcgggcctcgaggcctccgtccgagcctatggcagcagcgccggcgcccccgggcggtggcccagcccgttcatcgtggcctgcggcgtgctgctcgcggcgtccctgttcgcgccgctcctccctccgctgcggtggctggcggtggcggcggcctgcgtggggtcccagcccatgctgctgagggcgttcgcggcggccggcaagctcaccctggacatcaacatcctgatgctcatcgcggtggccggggccgtggcgctcgggagctacacggaggcgggcgccatcgtgttcctcttcaccgtggccgagtggctggagacgctggcgtgcaccaaggccagcgccgggatgctgtccctgatgtcctcggtgcccaagaccgtggtgctcgccgagacggggcaggtcgtcggcatgggtgacgtggcggtcggcacggtcgtcgcggtcagggccggggacgtggtccccgtggacggtgttgtggtcggcgggcagagcgaggtcgacgagagcagcctcaccggcgagtccttccccgtgccgaagcaggcgcagtccgaggtctgggccggcaccatcaacttggatggttacatctccgtgcggacgacggccctcgccgagaactcgacggtggcgaagatggagaggctggtggaggaggcccagaacagccggtccaggacgcagcggctcatcgactcgtgcgccaagcactacacccctggttggtacgacgaccgcgccgtggtcgtcctcgccgccggggtggtcctcgtgcccgtcctgctgggagctcccgacctggagcactggttccggctgtccctggtgctgctggtgagcgcgtgcccgtgcgcgctggtgctgtccacgcccgtcgccaccttctgcgcgctcctgcgggcggccaggatggggctcctcgtcaagggaggcaacgttcttgagtcgctgggcgaggtcagggtcgccgcgttcgacaagaccgggaccatcaccagaggcgagttcagcatcaaggacttccttgtggtgagggacaaggttcaaatgagccagctactttactgggtatctagcatcgagagcaaatcaagccacccaatggctgctgcacttgtcgagtatgcccagtccaaatctatacagccgaagccggaggacgtgactgagacttgcatctaccatggcgagggcatctatggggccatcaatggaaaacacatctacatcggaaacgaaaggatcatggcaaggaccggggcggccgaggcgatcttgcagctgcgatcaatggggatcaagtcagtgatgctcaccggggacagcgaagcggcggccaagcacgcgcaggagcagctcggcggcgtcctggaggagctccactcggggctcctcccggaggacaaggtccggctcatccgggggctccaggcgcggcacggggcgacgctgatggtcggcgacggcatgaacgacgcgccggcgctcgccgcggcggacgtgggcgtgtccatgggcctgtccgggtcggcggccgccatcgagacgagccacgccacgctcatgtccggcgacgtcctgcgggtgcccaaggccgtcaggctcgggcgccgcacccgccggaccatcgccgtcaacgtggcctcctccgtcggcgccaaggccgccgtcctggcgctcgccgtcgcgtggcgccccgtgctgtgggtggccgtgctcgccgacgtcggcacgtgcctgctcgtcgtgctgcacagcatgctgctgctgagggacgcggcccgcgcgcggcggaggtgcggcggggcgtccaaggcgtgctgtgctacggcgtgcaaggcgcccaagacagcgtgctgcgctacggcgtccaaggcgtgtggcgcgacgacggtgaagcctgtggccacgaggccccagcccgcgggcgcagggaagaaggccgataggccaggaggtgacaagcatggtaatggtaaagacgactgccatcgttgctgccacaagcagagcaagctgcccgaggacgccgtcgtgatcgccataccggtacgagccgtggagcaccggaaggacgcggccgctcacgagaaggcggaaggcaacgccgccgggggatgctgcggtggcgctcccgcttcggccgcgtgctgcgcggaagcacacggtggcgaggacgaggtgtgcattgtcatcagcgcgaggtcgccctgctgcagcacggcgaggagtcggtctgcttctcccaaggacgccatgtgctgcggctccggtggtaaagacggcggcgccatctcagcccttgagcacgcgggtctgcgccccacgctcgcggggcttgagcacaccaacaagagcaccacatggaactggagcacgcccaacacctcgtggctcgactccttgccaaagaatactgcgacatggggctttactgctagcgcgagggctggtgagagg

SEQ ID NO: 5145 - DNA, 405 bp, Zea mays
  Peptide Sequence Number=SeqID_48520
atggcatccccggcggcgttcggcccccaccaccaccgctcggccctccccggcgcggcggcgcccgtccccggcctccctccccggcgcggcggcgcccatcctcagccctccccgcggcggcgttcggcgcccgtccccggcgcggcggcgcccgtccccgcccggcctccctccccggcggcgcgcggcccccgcccggcccccggcggcgctcggccccgccccctgtcccgccccggcccccggctcggccgcccctggccgattcaaccgtcccggccccggctcggccgcccctggccggttcaaccgccccggccccggctcggccgcccgttcccccgtcccggcctcgcccgaccgtatctccgctcgcccgcgctcgcggtgattatttgttaa

SEQ ID NO: 5146 - DNA, 699 bp, Zea mays
  Peptide Sequence Number=SeqID_48521
atggcgcctcctgttgacgtggtcggtctgtgccctaggttgggcgaggtggaggctcctccgaggtcgaggtcaagtctgtcttccaaggtcgaggttgagtccgagcccccgggtcggacaaggcggagatcgtcggctgaggccagggctgagtccgagccctggggtcgggcgaagcggagttcgtcgtccttcggggctgagcccgagtccgagccctggggtcgggcggagtggagttcgttgtcttccggggccgagcccgagtccgagccctggggttgggcggagcggagttcgtcgtcttccgggaccgagcccgagtccgagccctggggtcgggcgaagcggagttcgtcgtcttccggggctgagcccgagtccgagccctggggtcgggaggagcggagttcgtcgtcttctggggctgagcccgagtccgagccctggggtcgggcggagcggagttcgtcgtcttctggggccgagcccgagtccgagccctggggttgggcggagcggagtttcccatggcgcctagggccgaactcggctgctgtcagcctcactttctcgagtggctcagcagtcggagcggcgcaggtggcgctgtcctcttgtcagaccggtcagtggagcggcgaagtgactgcggtcacttcggctctgtcgactggagggcgtgcgtcaggataa

SEQ ID NO: 5147 - DNA, 462 bp, Zea mays
  Peptide Sequence Number=SeqID_48522
atgtcttcgcgttcccttatgtgttgcgtctttccaccttccgagcccccgaatgggggacgcccgcaatccttccgccttgtcgtcggagggacgcaacttcgaggaagtcggtacctttcagccatcgttcggcttcaaggattttcatcatgcagcccggctgcatcccctcgccggtggtcacccaagacagtgaccaccagcccctgggtggggagaagcaagccgggctgcgatcttggtcccgccctcagcttcaaggatgttcatcatccttgctggggcggaggccgggctgagccggagctctacctcccgcgcaggttcatgggtcagcctctccttcagcattcaagggagagggcgctcactggccctgcgagaggggcgaacttcgacaacgcggggctggtcgacgaattgtttgtgcgggcgagagttgcttttcacggaaggtga

SEQ ID NO: 5148 - DNA, 1395 bp, Zea mays
  Peptide Sequence Number=SeqID_48523
atggactgcagctctgacgagtcgtcagagctaagcgagacagatatcgacgactacgccgacaagtcgtactcggacctcaagtccggcaagttcgtggcgaggctgggcagcgacaggttcaggtgcccgttctgtccggggaagaagaagcaggactaccgctacagcgagctgctccagcacgccgtcggggtgggcgcatccaaccgtgccgcgaaggtgaaggcgaaccaccaggccctggcgaaacttctcaaggaggaccacgccgacgcggcggccacactgccagcatggcaggccatcgcgctaagcaacgcgccgaagccggcgcaggaccaggaagcgttcgtttggccctggacgggcgtcctcgcgaacgtcccggccggacaagcccaggagggtggagctacactgatggagcagctagctgagttcaaacccgtgcagatcactgccgtgtgcggtgccgatgggtatgccggctacgtcgttgttctgttcaccaaggattggatcgggttcaagaacgccttggcattccagaactgtttcaagtcacggcgcttggaaatgaggaatatgcagtctgctgtccgtgagcatacacggagggtttttcaggagactgaagaactcagaaatcagctggttgagaaagagagcaacatccagaggaggtccagggaactaaatgaactagtcgctcaaactgacatggaaagaagaaaactggaggaagagaggaaaaagaatgctgaccaaaatgattccctcaacatggctagaattgagcaacagagagctgacgaacgggcgctacagcttcttgagaaacataagaaagagaaggaggacgctctcaacagaatcctgcagctagagaggcaggtggacgagaagcagaagctggagctggatatcgagcagcttaaaggcaaactggaggtgggtttgacagatatgttaggtcctcgtagcaacattgggatcaagaggatgggtgagctggacgagaagcccttcgttctgtcctgcaagcagaggtacggacaagacgccgaaatgaaagccgctgaactcgtctccctgtggcaagagcatctgaaggaccctaattggcatcctttcaagatagtgaccacaggctcaactaaagagcaaatcatcgatgacaaggatgagaagctggcgggcttgaagaagcagctcggcgagaaggtctacgaggccgtggctaccgcgctgctagagatcaacgagtacaacgctagcggcagctacgtggtgtccgagctctggaacaacagggagaaccgcaaggccagcgtaacggaagccatacagcacgtcctgaagcaatggaaggcgcagaggcgtcgaagatga

SEQ ID NO: 5149 - DNA, 975 bp, Zea mays
  Peptide Sequence Number=SeqID_48524
atggagggatttatggcgtatgcctccctggtcacctgcgagggggcgatgaacgcgctctcccgcgaagggtgccggcacttcgaggtcttcgaccaagccgatgaagattttgagcgagatatctttaaggttgaggaccccgtggtgaaggaatccgccggagccctctacgaccggatgtggggtctgcatggtcgcgaggtggtcagggagcgggccgagacggcgagggcgcaggcggcgcgtggcgagagggtggacgacttcggggcgttgaacagcatgttgtctgacccggagccgaccccggggaccgcgggaaacgcgccgggtgcccccgcatccgctgcggccggcgaagacctacccccggaggtcgccgaaggcgcgcctgatgccctcgcagccgctgcgccgagtgctgaagatcctgcagcggtggcggcagaagcagcagcggaaacaacggcggaggctcccgcaacgtcagggtcgtcgcaggttcaagattttgggcctgcgcacacaaccgctactactaaatttttggcggcttcgaccgcggaagatggtaatgaatgtggtggatctgcatctgagtgttttgattgtgctgactctgggagctcggttgagtggactgaggagtcgtcggaggaggacttggactattttgcggccttggatgtggctgcggtggaggcttcgccgtgcgtcgcggacgcaggagatgcgccaggtcctagtaccgggcgacgacgacgaagggcgattgcgaaacatagagttagtggggcggagggggctcggcttcgtgtgagtggggctggccggcaggaactgttgtctttgccggccgccgtgaatacaggtgaaggggaactgcgaagtctttttgcgggtgaagagcttaggataatgttatttaattatagggagatgggaattattcctaaggttgagccgatgtag

SEQ ID NO: 5150 - DNA, 309 bp, Zea mays
  Peptide Sequence Number=SeqID_48525
atggccttgctagaccctcccaagtgcttccagtccgaggtggcacccaacttggtgcgcaacctgctcggatggggtgcgtcggcgttcaccggaaggatccgtgtcggcgcctctccccttggcgatctcgccgccggggagttcgtgctcttcatctccaacctcccctgcgggttggcgctgctgatctcgtctttcttcgtgctgctgctagaggagctcggcctccaacctcagcacttcacacccgcttcatccttcaggcgaccatcttcgcctacctctgcgagatgttcgtgggggtga

SEQ ID NO: 5151 - DNA, 522 bp, Zea mays
  Peptide Sequence Number=SeqID_48526
atggccttgctagaccctcccgagtgcttccagtccgaggtggcacccaacttggtgcacaacctgctcggatggggtgcaccgacgttcgccggaaggatccgtgtcagcgcctctcccctcggcgatctcgccgctggggagttcgtgctcttcgtctccaacctcccctgcgggtgggcgctaccgatctcgtctttctttgtgctgctgctggaggagtttggcctccaacctcagcacttcacgccccgcttcatccttcaggagaccatcttcgcctacctctgcaaaatgatctgcaggatttggcctaggaagctaagccatgtgcccagaccgcctgaatcacaattccagatactaggacacccatcacagagtggtggagcgtgcaggcttacggtacagaaccaggctaagcgtctacacggctccggaccaccccaggggacgtgcgtccattctctagaatcggaccccaagttcccggacccacagggctatagttctagatactag

SEQ ID NO: 5152 - DNA, 96 bp, Zea mays
  Peptide Sequence Number=SeqID_48527
atgacgtcactgctccggaatatattaaagaattctggcagctcgccaagtgtgtacgtgagcatatggtttccggcccagaattttaattcctaa

SEQ ID NO: 5153 - DNA, 576 bp, Zea mays
  Peptide Sequence Number=SeqID_48528
atgaggaagaggtacctcaagacgatggcatggatcaagggggagcgcatgaacaagaagacaaggaataagaagtaccacaggcacctccagctccaatctatgccactgtacaaagaggccatcagaggacgcgcagcccagaagccttacgtcaggctccgcccgttggcttatgtcacgggtagtcggccacgcggcagcatcaagtctccgcctgagcgaggagcggaagcgtacgcgaatcccggggaccttgctgtgagtggcccggaccctgcacagggggtccgggacccatcccaggggtccgggcacgcccgtggaggttctggaccttacccggagggtaccgacaatggcccccgggcccacctcaggggaggatatgagcctgtaggatcggcgcacaaggaggatgactcgtgggctcgggcccccgtgtcagacactgggttgttggtttcaacggaggcccccgtgttagaggctagtccgctgctttcgacggagatgaagaggcgaggcggttctctcttcgcgtggtggttcgccttcttcgcactcggagactga

SEQ ID NO: 5154 - DNA, 462 bp, Zea mays
  Peptide Sequence Number=SeqID_48529
atgatatgggatacgtcgaatggctggcagatacaagatcgcgttcctgttgagcatacgctggatgcagtcaatattgccgatcggtacgatgctaaagcagtaaaggaacgtctggcgatgatgacgccgcagaatgcgcgtatctggtatatcagcccgaaagagccgcacaacaaaacggcttactttgtcgatgcgccgtatcaggtcgataaaatcagcgcacaaactttcgccgactggcagaaaaaagccgccgacattgcgctctctttgccagagcttaacccttatattcctgatgatttctcgctgattaagtcagagaagaaatacgaccatccagagctgattgttgatgagtcgaatctgcgcaaccaccaacacttcaaggcatccaagttttcagccaacacattcaatacaagagctagtgcattcaatacaagacacaaatag

SEQ ID NO: 5155 - DNA, 309 bp, Zea mays
  Peptide Sequence Number=SeqID_48530
atggggtccatacatgacatggggtcttcaatgtcgtactacatagtagggaaatctcttgatgtggccgggaacaacatgggcaataacgaggccactgtccatgaactctctaaggaatggggccggggagtcgggccacacttccgcgccttgccgccttcttcggtgccacgctcctgtttatcgtttaaggtagtagtgaatggaacggagcgtgactgtgagagcgggattggaacggagcggctccgtcccattgattttttggagcggaatggttccgaatctgaggagaatattctctaa

SEQ ID NO: 5156 - DNA, 744 bp, Zea mays
  Peptide Sequence Number=SeqID_48531
atggggatatttcgaaaaaggatccttctcagcgaaggaagcgggccccgagccctcctactgatcaggggttcaaaggttgcgccctgcggggctcggcaaccaccccagagcactcgggctccgagccctttactgatcaggggttcgaaggctggcccctcggaagggttcgacagccgccccagagcatgcagagtcagggatgaccctgggtacgtccgttacatggccgaggctcgggctacgctcccgaggtaccctaggacattttcgagaccagcgggaacgatttgtaatggaatcccaccggagggaggcaccgagcccttggaccgtatcaaatgggtccgggtccagcaaatcacctgcagggtaaaactgagtcacggcctcccccgagttcagcctcgggtgcaacagggagctccgcctcgcccgacatcaggcctcgacctcagcctcggcctcgggaggagtcacatcctcgcccgacctcagcctcggcctcatgagaagtctccgcctcgcccgacctcgacctcggaccgaccgcgccacagcctcagcctcgggagaagtcacatcctcgcccgacctctggcctcggcctcaacctcggcctcgggaggagtcacatcctcgcccgacctcagcctcggcctcaggagaagtctccgcctcgcccgacctcgacctcggaccgaccgcgccactggggatacatcattaccctacccctag

SEQ ID NO: 5157 - DNA, 471 bp, Zea mays
  Peptide Sequence Number=SeqID_48532
atgtcgggtgttgtccccgcacctgaggcaacgacgggtgtcgcttcccagcaacgtgccaaccccaagcggactgatgacgccagcaccctcgcgaaggacttgttaggcgttagcctcgtacctaagataacgggggatcacgacgaagacaaccacctcggcatgctagaagatgacgacgcccctgtgcctgcgtctcgtgttgagatcccgcggggagctagctatggtccgagtccctgcgagggggtcaggacacacagctcgagcaactccgcgagatgcaggccaagctcgacgaagaaatggagcgacttgtgcagctccgacaaaacatcgagcaggagtgggcaggccgagcactcaccggaggagcgcgtcatcaggcccgggacgtccaacgccgtatcattgacgatgccagggcagggttgcccccagccttcagcggggccggctagaacctag

SEQ ID NO: 5158 - DNA, 402 bp, Zea mays
  Peptide Sequence Number=SeqID_48533
atgtccggtgctccaaggaagcgcggtctccggaactcgccagcctcaggttcgcgtggcagccgctccgctaaaattcaccggactgtccggtgtgcaccggactgtccggtgtaccagcggagcaacggctcttttcggcgccaacggctccctgcggtgcatttaatgcgcgcacagcgcgcgcagacgtcagacatgcccataccggtgcaccggacatcaaacagtacatgtccggtgtgcaccggacacccaggagggcccacaagtcagaagctccaacggtcagaatccaacggcagtgatgacgtggcaggggcaccggactgtccggaccaccacttcctgacaattgttgagggcactaggtgtgagagggtgacgctcctcctctactaa

SEQ ID NO: 5159 - DNA, 1170 bp, Zea mays
  Peptide Sequence Number=SeqID_48534
atgaacaaaagaccggcactcaaggtgccattacaaacggaactccgggttccacctccacaggtacgaacaaccccactcgatcaggggggcctgcggagcaacagaagaccgacgggcggctcgctgtcgcccgctccggcagcaacgacaacggcccctgcttcgggtggccgaactgcagcagcgatggcctcagggcggacgctgctgcaaccttgccctcgcccacgccgacgctcgaggggcgacgacaagtacaaagagccggaggcccgaagcgcggatggtggcggtgatcccgtcggcaacggacttctcgcgccgcctccacctcggcaccgacgacaggggccgtcagccctccggcagatccccactcagatcctcccggacgagtggggcaccgacctccgcgtggaggcgccgtaccggtgcaaaggcaggaccgccccagaacacgaacaccgccctggcagcgcgcgacatcttgggcggtcctcccaagcgcacggcgcgacaaccgccttcgcggcaggaggaggcaccgggagcgaagccggcgagcccaacgcgctgaggctgacgacgcccgccgtcgaccagccccgcgttgtcggagtccgcccctctcgcagggccagtgagcgccctctccctcgaacactgaacgagaggctgacccacgaaaccgcgcgggaggtagagctccggctcagcccggcttccaccctagcgaggatgatgaacatccttgaagctgagggtgggaccaagatcgcagcccggcttgcttctccccacccagggcctggtggtcaccgtctcgggggaagcgagcgacgcttcgccttcgccataatgaccgtgtcaaaaaagggaccgggaaagggggataccccgaaaaggacccttctccgtgaaggaaacaggctccgagcctccctactgatcagaggttcgaaggctggcccctcggaggggttcaacagccgcctcagagcacgtgggctccacgcccactactggtcagaggttcgaaggtcggcccctcggaagggttcaacggctgcctcaggccactcgggctccgcgcccactactgatcaggggttcgtaggctggctcacgaagggttcacagccgcctcagacgcagagcgagggatga

SEQ ID NO: 5160 - DNA, 234 bp, Zea mays
  Peptide Sequence Number=SeqID_48535
atgggcatatccttgtggattctcggaagaaaagcaggagcaaatggttgcagagaaggaaagagagctagaagaaggagaagcacaaaagtcaccctccaagctcaacaggccacacttgaagaaaaccaaagtttgctgcgccagacccaagaggaagtgaaggggttgcataccaagtttgaagagaccaatgcactgctacgagctgtcctgaaacttcagaaagattga

SEQ ID NO: 5161 - DNA, 90 bp, Zea mays
  Peptide Sequence Number=SeqID_48536
atggaggcaaagtctcggatggagcaggcggggaacaacgccattatcgtgaagctaccagaagggaagcaagaacgaaccagaaaataa

SEQ ID NO: 5162 - DNA, 73 bp, Zea mays
  Peptide Sequence Number=SeqID_48537
aggcattatggtacaggtggctatgagatcgatggttctggttatgactacggagacgaatccttttggaacc

SEQ ID NO: 5163 - DNA, 819 bp, Zea mays
  Peptide Sequence Number=SeqID_48538
atggtggacgtggccttctccgccgaccgagtcccgagcttcgctgcgatcgcgcatctccctccacccgctatcaagaccggtgtggacttcgagaagagaatagcccctggatgccgaggtagccgaagtcgaggtggccgtggtcgggagacacgcagcagtagcctgttcttcgggaggggtccacgttcgagcgtcattggttggcagggcgacacaacaaaagagcatcatcaggccgaccttcttgcttcttcgatcgtccggacgtcgaggagccccgctagggaggccggcggcagcgaagacggcgatccggccaaagttacggcagatcaagacgagatggtcgcagcaatagtgaatccgaccgagaaggccgcggcagcgacggatccaacgaaggcgatgaaggggaaggcaacgggccggtccaaccgggcaagggcctatgccgaacctggcaagagggggtgggctgcactgggcccgatggcggtggatcaggcggccgacgaagctgggggaagggagctcacaggggcgccgagcagggctaggagaagtcgtggaggggaggggctggcggcagttggccggtggccagaggtggggagccgttgccgccgcgaggcgcgccccggacagccacctggaggagcacgggcatcccccggcgaccgggatgggagacagggggcctcgaccatggggctaaaggaggcgccgagtggaactccctgcgtctgggaagaaggtcgagcggcaccgaggaaagagctggaggaggcgctggtgaagacctgggcgcggtag

SEQ ID NO: 5164 - DNA, 462 bp, Zea mays
  Peptide Sequence Number=SeqID_48539
atgatggtactcgcctcagttgccaccacctcgttcgtcattctacttcttttctctctcccctcatgcctccacctccgcgccacaccattctcggcagagggcgtaggagcaggcgcctcctccccgtattcgtccgacactagccctgacaccgactcgcgcagtggctattgcacgtccacgaggacgtttcacatcatgtgtgcaccatcatttttaccgtcgtcggacgtcccattcgtcttccctgccttcgccatgttcttccaccccaacctgctgcccccgcccacggtcgcaactgcgagccgaccgacgctcgtcgacgcaggtacggggcgagtcgatcatgctcttggcctttctctatgcgtgtcgtcgaggaggatatggtggcgcctgtcatgcttaggttatcttagcgatgaggagtccaggtctgagatattagacaactaa

SEQ ID NO: 5165 - DNA, 729 bp, Zea mays
  Peptide Sequence Number=SeqID_48540
gtgcgaggacaatgcccgatatgtcccccgctggggtgccggcgtcgtcgactcgctccggaccgacagccgacgaggtgccgcctcctacctggccacgattgccccgtctcctcctcctacggcgaggagggtggcgggacaaacccggatgctgctcttccgccacggggggaagacgtcgtcgagttcgccgccgccgagcgagctgacgaccatcgttgttgctgtcgcgctgcggggggaggagtaccatgtcgtagctgccatcgagggacatgaactcgagactcccgaagcggagcaccgtcccgggctgaagaggttgctgaagactacccatctggaactcaacgggaaggtgttcgttaacatgcagcaggccccctacctggcgcgccaactgtcggcgtttcggacccgggggtccctggaccgaccagtaaatttgtcgcagcgtgcccctgcccagatgggttggcgcaagatggaacacaaggggaaaatgcggcttgtattatctcgcaccagggacccctctctcgcctcccccacgctgcgcgcacgccagagcaccgccgccattaaccaccgccgcccgagcccgtttccccgtcgccgttggagctccaccgtgccctctgccacgccgcggaggtccgccaccgtcgacccgggctgccgtcgcgccattgccgccactgaggagtccccggagtccgccttgag

SEQ ID NO: 5166 - DNA, 480 bp, Zea mays
  Peptide Sequence Number=SeqID_48541
atggctggaggacgcctcctccgcagagctgggggatggtttccaccaccagaagctggaagaggaggtggccagccgacccgtgcgggaggtagagccccgactcgcctcgctctccgccccagcaaggatgcgggtgaaagggcggacagccatgcagtcggcacgcaaccgcgccaagtgggcgcaccccttcgacttccaacgcacccagcatggaggcctaggcccacgcgtcatgcaaccggcgcgccggttactacgtgcgagcaactgcaccgccactcgcaccactaccacgcctcctcgactgaggaaccagtaccgcgactcgaggcaaccctgcgtatgacccagcagtgccagccaggcgcgatggtcaatacggccaaaaatgggctggcagtaatggcggtggcaggcaggcaggagcagcggtcacgtcgtcagccaagcttaggtcccatccaggggcagtga

SEQ ID NO: 5167 - DNA, 1119 bp, Zea mays
  Peptide Sequence Number=SeqID_48542
atgaacaaaaacactggcattcaaagtgccattacaaacggaactccggttccacctccgcaggtacgaacaaccccactcgatgggggagggcctgcggagcaacagaagaccgacgaacggcgcgccgtcgcccgctccagcagcagcgacgacgacgacttctgctccgggggaccgaacagcggcagcactgacctcagggcggatgctgctgccaagaggcccccgcccatgcccaaactcgtgaggcaaggacgggcagaaggccgtagagttggaggtcggtccgtgggcggccctggctatctcgtcggcggaagaacctcttccagctgtcgtggcagacgccggcgccgcgagcggctccgaagccactcgcgtccgagagccaggcacggtgcagctgccagcgccacggacgacgaccgcccttccctccgatcactgagtgaaggagcgggccaccacccacgcaggggccgaccccaactcggcacactcccctccccagccctggtgatgaaaatccttgaggctgagggaggggcagaggccgcagcccggctcgctttcccccaccatcaagctggagaccaacgggcgaaaggggcgggcagccatgcaggcggcatgcaaccgcgccaaatgggcgcgcttctccgactcccgacacgcccagcatggaggcccaggcccacgcgtcacgcaaccggtgcgccggatgcttcgtgcaagcaactgcaccgccgctcgcgccactaccgcgcctcctcgactgcggaaccaataccgcggctcgaggcgacccagcgcacgacccagcagcgccagcctggcgcgacggtcaatgcggccaaaaatgggccggccgtaacggcggtagcaggcgggcaggagcagcagtcacgtcgtcagccaagctcacgtcccatctgggggcagcgagagaaccctctctcacggcgtgaagacaatgcgcccgtgttccgttcctcgaacggctcgcgcatgcgcaacgatcgccccgccaaccactcgccccgtcgcattaactccgcggcgggacaggcggcgcctcaggcagaagaagcgggcgacacttcgccctcgccgtaa

SEQ ID NO: 5168 - DNA, 818 bp, Zea mays
  Peptide Sequence Number=SeqID_48543
atgaagtctcgcatggcactgggatcacggagcccggagaaatcccaaccggagtcggggtcgtcttcttcctcggaaccagggggcctgtgcgaggacaatgcccgatatgtcccccgctggggtgccggcgtcgtcgactcgctccggaccgacagccgacgaggtgccgcctcctacctggccacgattgccccgtctcctcctcctacggcgaggagggtggcgggacaaacccggatgctgctcttccgccacggggggaagacgtcgtcgagttcgccgccgccgagcgagctgacgaccatcgttgttgctgtcgcgctgcggggggaggagtaccatgtcgtagctgccatcgagggacatgaactcgagactcccgaagcggagcaccgtcccgggctgaagaggttgctgaagactacccatctggaactcaacgggaaggtgttcgttaacatgcagcaggccccctacctggcgcgccaactgtcggcgtttcggacccgggggtccctggaccgaccagtaaatttgtcgcagcgtgcccctgcccagatgggttggcgcaagatggaacacaaggggaaaatgcggcttgtattatctcgcaccagggacccctctctcgcctcccccacgctgcgcgcacgccagagcaccgccgccattaaccaccgccgcccgagcccgtttccccgtcgccgttggagctccaccgtgccctctgccacgccgcggaggtccgccaccgtcgacccgggctgccgtcgcgccattgccgccactgaggagtccccggagtccgccttgag

SEQ ID NO: 5169 - DNA, 822 bp, Zea mays
  Peptide Sequence Number=SeqID_48544
atgttttcaccggaggctcctactccggtgaagacaactaggcggaccccagggggaccccgtgctccccagtctacggagctgaagcatgccttcctccggaaacccttctggatcccccgcaaatcaaggcagccaataggtatgaactacctgcacaccagtaagggccgcgggatagctggctccgagcggctcgccagcggaggcgaccacatcagcaccgacggtggcggccacctctgcattgacaactcgccagcagcggcgatcatctcagcatgtacgccgttgcggaaaggtcctcgcccccgtcttcctacgggggacgacaacgaggccattaaagccaaagagccagaggtccggcggcaggtggcactgacagtctcgccagcggaggcaaccacctctgcagtggggagcctcaccagcggcggcgaccacctcagcaccgacaacagcggccacctgtgcgccagtgccgtaccggcaaatggcggccgccccggcgcgcacgaagaggtcctcgctcccgtcctcactacgggagtgaggacaagaccatccaagaacgccgccgccgcccccgcggcgtacgacgtcttgtacgtccccccggtgcggctggcgacgcgggagaagccgtgggtgtggccaacccgcgcacggcgcgaccgtcgcccgtgcggtggacggacagccccgccccgccccgcccaagcggtaggaggcagcgccggaggcggcaccaaggccacccaggccgaggagccagacatgcggcagccgatggcgcctcagacggccgaccccgcgtag

SEQ ID NO: 5170 - DNA, 501 bp, Zea mays
  Peptide Sequence Number=SeqID_48545
atgcgcggcggcggcttcctctccgtgcttggttccctccattgctcctccggtgctcttggtcccgtgcgcgtccggggctctcggtacgtatgtcccgagcgcactccgtcccaggcgcagtccggtgctccctccctgctccctcctcccggcgcggcgcactccggtactccctcctccatagctacggtgctcggtgctcccacctccctgctccctcctaccggcgcggcgcatccggtgctccctcctctagagctccggtgctcccaagtcccacctccctggtccctcctaccggcgcggcgcatccggtgctccctcctcgagagctcctgtgctcccacctccctgctccctcctaccagcgcggcgcatccggtgctccctcctccagagctcaggataatcgaggaacaacgaaggcgcctagcaccagaaatggtagagatgcttctttgcatgaaagactgggaacttggtgaagctagagggtag

SEQ ID NO: 5171 - DNA, 306 bp, Zea mays
  Peptide Sequence Number=SeqID_48546
atgaacgtatgtgagctcactcttgctgtctcacacccccccacacaggtcaagaacaggaagatcaccttcacctgggaaagccgtcagtgccctcgatttgagtcgaacaccgccaagactcgtgcaattgctcgccggacttcggagtccgccgtgcgccgtggggagctaggggcggaaatcgccgtaacgcgtgctccggcgatggcgccgccgtccctggtcggggcaccgccggtgtttgagccgtggctggggcggagtggatggaccgtcggatcggttctggacggcggagattag

SEQ ID NO: 5172 - DNA, 180 bp, Zea mays
  Peptide Sequence Number=SeqID_48547
atggagataggactccgcttgaaaacggatgtaatacttttgctttttgtaaggctcaatttgtcgaggctacagaccagcatacctaagaaagagttggtgatggcccccaggaggccaacaggccgggcttatgagggcggacctcacctggttggcgtatacgtatgcgttacctag

SEQ ID NO: 5173 - DNA, 318 bp, Zea mays
  Peptide Sequence Number=SeqID_48548
atgccgacctcttcttcttctgctgctgctatgccgtcggccgacgcgtcgtctgaggagacactgagcactgtggcggcggaggaattgcgcgccagcgatacagtggatttcggtgtgtcgcggatgtcctcggtccgcgtgcaagatatgcagcagcttgactactttggcggcggagtcactcgcgtcccggggacggaggaggtccccgagccggaaggcgaattggttgtgttcgaggcgttctttgccgctggtcttcgcctgcctgcgcaccgatttgtgggagaagtcctgcgcagatttaacatttag

SEQ ID NO: 5174 - DNA, 318 bp, Zea mays
  Peptide Sequence Number=SeqID_48549
atggcgtggcccgacgttcgtggccaacgcagcgcgacctgcccgcgtggcctcgcgctcgcccgatgcggccccgcacgtgcgctcccggcgcggccttgcgcgcgcgcctccggcatgcccacgactcacctgtgtgcagccctcgtccgcgttcgacgcgccgagcatgttcgtctacccctagacgtagttgtctaccctcgtcgttgcccggggctcaagcggtttctcgagtgcctctccataaggactggttcgttgagtgaccacccgggagaacagtacaaccatgagggtggaatgagacgcccttag

SEQ ID NO: 5175 - DNA, 183 bp, Zea mays
  Peptide Sequence Number=SeqID_48550
atggggaagaaggagaagtgtgcgaatctattagaagttgattgtgtggtagaagacccgaactcatttgaggaagatccgcaggaaacttttgagcaaggcaagtggattctccctctgcatttcttattgtacccagaaggtgatgaggaagactttgacgaagatgttgatgagtactga

SEQ ID NO: 5176 - DNA, 345 bp, Zea mays
  Peptide Sequence Number=SeqID_48551
atgagggtgttggtggaaatggggatcctcttgagagtgacattaagttgctcaagcaaaccagttgtgagacaaatgacggcttggtggcgttgggagctcggtgatcaccgtgaagatcttgttggtgacccgactgaagtttgtaagcggtctcgagggatccaccgcgccggagtggcaaaggatcatctcatagtgagcacttggttcttgcgaggaccaagggggagcgatacccttgcgcgggtgctccaacgaggactagtggagagtgccgactcttcgatacctcaggaaaaattggaggagtcttctaaaccttgctttacattccgcacttaa

SEQ ID NO: 5177 - DNA, 687 bp, Zea mays
  Peptide Sequence Number=SeqID_48552
atggcacccaagaaagctagctcgaaggctgacgaggctgcgaaggcagcactgctggccgcaaaaaagggcaaggccctcgccctcacccactccacccaccaagaggctactgaagacgacgttctccgcacctgcgaagacgacgctctccgcacctgcgaccctgaagggcagccgcaacctcccccaggcttcactccaccagagggcacggacttcaccgaggacggcaaaatcctcggtgtctcagcggaagaacagctacagctacgcgccctgcgcatcaagaaccgcaatctccagaagcaaaaggagatacttgaggccaagcgccaacgtgtgtctgcacaagtgtcacacccgggttttaggggtccaaagcccgggcgcgaacataaacaccaggaatcccttgcaggaccgccatcgcagcaaaatcctcccgagggcctccctacactgaccactcccctactgcccttgcccctttcgggttctggactgggcctcgatttccagagaagtcaggggcccaggcgcaataaatcccaggacacagacaaaccccccgacgaactgcgagatggtttcctggaatcgcaggggctctttaataaaataaccatcgcgaaggggtatcgagagatcttggccgcccgatccacaacggagggcacagattag

SEQ ID NO: 5178 - DNA, 1605 bp, Zea mays
  Peptide Sequence Number=SeqID_48553
atggcaaaggctcaattattttataactattgtagaaacaagcatgaagttatattaagatccacgaatggcactcttagccttagtccagtgtgggaggtggtggctgatgatgccgaggcagtggacgcaggtttaggtggacaggatgctgttgctgccctacccttgacttggcgatgggtggaccccattgcctctggcagcgcagaggctcatgaggcttttgttaaggatgtggaggatggtgagaacgaggggtggggctgcagcggtggtgttggggctggcatggcggcggtggtggcaatgcacccatgccaaacggaggatggtggaggacagggccaatctatgggcggagcatggtggcaccagcaggtgcagaaaggagtggcggtggcggcgcgaatgcagcacattctgccgcattatggtcaaggtggtgctgagagattgattgtcgatgcggcttgtcagcttgctgcccacgatcatgatgttcatgtcttcacatcacatcatgataaaaaacgttgctttgaggagactctttctggtttgtttccggttactgtacatggggatttcctgcctcgccatgtgttctaccgctttcatgctgtttgtgcttatcttcgctgcatttttgttgcgctctgtgtgctactcagatggcccttctttgatgtcatattggtagaccaggtttctgttgtgattccactacttaaactaatggcatcatcgaagataatattttactgtcatttccctgatctgttacttgcacaacatactactatgcttcggaggttatatcgcaagccaattgacatgattgaggaaagcactactggtatggctgatttgattcttgtcaatagcaagttcactgcagcaacttttgcaaggaccttttctggtttacatgctagaggaatcgagcctggtgttctttatccagctgtctctgttgagcagtttcacgaaccccatgcttataagttgaatttcctatcaatcaaccggtttgagaggaaaaagaatcttgatcttgccatttcagcatttgctttgctccgttctgctgcttggactctacctggtgatgctctacaagaagcaacattaacagtggcaggtggctatgataagcgtctcaaggaaaatgttgaataccttgaggaactcaaaagactcgcattgacggaaggggtttctggacaggttaattttgttacatcttgctcaacatctgaaagaaacgagcttctctccaactgcctctgcgttttatacactccaaaggatgaacatttcggtattgtacctcttgaagccatggccgcccataagccggtaattgcctgcaatagtggtggcccagtggaaacagttgtgaatgaagtaacagggtttctgtgtgatccctctcccgcagaattctccaaagccatgctgaaacttgtgaatgatcatgatcttgctgtcagattgggtgaacaagcacgtgaccatgtggtgcaaaaattctcgaccaagacatttggtgatctcctcaacagctacgtcttgaacatctaccatgagaggatggaatga

SEQ ID NO: 5179 - DNA, 2667 bp, Zea mays
  Peptide Sequence Number=SeqID_48554
atggaggtcgttgagttggttccttgcgcccgcaataaatggggcaactggtatgagttttggttctacgttgcggagggcacagtcgaagaccatctggggctccccgtggccgagatgtgctcgcattattactcagcatacccgcagtttgaagtggcggaggaggatgcagacgaaggggccctgcggtgcgcggccgacctgagtagcgggcgcaatttggttgaggagtttgtggcgtatggggtgtggcctttggcgcatggctgggcgctgggcgaagtatgccctcgccagatgccctcccgtggtgggatgctggatggggcggtgcggattgttggccggtacgtgtcgaagacggagggccagcgtagctgggatatacgcgggtccaacgatcgcttgaacagggtcttcgagttgaaccgtctgccgtatggcggttatcccggacaagacgatgtggatcgtcgcgggaagaaaccggctgtagagattggagacgaccccgcgccggcggccgccccatcctctaagaagaggaagctaggtactgctacgggaggactgaggatttccgatggttttgctagggaattgatgaggacatgcgcggcccccgggggaaggatgtcttcgcccgagctccaggagtcttcggcgcggatgctgaaggttaccgggggttggtggcctaagaatgttcctatcccccgcgcggccggcgaagacttttttacatctcgcatggttcgtgattggagagtgtttccttatggacggaatattgctgctgttgtgtcggtagtgatggacaaggatcgtcagggagctacgcagaagcgccaggcggtcttcaggctgcctgaggctaggccgaagaggtcacgggggactgcgaaggctgctgcccccggcggcagccagccgacgctggcggcaaagtcggccgcccctgggtccagcagggtgccggaggctgcgaaggcggccgccgccggcggaaccaagtctgtcccggccggagccgcgaaggcccgagaattgcctccgccgggcaagcgcgttgccgacttcgccaccgatattagcgtggacgattatctcgttgggtcgggcgaggggcaacttgttgttgttccgcctgcggtggcgaccgcggcggctgccgtggtgcctagggcgaggggtagcgctctcagcgccggtggtgagattccggcgctcactgccatcaaggacgaggcgggcgctgtgtcccgccgactgaaggaggcattaagtcaggcggctgacttcgctgaccgcgtggcgtcgggggcgcttatggcggttgtgtctgccgaagtcgagagacttcgggcgcaacatgctgacgctgtccgaagggaggctaatgaggccttcaccaaggcgcagtctgtgcaggcggaggccaatttggcgcgggtggagggtagccttgccagacagcgcgccgaggaatgggaggagcggttcaacgctctgcagacccgtgtggagagggtcgaggcttcgacgcgcacggaggctgagcggacgcgcaaacagcttatggactcgtaccacgagctgggcgcgcggaccgctgacttcgaagtgccagatcaagagctcggacttcgctgcctcgagtggctgcaggaggagttgctggcgctccccgccattgtggagggctttatgtcctatgcctccctggtcacctgcgaaggggcgatgaacgcgctgtcccgcgaagggtgccggcactatgaggtcttcgaccaatctgatgaggatttcgagcgcgagatttacaaggttgaggaccctgtggtgaaggaatccgcgggagcccttttcgaccggatgtggggtccccacggtcgggaggtggtcagggagcggtccgacacggcgaggggtcaggcggcgcgtaacgagaaagtggaggacttcagggctttgaacagcgcgcagcctgattcggagtcgaacccggtggcggctatgtctgaggtcgccccggcgccgcccccagaaaccgtcgaaggcgcccctgatgcccccgcagccactgcggtcggcggtggctcgtcgccaactgctgcgtcgaggactgaggatcctgtgaagatggcggcggagccggcagcggaggatcccgcgacggctgggtcttcgcaggttcaagattttgggcctgcgcacgcaaccgctactgctaattttttggcggcttcgaccgtggatggtgggaatgaatcggatgaatctgcgtctaagttttctgattttggtgactctgggagttcggttgagtggactgaagagtcgtcggatgaggacttggattactttgcggccttggatgtggcagcggtggaggcttcgccgcgtgctgtggatgctaaagttgtgcctggtccaagtgctgggcgtaggcggcgaagggtggttgcgaagcatagagtgagtgaggcggacggcggtcggcttcgtgtgggcagggctggccggcaggaattgttgtccttgccggccgttgcgagtgtaggtgagggggagctgcgaagtctttttgcgggtgagaagatgaggataatgctttttaactatagggagatgggaattattccgaaggttgagccgatgtaa

SEQ ID NO: 5180 - DNA, 2385 bp, Zea mays
  Peptide Sequence Number=SeqID_48555
atggcgccccttcctttcccgcctgaccgttcctatcccctgaccctctcctctacccccgacgcctcttcaccttcctccaccagccccacgctggagaccactccgatcccggcggccaatcacctctcctcttccccggcgtcggcggggccctctgcttgtggtcggtccaaggcgcagcggtggcgtgacgacagcgcagcaggcgcggcgagcgtgggtgctgccccggcggacgctgtcccggcgggcgcaggtgctatcccggcggcggcgggcgcgggtgctgtcccggcgggcgctgtcccggcggctgtgggtgtggcctcgtctcagaatcgccgctcctacagggatgcgctggtgtcctcgcagcgccctgtttctcggttagcagtggatagggctggtggcggctgggagactgtccagagtcgtcgcgaccgccgcttggctcgtcgccctcccctgccagtacctagacccgtgccggttgatctgcggggcagatgtttgaactgtttctctgctgatcatcgggtggcgcggtgttcgaacagggtgcggtgcttcttctgcaggcggccggggcaccgtgtgagcgagtgcccgcgcaggcagacgaacctggccgctcctgtgcgcagactggtgtggcggccaatttccatggaggccccggcggcggtcactggtgtcgaccacgccatggcgggtggctcgacgcttggtggttccgatgccgtgatcagcgggaagcggcgtacccgccgtgggcagcgaaggcgcaggtccgggcctagtggtggtcttggtggtgatcctctgctgctatcttcgggaaacttgtcgcccgcggctcaggatggtcctcgccctgtgaggtttattgggcggtccagaatgatcgaccatgctgagttggagcttcgccatgccctgatcgtcagcgttgttgggcaagaaggaactggttgcgccacggaggttagagaggcgctcgcctcaaggtttgaccttgatgcagatgcgctccgcctacgtcgtgctgcgccaggttcttttattgtcctcttcccttcggaggagctggctgggcaggtgtttagtggaggaccgtcgctctttgtccctccattgaggttgcatattaagagatggactaggcaggcttttgcttcgggaggcagtgtcttgtcttccctcattgacgtcgagctccgtggtatccctgctcacctttggggactggagacagcggaggttttgcttggtccatactgcctggttcagggactgcacccggattctatcagcggggaggacttgtcggtcatcaggttgagtgcatggtgtcgctctcccgtggagttgccgaaggtgttggaccttcatgctgtggagccagcggtccccgatgaagacggagtttggattccacgttcgttggtgttccctgtgttggtgaagattattgggccggagggtgtccttgtggaggagcagctgcagccacctccatcggatccctctgatgatgagccggagctgagtcgtcgggctcggcgggtgcagagactgggtgatcaggcctcattgcctcgggcttcggtgcactcgcgactgggccctcgtcttcattcctcgtcgacgcgtgttggtccctctgatgatgtggggcttttggatgcgtcgatggataacagtgatgctgtggcggcgtctgtctcttcggattcgttggcaaaaccagttgatgcccctaccctcccgtgtgctgcggttgagatgctggcggcgcctgttgttctggccttgtgtgatgttatggttcctgattattctcctgatggtgcctctgctgatttggctgctgagttgagggaggattcggttttggcagtgagttgtgttgtcagtgcttcttctgctagatggaatttgaagccgcctgtttttagagtctactccaggaggttgagaccttctattttggatgatcaggatggcccgttggttcagtcgggtcttgataattctatggtgatttcttcgcccttgtgcgagttccagtgtttggtcactaaaccagtggatgccttgctgccaactccacagattccaaagagaaggaagaagcctctacctagtaattttataccaaggcggagcaggagggtggccaaatttcctccagaactcggttctgaggctactgcccaggtctgcaggcatttgggtttctgtgatgataatgaagttatttctgtccaggatgccggtaattatgcgaagctatttgtttctgggctctctagcgtccatattgctgctttggcagcgctgtttggctggacggtgccgctgaatggacctgtttag

SEQ ID NO: 5181 - DNA, 4221 bp, Zea mays
  Peptide Sequence Number=SeqID_48556
atggagagggggggcctgcactactggcctgctctcgcggggattcttcccaacaagcaggtgcaacagctgttcatccaggggggcttcctcgatgacccgtcaggttctactatattgcatcatatgcaagaatggcaagacctatattcaccttgcttctggatggtcacttttgcactgatacaattgatgttcatcatgagtatattggctcaatttctgttcaagaaattcagatggtggagacagagactgaagggttcagctcctgaaagcaataaacaacatcaggaacacaagattacagatataaagctggacatctcatacaaagcatgcaaagcttgttgcctgcttatactaggaagtcatgttctgagggcagtatttctacagttacatgaaagaataagtgattgcaagtatccaccctttattatttgtgaagtcagggggaaaacaggaatcagattcacagacagcagcgtaacagaggcactattgaatccatctgtgggacagcaggcagaagtcaaacggccatgcccatatggaagagcaaatattcttgaacttgtcaccttctcctggatgaaccccgtcttttctatcggatacaagaaacctctagagaagaatgaggtgccagatgttgatggcaaagacgctgctgagtttctttctgattcatttaaaaagatcataggtgatgttgaacacaggcatggtttaagtactttatcgatctatagagcaatgtttctatttataggacggaaagcaattatcaatgcaggatttgcaattttaagtgccagcgcatcctatgtcggaccctcactgattaatgatttggtgaaattccttggaggagagaggcaatatggactcaaaagaggttatattctcgctgttgtttttctaagtgccaaagttgtggagaccatagcacagaggcagtggatttttggagctcgacagcttgggatgcggctgcgagctgctttgatatcccacatctatcaaaagggccttcgcttatcctgcagttcaaggcagaagcatactagtggagagatcataaactacatgagtgtggatatacaaaggataactgatgttatatggtatacaaactatatctggatgctacccattcaactttctctagctgtttatgtgctccatacaaacttaggggtcggggcctgggctggtttagcagcgacattagcaataatggcttgcaatattccactaaccagaatgcaaaagaggttgcaagccaaaatcatggttgccaaagacaacagaatgaaggcaacaacggaagttcttagaagcatgaaaatactgaaacttcaagcgtgggatatgaagtaccttcagaagctagaaagtttacgaggcgaggagtacaactggctatggagatcggtgaggttgtcggctctaacaacgttcatattttgggggtcacctgcattcatttcctccataacatttggctcatgtatacttatggggattcctctgacagctggaactgttttgtcagctcttgcgacattccgcatgctacaagatccaattttcacacttcctgacttactttcagtgtttgctcagggaaaagtttcagctgacagagtggcaaaataccttgaggaagaagaattgaaatgtgatgcggttacacaagtaccaagaaatgacacagactatgatgtggagattgatcatggaatattcagctgggaacttgagacgacttctccaactctaacagatgtagagttaaaggtaaagagagggatgaaagtggctatctgtggaatcgttggttctggcaaatccagtctattatcatgcatactcggggagatgccaaagctagatgggactgtcagggtcagtggccgcaaagcatatgttcctcaaactgcctggatcctgtctgggaacataagggaaaacattctgtttggaaacacacatgacaaggaaaaatatgaaaacatcatacaagcatgtgcattgacaaaagattttgagttgtttgcaaatggtgatttgactgagattggtgaaagaggaattaacatgagtggtggacagaaacagcgaattcagattgcaaggtcagtgtatgaagatgcagatatttacctctttgatgatcctttcagtgcagtagatgcccatactggaagccagcttttcaaggattgtgtaatgggaattcttaaagataaaacagtgttgtatgtgacccaccaagtcgaattccttcctgccgcagaccttatattggtgatgcaagatggtaaaatcgtgcagaaagggaaattcgatgaacttcttcaacaaaacatagggtttgaagctatagtaggtgcacatagccaggctcttgaatctgttataaatgctgagagttccagcagaatacagtcaggcaaccaaaaatcagcagatagtgaggatgagttcgatacagaaaatgaaacggatgatcaacttcagggcataacaaaacaagagtctgcacatgatgtctcacaagacatcagtgacaagggaaggttaacacaagaagaagaacgggaaaaaggaggcattggcaagaaggtttactggacttacctgagggcagttcatggtggagccttagtgccagtaacaatagctgcacaatcattctttcaaatcttccaggtagccagcaactattggatggcatgggcatcacctcctacaactgcaaccactccaaccgttggattaggcctcctcttctctgtatacatagcactatctatgggaagtgccctgtgtgtcttatttcggtccttgcttgtgtcactgattggtctactaacatcagaaaggttcttcaagaacatgctccactgcatcctgcgtgccccaatgtccttctttgattccacacctactggtagaattttgaacaggcgctactacataccaacagcgagagagttggctcgtttatcacaaattcaaagggctccaatcctacaccattttgcagaatcgctggcaggagcatcaagtattagagcatatgcacagaaagatcgtttcagaaaagcaaaccttggtcttgttgacaaccactccaggccatggttccataacgtttccgcaatggagtggctttctttcaggctaaacatgctatccaactttgtctttgccttttctttgactctgctagtgagcctccctgaaggttttataaatccaagtattgctggacttgcagtgacttatgcattgaacctcaactcacagctggcatccataatttggaacatttgcaacacagaaaacaaaatgatatcagttgaaagaataatgcagtactcgaggatccctagtgaggctcctctcatagttgatcactaccgccctccaaacagctggccagatgctggaactatcaatataagatcattggaggttcgatatgcagagcatctcccatcagttttgagaaacatatcatgcacaattccaggaaggaagaaggtggggattgtaggacgtactggtagcggaaagtcaacttttatccaagcacttttcaggatcattgaaccaaggggaggaacgatccaaatcgacaatgttgacatcttgaaaatagggctgcatgatttaagaggaagactaagcatcattccacaggatccaacgatgtttgagggaacagttagagggaatctggatcccctgaatgagtaccctgatcatcgtgtgtgggagattttggacaaatgccagcttggtgatatagttcggcaaaacccaaagaaattggactccatagttgtagagaatggggaaaattggagtgttgggcagagacaactattttgcctcggaagggttctcctaaagcgaagcaatgttcttgttcttgatgaggcaactgcttcagttgactcctccactgatgcagttatccaaggaacgatacgcgaggaattcaggaaatgtacggtattgacaatagctcacagaatccacaccgtaattgacagtgatctcattcttgttttcagtgaaggaagaattatagaatatgacacaccctcaaaattactggagaacgagagctctgaattctccagactcataaaggagtactcacggcgatcccatggcttcagtggaacagcaaacaattga

SEQ ID NO: 5182 - DNA, 474 bp, Zea mays
  Peptide Sequence Number=SeqID_48557
atgccgtcgtcgctagcgcctagggaaatccgccgtcgcgaccgctggcacatcgccgtcgtgcgcacctcatggggccgccgccgcgtgcgtgccctcgggatccgatgccgcagcgtgtccctagattcgccgtcgcgccacaggaatccgccatcgcgagcgtgtccccagatccgccgtcgcgcctcagggatccgccgtcgcgagcgtgtccccagatccgtcatcgcgccacagatgctggagcggcggtggcggtggccatcgcagagacggacgggacaaccgccgttgtcaccgggcctagggtgcgctgccgtcgtccgtctgcttcaagagcgccgtcaccgcttgctcgcctgcctcggagcgtcgttgtcgctcgttcctggtggagcgccgccgtcggtcgcctgcctcgaggtgacaccgctgctggcccccaggatcaccgccgctcgcacgccctag

SEQ ID NO: 5183 - DNA, 774 bp, Zea mays
  Peptide Sequence Number=SeqID_48558
atggctggttctaaggatcacaccaagatctccaccaccaacatcatcaagccggccatggaggcgctcccggctgatgaccaaaggccctttgaagacctcgtaatgcgcgatgagaaggaggtgatgcggcaatggaacgaacaacgcgacaaggaagaggcggaactgctgcataaactctccgaacggcgcaaggaggcggcggacaagtacttgtcacacttcacggtggatcgccaccagaagatcgtccgtcaaggggagatcgatatggaatctctcctacctccacttcagggtcccgcttcacaaccactaggcacgcggcaggtactggacgcgaccggaccgtccgagcatcatcttagacagtccggttataccgcggaccgtccggcgtgtttcgccggaccgtccgacccgatgcagacccgcacacaaaacactcaggtcgcaccgtacatggccggaccatcagggtacaaccccgaacaattcggccccatcacggaccgtccgacgcatcacgccggaccgtccggatatgttgcggaccgtccgccatcttacgtcggaccgtctggatatggcatgaaccggccgacgtattacgccggaccatccgactctacacgagtccacgtgcagactgcccaagtcgcgccatatatgaccgatccgtccgggtacaaccctggaccattcggactgatcgcggaccgtccagttctttacgacagacggtctgggtacgagactacccacggctga

SEQ ID NO: 5184 - DNA, 444 bp, Zea mays
  Peptide Sequence Number=SeqID_48559
atggctcgccaccgagcggggagaagcatcgcgccgctgccggtgacgggcgcggcggatgggggcgtcggcggcgggcgcggcagatggggggccccagtgatgggcgtgccggatgggggcgcagcacggccgcgtcgaggcagagcgccgaggccgggtcaaaccgggggaagagaggcggcgacatgggcgccgaggaggggagggaggaggtggtggccggagcaggagcagccggcggcggaaaatctggcgcgggcggccctggcagcaggggcggcgcgggcgggatgcgcaccagggagggggttcggcgtgggcgccggcggcgccatccgacatcgagcaatagcagccggcggccggagcagtagcagagtcgaggaggcgcgggcgccggagaagggggagaagcgggcctactggtcggggcgcgcttga

SEQ ID NO: 5185 - DNA, 375 bp, Zea mays
  Peptide Sequence Number=SeqID_48560
atggaggtcctcgacctggaccatctcaacgtgcgccaagtggccaacagctcgtcgctagtgccaactgtcgacagtgagattgacgccggtcacgtcagcacgccaacggttgggaggggcaccggacagtccggtgcccacccgaaaaggaaggcgaccaatcaactgattcaacaaccgttgcagccgaggttgttcggtcaaacagaagacaatctagagtttccaaacgaacgagcaatggctccttggccccttggggctataaaagaggcccttgggtgcctctaccagtacaccaagcattctaagagcacgctacaactccgagactccgtgaccacgtcgttcagtgattcaagagagatttga

SEQ ID NO: 5186 - DNA, 657 bp, Zea mays
  Peptide Sequence Number=SeqID_48561
atggacgcctactccaggcgcgttggtcgacgtgagcgcggctggtcaccgacgcaggcacggaccggccccgacgcgggcacggaccggcggctacccccggcgagcgggcgcggccgcggtccgaccccggcagccgtgcgtcccggcgcgggcgcgatctggccccagcacgggcgcgctcggtcacaggcgagccccgactccgacttgggcgggggaacccggtccctggtcgccacaggcgaacccaaccctggcgaccacgagcgaacgcgaccggcctggctccggcgaggactcctcggcgtacgagccggtgaggactctgctggccacccgacgcgcgcgcaagcaggcctgctcggcctccaagtaggcacgagcagcgagctgctctgccatggcgggcagggcgctcggcctcctgagtgcggaggcttggtgcggcggacgatcggccctggcgcgctcctgagggcggtgcggccccggcgcgagcgtggccggccctggcgcagacggcctctgtgcgtcgcgggcgtggccctcggcgcgggcgcggccgacccccgggagacggcgacggcggtagcgctccccctggcggcggccggattagcccctggcggcggcggctatgcatatggcggttag

SEQ ID NO: 5187 - DNA, 819 bp, Zea mays
  Peptide Sequence Number=SeqID_48562
atgtcgggtagctattttttgggaaaaactttggatattatttctgaaaacccaaacttttcgaaatccgaaatacccacccctcctccatataatcatgatgccatctcagtgaggacgcacgtcctggacatcagattttgtgccctctgcgaggaggcctgctctcatcttcccaagatctctagcaaggaaacacatccaaagatagcacaagttcttctggaacgacaaaaatatgatatggcacttcttgtgctaaagtgcacagggcatggaagcttctctgctacagaaaactttaaaaaagatgacatttcatctcttagtgaggcagtgactgtggttcgtgtcagaattgaatgtcgcctcctaacagaagcgtttatgtatcataggagctactgctctaaggtgaaagagcaacactcagcagatatgacacatgctgaggatgcattaaaaaactcttgggtttatcatgttgagatgatggtgaccgaattttgtgctatctgcattaaaaggaatttagttgataaaatgattgatctgccctgggattctgaggaggagaaacatcttcacaagtccctctttgactctgctcatgaaatgcccatgaaaccaaatggtagtctgcttgttgtctactaccttcggcgttatcggtatttggaggcatatgaggttgaccgtagtcttcaaaaatttgagcaaaagatattggaaaatacaactgaagagattgcttcaaaaatcagagcaattgctcgatggagagaaagtttagttttctgctttattacgcatgtctaa

SEQ ID NO: 5188 - DNA, 597 bp, Zea mays
  Peptide Sequence Number=SeqID_48563
atgacaaacctttgtgtgcatgtgcgtttagtcgtttacatccacgtcctgtctaatgcgttggagcagttggcatccattgatctcatcgagctatgcaaggaggccagaattgagcgctgccgtgcaactagagacttgagtagctgtggccgctatgtgcaccatgtgcttaactcatgtggccatgcctcattatgtgctgagtgcagccaaagatgtgacgtctgcccaatctgcaggagtccaatatcggacaatggaaatagggttcagctacgtctttactacaagtgcctggaagcgggccttatttctaagcagcacgatgacaggtttcaggaaaaggaagaccatggcaatcctgttagcatggatgtccagcggctgcattcattgtttgatgttgcagtccagaacaatcttacttcccttatttgccactatatcacagatgtttgtttggatgagaatgctgtgtcaagtgatccacttctggcttttcttttggatgaggtggtcatcaaggactggtgcaagaaggctgttaatgcgctcattactgagattggcgtgatctgtatccaaaaactctag

SEQ ID NO: 5189 - DNA, 2205 bp, Zea mays
  Peptide Sequence Number=SeqID_48564
atgggaggacttggggtgtctgatagttttgctagagagttgatgaggacgtgcgcggccccgggggaaaggatgtcttcgcccgagctccgggagtcttcggctcggatgctgagggttaccgggggttgctggcctaggaatgttcctatcccctgtgcggctgacgaggactgttttacgtctcgcatggttcgtaaatggagagtttttccttacgggtggaatattgctgctgttgtgtcggcagtgatggacaaggatcgccaaggggcagcgcaaaaacgccaggcggctgtcaggcctcatgaagctaggccgaaaaggcagcgggggactgcgaaggctgcggcctccggcggaggcaagccgccgctggcggcgaacggagtggcggaggtcgcgaaggcggcccgagcgttgccgttgtcgggcaggcgtgttgccgacttcggcaccgatattaatgtggacgactatcttggtgggtcggacgaaggaaaacttgctatagttgcgcctgccgcggcgatcgcgacggctgccatagtgccgaaggcgaggggcgaggctcttggcgccggaggcgaggtgtcggccctcgcggttgtcagggacgaggcgggcgcagcgacccgccggctgaaggaggtgacggaggcgctgagtcaggtggctgacttcgccagccgtactgcgtcgggggccctcacggcagctgtgtctgccgaagtcgagagacttcggacgcaacatgctgacgctgtccgtgaaaaatcggcctccgacagcaagtgccgtaaactgacggacaaggtagcggcactggagaaggagaaggctgacctccggcgccaactggcgggggagaggagggaggccaacgaggccatcgccaaggagcaggctgcgcaggcggaggccaaactggcgcgggcggaaggcaatcttgccaaggagctcgccgaacatctgcaggagcggctcaccgccctggagagccgcgtgaagggggccgaggccgcgatgcgtgcggaggccgaacggacgcgcacacagcttatggatacatatcgtgagctgggtgcgcggaccggtgacttcgaggtgccggaccgagagcccgggcttcgctgtctggaatgggtgcaggaagagctgcaggaactccccactgtcttgggggggtttatgtcgtacgcctccctggtcacctgcgagggggcgatgaacgcactctcccgcgaagggtgccggcacttcgaggtcttcgaccaggcagatgaagattttgagcgagatgtctataaggtcgaagaccccgtagtgaaggaatccgccggggccctctatgaccggatgtggggtccgcacggtcgtgaggtggtcagggagcgggccgaggctgcgagggctcaggcggcgcgtggcgagcgggtggacgacttcggggcattgaacagcgcgctgcctgacccggagccgacccctgcggaggccgtgtctggggtcgcatgggagccaaccccgaagtccgcggaagacgcaccggatgcccccacatctgctgcggccggcgaagacctgcccccaaaggtggccgaaggcgcacctgatgcccccgcagctgctgtgccgagtgctgaagatcccgcggcggtggcggcggaaacaacggcggaagcagcggcggagccaacggcggaggctcccgcagcgttagggccttcgcaggttcaagattttgggcctgcgcacgcaaccgctactactgaatttttggcggcttcgaccgcggaaggtggtaatgaatatggtggatctgcatctgagttttttgattttactgactctgggagctcggttgagtggactgaggagtcgtcggaggaggacatggattattttgcggccttggacgtggctgcggcggaggcttcgccacacgccgcggacgcgcaagacgtgccaggtcctagcaccgggcgccgacgacgaagggcggttgcaaagcgtagggttagtacggaggaaggggctcggcttcgtgtgagtagggctggtcggcaggaactgttgtctttgccggccgccgcgagtacaggggaaggggaactgcgaagtctttttgcgggtgaggagcttaggataatgttgtttaattatagggagatgggaattattcctaaggttgagccgatgtag

SEQ ID NO: 5190 - DNA, 180 bp, Zea mays
  Peptide Sequence Number=SeqID_48565
atggggaagtctgtcccatcactcctcatgctcctcctcagccgagtgaccgcacttgtacccaccataaccggaatgggagaccacgtctcaggtcgcgtgaggggtaaagtctgcgggcaggttcactcaggtactaggcttaccgatttaccatatttctcggtatccacacgttaa

SEQ ID NO: 5191 - DNA, 681 bp, Zea mays
  Peptide Sequence Number=SeqID_48566
atggagtctcgccctctgcagcccgggtggcgttcccttgattccgagactgtcgggttcagggcggacgacaccactgaggtcgcagcgctaaaggccttgacaaccttctgcggataccatcccctgaatatgatgatgcacccacttggactcttccccatcgagaagagggatgacccaatgtggtgcaacagagctacaaagatcaccctcgataatcgggaggacttggtagtcaagttgtattcagaattggtggagaaagatatacaggtggaacagatgaaccagcgcatcctgactctagagcagcaggccttcaacgacctgtgccaatatgcgggttatcatgcagattcagataagaataagagggaccatttccgaaggggactcaacaccaaacatcatgagcgcctcaacactgttcgtgctgatagctacaatgaactggtcaaccttgccatatcacaggaagactgcatcgtagcccaccgggcagagaagaagagaaaatcaccaatgtcagggttcccaactccagctcagaggttccagattgtcaccaacaatcagagcatgggattccatcagcaaccagggagatgggtcattaggctgccacagcaacagcaagtacctaaccatttccccgctcccgctccaaggaataattag

SEQ ID NO: 5192 - DNA, 611 bp, Zea mays
  Peptide Sequence Number=SeqID_48567
atggccatgattggttcaacatcagaaaagatgtacctctgccagcaagcttttgaacatgggcagaagaacacctccacgtgttcgacgcgctctgcgcgcgccagagcacgcccgcgcccgacccctcgcgcctcgcgccacgccaagccacgctcgcgtctcctgctcgcgcctgcgcctataaatcaccctcaggcgtcgacagtactcctccgcgcacgctcgacctcaccggagcccgaaatcaccggcgtttgccccgcgcacggcgtgcccacggcgacccgagcacctgccaccgtagaccggccagcagagccctttcctagccacgcccgacccttggaagagactgtgcatgcctcggtgaagctccccgagcaaggaatcggaccatgcttcgccggagaagccagtccacagtcgccggacttcgcccgactgcccaaaacggaaaccggccggaacacccgtcgccgacgagatcacccgcctgcgcacgtagaccggacgattccgaccacctgcgccatcgagtcgtacaccgctgtgaacgccaggacctcccggagccaaccccgcccctcgccggacctctctcaccgccg

SEQ ID NO: 5193 - DNA, 456 bp, Zea mays
  Peptide Sequence Number=SeqID_48568
atgccgaggttcacagccatcgatggcggtgaagtcctctcgtttccccatctcaattgttgtccaacgacgatgatgattgagtcacgacggggagagaggatttgggacccaaggtactcgaattttatggttcccgtaggccggtccggcgcaggcaatggactccatgagtcttcgatgaggttccaccatggtcgggcgtggttgttggagggatgggctgacggcttgggtcaacctgctggtgatgaaccagtgccacatggactagccgagctgactaacccaccgggcccgcatttcaattctcttgcacgggcccgagtcactggcccaggtggaaggggtggcgcctgggctggagaaggtgctgctggtgtagatgtgctcgtgttggtgttgatgtccgcatcaggcgtgatcctccctagttggacaccggactacgactaa

SEQ ID NO: 5194 - DNA, 372 bp, Zea mays
  Peptide Sequence Number=SeqID_48569
atgtctgaagataagaaagttgtcgctgaatcgaagctgagcctttctgaggagatgaatctcggctttcttgaatcaatagcaaagacaaatacagagaagattactagagagattttagagggtttatctgtgtcacacccgggtttcggggacaccaagacccggggcgaacataaacaccaggatcagaaatccatggcccagatctgcacgcgcgaaggtgttcaccagatcgattttccacctcacatctctggatcaacggtccacccatcgtctaatcctagccgcaaagtgaaccgggatgcgatcctgcccgctggatctgagatccatggccagccatcgcccaagccccctaccatctga

SEQ ID NO: 5195 - DNA, 118 bp, Zea mays
  Peptide Sequence Number=SeqID_48570
agatgtatggtttaccggtggtgatgaggatgatggttttggttatgactatggtaatggtgaagatgaagtcggggaggaggacttccaggagttccaagagtacgatgagttctag

SEQ ID NO: 5196 - DNA, 270 bp, Zea mays
  Peptide Sequence Number=SeqID_48571
atggagggaggagagaggaggagcggctgggagatgaaggccgagggagctgtcgtggaagaagcaggagagaaggagctccgcctcgcccaacctcaggcctcggcctcggaagaagatctccgcctcgcccgaccccaggcctcggcctcgggaggagtcacaacctcgcccgagcccagcctcggcctcaggagaaatctccgcctcgcccgacctgggcctcggaccgactacgctacaggggatacatcattaccctacccctag

SEQ ID NO: 5197 - DNA, 141 bp, Zea mays
  Peptide Sequence Number=SeqID_48572
atggcgagagtagcgtgtaccctccatggcaagaggctggacggtggtgtatctgtgctctcgcctttccttgactcccaaatccagcatatccttgagagtcttttggatacgagtcgcttggattgtgattggtattaa

SEQ ID NO: 5198 - DNA, 387 bp, Zea mays
  Peptide Sequence Number=SeqID_48573
atggcccgcacccgcgcctataaaacgcccagggaccttgaccgtaccccttcgcacgagctcgacctcaccggagcccaaactcaccggcgtttgcccgtgcacggcgtgtccgcggccgcccgatccccttgtcaccgtagaccggccaaccaagcccttcccaaccctgtccgaccctcggagaagactgagcacacctcggtgaagctccccgagcgaggaatcggagtttgcttcgccggagaggccagtccacggtcgccggactccacccgaccgccggcgagcgtagaccgggtaatcctctgcgccattcctcgattccttgtgcacacagcctctacgtcaccccgtgaagctcactgtgccattggattgaactag

SEQ ID NO: 5199 - DNA, 297 bp, Zea mays
  Peptide Sequence Number=SeqID_48574
atggagacctgtgcactcttgttttgcttaggaacgagggagaagaccgaaagggaaaaggatttgaacatgctggattcgaactacagaagaacaccaacttgtgacggtcaccatggtcacatgcgggctcggattggaatgttcaagcacaacatggaaagcttatcaagtctactttcatatggattcagaattatagtcatatttgttgacgagtgccctagtggccagggtgtcacgctccacaagatcgtgacagccataggaggtggtgtatcggttgctaaggcgtag

SEQ ID NO: 5200 - DNA, 588 bp, Zea mays
  Peptide Sequence Number=SeqID_48575
atgtcgcccctgttcatcttcctccaactgctcgtgcccacgatcataggatttctggcccctgtttggttcagcttctgggcggcttctggccggcagaagcagaagctggagccaaacggtttgcccttatcaactcgctgtcttcgtcttaggttccaatttccagtgcaaccaagtacactaaccaacctaaatccacatcagatggattcagcagactccatagccgacaaggcaattggaaggatgcaagagattgcggacaagatattttccgtagctcgtgaaacaatccgtccaagacgcgggttgacctcatttgaggctaccaaattatgtgtagcattggaggacattgcttgcatgcttgagcaagactctctggtgttgcaagagaatttggacaacgtgaacaacgtaaacaaccctggtgaaagcagctacgaaccgtcagccttgtcctcaccaccccctgctgacgagtaccttaatccggattgggactttgcggagcacttcgaaaacttctgtggtcttcaatatgactcagaccagatgccatcgtttagtgacaatgaagtttaa

SEQ ID NO: 5201 - DNA, 510 bp, Zea mays
  Peptide Sequence Number=SeqID_48576
atggaatgctgttatcaagttcttatacgttcttaccaagccacagtggtgaactgcaatcaacaggtggaaccggtgaaagattggatgagcgattgcgtggagaaacagaaacctgctcgtcgtagaaatatgtggagttctgggtgcaaaggacggatggaactagcagaatggcagtaccgtaaatattgtactagcgatgccaaaaaggcactagtaggaatcacaggagaaaaaacactcgataaactcaccgatcaaccagaaaatctgataccacttgatatagctgaggtgcctgatcttttggcgagtagagataattccgatttggcgaaagatgacccttacgatccgactacgacgagcaagcccgaggcgccaatgcaatcgctgaaccaactccctgtggttaccgaccttgctgatgcgagatcggccagatcacgaagatcgtttcctgtgcgcaatcgaagaatgaacaagaaaaagatgcgagcaatctaa

SEQ ID NO: 5202 - DNA, 96 bp, Zea mays
  Peptide Sequence Number=SeqID_48577
atggcctctcaactcgagctacctgataatctatctaatgtgcataatcgaaacaaggacatccatccacaggaagatgaccgggggtatcactag

SEQ ID NO: 5203 - DNA, 606 bp, Zea mays
  Peptide Sequence Number=SeqID_48578
atggccttgctagactctcctgagtgcttccagtccgaggtggctctcaactcggtgcgcaacctgctcggaaggggtgcgttggcgttcgccggaaggatccatgtcggcgccactcccctcggtgatctcgccgccgaggagttcgtgctcttcgtctccaacttctcctgtgggttggcgctgccgatctcgcctttcttcctgctgctatcagaggagcttggtctccaactccagcacctcacgccccgctccatcctccgggcggccatctttgctcacctttgggagatgttcgtgggggtggtgcttctttcgacagcgcccgggcgaaagggtgtcgtgcggcgaccttccggaggtggaaagcgaggtggaaagcgagctgagctgcggctccatctttcgtgcctccatctctttggctttaatggcctcaacgttgcctccaacgatgagggctcctttgctttggcgcatgtatcgaggaggccgctgccgctggcaagctgtagcactaggttgccgccagtgccgctcttcccagtggccgccatcgtgttcaaggttcgacgtgtcgaggctggataccagcatacctaa

SEQ ID NO: 5204 - DNA, 210 bp, Zea mays
  Peptide Sequence Number=SeqID_48579
atgggggccgcgggtcagtcagccgcggggacagacgtggcagttggcgtgaccgaaggcggactggcagtgattacgtcagcaagcgtacggaagcggcgcaccaatcgccaaccaggctttggccccacctgcaagctcgtatcctcccttgaggtgggcccgggggccactgttggtaccttgaaacaggggtaccccttactatag

SEQ ID NO: 5205 - DNA, 456 bp, Zea mays
  Peptide Sequence Number=SeqID_48580
atggactcaactaaaacgaacgcataccggagtatggcagcgcaggctcggtccacaggatggcggcactgcggtggaggaggaatcacgtcgagcgattcgtcgtcagcacgaactccacactcacgacgattgccacgaacgggttccagacatgtcggcgaaccaccagcgtgggttcttactgttaatgaggcactgtcggtgtggttcgactgcggcggcggtgggacgattgggcggcggtgttcgactacggctgcgctggatctaggttatggaggtcaaggcagccgagcagggcactgctttataccgggtcgaccacccccctccacttcccccgcgagccgagctacacggaatccgttagtcaactaccacaccgagaagcacggagaagaagagagctacgcctgcatggtgtgtcccgcggagcagtgggatgacgtgtga

SEQ ID NO: 5206 - DNA, 802 bp, Zea mays
  Peptide Sequence Number=SeqID_48581
atgacacagtggttatcccgtggttcggccaagtacaaaacttgcctactccacgttgtggcgtcccaacggacgagagttgcactcaactcctctcaagcggagcgcggcgagcgggtggacgacttcggggcgctgaacagcgcgttgcctgacccggagacgacccctgcggaggccgcgactggagtcgccccgggatcgaccccggagactgcggaagacgcaccaggcgcccccgcatctgctgcggccggcgaagtcctgcccccaaaggtggccgaaggcacgcccgatgcccccgtagctgctgtgccgagcgctgaagatcccgcggcggtgggggcggaggcagcggcggaggctgcggcggaggctcccgcagcggcagggccttcgcaggttcaagattttgggcctgcgcacgcaaccgctactactgagtttttggcggcttcgaccgcggaagatggaaatgaatatggtgggtctgtatctgagttttttgattttactgactctgggagctcggttgagtggactgaggagtcgtcggaggaggacttggattattttgcggtcttggacgtggctgcggcggaggctgtgccacattttgcggacgcgccagacgtgccaggtcctagtaccgggcgccgacgacgaagggcggttgcaaagcgtagggttagtgtggaggaaggggctcggcttcgcgtgagtagggctggtcggcaggagctgctgtctttgccggccgccgcgggtgcaggggaaggggagctgcgaagtctttttgcgg

SEQ ID NO: 5207 - DNA, 204 bp, Zea mays
  Peptide Sequence Number=SeqID_48582
atggagcctggcggagggacagctgtcggagcggttgagtccttgctgacgtcctcttgcttctgtaagggggctgagagccgccgccgtcacagggttgggcgatgtggaagttcctccgaggccgaggtcgagtctgtcttccatggtcgaggtcgagtccgagcccctgggtcgggcgaggcggagttcgtcgtcttctag

SEQ ID NO: 5208 - DNA, 306 bp, Zea mays
  Peptide Sequence Number=SeqID_48583
atggaggccagatccagctcctgcctcttgggcgtccgtcatccttccatctcccgccctccctcgtcggagcacgagcaccaaaggtccccgtactgcccttacctctgctctccttttcttctcctgttcacccctcgtgccataactgggcgaccgccgctcccgccctacgccaggactggcgtcctgccatggctccacgccaagattgttgatcccatgctgcaggtcatcagaaggggagcagaacccaagcaactagccttctctgctgcccttggtatcacgattgggatctttccg

SEQ ID NO: 5209 - DNA, 954 bp, Zea mays
  Peptide Sequence Number=SeqID_48584
atgagctacatggccaacggtgcaggggatttcgtaggatctagcatggccggggggcaatcccgcacgggtgtgggcgcgcagctcgctggagaaaaagtggcactatggcacaagtatggctacacaaaagaagagaagaggaacgagggaggaaagggggagttggttggtgttggggcgaaggcgaagacgctacccttcgcgcgaagccttcgtcgcctcgctgcaccaacgaaggcgagatggtcagcgcagttgcccttcgtcgtctccatcgcaagacgaaggccagactccgaagagagcaagttccaacatttggcgcccaccgttcgtgctacgaacaaaccaccagcgatggcacccaagagagctagttcgaaggcagccccatccgtcgatgaagtagcgaaggcagcgctgctagccgagaaaaaaaggcaaggccctcgcagacaacacccccaagaagcctgcgaagacgaagctctcaacaagagacagcgccacgaagaacccactcccgaaggcaccctacgcacctgcagttccggagaaccacaagcaccacccccaggcttcgctccaccagagggcgaagacgcaacagaggaaggcgaagtcatcggcgttgtagccgaagaacagctacatctatgggccctgcgcatcaagaaccacaacctccaaaaacagaaagacatcctcgaggccaagtgccaacgtgtcaccgtgcaagccaaggtgcgccagatgatacgagacgaggaacagagagcccgggaactcgagcaagagattgcgctcatgcagaccaaaggccagcacgatctgcagcacggcccgcccctccaacagcgcgcgccagccggagacttattcataccccagcgcgggcccttcatcccgcaggccgcagccttccaaggcatcaactaccttgatgagtga

SEQ ID NO: 5210 - DNA, 699 bp, Zea mays
  Peptide Sequence Number=SeqID_48585
atggcgagcgacacgaatgcacacgagaggggggggtatacgaggggtagacgggcggtagacgagcgtggacggagtcccgtcaacgcactgcgcgtaagcgaactcgacgcgccggtggttaggggcatggggacggggctgagcgtgtcgagcgcgcagctactcggccgcggcgcgcaggggcgaagcttcgccggcgaatgggaggacgcggctgccgcagcgctaggcgccgacgccctgctctgggagaatacggacatgggaggagggacgagggcgtctgggccggctcaaccgagccccggccatggcgagcgagcggcgaggaggagagcggtggagagaagaaaggggggacgagctcacctcggcgaagcacaacgaggcgctgcgcacgcaagttcggcgacctgcacggcgacggcggcggcgctccgggcggggcgcggctccgacggcggcaatggcgaggcggagagcgaggtcgaggcgaggagaggcggttgcttcttcctcagagtggtgaccccatctgactttgcacattctgatggtgttcctccggcggagtcctacaactccgtccatagagcgcttgaaacagtgacatcttcaagctggcctggtaactattgttgtaggagaattctgcataagtctgaccgtctgtctgcgggtgataagccgagctga

SEQ ID NO: 5211 - DNA, 639 bp, Zea mays
  Peptide Sequence Number=SeqID_48586
atgggggcggtgccgggaagaagctctatagcaaactcaacttttcgctctggtggcatgcctgggcgggaagacgaggtgcctgctgattctgcctctggaactaacctcctcctgactgattgttctagcgattctgctgctggtgctgagggtactgcctttgaaattgctgttgctgagatggacgctggtgctgaaatgtggggaaggagcatagcgagacagctacagaaacttgtctcggtactcaccgacggacataggcccttgcttgagtgccaggaactcctccttcgtcactgtcttcgggcctgctggaacatggtaatggcagaaattgtctctgaattcttcccacgtgatggcgtcagggttggcatgggtggcaagcacgcttgtctctatgcatctaaggcatctgaggctaaggtggtggctgctgctgctgctgttgaatggtggccagagtctgaccaatggcttgaactacctaagtctacattaggaacatctgctcgatggtcatcgggggcggtggtggtagttgctgttgctggggtgcctcatcctgcggggctggccactcctgctgagcacgccttcctcctctgcgcctgttttctcacatctacataa

SEQ ID NO: 5212 - DNA, 315 bp, Zea mays
  Peptide Sequence Number=SeqID_48587
atgcaagatgccgcacgacgtgcgctttcgcactactgctcggtgctcggtggggtagctgatggtctcaacctgaagtattacccccgccgtccatcttgcagcacaggaggcgtggttgtctcacctgttgatgagctgagtagggctcgtgctgagatcgcccagctgtgggctgagcgcgtggagcatcgtcacctggaggatggctcccccgctcccgtcgggactcagcacccgtaccgctcacctcagcgtggacaccatgcttatggcaaccccgactgtaggaccaagataaatttagaaccatag

SEQ ID NO: 5213 - DNA, 261 bp, Zea mays
  Peptide Sequence Number=SeqID_48588
atgactatgctggaagacaacacagcgatactcgatggaccaagtgcgccagtcaagtgcctggtgcagcaggcagctactccagcggttgggtgctcagtggtggtgcagggggcgcctccagcgggagcacaggggaacagctcctcacagactctatctcctgctgaagcgagaaagaagagtcctgctactccagctcctgtcgtcgacgctcctgctcctcgtgcgggcggtggtgcagcctctccaagtggctag

SEQ ID NO: 5214 - DNA, 162 bp, Zea mays
  Peptide Sequence Number=SeqID_48589
atggggctcagtgtatgcggctcgctctgccaaggtggtgatgaggatgatgattttggttatgactatggtaatggttgtccgcgttgcaaccactgctcaggtgaagatcaagttgtggaggaggacttccaggagtttcaagagtacgatgagttctag

SEQ ID NO: 5215 - DNA, 471 bp, Zea mays
  Peptide Sequence Number=SeqID_48590
atgcctgtcccgcctcctcctccgtcggcggggaaggtgacgggacagactcggatgttgctcttccaccacgtggggaagtcatcgtcgattctgccgccggcgggcgggctgacggtcgccattgtcgttgtcgtgtggcggaggaaggagtatcatgtcgtagctgccgtcgagggacatgaactcaagactcccgaagtggagcatcgtctcgggttggagaggttgctggaaacgacccatctggagcttgacgggaagctgttcgtcaacacgcagcaggcccctacctggcgcgccaactgtcggcgtttcgaccccgggaggtccttggaccgacgagtaaattgtcgctgcgtgtcccagcccagatgggtcggcgcgagacggaacacaaggggggaaaacagtaaggggaaaccgcagcctcgtgttgttctgcgcccagggcggatgcgcttgcagtag

SEQ ID NO: 5216 - DNA, 168 bp, Zea mays
  Peptide Sequence Number=SeqID_48591
atggagctcaaggcgtcaagtggtggctcactcggactcgtgctcctctgcaaggcactgttccccatgagggacatggttgctggagtgacttggtcgtccatcttgccaccaggttggactgtcgagtgggaccccgcctcggccgaggaggagcatgaggagtga

SEQ ID NO: 5217 - DNA, 777 bp, Zea mays
  Peptide Sequence Number=SeqID_48592
atggaggcggaggaaggcgtgatggcgacggacttcttctggtcgtacacggacaagctgcatgcgtcgcgccgccgggagatcctggccaagtacccgcagatcaaggagctcttccgtccggatccgtgggccttcctcaagaacccagctgaaacaacatgctccaaatatgctaccaacattcaacagagaatggaaaaacacttatttacaccagaagaactaaaagttaggcaaaggatgatgacaatatctacagttggtgttccaaatacaataaaaatgctagcatctcacaagcttcagtcaacgttggcagtcagtctgcatgccccaaatcagaagctgcgggagacgattgttcctagcaccaagtcttaccccttgggagcactaatggatgactgcaagagttacttccttgaaactgggcgcatggtatccttcgagtacactctgctagctgggattaacgatgaaaagaagcatgccgaagagctagcagaactacttcgtatgtgtggaggtggttaccatgtgaacctgattccctataacccaattgaaggctccgagtacaagagaccttacagaaaagtggtccaaacctttgttgatgctttagaagcacgcaagataaccatcaacgttcgacggacccgtgggcttgacgctaacgcagcctgtgggcagctgaggaatgagtttcagaagaatccactacttgagattgaaccgtcaccctccacagagcggaccctcgtaactgcttaa

SEQ ID NO: 5218 - DNA, 801 bp, Zea mays
  Peptide Sequence Number=SeqID_48593
atggcacggggtggcgctggagcccgaatgcgggtaggtggattcgtcggctccttttcacgccggaccctcgccctgcttcctgttcggggagtccatgggcggggccatctgcctgctcatccacctccgcacacggccggaggagtgggtgggggtggtcctcgtcgctcccatgtgcaggatctccgaccggatccgcccgccgtggccgcgactggatccgctgcgtttgggggcggcaggatctccgaccggatccgcccgccgtggccgcgaccggatccgttgcgtttgggggcggcaggatctccgaccggatccgcccgccgtggccgcgaccggatccgctgcgtttggggcggcaaggaagcgggtggggcttctagggttcgggtggcgggcgtcggggtagagagtgcctgcggcgattctggcgggcatgcgcagggtggggcagggtgtggtcgagcgggccatgcgcaaccttccatccgcgggattttgcgagcgttgctggcacggtggatttgcaggagttgctggcgcggagctttgaggacgcgaccgatttggggactgcaggtgttggcgattttgcgggcgttgctggcgctgtggtcggctacggccacgaggaaggcgacggggactgcgggcgttgctggcgcagggactgcgggcgcgacggctgtgctcgcctgcggccgcgaggaaggcggcggggactgcgggcgcggggagggaatcgcgggcggagcgcgcgatggcagaacacagaactgtggacgcctacactaa

SEQ ID NO: 5219 - DNA, 636 bp, Zea mays
  Peptide Sequence Number=SeqID_48594
atgtcttcgcgcttccttatgcatcatgtctttccaccttccaagcccccggatgggggatacccgccgtctttccgccttgtcgttgggggaacgcaactccgcgggagttggtacctttcagccatcgttcggcttcaaggattttcatcagccagcccggctgtacccctacgccggtggtcacctgagacggtgaccaccagcccctgggtggggagaagcaggccgggctgcgatcttggtcccaccctcagcttcaaggatgttcatcatccttgctggggtggaggccgggctgagccagagctctacctcccgcgcgggttcgtgggtcggcctctccttcggcgttcgagggagagggcgctcactggccctgcgggcgggtcggacttcgacaacgcggggccggtcgacggcgggcgtcgtcagcctcagcgcgtcgggctcgtcggcttggctcccggtgccccctcctgccggaaggcggctgccgcgccgtgtgcacgggaggaccgcccaagatatcgcgcgctgccagggcggcgttcgtgttctggggcggtcctgcctttgcaccggtacggcgcctccgtgcggaggtcggtgccccactcgtccgggaggatctga

SEQ ID NO: 5220 - DNA, 846 bp, Zea mays
  Peptide Sequence Number=SeqID_48595
atggaggcccaggcccacgcgtcatgcaaccggcgcgccgaatgcttcgtgcatgcaactgcaccgccacttgcgccaccaccgcgcctcctcgactgcggaaccaataccgcgactcgaggcgacccagatcacgacccagcggcgccagcctggcgcgacggcggcgcctctggcaggagaagcgagcgacgcttcgccttcgccataacaaccgcgtcaaaaaagggaccgggaaagggggataccccgaaaaggatccttccccgtgaaggaaccaggctccgagcctccctactgatcagaggttcgaaggctggcccctcggaagggttcaacagccgcctcagagcgcgtgggctccacacccactactggtcagaggttcgaaggccggcccctcggaagggttcaatggccgcctcaggctactcgggctccgcgcccactactgatcagggcgggaacgatcttgtaacagaatcccatcggagggaggcatcaagccctcggaccccgtcgctaggggaccgggtccggcagatcacccgcagctcaccggagacaccatgttcggcgcccaccgagggcaacatggcgctttcccccctcctccttgcggaaaggcgacgcaggggcgtatgtaaaaaagtcgagtctgtccctaatcgccctctcgccctgtgcggaggctcgggggctgctctcgcaaacccggctccggccgaaccgttgacagcgtcaacataccagcccgagaacttgggacccgaccgtacacccgggctacatccagctcgcatgagggaacgaccagaccagccgaagcattacgcgaggcattaa

SEQ ID NO: 5221 - DNA, 852 bp, Zea mays
  Peptide Sequence Number=SeqID_48596
atggcgcttcctgttgacgtggcgggtctgtgccctaggcagggtgacatgggggctcctccgaagccgaggttgagtctgtcttctgttgctgaggccgagtccgagccatggggtcgggcgaggcggaggtcgttcggccgaggtcagggcggagtccgagccctggggtcgggcgaggcggagtttcgtcgtcttccgggtcttagcccgagtccgagccctggggtcgggcgaggcggaggtcgttcggccgaggccagggtggagtccgagccctggggtcgggcgaggcggagtttcgtcgtcttccgggtcttagcccgagtccgagccctggggtcgggcggagcggagttcgccgtcttccgggtcttagcccgagtccgagccctagggtcgggcggagcggagttcgccgtggcgcctttggcaaggcctgactgtctgtcagactcactctgtcgagtggcaccgcagtcgaagtggcgcaggcggcgctgtccttctgtcagactggcttggatcctgacggctaaagggagcatctgcgcccccggcatcgacaacaccttcagcgaggcccgacctagcctcggacggcgacgcgatccaagggtctctgctctgaaggacaacgtcatcaccaagcccgggccattgccgccagggtcttctccgagaatccggcccgagcaggcggctcggccggtcaccccagggcctcggccagctgtcctccaaggacatcagcccggcccgaggcctcggcagccaactccgcctctgttcgcgctgacaccgctacccctggcctcggctcatcgaagagtggccgaggggttcctttaa

SEQ ID NO: 5222 - DNA, 811 bp, Zea mays
  Peptide Sequence Number=SeqID_48597
tcacctggagaggctgcaccaccgcttgcgtgaggagcaggaacgccagcgccagcacagagagcagcagggctcttcctccccaccccagcaagaggtggagtccgtgaggccccgttcctctgttgcccagctggaggcgccccctgcaccaccgcgggacgtcccggctgttggaggagctactggaggagatcctggaggagaccccgacgacgacgactcagaccacagcacggagtcttctgagccgcaggaggcggaaggatgggtcgcccgacccatcacccgtgacgccgctcgcggttgtcacttccacgacgcactcgacaccttgctgcgccaggctttcgaccggcacacctggtcgatcgagtatcgttgtgtagtctaccagcacagtcgcgggaggtacccggaccgctgggaggctacctgcctagttcgccgtccggaggatgacctctggggtgcagaggccgtttcggagcactattccatctccgagagggacactgcagaggcggctatgcaggatgcagcatggcgtgcactctctcagtactgttctttgttcggtggcgtggccgatggtcttaacccttcggtactacccccgccgccctactggcagcacagagaggctcgaacggagattgcggagttgcgtgctgagttggcagagcgccatcaccaggagggtggttctcccgcacctgttgggactcagcacccataccgctcaccgccacgtggtcaccacacttatggttcccctgtctgtaagaccatgatagatctggatccttag

SEQ ID NO: 5223 - DNA, 2658 bp, Zea mays
  Peptide Sequence Number=SeqID_48598
atgcgcaagtgggcgctctcctccgcgctcctccttctcttcctcctcaccaccctccccgacccaggcatgtccccgcccgccggagatctccagttctttaaattcaagtccctatcagctctggtttctatctattgtgctgtgcctgcataccaaaagcatacatataagtggaagttcaatcttctgatccttgtgaaatttcaatcttgttctgaccctgcctctactgcagctaagaagctacaggtgaatgcggaagagagcagcgatgacttagctaacccacccaaggtagaggagaagcttggtgctgtccctcatggcctgtccaccgactctgaggttgcccagagggaagctgagtctatctctaggaagactcttaggagctccgccgagaagtttgagttccaggctgaggtgtccagactcatggacatcatcatcaactcactctacagcaacaaggatatcttcctgagggagctcatatccaatgcctctgatgcattggataagatcaggttcctttcccttactgataaggaagttctgggtgaaggtgacactgcaaagcttgagattcagattaagttggacaaagagaagaaaatcctctccattcgggataggggtattggtatgaccaaggaggatcttattaataaccttggaaccattgctaagtctggcacttcagcttttgtcgaaaagatgcagtctggaggtgacctcaatcttattggacagtttggtgttggcttctactcggtgtacttggttgctgactatgtcgaagtggtcagcaagcacaatgatgataaacaatatgtttgggaatcaaaagctgatggatcgtttgctatctccgaggatacatggaatgaaccccttggccgtggaaccgagataagattacatctgcgagatgaggccaaggagtacttggaagaggataagcttaaggatttggttaagaagtactctgagttcatcaacttccctatctatttgtggtcaaccaaggaggttgatgttgaagtgccagctgatgaggatgagacaagtgaagaagaggattcgtccccagaaactacagaagaagagacagaagaagatgaagagaaagagaaaaagcctaagacgaagacgataaaggagactacttctgaatgggaacttctgaatgatatgaaggctgtatggcttcgcagcccgaaggaggttactgatgaggaatactcgaagttttaccactcactagccaaggacttcggtgatgacaagcctatgggttggagccacttcactgctgaaggagatgttgagttcaaagctttgctcttcattccaccgaaggctccgcatgatctctatgagagttactacaacagcaacaagtcaaacctcaagttgtatgttagaagagtgttcatctctgatgaatttgatgaccttcttccgaagtatctcagctttttgaggggtattgttgactcagacacactgccgctgaatgtgtcacgagaaatgctccaacaacatagcagtctgaagactatcaagaagaagctgatccgcaaagctcttgacatgattaggaaacttgctgaagaagaccctgatgagtacagcaacaaggataagacagatgaagagaaaaatgagatggaggagaagaagggccagtacgccaagttctggaatgagtttggcaaatcaatcaagctgggtatcattgaagacgcaactaacaggaaccgccttgcgaagcttcttagatttgaaagtaccaagtcggatggcaaacttgcctcccttgacgagtacatttcaaggatgaagccagggcagaaagacatcttctacctcacgggaagcagcaaagatcagctggagaagtctccgttcctggagaggctaaccaagaagaactacgaggtcatcttcttcaccgaccctatggacgagtacctgatgcagtacctgatggactacgaggacaggaagttccagaacgtgtccaaggagggcctgaagctgggcaaggactcgaggctcaaggacctcaaggagtcgttcaaggagctgacggagtggtggaagaaggccctggagagcgagagcgtggactcggtgaaggtcagcagccggctgcacgacaccccctgcgtcgtcgtcacctccaagtacgggtggagcgccaacatggagaagatcatgcaggcgcagacgctgtcggactcgagcaagcaggcgtacatgcgcggcaagagggtgctggagatcaaccccaggcaccccatcatcaaggagctccgcgacaaggtcgcccaggacaacgaggatgaaatgaaacacgatgctgattcgtttgttcgttggttcgtaaaacaacaacaacagagcgaggagctgaagcagacggcgaggctggtgtaccagacggcccttatggagagcgggttcaacctccccgaccccaaggagttcgcgtccagcatctacaagtcggtgcacaagagcctggacctgagccccgacgcggccgtggaggaggaggacgaggccgaggagcagccggaggtggaagagaaggagccggcggccaaggaggggtcggagccgtccttcgacaaggacgagctgtag

SEQ ID NO: 5224 - DNA, 276 bp, Zea mays
  Peptide Sequence Number=SeqID_48599
atggccgttggaaggctgctgtcgcatggcgcaccggacggtccggtgcgccactggacactgtccggtgcgccagccacgtcagccagccgttggggttcgaccgttggagctctgacttgtggggcctctgggctgtccggtggtgcaccggacaggtcctgtagactggccgatgtccatcagctcgctcgccctggtgggagtcttgcgacccagcttgctcaccaggtcgcgacaagtggtgccggcgaggaacgcgccgatgacatctga

SEQ ID NO: 5225 - DNA, 441 bp, Zea mays
  Peptide Sequence Number=SeqID_48600
atgggcgcaatacaggtcaaagctccgtccgctcaaggaacacgatctcgcctcgccccagcccagcctcgggcaggaacagtagacccaggcagattcacgcctcgcccgaaggtctcctcaagcaacgggcgcaccttcgactcgcccgaggcccagctcgggcaggcttcatggagaagcaaccttggccagatcgcctcgccagccgaccggatcgaaaacatcaccgcctgcactgctccgactgctgtgccacccgccagggtgaggctgacagccgccaagtccgacctcgggtgccataggaagctccgcctcgcccgaccccagggctcggactcaacctcgacttcggacgatggtctccgcctcgcccgaccccagggctcggactcaacctcgacctcggacgacggcctccgcctcgcccgaccctag

SEQ ID NO: 5226 - DNA, 279 bp, Zea mays
  Peptide Sequence Number=SeqID_48601
atggcgggtgccgtgctggaccagcttgcctcgtcgtcgtcgccgcggtccgcacacggcgtacgcgttcacgcccgtactgccgccgccggcggcggtgggcgcgcgttcacgttccataggttcacaccgcggttggttgggctcggatatacaccggacgcggacgggccggacgacacgtcgttgcactctgctctgcgcagccaggcagtggcaggcactctgggcctttggggtcctggctccgcccgtagtccggccaaccggtcagcgtga

SEQ ID NO: 5227 - DNA, 963 bp, Zea mays
  Peptide Sequence Number=SeqID_48602
atgaacctcgccgtcgcagccgcactgccgtccgtgacgccacgtaccggcgtcgtgctcccacggagcagtcgccgacactgcccccgcggggtcgtcccacgcgcggcctcgagctccgtttcctcctttacctccccctcagcagcggcggcgcccatctacacgcccacgccgcaggaccggtctctccggacgccgcatagcgggggggctgcatacccagatctcgacttctgcagggggttcaaaaagtatagacgagacctggtggttgggcaccttccgcaccgcccgcctaacaaggaagccgcgtgctcatgtgatgacggccatggggttgccctggaggccacatcaagcggtggaacctcccaccgaactgatcccactgctctgcgaaacggccaaaaactctctttgagccgagtgaatgcatctggagttggagagggcgggtgggagggcgttgcggcggctgatggcgcggcggctggtggtggtgaggataacctggagctgataccaggtgtcatggaccttcggtccatggggatatctgtcttctccggcgaggttatatccctctgccgcaggcttggttctaggctagcatcgatccagtgcaatgtcttcccaggagcttctggtgaagtttctttaactgctgctggtggattgaggaaaattggacttggtgatacctatgaaagtccttcactggtacaatttgtgatacttcgctttccaaatttaacatggcgtgcatcggggtgtgaggggcaatggctagacggtggtaaagagatgagggagaaggtgttggactatcctggacctggagcaaagctcaaggaacttgatcctctcaaggggcttagtgagcaggtctgcaagctggtccttggtgttgatttagcgcgacttgatgctcccttccaccaagccgtctcagatgaagtg

SEQ ID NO: 5228 - DNA, 135 bp, Zea mays
  Peptide Sequence Number=SeqID_48603
atggcggtgcacgctcgccgccggggcgcgggatactggatgaagggggatcattatgttaattggaacatggagcgaccacccgggaaaacagtgctaccacaagggtttaatgggacgcccttggctgattaa

SEQ ID NO: 5229 - DNA, 159 bp, Zea mays
  Peptide Sequence Number=SeqID_48604
atggcgagagtagcatgtaccctccatggcaagaggctggacagtggtgtatctgtgctctcggcaaggaaatacagataccgaacttatcaagtgattagaagcatctacagggttgcccgaggtccgctggacaaggacaactgtaggtgggcctaa

SEQ ID NO: 5230 - DNA, 546 bp, Zea mays
  Peptide Sequence Number=SeqID_48605
atggcactcgacaaagaaggaaacctgggaaccggcaaagccatctttgccgagtgctgttgccaaggcactcggcaaagggactggcaaaggggcccactggaggactctttgccgagtgccggtccccctagacactcggcaaaagagtcctcctttgctgagtgcctacgagagctctcggcacagggactggcggtggggcccactggacccgtctttgccgagggccatgatagcaggcactcggcaaaattggcctctttgtcgagtgccaaagaagacactcgacgaataactaggttgatgttgagctacaagacactactgaaatccggatctttgccgagtgctcgatgttttgccgagtgttttttgtcgggcactcggcaaagtcttgctctcggtaacgatggcgtttgccaagagcaggactctcggcacaggcatacactcgacgatgggcggcaaacgcccgtcaaccacagtgtaaagctgacggctattatctttgccgagcgccgagttctggcactcggcaaataa

SEQ ID NO: 5231 - DNA, 150 bp, Zea mays
  Peptide Sequence Number=SeqID_48606
atgactcttgactgggctgcacaagacgaagtgcatcctgggctcatcagcgaggtggatgatgaagctggacgacataatggcgcccatcgtcggatggggtgccttagaaccaacccgagagtcgtcggcgttggcgacggcccatga

SEQ ID NO: 5232 - DNA, 297 bp, Zea mays
  Peptide Sequence Number=SeqID_48607
atggagaagcagaaatccttgaaatcttggctgtcaaattgcttgccattgtcaactaaacagggttattggtgcccgctagtcttcggtcatgatgaggttgactatgcggtggccctcgctgtcattggttatttggagcccctctgggctgcggacggctggcatgccaatgacatggtagaatacgtcggagggcagggcctcgcctctggcggctgccttggccaatgcgtcggcctcctcatttttggctcggtccacatgctgcaaggtggagacaccaagtgcccttag

SEQ ID NO: 5233 - DNA, 1725 bp, Zea mays
  Peptide Sequence Number=SeqID_48608
atgaaggggcccttcggtgctgtccgcatgagcagcgggcgcgaccttgttgaggagtttgtcgggtatggggtatggcccttggcgcatggctgggcgctgggcgaagtatgccctcgccagatgccctcccgtggcgggatgctggtgcgaagtcctgcctttgcgctggatttgcatggccgagatcctgccgcattcgtgcgtgaagcggaagatggtgcggcgaggatcgtgggtcgctacgtgccgaagacagagggtccgcggagctgggatatccgtgggtccaatgacaagctgaatcgggttttcgaattgaaccgtttgccgtacgattgttatcctggggaagacaccgccgaccgccgcaggaagaaaccgatgggcggtaccgaggaagggccttcgcaagaggctgtcccggccactaagaagagaaaattaggtactatattggggagaaagggggtgtctgataattttgctgtggagttgatgggaacatgtgcggcccccgggggaaggatgtcttcgcccgagctccgggagtcttcggcgcgaatgctggaggttaccgggggtcggtggccaaagaatcttccgatcccttgggcagagggcgaagacatgtctacgtctcgtatagctcatggcttgaggattttctcttacggacgaaatattgctgctgttgtgtcgtcagtgatgaacaaggattgccaggatgctgcgcagaagcgtcgggcggtcatcaggcttcccgatcctaggcgtgaagcgaagagagcgtgggggagtgtgaaggctgtcgcccccggcggtagccagccgacgctggctgcgaaaccggccgcgcccggatccagcaaggtgccggagagcacgaaggcggtcgtcaccgacagaaccaagtctgccccgggtggagctgcgaaggtccgggagctgccttcgccggggagacgtgttgccgacttcggcatgaatattagcgtggacgactatttcgttgggtcgggcgaggggcaaatggttgttgtcccgcctgtggtggcagccacggcatcaaccgcggtggttggggtgaggggtgacgctttctgcgcgagcggcgagatttcgtcggccgctgctgtcaaggacgaggtgggcacccatgtcctgccggctaagggaggcgtcgcagcagttgtcgcagcagctaagacaaatgtgtctgccgaagtcgagagacttcgggcgcagcacgcggacgccgtccgggagaagtcggctgcggagagcaaaaaccgcaggctggcggagaaggtggccgccctagaggccgagaagacagacctccggcgccagctggtggaggaaaggagggaggccaaccaggccatcgccgaggcacaggctgcgcaggcggaggccaaattggcgcgggcggagggaagtctcgccagccaacgcgccgaggaatgggaggtgaggttcaacggtctgtgcagtcgtgtggacaaggccgaggcctctacgcgctcggaggttgagcggacgcgcgcacagctcgtggactcgtaccgcgagttggggcgcggactactgacttcgaggtgcccgaccgagaggcgggccttcgcttcctcgagtggttgcaagacgagccgctggtactcccgaccatcgtggaaggtttcatgtcctttgcctccctcgtcatctgtgaaggggctatga

SEQ ID NO: 5234 - DNA, 315 bp, Zea mays
  Peptide Sequence Number=SeqID_48609
atggagagtcatgatctccgggcagaaagggaatcacggcttgtgggtggtgatgagaatgttggttttggcattgactctgatgatggtaagtggtattctttccgtttggaaagggttgtccgcattgcaaccactgctcaggagaagacgaagccgtggaaggagactttcaggagttccaagattacgacgagttttaggcgtgggttagcggcaacccccagtcggctgcttgtgaaggccgcgtgtatctacgtttcttttacgcactttgattattgtaaagactatgtggatgtcttagacatatga

SEQ ID NO: 5235 - DNA, 354 bp, Zea mays
  Peptide Sequence Number=SeqID_48610
atgccggagcaaggagctgctcaggaggtagccccagatccagcacccgagcctgcaccagaggacctgcctgccactgctttggaaggcaagccccgcagattgccctcctcacgcgacctaagacgaggtctcccattccggttatggtgggtacgagtgcggtcactgcacgacggccagtcgagaaactcagctagtgcttttggcaaccaaaccccacaaccaaacagctgcatgtctagaggttctctggaggagatggttgctgggataacttggccgtccaccttgccaccgggttggactgttgagtgggaccctgcctcggctgaggaggagcatgaggagtga

SEQ ID NO: 5236 - DNA, 1572 bp, Zea mays
  Peptide Sequence Number=SeqID_48611
atgcaggggcactccgtccccacacacatcaaccgtccccatcgattccccgtcagcagagaggggctcaccgccttggcgctcgggtgctggatctggggctacctcctgagcagctccttgctccggcatgaggatgtactctccgtcagcaagattacagtctatcgaaatgcaatgaacattccttccccttatgcaaacagtaaccgcgggaaagaaaagggcggagcggcttaccggcggcgagggaggtccgacgaagggtggggttggctcggggagactctggcggtcacgtcgaggtacggctcgacgtcggagatggccggaatcgcccggtccacgcgtgcaggcgggtgtcctcgtcggcggcgagtataccggccaaaccacggcgaactggttcaatccgagggcacggtgagcttcacggggtcacgcagcgactgtgtgcacaaggaatcgaaggatggtggagtggtttacccggtccacgcttctccgagggctggactgggttgggaatggctctactggccgatctatggtgacagagggattgggcggccgcggactcgctgcgcacgggcaaacggtgacgagctaactccgaaggctgaactgcgaggaaagcaggaggcagctgacagaaacatcgtggaaaccagaacgcctggaagggaagagaccgatgtgatggtgcttctttacttccttgtggggctcaccactgaactaccttatttgccgttctcccctgccgctgccggccttgaatctgtggcaaggttcggccatccgtgctttctgacgaggacagcgcaggcagaaccggtggcggcgagagcaggttgccgacgaccctgcaacaacaccggatccccgcggacacctgggtgcatcgcgccgccctgggccccgctctcaggtctgtctcagcacgcctcctgcgttcccgtgtcccgcctgcgacgtgtgtcccgacagccaccgccacggttctttagcgtcggcggaccctggttcgggccccatgcatcggcgattcggccgcagtcgcgacgcgaagctggacacggcagcactccgcctgcgcgtgatatatatgatcctacaccgcgctgctgctggcgtgctacgtgtactgtgtccgccattccgccagcctttctcgttgtccacgtggtgcgtgccggcgccggtggcatcgcaaagctgcacaggacgtcgggacaggtggcgccggcgccgttgccgaccgaaacctcgccgcgggcacctggcaccgctgcagggagagaggaccttgtacagcccccaaacacgcgacaagtgtcccctcccccgaaagcgacggctttccggcggtggcaactgccgtcactggcccccgcccgggacaaagaccgagacccaccgaaggcgtcgcgcaaaaagaagcggacgacgggacgggacgggacagccgacagctccagagacgtgcgatgtgggctacggcctacggatggacccaggcacccggctcagcggggccgcgctacatattgcaacgtgcactatgcctag

SEQ ID NO: 5237 - DNA, 174 bp, Zea mays
  Peptide Sequence Number=SeqID_48612
atggagagtcatgatctccgggcagaaagggaatcacggcttgtgggtggcaatgagattgatggttctggttatgactatggtgctggttgtcagcattgcaaccactgctcaggagaagatgaagctgtggaaggagacttccaggagttccaagactacgacgagttctag

SEQ ID NO: 5238 - DNA, 210 bp, Zea mays
  Peptide Sequence Number=SeqID_48613
atgcacgacttcctccttgcgctggcgctgcttggttgctctggttggttgctagggcaggaaggcggggtgcctggttgctctgacgctgatattgatttcctccctgctggttattctgacggtactgctactgctgctgaggaaactgcttctggtactgctgctgctggttctgacactgatgctggtgctggtggccttgcttga

SEQ ID NO: 5239 - DNA, 507 bp, Zea mays
  Peptide Sequence Number=SeqID_48614
atgcaagatgcagcacaacgaacactttctcagtattgctcattgttcagcggggtagctgatggccttgatctgaagtactaccctcgtcgttcgaccggcaatgctggaggtgtgattgcctcgccagtgggcgagggcaatcctaggatgaacaacatggtcatcctggctgtcgtgctcaacacagagttggaccacacccttgacgagtttggcaaggttcgggcagaggtcgccgaattgcgtgctgagtgcgcagcacgccactatctggatggtggttctcccgcccctatcgggattcaacacccttaccgttcaccgcccgtggtcgcttcgactatgatgtctgagaacaggcgcagaggtgcgaggcgtgctcagccagaacagcaggcaccccaagaggaggcagctccgcagcagcatttgccaccgccacccccgatgaccattgagcaaatgttcctgatgcagactcaagcagtccaagcaattggttag

SEQ ID NO: 5240 - DNA, 528 bp, Zea mays
  Peptide Sequence Number=SeqID_48615
atgatgctagtagactacacaatggtactcgatggaccaagtgtgtcagtcgaaggcccgacgcagcagggtgtcgagagcgtcgtggaagtgacacccgcgagcagcgtcacgagtgatgggtctaggcctagcgatccacccctccggctttggctccttcaagagctccgtgccatgtctcgaactgccacctgcgtcatcgtcgtctccgtcagggtctcctccagcagcggggatgccctgtggtggtgcagggggcatctctggctgaggtgcaagggaaggaggcctcttagactccacctcatgctgaggcgagggggaatagtcctgttgctcctgctcctgcttctagcgtcggcgctcctgctcctcgtgcaggtgacgatgcagtctctccaggtggttggactgacctggcaccgtgcgatgcagtggacgctccgccaggcgagaaggcaaaaaggggatcacagacttacgtgcagtacacctaagacgagccatctacaaaagacatcgtaa

SEQ ID NO: 5241 - DNA, 297 bp, Zea mays
  Peptide Sequence Number=SeqID_48616
atggagcgtgctggcgtgcggtggaaggatccgcgttggcgccttccccctcagcgatctcgccgctggggagctcgtgctttttgtttcctgcgtgatggcgctgccgatctcatcttcttcttgctgttgctggaggagcatgacctcgtgggggtggcactcttccgccggtgctcagtttcaaggatgttcatcagccttgcggtggtggaaagcgagctgggctacagctccatcctccgcatgagctggtggcccacctccatgtactggtcgagccccggcatgccgtaa

SEQ ID NO: 5242 - DNA, 237 bp, Zea mays
  Peptide Sequence Number=SeqID_48617
atgtccaagaaagaaggaatgctccaggacgtcaacagtaagtccgaaccctcatgggagagtgctggacctctgggtatgcagccgggaccaccagggaggcggagacccgatgccgccacgtggcccacgaccggtgacttaagccaacaggtggagcctgacatatggcctctacgccgcgggccgcatcgtggtctacgccgcaagctacgctacctcagcattaaatactga

SEQ ID NO: 5243 - DNA, 450 bp, Zea mays
  Peptide Sequence Number=SeqID_48618
atgaagcagtggcacgacgacgtggatcacctccttggcatggcgcactctagctcggccaggcccaggcctcgatcatcccagcgccagcacaaagcatcagcctcggtgcgttcaccctcagtgagggctgcgccgaccaaagatctacgggtagagctcaaccacacacgtgcggtagaagacgctcaagcctctctggagaggcctgaagaccggcgggatgagctcaaccgtaggcgtgcaggcgaggatgcccgtatctctttagagagggagcgtgagctgaaagggaaatgtgcccttgggccatttctaagtattttggttattgagtgccaacacaagtgcttttgtgttaatctatgcaaagtggtggacaaagtgcaaatcaagtcaaaagtgctggaaacagaagaaatggaattggaaaagagatggctttgttaa

SEQ ID NO: 5244 - DNA, 159 bp, Zea mays
  Peptide Sequence Number=SeqID_48619
atgaaggacagcaagcgccagcgaaatattggcaaatacgtgacaccaaaccacaaggatatcaatgggaatggaatagaaccggattataatcatcttctcgatttcaatgaagctagagattacctttcacgatgcgaaattaaagaattaagctga

SEQ ID NO: 5245 - DNA, 843 bp, Zea mays
  Peptide Sequence Number=SeqID_48620
atgaaagacttccactgcactccgatgagaggcataaatcaccaaaaaagggagagattgaaagggaaatgtgcccttgggccatttctaagtattttggtgattgagtgccaacgcaagtgcttttgtgttgatctatgcaatgtggtggacaaagtgcaaatcatgtcaaaagtgctggaaacaggaaaaattgacttggaaatgaaatggctctgttcagccaaagtcagctcggtctgggtgcaccggactgtctggtggtgcactggacagtgtccggtgcgccaggctgactctggtgaacttactgctctcgggagttcgacggcggtgtacgactataattcaccagactgtccgctgtgcaccggactgtccagagaaatcgaattggagaagagatggctttgttctgccaaagtcagctctgtctgggtgcaccggactgtccggtggtgcaccggacagtgtccggtgcgccaggctggctcaggcgaactagctgctctcgggaagaaattaacggtgtacggctataattcatcggactgtccggatgcaagaactacttggactaaggaattgaggaaaagcaacacctcaaaagaagacattaagaagatcaagaaaagtccaccaaaggaggcgtgtgctccctgcggcccctatgacaagggagcacccgactgtccgctggcacaccggactgtccggtgcccacacgccggactgtccggtgcacctgggaactacagcccaacggctagttctaggtggcacccggagcatgcgcatccaacggtcacctgctctgacaggagtcagacaggcaacggctag

SEQ ID NO: 5246 - DNA, 285 bp, Zea mays
  Peptide Sequence Number=SeqID_48621
atggagaaggcagagccacatccaatcacccaccgtgaaatcgagctcacaatgttggtcgtcatagtaacgtttggtgtattgctgaacctggagaagacgcccacgaacctccatgaggaaaggcatcacagtcatgcagaagggaatccaccgtcttcgtctgagcagcccctgccgtgtgtggtggagcttgacgtctaccatcttgaagaagttgtgccccatgtgactagtgaagagcggatcacggtcgctgatgatggaggtggggaagttgtgtag

SEQ ID NO: 5247 - DNA, 87 bp, Zea mays
  Peptide Sequence Number=SeqID_48622
atggagttggtggaaggcaagctgggaaggttcgcgatgatcaggggagaggagccaacacaaccatttttcaggctcaagaccctg

SEQ ID NO: 5248 - DNA, 594 bp, Zea mays
  Peptide Sequence Number=SeqID_48623
atgacaaaggacgccagcaacaatgttccttcacgccaccagcttcaaggggccaaggcgacaggggcttcggaggaagatatggggattggcccaggaaaatctattgcttattctgtggtaaagacaagggccacactacaagaacgtgtcaaatcaccattcagaagcaaaaagagattgccgaagcagaagcccggcagaattagccgaagcaggtcttacatactgcttcgtgccactctctctacagaccagaatatgtgggcaaccaacctgcagcctctgttgcttcagcaagccattcaaaagcttcctggcctcagctcccatcgccacctccattacaacctacttatacccgaagccagcagccagaagggcgccaacacccacaacagcaacgtgacttcagggaggagtccgaagctcatttacgaagctcaaaagtccttcctaagggaatgcagagccaacataaacgaagctacaaaagtcattcctaagggagcgcagcgtaagttttttgctcaaaagtcgttcctaagggaatgcagagctaaagttgacgaagctaccaaaagtcgttcctaa

SEQ ID NO: 5249 - DNA, 93 bp, Zea mays
  Peptide Sequence Number=SeqID_48624
atggagatggtcggcggcaactgcttcgtccctttactgctttcaccctctctcctcacggtgttgatggcccacgaagttttagacttctga

SEQ ID NO: 5250 - DNA, 1263 bp, Zea mays
  Peptide Sequence Number=SeqID_48625
atgccatcctcttcttcttccgccgacgccacgccgccggccgccgcctcgtctgaggagacgtcgagtgacgtgatggtggaggagttgcgcgccggcgactctgttgaatttggtgtgtcacggatgacgtcagcccgtattgaagatatgcagcggttgggctactttggcggcgaagtcgctcgtgctccggggacggaggaagtccccgagccggagggcgagttggttgttttcaaggcgttcttcgtcgccggactccgcttgcctgcgcaccgtgatggacaaggatcgccaaggggcggcgcgaaaacgccaggcgactgtgagggttcacgaagctcggccgaaaaaacagcggggaacggcgaaggcggaggcctccggcggaggcaagccgccgctgccggcgaagggtcggacgagggcccgctcactctagttgtgcctggcgcggcgatcgcgacggctgcgccagcgccgaaggcggggggagaggcccttggcgccggaggcgaggtgtctgccctcgcactggtcagggacgaggcgggcgtggcgacccgccggctgaagggagcgacggaggcgttgagtcgagcgacggaggcgctgagtcaggtggctgacttcaccagccgcaccgcgtcgggggcccttacggcagctttgtctgccgaggtcgagagacttcggacgcaacatgatgacgctgtccgtgagaagtcggcctccgacagcaagtgccgcaaactggcggagaaggaggaactgcaggagctccccactgtcttggcggggttgatgtcgttcacctccctggtcacctgcgaggcagcgatgaacgcgctctctcgcgaaggctgccggcactctgaggccctcgaccaggcagatgaggattttgggcgagatatctttgaggtcgaagaccccgtggtgaaggaatccgccggggccctctatgaccggatgtggggttcatacggttgtgaggtggtccgggcgcgggccgaggctgcgagggctcaggcggagcgcggcgagcaggtggttgacttcggggcgctgaacagcgcgctgcctgacccggagacgacccctgcggaggccgcgactggagtcgccccgggaccgaccccggagattgcggaagatgcaccaggcgcccctgcacctgctgcggccggcgaagaccttcccccaaaggtggccgaaggcgcgcccgatgccccccgcagctgctatgccgagcgctga

SEQ ID NO: 5251 - DNA, 282 bp, Zea mays
  Peptide Sequence Number=SeqID_48626
atggcccatgctggtgctggcgagcaggcaggagaggagcgacctgtgctggcgtctgcaggggatggatcacagagagaggagcaggatgcgctagggtgggatggagcacgggagaggagccactggccgccagggcaggatgcgcacagccaccggggcaggagaggagcactgagtgcggcacgccgacacgaggatggatcacaggagttaggccaaatacagatgggtgaagacccatggaagtccatgtctatgcaaacccatctacacccatag

SEQ ID NO: 5252 - DNA, 984 bp, Zea mays
  Peptide Sequence Number=SeqID_48627
atgtcatgcaaccagcgcgccggttacgacgtgcgagaagttacaccgccactcgcgccgatgctgcgcctcctcgactgcggaaccagtactgcgactcgaggtagccctgcgcatgacccaacagtgccagttaaagggaccgggaaaggggatgttgtggaaaggatcctttccggcgaaggaagacagtcgccccagagcactcggtcttcaagcccattactgatcaggggttcgaaggctggcccctcggaagggttcaacagccgccctagagcacgcagagtgagggatgactctgggtacgttcgatacatagccgaggctcaggctacgctcccgagataccctaggacatttccgagaccggcgggaatgatttgtaacggaatcccaccggagggaggcatcgagccctcggaccctgtcgaaggggtctgggtctggcaaatcacccgcaggctcgggggctgctctcacacccggctatggccaaaactgttgacagcgtcaacaaaccagcttgataacttggaacccgaccacgcacctgggctacggccaggccgcatgagggaacgatcagaccggccgaagcatcacgaaaagcattcagacctcagaggagtcaaaccactcctccgaggcctcgggggctacacccggcgggaaaacagcatcgctcgctccgctccagttgccgtgtcagccaccccgtcgacgactgacaacaagtcacgatcaaccaccgagttcagcctcgggcacaacaggaagctccgcctcgcccgacctcatgctccggcctcgggaggaggtcttccgcatcgcccgaccttaggctccagcctcgggaggaggtctccacctcgcccgacccccagactcggcttcgaccccggtctcaggaagaatcgcgtcctcgcccgaccccatcctcggcctcaagaggagtctccgcctcaaccgaccctaggctag

SEQ ID NO: 5253 - DNA, 846 bp, Zea mays
  Peptide Sequence Number=SeqID_48628
atgcattgtgcccttccgccttttgatcccccggatggggtgctccagcgccgccttgctcttgctgtcgttggaggaacgcggcctcgtggagatcggcacctttcagccatcgcttggcttcaaggattttcgttgtgcagcccggctgcattccctcaccaatgggcagtttggtggggagaagcaagccgggctgcagcctccgccccgccctcagcttcaaggatcttcgtcatccttgctgaggcggagggcgagctgagccagggttctacctcccgcatgggccagcaggtcgtctcctccttcagcattcaggggagaaggcgctcaccgaccttgcgaaggggcgaacttcggcaacgcaggaccggtcggccgcaagcgtcgtcagctccagcgtgcctggctcgctggctcagctggctctgtcgcggcctcctgccgctgcctcctgccgcttggtcctcgtggggaccggcgctagccggtcatagaggatttgagtggggatctactggcgagtcgcttggagttcgtcatcccgctggccccctggtgtggaggctcctcttgctcagtttttggaaccctcggctgctctgcgatgagccggagctggaggcagcggtgttagcgcggacagacgcggagtcggctcagaaagagacttcgtcggtccgggagatggcggcttcccaggccgaggaagatgtggtagcagccgctggagcttggccaagacacctgctggcgcggtgctggcgtcctcccttaggtggaggtccttttgcccgggtcgccgtccgaggccgggccagattccgccgagggtggacataa

SEQ ID NO: 5254 - DNA, 408 bp, Zea mays
  Peptide Sequence Number=SeqID_48629
atggacaaggcagtccaggctggccatattttgatgaagagacccgacgttgtggttcctgatgatatcgttgcggatgttcttactgtgtcaaggtctgtaaccaaggctccgtcctctgagtatgtctcctatcgggaaacctgtaaccattatgactttgtgatcgtcaaaatagtgacacaactttcacgctgtgaggagcactgcatacaacaacttctggacttgagggtatcagatcttggagggctcgaggacttcactgatgaagttaagtttccagcagtagcgcctcaagctgttgaaaacctgttggagatcgttgatgaagttttccaggttcatggttttgatcaccacatcgtcaacgtaagcttccacctgcttgccccagtggtcggctaa

SEQ ID NO: 5255 - DNA, 171 bp, Zea mays
  Peptide Sequence Number=SeqID_48630
atggccatgatgggttcaacatcggaaaagatgtacctctgtcagcatacccttaagagtcttttccttagtcaggtgaagaagcaacaaacttttgttgcttctgttctaagttggtaccaaaggaagaacaccaggagtgaagttgcgggaggaaaggatcctccgtaa

SEQ ID NO: 5256 - DNA, 252 bp, Zea mays
  Peptide Sequence Number=SeqID_48631
atggcgatgggtgcggacgacggttataaaatcccagagtctagggtctcccttgcaagattactcgcggacgatgggatagggacactttgcgcccaaccactggctggaatcgggccacacacgggtactcaaagtgggcgcacgggatctggcccgtaccaaatccccactaccaatgcacgtgcaattaaacggggaccaacacggaccgctggatcagtgatctacgaccagggtttaatgttgtga

SEQ ID NO: 5257 - DNA, 324 bp, Zea mays
  Peptide Sequence Number=SeqID_48632
atggatgctagtctagtgatacccccggtcatcttcctgtggatggatgtccctgttttgctatcctggcacacatatgctatgcacccggctctaccccttggagacgggtgtgacacggcaccgctgctggcctcggtcctgctctcgtcgctcctcatctccgcgtcgctcttcttctcctcctcccgcgtgctgctcctctccttctcgtcgctcccctccgcggcctccgttgagcccctctttgtcgaggccaagctccgccagcagatgcatcgttgcaggtcgtctgacgtggaggctacgactcagcgggggtag

SEQ ID NO: 5258 - DNA, 197 bp, Zea mays
  Peptide Sequence Number=SeqID_48633
ggctctcgtacgagagggttggccgcgcgggagaatgggccgacgacaacacgaaggccgcgggttccccttacttttctcccccctttgtgtcccgtctcgcgccgacccatctgggctgggacacgcagcgacaatttactcgtcggtccagggacccccccggggtcgaaacgccgataggtataaccgttaag

SEQ ID NO: 5259 - DNA, 1500 bp, Zea mays
  Peptide Sequence Number=SeqID_48634
atggaggcccaggcccacgcgtcatgcaacctgcgcgccgaatgcttcgtgcatgcaactgcaccgccacttgcgccaccaccacgcctcctcgactgcggaaccagcggcgcctctggcaggagaagcgagcgacgcttcgccttcgccataacaaccgcgtcaaaaaagggaccaggaaagggggataccccgaaaaggatccttccccgtgaaggaaccaggctccgagcctccctactgatcagaggttcgaaggctggcccctcggaagggttcaacagccgcctcagagcgcgtgggctccacacccactactggtcagaggttcgaaggctggcccctcggaagggttcaacggccgcctcaggctactcgggctacgcgcccactactgatcagggcgggaacgatcttgtaacggaatcccatcagagggaggcatcgagccctcggaccccgtcgccaggggaccgggtccggcagatcacccgcagctcaccggagacaccatgttcggcgcccaccgagggcaacatggcgctctcccccctcctccttgcggaaaggcgacgcaggggcaggctcgggggctgctctcacaaacccggcttcggccaaaccgttgacagcgtcaacataccagcccgagaacttggtacccgaccgtacacccgggctacggccagctcgcatgagggaacgaccagaccagccgaagcattgcgcgaggcattaagacctcggaggagtaaaaccactcctccgaggcctcgggggctacacccggcgggtgcgctcgcgcgcacccaccggaacaaaacgcaaccgagaaaggctggtccccttgcaaaaaagtgcgacgaaagcctccaagcgagtgctaacactccctttgaggctcgggggctactgtcggggaccataattaggggtaccctcaaggctcctaattctcagctgccccagaagacgacgaactccgctccgcccgatccagggctcggacttgggctcagccccagaagacgacgaactctgctccgcccgaccccggggctcggactccaccctggcctcatccgacggtctccacctcgcccgaaccaggggctcggactcgacctcagccacgggagacagactcgacctcggcttcggaggagcttccacatcgcccaacctagggcgcagaccagcccacgtcaacaggaggcgccatcatcaccctacccccgagctgactcgggcaacggggaacaagaccggcgtcccatctggctcgctccgccagataggcaatcatggcgccccgcatactctgtgacaacgacggctctcagcccccttacggaagcaagaggacgtcagcaaggactcaacagctccgacagctgtccccccgccaggctccagcactcctccgacggccacgacatcacaccagctgggtgccaaaatctctccagctgccacaacggcatgtacttagggcgctag

SEQ ID NO: 5260 - DNA, 294 bp, Zea mays
  Peptide Sequence Number=SeqID_48635
atggcggcatgcaggcacagtgaggccaggtgcacgacacgaacaaggaacggacatgagcatgatgaacttctcacctcggaatggagcacacgtgtaggaggatggggacaacagactcgacgggctctagcaaggatagtggttctggatccacgacggtggtcggagcaggcggagatgtcgcaggggaggctggatgacagaggtcggagacgccgggcgagcagggctaccccgcgcaggagcatccgcaacggaccacttttcccgcgagaccccaggcggccgtga

SEQ ID NO: 5261 - DNA, 111 bp, Zea mays
  Peptide Sequence Number=SeqID_48636
atggagcttgagcagaggaaagctgcgcgcgtagataaaggagcaggggcggtggctgtagagaaagatcagggcactgttggggacttgttctcaaatgctaagaattaa

SEQ ID NO: 5262 - DNA, 540 bp, Zea mays
  Peptide Sequence Number=SeqID_48637
atggggatggagccgaaggggcgcacagttgtggtgcagttggacgcttgtcgcgtggcagtccacccttttgaccaccggtttctgcgaagatgggagagtgcttgtaaccgcggaacggttacatgccttgcgtgcggcggttcgccttcttcgtgcttcggttcagctcgtatgacgtgtgggtcccagcccccgtgtcgtggggggagaaccctggaggttgtcagtggggacttcgcctgtgacgctaaggggtgcaagcgaggaggagcgcgacctcatggagatcggtacccttcagccatcgttcggcttcaagtattttcgtcgtgcaacccgactgcattccctcaccaatgggcagtttggtggggagaagcaagccgggttacggcctccgccccgccctcagcttcaaggatctttgtcatccttgctgaggcggagggagagctgagccggggttctacctcccgcatgggccggcaggccgtctcctccttcagcattaaggggagaaggctgaaagggaattag

SEQ ID NO: 5263 - DNA, 285 bp, Zea mays
  Peptide Sequence Number=SeqID_48638
atggtggggagtgggggcgagaggtaccggggccggagcggttggtggccggacagcgggcggtggccggactccgggcggtggtcgtcggagctcgggcggagcgcggcggggcgccggcggagcggccggctgagctcggacggagctcgggccgagctcgagggcggacctcgccgcggcgtgaatagggcggagctcgcggcggcgggcagcggagcttggggcggccggcgtgaagagctcgaggcggcgccggagaaggggcaagcggcggcggcgtga

SEQ ID NO: 5264 - DNA, 507 bp, Zea mays
  Peptide Sequence Number=SeqID_48639
atggcgctccacaagctctgtgacgacggcggcccccagctctcttacggaagcagggcgacgtcagcaaggactcgaccgctccaaacagctgtccctccgccaggctccgtcgcacctccgacagccacgacatcacgccagcaaggtgccaagacctctccggctgccacattggcatggaggaccagggccttcttagagaaggttggccgcgcgggaccgaggacgggacagacgctctcttggggccgctcgcttccctcacccgcgtggacgcttgtaacccccctactgcaagcgcacctgacctgggcgcgggacgaacacgaaggccgcgggacttccacctctctcacgctcgactccggccacctcgcctctccccccttcgcgctcgcccacgcgctcgacccatctgggctggggcacgcagcacactcactcgtcggctttgggaccccctgtctcgaaacgccgacaggtatcaaccattttaacccgtaa

SEQ ID NO: 5265 - DNA, 477 bp, Zea mays
  Peptide Sequence Number=SeqID_48640
atggatcctcagctgagtataatcgattcggatcgccgtaccttcgcggttatgaagacttggtcacttttctacaaccatacccttgagagtcttttccttagtcgggtgaggaagcgacaaatttttgttgcttttgcttcaaggtggtaccaaatgaggaaaaacaagactgaagtgcgggaggactcggtcctccacttaggttcttttgcttatagcttaccgggaggagtttgtgcctcccatggcccacgaaaggatgaccttacgatttattgggcccttgggcctttcgtgaggtcctttactcttttagtggacccgggggatatctatctcccacagtcacctctttgttgtgacttgatggaggaagaggattcctccttgtgcttgtggccggactccctcgagtgggttatccccgagcttgcggacttgtcgccgccggtcacgatctccctcttggcgtga

SEQ ID NO: 5266 - DNA, 459 bp, Zea mays
  Peptide Sequence Number=SeqID_48641
atgggtgtgggcaagggacggcttgacgggtggaagtgcttattgaatgctttgcgactgttcagtgaccgcggttggaggagttctcctccgagtccgagggaactccggctcccgtctctccccccggcgtcgtccgatgactcggacgactcccaggggatagctgcggaagtctggtcatatatccgggccgtcgagcgctccgggctcgagggctcggatgagtcggagtactcctcggatgaggaggactctgacggcggcggcgaggacgaggacaacgacgacgacgacgacgacgacggtgacgacggtgacggcggcggtagcggcaggggcagcggcgacggcggcagggacggtgacggcagcggcagcagggacagcaccaagggcggcagcagcaagggcagcaccaagggcggcggcagcagtaggggcagggccagtggctag

SEQ ID NO: 5267 - DNA, 933 bp, Zea mays
  Peptide Sequence Number=SeqID_48642
atgatgaccgcgtcaaaaaaggtgcgccacgtcattcgatttcgtatccttttccacttcctctttctctctcttgctacagggaccgggaaaggggatactccgaaaaggatccttctccgcgaaggaagcgggccccgagccctcctactgatcagaggttcgaagactgacccctcggaagggttcaacagccgcctcagagcactcgggctccgtgcccactactggtcagaggttcgaaggctggcccctcggaagggttcaacggccgcctcaagccactcgggctccgcgcccactactgatcaggggttcgtaggctggcccccgaagggttcgacaaccgcctcagagcacgcagagcgagggatgaccctggaatcccaccagagggaggcatcgagccctcggaccccatcaaaaggggaccgggtccggcgaatcacccgcaggaagctccgcctcgcccgaccccagggtttggcccccgtctcggccttggaagatggacttcgcctcgcccgaccccagggctcggactcagcctcggctccggaagacgatggactccgcctcgcccgaccccagggctcggactcagcctcggctccggaagaccatggtctccgcctcgcccgacccagggctcggactcaacctcgacgctggacgacggactccgcctcgcccgaccctagggctcggacacagcctcgacctcggaagacggtctccgcctcgcccgacccagggctcggactcgacctcgacctcggaagacggactccgcctcgcccgaccccaggggtcggactcagcctcgactccggaagacggactcgacctcgacctcggaggagcctccgcctcgcccgacctagggctcggaccgaccacgtcacaggggggccatcattaccctacccctag

SEQ ID NO: 5268 - DNA, 258 bp, Zea mays
  Peptide Sequence Number=SeqID_48643
atggagaccccagacggccgcgccgggcagaacggtaatggtgacacgatcccaacagcaatggcaagaatgaaattacagtgtacaacattggtagtgtcggcgtctcgagaccggggggtccctaaggccgacgagtcgggtgcgcttgcagtagggggttacaagcgtccacgcgggcgtaaggagaggatccaggtgtacaatgggggtgtagcagagtgctacgtgtctagcgggggagagctagcgccctaa

SEQ ID NO: 5269 - DNA, 171 bp, Zea mays
  Peptide Sequence Number=SeqID_48644
atgccgttaatggggctcagtgtatgcggctcgctctaccaaggtggcgatcagaaaggtggttttggtattgactatggtaatggttgtccatgttgcaaccactgctcaggagaagatgaagctgtggaggaagacttccaggagttccaagattatgacgagttttag

SEQ ID NO: 5270 - DNA, 318 bp, Zea mays
  Peptide Sequence Number=SeqID_48645
atggcgcggctccggcgcggggcgcggcgcgtcctcccccaccccgagcccttcttcctccctgcgcgacacctcggcgcggtctgccctacgtgtgtgccccgacgcgatgaaggtcacgaaggatgtaccctcatcatcgcaatatatgtcaataaaagaaaaggcatatggagtgtaaaagataaaaaaagtgataatataacaatgttagctcattcttactctattgtcatagaagaaatagaaacaatattgaattataagtgtacctttaacttgacagaaggcaaaagtacaagcgtgacgcaaaagtaa

SEQ ID NO: 5271 - DNA, 396 bp, Zea mays
  Peptide Sequence Number=SeqID_48646
atgcagtcggcatgcaaccgcgccaagtgggtgcgccccttcgactccaacgcgcccagcatggaggcccagacccacacgtcatgcaaccggcgcgccggttgctacgtgcgagcaactgcaccgcccctcgcgccactaccgcgcctcctcgactgcggaaccagcgggcaggagcagcggtcacgtcgtcagccaagcttacgtcccatccaggggcagcgagagaaccctctctcacggcgtgaagacggcgcgcccgtgttccgttcctcgaatggctcgcacacgcgcaacgcccgcctcgcgaaccactcgccccatcgcattaactccgcggcgggacaggcggcacctcaggcaggagaagcgagcgacgctttgccttcgccataa

SEQ ID NO: 5272 - DNA, 279 bp, Zea mays
  Peptide Sequence Number=SeqID_48647
atgtgggcagtgagacaaaccaaaattggcgcccgtctatctcctgatctagggcgtatcctccattggaactcacatgaactaggtagccctaggtgcagggaagagatctcccacaggcgacagggcaagattcactgtaaccttgctgacggagagtacatcctcgtgccagagcaaggagctgctcaggaggtagccccggatccagcccccgagtctgcaccagaggacctgcctgccactgctttggaaggcaagccccggttttatgcataa

SEQ ID NO: 5273 - DNA, 340 bp, Zea mays
  Peptide Sequence Number=SeqID_48648
atgaggcggaaagacggcgggtatcccccatccggaggcttggaaggtggaaagacacgatgcataagggagcgcgaagacatggtcgccttccaaagggggagcagcggccccgtcgtccgccaagctcacgtcccatccgggggcggcaagagaaccctctctcacgacgtgaagacaacgcgcccgtgctccgttcctcgaacggctcgcgcacgcgcaacggctgccccgccaaccactcgccccgtcgcattaactccgcggcgggacaggcggcgcctctggcaggagaagcgggcgacgcttcgccttcgccataatgaccgcgtcaaaaaag

SEQ ID NO: 5274 - DNA, 792 bp, Zea mays
  Peptide Sequence Number=SeqID_48649
atggtgacctccagtttgatggtgggggaaagcgagccgggctacggcctctgcccctccctcagcctcaaggattttcatcaccagggctggggaggggactgcagcgtgcctggctctcggatgcgagtggctttggagccgctcccggcgccggcgtctgccacgacagctggaagaggttcttccgccgacgagatagccagggccgcccacggaccgacctccaactctacggccttctgcccgtccttgcctcacgagtttgggcatgggcgggggcctcttggcagcagcatccgccctgaggtcagcgcggccgctgttcggccccccggagcagaagtcatcgtcgtcgccgctgctggagcgggcgaaggcgcgccgttcgtcggtcttctattgctccgcaggccccccccccccccccccccgtcgagtggggttgttcgtacctgcggagactcgcctgttggttgtctgaaccgcttcaccaagcgtgagtcgccccgtgtaaaggtgacgagggcagagttggctcgaaaaggaaacctggttggccggagcctagccgggtcgtccgttagcgggaccgacgccggagttgaccagccgaggcctcaggtcgggctgacatccttggaggacggctggccgaggccccgggatcctcggaccgcgtcgccgtctgaggctaggtcggacctcgccgaaggtgtcgtcgatgccgagggtgctgctgcccccttctaccgtcaagacccgagcctgcaggatcggatagtcttgtag

SEQ ID NO: 5275 - DNA, 651 bp, Zea mays
  Peptide Sequence Number=SeqID_48650
atggcccttcccagggaggaatgctcggctttagtccctgcaaaatcatgccattggcgcgctccacctgcccgtttgtcatcggccctcgatccacttggagaatttgtcgatggcgaccaacaggtgcgtgaagcttccgggtgccttctgcaagggaccgacgaggtccagaccccacacggcgaacggccaagtgataggtatcgtctggagggcctgagcgggcagtcaccaagcttcggccttgtcaagggacagctctcctcggaggagatattccaggtacggggtctgccagttcaggtttggcgtctccttggagaggcaatcctggtcggtgatgagggcttcggactcggcgagggcttcggcatactccacgcattccacatcgcactccttgaggtacgtgtagttggggatggccatgaacttggagtagcacggtcttcccagcactgcgtgataggtccctcggaacccgactacctcgaaagtgagggtttcctttcagaaattggagggagttctgaagcagatgggcaagtcaagttgcccaaggggcagaacacgcttgcctgggacgatcctgtggaaaggtgctgcaccgggccggatcatggacagatcgacccccaagagccctag

SEQ ID NO: 5276 - DNA, 153 bp, Zea mays
  Peptide Sequence Number=SeqID_48651
atggggaagcctgtcccatcactcctcatgctcctcctcagccgagtgatcgcacttgtacccaccataaccggaatgggagaccacgtctcaggtcgcatgaggggcaaagtctgctgccaggttcaatcaggtgggtttgaactacaatag

SEQ ID NO: 5277 - DNA, 1425 bp, Zea mays
  Peptide Sequence Number=SeqID_48652
atgcctggggccggccgtgtgccatacaggcggacatgcccatggcacaaaccaccgcgagagtccggccagtggtgtctaaatcccaagcgcacgcccaacactgccccagccaaccggtcaatgggactcttgatagtttctgtaataccgcagagaggaaaacaaagcttaccagcggtggtgtccgagctaggaacgaggattggagttgcgagcttcgcggccagccgttgcgacaaacgcggcgggcagcacgattctgttatgcgcgagtttgttgagagggggaagaatgcgctgacaagatgggtccccagggcagtgagatcgggggcacggcaacagcctgatccactaggatttgcggcggccgcaaccaccaacgccgagatccccggctggaagatgcacagtagtggaaggggagcgacagatgctggcaaagcgaccccacacggcagcgaccagactttggcgttcacagataggcaagctgacagagaggaaaacaaagcttaccaggttagcgccgacccggccgaccgcgcggtggtgtccgagctaggaacgaggattggagttgcgagcttcgcggccagccgttgcgacaaacgcggcgggcagcacgattctgttatgcgcgagtttgttgagagggggaagaatgcgctgacaagatgggtccccagggcagtgagatcgggggcacggcaacagcctgatccactaggatttgcggcggccgcaaccaccaacgccgagatccccggctggaagatgcacagtagtggaaggggagcgacagatgctggcaaagcgaccccacacggcagcgaccagactttggcgttcacagataggcaagctgacaggtgggcccggttgttggcgcttcatcagcccggctgtagtccctcactaatggtcatccaaaaggatgaccaccagcttcgtgatggggagaagcgagccgggctgtggcctccctcctaccctcagcttcaaggatgttcatcatcctcgctggggtggaaggcgatccgagccgggtcctgcctttgcgtgggcagtggcccgcttcttccctcagtgttcgagggagaagggcgtttgccgtccgtggcgctgtcagttgccgcgtgtctagctccccggcctgagcggctctggcgctgctcccagtgccacctcctaccgctgaggcggagcgtggctgcccatccgccgcacgggtgtcggtcgcacaacacgccgtatgccgcgagggcggtgttcgtgttctgggactgtctcttccttgctcctgtagtgaggacgggagtgaggacctgctggtgcgcactggggcggccaccattcgccgatgtggtgttggcgcgtaggtggccgctgtcgtcggtgctggagtggtggtcgccatag

SEQ ID NO: 5278 - DNA, 693 bp, Zea mays
  Peptide Sequence Number=SeqID_48653
atggctctgagacatgaagatagcagcagcggcagcaatgaccccattggagatttagaagctcaggtggagcagcttcaaacagagttacgtcacagaaacaatgtgtgggtcgaggatggtcagcgaattaatgagttgagaactaacatccgccatctgcaagacgagcttgtcgaacgagatttggcactcgattgggccgtcaactcacgttccattgcttgggaccgagaggccaaagctcgagcccatgtggcggagcttagcacggccgttgataacttgcagaccctgtcggaatgggagttggaccttctggaacagcagatgccattccgaactcgtgcacatgacggcgcgggaacatcccatggccaagaagatacaccaaatccaccaccggttccatccacgctggccgaggctatcgccaccttggtcaccgcgaccactgacaacacccgcttccttcgtgaaatggcgggacagcaacttcaacagcaaggcaggagggcttatctgcagggaccccgcgaaacttcatatttggatttctcggaaacccgtcccccactattcgtcaaggctgaagatcccctcgaagctgacgaatgggttcgggtcattgaacaagaatctagactcatcagatgttcggagacccagaagccgttattcacggctcagtag

SEQ ID NO: 5279 - DNA, 312 bp, Zea mays
  Peptide Sequence Number=SeqID_48654
atgacctcagggcagacgctgctgcgacaaggcgctcgcccgtgtccccgcccaaggggcgaggacatgcagaaggccgtagagttggaggtcagtccgcaggtggcgccggctatctcgtcggcggagaaacctcttccggctgcctcggtgggaggggggaaagggtggaccgccatgcaggcggtatgcaaccgcaccaagggggcgcaccctttcgactttgacgcgtccagcatggaggcccgacccccacgtcatgtaaccggcgcgccggttactacgtgggagaaactgcagacgaatctctag

SEQ ID NO: 5280 - DNA, 204 bp, Zea mays
  Peptide Sequence Number=SeqID_48655
atggagcctggcagagggacagctgtcggagcggttgagtccttgctgacgtcctcttgcttccgtaagggggctgagagccgccatcgtcacagagttgggcaatgtggaagctcctccgaagccgaggtcgagtctgtcttccgtggccgaggtcaagtccaagcccctgggtcgggcgaggcggagttcgtcgtcttctag

SEQ ID NO: 5281 - DNA, 426 bp, Zea mays
  Peptide Sequence Number=SeqID_48656
atggtgatcagcttcgtgtttccgaagggtggattcctgctgagaggatacatggaagccggcgccaaccctgtcaacctgtcgctaatatttcctaatccacacggtggcttcaatgttgcagagttccagttggatgtggttctgttgccaaggagatgggccgagcagcgtcttttgcatacgcatggaatctcagttgataatgacgaaattcgaaatagtagggggatgcgcatcgcgttatcatccatgttaacgatagcacctttaaagaggaaggctattcccaatcacccctttgcgacgtcaaggtacggagccgggccatgcgcgacaggggcagccagcagggagggagccattcaggttggctaccgtcagctgcctgacattaggaagaccgaggtggtagagcgtacatga

SEQ ID NO: 5282 - DNA, 315 bp, Zea mays
  Peptide Sequence Number=SeqID_48657
atggctgtgctggagcggcgttcccgcctcccggcggtggcgcagcttgccgtggcgttctggctggcggccaccagcgcctgcctgtgccgtagcgtcatccctgacccggacctggaaccgggccgccccagctccggagacgacgactccgccaccgcgacaccaccatacccctccgttttgtccttcccctctgtgtcgtcatcgcctgccgccccacctgccgaggccgatctacccaccaccgacaccgttgtccccggagtccccgccgctgcctccaccgccgccggtcgtcacccctcctcgtga

SEQ ID NO: 5283 - DNA, 339 bp, Zea mays
  Peptide Sequence Number=SeqID_48658
atgaccatgggtacgtccgttacatggccaaggctcgggctacgctcccgaggtaccctaggacatttccgagaccagcgggaacgatttgtaatggaatcccactggagggaggcaccgagcccttggaccctatcaaatgggtccgggtccagcaaatcacatgcaggaaaacagcactattcaccctgttccgactactgtgccaaccaccagggtaaaactaacgacgttgcaacactcactgctatgacacctattgttgatccttcaaatagacatatcattgtccttgagtatccaattaatggtgccacaagtcattgccccagtaaatga

SEQ ID NO: 5284 - DNA, 333 bp, Zea mays
  Peptide Sequence Number=SeqID_48659
atggctcaccggagtttctctggcccgcccgagactctctcaccgccgttctaccctctctgcccgtggattcatggcctattccccaccattgagttcgccgtggcgccctctttctctctgcccaactccggtgatcctggaaccaccctagctcgcgcccgcctcaaccccaccgccgtggagaggagcggcgccgcccgcagccgtctgtttccccggtctgatcccctccgtccgatgcagatcgaatggctcggaccacggtgctcaggaggtgatgctggcaacatggaggaattcgaggagttccaggaatacgatgagttctag

SEQ ID NO: 5285 - DNA, 409 bp, Zea mays
  Peptide Sequence Number=SeqID_48660
gtttactgcaatacgttgcacgaggaagtccatatactatactcacaactacacccaagtgagcctgcacaacctgctgaggcggaagctggaccatctcacgttgcgggacatgccgaccaggactcgaggacaggacgcagcaggaacttctgggggacgggatgttaccccaaacccacctccagttcctcccatgttagccgaggcgattgccgccttggtgaatgccaccgccgataatacccgcttccttagggaaatggcgggtcagcagcagttccagcagcaagcagcaagaggttttcagcaaggtccccgtgagaccacctatttggacttctctgaaacccgtccacctgtattcgtcaaggcagaagatcccctagaagctgacgagtggattcgg

SEQ ID NO: 5286 - DNA, 231 bp, Zea mays
  Peptide Sequence Number=SeqID_48661
atgcagcgctgcaaaccaaacgtgggcctcacggcctgtccccgctgctgtggtcgagaaaacggcagcagtggggtgtgtatggatggtcgccacaactgcaatgcgttctacgagggactatatgcaactgctgaactgcaggtagctttgaatatgagtgacgatcgaaaaagggcgatgtacgatggattcgacagtgtcactcatgggcactctgaatatgagtga

SEQ ID NO: 5287 - DNA, 1476 bp, Zea mays
  Peptide Sequence Number=SeqID_48662
atggccgagattagatctgcggccgagggcgcgcgcgtgggcgggcaagcgctgacaggtgggacagggagtgtcaacgacagagggggagagcgtgctgaccgagcgggcccagcgctagaggcgaaacggacggctacaagggtccgagggggtccgagccgttcgatcaagatcggacggggaggggtccgaaccgttcgatcaagatcggacggggaaaatcagaccgggaaggatgagcggctgcgggtggcgctgacaggcgggctagggcgtcaggcgcgcgtgcgcgaagcgggcagaaaggacgagggtgccacagcgaactcaatggcggggaagaggccacgaatccacgggcagagaggggagaacggcggtgagaaggcctcaggcgggccagagaaactccgggaggcttggagcggtctccagcgagctggatggccgggaacacgggcgcgggtctccggcggcggctggcggtgcgggcagagcgcgagagagggtgaagccgagcgaattgagacacggcccaacccacactgcccatgtggcgtccggacgcgtggccctgctacatgggctgaattgcacaggggcctctccctgctctggacggtgtccttggtctgtccggcggggcctgcagacacggacttcgtccgtgcagcgcgaggtagatgtcgtcgagcgaagggtggcgtgttcgccttcgcgccaacatttgccctccgaggggccagttcgaccaagtcagctggtgccaaagaccaccgtgagatggtgaagacgatgctctcgctcaaagtggccccgcgggggcccggccacaccgtggagtttgggacctcaagaattttcttgggtcacgtgctggagatgcagcgacttggttactttgtggtggcatttgcgaagtacgtctgggcagtctcttcctacggcggacagccggctatggaggtcttcaccaaaaattattgcctgcattggcagaagaggaagataggggataagatagcccaatttagatcgtgcaccttcacgccaaggactgggaagactttgactgaggttgtggagatagtcctctgtgctaggaacaagtggggtaactggtgggacttttggttctatgtggctcccggggatgtcgaaggcttgttgagtctgcctctggccatcctgtgctcacattgctatgtggcatttcctcgattcgaggtggcgaaagaagacgaaggggccctccgatatgctgcccgcctgagtggcgggcgcgacctggtggaggagtttattgcctatggggtgtggcccttggcacatggttgggcgttgggcgaagtgaccccccccgtcggatgcctaccctgggcggccagatggtgcgaagtccagccttcacagtggatctacgtggtcccgatgcagccgcgtttgtgcgtgaagtcgaggccgaggccatga

SEQ ID NO: 5288 - DNA, 192 bp, Zea mays
  Peptide Sequence Number=SeqID_48663
atgtcctacgcctcgctcgttacctgcgaggtggcggtgaatgcctcatcccgtgaggggtgtaggcatttcaaagtcttcgatcgggtaaccgaggacttcgaccgtggaatcttccagatgatgaatgatgaggaagtcgaggacttcagcggccttgaaagctcgatgacacgggcaaagggcgtgtag

SEQ ID NO: 5289 - DNA, 771 bp, Zea mays
  Peptide Sequence Number=SeqID_48664
atgaagtctcgcatggcactgggatcacggagtccggagaaatcccaactgaagttggggtcgtcttcttcctcggaacccgtaggtctggaggttgagacagccgtcagtcagtcccaagttgaccacatatggtaccccggaaggtcaggatatgcccttgcgaaagcgctcaccgaagtggggtcgcttggtggatcgaagctgaatctaaagggaacagggtggaaaactgatggaagcgacacccgtcgttgtctcaggtgcaaggacaacacccgacatgtcccccgcaggggtgccagcgtcatcggctcgctctggtccgacagccgacgaggtgccgcctcctgcctggccacggttgctccgtctcctcctcctctggcgaggagggtggcagggcaaacctgggtgttcctcttccgccacggggggaagtcgtcgtcgagtttgcctccgccgggcgagccgacgaccgtcgttgttgtcgtgctgcggggggaggagtaccatgtcgtagctgccatcgcgggacatgaactcgagactctagaagcggagcaccgtcccaggctgaagaggctgctgaagattgtccatctagaactcaatgggaaagtgtttgtcaacacgcagcaggacccctacctggcgcgccaactgtcggtgttttggacccgcgaggaccctcaaccgactagtgaatttgatgctgggtgtccttgcccagatgggttgatgcaagatgaaacacaagaggggggatga

SEQ ID NO: 5290 - DNA, 1029 bp, Zea mays
  Peptide Sequence Number=SeqID_48665
atggatcttggcacacatatgatggttcgtaccctccaaaccacccgggttaacaccagctacgcccctccaccacgacaaatccatgtctacctagtggtagtagaggaagttccggtggatctccctcacattcgagtggagcatggagtcatcctggaggacagctcgaaggaacagctgtcgatgcccaccccgttggcagagtcactggccttcgcagctaggtcatcgacctcggcaccgcctgcaccagtcgttcaagctcctgcacccggaggtgacgacccaaatgactctagagacgacgatgatgaggatgacgacgacaacgaggacgaagaagaacaagtcaacgaggaagccaactacacccagcaggactacttcatggggtttgggcctatcgttgaacattacacattaatgttcgagacagggcactttcccaacctactgcaagacgtgctgcacgcgctacgaacctgcgtcctccccttgtacgaaacaaggcgagtgagcgagcctccccgggcttgctactacattactcacatccacgtcagggtgatggatggaggggataggggattcaggactctgtctgctcatgagtccctgacaccgctatccacctacgctgcttcggtcagcgatgctgccagacggaccctgtggtctctcagccacacctaccggcaacagctgcataacacgaggttcaggcatcttcctctgcgtctgagtggaggaagccagaccagcattgttccaggtggagctggtgaggatcgcctcaacaccctagctggtgtagtggccggactcaacaccgacctggacagtgccaccctggatctctctagggtgcatttggagctggaggatgcccatgccagaattgcagccctggaagccctacttcaaggacgggatactccggaagctcaggtccccgccatggcgttgtctcctccccgcaagaggcttcgctatggggagcccagatccatcactaggctactttaa

SEQ ID NO: 5291 - DNA, 639 bp, Zea mays
  Peptide Sequence Number=SeqID_48666
atgggacgagacattcaccccaaaactagtcatcagagctctaaatcaaaccattggacctacaaactatgggacttcaacatctatgccacttgcagtgaatatgatagcaaggaaaacagcactattcaccccgttccgactactgtgccaaccaccaggcctcgggcgcaacagggagctccgcctcgcccgacctcaggccttggcctcagcctcagcctcggtagaaggtctccgcctcgcccgacctcaggcctcagcctcaggagaaggtctccgcctcgcccgaccccaggcctcgacctcagcctcggcctcaggaaaaggtctctgcctcgcccgacctcgggcctcgccctcagcctcggcctcgggaggagtcacaacctcgcccgacctcagactcggcctcaggagaagtctccgcctcgcccgacctcggcctcggatcgactgcgccacaggggatacatcattaccctacccctagctagctgcctcaggctacgaaggaacatgaccagtgtcccatttagattactccggcaacaggcaaagaaacgtcaggaggaccccgggccgcaacgccagctacgcttctacagggctcaagcacttctccgcctgccatgttag

SEQ ID NO: 5292 - DNA, 1218 bp, Zea mays
  Peptide Sequence Number=SeqID_48667
atggtcaactgcgcccaacggtcgactgcgatgaacagtgaacagtggacagagcagaagtcagaactgcaaagtcagaacgcaccggactgtctggtgtgcctccagactgtccggtgccgcaagagaacaaaggacttcaacagtcaactgctccaaaccacaatggtcggattacgtggcacgcactggacattgaacagtgtcatgtccggtgcaccactagactgtctggagccaacttcctcaaggccatatgcttttgcatgtgatgaaaggaagggcaaaaagaaggctcccactccaagttcctcaagtgaagaagaggaagaagaagaaagtgatgatgatgaagataatcaaccatcaacatcatcctccaaggacaaagaaacaatccaacgtgtcagaaaggtcgagaatcttctctttaatattgatagggaaaaacaaagaaatagaggatggttcgcatgcggggagaagggccacttcagggacagctgtccaaatatggttgaacccacaaaaggaaggagcaaaggcaaggcgcttacaagtgtcaaaacttgggatgactgttcaagcgaatatgaacctctaaggacacgcagccacagatcctcgtcacgttcatcacggtcatcacacaagtgccttatggcaagaggtaaaatgagtattccatcctctagtgatgatagcagtggtgatgatgaaggtgagggaaagccctccgtagatgagcttgcagaagccataaaatgtttccaggataaacatgctcggatgagatttgcaatggagaatgagaaattaaagcaagaagtgactcgtcttggcaaggccttgtatgacaagaaagaacacaagtctttccaatgcaaggcgaagaccggggataagaaaaagctcaagcaaaagccaacaagcaaaatatccaacacatacatcaacaaggtggacaaaaaggctgctacaccatacttgatcaaaaagaaaaaagaatggaaaggtgatagcaatcaaggccaacaagcaagtcaccaaaggaaagggggccaaacgcatctgggtgccaaaggaaattatttcaactatgaaaagcaccaagaaggtttggatcccgagagggaagtaagaagtccgaaggacatcgaggaatttggagacttggcaaaattgagttgtttatcatgggatgcatcatattggtaa

SEQ ID NO: 5293 - DNA, 147 bp, Zea mays
  Peptide Sequence Number=SeqID_48668
atggtggaagccttgatgtgtatgcaagcttgggctcgcgctgacatgcttggtcatggatctcatgcactcaatgcactcatgacttgccttgatgatgaagatgaagcaacgggtggcatgaaatctgaaatcattgatccatga

SEQ ID NO: 5294 - DNA, 888 bp, Zea mays
  Peptide Sequence Number=SeqID_48669
atggcgtcgctctggctagcgagagcgtcgtcccagctggcgcgccgtgccgccgccaggaggcctcctccgcgtcctgcgcgccacggctccggccaacccaccagttcgtggttcttgggctcggtgccgcaggcggcccttgggtcaccagcgctggacacaagccgccggggcttctgctccgtccggcgcttcgcaggggagagcagcgctgctgctgctgcggcggctgtcgtcgacgaggagccggagagcgggttcgcagccggcgatcagcaggcagttgactttccaggagggaaagtatcctttgtggccgaaatgaacttccttccagaatcgacgagggaaaggatcaactgctaccgcgtgcttgacgacgacggcagaacgatatcaggaagtagattccaagaggtcagtcgggagctggctctgaagatgtacagcgagatggtgacgctccagatcatggataccatcttctacgaggctcagaggcagggcaggatctcgttctacctcacttccaacggcgaggaagcgatcaacatagcctctgctgctgcgctcagtatggatgacattgtgctgcctcaggagtttgcaaaccagtgctttgggaacaagctggactatggtaaagggaggcagatgcccattcactatgggtcgaaccgtctgaactatttcacagtctcgtcacctatcgcaacacagctccctcatgctgttggagctgcctactctctgaagatggacaagaaggacgcgtgtgccatcacatactttggggacggtgggacaagtgaggtagatgaaagctctccagccactgaccagtcgcttgccagtgccattatatccagccttcctgacagatga

SEQ ID NO: 5295 - DNA, 915 bp, Zea mays
  Peptide Sequence Number=SeqID_48670
atgtacacaaagaaggccgagacttggattctactagctggcgcgtcagactggttcgactccaacggctatcttcgacgtggtgctgatgtggtggggtccggggtggatttccgaccggggctgcctgggctgcagccccggtcatggcccaataacgagaggaataggcccatcgcccagtgccccagccaccagcctagtgcctaccctaaccagccgtcaccgtccgtcgaggagccacccagagtcccagacccagacacggtcacattaaggcacccaccggccaccgcggcatgccggcaccgcgcgtccacgccactgcctaggcgcccacggccccacgcccaactctcggaggccagagccccggagcaccaccgacggctgccgcacgcccgcacctcgcctagtcgcctggagcgcctagaggctggagccgccgcccgccgaggccgagccggacagccggtcatcgaacgagcagagctgcgaagcgcgcttggattgctagaaactacaaggtgggtctgcaggccagcgtggtacaaggagaaggtttatccagaaaacaaggtgccttctctagagcacgacaaccaggtgaaaggagagagcttggatttggttaagtacattgacagcaacttcgaatgtccatcgttgctccccgaggtctctgccgagaaactcaacgaggcggaggtgttggccaagtctatgctgagcaacttaatgaggcgaaggtctcaaccaagtctctttggagcaactcggcgaggtgaagactccgaccaggttgtgattcgacatggacccatatatagagtggataagatggagtactacacccccctaccaggtgaacgacaacgcaagaccccaaaggtggcttcaggaagattacgttag

SEQ ID NO: 5296 - DNA, 258 bp, Zea mays
  Peptide Sequence Number=SeqID_48671
atgggcgtgtgggcagatccgcaccacgtcgtggccagacatcgtcgcgccatcatcgccggtgagtcctcgtccatcatgcttgctttgttcgtctctgcgggaaacgctagccgcatcgtgtttgggctcagggcactcgccggttcgtggggtcgccggtgcttccatcgtgggggtgtggcggcgccacctgtgctgaccggaaaggaagaagggtccctcaccctcgatccagggatggacggatattgttga

SEQ ID NO: 5297 - DNA, 462 bp, Zea mays
  Peptide Sequence Number=SeqID_48672
gaagatcagcctcaggagctctacagcttcgggaaacttcaacggctagtgcgctataattcaccggactgtccggtgtgcatcggactgtaccatgcggctccggagcaacggctagattcgctgaggcggctcttccccgggcatttaatgactgctcggcgcgcgcagagagcaaccgctaccattctgcaacgccggacaacaaacacatcatatgcggtgtgctccggaccagcaggcgagcacgcaagacagaagcttcaacagtcagacaggaacggcagttatgatgtggcaactgtggatttgatctctggggtgtgtcgggcagtgcagtgcagcattgagcagacagcctcccacaacgaacaagtaggtggtgggggctataaataccccaaccaccccaccataaatgcatccaagttttccacttcccaactactacaagagctctag

SEQ ID NO: 5298 - DNA, 159 bp, Zea mays
  Peptide Sequence Number=SeqID_48673
atggcgagagtagcgtgtaccctccgtggcaagaggctggacggtggtgtatctgtgctcacggtgaagaagcagcaaacttttgttgcttctgttccaaggtggtaccgaaagaagagaatcaagactaaagctgcagaaggaaaggccctccgttaa

SEQ ID NO: 5299 - DNA, 387 bp, Zea mays
  Peptide Sequence Number=SeqID_48674
atgggcgggggcctcttggcagcagcatccgccctgaggtcagtgctgccgctgttcgcccccccggagcagaagtcgtcgtcgtcgctgctgctggagcgggcgacggcgcgccgttcgtcggttttctgttgctccgcaggccctcccccatcgagtggggttgttcgtccctgcggagggggaaccggagttccgtttgtaatggcactatggatgccagtgttttttgttcattgtggctgtcgaggccagaacatggatgtttgtgcgagcgagagttgcttctcgcggaaggtgatgagtgaggtatccgtatcccggaggcgtaggagtccctcggctcggtcggccttgccgcttacgcgcacttttacccgtccatga

SEQ ID NO: 5300 - DNA, 474 bp, Zea mays
  Peptide Sequence Number=SeqID_48675
atggagcaccgtcccgggttggagaggttgctggagactgcccatctggagcttgacgggaagctgttcgtcaacacgcagcaggccctacctggcgcgccaactgtcggcgtttcgagaccggggggtccctgggccgacgaggggctgagagccgccgtcgtcacagagcatgcggggcgccatcattgcctatctggcggagctagccagacgggacgccagtctggttccctgtggcccgagtcagctcggggtagggtgatgatggcgcctcctgttgacgtggctggcctgcgccctaggttgggcgatgcggaggctcctccgaagccgaggtcgagtctgtcttccgtggccgaggccgagtccgagcccctgggtcgggcgaggcggaggtcgtcggctgaggccagggcggagtccgagccctggggtcgagcgaagcagagttcgtcgtcttccgggacttag

SEQ ID NO: 5301 - DNA, 465 bp, Zea mays
  Peptide Sequence Number=SeqID_48676
atggcggcgtggctcgcccgcccgcgactcggcatggccttgcgcccgccgtggcggcgtggctcgctcgcccgcggcctggctcggccagcgcccggtgtcctgcgcaggccctccctggctgctggcgcgcggccatggccccaccgcggcttcagcgtggtgacaatgagactgatggttcttggttttgactctggtaacgctagtccactacagccaaacaggacacttgctgagtatgttgatgtgtactcacccttgctctacacaccaacccccccccttccccaggttgtcagcattgcaaccactactcaggagaagatgaagccgtggaaggagacttccaggagttccaagactacgacgagttctaggcgtgggttagcggcaacccccagttggctgcctgtgaaggccgcgtttatctacgtttcgttttcgcactttgatttattgtaa

SEQ ID NO: 5302 - DNA, 378 bp, Zea mays
  Peptide Sequence Number=SeqID_48677
atggccgagctccggccgccacgaccgagccaggggcaggcgagctgcaccgccgcgctatgcagcgcgcagggccggggacggaccgcgggcgggcaggccgcgccgccacgccatgccgcgcgcaagaccggggccggggccgggccgcagatgcgaggaggaaggggggcgccaagggcgggcgaggccggggccgaccgcgccggagggccgagccgccgagcgccaggacaccgggtcggggctccaccgcgccgggatgtcgttgggagcagggggagggggaggaagaaagggagggggccagggctcaccacgggcgggcgacgggcggcggcgtcgggcgagtcgggggcgggcaggggagcagcgtga

SEQ ID NO: 5303 - DNA, 438 bp, Zea mays
  Peptide Sequence Number=SeqID_48678
atggcgccccacaagctctgtgacgacggcggctctcagctctcttacggaagcagggcgacgtcagcaaggactcgaccgctcctacagctgtccctccgccaggctccgttgctcctccgacagccacgacatcacgccagcaagggaccgggaaagggggataccccgaaaaggatccttccctgtgaaggaaccaggctccgagcctccctactgatcagaggttcgaaggctggccccccggaagggttcgacagtcgcctcagatcgcgtgggccctacacccactactggtcagaggttcgaaggccggcccctcggaagggtaccacggccgcctcaggctactcgggctccgcgcccattactgatcaggggttcgaaggctggcccccgaagggttcacagccgactcagacgccgagcgagggatga

SEQ ID NO: 5304 - DNA, 684 bp, Zea mays
  Peptide Sequence Number=SeqID_48679
atgggcatgcaaagtcatagagagaagggtagcgtgttcgccttcgccccaacatttgcccttcgagggaccagttcgactaagtcaactgacaagccacaccgtggagtttggcacttcgaggatttcctcggtccacgtgctaaagatgcaaggttcgaagtgcaggtccaccagttgacgcctaacgtcgtggttgcgctggcgaagtatgtttgggcggttgcttcttacggcaggcagccgtctgtggaggtggcggaggatgacgaggacgaaggggcccttcggtacgctgcccgcctaagttgtgggcgtgatttggttgaggaatttatcagctatggagtgtggcccttggcacacggctgggtactgggcaaagtgtgccctcgccggatgtcgaccctgggcgatcggttggtacgaagtcctgccttcatcgtggatttacggggtcggaacctagcgacgttcgtgcacaaagtgaagaccgaggtcgtgaagattgtagggcgatatgtgccgaagactgagactctgcggagttgggatatccgtggttcaaatgttcggttgaatcacgtttttgagttgaatcgtctgccatatgctggctacctgggggacgacgatgccgatgttgctgatcgccggggaaaaaaaggtggtggcagcggttga

SEQ ID NO: 5305 - DNA, 1431 bp, Zea mays
  Peptide Sequence Number=SeqID_48680
atgaagatttttccttacagacgaaatgttgctgctgttgtatcggcagtgatagagaaggatcgccaagacgcgacgcaaaaacgccaggcgttcgagagggtcggggacctgcgccgcgaggtcaagatggcgcgggggagcgtgaattctgccgcgctcggctccagcaagcctctgctaggcgcgaagtctgccgccctcggccctagcaagtcgctccctgccgtgcccacacaggagcgaaggcctccatccccgccgcgtgctgctgagacggaaatgggtggggccgaggtctccatggatatttctgtggattactatcttgtgagcgggatcacgatgttcgacgcccatacaggacggggacctgttggtgagtttttttgtaacgaggtctgggtgtctgacgacccatggtccaggttttgcgctcgtggcaaaattgctttggctgccgccgctaaggacgtggctggctcagttgcgcagcagctgaagcatatggccgccttcgccgagcacattgcgtcagggaccctgacctcggagttcgctgccgaaaggcgacgactcgaggggaggattgaacgcctccggacgcaacatactgaggttgtgcgagacaacttagccacggaaaacaaaagctgcaacctgatggagaagttgttggctgcggaggccgaaaaagaggacctcggtcgccggctgtcggcgaagaaggaggatgcggacaaggcctgcgcggaggtccaggctgcgcgtgccgaggtcaaactcgcgtgtgccaaggccagcctcgctctccaacatgctgttgaggcggagtcgagccacaggagcctccgtggctatctggacaaagcggaggcctctaccagcacgggcttggtgcgcgtaccgcctccttttgatgcgtctggtgaggaggtgggcctccgctttcttggatggctgcaggaggaactggagctgcttccggcaattgtgatgggtctcatgtccttcgcctcgctcatcacctgtgaaggcgtcgcgaatgccctatcccatgagggatgcaggcacttcgaagtctttgaccaatccgatgaagacttcgaccgcagaagtttccaggtcgaagatgaggtgctaaagcggtccgctggggcactttacgataggatgtggggccctcacggccgtgaaaccgtcccggaaaggtctgaccgggcgatggagcagatggcaaacgatgaagaggtcaatgacttcagaggcctggagagcacggagcccctggcggaagatgcgagggctggggagcaaccggcgccgccaactggtgctagcgaggaccctgtggactttgtttttgtgatactcaaagtcggttgctgcgcaagttccgacgtctgggcctgtgcaagcaacccctactga

SEQ ID NO: 5306 - DNA, 735 bp, Zea mays
  Peptide Sequence Number=SeqID_48681
atggccgcgtggcagccggagttagtgcccttcaccgcggcggtctatccggagcaaagaggtcttcgcggggagatgctcgccgcccgatcatctcgaccccggcgcaaatcgcggcgcggaaaggtcgtcggcgaattcctcagcctcgggaattttcagaagccggcgcgctataattcaccggactgtccggtgtacaccggacagtgtccggtgctcctagaggacgcggctctggaacttcgcagcctcggaaattcgcgaaggctgctccgctataattcaccggacatgtccggtgtacaccggactgtccggtgcaactgcggggcaacggctacttcgcgccaacggtcgcctgcaactgcaattaatgcgcgccagagcgcgcaggcgtcaggcacgcccatgctggcgcaccggacactctacagtacatgtccggtgcgccaccggacatcgaggcgggcccagaagacagaactccaacggtcgaatcccaacggctttggtgtcgtggctggcgcaccggacatgtctggagcaaccgacgaagaagggcgacttgaggaatcaggagcagcgttcacatcagcccttatatcgtcgggaacaaccacgccgggtctcctcatcaagatccgccccgcgcgaatggctttatccatggctctgtcgcgctgggccctcagagtaatggaagtttcttcagcaactttgacagccaactga

SEQ ID NO: 5307 - DNA, 117 bp, Zea mays
  Peptide Sequence Number=SeqID_48682
atggacaggcagcctgaacccaatctaacacgccattgtcatccgtcttattgtgttgcccttcgacgactgtggtggcgtggggaacatggtgccaaggggtggggaggagagtag

SEQ ID NO: 5308 - DNA, 285 bp, Zea mays
  Peptide Sequence Number=SeqID_48683
atgtcggattcggccgggaaggccacgacagcgacagatccggacgggaagacgagatccagccaaagggacggcagatcgagccgaaaaggtcgcagcaacgtggatccggccgggaaagccgcggcagcgacggatccaacgaaggcgatgaagggggtgggcggcgaggcgcgtctagccgggcaggggcctgcgccggacctggcaagggatgatgacgacgcaggcgccgggagaagcttgaagggtgaggcgctgctgggcatcagcgcgagcagttag

SEQ ID NO: 5309 - DNA, 360 bp, Zea mays
  Peptide Sequence Number=SeqID_48684
atggggaacagggaaccgagcagaggggttgctcgtgccctgccccatcttgacgcgcgggaaatggggctcaggcgccgagcaccatggatccgaagcttggctggtgacctgggagaggtagcaacagtgggaaagctggctggagaccgcgaccgtcatgggggttggaggcagatcgcggggcgtccgagggcttgtgcccgccgagcagggagccagacggccggagaggaagcagagagaggaagagcatcggctgttgtagaggaaacatggagaagatggcgtgggcgagaggggccaggatggggaggtggtgaaggccatgacctggtggaggccgagcaccaaggggag

SEQ ID NO: 5310 - DNA, 720 bp, Zea mays
  Peptide Sequence Number=SeqID_48685
atggatgtcaaggagaacatacctgctgatgatctagccaggagagaagagttagagattttcgaaggttcaatgggttgtgaacaaatgagaaggtttttccagccactttcaagaggctctaacactggtgctaataataatgtgaataacacagcaactgttggagggacgttcaatccggataacatagttgcagatcccgctttaaggaggcaaatttatgaatatgataaagatgtccaagaccaagtgagaagggcatatgttctgaatggtccatgccaaccaaagggtttagatttccctcgtagacagtatggacaaagttcaaggccttttaaagaggaatgtagtgcatgttgccaatcggttcatgacttctttgagtacattcacttaattgtcaccaccacaagctcatcttgcaagagaagggatgatctaaaagaaaaacaccaccagaatattttagaaaaactagaaaggggtgaaattttatctggtagaggaagttccaccggtttcatcagtgagaatgtggtgaagcagttggggttgtctgtgcatgcatgctcacctatgcagatcaagtccagtatgagggtgcttcccttgagtgcatttgatgcaattttagactatgactggttgatgcagtatatccctataaagtgtgactggaaacaaaagatactgcagtttaaagatggagtgtag

SEQ ID NO: 5311 - DNA, 456 bp, Zea mays
  Peptide Sequence Number=SeqID_48686
atgggcgggggcctcctggcggcagcacccgccctgaggtcagtgctgccgctgttcgaccccccggagcagaagtcgtcgtcgtcgccgctgctggagcaggtgacggcgcgccgttcgtcggccttccgttgctctgcaggccttccccctcggagtggggttgttcgtacctgcggagggggaaccggagtttcgtttgtaatggcacatgccagtgtttttgttcattgtggctgtcgaggcctgaacatggatgtttgtgcgggcgagagttgcttctcgcagaaggtgatgagtgaggatccgcttttcgaagtagtcaaaaagcacgaaagaagttctgctgaaaagagatcctttttcgaggaaaatttcgacgcagagggggtctccccccttttagcccccgagggagggtcgggctttgccgaggcgaggccgacccttccttga

SEQ ID NO: 5312 - DNA, 1098 bp, Zea mays
  Peptide Sequence Number=SeqID_48687
atggggctcggtgtatgcggctcgctctgccaaggtggtgatgaggatgatggtcctggttatgactatggtaatggtaagtggtattctttctgtttggaaaggatggctcgtcttagacacactgcacggaagtccgtcattcctttcttgccttctcgtctcgctgagcgtccgcttcgccgtccagtgactggtcagtctagccacttggagaggctgcaccaccgcctgcacgaggagcaggagcgtcgacgagaggagctggagcagcagggctcttctttctcgcttcagcaggagatagagtctgtgaggagctgctcccctgtgctcccgctggaggcgccccctgcgccaccactgagcgccccagccgctggagtagctgctggaggagacccagatgacggaggtggcgacaatagctcgagccacaacaccgacctttcagaggagcaggagctggaaggatgggttgctcgacccatcactcgcgacgtcgctcgcgggtgtcactttcacgacgcgctcaacaccctgctacgccagacactcgaccggcgcacttggtctatcgagtatcgctgtgttgtcttccagcatagtcgcggggtttatccggaccgttgggaggcgacctgcttcgtgcaccgttcggagaacagtctccggggtgcggaggtctgctcagagcactattctatctctgagcgggactcagctaaggtggtcatgcaagatgccgcacggcgtgcgctttcgcactactgctcagtgctcagaagggtagccgatagtctcaacctgagcacaggaagcatggttgtctcacctgttggtgaggataatcctaggttgagcagcacagtcaacctagccgtcgtgctaaacacgaagctggaccatgcattagacgagctgagtagggctcatgctgagatcgcccagctgcgggctgagcgcgcagagcgtcgtcacctagaggatggctcccccgctctagtcgggactcagcacccgtatcactcacctcagcgtggacacgatgcttatggtaaccctgactgtaggaccaagataaatttagtaccatag

SEQ ID NO: 5313 - DNA, 1110 bp, Zea mays
  Peptide Sequence Number=SeqID_48688
atgggcgtcaagcaggtcctcgtccgcccccgctacggcgacggcgacggcgacgacgatggcggtaccagcagcagcagcagcacgggccgctgcgatgaggatgtggtcgaccagtcgccgccgcccatgtcgtcctgcggccgctacctcctccaccgcgtctgcaggttcgacacactcgccggcgtcgccatcaagtacggcgtcgaggtggcggacgtgaagcgcgccaacggcctcaacgccgacctgcagatgttcgcgcacaagactctccgggtcccgctccacgggagccaccagcccgccgccgcaccaccgtctcttccctcctattccccaaggaaccacgccgatcgcgtcgccagcccgtttacaggtcaaatcactagccttgaggttggcaggtttggccacacaccgttgagaactggggacgtaggtagggcagtgttccaccgagaatggacaacacgccgccctcccaaaaatgccgcttccatggacccatttcttaaaccaccacggagcacagtttcgccgtccatgagccttctgcagggatactatggccttccaccgactccacaggagaacctcacctacgaaggcactgagatggcgacgtacgctcaaggtcatcataggaaggctagaagcttatcgagcagcgaacatggagatggtgctgacgatgctgagaagcccataaggcggcgccagaaagccgactctgagctgacgacaggtagggaggacaatggcggttgcctcttgccaagggctgggcaagggctggccctgaggccaaaatctgggagtcgaccagacgggaacggcagccagctagatctctcggccacgtgggtgccctcgtacggggatgggctgcacaccgtgaagaaatcatcgagcaccccggagttccaagactcagacagcatcagcatcgcctcggaatggctgaagagcaagtggaacctgaagccggacgcgttcaccctcacgcttcctcctctcccgctcttggacagcatacccaagcctctcctcgacaacattcccaactccatcgctgcttggcgaaacaaggcggccaaagattag

SEQ ID NO: 5314 - DNA, 948 bp, Zea mays
  Peptide Sequence Number=SeqID_48689
atggatcccagttgcatctatctgatcaattctaggttggcttttggctatgcctatcctgcctatgaatgctacaagactgttgaactgaacaaaccagagattgcgcagctcatattttggtgtcagtattggaaaggcgtttcaataagttatgcggtcgcaatattgacttccgtgaacaatctgccaaatttaggtttgtttcctgtgtctaggattttagttgccctattgacagttttggagagattcggagatttcataatatcatggttaccgttttactcgaaagcaaagtcggtgttctttgtatacttgtggtaccctaagacaaagggaactacgtatgtttatagaactttctttaaaccatatatttcccagcatgagaatgaaatcgactggaatctccttgagctgagagctcgagccaccaacacggttgtcctttattttcataaggctgcttcggcaggacaaagtactttctttgacattttaaaatatgttgttgcccagtcaccttctcagaaatcaaggcaatgccttcatcaggagactaaacccgttcaatcttcacccaagatcaagtgtcaaacactagcgagatctggttcagtggcatccacaaagcctctggtagctgcatccgcaccaaaacctggtggtagcccaaagaaaggcgaggtcaaacctactgccgacctagttcaaactccaaccacatgtgctgattcaccgaaacccgagcctagcgccccatcactccctggagccgaaggggtggacaagatggccatcaatgaggccagtggtgatgccctagagggcgcagaagagcttgaccctgcgctcgaagaggagacgccgatggaggagacgatctgtgtgacgcgcgccaagctaaggaggcgcacagccaccgaagttcctgctgggaattag

SEQ ID NO: 5315 - DNA, 231 bp, Zea mays
  Peptide Sequence Number=SeqID_48690
atggtgccagtagtgaaagggaaatgtgcccttgggccatttctaagtattttggtgattgagtgtcaacacaagggcttaaatgtgaatcaatgcccatggatgaacacagtgcaaatcttcaacaaagggacccctaggcgcatggaggagaacaccaagcattcctacaacctttctaagcaccaagacattgatctagcgcattcgattcattgtgatagcatatag

SEQ ID NO: 5316 - DNA, 405 bp, Zea mays
  Peptide Sequence Number=SeqID_48691
atgaagcacaaaaccgcagctctcaagctcactcaaggatttctctccaaagatttgaaatgggagaggcaagagatatttttctacctgagaccggttgaaccgcccctagggcggttgaaccgcccctggcaggcctggcagcctgtctgccagtctgactggcagactgacgcgcagactgacctgcagactgaggtcagaggggtcagagaccagctgaactgcccctcaggaccagttcaactggtcttgaccagagagtttaggagagaaaaccccagctcaactgcccggaggcaagttcagctgcggaagaagctcaactcagctgaagtcaagttcagctggaaagctcagctgcagttgaagaagttcagctgcttttcagcaagaacactctag

SEQ ID NO: 5317 - DNA, 186 bp, Zea mays
  Peptide Sequence Number=SeqID_48692
atggcgaaccgctggtgggcgtggtcggggatggtggtgtggttagtggatcggtgggcgggactgggtgaggcaaggatctccggactcgggataccaagctgtcaagagcgtcgaacccttgactcgccgggcctcggctacgtaactcgtagccttcggccgtcttctccggtgaagttttaa

SEQ ID NO: 5318 - DNA, 405 bp, Zea mays
  Peptide Sequence Number=SeqID_48693
atgacgtcaaagcgataccaggaccccattgatgtttctgaaggtataaaaggttcacactcagccaataaaaagatcaagttttggattcaacaaaggagcaaagagataaccgaaggccctctggtctgggagcaccggactgtccggccagcgcgctataattcaccggacatgtccggtgtacaccggacagtgtccggtgcgccaaggaggagcggcctcaggaactcgccggcttcgggaatctccaacggctcgtccgctataattcaccggacatgtccggtgtgcaccggacagtccggtgcaacttcggagcaacggctattcggcgccaacggctacctgcgtcgcattaaatgcgcgcactgcgcgcgcagatgtcaggcgtgcccatactag

SEQ ID NO: 5319 - DNA, 966 bp, Zea mays
  Peptide Sequence Number=SeqID_48694
atgcaagactcgctacggatagttgagcaggggctgctgcaaattaaggcagcagtgcaacatgagcagcaacagctggcgttgtctgcacggctccagacgtcggcgactgtggacatacaggctgctgctcgtggcttccttgcacgacgaagagtgcgagagatgcgccgacagatactcgaggcagccttggtgatggttgactgcggcacacggggcgcgaccttgccctgtcggccggccatcagcagcggcaccgagccgctatctccaagtgcgagcatggccaaatttctagcattgttgattgtggttccatgggtgatagattttctagtgcatgactatgttatgatgccctttttagagaggtatgtccagaaggtgccacttgcagctgagctactcgatgtaaggcgcagccaaaagctgcagatggttaaagacctaaatattgaaaaggcaagatatcgtcttgaagtagagattggcaaatctcctccactttctgatgaggaggtctggcatgagttgcgggaaaaagcgatagagttgagggatgattggaggctagaaaatcgaaatgctttcgcaaatatatggtccgatactgtttatggaattgtgctatttcttcttatgtgcttcaaccagagcaaagttgcaatgctgaagttcacgggatataaggtgctaaataacatttcagacagtgggaaagcctttcttattattttagtatcggacatccttctaggctaccattcagagtcaggttggcatacattggtagaagttattctcgagcattatgggcttgaagctgatgaagcggcggtcacattttttgtttgtctggttccagtggctttcgatgtgtacataaaatattgggtatacaaataccttccaagattatcacccagtgtgggaaacgttttggatgaaataaagcgccattag

SEQ ID NO: 5320 - DNA, 405 bp, Zea mays
  Peptide Sequence Number=SeqID_48695
atggctgcccctagtggcgtcgtccatggggacggagacgccgtcaacgaagatgatgtgacgaaatttggcattgtccctggagatggacacgccggcgtccaggatgtgttgacaaaattagcaggcgatgctacccatggagatggggacgccggttgccaggatggcgtgacgaaagtggcatgcgacgcagcccatggagatggggacaccggttgccaggacggcgtgacgaaggtgacatgcggcgcagtccatggagatgggaacaccggttgtcaggacaccgccgcgaaattggcagcagaagccatgggatcagatcgaaacccaagctatctgataccagatgttatggtcgctagatcggtgagggattggagagggatatcgatggactag

SEQ ID NO: 5321 - DNA, 132 bp, Zea mays
  Peptide Sequence Number=SeqID_48696
atgggaaccaatgggcatctcgacctcgacacagaaggtaagtccgtggatcaaaagctgtggggagaatctgagtatcgtggggattacgtgcggaggaagacgaagtggtccaaagggtccaggatctag

SEQ ID NO: 5322 - DNA, 219 bp, Zea mays
  Peptide Sequence Number=SeqID_48697
atgactatacccacgggtaaatctttgtacccgtgcccgtacccattgggtatcgggcagatatcaggtaagacccgcaggtcaaatttcgtgcccaaacccgtacccgacgggtcggatatccgacggatatccgaacccacgggtaaaattgccatccctaaggacgaggtgctcgtagacgacgccggagaggatgacgccgaccatgggcagtag

SEQ ID NO: 5323 - DNA, 384 bp, Zea mays
  Peptide Sequence Number=SeqID_48698
atgcgggggaaggcgaactgctgctgcctggccagggtgcagctgtccgtcctccacctgggcgacggtcgtgccgcgcgcaggtggctgctgtcaccggtgctggagtgggggctgccgctggtgaggcttcccaccgcagcggttgcctccgccgacgagaccatcggtgccagctacgctccggacctccggctctttggctttaatggctggttctcgtcccctgtgaggggacatgaacgagggccttacagcagtagcgtttgccctgaggccatcgttgctactgttcagccgcccgaggcgaaggtcgttgtcgcgctactggcgcagtggtcgccggcgagctactcggagcccgttattccgcaggctttctag

SEQ ID NO: 5324 - DNA, 459 bp, Zea mays
  Peptide Sequence Number=SeqID_48699
gaaaacagcgctgttcaccccgctccggcaactgcgagccaccagggaaaggctgacaacggcaagtcacgacctccctcgagttcggcctcgggcgcaaccgggagctccgtctcacccgaccccggcctcggcctcaaccttggcctcgggagaaggtctccgcctcgcccgaccctgggcctcggcctcaacctcggcctcgggagaaggtctccgcctcgcccgaccctaggcctcggcctcagccacggcctcggaggagtcgccgcctcgcccgacctcggcctcggcttaaggcactcctccgacgaccacgtcggtacatctacagggctcaaggcgctcccccgacggccacgttattatctgtacagggctcagggcacatccctgccagccacgttagctccaagctacacccccattgtacagctgggcatctccttgtgtctataa

SEQ ID NO: 5325 - DNA, 105 bp, Zea mays
  Peptide Sequence Number=SeqID_48700
atggcgccgaggcggagcgactggtggcggactaggagtattattgattggttgctgggcgtggtccggccgtatggtatggacgtatggttggttgggagctga

SEQ ID NO: 5326 - DNA, 333 bp, Zea mays
  Peptide Sequence Number=SeqID_48701
atgccgggcataccgagggatgtcgccaagcactctctggatatccgagctggagcccgatgtaacaccctgggctttaagggacaaagccaggatctaaaatccatccttggcgccaaaaagtcaactgggagatgccacctagatcgaatcgaactcctcgttgtggctcctcttgaaccacctgtacttctcctgtgggggggtgagacagcaaggtggatcaagggcacaacttgcctggcacttgagattccagttaccagggtgattcttcaaatccttgtgaccgcactgctagtcgtagcaatacaaacaaacaagaggtactag

SEQ ID NO: 5327 - DNA, 804 bp, Zea mays
  Peptide Sequence Number=SeqID_48702
atggcgcaccagacagtccggtggtgcaccgggcagggcactgttcactgtccggtgcgtgccacgtcagcacaccgttggggtttggagcggttgaccgttgaagtcctttgtcttctagccgcaccggacactccgatgtgttctgacttcgctgctctgacttctaacttgagcactgttcacttttactatacaccgcagtcgaccgttggcgcagttaaccgttgctccgttggctcaccagacatgtccggtgcacaccggacagtccggcgaattatagtggagtggctttctgagaaacccaagagcggccagttgggaaggtgctcggcctgggcaccggacactgtccgagtttttgggacactcgtcaaagaatgtgaaggattctatgttcctaaggaaaacaacgctgttcaccccgctccggcaactgcgccagccaccagggaaaggctgacaacgacaagtcatgacctccctcgagtttggccttgggcgcaaccgggagctccgcctcgcccgaccccggcctcggtctcaacctcggcctcgggagaaggtatccgcctcgcccgaccctgggcctcggcctcaacctcggcctcgggagaaggtctccgcctcgcccgaccctgggcctcgaccttagccacggcctcggaggagtcgccgcctcgcccgacctcggcctcgtatcagctacgctacaggggatccatcattgccctacctttagctagccgcctcagactacgaaggaacaagaccggtgtcccatctaagttactccggtaa

SEQ ID NO: 5328 - DNA, 426 bp, Zea mays
  Peptide Sequence Number=SeqID_48703
atggcacccaagaaagctagctcgaaggctgatgaggctgcgaaggcagcactgctggccgcaagaaagggcaaggccctcgcactcacccactccacccaccaagaggctgctgaagacgacgctctccgcacctgcggccttgaaggacaaccgcagcctcccccaggcttcgccccaccggaaggcgcggacctcaccgaggatggtgaagtcctcggcttcaccccaccggagggcgcggacctcactgaggacggtgaagtcctcggcgtttcagaggaagaacagctacagctgcgcgccctgcgcctcaagaaccgcaatctccagaggcaaaaagagatactggaggccaagcgccagcacgtgtctgcactagccaaggtgcggcaaatgatacgcgacgaagagcagaaggcctag

SEQ ID NO: 5329 - DNA, 780 bp, Zea mays
  Peptide Sequence Number=SeqID_48704
atggctaaatatggtttacgtccccgcacactgaaaggagaattgtttgcactgttgtctaaggcaggaagttgtgggttaaaggtttcagtactagccaaatcatctgagattattgatcttaatgtttcgagcccattagaactagagcagttgatatctttagctctctccagtgacatcacattatttgagaagattgcaccttctgcatatcgtctccgtgttgacccccaaattaaaggggaagaagattctatgtcagatagtgatgattctggaagtgttgatgaggatgaggatgctagccgaagtgatgatggatctgatggttcccaaaagttaaaatttcttgagaatgaaagcagacttgctcgaaggaaggagaaaaatgcacatggaagtccaaataaatgtagtgaaattgatgaaagttattcaggtgaaaaatggcttttggcattgatggaaggcgagtattcagatctaagcattgatgagaagttggattgtttggttgctttaatagatgttgtttctggtgctggttctgttccaagacttgagtctaacaccctcgtagtcgaaactctagccacgatagatgttcagaccggtccaaaactccgcgagcaccaaggacaaaagatttttggtgaagctgtccgcaaattgcgagctcgtcgggatgtggagaacacggatgtccccgacaacaatgcgctcacggatgaagtgaagattgaactcaacatgctttctgtgctggtgctagactga

SEQ ID NO: 5330 - DNA, 579 bp, Zea mays
  Peptide Sequence Number=SeqID_48705
atgacggacggagtacgtcttggcttgcaagttctgtggtttggtggagacctggtcggccatggaagaggcatgcgaactttcgtctcccatccaatggaagatgaatcaacgcgaaccaaggaagagcaaggccccagcggcagacgggaccgggcccactcaggcgccaaggctgccggtggtgggtacttcctcgtgtctctggataccttccctccgtctccggatgcttcccgtgtctctggatacttccgtttgatacgacgtctccccttgtttctttacccttctgcctcatctaatttcttcctactcgctccctccgcgtcgtccttctcccggcgccggagcaaagcccaccgacgtccgctaagtcatggcaccatcgccgtcgggagcagcgactttggttcgtcagtgtccctgctcccctgcgcgctttgtcccagtgttgcgtggtggggaaggagaaaagtggtggggaaggagaaaaggtaccggtggaagatggcgctgccgcaacgacgaagtggggagcagttagccatggagtgggatgcgcagaggcggaggtga

SEQ ID NO: 5331 - DNA, 402 bp, Zea mays
  Peptide Sequence Number=SeqID_48706
atggctcggggtctcctacaaatggacatcttgaccaagatgagggagcctacccagaactccacatatttctacgacgagcaggtttctgtttctccaggcaatcgctcatccaatctttcaccggttccacctattggttgcagttcaccactatggcttggagcacacgacacggtggatgcccagttgcaggaagtaaggggacaagttgatggacttgctgctgacattaggacgatgcatgaacggcttgattcaacggtcacttcgacgaccgcgtgtttcaaccagcttgaccttgctcaaacggcgactcgcaccacactcgacaccatcctggcacgccttgatgcgttgaccacaaggatggagcaggactacggcggtgacactgagtag

SEQ ID NO: 5332 - DNA, 534 bp, Zea mays
  Peptide Sequence Number=SeqID_48707
atgcagcgggtaaacgcgtcctggcgattcaccttctcgggttctgtggcccaccactcaggtgaggtggaggctcctccgaggtcgaggtcgagtctgtcttccgaggtcgaggtcgagtccgagcccttgggtcgggcgagacggagaccatcggctgaggccaaggccgagtccaagccctggggtcgggcgaggcggagttcgtcgtgttcgtcgtcttccggggccgaggccgagtccgagccctggggtcgggcgaggcggagttcgtcgtcttccggggccgagcccaaatccgagccctgggtcgggcgaggcggagttcgtcgtcttccggggccgagcccgagtccgagccctgggtcgggcgaggcggagcttcctatggcgcccgaggccggacttggccgctgtcagcctcactctgtcgtgtggcacaacagtcagagcggcgcgggcggcgctgtcttcttgtcagactggtcagtggagcggcgtagtgactgcggtcacttcggctcagtcgactga

SEQ ID NO: 5333 - DNA, 582 bp, Zea mays
  Peptide Sequence Number=SeqID_48708
atgggaaaggaagtcagagcagaaacgagtgtctcctccactggcgggggtaggcgaggtcatctgcggaagggtatcagagtggccgcggaggaagaaaggggcggaggggcttacctgcggcgagactgctccagtgaggtggtcgagggtgtaggggaggtcctgagggtcacagtgatgtgcgggttgccgtcggggatggtcggagtcggccggtccacgtgcacaggcggggagctcgtcggcggcgaggagtccagccaaaccagggcgatacggttcaaacaaatgggtcagggagcttcaccagggatcaaggaaggcgtgtgtgcaaggaatttgagaatgactcaccggattgctcggtctacgcgcgcaggcgggcgaccgaagtccggcgaggatgaacttgggtcttcggtgaggtcctgtcgggtccgagcgcttggaaggcttcacggggcactagcgaagctaaccgagaggccggcgcaacttggacgcgactggagcgggctggccatggtggccgaggcttgggcagtgatggcgggcggaggaaaggctcactggagctaa

SEQ ID NO: 5334 - DNA, 1005 bp, Zea mays
  Peptide Sequence Number=SeqID_48709
atgcaggatgctacgcgacatgcactttcgcagtactgttcgttgttcagtggggtggctgatggtctcgacctgaagcactaccccaaccgctcgactagcagaactagttgtgtgattgtctaccgttggtgttactctctttccttttcctgtttcgctccttcttcccaatttcaaagcaatatagcaatgggtgtctgtgtcatgtgtgctgcgtcgtgcgcttcgtcgcgcgacgattcgtttaaatgcagttctgttgacagaacgatctggttgaagagcccgaagaactcgcaggagaagcccctgagcagtggctggttggtggaggcaagtgtccccttgtcagtgttttgggtccgaccacgcacccagggttgcccctcaagccgactcatcctcgctcagttccgatgtacggggctcctgtgcgggaagtgttcttgcttctccggcgtcttcacatctcttactgctgcttgttgcttattctcttcactttccttctactccaccgtgggcaagagcaaaaagggtggtagttcttcgcatcactccggtgataagcggaagcgtgagccgactcctccctcggaggacttcggcgactcagagtactcagaggaggagttctcctctgagtcagagggctcaccggtccatgcctctcccccggcgtcgtctgatggctcagacgactcccaagggatcaccgcggaggtgtggacctacatccgggccgtcgagcgcgccgggctcgagggctcggatgagtcgaagtactcctcagacaaggagaactcctcggactcgtctgaggagggcggcggcgacggcgacggcggtgacgacgatgacgacggaggcgatggtgacggcggcggtgacggcggcgaaggcgacggcaagggcggtgacggcagcggcaagggtggcagcggcgacggcggcgatggcagcaagggcagcagcaggggcagcaacaaggccagtggctag

SEQ ID NO: 5335 - DNA, 885 bp, Zea mays
  Peptide Sequence Number=SeqID_48710
atgatggctcgtcttagacacactgcacgaaagtctgtcatccccttcttaccctcctgtctcgctaagcgtccgcttcgccgtccagtgactgcaggagagagagtctgtgaggagctgctcccctgtgctcccgctagaggcgccccctgcaccaccactgagcgccccagctttggagtagctgctgaaggagacccagacaacggaggtggcgacaacagctcgagcttcagcaccgacctttccgccgaccaggagccggaaggatgggttgctcgacccatcactcgcgatgctgctcgcggatgtcacttccatgatgcgctcgacaccctgctacgtcggacacttgaccggcgtacttggtccatcgagtattgctgtgtggtcttccagcacagtcgcggggtttacccagaccgctgggaggcgacctgcttggtgtgccgtccggagaacagtctccggggtgcggaggtctgctcagagcactattccatctctgagcaggactcagctgaggcggtcatgcaagatgccgcacggcgtgcgctttcgcactactgctcatttctcggcggggtagccgatggtctcaacctgaagtactacccatgtcgcccatctggcagcacaggaggcgtgattgtctcacctgttggcgaggacaatcctaggttgagcagcacagtcaacctagccgccatgctaaacacggagctggaccatgcactagacgagatcagtgaagatgttcatctgttcagtgttgtggaagaattctatactctttttcttatgctgcaagatttgcaagatgtcagaaaacaggcgcagaggaggaaggcatgctcagcaggagcaagcagcaccgcaggatga

SEQ ID NO: 5336 - DNA, 336 bp, Zea mays
  Peptide Sequence Number=SeqID_48711
atgagggtggtatgggacgcccttggccaagtaattaggggagtcttatgttgggtgctggtttttggtcattgggaaacagaggcatctgttatggctcctatattctcgctcagggatctaggtacgggcatcgtcccatggatttttcctgagaccctgctaggttttgggatgttatatggactttatgcaatggtcatttccaacattcgcatagtgaggaccctagggaaaagccacgtagttgcctttggtgatctatgcttaggtaaagaagaaggcgccgaggcggatctccaggagttccaggacttcgacgagttcgaggattag

SEQ ID NO: 5337 - DNA, 147 bp, Zea mays
  Peptide Sequence Number=SeqID_48712
atgagggtgggatctgggtacgggcatcgtcccacggctttttctaagggcagaggttgcctttggtgcaatctatgctcaagtaaagaagaaggcgccgaggcggatctccaggagttccaggacttcgacaagtttgaggattag

SEQ ID NO: 5338 - DNA, 510 bp, Zea mays
  Peptide Sequence Number=SeqID_48713
atgagggaaacggagctcggccaggttcttcgccgccacgacggaaccaggggcgagtggggggaggcctggccgttgacgagggggcactgcaccggaggggcgcgtgggcaggggcggctcggtcgcacccgggaacctctcgcccatggcggacaagccaccggcggggagcggactggccggctggacgccgagcatggcatcgcgcagcactggtcgagggagcaagggctgggtgggctccctatcggccggcggggcacgcacgtggctgcccccatgcgcacgcctgtaggggcggttcctagctggatgcagggcacgcgcggaagaggcctagcaaccggccatgggcagcaccggccaacgtgcctgcgagctggcgtgcgggacgtcgttgtcgcgagcgtaggggtctgcgaggagcacgttgccatggccaggagagggatgggagaagaacgcgtggggagggagaggaagaaggatcttgtgcatacctggtaa

SEQ ID NO: 5339 - DNA, 702 bp, Zea mays
  Peptide Sequence Number=SeqID_48714
atggagaaggacgcgctggagtgcgacatctgctgcctacccttccagtccgaagttttcctggcaaataaaaccatcgagaaggggaagctggtgatcgacgtcaagtacttcttctacgtgcactcggagacacgcgacatctgcgaagagatctcctgtccggcgaacggcgacttcgtgctgtcccacgaacagacgttgccagagttcactccaccggcccattttactctagtctccggtctctctctccactctaactacgggtcgacctgcgtctcctcgaccatcaccaccttgacgatctccgtgaagtggcctgtggcattagacagaccaatgattacccaagacaggacacctggaaagcgaaaacctcctcagtcgaagtttgcgtcagtgaaccactcgctcagattgattgagctgccaaagtttggtctcgacatggaacagcgggtggtccaggtagcagctgatgttgaagttggttacagcattgacgccacggtattcgatggccgcaaggtcataggccttggctgcctcttcttgagtgtctgcgaaagtgcacgaatgagtacagtagtgcctctagaaagtaagacaaaatgtttggtgacacagattctgggcatgtttgctgcacgtgaagaggaaaaaccagaaaaggctaaggcattccagacagtcttgtga

SEQ ID NO: 5340 - DNA, 369 bp, Zea mays
  Peptide Sequence Number=SeqID_48715
atgggggatacccgccgtcttttcgcctcatcgttggaggatcacaactccgtgggagttggtacctttctgccatcgttcggcttcaaggattttcatcagccagcccggctgtacccccccccccccgccggcggtcacccgagacggcgaccaccagctcctgggtggggagaagtaagccgggctgcgatcttggtcccaccctcagcttcaaggatgttcatcatccttgctggggtgggggccgggctgagccggcgctctacctcccgcgcgggtccgtgggtcaccctctcccacggcattcgagggagagggcgctcactggccctgcgggcggcccggaattcgacaacgcggggctga

SEQ ID NO: 5341 - DNA, 510 bp, Zea mays
  Peptide Sequence Number=SeqID_48716
atggcgctccctgttgacgtggcgggtctgtgccctaagcagggtgacgtgggggctcctccgaagccgaggttgagtctgtcttctgttgccgaggccgagtccgaaccatggggtcgggcgaggcggaggtcattcggccgaggccagggcggagtccgagccctggggtcgggcgaggcggagtttcgtcgtcttccggcccgagtccgagccctggggtcgggcggagcggagttcgccgtcttccgggtcttagcccgagtccgagccctggggtcgggcggagcggagttcgccgtcttccgggtcttagcccgagtccgagccctggggtcgggcggagcggagttcgccgtggcgcctttggcaaggcctgactgcctgtcagactcactctgtcgagtggcaccgcagtcggagtggcgcaggcggcgctgtccttctgtcagactggtcagtggagcggcggtcacttcggctctaccgggggggcgtgtgtcaggataa

SEQ ID NO: 5342 - DNA, 492 bp, Zea mays
  Peptide Sequence Number=SeqID_48717
atggcccgcgctcgtgcctataaagcacccagggaccttgaccgtacccctccgcacgcgctcgacctcaccggagcccaaaaccaccggcgtttgcccgtgcacggcgtgcccgcggccgcccgatccccctgccaccgtagaccggccagcaggacccttcccaaccccgtccagccctcggagaagactgtgcacacctcggtgaagctccccaagcgaggaatcggagtttgcttcgccggagagaccagtccacggtcgccggactccacccgaccgccagcgagcgtagaccgggttaaagaaaataggaaagattgcaacctcgctgacggagagtacgtcctcgtgccggagcaaggagctgctcaggaggtagccccggacccagcaccagagcctgcaccagaggatctgcctgccacagctttggaaggcaagccccggtttatgcataacctgttatttatgctattttactatacttaa

SEQ ID NO: 5343 - DNA, 252 bp, Zea mays
  Peptide Sequence Number=SeqID_48718
atggggattggttgtctacgaggtggaaattggaataaggattatggtgtggtacccagattgctctcctcacgcgacctgagacgaggtctcccattccggttatggtgggtacaagtgcggtcactgcacgacggcagtcggggttctttgcaggacatggttgatggagtgacttggtcgtccatcttgccaccgggttggactgttgagtgggaccccgcctcagctgaggaggagcatgaggagtga

SEQ ID NO: 5344 - DNA, 678 bp, Zea mays
  Peptide Sequence Number=SeqID_48719
atgtccagcctcgggcgccataggaagctccgcctcgcccgaccccagggctcggactcggcctcggccccggaagacgatgaactccgcctcgcccgaccccagggctcggactcggcctcggccccggaagacgacgaactccgcctcgcccgaccccagggctcggactcagccctggcctcagccgacggtctccgcctcgcccgacccggggctcggactcgacctcgaccacggaagacagactcaacctcgacctcggaggagcctccgcctcgcccgacccagggctcggaccgactacgtcacaggggggccatcattaccctacccctaactagctcaggctacggggaacaagaccgacgtcccatatggctcgccccggaaggcccagggcactcgaacgggaggttggccacgcgggggaacgggacggcgcgcataagcctctcgctctctcccacgcggacgcttgtaaccccctactgcaagcgcacccgacctgggcgcgggacaaacacgaagggcgcaggtttcccctttacacctgtctccctctggtttccccccttcgcgctccgtctcgcgccgacttatttgggctggggcacgcggcgacaatttactcgtcggtctagagacccccggggtcgaaacgccgacatgatttaa

SEQ ID NO: 5345 - DNA, 291 bp, Zea mays
  Peptide Sequence Number=SeqID_48720
atggattcgcacgcgctggtgcaatacctgttcaaattcaatcaagctaaaaataacagcgtagggtgtggtggaaatcataggtattttggattcaaaggatcaggagcttgccgtggcttttcggcggaagggggaaagagaggctcgcggaactggctctggctctggcgtaggcctgtagaatctggcctccacgagacggagagttataggcagaatatgggacgagagtattttgggatttttctggaacatgaaccatgcttaagggatggcatggttggatag

SEQ ID NO: 5346 - DNA, 993 bp, Zea mays
  Peptide Sequence Number=SeqID_48721
atggctcgtagaagatcccaaaagaacaagaagactcaggagaacaaggaggtaactcttgagatattactttccgattgttctaattatgtttcttggtctactagagtgataaatgcctttagagcggtagacccacaattagaacaaattttagacaagagtattattcctcctaactatgctagggaaaatgcctccgaaaaagatttaagatgtatacgcttaaactatctagcttatgacatcttaagtaaatcccttagcaaagaagattatcatgccttcataataaaatatgacaaacccatttgtgatgtgcatgatatttggattagaattaaaagcaaatttaataagtccaaacatgatagttcattttgtgcttctacttcccttggtatttgtgatactaacccttgcaaggaagaagaagaaaatgaacgatggagaccaatcgatgaatccacctctccaaaaggtttgtcttcccattttgattcccacatatgttgtgtggctaatgaaaatgatagcggaagcacaaatgaggatgaggaggaagaaagaagctttgtgcatctctacgctcgcctaagccaagaagataaggcggtcatgctcaaacttctagagagagcgagagagcaaagcgaagctcgtcaaaggctagaagatattctctccataaagatgcaacactttgacgagttgactaaagaacatgaggagctaaagtgctctcatgttgatttggtccaaagcaaatcttcctttgagctagaatttgcaggaacaaatgatgattcatatcaaaagctcaaagaagaaaatgagaggctaaagaagagcttgacacaactaaaagggaaatgcattgcccaaccttctcaagataactgtgatcccgtggtgaagaagcttgagacgggaacaaccgtggtttgtctttcctcccttgaagaaaatgtcaaggatttgaggatgcaatga

SEQ ID NO: 5347 - DNA, 270 bp, Zea mays
  Peptide Sequence Number=SeqID_48722
atgggtggcagcctggcagggcataggacgagcaagcccatcgtggtgcaaacgtgccatgggccgtcactctggccgccacggacggacagagctgttcaacaggcggcgcgacagcaggaggagtgcccgtgcggcgaggccgagtccgccgaccagttcgagcggctccacgacgcagtgttgctcgacgtcctcaatcgcatcggcgacgtcaaggcgctcggccgctgcgccctcatcaaaactcagcttgttcccatggtttga

SEQ ID NO: 5348 - DNA, 873 bp, Zea mays
  Peptide Sequence Number=SeqID_48723
atgcggacggcctggacacgaagtacccgcggacgaagcgccgacggcggctaccggcaggccttcgagcccgttcttggcggcccaggaccggatcacccgcctggcgacgtcgacctccttccccggcgactagcactccccggcgctcgcaacggccagcacggcgaaccgcctccgcagcgcgcggtccgtgatggcgacgacctctggcaggccgacgcaccccggggcagcgcggggacggcggccagaagttctccgggcagcagcggcagccgtgggcgacgaagagaaacgccctggccggccccgcagcgggtagctcccagatggcgcgcgctctctccatggcccgccacctcctgccgcctgctccacctcccggcgctcctcgacggtgtcgagctcgcgcagcgcgcccgcgccctcctctccgacatcgcgcgccgccacatggagctggacacggtcgtgtttgttatttgctgtacatcaggcacggagcttcagaatgcttcttcggccgagcgccttgacgtcgccgatgcgattgaggacgtcgagcaacactgcgtcgtggagccgctcgaactggtcggcggactcggcctcgccgcacgggcactcctcctgctgtcgcgccgcctccatcccacggaggttgcaagcagccaggcacacatatcgggatcggggagaggagcgcgcgtgctcgtgctcccgccacctcctggctcgccgccgtccgcggccatctcgccgtccgagtccggcaccgcggcccctggggatgacggcgctgaagacggcagccgagcggaggagacttattctcacggcgggagattaattagtgtccataacaactaa

SEQ ID NO: 5349 - DNA, 1224 bp, Zea mays
  Peptide Sequence Number=SeqID_48724
atgaggaggaaagacgacgggtatcccccatccaggggcttggaaggtggaaagacgcggtgcataagggagcgcgaagacatggtcgccttccgaagggggcccacgcgtcatgcaaccggcgcgctgactgcttcatgcatgcaactgcaccgccacttgcgccaccaccgcgcctcctcgattgcggaaccaataccgcgactcgaggcgacccagcgcacgacccagcagcgccagcctggcgcggcggtcaatgcgaccaaagatgggccggcagtaatgacggtggcaggcgggcgggagcaacggtcacgttgtcagccaagcccacgtcccatccgggggcagcaagagaaccccctctcacggtgtgaagacaacgcgcccgtgatccgttcctcgaacggctcgcgcacgcgcaacggccgccccgccaaccactcgccccgtcgcatttactccgcgacgggacaggcggcacttctggcaggagaagcgggcgacgcttcgcccttcgccgctccgagcctccctactgatcagaggttcgaaggctggccccccgaagggttcgacagccgcctcagatcgcgtgggccctacacccactattggtcagaggttcgaaggccggccccccgaagggttccacggccgcctcaggctactcgggctccgcgcccattactgatcaggggttcgaaggctggcccccgaagggttcacagccgcctcagacgccgagcgagggatgaccatgggtacgttcgatacataaccaaggctcgggctgcgctcccgagctcaccggagacaccatgttcggcgcccatcgagggcaacatggcgctctcccccctcctccttgcggaaaggcgacgcaaggggccgtcaacataccagcccgagaacttgggacccgaccgtacacccgggctacggccagctcgcatgagggaacaaccagaccagccgaagcattacgcgaggctacacccggcgggtgcgctcgcgcgcacccaccggaacaaaatgcaaccgagaaaggctggtccccttgcaaaaaagtgcgacgaaagcctccaagcgagtgctaacactcccttcgaggctcgagggctactgtcggggaccataattaggggtaccctcaagactcctaattctcagctggtaatccccatcagcataaagctgctaaggcctgatgggtgcgattaa

SEQ ID NO: 5350 - DNA, 750 bp, Zea mays
  Peptide Sequence Number=SeqID_48725
atggcagttacgcttcggttcgtctccatctcccagccccggcgtgcttccttcctcgacacgctgctactcccggtcccggtcccggtcccggtcccggccctcctccaaaagattcgcacccatccagccgacgccccaaccggtccgtccggccatcacccgcgcaaatccccacgatttatacccggcgggccccacgcgaaggcgcgaactcggccgcgccacgaactccacattgcccgcgccgcgcactgccgcactccgcaggggggagggacaggacgcgccgtgcccgtgcgtgagcgtggcaccaacccctcaaccctacccgcccgcaagtaccctcacgtagtcacgttcgcttctcgctcggccgctcctcctcctcgccacgccgcgcgcccggcagcgggaggcggggcccttcgcgcgcgcgcaatggcgccggacccgtgcgccgacctcgcggtgacgcccaagacgtcggccaaggacgaggcgtcctgctccgtggccccgcccacgccgcccaaggtcacccccgacgaggtccgcgcggtggcgcgcaagttcgcggaccagcctatccaggagacggaacccgacgtctgggccgtcctcaccgccatctccaagaaggcccgcctccggccccaggttcccgcccccctaccccgccctcccttaaaccctaaccctaaaacccaagcattgcccattttcctttctttctttgtatttgcctga

SEQ ID NO: 5351 - DNA, 615 bp, Zea mays
  Peptide Sequence Number=SeqID_48726
atgcaggcggcatgcaaccgcaccaagggggcgcaccctttcgacttcgacgcgtccagcatggaggcccggactcacacgtcatgtaaccggcgcaccggttactacgtgcaagaaactgcaccgccactcgcgccactaccgtgcctcctcgactgcggaaccagtaccgcgactcgaggcaaccctgcgcatgacccaacggtgccaaccgagcacatcggtcacgggtcagtcagccgcgggagaaggcgcgacggtcgatacagccagaaatgggtcggcagtaatggcggtggcaggcaggcggaagcagcggacaggcggcacctttggcagaagaagcaggcgacgcttcgcttccgccataatgaccgcatcaaaaaagggaccgggaaaggggataccccgaaagggatccttctccgcgaaggaaacggggccccgagcccccctactgatcagaggttcgaaggctggcccctccgaagggttcaacagccgcctcagagcactcgggctccgcacccactactggtcagaggttcgaaggctggcccctcggaagggttcaacagccgcctcaggccactcgggctccgcgcccactactga

SEQ ID NO: 5352 - DNA, 477 bp, Zea mays
  Peptide Sequence Number=SeqID_48727
atgcggcggccgccctccggtaggaggggccgccggaagcccggccgacgactccgacacgctggaggtgacgacgctcgccgtcgttcagccccgcgttatcgaagtccgcgccgtccgcagggccagcgaacgcctctacccccaaacgccacgggaaagggcgacccgcggacccacgcggaagggaccgggaaagggggataccccgaaagggatccttctccgcgaaggaaccgggctccgagccccccattactgatcaggggttcgaaggctggccccccgagggttcaacagtcgcctcagatcgcgtgggcccgacacccactactggtcaggggttcgaaggccagccccccgaagggctccatggccgcctcaggctactcgggctccgcgcccattactgatcaggggttcgaaggctggcccccgaagggttcacagtcgcctcagacaccgagcgagggatga

SEQ ID NO: 5353 - DNA, 231 bp, Zea mays
  Peptide Sequence Number=SeqID_48728
atgcgcaagtccactggaccgattggcgtgcctcgccatcctctggctccaaggcatgaggagagcagcagtagcagcaatgaccccattggagatctggaagcccaggtggagcagcttcgaacggagctacgtcacagaaagagtgtgtgggtcgaggatggtgtcacacccgggtttcggggcaccaagacccgggtccgagctgctcatgaccgtgagcacggctag

SEQ ID NO: 5354 - DNA, 105 bp, Zea mays
  Peptide Sequence Number=SeqID_48729
atggcgcaccggacagtgtccggtgcatcaggccgagcagcactcgaacaactcactctcgggtttctccagggcacgctccgctataattcactggactatccg

SEQ ID NO: 5355 - DNA, 1731 bp, Zea mays
  Peptide Sequence Number=SeqID_48730
atgcctgttctgatcggtttactgtacctgaacacccgtcggaccctcctcgaaaaatacaacctgctagctgttgggagttctcatggtgctctgattgaccccaaggatcagttcatgtaccgcaccggagatggcaagtacaatgaccccgataatgctgaggctggtagccaatacacattttttgggagaaacatgaagccggttgatcaagagtatgagttgatgagcccagatccatttgttgtggcgacaaagctgttagccaggagagaatacaaggacacaggaaaacagttcaatatactagcagctgcatggatacagttcatggttcatgactggatggatcatatggaggataccaaacagattgaaatcacagctccaaacgaagtggccaataagtgcccactcaaatcattcaagttctatgccacaaaagaactgcctacgaattctgatggaacaataaagactggttactacaatgtccgcacagcttggtgggacgggagtgcaatatatggtaataatgataaaaaggcagaaaagctcaggacttatgttgatggaaaactagtgatcggagatgacggtcttcttttgcatgaggagaatggtgtggcattattgggcgatgtccgcaacagttgggttggggtttcgatcttacaagctctttttgttaaggaacacaatgcagtgtgtgatgcaataaaggaagaacatcccaacctatcagacgaagaattatatcgatatgctagattggtcacttctgctgtcattgcaaaggttcacactattgattggactgtggagcttctcaagactaagaccatgagagctggaatgcgcgcaaattggtatggtttattgggtaagaaaataaaagatacatttggtcacataggaggaccggcattaggtgggcttgtgggattgaagaagccgatcaaccatggcgtaccttattctttgactgaagagtttactagtgtttacagaatgcactccctattaccaagcactcttaagctcagggatccgaccggccaacccgatgcaaataattccccaccgtacttgaaagacgtcgatattggagagttggttggtctcaagggggaaggacaactatcgaaaataggctttgaaatggaaatattatcaatgggatatcaagcttgtggtgcacttgaactatggaactacccaagtttcttcagggacctcataccacaaaatttggatggtaccaatcgatctgacaggatcgaccttgctgccctagaagtatacagagatagggagagaagtgtaccgaggtacaatgagttcaggagaagactatttctgattccaataaaatgctgggaggatctgacaagtgacaaggacgcaattgaagccataagagcaatatatggagacgatgtagagaaattggatcttcttgttggtcttatggcagagaaaaaaatcaaggggtttgccataagcgaaacagcattcaacattttcattttaatggcatcgaggagactggaagcagatcgattttttacaagcaatttcaatgagaaaacatacacaaagaaggggatgcaatgggtcaaaacaactgaaggcctacgggatgtgatcaaccggcactaccctgaaatcagtgccaagtggatgaagtcctctagtgctttctctgtgtgggatgcagactactag

SEQ ID NO: 5356 - DNA, 288 bp, Zea mays
  Peptide Sequence Number=SeqID_48731
atggctgtcctttctcacggcggcgacgcgctctcccatctctccctctacgtgtttctcggtgttttggcgatggcagaaaggggcgttcatgcctgcatacttatacatgcagagggaaaccgcttcctggtggagctggtagaaggcccgacgattaccggcaagatacagggccccatcagcagtggtgataaccggtgtgtgcacatgcatgatggagccgagaggctcacgttggataggtgtgggctgctaccagactcaatttggctgtcaggtttttaa

SEQ ID NO: 5357 - DNA, 519 bp, Zea mays
  Peptide Sequence Number=SeqID_48732
atgggtgaccagttgcggtggctgacacctagggacatcaagagtcgcgaggacatggcacaatggatcatgttggcgacaggattaaggatttacaggacacgtgtccaggacgtgggggacgcgtatggacccgcccgccctccgtcgccgcgccgccgtcggcgcccgccccccgtcctccctcgccgcaacgccgcccgtcctcacgcgccctcgccgctgcgcggccgcctcgcgccgtcgccgctgcgcgcccgccgcgcgcccttccctccaccggcgatcgggcggcctgccccatcacgccccggccccctgcagctccggcggcgctcgccccattgcgccccggctcctcgaaggggcaccgctcgcccgtgcagctccggcgacacggacccccactgcgcggcagcctcgcccccaccaccgccctcggcccgagagcctcaggcaccggctctctccaccgccgtcccccgccgcagccgcaccgagctccgcctcgcctcctag

SEQ ID NO: 5358 - DNA, 657 bp, Zea mays
  Peptide Sequence Number=SeqID_48733
atgcgggagttcctggcactaggatataaacccgaccgccgccgtttctcgctctattctcgtaggatttacaccgtgctgggaaccgccactattgaatctgtcgacaggagagagggcgtgtggcgtgtggagtggggcgtcggtgttgacctcgcccacgactggcgttcggggatccgtggcgagagcattgcttgcgctgctggctccgctgacgcatgggacccacctggtggtctctcgctcgcgctcagcattcgcgggcccactcgtctgccgcttctccacgcgcgcgccactcactctgaccacgcgggcccgctgctcagctccacccgaacccgcacggtcttcttcttccccgcgaaaatagcacggcatgaacagacctcaccgtttcctacggatcgttcctccaatttcgtgatgcgggagttcctggcactaggatataaacccgactgccgtcgtttttcgctctattctcgtaggatttacaccgtgctgggaactgccactattgaatctgtcgacaggagagagggcgtgcggcgtgtggagtggggcgtcggtgttgacctcgcccacgactggcgttcggggatccgtggtgaaccaaggtgcttcgcgtggattgccagtggatcgccgtag

SEQ ID NO: 5359 - DNA, 267 bp, Zea mays
  Peptide Sequence Number=SeqID_48734
atgtatagaagaaggggcaacgaagggtcggggctagcaagggttgctaagtcagacaggtgttgtttgagcgactcgaaggccgctgcctgctctagtccccaagcaaagtcttttgcaccacacaatgtattgaggaaaggtagactgtgctctgcggatttggagatgaatctgttcagggtggccaatctgcctgtcagtcgctggacatccctggctgactgcgagggtgttggggacttgttctcaaatgcttcgaattaa

SEQ ID NO: 5360 - DNA, 702 bp, Zea mays
  Peptide Sequence Number=SeqID_48735
atgcgggacaaattggtcgcagagaacaagagccgcaacctgatggagaagttgtcggctgcggaggtcgaaaaagaggaccttgtccgtcagctgccggcggaaaaggaggatgctgacaaggcctgcgcggaggcccaggctgtgcgtgccgaggctaacctcgctctccaacgtgctacggaggcggaggcgagccacaggagcctgcgcggctatctggacaaagcggaggcctctacccgcacagaggtcgaccgagcgcatgcgttgctcgtggacgcgtatcggcagcttggtgcgtgtaccgccccctttgatgcgttcggtaaggaggtgggcctccgctttctcggatggctgcaggaggaactggagatgcttccggcgatcgtgacgggtctcatgtccttcgcctcgctcatcacctatgaaggggccgcaaatgccttgtcccacttcgaccatgaaattttccaggtcgaagacgcggtgctaaagcggtctgctggggcgctttatgataggatgtggggccctcatggtcgtgatactgtccgggaaaggtctgaccgagcgatggagcagatggtgaatgatgaggaggttgacgacttgggaggcctggagagcacgatgcctctggcggaggatgcaagggctaggattggggagcagacggcgcccgccaactggtgctag

SEQ ID NO: 5361 - DNA, 69 bp, Zea mays
  Peptide Sequence Number=SeqID_48736
atgaagcatttgagaacaagtccccaacagccgcggctgcccaaaacggcccaagacgagagggggtag

SEQ ID NO: 5362 - DNA, 162 bp, Zea mays
  Peptide Sequence Number=SeqID_48737
atggggctcggtgtatgcggctcgctctgccaaggtggtgacgaggatgatggttttggttatgactatggtgttgggtgtccgcattgcaaccactgctcaggtgaagatgaagtcatggaggaggacttccaggagttccaagagtacgatgagttctag

SEQ ID NO: 5363 - DNA, 1395 bp, Zea mays
  Peptide Sequence Number=SeqID_48738
atgcgggaaccctcacctcggccttcttggggtctctcgcaggtgctcgatcggcgttggggctctgagggttggggctgttggggtggtgcgtcggcggactacagaaggcgagcggcgacggcttttcgacgtcgtttctccttcttgaaggcgcgacccagaagacctctagtttgtgtgtttgtcggcgttgtggaggctcttcgtcactctgcttggctcggtggtgtcggggccattgtcgctttaggcgtctgcttgctctcggagttcggcgttgtggatcttttgctcgtggtgaagaatcggagctgcctcatgtggggtgtgctgaggcttggcaacgatggcgcgccgcggtcttattccttgcgtcggtgtctagatgtaggcatcgtcgagttgctttggcagaatgctcaacctagattccagttcattgtcatgaaccgcaggaatacagataatctagttgaagatctcttgggagattttgaataccaactccaagctccttatattatgtaccgaaatgctgctcaagaagttataggaatttggttttacaactctcaggagtgtcaagaagttgcaaatctttttagcaggattctgaatgctttctcgaaggtgccaccaaagccgaagattccccctgttcaaagtgaatttgaagaggtggaagcagcacctgtgttggttgatggccctctagaaccgcaaacgtcaaatatcatgtcaactactactcacattcaagaggatcctttatctgcatttttcagtgcagctgcaaatgctggtggcaactctgctgtagctgttgcaaggcaaccaattcaactttttggtgctactccggtggctacacatgcagctactagtatcactacaatacaatcgccaggcttgcattatttgcttccttcacaagcctcatcggtttctgggatgcctgctgatgctcatggttctataggaaggtccacaaaccttgtaaatccatcacttttctcaccattgacgtcttcacagacaacaatggtgtgcactaattctgtagtagcaattgctccacctcaacatcctcagactgctcagcagccgcaaagtgctcccttgcttcagccttttctattacctacggcttcaccatctccaccatatgggactccattacttcaaccatttccgccacctaatccatcgccatctcttgcgtctgcaccagtcttgagcccagcactgtctagagacaaagtccgagatgcattactgagacttgtggagcatcgactgccattagatatggctcctgacacccttaactacaaggagaaaataccattttacccatgtgtcgggtgctcagaaactgggtacccaaaataa

SEQ ID NO: 5364 - DNA, 465 bp, Zea mays
  Peptide Sequence Number=SeqID_48739
atggcccacggcggcggcgccgggaaggcgaaggtgacgccgaacctggcggtggacggcgagggcacgcgcacgctcaaccgcactgtgctgcagcgcctcgacccggccgttgaggatattctcatcaccgcggctcacgtcacgctgtacgactttgacaccgatgtcaaccagtggagcagggctttaaaacattgtagtggcaaggcccccgcgtcgtcctcctctgggcgatatgggcggctcctgttcgatcccgcccaactccacccaccgccgccggtcttcacccccgccgtcgctggagcagctcgccggaagtccggcgagcagcgaggagggcggcggcgggactgctctctcactcatttccctcccttcttccaccctctccactcctccctcttcctggaggtggccggtgacctgatccgcgctgggaaggccggatcggcgggctag

SEQ ID NO: 5365 - DNA, 669 bp, Zea mays
  Peptide Sequence Number=SeqID_48740
atgcgtgaacagtgcgcacagaagtcagagcaggcatcagaggcgcaccggacagtgaacagtgcctgtctggtgcccccaagctgtcagagctccaacggtcaaaaccgtcagaaccctaacggttgggtgatgtggctggcgcaccagacagtgtccggtggcgcaccggactgtccgttattttctagaggagagttatgcaatgaattgagaaggcttgctaacgataagactagtctatacatgtctgaatgcattactgagggtggtgtggcagagatgtttatggatataaacaaaggaaataaagatacagttaaatcatttggtagtagcaaggaaaattctgagcagatcacgaaggaaattgagaatttcaagacattttatagttcacctgtcaagagtggacaaaaagatgtaaagaatgtgaatgaaggagatgatgatcttaaaaaaggtgaacaagaggttaagagagcaaaatctaaggtgatgagaaggatctatgagtcttgtaaaggtgaatatgctaaggtatttgagtatcaagatgagggtcttctcaatgttgtagcaaatttgtttcctaatatcgagcatagaatgtgcacaaggcagatctatgccaattggaggaagacccacagagataaagacttttag

SEQ ID NO: 5366 - DNA, 63 bp, Zea mays
  Peptide Sequence Number=SeqID_48741
atgaggctggggctggggctgcgcgcggtctctacccaagagggtcatttggcactaacatga

SEQ ID NO: 5367 - DNA, 117 bp, Zea mays
  Peptide Sequence Number=SeqID_48742
atgagggtggaatggggtgacaatgagattgatggttctgattacgattatggtattggcgaagatgaagctgtggaaggagacttccaggagttccaagactacgacgagttctag

SEQ ID NO: 5368 - DNA, 661 bp, Zea mays
  Peptide Sequence Number=SeqID_48743
atggcgctccctgttgacgtggcgggcccgcgcccgaggccgggcgacgtgggggctcctccgaagctggggtcgaatctgtcttccgttgccgaggccgagtccgagcccctgggtcgggcgaggcggaagtcgttcggcagaggccagggcggagtccgagccctggggtcgggcgaggcggagttcgtcgtcttccggggccgagcccgagtccgagccctggggtcgggcggagcggaagtcgttcggcagaggccagggcggagtccgagccctggggtcgggcgaggcggagttcgtcgtcttccggggccgagcccgagtccgagccttggggtcgggcggagcggagtttgccgtcttccgggtcttagcccgagtccgagccctgggtcgggcggagcggagttcgccgtcttccgggtcttagcccgagtccgagccctggggtcgggcggagcggagttcgccgtcttccgggtcttagcccgagtccgagccctgggtcgggcggagcggagcggcgctgtccttctatcagactggtcagtggagcggtggagtgacggcggtcacttcggctctgccgggggggcgcgtgtcaggataaagctttatgctgatgggggttaccagctgagaattaggcgtcttgagg

SEQ ID NO: 5369 - DNA, 150 bp, Zea mays
  Peptide Sequence Number=SeqID_48744
atgggcgggggcctcctggcagcagcatccgccctgaggtcagtgctgccgctgttcggccccccggagcagaagtcgtcgtcgtcgctgctgctggagcagggatgtttgtgcgagcgagagttgcttctcgcggaaggtgatgagtga

SEQ ID NO: 5370 - DNA, 639 bp, Zea mays
  Peptide Sequence Number=SeqID_48745
atggctgaaaggtaccaactcccacggagttgcgtttctccaacgatgaggcggaaagacggcgggtatcccccatccgggggcttggaaggtggaaagacacgatgcatgagggagcgcgaaaacatggtctacttccaagggggtcaccctccttttaaaggcgactatccctacctgcgtccccagccgtcacgggctgagtcttctccaacacgctccaaggccctcccctgcggcgcgggggctgggtcccgcatgtcatgcaagccggctcagagcagaagaagccaaaccgccgcgcgcggtgcacacgaccgcccagcgggaccgggaaagggggataccccgaaaaggatccttccccgtgaaggaaccaggctccgagcctccctactgatcagaggttcaaagactggccccccgaagggtttgaaagccgcctcagatcgcgtgggccctacacccactactggtcagagaggctcgggggctgctctcgcaaacccggctctggccgaaccattgacagcgtcaacataccagcccgagaacttgggacccgaccgtacacccgggctacggccagctcgcatgagggaacaaccagaccagccgaagcgttacgcgaggcattaa

SEQ ID NO: 5371 - DNA, 84 bp, Zea mays
  Peptide Sequence Number=SeqID_48746
atgaagcagacccccaacagggacttagctggtgacgaagctcgaagtcatcttaagccggatgacgatgttgaaggtcaataa

SEQ ID NO: 5372 - DNA, 309 bp, Zea mays
  Peptide Sequence Number=SeqID_48747
atgaagactaggtttcaaataaggcgtgagaagaaagggaaaagttttgaccctttggtcattgaagagtttaattgggacaatgagtgggctgactcatcacatgtacaccctcaaggactaggacaaggtacacttgatccatatttacatagcttctcaaatgtttcttacaatcatgattcattacaagatgtttgtatgttacaatctgctagagggatacattctacatggaagaagggaaattggaaggataagagctctaaaactgacatcaataaggtgtcccggtgtaccaaagattga

SEQ ID NO: 5373 - DNA, 483 bp, Zea mays
  Peptide Sequence Number=SeqID_48748
atgacaggaaagaaagcgcctgtgcccccacctccaccacctcaagcaccaaaacctcctggagttgtgcctccaccaccaccaccaagctcaaagatctcaaatgcaccagcaccacctccattattgggaaggggacgtggcaacacaactggaccaactaaaggccgtggcattggtttggcacaacaaagtaatcctcccaagaaggcttcactgaagcctctacattgggtgaaagtcacgagagcaatgcaagggagtctctgggctgatgcccagaaacaagggaatcaggctaggtctcctgatatcgatttatccgaactggagagcttgttctccactgcagttgtaaccagcacaagtgaaaagggggcaacaagacgtggttcagctattaacaagccagaaattgttcacctgttacttgtgattcttccatattggttgacatgcgacgagcaaacaattgtgagataa

SEQ ID NO: 5374 - DNA, 615 bp, Zea mays
  Peptide Sequence Number=SeqID_48749
atgagctcctacacttatttgaaacaagttcaatgcatccagaatgattttattgcactcaaagttactatcatattaccaagaaggtgctacccaaaggatgatgaagcaaccttcgtcttagctcgaagaaatcaatcacatctttattacataataggagttatgtacaaaataactaactacaataaaccatatgatgaaaacgatcctctgcaaccattgttgactgggagacgacatcctagacctcgtcgaactcatcctcatggtattcctctggcggtacctgttattgatctgccgcccgccgaggcggtcatgaacaccaaggttctggcgattgtcgaggaggcggtctcagaccataggggctttatccttcacaggctcgggatggaccgaggcctacctctcttggcgggagggccccgcttgttgttccgaggtgggctcccgaagtcgagaggtagagctctcgacctgctagactgcagcgcactccaggagacccctgattccgtagtggatacgacgtccttcaatggtggatggttctggcatcatctggagcaagattgtcgccgcagcaaggttctgactagccctgtataa

SEQ ID NO: 5375 - DNA, 843 bp, Zea mays
  Peptide Sequence Number=SeqID_48750
atggatgctcatcagtcaaattatggggtatgggagctactcatcagtgaaacggtgtgcaacaagcgagacagctatactccagtttctgttatatttacacgcaaaaactacagcagccgtggcgtgggcatgtttgttcagtcatctgttcaaacattcccactgtacatgagcacgaaagctcctagaccttggaattcgcaaaggaaacctgcaaaaaagagaaaaaagacaacaatcatcaaatacatgcgacgaaatatatgcggagtggcagttgagagcctaccatttaatggatggcaaccagatagcgagactcctggcacagcatctctgtacgtacagaaggtgtttcaaagcaggttctgcactgccgcaaattatactgcagtcgcaactctatctagtacagatgttgagactggatcaaaaatcggtgaatacactcgacgggagccccttggtgaagatgtcggtgaactacagcgtggtggggacgctgagaacccgaacgtcaccgacagcgacacgttcacggacgaagtgcaggtcgatctccacgtgcttcgtgcgctgatgttgcacgggattagtggagaggtagaccgcgctgacgttgtcgcagtagacaagggtggcacgctgaatggggttgtggagctcctggagaagttggcgcagccaggaggcctctgcgctggagcacgagacgacaggctgccgcttggcggcctaggagacgaggttggcacccaggaacacggcataaccggaagtagaccggcgtgtgtcaggacagccagcccagtcagcgtcggtgtagaccacgagctctga

SEQ ID NO: 5376 - DNA, 660 bp, Zea mays
  Peptide Sequence Number=SeqID_48751
atgactctgggtacgtccgatacatggccgaggctcgggctacgctcccgaggtaccctaggacatttccaagaccagcaggagcgattttgtaacggaatcccatcagagggaggcatcgagccctcggaccctatcgaatgggaccgggtctggcaaatcacctgcaggacgcatgagggaacaaccagaccggctgaggcatcacgaaaggcattaagacctcacaggagtcaaaccactcctccgaggcctcgggggctacacccggcgggtcgaagtgaccgcagtcacttcgccctcccactgaccgacctgataggaaaacagcgccgctcgcccctctccgactgttgtgccacccgccagggtgaggctgacagcagtcgagtccagcctcaggcgcaacaggaaactccgcctcgcccgaccctagggctcggcccccgccacggcctcaggaggaggtctccgcctcgcccgaccccaaggctcggcccccgcctcggcctcggaaggtggtctccgcctcgcccgaccccagggctcggcctcaaccttgacctcggaaggtggtctctgcctcgcccgaccccggcctcggcctcaggaggagtctccgcctcgcccaaccttgggctcggaccgaccgcaccatag

SEQ ID NO: 5377 - DNA, 309 bp, Zea mays
  Peptide Sequence Number=SeqID_48752
atggagttatacctatattttcttttgtcctccgctactgtcaaaaccccggaccccgccagggaatcgacggaatttgttggagtctgccatgtttgggagctggtaggagatcccgcccgtgcggcccacgtaccgatgacggggtgcgcagattctgtggagttcggccgaggagatatggatggcggtaaatctcaacaaacccggctgttacggcgaccgcgtttcccggatttcgcagatgctggaatagaaatcggtcggcatgaagctagaaggtggtcccgacatgcatggcccacatga

SEQ ID NO: 5378 - DNA, 729 bp, Zea mays
  Peptide Sequence Number=SeqID_48753
atgaagccgtggaaggagacttctaggagttccaagactacaacgagttctaggcgtgggttagcggcaacccccagtcgactgcctgtgaaggccgcggtgttgggggccttcggcttacgaaggtatcttcggactcgagtcggaatcacagtgaacagtacccccgtactgttcacgctgatttggcatttgcttttgcgtcacacctgtattttcatctccttccaagctgaagcctctggagtagctgctggaggagacccagacgacggaggtggcgacgacagctcgagccacgacaccgacttttctgctgaccaggagccggaaggatgggttgctcgacccatcactcgcgacgctgctcgcgggtgtcacttccacgacgcgctcgacaccctgctacgtggggcacttaaccggcgtacttggtccatcgagtatcgctgtgtggtctaccagcatagtcgcggggtctacccggaccgctgggaggcgacctgcttgatgtcagagaacaggcgcagaggaggaaggcgtgctcagcaggagcgagccgctcagcaggatgaggtaccccagcaacagcacctgccgcccccgcccccgatgtcgatcgagcagatgtttctgatgcagactcaggcagttcaagccatcggtcagactctggccgccattcagcagcagcagcagcaacaccagcaggccccacctcagccttag

SEQ ID NO: 5379 - DNA, 1314 bp, Zea mays
  Peptide Sequence Number=SeqID_48754
gacgtgctccgcttctaccgttccggcgccttcttctaccggagcagcgcctccaaggcggggcttgaccccgcgaaggtgatccggtcggcgctgtcggaggcgctcgtgcacttctacccgctcgccggccggttccgcgagctccggcccacgaggaagctcgtggtggagtgcaccggcgagggggtcgtgtttgtggaggccgacgcggacgtccggatggatgacctcggagactcccttgcgccgcccgtgccgtgctatgacaagctgctgtgcgaacccgagtcccccacagcagatgtaatcgatcgtcccctgctctatgttcaggtgacgcgactgaggtgtggtggcttcgtcttcggctcccagatatgccactgcatagccgacggaaccgggattgtccagttcctgaccacgctaaccgagttggcacggggcgtgcccggcgcgcctaccgtccgcccagtgtgggagcgcgagcttttcacggcgagctggccgcatgaggtcagccacgaccacctggagtacgctccgctcccggaacgacccgcggccggcaaggaccacagggtgaaccccagcgacggcgacgacgtgttcgaccaccacgccttcttcttcggtccggccgagatcgcggcgatccggtcgcaggcgccgcccgcgctgcgctctgccgcctcgcggttcgacctcgtcggcgccttcatgtggcgctgccgcgccgccgcgctgcagttctaccccgacgactccgtccgcctccacatattcgtggacgcccgcgtcaggaaccggagccgccggcctgtgcccgcgggctactacggcaacgcgttcgcgttcgcgtcggcgtcggccccggccggggagctctgccgcaggccctaccgctacgcgcagcagctgctggcggaggccaaggcccgggcgtcgcgggaaggctacgtgcagtcggtggccggcttcaacgcggcgcgcaggaggccgccgttccccaaggcgcggtcgtacctcatctccgacgttactaacgcggggctgctggcggtggacttcggctgggggaggccagtgtacggagggccggccaccataatgctggcctcgttccaccaggaggggagaaacgaggccggtgagccaggaatcctcgtgccgataaggctgccggcttcagccatggagaggctaaagcaaaacgtcaggaaggagctggcgggcgcacacgttgacgccgtagaaacggctgcggacgagacaaactcaaacaggtcatcttgtttggccaaactctag

SEQ ID NO: 5380 - DNA, 636 bp, Zea mays
  Peptide Sequence Number=SeqID_48755
atgtcttcgcgctcccttatgcatcatgtctttccaccttccaagcccccggatggggaatacccgccgtctttccgcctcgtcgttggaggaacacaactccgtgggagttggtacctttcagccatcgttcggcttcaaggattttcatcatgcagcccggctgcacccctccgccggcggtcacccgagacggtgaccaccagcccctgggtggggagaagcaagccgggctgcgatcttggtcccaccctcagcttcaaggatgttcatcatcctcgctggggtggaggccgggctgtgccggagctctacctcccgcgcgggttcgtgggtcgacctctccttcggtgttcgagggagagggcgctcactggccctgtgggcgggtcggacttcaacaatgcggggctggtcgacggcgggtgtcgtcagcctcagcgcgtcgggctcgtcggcttagcccccggtgccccctcctgccggaaggcggctgccgcgccgtgtgcacgggaggaccgcccaagatgtcgcgcgctgccagggcggcgttcgtgttctggggtggtcctgcctttgcaccggtacggcgcctccacgcggaggtcggcaccccactcgtccgggaggatctga

SEQ ID NO: 5381 - DNA, 300 bp, Zea mays
  Peptide Sequence Number=SeqID_48756
atgggctacatgaagcggaggccaaacggctccgatggtcgactagggccacgacacatggcttttatagtcccaggggaagaagaagtccacgcgagaggaggccgagatcaccagcgagctatgggaggaaagatttggcctattgttagagatgggtttgttgtattgaagcaagatgaaccatcacctagtgacaatgagaatgttctgaccaatgatcaagccatgaatgtgttctatgatgctctagacataaatgagttcaatcgtatcaaaaaatctcacaaccgctcatga

SEQ ID NO: 5382 - DNA, 345 bp, Zea mays
  Peptide Sequence Number=SeqID_48757
atggctgcaggcagcaaattggtgagagagaggcggagcggcttcgcggtagaggtgaagatcgcacgagggaggagaggcttcgggagagggagccggagagcgtacgacacgaaggaggataggcttcgggagagggaggcggagagcacagggcggcgacgcggggcgtggaaggaggggaaaaatgcagcaaacaagataaataatagttcagattcggattcatatgtctctttctatctccttgacgatgatgatcaaggagatactgatgatgacactgaatcttatgagcagccaaaacccctggcaatgaaggtgctccttctatcttcaaagtag

SEQ ID NO: 5383 - DNA, 531 bp, Zea mays
  Peptide Sequence Number=SeqID_48758
atgttgctggccgagcacgagctcgaggcggaggagaaggagaagaagctggaaaagcgggtccaccagttcaaagcggcgcaggcggtgccgggtccccaggagacggaggccaccaagaaggccctagaagatctccaggcagagcaccgcgctagggttcaacggatagctgagtgggccggtgaggcgagcacgatgctggtgccactggggatgagtcccatcctagtgtcggagctgccagcgtcgatctccgacgccctcccggtgctggactccgctgccgatcgcattcgtcgcttagaccagatcctcggtgcctgcctgggggtagacggcagcaggctctgccagggggtggtggactacatgctgacgtgcttcgggagccacaacccagccatgtccttggcactggtgcttgatggttcggtggccgccacagaagacgccgcccgggagagagtccaagacgccgtggagatggtggccatgcgcttccagcacgaccctgccgatgtcgagtag

SEQ ID NO: 5384 - DNA, 780 bp, Zea mays
  Peptide Sequence Number=SeqID_48759
atgacttcccacggatcctccgatgacggaaatgcactgacccacactgacggacttgcacgagagggctttccccgcattttgtgggaagtacttcagggggccggatacacgacaccccctcagtacgcggtgcagcagttcgagaagcaccgggtgccccgctgtagggtgaggatgactttggagcctcatcccctgcagccaggctggcgctccttggactcagagtctttcgggtaccgggcagaggacacgatcgaggcgatcgctctgcatgggttgactaccttctgcggattccatcccttggagctggctacccaccccattggcttgttccccgctgagaaggaggacgacccaatgtggaaggatcgggtggagcatgccaaggacatctgggccatctacccaggtcagactgcgcatttgacagtacggtgcatgaatgttctgtaccgtctgcaggtgatgcgcggtgaggcaatgtcccatctgatggcactgctggaggcaacaaagatcacattggataacagagaggaactcgtggttgatttatctcaagaaatggtggagaaggacttgcaggtggagcagctatccactgatattcaggagttggaggagctggtaggcaccagggagaacaccatcgaggaggccaacgaggacgtcgacattgagggaggagatgatcctgcctccagtgtggacactgctggctcgggaagaccaccttcccccgagtcaagtgttgcttcgttcgctcactag

SEQ ID NO: 5385 - DNA, 345 bp, Zea mays
  Peptide Sequence Number=SeqID_48760
atgaggatcaagaacagtgaaggacctgagcataagtcggacgacgtcgtggttcgtccatctcgtgcttccatagctcctgatcttgttgaccagggtcttgagcctgtttgtaccttcaatcggaagggaataacagtacaagcgtggcgcaaaaagcgaatgccaagtcagcgtgaacagtacggggatactgttcacctatttatagacaagggacacagcccttacaaaattacattcatgccctttacatttgataataactctatagtaatctatcgagaaatactgttaaatcctgtttttgaggaccttcggacgccgaaaggtccccaacagtag

SEQ ID NO: 5386 - DNA, 765 bp, Zea mays
  Peptide Sequence Number=SeqID_48761
atggggatgaaccacaagattaatcttatgggtgtgcccttgcaggtcgagaatcttctctttaacattgacaggaaagagcaaagaatgagaggaagcttcgtatgtggggagaagggccacttcagggacaactgtccatctatggccgaacccaaaaaggaaaggagcaaaggcaaggcgctaacaagtgtcaagacttgggatgattcttcaagtgaagatgaacctccaaggacgcgcagccaccggtcctcatcacgctcatcacggtcatcacgcaaatgccttatggcaagagaagtgtctttggttgaaatacctgaaattattaagaaaaatgcttctacttcctgccttgatttaattaatgatactaacccctgcaaccaagttcttgttaagaatattgttgtagaaacatgtccggataaggttgcaaaggaaaatgaggaattaaggcaagaggtggctcgccttggcaagactttatatgacaagaaaggaaaagccaaacaaatccgacctccacaggataacaccactgcgggagtgaacaagcttatggagggtgaaactgtattttgtaggttatgccacaaggaaggccacaagtctttccaatgcaaggcgatgaccggggataagcaaaggcaaaagctcaagcaaaagccatcaagcaaaatctccaacacctacatcaaaaaggtggataaaaaggctgatacaccatatttgatcaagaagaaaaaaatggaaaggtga

SEQ ID NO: 5387 - DNA, 645 bp, Zea mays
  Peptide Sequence Number=SeqID_48762
atgtctttgacttgtttatgtgagtccattgtgaacatgcttattaaggcgtccgtgaagcgtcgcctaggcgctaaagcgttcatggagggtgaggcgtctacctcgccttgctctgggggtataaggcgtctgctggcgtcgtcagagcgtcatcggatcgacgccttgggcacgggcagcggtgggcagggcacggcggcagggcgagcagggcgcgtcctcggcggcgcgcatgctctgctccctctcaggcagcggcggcacggcagagcgagcaggttacggcagggcggcatgcaggtcatggcagtgcgcagggtgaaagaggagagctgcagggagggacaaggagtgctacggggagggagagggaagggagagaaggggctggcggctgagactgagagggctgcaggctgtaccgatgtagctgctggtggctgcgtcgcctcgccttacgccttttcgcttaaaagcttattatattccgtgtttgcaaaatctcacctagctctgttgcaagttgctttggctcttggttttagtggagctatggttgtggcaaacgatgaggcctttgccctagttgtgtacataactactattcacactcttatgctcctcaccattcaattgaagtaa

SEQ ID NO: 5388 - DNA, 741 bp, Zea mays
  Peptide Sequence Number=SeqID_48763
atggatcggccgccgcatctcgtcatcgacctcaacgaggccccgccgccgccgtcgagcgacaccccgccggcgcaggccccgtcgccgccgccgcagtttcctcctctcctgccgccgcagctgcccctgggtgcgcccaaccaacaggtgcggctccagcaggaggccctcgacgtggtgcttcgggtccaccgccccctcgaactgaggaatacaccttttgggcccatagggaacgtgcccgccggcttgctccctggtctggggctgccgctgctccctctgcagccgccggcgcctcaccctggggaggcgggttggggcaacccgccggccccctgctcgtcctgcggtcgccaggagattctggggggaaccttggtctgcgacgcgtgtgacagggggttccatcccaactgcgtccgcgtctggccgcctctcttccccccgcccccgccacccggcccccctggcgcccggcggccccgtgccgccgccaacgaggactggatctgccctgcgtgtgagaggcgtggcgctcgctccacccgctggaagctaggtgcagttgagcttgacatcaacgctgctccgccagaggaccccgtcacagtcatcgccaatgacatccgcaggcagttacttgagctctttttaatcattattatcattgattatattgatagtatatgcttggccatcgaactccttagtctcagaggctatgagtccgagtaa

SEQ ID NO: 5389 - DNA, 228 bp, Zea mays
  Peptide Sequence Number=SeqID_48764
atgaacaagaccgaaggccccaacacaaggagcttcgtcaggaaggcttattcaacgaggatggatgcccagatgggtcggcgcgaggccgagcgcgaaggggggaaaaggcggccggagacgggcgtgagagaggtggaaatcccgcggccttcgtgttcgtcccgcgcccaggtcaggcgtaaggagaggatccaggtgtacaatgggggtgtagcagagtgctaa

SEQ ID NO: 5390 - DNA, 597 bp, Zea mays
  Peptide Sequence Number=SeqID_48765
atggaccgaaggtccatggcacctggtatcagctccaggttatcctcaccaccaccagccgccgcgccatcagccgccgcaacgtcctcccacccgccctctccaactccagatgcattcactcggctcgaagagagttttggtcgtttcgcagagcagtgggatcaattcgttgtgatgttccaccgctacaaggagaagacagagaaggaactccaagcagcggtgcggcttcagacgacagcgcgagggttcttggcacaccgccaggtacagtcccttcgtggggagaagcaccttgctgtggcctccagggccaccccatggccgtcatcgcatgagcaggccgtggtgcgcctgcaagccgtggtgcgcgacttccttgttaggcgggcggtgcggaagctgcacttgctgatcagctcatcgctgcaccaactcgtagcctgcgcgcccaaccaccaggtctcgtctatactttttgaaccccctgcagaagtcgagatctgggtatgcagcccccctgcacggccaaagagggtcgtctccttcattcgggcacctgccttggtgctggacagacccaacataacataa

SEQ ID NO: 5391 - DNA, 6051 bp, Zea mays
  Peptide Sequence Number=SeqID_48766
atgacaaccatatcattgaacaacaacattgaatctcagttccatctccccttatcagagcaagcttatcaagattgtcaagcccttcaagattacattcagacacttcaagtgcagccatatactaaagactcctgccattatatttggggaagcagaaactatacatcaacaaagttctacaattttcccttcaaaaatgtgcagccccaactccttttatctggatttgggggactaaatgttccaacaaacttagagtttttgcttggctacttcttatcgatcctcgtgctctctggctggccgtattttttttcgttccttcttccctgctgtgttttgggacaaaatatcaccgatggaccccagttgacagttgccaacttgccacattttgaggggggtcacttgcagaatactactctttatgatggaatgcagtttatgccagcatttgatcttgcccagtgttttggcatgagacaaaattttacttccatggatcaagatttaattgctgatggaaacgtaccacaaagatcagctcatttacgcagaagaagagatcttccacaaacatcaacattacccaaggttgcagtgaaccatgagttaggaagtgctggcacgtctatggatccatcattttttaacaatacaatcaaacaaagtcctagtgaaaacagaagttccttaaagcctccaatatttcttatggagaacagtaatcatcagccacatcatcatacagttgcactacctgttcaatatagtgattttttcattaccagcttgggagaaattgacaatcggacaagttaccacaattcataccagatatggccagttgggtttacgtcttactggcatgatagagttactggttcactgtttgagtgtgaagtgcacgatggagggaattttggacctttgtttaagatgagaaggttaccgtgttcagcattccaacttccggatgcatcaaccacagtgtgcctaaatgttgttaggaacgctgatacaatagaaacgaaggaaggtagtgatttgattgaagatactgccaatgatgctaatgataatatttctatgctcttatcagatttctctgagacgaatcaagatttcttatcatgtctaggtaatgatttggagggtaaagaaagtttagggtgcagtaatgtagaaactaaggatatgacagtgccagatgtgctgtcagatcctggctctttcagttgggcaccgaccaatgatgcaaatatgtatgacaaaattggtgacttcagttatgaaggaacatcaccttcctcagtctggaggatgatttcttgtgctatgatggaagcctgtgaaaaaatgtacaaggagcatggccatttggtattattctgcactcacagtagtgaaaaatctccatttgactatgaaagtggacctcagcgcactgatggtcctttcaatctattggctaagttttgctcatcaaatgggcctaaggtaccacagtttatagaaaaggagaatgatgtgcagtcaacttgtgcattacttaaagaatggctgtatccagacagaatcgggtttgatttggaatttgttcaagaatttgtggaatctcttcctaaatccggggcttgttcacactatcagttcttgtgtaacaggactggaattaactcttcactgacgattgcaagtggcacactggtagctgttaataaaaatagtccaatgcatgcgagacatggatctgtagtgagtgggccgcaggatcatgctcagcctagctcttctagcatccgtgagcttcctccaggaaatcctattagccgcaagcttgcaccagaattggctggggatgttttccagatattggagtttcttggacgatttgctgaaatcatcggcctgaaagaacttccttcaattgagcaagtagaagatgaactcattgacccatggccaatgcatccaaataaaaatgacatccacaactacatggatcacaatccaccgatgaattcacctgctaatgtttcttcatcgtactcgaatggcgaatcaggtataacttctattgaagaaatggtatatgtgtctattccagttgagacttcttcagcacgagaagctgctcaaaataagttggctgcccagacacttgggagatgtagtggtttagtgctgcctgagatccacattgcactcttgaaggttcttttcaccgaacttgtatctagagtcgcaatttttgtggatccaagcattgatttaaaagaatcaaaatccagacgaggaagaaaaagggacactgatactctaacaagagagttaaagattgatatgctgactgctaacaatttgacttggccggagttggctagaagatatattttagctgtttcttccatgagtggctgcatggatttatctgatatttctagtcgagaaggagtgaaattgttccgctgcctacaaggtgatggaggtatcctgtgtggagctctacccggggttgttggcatggagaaggatgcatcgctacttgcagaggctgaaacattgatatgcaattcttcagcaaatgaagggaataccgtctttatgatggattacaaggatactgatattgtagattctcctgaggagcctgctagtgacactacgttgccagattgggtgaaatcattggagcctgtgagaaaattgccaactaatgtgggaacaagaataaggaagtgtgtttatgaagctttggagagaaaacctccagaatgggcaaggaaaattttggagcactcaatcagtaaagaggtctacaagggtaatgcatctggaccaaccaagaaagctgttttatccgtcttgacagaggcatgccgtacaaaagtaccccagaatacagaaaaaccaagaaaagagagaaatattatctccatctcagaggctgtcctgaaaaagtgccgtattgccctgcggcgtgctatttcctctgatgaatcaaagcagtttgctaatttgcttggaacaactctaacaaattccaatgagaatgaagatgagggcatccttggatttcctggtatggtatcccgccctttggatttccgcacaattgatataaggttggctaagggagcttatcgcggatcttgggaggcttttcttgatgatgtacaagaatatgcctttctggttttcaatagggttctagagcctgcttttcatagccaaaaggtaatttgtaatctgcaaactgcatttgctgatcgacctgaagtgctgataatggttgttgcactgtctgagagttttgagtcattgtataagacagaggtacaagaccttgttgagaaatttgacagatatctaagcaatgaaaatgatagctcagaaatccaccaggagctacaagatgctctcacggcagcaaacaataaactgccgaaagcaccatgggaggatggtgtctgcaaagtctgtggaatcgaccgtgatgacgagagcgttcttctatgtgataattgtgactctgaataccacacttattgcctgaacccaccactggcacgcataccgcttggaaactggtattgtccatcatgtactgcccaaactcatgttgcagtgcaagaacaaaagaagtgccttggggaggaagctcatgtttttattgagaaactcaacaagttagctgttgcgatggatgagaaagagtactgggagctaaccgtagcagagagaatctatttgctaaaatttctatgtgacgaattgcacaacacagctctcatcagagaacatctagatcagtgttcagacaagtcaaatgatctccagcagaaattacgtcacctgaattatgaactgaaagagttaaggtatcgggtagaaataaaaaatccttatgccacacaaagtagatggatgaaaaatgaccaagtaagcaatagttcaggactcgtggagaatcagcagcgtgctatgcccacagcctcagagcatcttgaagaggctgaacaggttaatgttggagttaacctgaacaaccctgctgaaggggttcctgctgcactattggatgtgggtaaaccttgcagtactgacaatggcatatccagcacatctgttattgaaggaaataaatctttggggctttcagaacaaccatcaaagataattactgaccagactgatcgggactctattgccgaaggatccaatagttgcgagaaatcattagttggcaaaagtggtacttgtgatccgaatgtgggagagactcatgctgctacagttatcaatgcaccaaatggagatttacctgatgaaaatgctatgacattgtcccaagataatattgaaacatcgacatctaaactggttgaccatgatgctgatatgaacgaatcaaataatttattggagaggatttcacagttgcatggttcaattagcacagtagagtcacagcttagtatggcatccttgagaggagagtgcctgggtagggattctgttggtcgattgtactgggttacaggaagaccttgtaagcgtcctcgtcttgttgcagatggaagcatgatgatacccaaggacagagacattagcatggttacaagccattctcagtcaacattcgatagaggttggaattcggcatcacttgttatttatgaatctgatgaagaaatgaagtgtcttgttgactggctaagggacattgatccaagggagaaggatctgaaagactctatcttgcactggcaaaagtctatttatcgccaggctagtttccccatcactgatcctccagtgtccaagttttcaaagagtgagccacttatggagcttccaaacaccaatgcttttatagttttggagcaaaagtatggtctgcaaacggatcaggacactagtgagctatccaaaaggagaggaacgaagtcaaggtcgggttctgaagaaagagtatatcgctgcgactgtttagagcctatatggccttctcgacaccattgcttaaattgtcatgaaacttatctcacattgatggaatatgaagggcataatggtggaaaatgcaccagcagtaacgactgtcctaatgaaagtaaagaaattgatgagccgaaactgaagggcagcaagtctgatataaaggaaaaagatcctgtagttcataattgttccgttgaaccatctaacagtggaaaattggagtcatgcccttatgactttgaagaaatttgtagaaaatttaccacaaatgattcaatcaaggagacggtgaaggagattgggctgcttggctcaaatggaattccatcttgtgtaccttcacctgcatatttccttgacccgccagttctgctaaatgaaagtaaaagaaatgacgataaaccaaatgattggacttcctcattgcaggaatgccaagctgtgtctgccaaaatgtcagggcaagagggatctcaagttggccaagatttttctggcaatgcaggtgatgaggagttgccaaaatctaagaagcctgtcagggatagtacttcagccaaggaagcaccttcaacagacatatccacaagattgctaactgttaatgggggattggttccagagtcatcactgatgcctgtaataggcaggaattttcatatcctgaagcagctaaagattaacttgcttgacatagaagcagctttgcctgaggaagcattcagagcctcaaagtctcagcaaataagaagacgttcatggcgtgcttttgtgaaggatgcagaattaatatcatatgtggtattggcaatcaatttcttgcagagcatgataaaagccgagtttctgaagaaagattggtggtactggtcctccttcactgcagctatcaagacaacaactgtatcatcgcttgcgctcaggatttacaccctcgacgactgcatcatgtacacaaaggatccagctccaaacctgcagccagctgacaatgcaaggtctggaaacaaggggaagaggaagaaagacatagattcatga

SEQ ID NO: 5392 - DNA, 240 bp, Zea mays
  Peptide Sequence Number=SeqID_48767
atggtggtatccagtctcgacacgtcgagcctacatcccaggggggcaggtgaaggagccctcatcatgggaggcgacgtcgaggccattaaagccaaagagatggaggcgcggcagcacacggtgcttggcggcctggccgctgagacggagccagagctcgaccagttcatggaggtgtacctcgaggtgctggtgaagttcagggagaaactgacgagactgctacgggaggcgtag

SEQ ID NO: 5393 - DNA, 837 bp, Zea mays
  Peptide Sequence Number=SeqID_48768
atgacggcgatgccatcgagcacaccgtcggcagcggcagaggagaccccagctgcgtccgccgccgccatcgaggtcgacacgggaggcgcgtccagctccaacccgccgcccactctggaggagacggaggtgatttttgggcgacgactccggtccggcgctgagccggaagcagcgctagttcccctcccccgggtgcagtcccgcgcccaccaggccctccaagagactaaggcggcgatcctgcgagagtgggaggcgcttgaggccgaacaccagcgcctcagcgactggcgtgcccagctggaggagcgcaccaaggcagcgtcccaacagttcgcctccgagcggtccgagcttgagcgggaccgcaaggactacaggaaggacctccagaaggtgttcgcccgggagctggaggtgactcggaaggagaagaggctggccaagaaggaggtgcacttggaccagagggaggaagtcatctcggagctccagggcaagctgaattcccttaacaaaatcctggaggagcagcgggtcgatcagaccgcagctgtggagagcctgcaaaggctgcaacaagagctcgatggcaaggcccgcgacgccgcacttgccgaggagaagctcaaggtgaaaggtgaatccttggacaggcgggaggcggacctcgccggtcgggcagcggacctcaccaggtgggagaaggatctcaccttcaagaaggaaatgcttgaaaggcggaagaagtcactggccgagcatgagctcgaggcggaagagaaggagcggacgctggaggagcgggttcgccagttcgaggtggcgtag

SEQ ID NO: 5394 - DNA, 1125 bp, Zea mays
  Peptide Sequence Number=SeqID_48769
atggcccctggcgaggccgtggagctaggagggtggcgcagcaattctctggccgcagacagcgccccaggcgcagccctagacgtcctggatgcacaccgcctgcaggatggtttggtcgccgcccgtcagtggagtggacagggcacatttaatgctgaggcagcacatcgcctaggacgtgcggctcagaggccttacgtcaggctccgcccgctggcttacgtcacgggtagtgggccacgtggcagcatcgggtctccgtctgagcggggagcagaagcgtacacggtatggtccggacacgtgttggctccggacccccgcctggccttgactaaggtccgggtactctttgtcccagaatcccgggacccttctaagagtggcccggaccccacgcagagaggtccaggacctgtcccgggggtccggtctgtacctgcggaggtcctggaccctgccccgaggtccggtccgtatatgcaggggtccgacactttcccatgggggttcgggcccaccgttgataccttgggggatattgtcttctctggccacgtggtggtcctggagccgtccacgtggtggggtcgggtgctgttcgccacgcgactagagatagttgtgcgggcaccgtatcttcatactgtagcaaggggtacccctgtttcaggagctcacgaaggaggaggaggcgggtcttcgctgcaagacgccgcctcaatgatggctaggaacaacgacgacaaaaagagaaggctcgcggctctcgccccttgtggccaaaaagcccgatggccgggcgttcaacgcgagaccgaccggcggccgctgaccccaccaccaccgccaccaccaacaccactgccgtcggcgcctgttgctatctattgccgaacggaggggtggggtagcgtggcgtactggcgtggtagaccggagaaacgggcgcccgcgcgcttcctgtttctcgccggctatacggtcctgcgtgaaaacccgaagaagcacggcaagtacagtggcccgaaatggaccgggccgggcggggcctacgggccagtccttgcgatattaaaaaccgagcatgaggatggcgggaagcagagactagagaagtag

SEQ ID NO: 5395 - DNA, 96 bp, Zea mays
  Peptide Sequence Number=SeqID_48770
atgggcagcaggttggggaggaagaacagggcgaaggccgagaagacgaacgagacgtccgacgatggcaaaaacgatgtaaaagaaattgactaa

SEQ ID NO: 5396 - DNA, 333 bp, Zea mays
  Peptide Sequence Number=SeqID_48771
atggatgttttaatgattaggaaccttgcagaggaccagcaaggacttggtaaaggtctagttgttgagaggagcagcaagggcgccacaacaggaaggagatcaagtccgactcggctgcgactccatctcgggttccaggaccagtctgcactaaaatggacgcccaagatgcatccggactccgattgcgacggacttgatatggttggaaagataaggatattatctaaccaatccaactggcaaggattagccttcatggcgaggtcaatcgcgcagcgcacggttgataaccagaggagaagtggtgctgcgattgcggggttctag

SEQ ID NO: 5397 - DNA, 693 bp, Zea mays
  Peptide Sequence Number=SeqID_48772
atgggtcaagttaagatggtagaaatcaaggaggctgcggaaaaagggagaaatgggaaggccaaggccgcggagaaggaaaggagcattaaacaacagactcatggggtatcctcagttggaacagaagccccatggcaaatccgccaagaacagagttcccgcggaggaagaaccccgatggacacgaggtggagaaattcgggctcagagatgacggacatgtgggtacctgcgaaaggcaactggttgttggggtcgattgaaggaatcaccacgacagacgaactcgaggttttcctcttgggcgccatctcgattctaccggcgagtagagtgggaggcgaattgcagagaggattcggaagcgagaaagcaagaactagggcacgaaaagcagaggcggctaaaagcgcagcacttatgggatattcccgagccagataccgtttcaaaaagtgcccagtcatcacccgacggttatttccaaaaccccagcgtgccacgtggtcacccagcagttatctccagaacaccgacgtcgccctccagtcactcggcgttacctctaaaacgctgatatcatattcaatcactcggcgttgcctccaaaacgccgattttgtgttcagacgctcggcattacctctaaaatgccgacgtcgcctcccagtcactcggcgttgcctctaa

SEQ ID NO: 5398 - DNA, 552 bp, Zea mays
  Peptide Sequence Number=SeqID_48773
atgtcgactgagaaatgccacctagatcagatcgaatgcctcggtgttaggcgactcctcttcgaccacctgttcttctcctgtggggggtgtgagacagcaagatttataggaagctccagtgcaggaatccctcgcctgaccgccattgcagcaaaatcaacccaaggacctccctacactgaccactcccctactgcccttgcccctttcgggttctggactgggcatcaattttcagaaagctcaagggtctctgcgcaagataacctagactcagggaacagtggccaatggactgcagcagcgccatccgtcggccgaatccatgctggtgagcgtgccctgcccggctattccgagcgccatacactgattcacatggcccccgtgaaattgacgactccccacaccttttcctcccatcaatttctgccaccacccagcgcagaccccgccatggtgcggtccaactcacggcggaggaatcgctacggtgagcaattatcggcgccccgattcccaaacccgagtctaattagtaacgtgtga

SEQ ID NO: 5399 - DNA, 1017 bp, Zea mays
  Peptide Sequence Number=SeqID_48774
atgcaggcggcatgcaactgcaccaagggggcgcaccccttcgacttcgacgcatccagcttggaggcccaggcccacacgtcatgtaaccggcgcgccggttactacgtgcgagaaactgcaccgccactcgcgccagtaccgcgccttctcgactgcggaaccggtgccgtgactcgaggcgaccctgcgcatggcccaatagtgccaaccgagcacatcggtcacgggtcagtcagccgcgggagaaggcgcgacggtcgatacggccagaaatgcgccggcagtaatggcggtggcaggcgggcggaagcagcagtcaaatcgcctgcaggctcacgtcccctcctgggacagcaagagagccctctcccacggcgtgaagacgacgcgcccgtgttccgttcctcgaacgactcgcgcacgcacaacggctgcctcgcgaaccactcgtcctgtcgcattaactctgtggcagggcaggcggcacctttggcaggcgaaagcgagcgagggaccgggaaaggggatactccgaaagggatccttctccgcgaaggaagcgggccccgagcccccctaatgatcagaggttcgaaggctggcccctcggaagggttcaacagccgcctcagagcactcgggctccgcgcccactactggtcagaggttcgaagactggcccctcggaagggttcaacggccgcctcaggccactcgggctccgcgcccactactgatcagaggttcgtaggctggcccccgaagggttcgacagccgcctcagagcacgcagagcgagggatgactctgggtacgttcggtacacaaccaaggctcgggctacgctcccgaggtaccctaggacatttccaagaccagcgggagcgatttcgtaacggaatcccaccagagggaggcatcgagccctcggaccccatcaaaaggggaccgggtccggcgaatcacccgcaggtacttttggagcgcgcctccgggccactagccgacccctaa

SEQ ID NO: 5400 - DNA, 102 bp, Zea mays
  Peptide Sequence Number=SeqID_48775
atgggagggggaatgagaaagaccgggctttgcagtgaggacggaatgggaatggcagaacacggaatcgggcagcctaccccttaccgtcttaataggtag

SEQ ID NO: 5401 - DNA, 396 bp, Zea mays
  Peptide Sequence Number=SeqID_48776
atggacgctagccaccgttgttctgcagcagccgtcgacaccatcttcaaccagagcctcatcttcagcaaagccacaccatctgttcgtagatccatccagattcgcatctacgcttggggcttccaccgatcaattgctgcaagatttgtggcctcagcctcagcctcggcctcgggagaaggtctccgcctcgcccgaccccaggcctcggcctcagcctcggcctctggaggagtcacatcctcacacgacctcggcctcggcctcaggagaagtctccgcctcgcccgacctcaacctcggaccgactacgctacaggctcaaggcacttctccgacagccacgttagcacacgtgcagggctcaaggcacttctccgccagccacgttag

SEQ ID NO: 5402 - DNA, 846 bp, Zea mays
  Peptide Sequence Number=SeqID_48777
atggcgcctcctgtgatgtggtcggtccgagccctgagttgggcgaggcggaggctcctccgaggtcgaggtcgagtctgtcttccaaggccgaggtcgagtccgagcccctgggtcgggcaaggcggagaccgtcggctgaggccagggctgagtccgagccctggggtcgggcgaagcggagttcgtcgtcttccggggctgagcccgagtccgagccctggggtcgggcgaagcggagttcgtcgtcttccggggcagagcccgagtccgagccctggggtcgggcgaagcggagttcgtcgtcttccggggctgagcccgagtccgagccctagggtacacatgattttgcagttattgataaggtctgagaaggatggcattctctgccctattccacagtacccattgtactctgcatcaattgctcttcatggtggttcccttgttccttatttccttgatgaagagacagggtgggcacttgaggttgatgagctcaagaaacaacttgaggaggctcgatctaagggcatcagtgttagggcgcttgttgttataaatccaggaaacccaacaggacaggtcgagctatgtgaagaacacgaattcattgttttggcatgcgatggcatctgcagtatcctctgggttattagggactacatgtcaagccagcagttggtcgatttcatccgcgagcatatagacacattagcttcagagtacctgttgcccattaaagaaccactactagaattagaaatgccgccaatttttttagcacagatggttccagcaccagcagcaatggattggctaagaaagtctggtgttcactag

SEQ ID NO: 5403 - DNA, 789 bp, Zea mays
  Peptide Sequence Number=SeqID_48778
atggagacagccacctccatggagcaccagaccggtggggaagacgagtcggtcgcgcccctaggtggtggacgcactggccaccggctttgtccgcctcgtcgagccgcccgatgcgacaccacgcgtgaaccacgaaacgaaggagagcgacgaatccttaccgattggatggtccctccctgtcctctgttctggacctacctcaacctgttcctccgccggcgcgcccgccgcctactcaacgtcgtggacccctacgtgaccatcgacatctcggagcccggcggcgaggtgcgctactcacgctacggccccgtctccgacaacgacagcacctacgaggaggtgaaggcgtacctgagcggcgccgtgcgctcgcaggacgcgcgcgagctccgcgtcgagggtgcccgggagggcaacggcctcgtcgtcagcatgcgcgacggccaggacgtggccgacgagttccgcggcgtcccgctctggtggtcctcggtggtcgcagcggagcgagaggaggtggcgtgggaatggagcaggctgttgaggagcgcagtgggacgccaccgaggggggagtcagcggagaatgcgacggaggtggtacgaggcgtccgcaacgccgtcgcggcggcccacggcggcaatcggcgaaggtgaattttggaggcgagaacgagatgccgggagcctgcgggttacggcatgggcagatccagaatcggagacggagagggagggggcaaggggcggacgcaactcgattgttctgctgctggattga

SEQ ID NO: 5404 - DNA, 177 bp, Zea mays
  Peptide Sequence Number=SeqID_48779
atgaatacgcaggctggagctgcgatctcgtcgcagaccatgggtgcaatgggtgcagaggtgcaaactcatggcagttctgatagggcaccctacacaaatctggagtttgaacacacgacaggtgatatgcttatcttttgtggatggactgttcgcttggcttttgctgattga

SEQ ID NO: 5405 - DNA, 1008 bp, Zea mays
  Peptide Sequence Number=SeqID_48780
atggacgaagagaaagcacggccctactttacacctcttcttcgtgcggtagctgtccacaccgcatcgcacgctgctggggtttcgcttgcattgggttcttgtggagacgaaatgggtcagaggctgctcgaccgcttggcgggcttccttcttgtcgtcgtcgtcgtcgttgtcctctatggcggaacagagcagcggatagcagaggcggcggatggagcgaacccgcacaggctgctggccaccgtctcggtgtccaagccgtcgtaccccacggttgtcaccacgccgatgtcagcctacggcgccgacccggcctccaagccgtcctactccacgttcccgtcgctggcgaccgggaacggcggtgccggtgccggtgccggtgcaggcggtggtggtgcagctgcaggcagtggcgggggcggcgggacgtggtgcgtggccagccagagcgccagcccgaccgcgctgcaggtcgcgctggactacgcctgcggctacggcgcggactgctccgcgatccagcagggcgggagctgcttcaacccggacaccgtccacgaccacgcgtcctacgccttcaacagctactaccagaagaaccccgccccgaccagctgcgacttcggcggcacggccaccatcaccaacaccgatcccagttcagggtcgtgccagtacccatcatcaagcggcggcggcggcgctcagaacatggtgcccccgccatccccgacgacgaccatgccgccgacagtccccagtaccgtcccgatgaccccgacgccgacggcgccggacaccggtaccccggtctacgggctgtccccgcccgactacagcggctcaacttcccctcccggctacggatcgacgtctcccccggactacaacgacgtcagcgccgccgccgcgagggtgaggcagcagggcggcgcggcgctggcgctgacgcttctgtgcgtcgtcgtcgcgacagtgtcgctgcgcgtctccaaatga

SEQ ID NO: 5406 - DNA, 285 bp, Zea mays
  Peptide Sequence Number=SeqID_48781
atggcgcttcctgttgacgtggcgggcctgtgccctaggtcgggcgacgtggaggttcctccgaagccgaggtcgagtctgtcttccatggccgaggctgagcccgagcccctgggtcgggcgaggcggaggttgttcggcagaggccagggcggagtccgagccctagagaccctgagtccgagccctaggtcgggcggagcggagttcgccgtcttccagggcctagcccgagtccgagccctgggtcgggcggagcggagttcgccgtcttccgaggcctag

SEQ ID NO: 5407 - DNA, 1053 bp, Zea mays
  Peptide Sequence Number=SeqID_48782
atgaacaaagacaccgacattcaaagtgccactacaaacggaactctggttccgtccccgcgggtacgaacaaccccacgaaatcggggaacccgcagagcgatcgcgagccgaagggcggctcgccgccgcccgatccggcaacagcggcaaccacccccgccccgggcgacgaagcagcttcggcagtggcttcggggcaggtgttacgacaggagggctctcacccgcagaggacaagaaccagccattcaggccgggagacggagacccagggctactggcggagttggcaatctcatcggtagagaagccatctccggctgtcgacgcctcgaagcgcgccggcaggtcttcgccctagtcagaaccgcccagagcgtgggcgccgccctcgtggaacgcaacacaaccgtcgtccgaacggagggcgtagtgctgcgccctagccgagtgatggcggcccacctatcccggcatggctggaggaagtctccgcgaaactggaggctgccattcttccctagacgccaggggaagaaaagggcagccgacccacgcgggggcagccccctgactcgcctcatcctccatcttggcctggatgacgaaaatcctcgaggccgagggaggggtagaggccgtagcccggctcgatttcccccaccatcaagctggaggtcaccatcttgggtgaccgccggtggaggggtgcagccgggctgcatgatgaaaatccttgaagccgaacgatggctgaaaggcggcgcttctggcaggagaagcgggcgacgcttcgccttcgccgcaataaccgcgccaaaaaagggaccgggaaagggggataccccgaaaaggatccttccctgtgaaggaaccaggctccgagcccccctactgatcagaggttcgaaggctggccctccgaggggttcaacagtcgcctcagatcgcgtgggccctacacccactactggtcagaggttcgaaggccggccccccgaagggctccacggccgcctcaggctactcgggctccgcgcccattactga

SEQ ID NO: 5408 - DNA, 660 bp, Zea mays
  Peptide Sequence Number=SeqID_48783
atgcagtcggcacgcaaccgcgccgagtgggcgcacctcttcgactctaacgcgcccagcatggaggcccaggcccacacgtcatgcaaccggcgcgccggttgctacgtgcgagcaactgcaccgcccctcgcgccactaccgcgcctcctcgactgcggaaccagtaccgcgactcgaggcaaccctgcgtatgacccaacagtgccagcctggtgcatcggtcacaggccggtcagccgcgggaggaggcgcgacggtcgatgcggccacaaatgggccagcattaatggcggtagcaggcgggcggaagcagcggtcacgtcgtcagccaagctcacgagaagcgagcgatgcttcgccttcgccataatgaccgcgtcaaaaaaggctggcccctcggaagggttcaacagccgcctcagagcgctcgggctccgcgcccactactggtcagaggttcgagggccggcccctcagaagggttcaacggccgcctcaggccactcgggctccgtgcccactactgatcagggcgggaacgattttgtaacggaatcccatcagagggaggcatcgagccctcggaccccgtcaaaaggggaccgggtccggcagatcacccgcaggtacttttggagcgcgcctccgggcctctag

SEQ ID NO: 5409 - DNA, 606 bp, Zea mays
  Peptide Sequence Number=SeqID_48784
atgaacaagacaccggcactcaaagtgccattacaaacggaactccagttccgcccccgcgggtacgaacaacccctcacactggaggacccgcggggtgacaaggctccagctggcccaccgccacccgctccagcagcagcgacaatgacctccgctctggctggccgaactgcagcagcgatggccgcgggacggatgccgctgcaacaacgccctcgcccacggctacgctcgaggggcgaggacaagtgcaaagagccggaggcccggagcgcggatggtggtggtgatcccgtcggcgacggggacttctccagccatcgctacctcggcaccggcgacaggagccggctccccactcggatcctcacggacgagcggagcaccgacctccgcgcggagacgcgtaccggggcaaaggcaggacagccccagaacacgaacgccgccctagcagcgcgcgatgtcttgggcggtcctccaccatcgtgggctgagtcttctccgacacgctccaaggtcctccccctacgacacgggggctgggccccacgcgtcatgcaagctggtccagggcagaaggagccaaaccgccgcgcgtag

SEQ ID NO: 5410 - DNA, 823 bp, Zea mays
  Peptide Sequence Number=SeqID_48785
aagtcagatggaggttcgctgccaaaccagcttttgccagaatgaagatggtttccccacgttgatgagagcatgcacagtccgcctcggaataaggagccagccagagtatgatggtcgtgagttcgtcgagcatggcacagagaagtgtgtcgtgactgtatacattggatccaaagaagtggccgacaccccgctcagattctttccgccctttcagagaaaccgtcctgtttggatggccaggatgcgtgcattggaagagaagcacacccgtaagctccatgtggatctcaccacagctcaagcccgtgtagctgccttggaaagtcgtgaagtcattgctgttgaagccctgaagcaagccaaggatgagcacgtccagaagctgatggaggcctacttggtaacccataaccaacgtagagccctccggatccaagaacctgtttcatccaacccagttcaacccatgagagccgaagatccccaaattcttgaaggcgcaagaacaagggcagaatgcaacgaccacgtgttcgacgcgctctgggctcgccagagcacgcccgacgcgcgccccgcgtgccccgcgtcgcgccaaagtccagccggcgccatggtccgcgcccgcgcctataaagcacccagggacttcgaccttactgaaagggaaatccaaggggctgcttcggtctggggcaccggactgtccggtggtgcaccggacagtgtccggtggtgcaccggacagtgtccggtgcgccaggccgcctcggccgaagaggccgctctcgggtttttctccggcgacttcggctaa

SEQ ID NO: 5411 - DNA, 342 bp, Zea mays
  Peptide Sequence Number=SeqID_48786
atggcccgcgcccgcacctataaagcacccagggacttcgaccgtacccctccgcacgcgctcgacctcaccggagcccaaaaccaccggcgttcgcccgtgcacatcgtgtccgcggccgcccgatccccctgccaccgtagaccggccgacagaacccttcccaaccccgtccgaccctcggagaagactgtgcacacctcggtgaagctccccgagcgaggaatcggagtttgcttcgccggagaggccagtccacggtcgccggactccacccgaccgccggcgagcgtagaccagcctctacgtcaccccgtgaagctcactgtgccattggattga

SEQ ID NO: 5412 - DNA, 339 bp, Zea mays
  Peptide Sequence Number=SeqID_48787
atggtctcccattctggttatggtgggtacaagtgtggtcactgcacgacggcagtcggggtcagtgaggcattgtacgccaaggcgatccaagggattgacgggttattcccatttaagtgtggtctagcctctaaggcgggacttaggcacttaagtcggaataattcgggcagttccgccacacttaacccatctcaagagaaaagcaccttacctaagaagataccgggaagcttacccttgaagcctggaataagctacagaagaaaccagtccagcggctcagtcaaaaggatcgaccgtgagaatcaaagcactgcccctgagtcaaagtaa

SEQ ID NO: 5413 - DNA, 2244 bp, Zea mays
  Peptide Sequence Number=SeqID_48788
atgatcaaggccatgtttggccttctccccaatagtatccctcaagggcaaaggctcgaactgacgagtcaatcccgaagactagagaatgggcttgatacaatgcgtggaggcgcatcaaagggtaaggcccccctccgcattgtgaaccctttggacatcattcgctcgaagaagcagagggacaaccctgttgttgaccctacaaagtcggtcgagacttcgcgtgacgcggtggtaccctccacgttggatagtctcgcacatgcagccctcgatgctttgcacatgcatcatgccgagatcatgggatctcaagacgctctacgggccatggatgtgtccgaggactatgatgtggaccaattttttaatttgggtcctaatgtacctctggaggagacgtcgggagggcttgatacaatgaatggaggtgcatcgaaggttaaggcccccctacgcattgtgaaccctctggacgtcattcgcttgaagaagcagagggtcgacctttctgctaaccatgcaaaatctgccgagacttcgcgtggcgaggcggtaccctgcgtgttggagggtgtcacacctgcaatccctaatgctccgtacatgcatcatgcaaaggtcttgggacttcaagacattccgtgggacagggatgtatccttggaggaccatgacgttgaccaaattttgaatttgggtcctaatgaactgtcggagaagatgtcgggtggtgtggggcttgatacaatgcatggagctacatcgaaggggaaggctcccctactcattgtgaaccctctggacgtcattcgctcgaggaagctgagggtcggtcctgctgcagaccctgtaaagtcagtcgagacttcacgtggcaaggcggtaccctctgtgtcagaggggcttgatagtagataccgatcgaagggtgtgccccgcgttagccttgatatccttcggcgcatggtcggcattttgaacgccatttgcttgaaggaggagcagcagagggctgaccctgctgcttactctacaaagatggctgatacttcgcatggcaagccagtatgcctccgcattgtgaaccctctaggccccattcgctcgaggaagaggagggtcagccatgctgcttaccttgcaaagtcgtctgagacttcacgtggtgatggtaccctccgagttggaggctgtcgcactggcagcccccgatgctccgcacatgcatcgtgtcgaggtcatgggaactcaagacgctacacagggcttgatacaaatcgtgcaggcgcatcgaaggataaggcccccctccgcattgtgaatcctcttgacgtcgttctctcgaagcagagggccggccttgccgctgaccctgcaaagtcgatcgatacttcacgtggcgaggtggcaccctttatgtcgaagggtgttgcaccgacaacccctgatgctctgcacgtgcatcatgctggggttttgggacctcaaggcgctccacggctcggagatgtgtccctggagggctttgacatggaccaaattttgaattcgggtcctaatgtactgtcggaggagacgtctgatagcgcggggcttcacacaatgcgtgaaggcacatcgaaggatgttattcgctcgaagaagcggagggctgaccatgctgttgaccttgcagagtctgccgagacttcacgtggcgaggcggtaccttctgtgtcggagggtgtcacacctgccgccctcgatgctccgtacgtgcatcatgtcgaggccttgggacctcaagacactccgcaggccaaggatgtgtccgtggaggatcatgacgttgaccaaattttgaatttgggttcgaatgtactgttggagacgtcgggtggtgcggggcatgatacaatgtgtggagccacatcgaagaggatggctcccgtactcattgtgaaccatctggatgtcattcgctcgaggaagcggagtgtgagccctgctacggaccctgtaaagtcggccgacacttcgcgtggcaaggcggtaccatccgtgttggatggtgtcacacctgcaacccttgatgcccgacacgtgcgtcgtgacgaggtatcgggacctcaagacgctctgcgggccagcgatgtgtctgtggatcaccatgacgtgaaccaaaatttgattttgggtcctaatgtacggccgaaggagacatcgggtggtgcgggtaaggccacttcgttttgttga

SEQ ID NO: 5414 - DNA, 288 bp, Zea mays
  Peptide Sequence Number=SeqID_48789
atgcaggactcatcatgccgcaaagacgctactgaggacttcgctccttggcgaattggtccgaggaagaccatgcctactcaggactccgtcatctacctcaagcatgcaagacccatcgaaggccgtgaagacgctaccaagtcccgaggaagaccttgtgttggggcgaaggcaaagacgccacccttcgctcgaggcctccgccgcagtggatggtctaacagagacaaagcggcgacgtcttcccgcggcgcggcctcgttcagtcccaaggcccacgtgtga

SEQ ID NO: 5415 - DNA, 1162 bp, Zea mays
  Peptide Sequence Number=SeqID_48790
atgccctccccgccgacgcctccggccgcctcggactggcgctgcgtccggtgcacgttcctcaaccccgacaactccgactcctgcgaggtgtgcgaggcctcacgcccagtggaggtcgacatcgacagccccgtcgtcgtgggcgccgccctcgcgttggcctcgctcaagcggagccggaggaagagggagcgcagtgcgtcccccccaccccagcggtttgggaagaatagggagcgcgatgcgtcgcccgatgtggtcgaagtctgcgatagtgcgggcaaggggtctgccgccaagaaagggtcggacgagggccagcttgctcttgccgcgcctggcgcggcgatcgtgacagctgcgctagcgccgaaggcaaggggtgagacccttggcgtcggaggcgaggtgtcggccctcgcgctggtcagggacgaggcgggcgtggcgacccgccgactgaagggagtgacggaggcgctgagtcaggcgacggaggcgctgagtcagctttgtctgccgaagtcgagagactttcggacgcaacatgctgacgctgtccgtgagaagtcggcctccgacagcaagtgccgtaaactggcggacaaggtggccgccctggagaaggagaaggctgacctccggcgccagctggcgggagagaggagggaggccaacgaagccatcgccaaagagcaggctgcgcaggcggaggccaggctggcgcgggcggagggcaatattgccaaggagctcgccggagagctgcaggggcggcttactgccctggagagccgcgcggagggggccgaggccgcgatgcgagcggaggccgaacggacgcgcacgcagctcatggctgcgtatcacgagctgggtgcacggaccggcgacttcgaggtgccggagcgagaggccgggcttcgctgtctggaatgggtgcaggaggagctgcaggagctccccactgtcttggaggggttaatgtcgtttgcctccctggtcacctgcgaggcggcgatgaacgcactctctcgcgaagggtgccggcactttgaggccctcgaccaggcagatgaggattttgggcgagatatctttgaggtcgaagaccccgtggtgaaggagtccgccggggccctctatgaccggatgtggg

SEQ ID NO: 5416 - DNA, 774 bp, Zea mays
  Peptide Sequence Number=SeqID_48791
atggcgaaccgccctaccgcccgcacgccgcaatcccgccccccgacgcatgccgcacgcccacctagcgcgacctgtggaaccctgctgccgcccccgaaccagcccaaagcgagaccggaggggcacgagcgccaccgccttgatcccgcccgcttctccccagatctcctcgccattatcgccgccatgcccggattcgcgccctgctcgcccaaatccgaccgcgactttgatttcccaaccgacgcaggagcggtgggtctgatcggccgcgacccgtcttctcacgggcgcttgctggtgtggtttgctgatcaaaatggggatgcgatgcttccgttgcgccgtgtaagtcaccagatcagacatgtcctcctggcaatttctgaactgttcgtgctcggtccaattcttcgaacagttgccaaatcggcaatagcgttgaaagggaaatgtgcccttgggccatttctaagtattttggtgattgtgtgccaacacaagggcttaaatgtgtatttatgcttctggaggaacaaagtgcaaatcaagataaaagctcttgttgcgacttgtgtgcgtgttgttgctctgattttcgagtcttgtgtgcgttgctcattcccaccttactccgtgcttctttgtgaactcaattgtaagggcgagagactccaagttgtggagattcctcgcaaacgggaaaagatcaaaggaaagaaaaacaccgtggtattcaagttgatcattggatcacttgagaggagttga

SEQ ID NO: 5417 - DNA, 519 bp, Zea mays
  Peptide Sequence Number=SeqID_48792
atgtcagcattcgacctcctcgcgacggtggcagggaagctgcttgatgagggggtgggctcgctggggaacatgagcgctggtgccctagctttgactgcatgcgcgaaggatgtccgtgtgaagaaggagcagtgtgacgaggaaatgaagcagttcaagcatgaggtgacagatcaggatagctgcaatgagagtgcaattctcccgcacattgtgttccagcgggcggtgaataatgctcggaatgaggatcctaaggcgaagtggtcgcctgaatccatggaatcaggagccttcacaggagatgcagtggcgagcctgatgccaccggccccagcaggatttcataagaatgcacccgaaatgtataatttgcttgattcaatggatgtggatgtcaagcctcctcctttggtcagctctgacagcaccgacgagatgccattgtatggcgataaagttcaccgctcaacctccttaccaaggggctcgaagggagtgggatttttgctgtag

SEQ ID NO: 5418 - DNA, 348 bp, Zea mays
  Peptide Sequence Number=SeqID_48793
atgaaccgcgcgttcccggctaacgtgcggctcgacgacgggcaggtgctcgacggcggcgagcggcggggtgcctcgtccgcgtccgacggctactcggcgtcgatgtgcctggacggctcgctggacccagccgcgatgcgcggcaagatcgtggtgtgcgaccgcgacgtgaactcgcgcgccgccaagggcgacgtggtccgccacgcggggggcgtcgggatggtgctagccaacggggcgttcgacggcgagggccttgtcgccgactgccacgtccttaccctactatactcagctgtacaattggacctgaaatccttgttagtggtggtgctgggatga

SEQ ID NO: 5419 - DNA, 303 bp, Zea mays
  Peptide Sequence Number=SeqID_48794
atggccacgtttgtggcactggcgaatggaccccaccggacagaagctcctcttccctttccccacgtctacgccgccagagacttcgtcttcctcgggcaggcgttcttccgctgcggtgtcattcccagtggcagcggcgtacaccggctcggccattgccgcgcgtcgtccgagcttcctcgccgacgagcagccgtaggggctgacgacctgcacgcccagcctgagacttcggcgcgggcggggttggccgacaatggcactgccgccctgggtgctgctgttactcttcttgcccag

SEQ ID NO: 5420 - DNA, 513 bp, Zea mays
  Peptide Sequence Number=SeqID_48795
atgacaccgcggcggaagaacgcctgcccctggagccgaatatctgctcacggcatccatgaaaccgtggccggggtcggagttgacgcagccgaccgaggatgtggtcgaagctgcggttctccatcaccgcgaccaccatcgcctttatcggagagtggatctcgtgtttctgctgacgacgatactcggtcaggtgctccgcccgcgaccgcgaccgcgctgcccggaccagcggtggaggcaaccggcgtgcgcaagggagaagatacaaatgacacactcatgtatacaaagggatataattttctccttttcgattttcttacaaagtgggtgttacaaacaccctctgccaccgacgtagaggaaatcttaaagaagtcattgaagggacaccaccataagcttcagctccgaaggccccagctgttgagagcacaacagctaccgaagctgcaccttcggaagctacagctgtcgaagctgccacagccgaaaatattcacttag

SEQ ID NO: 5421 - DNA, 303 bp, Zea mays
  Peptide Sequence Number=SeqID_48796
atggccacgtttgtggcactggcgaatggaccccaccggacagaagctcctcttccctttccccacgtctacgccgccagagacttcgtcttcctcgggcaggcgttcttccgccgcggtgtcattcccagtggcagcggcgtacaccggctcggccattgccgcgcgtcgtccgagcttcctcgccgacgagcagccgtaggggctgacgacctgcacgcccagcctgagacttcggcgcgggcggggttggccgacaatggcactgccgccctgggcgctgctgttactcttcttgcccag

SEQ ID NO: 5422 - DNA, 225 bp, Zea mays
  Peptide Sequence Number=SeqID_48797
atgggcgtcggtctagttcgattcaatggttcggcaagcattacggagatggaaagggtgctcaaacgaaatagcagaggactggggctgacctgtggagggctgcccacggctccaaggacggtggccggtgaatttcgaggagatgcgcggcggtcggaggtgacgaaggttatcggcttcgcgactacgtgtctaccgccgtggcgggctcaccggccttga

SEQ ID NO: 5423 - DNA, 99 bp, Zea mays
  Peptide Sequence Number=SeqID_48798
atggggttcgagcacagtacttgctctgccgagtgctcaggaggtgaagctggcaacatggatgacttcgaggagttccaggagtatgatgagttctag

SEQ ID NO: 5424 - DNA, 1062 bp, Zea mays
  Peptide Sequence Number=SeqID_48799
atgtcttcgcgctcccttatgcatcatgtctttccaccttccgagcccccggatgggggatacccgcagaccttccgccttgtcgttggaggaacgcaactttgtgggagttggtacctttcagccatcgttcggcttcaaggatttccatcagtcagcccggctgcatccccttgccggtggtcacccgagacggtgaccaccagcccctgggtggggagaagcaagtcgggctgcgatcttggtcccaccctcagcttcaaggatgttcatcatcctcgctggggtggaggccgggatgagttggagctctacctcccgcgcgggttcgtgggtcagcctctccttcaatgttcgagggagagggcgctcaccggccctgcgagaggggtggacttcgacaacgcggggctggtcgacggcgggcgtcgtcagcctcagcgcgttgggctcgccggcttggctcccagtgccccctcctgccgcgaaggcggttgtcacgtcgtgcgcacgggaggaccgcccaagatgtcgtgcgctgccagggcggcgttcgtgttctggggcggtcctgcctttgcaccggagtccctcggctcggtcggccttgctgtccgaggcttctcttgcttagttaaaggaacccctcgcccgctcttcgatgagccgaggccaggggtagcggtgtcagcacggacagaggcagagttggctcgaaaagaagacttggttggccggagcctggccgggtcgtccgttagcgggaccgacgccggagtcgatctgccgaggcctcgggcctggctgatgtcttcgggggacagctggccgaggcctcggggtgaccagccgagccgcctgctcgagccggattcttggaggagacccaggcggcaatggcccgggcgtgatgatgaagtcgtccttcagagtggagatcctcggaccacgtcactgtcggaggctaggtcggacctcgccgaaggtgtagtcgacgccgagggtgctgctgctcccttcagccgtcaagatccgagcctgcaggatcagattatcttgtag

SEQ ID NO: 5425 - DNA, 396 bp, Zea mays
  Peptide Sequence Number=SeqID_48800
atggccgcctcggcagaagagccggcctcgggagcccgctcctcagagaccggcgacacccgagccccctgcggtgaagtaccccgcgaaagggtcggcaggatgacaaggtccggggcggcgctggccacacagtccggcaccgtcttgagggccttccggggcgccagggaccgggaaagggggataccccgaaaaggatccttccctgtgaaggaaccgggctccgagccccccctactgatcagaggttcaaaggctggccctccgaatggttcaacagtcgcctcagatcgcgtgggcctgacacccactactggtcaggggttcgaaggccggccccccgaagggttccatggccgcctcaggctactcgggctccgcgcccattactga

SEQ ID NO: 5426 - DNA, 660 bp, Zea mays
  Peptide Sequence Number=SeqID_48801
atgcctttgtccacaacgctggtcgttacaactatgaggatgccttcacctggcaaggctggccagggggagcagcgagaggtggtcgggacccaggcgaggtctgtggctgaaacatcatctgacccgtgggcgcggttcttccctattgttgatggaggcgggggtgtcactgaggcatctacatctggtggtgttgcgatggttgttgtgaggcaactacgctatgttgctgtttttactgaccaagtggtgtatggggtgcttgtggacctcgcgacctctcaactgcgttctgaaaagaaatggttggaagacaaggttgagcgtcttcgaacccagaatatcgaagctatccgggataagtctgccatgcaaaagcctatcacgagaaggtggaggctcctacatgggtcggtgtgggtcgagctcatttgctcttttttgaaggttatcgtgatcccgggtcttgctgcagtggcttggtccaagtcctacttgtttgcggagtctcttttggcttctgttgtgactcgactttcttttggtggagctcctgtgaacaggcatatttctcgaaaagttgatacaattcttgaaggttggtcggagggttcattgtgcagtgactatataggacacttgcccgaaggccactga

SEQ ID NO: 5427 - DNA, 375 bp, Zea mays
  Peptide Sequence Number=SeqID_48802
atgtggggtctcggtgtcaggaccatcgtcgtcaccaacccaccgtacccgccgccgagctttccggcatggcgcgaccgcgtggaccgatttccctggccggaattaccgcaacccactcgccttagttcttctcgcgcgtctcaccccattcaccgccgcgtgggtcccatgagtcatccccagctcccagtcttcgtcatcgcgcgaaaacaacgaaagctgagaggagcgatcggcgaggcgggtggtcgcggtcgatttagacctctgggcagggtcggggggcttgcgcgtgtcaacaggaagccgtcggtggattttgtgggcggagtcgactaccgggcaaccactgattgctcgccggacctttga

SEQ ID NO: 5428 - DNA, 2373 bp, Zea mays
  Peptide Sequence Number=SeqID_48803
atgactgctcagccaatgaagagggctattgtggagagtggagatggaggtcttggtttgggaattgctacattcattgcaaacggtgaggatttgggtcccatcattcgtcattcgtttgagtctgggaaacctgaagcgctgatgcagaaccttagaagcattgtgaagaagaaggaagttgagatcgaagagctatgcaggcttcactacgaggatttcatccttgctgtggatgaactacgtggtgtgttagtcgacgccgatgagttgaagggcatgctatatggcgagaattcacacctgcaggaggcttctgctgaccaactcctgaagctcgacgaacttcttgagctatactctgtgaagaaaaacgttggggaggccataacaacgctgaagatatgtgtggaggtgttcagcttgtgcatgacatgcaacaatttcattgccgaagctaagttccatcctgcacttaagacactggacctgatccagaaaggctacctgcgaaacattcctttgaagcttgttaagaaggtggtggcgaggcagatcccactgataaagctgcacatagagaagaaagtctgtagcgagttcaacgattggctcgtccatataagaagaatggccaagcagattgggcaggcctccataagccaggcgtcgtcggctcgccaaaagggcgaggagatgcgtgcccggcagagggaagccgaagggcatagccatgctggaccagatgagcatctgtatgccttggacctggagaacacggaagaggaatcggcgctacattttgatctcacaccggtttatcgggcgcaccacatgcacacatgtcttgggatggaggacaagttcagagactattactacaagaacaggctcatgcaactcaacttggacatgcagatctccacttcgcagcccttcttggagtcccatcaacccttccttgcccaggtagctgggttctttatagtcgaagaacgtgttcttcgaaccgcagatggattgctgttggagagtcaggtggaaacaacatgggagacagctattggcaagataacgtctatactggaggaacagttctctcgcatgcgtacagccagccacttgcttctcataaaagactatgtcactcttctaggcgcagctgtgaacaagtacggctatcgaatcacacagctgattgaagttctggagaagagtagggacaaataccaccagctgctgcttcttgattgccggaagcagatagacgacgtccttactaatgactcgtacgagcagatggttataaagaaggaatacgagtacagcatgaatgtgacagcgtttcatctggaacacgatgatgcgatccctgatttcccatacgtgacatccttctcctcttccgttccagatgtctgccgcatcgtccggtccttcatcgaggattccgtcagctacttgtcatacggcggtctcatgaacatctacgatgtggtgaaagcatacctagaccggctgctgatcgaggtgctgaacgacagccttctgaacatgatatacgctcgttccctgggcatgtcgcagatgatgcagctcgctggaaacatatcggtccttgagcaagcatgcggcatgtacctgctgcactccgcccagctgtgcggcatcccgaagcgtgtcgccgagaggtcccattccggcctgactgctcgagcggtcctcaaggcctcgcagaacgcggtgtacaacgcgctgataaacctgaccaatttcaaggtcgacgagttcatggtgctcctggaagaggtgaactggatagcggaggaagcccccgacaacgcgaacgactacatgaacgaggtcctgatctacctcgaaacgctggtgtcgacggcgcaggagatcctgcctctggaagctctgtacaaggtggtttctggtgccatgagccacatctcggactccataatgaccacgctcctgaacgacggcgtgaagaggttcaccgtcaacgcggtcttagggatcgatattgacctgaagacgctggaagcattcgcggacgacaagttcgacagcacggggctgtcagatctgggcaaggagacgactttcagggactgtttggttgagatcaggcagctcacgaatctcctgctcagcagccagcctgagaacttcatgaacccggtgatcaggcagaggaactacgggtctctggactacaagaagctggccatcatttgtgagaagtacaaggactctgcagacagtctgttcggaagcctttcaaaccggaacaccccccagcagagtgcccgtaagaaatctatggacgtcttgaagagaaggcttaaggattttagctaa

SEQ ID NO: 5429 - DNA, 1608 bp, Zea mays
  Peptide Sequence Number=SeqID_48804
atgaagcccatgagctgccacgagcaggagcagcacgcggagctcgccgccgccacgaccaacagcggcttcgactggcttgatgaccccatctccttcctcacagcagacgttgacgccgccggctgcggcggctacgggtggtggtcagacgatcccgcggcggcgcagcaagataatattggcagcgtcgtggcgcagacgctttcgcccccggcggcgccgctgctgacgaccagtccgcccctggcgcacacctcgccaagcattgcgtcaccggccgtgtcggagccttcgtccaagaagcgcaagtccccggcgcacagggcgtccgcccacagtggcagcaaccagcgtcgccgcgctgaccaggcggacaggccaggtgctggcggcggcaagaagggcgggggagcgggatccgacgaccgcgacacgaggtgggcggagcagctcctgaacccgtgcgcggccgccgtcgaggccggcaacctgacgcgcgtgcagcacctgttctacgtgctcggcgagctcgcctccttctccggcgacgccaaccaccgcctggccgcgcacgggctgcgcgcgctcgcccgcagcaggctccccgccgccgtcgggccggcggccgcggcggccgtgcgggtgccgccctgcgactgccccacgccggcgttcgcgggcgcggagccgcggctgttccgcgcgtcgctcatcaggttccacgaggtgagcccctggttcgcgctccccaacgcgctggccaacgccgccatcgcgcgggccgcgtcgcgcggcgggtccacgcccgcggagcagccccggccgctccacgtcgtcgaccttggcgtctcgcacggcgtgcagtggccgacgctgctggagtcgctgacccgcctgtccggcggccgcgcgccgccctccgtctgtctcatcaccgtcgcggccgccccgccggcgcccttctcggcgtcgcctccggggtacgacttctcgccgcacctcctccggtacgccaagtccatcagcctgcagctcgccatcagccgcgcggcctccctggactccgtgcgtgggttggcctccccgtcggcgtcgggcgaggaggccctcgtcgtgtgtatccagttccggctcggccacgccagcgccgacgagcggacagagatcctaaggaaggtccgaggtctcgacccggagttggtggtggtctcggagctcgacggcgggggcgacggcaccgcggcgggcgagttcacggcgaggctggagctgctgtggcggttcctggagtcgacgtccgcggcgttcaaggggagggacggggacgagaggcgtctgctggaggccgaggctggcgcgtctctcgtcgcgtcggaggcgccggcgctggaagggagggaggcgtggcgagaggccatggcggcggccgggttcgaggaggcgtcgttcggagacgaggcggtggagtcggccaagtcgctcctgaggaagtacgacggcggctgggagatgtcggcgtcgggggcggccggcgcggtggcgctgcggtggaaggggcagccagtgtccttctgctcgctgtggcggccggcgtgcagcggctaa

SEQ ID NO: 5430 - DNA, 762 bp, Zea mays
  Peptide Sequence Number=SeqID_48805
atgaagaagtggttcttgcatctggcatctcatgtacaatactcagaactggttctctgcgaagcattcctggtggcgagagaggatctcctgatctccttcctccctgtccttctcctcccctccccggctacggaggtgctggtgggtgctacggaggagtactacgacgacgacggcgaggaggagcaaagcgaaagcaaatcgcggtcgttaattccgagatcgatccgtgtcgagttttccgggcccaagctggaaagattcggcaaacaagtgaacccacatcctcctcacctcagcagcctcaccgcccatcgcagactctgcgcggctgctgacaaagagtgcagaattgccaagactagtacgccgacgaccaccagcagcagctgtccgggttccatggagggcggcgacggcgagacgacgctgtccgggttcggcgtcggcggcgtggacaccaaggtgctgcacgcgttccagaccagcttcgtgcaggtgcagacgctgctggaccagaaccgcctcctgatcagcgagatcaaccacaaccacgagtccaaggtgcccggcgacctctcccgcaacgtcggcctcatcagggagctcaacaacaacatccgccgcgtcgtcgacctctacgccgacctctcctcgctcttcgccgcatccgacggcgcgtccgagggcgggtccgtcggcaccgtccgccaggcgggcgccgccggacacaagaggatcaggtccggcctcgactga

SEQ ID NO: 5431 - DNA, 486 bp, Zea mays
  Peptide Sequence Number=SeqID_48806
atggcaggtgggccacaccggggccgcgtcttccccaaacgaacgcgcggattcttggctccgtggctcggactccgtacgccgctcccccaatcccaacggggtttccgtatcccgcgcgcaaagcttgggttgttgggggcgggctgcgggatcacctcttctataaatcccggcaccttcccccatgccatcctccatcaaccctcgagcatcgttgacgccattgaagatcggagaaaagcgctggtgggtctcgtccttgccgatggtccaaccttgggcatcgggtcgggttggtgcgcggcgggcgtggctggaggaaatccggagctcgcgggcggtcggactctcggcaattgctcgccggagcaatccttccgcctcggatcgcaggtcaccgtgggcgggtcggtcagctcatccatccctggtatggagctctctatcacgctcgttaggtgctccggtcccttttccgcctag

SEQ ID NO: 5432 - DNA, 1233 bp, Zea mays
  Peptide Sequence Number=SeqID_48807
atggcatgtggggttcgtggatccgaccgcaccgctactggcgtcccatgggatggtgacggcgacgcgacgctccgtggcttgcgcccccaccgccgtctccaacaccttcgccatcggcatctccgtccttggcacgacatggacaagaagcatcagttatatgttatttctgcccttgctggcaccaaaattgatatgaaaagctggtggtctacgaatgtttctgaggaaaatcttctagaagtacttcagttagatgaggcgtccagggctctcctgatgaaggtactagaagatgccacccaggacgctgtgcggaggcaggcaaagatgttattttttgagatatccaccacaggtgtctctaccaggatcatcatttctgactctgcaatgcaatcaaaagatgtcgtcaaggcactaaagaaacagattggtcacaagaatccaaaagttcaacttcttgcactaactctattcagatctgccatcatgaattggagaccacggattaatgggctgcttggaaatatcgatgcaaacactggtgatcctcaagttggtattttgcttggtgctgtccatggcatggtggaggctcttttcaggagatacatagaacaaggaatggatgaggaatcagcatataagaatactgtaaagagcatcaagttttgctcgagttacaagattcagttcatacttgggtttttctcactatattgtcttcaagcagggtatgcagaacaatacagatggaacagttccttctatgttagtggcacattgtcaatgatatgccttgaacaaggccctcatatcctcaatatattcaaggattatcatgttagcaaaacatccatcctgaacgaccttgccttctacaagagccgccagaagttgatgcaggataagaggtcaaaacaacagcaactccaaaagcagtgttttttgtataaggtgcccatacagattgttttgcccatcgggtatttccctctttttaatacaatgtctagaggaattgttcatgaattctctgattcaaagtttggtcatgtttttgcatttggggaatctagatctttatccatagcgaaaaagatctttgcaggtcaacaactcttttgcaggacgtcctcttcggtgttgtcctctcacgctggccagccgctgcatcactacattgccatgatggaccagcaggagcgcaatgagcagctcttgtaa

SEQ ID NO: 5433 - DNA, 462 bp, Zea mays
  Peptide Sequence Number=SeqID_48808
atggccatcaccatgtccaacaattacttcacccaccacaataagtggttggatttctcatctaatggtgaaggacaagacaatgcaggtgactcctatgtggaggacaaggcaatgcaggtgaccatagccttcaaccatttctgtgaaggtctcattccagataatgccaaggatagtgtgctgctccggagtgcactgcaggcaaccaccagtgaggtgttaaaggttgtagaggatggactgagggaagctaactttgagattgtacttgatgatcgaaaggtgcacaaggagatggacgagatctataccctgttcttaaacatctctactcctattaatgtatacaataagttgtttgttttgcaatcaacactgcaggcaactataatctcgagaataccatggagtcccagtgttggtgtatgttgtattgacccttatcattcaaaatcttaa

SEQ ID NO: 5434 - DNA, 303 bp, Zea mays
  Peptide Sequence Number=SeqID_48809
atgcatgattcgtcgaacttggacgcgattatggcaccgcgattaaacaaaacgtaccacgtcgtgtatgaaagccacacaaacagttttcatgtctacatgttgcgctgggcgaatgcaaggttggctggcaggcacacaagcaacagcctaaactattcgagattctcttgcgggcgtattctgcaggtaggtagctgtcctcagaaagcactgcagttcttctctcccttcttgcagagagcagcgatgccggttgctttctcgaccagagacatcgtgttggcatcacagcagggatag

SEQ ID NO: 5435 - DNA, 231 bp, Zea mays
  Peptide Sequence Number=SeqID_48810
atgggccacacagagggcatcagtggcaagtcaccaaccctaggaacaacgacaagcattagcggcaaggcaccaaccttcggcacgacgacggacattggtggcaacatcacttttggcatgatggcgggtacaacagtcggcatagggggcagcgcggcgctgtttggcacaatatggatctatggcatatatggcaccgacacccaccgtcggtatggcaagcattag

SEQ ID NO: 5436 - DNA, 357 bp, Zea mays
  Peptide Sequence Number=SeqID_48811
atggcgaaaatgaagctactgtgcgagtcggtgtcggggctggtggcggatgaatacggggaggaggaccgaagaaaatgtgcaatgtatgaaaatgtgtttccaagacttgcatctttgacaaatgttggaaagttgaaggatgttgagactatgattaaatcaggaattaacaagaaacttcttgtgcttctaggcaatggttctgagatctcacagcattacgtgattaccatgctaaaaatatttagtgaacttggtgctccacttaaagggtgcatggggcctgcagtgctgcttcatttgtcttgccatgctcagatcagtttggaaagccccaacaattatttgagatga

SEQ ID NO: 5437 - DNA, 849 bp, Zea mays
  Peptide Sequence Number=SeqID_48812
atggggatcatcaactggatgcagagcagattccatgggaagacggagaccagcagaatctttgacggcgcaaccgccaccagttcatatagaggtggtgctggagcccaagggacgacgcaagggacgatcgttcacgaatcagagaagcgtctcgacgccgagccatggcctcaggcgggcatcctctccatcggcacgctcggcagcgaggagcctcccgcgcaggagcaggacctgccggagttcaccgtggaggaggtgaagaagctccaggacgcgctggccatgctcctgcggcgggccaagtccaagtccagcgcccgcggctccggggccggggccggcgaggacaggccgccgctggacaggttcctcaactgcccgtcctgcctggaggtggagaggagggtcgtccagacgacggcgacgaatcacggcggccaggaagaaggagacctctcgccggacaccaagatcatcctgaacagggccagggacctgctcgatagcggcggcggcggcggcggcatcaagcagaggtcgttcaagttcctgctcaagaagatgttcgcctgcaatggcggcttctcggccgcgccgccccggagcttgaaggacccagtggagtcaagaatggagaagttcttccgaacgatgatcgggaagaagatgaacgccaggtcggggaacgggtcggcgtcgtccaggaaatacttcttggaggacggaaccaaaggcaggaggcgaggcggtcgtcgttgcggttgccaagaagaagaggagagggaagcagagagttgcaggtgggacagaacagattctgaattcattgttttggagatatga

SEQ ID NO: 5438 - DNA, 543 bp, Zea mays
  Peptide Sequence Number=SeqID_48813
atgtttagttggagaggatggagctcttggaagcttccgttgcatggaggattggagaggcttcgcgccgccactgttgagcgcgattggacgaacggagaattaagggacgagggagctttgcgttctgggtatatcaaaaaatttgaggtcattgatgagaatagagttgggaaaattagagtggagcttgatggacgtcttaaagattgcaaagctctcacctacaggcaagacctcaaagctaaggagatagaacgatacagagttaggatgctcccaacacgccagttgggtaggtctgtgtataaacctataatcatccttgaacctttatgtccgctcagtttagctgtagatctggagcacacatttgacatgtatacagtcagcatgtggggctatgttgtgattactactccgaatggtgttttggatcatgaggaagcaatcaggcagaacgtgggtgggcaggtcccagggaaggggtttggcggcagtcgggctccaaccactttatcaggatactcggaggcatcttag

SEQ ID NO: 5439 - DNA, 330 bp, Zea mays
  Peptide Sequence Number=SeqID_48814
atgaacaagaacacaagagacataagatttatcccgaggttcggtcacaccaccaaggtgccctacttcctcgttgaggcgcccacaaagagtcaggtctctttcaaccctaatcctccctttgccgaccacaaagatttgaaatgggagaggcaagagatgtgtgagagagagtgggaggtgttcttcaagttagaaatggagtttgggtcgtgctcttctgtgtggggagagaggtcaggtagactgtctgccagtctaactgtcagagtctgccagtctaactgtcagactgactggcaaactgacctgcaggctgaccagggttga

SEQ ID NO: 5440 - DNA, 99 bp, Zea mays
  Peptide Sequence Number=SeqID_48815
atggggtccgggcacagtacttgctctgccgagtgctcaggaggtgaagctggcaacatggatgactttgaggagttccaggaatacgacgagttctag

SEQ ID NO: 5441 - DNA, 96 bp, Zea mays
  Peptide Sequence Number=SeqID_48816
atggccgccgccacggttgctactgcaccgccgctcggtctgcgctggggtgcttgggcggagacgatcgagtatctcttcgctcaggttaagtag

SEQ ID NO: 5442 - DNA, 1503 bp, Zea mays
  Peptide Sequence Number=SeqID_48817
atggacaaggatcgccaaggtgcggcgcaaaaacgccaggcgactgtccgggttcacgaagctcggccgaaaaggcagcggggaccggcgaaggctgcggcccccggcggaggcaaaccgccgcttccggcgaaggcgggcgcctctggacctagcaaggcgccggaggcgacggtgggcgccggaggccccagactgacgaaggtggtgccgccgaccggcggagtggcggaggctgcgaaggcggctcgggcgttgccactgccgggcaaacgcgttgccgacttcggcaccgagattaatgtggatgattatcttggggggtcggacgagggccagcttgctcttgctgcgcctggcgcggcgatcgtgacagctgcgctagcgccgaaggcaagggttgagaccctcggcgccggaggcgaggtgtcggccctcgcgctggtggctgacttcaccagccgcaccgcgtcgggggcccttacggcagcgttgtctgccgaggtcgagagacttcggacgcaacatgctgacgctgtccgtgagaagtcggcctccgacagcaagtgccgcaaactggcggacaaggtggccgccctggagaaggagaaggctgacctccggcgccagctggcgggggagaggagggaggcgaacgaagccatcgccaaagagcaggctgcgcaggcggaggccaggctggcgcgggcggagggcaatatcgccaaggagctcgccggagagctgcaggggcggcttactgccctggagatccgcgcggaaggggccgaggccgcgatgcgagcggaggctgaacggacgcgcacgcagctcatgactgcatatcgcgagctgggtgtgcggaccggcgacttcgaggtgccggagcgagaggccgggcttcgctgtctggaatgggtgcaggaggaactgcaggagctccccactgtcttggcggggttaatgtcgttcacctccctggtcacctgcgaggcagcgatgaacgcactctctcgcgaagggtgccggcactttgaggccctcgaccaggcagatgaggattttgggcgagatatctttgaggtcgaagaccccgtggtgaaggaatccgccggggccctctatgaccggatgtggggttcgcacggtcgagaggtggtcagggcgcgggccgaggctgcgagggctcaggcggagcgcggcgagcgggtggacgacttcggggcgctgaacagcgtgttgcctgacccggagacgacccctgcggaggccgcgactggagtcgccccgggatcgaccccggagactgcggaagacgcaccaggcgcccccgcatctgctgcggccggcgaagacctgcccccaaaggtggccgaaggcgcacccgatgcccccgcagctgctgtgccgagctctgaagatcccacggcggtgggggcggaggcagcggcggaggctgcggcggaggctcccgcagcggcagggccttcgcaggtggcgtag

SEQ ID NO: 5443 - DNA, 876 bp, Zea mays
  Peptide Sequence Number=SeqID_48818
atggcgcctcctgttgacgtggccggtccgtgccctgggttgggcaatgtggaggctcctccgaggtcgaggtcgagtctgtcttccaaggccgaggtcgagtccgagcccccggggctgagtccgagccctggggtcgggcgaagcggagttcgtcgtcttccggggctgagcccgagtccgagccctggggtcgggcgaagcggagtttgtcgtcttcccggggctgagcccgagtccgagccctggggtcgggcgaagcggagttcgtcgtcttccggggctgagcccgagtccgagccctggggtcgggtgaagcggagttcgtcgtcttccggggctgagcccgagtccgagccctggggtcgggtggagcggagttcatcgtcttccggggctgagcccgagtacaagccctggggtccggcggagcggagttcgtcgtcttccggggctgagcccgagtccgagccctggggtcgagcgaagcggagttcgtcgtcttgcggggctgagcccgagtccgagcccctggggtcgggcgaagcggagtttcccatggcgcctagggccggacttggctgctgtcagcctcactctgtcgagtggctcagcagtcggtgcggcgcaggcggcgctgacctcttgtcagaccggtcagtggagcggcgaagtgactacgatcacttcggctctgtcgattggagggcgtgcgtcaggataaaggtgtcaggccacctttgcattaaatgcccctgcgatttggtcggttggcgtggcgatttggccaagctttatgctgatgggggttaccagctgagatttaggagccttgagggtacccctaattatggtccccgacactacctcttttaa

SEQ ID NO: 5444 - DNA, 294 bp, Zea mays
  Peptide Sequence Number=SeqID_48819
atgcgcttcaccatgaaaatatccaccgagtatagcccgactttatacctatttgctcggcgtggacggtgcacgacggcgaacgggcgtgacggcgtggaggtcgtgagcggtcgacgacgtggaggtcgtcggcgcggggtcgtcggcggtcgtgggcggcgcgcgggcgcgcgggcggcgcaggcgagcgggcgcagggccgggggcggcgcgtggccggcgacgagggtgggcgcgggcgcggggtcggcggcgagggtgggcgcgggtgtgggcgcatgcagcgagtga

SEQ ID NO: 5445 - DNA, 387 bp, Zea mays
  Peptide Sequence Number=SeqID_48820
atgtcgcgctccgttggtcatgagtcgagtgcggtcaccgccgacctaagggttgtgccacgaccgagctcctcgtctcttacctttccccttcaggtgttcgtagggaactacgacccctctcgcgcggcgtgggaggctgctgaggccgaggttgagccgctgcgggagaagcttgccgaggctgacgatcgagtcgttggtaccttggagaggaccagcaagaacttgggaaaggccaaggtgttgagtaggagcagcaagggcggccacaacaggaaggagatcaagtccgactcggctgcaactccatctcgggttccaggactagtctgcactaaaatggacgcccaggatgcatccgaactccgattgcaacaaacttga

SEQ ID NO: 5446 - DNA, 1545 bp, Zea mays
  Peptide Sequence Number=SeqID_48821
atgccgtcctcttcttcttccgctgccgctacgccgccggccgattcctcgccgccggccgccgcctcgtctgaggagacgttgagtagtttgatggcggaggagttgcgcgccggcgattctgttgattttggcgtgtcgcggatgacgtcagcccgtgttcaagatatgcagcggttgggttactttggcggtggagttgctcgtgctccggggacggaggaagtccccgagccggagggtgagttggtcgttttcgaggcgttcttcgccgccggtctccgcttgcctgcgcaccgggttttcgaattaaatcaattgtcgtacgacggctatcctggtcaagacgacgcggaccgccgtggaaagaagtcggtggtggagactggagacgaccctgcgccggcggccgccccttcctccaaaaagagaaaattaggtactgctatgggaggacttggggtgtctgatagttttgctagagagttgatgaggacgtgcgcggccccagggggaaggatgtcttcgcccgagctccgggagtcttcggctcggatgctgagggttaccgggggttgctggcctaggaatgttcctatcccccgcgcggctggcgaggactgttttacatctcgcatggttcgtgaatggagagtttttccttacgggcggaatattgctgctgttgtgtcggcagtgatggacaaggatcgccaaggggctgcgcaaaaacgccaggcggctgtcaggcttcacgaagctaggccgaagaggcagcgggggtctgcaaaggctgcagcctccagcgaaggcaaaccgccgctggcggcgaagccgggcgcctctacatctagcaaggcgccggagccaacggcaggcgccggaggctccaaatcgacgaaggtggtgcctccggtcagcggagtggcggaggtcgcgaaggcggcccgagcgttgccgttgtcgggcaagcgtgttgccgacttcggcaccgatattaatgtggacgaatatcttggtgggtcggacgaaggccaacttgctatagttgcgcctgccgcggcgatcacgacggctgccatagtgccgaaggcgagaggcgaggcccttggcgccggaggcgaggtgtcggccctcgcggttgtcagggacgaggcgggcgcagcgacccgccggctgaaggaggtgacggaggcgctgagtcaggtggctgacttcgccagccgtactgcgtcgggggccctcacggcagctgtgtctgccgaagtcgagagacttcggacgcaacatgctgacgctgtccgtgaaaaattggcctccgacagcaagtgccgtaaactgacggacaaggtggccgcactggagagggagaaggctgacctccggcgccaactggcgggggagaggagggagaccaacgaggccgtcgccaaggagcaggctgcgcaggtggaggccaaactggcgcgggcggaaggcaatctttgccagggagcgcgccgaacagctgcaggagcggctcaccgcccctggagagccgcgtga

SEQ ID NO: 5447 - DNA, 978 bp, Zea mays
  Peptide Sequence Number=SeqID_48822
atgaacgcactctcccgcgaagggtgccggcacttcgaggtcttcgaccaggcagatgaagattttgagcgacatgtctataaggtcgaagaccccgtagtgaaggaatccgccggggccctctatgaccggatgtggggtccgtacggtcgtgaggtggtcagggagcgggccaagactacgagggctcaggcggcgcgtggcgagcgggtggacgacttcggggcgttgaacagcgcgctgcctgacccagagccgacccctgcggaggccgtgtctggggtcgccctggagccaaccccggagaccgcggaagacgcaccggatgcccccacgtctgctgcggccggcgaagacctgcccccaaaggtggccgaaggcgcacctgatgcccccgcagctgctgcgccgagtgctgaagatcccacggcggtggcggcggaaataacagcgaaagcagcggcgaagccaacggcggaggctcccgcagcgtcagggccttcgcaggttcaagattttgggcctgcgcacgcaaccgctactactgaatttttggcgacttcgaccgcggaaggtggtaatgaatatggtggatctgcatctgagttttttgattttactgactctgggagctcggttgagtggactgaggagtcgtcggaggaggacttggactattttgcggccttggacgtggctgcggcggaggcctcgctacacgccgcggacgcgcaagatgtgccaggtcctagcaccgggcgccgacgacggagggcggttgcaaagcgtagggttagtacggaggaaggggctcggctttgtgtgagtagggctagtcggcaggaactgttgtctttgccggccgccgcaagtacaggggaaggggaactgcgaagtctttttgcgggtgaggagcttaggataatgttatttaattatagggagatgggaattattcctaaggttgagccgatgtag

SEQ ID NO: 5448 - DNA, 192 bp, Zea mays
  Peptide Sequence Number=SeqID_48823
atggcgattggagatttgcgaccgcaggagccacaagaacaagatcaattttcttcctcaactatggtgcaaccccctactcaaggggagcgcatgaagaagaatacatggaggaagaagacgttccaaagacacctccaccccaagttcgcaccaccatacaacgtgatcatccggtggatcaaatcctag

SEQ ID NO: 5449 - DNA, 1248 bp, Zea mays
  Peptide Sequence Number=SeqID_48824
atgaacaaaagaccggcattcaaggtgccattacaaacggaactccggttccacctccgcaggtacgaacaaccccacacgattggggggcctgtggagcaacagaagaccaacgaacggctcgccgtcgcccgctccagcagtggcgacgacgacgacttctgctccggggggccgaacagcagcagcgacgacctcagggcggatgctactgccatgaggccctcgcccgtgccctcactcgtgaggcaaggacgggcagaaggccgtagagttggaggtcggtccgatggcggccccggctatctcgtcggcgggagaacctcttctagctgtcgtggcagaaggcggcgccgggagcggctccgaagccactcgggtcagagagccaggcacgcggcagctgccagcgccacgaacggcgaacacctttcccccccatcattgagggaaggagcgggccgccgcccgcgcaggggccgaccccaactcggcacactcccctccccagcactgatgatgaaaatccttgaggctgagggaggggcagaggccgcagcccgccgtcgtgggctgagtcttctccaacatgctccaaggtcctccccctacggcgcgggggctgggtcccacgcgtcatgcaagctggcccagagcagaagaagccaaaccgccgcgcgtggtgcatgcaaccgcccagcggttacgagcattcctccactttcgcccagaccagtgggcgaaagggcgggcagccatgcaggcggcatgcaaccacaccaagtgggcgcgcccctccgacttccaatgcacccagcatgggggcccacgcgtcacgcaaccggcgcgccggtcgctacgtgcaagcaactgcaccaccactcgcaccactgccacgcctcctcgactgcggaaccagtaccgcgactcgaggcaaccctgcgtgcgacccagcagtgccagccaggcacgacggtcaatacggccaaaaatgggccggcagtaatggcggtggcaggcgggcaggagcagcggtcacgtcgtcagccaagctcacgtcccgtccaggggcagcgagagaaccctctctcacggcgtgaagacggcgcgcccgcgtttcgttcctcgaacggctcgcgcacgcgcaacggccgcctcgcgaaccactcgccccgtcgcattaactccacggcgggacaggcggcgccttcggcaggagaagcaagcgacgcttcgccttcgccataa

SEQ ID NO: 5450 - DNA, 882 bp, Zea mays
  Peptide Sequence Number=SeqID_48825
atgattataaacatcacgttgagtcctgcggttttggaatcgagtgttggatccgtcgcatcacgaccaccagggttgctcgtcgtcgggtgtgcgtatcgccgcccaggtgtatgggtcgccctgatcaagccagtttatgtttgggcaggttataatgtttttgcctttttatctattgtagagacactttctacacgaagcaagctttctattggtgttgtgtgtccatacactgctcaagttagagcaatacaggaaaaagttgggaaggcctgcaggaggaatgattatttctcagtgaaagtaaaatctgtggatggtttccaaggcgcggaggaagatataattatcatatcaatagtcaggagtaatggagctggcattgcttatggattgtggggaatggaaccactctgttcaacagcaattccgtttggcaaaagattgtcaaggacacaagggatagaggggaaacattatcgagaactaggtcgcatagaagacgagaaggccagcaggaatatatttgaagccagaaataagcatataacgaacacagtaaccatcgacttgcatggccaacatgtccaacatgctatgaaccttctcaaaattcacatgatgatttgtatttgcattccatatgagtaccacacaagattcgctgtcttactgagggtaattaccagttgtggttcagaaggtacagggaagggaaaaataaagcgctcggttatagagcttgcggagaaggaacatattgagtggcgcgaagagaactctggaactgtagcccttcgacttggtgggccaagagagtatcggttccttgagcatgaaagcgattctgaccaagtggggaactttaacatagattaa

SEQ ID NO: 5451 - DNA, 978 bp, Zea mays
  Peptide Sequence Number=SeqID_48826
atggacgagtctggtgtggagatcggcctcctgggactagtagttgtatcacatttgagtcccagaggattggggcgcttcaacaatcatgagagagcgctcaagttacttgatgctctagatctgaggagcggggtggagagccttggggatgaggagctagcgcttgttgctagccagttcacacggttccacaacaaccgtctgaaccgatggcgtggtgggtctagggatggatgctacaactgtggtggccccaagaagggaaagtcggaggccgtccagcgtgaccaccaccctggtcggtgcaagggcaagtgcaagtacacctccatcaagcacaagtccaagggaaggttctacaaggaggcgctcaagaagaagtacctctggaaggccaaagttaaggagtgtgacttccttgccttccttagcaaccttgatcatgactccgatgactcaacttcttccttgagtgatgaggagcttgagaggcgggtcaaggacaagctgaacagactctacttcaacgtgacaccgtgggaagcctctgcaccatggcacttgtgtgcattttgtgagggtttgcagtccacgcttgagtcctacagactcgagaagactaggatagaggtggaaaacgtataccttcgatcagtcttgagatgggtgtctagaagtgagccccagttggacatgatggttagtcaattcaagaagagcaccttaggcacccaaaggactcactcccacaaacagattccacctaagagagaggtgaggtaccattgtgagtattgtgagagggatggtcatttggctgtatttttctttaggaggaagagagagaggcgaggttctgaggtgagcagaaagaacatgaactgccctctcatggtgttcgtgatcttcctactcagagacgtcctacttggcctagaggttcttttcttcatgttgctaggcctcaagaagtga

SEQ ID NO: 5452 - DNA, 789 bp, Zea mays
  Peptide Sequence Number=SeqID_48827
atggctgaaaggtaccaacttccacgaagttgcgttcctccaatgacaaggcggaaggattgcgggtgtcccccatctgggggctcggaaggtggaaagacacggtgcataagggagcgcgaagacatggtcgcctttcaagggggtcaccctccttttaaaggcgactctccctacttgcgtccccagccgtcgtgggctgagtcctctccaacacgctccaaggtcctccccctacggcgcgggggctgggtcccacgcgtcatgcaagctggcccagggcagaagaagccaaaccgccgcgcgcggtgcatgcaactgcccagcggttacaagcattcctccactttcgcccagaccagcgggcccatgcgtcatgcaaccggcgtgccggttactacgcgcaagcaactgcaccgccactcgcaccactaccacgcctcctcgactgcggaaccagtaccgcgactcgaggcaaccctgcgtacgacccagcagtgccagccaggcgcgacggtcaattcgaccaaaaatggaccggcagtaatggcggtggcaggcgggcatgagcagcgatcacgtcgtcagccaagcttacgtcccattcaggggcagcgagagaaccctctctcacggcgtgaagacgacgcgcccgtgttccgttcctcgaacggctcgcgcacgcgcaacggccgcctcgcgaaccactcgctccgtcgcattaactccgcggtgggacaggcgacgcctcaggcaggagaagcaagcgacgcttcgccttcgccataa

SEQ ID NO: 5453 - DNA, 1200 bp, Zea mays
  Peptide Sequence Number=SeqID_48828
atgggtcggcgcgagacggagcgcgaaggggggaggcagtcggagggagactggcgtgagaggtggaatcccgcggccttcgtggtaatgatggcgtctcctgttgacgtggtcgatccgtgccctaggttgggcgagatggaggctcctccaaggtcgaggtcgagtctgtcttccaaggtcgaggtcgagtccgagcccccgggtcggacgaggcggagaccgtcggcggacgccaggcccgagtccgagccctggggtcgggcgaggcagagttcatcgtccttcggggccgagcccgagccctggggtcgagcggagcggagttcgtcgtcttccggggccgagcccaagtccgagccctggggtcgggcggagcggagttcatcgtcttccggggccgagcccaagtccgagccctggggtcaggcggagcggagttcgtcgtcttccggggccgagcccaagtccgatccctggggtcgggcggaggacctcactctgtcgagcggctcagtagtcggtgcggcgcaggcggcgctgtcctcttgtcagaccggtcagtggagcagcgaagccacctttgcattaaatgcccctgcgatttggtcggttggcgtggcgatttggcctaggttgcttcttggtgaagactgggcctcgggcgagccgaagctttgtgctgatgggggttaccagctgagatttaggagtcttgaggcaaaggggagccagagccctatgtatgtgccgtcgtggctgtcagagaggttttggcgccctgttcatgtgatgtcgtggccgtcggaggagcgcttgagccccgtggaagttgagtccgagccctggggtcgggcgaggcggagtccgtcttccgaggtcgaggtggagtccgaggcctggggtcaggcgaggcggagaccgccttccggagttgaggctaagtccgagctcaggggtcgggcgaggcggagtccgtcttccgaggtcgaggtggagtccgagccctggggtcgggcgaggcggagcttcctatggcgcctgaggccggtgttggcggctgtcggcctcaccttgacgggtggcacaacagtcgaagcagcgcaggcgacgctgttttcctgtcaggtcagccagtggaggggcgaagtgactgcggtcacttcggccttgtcgtctgaggagcgcgcgtcaggataa

SEQ ID NO: 5454 - DNA, 396 bp, Zea mays
  Peptide Sequence Number=SeqID_48829
atcgcgattaccttctcagagacgtgtcatgcgtcgctccctccaccctcgccgctgtcgtggcgtcgacctcaaccgcaccccagcgatctccatcccggcaccctcccctctccctcatgctcgctcttcggatctcgtgactcgcccctcacgcggcccctgctcgtctgcctcgtccccgatttctccgaccgcgtcgttaaggcgctcgacccctccatcatcgtccgcgacggcctcgacctcgtgcgtcgcccccccacccccacatccctcgccgccatcgggtctcaatcaatgccggtccaggcccgctcgtccgccacccacggcaagggatccaggcttgggcgcctcgcatggttattaaagcgtcgtttaaacgacgattaa

SEQ ID NO: 5455 - DNA, 162 bp, Zea mays
  Peptide Sequence Number=SeqID_48830
atggtgccattgcttcaggtccaggcgccgccgcccagtgcagcaatgctccagccgttgcccttgcccccagccagtgcgcagtgctccagccgccagacaccagccagaagccacaagctaggcattgtctgccattctactgattttgggggcatttag

SEQ ID NO: 5456 - DNA, 186 bp, Zea mays
  Peptide Sequence Number=SeqID_48831
atggaaaaggttaagtatgtaagagaaagtaccattctgagctctgctggaggagaaacagaaaagctaggagaagaacaagaaagattctcaggaaaatcctcccaaaagttgaagtcaaacggagaaagaacggaggaaaaagcacttagtgtgctgttggctggtgcacaggacagtgaatag

SEQ ID NO: 5457 - DNA, 624 bp, Zea mays
  Peptide Sequence Number=SeqID_48832
atgaaggctttgctcaaagtccttgtagactgtgccgaggatgccacaaaaacactgggtggtttagtagatcatgctttaggccacatgcatgatgaagagatcgtagctagaaccttgtatgctatcaaagataagctagaattgctgcagcaagatgccttagcggcaaaagtgcaagcatttccagaaattgttaaatacgatggggatgacataagtgttgaccctacatctccgtcgacccctccaacagttactgaaccatctgttgatgaagacgagttgtactgccccgatgtttctgatgagtggtacttcagcgattcagataggtctactcggagatggttaaggacctcagaagatagaggagagcgccaggcgcagatttccggaatacttcattatgccttgaagaggactcgaacctccacgctcgacaccttatatgtattacgagagaaccaaggtggcttaactgatgacgataagacttcgaaggcggcaaccttgtttgcacacgaggagaacaaaccattccattatatgcattgctggcatcaactgaaggggaaccaaaatgggagagtatctgtcaaggacattccttctgaggcttaa

SEQ ID NO: 5458 - DNA, 639 bp, Zea mays
  Peptide Sequence Number=SeqID_48833
atgggcttcgacacgatacacggcccaatggccccacagacgactgatcctggaacccgggatagagttgcagccgagtcggacttgatctccttcctgttgtggccgcccttgctgctcctcctcaacaccttggtctttcccaagtccttgctggtcctctccaagctcggcgccaagatctatggcgccgagctaggcgccacgtcggttgccgcgttagcctaccttggcgcccagacatgtggcgtcgaggcgttttacctcggctccacgaccatggcgtcgacgtcgtcatccgcctccaaccgcgtgcctgacgccgtctgggtctcccggttttccaccaacctcacggcgaccgcaacgatggagaagcagctgccaccttccgccgtagctgtatccaccaaccacttaaaccacgcccaaccctactacatcggctccctctccaagagccacccctacgggatggcctacgacggtgggttccaccagtacgatgcctacgatgaccttttcgacctcctagcatcccacccggtcgcgccgattgtgacaaagcaccacttcgacgtcatgaagccgatgttcctggacgcaaggttgcacaccgtggctgtgcagcggggctga

SEQ ID NO: 5459 - DNA, 309 bp, Zea mays
  Peptide Sequence Number=SeqID_48834
atggaggttttgatgattagataccttggagaggaccagcaaggacttgggaaagaccaagggataagccttcgtggcgagtcagccttcccagagccccagcttgtctcgagcagaacaggaccaaagaatcaaatggacaaggacaaggggcctaagcttaacgacgatgagtgtgtatctcagatggaattgaaggagatgatgcgcgctgtcggtgtttcgggtccgaccgcgcacccggggttggccctcaaggttacaagggagttctctagtatgaaggataccagagagttgggtgtatag

SEQ ID NO: 5460 - DNA, 1653 bp, Zea mays
  Peptide Sequence Number=SeqID_48835
atgacgtgcatgccggctgtgtctgccccatccgtcctcgcgccggccccggcgtcgacccgcacccacctctgctactcaacggaaatgcgacgcggcgcgctctccctccgtcccgcccgcgctatccccacgttgaggctcggcggccaccgcgacgcccgtggcgctgtcgtcgtccgcgccactgcggcagagggagccgtggagctgcaggccaaggtgacgagcaagtgcttcttcgacgtggaggtcggcggggagcctgcgggccgcatcgtcatcgggctcttcggagaggtcgtacctaagaccgtcgacaacttccgtgcgctctgcactggtgagaaagggtacggctacaagggctgctccttccaccggatcatcaaggactttatgattcaaggcggggacttccagcaaaacaatccacgtgccgaacaaccaccccgccaagcgcaagccccgccgccgcctggaaggaggaggacaagccccgccgctgccaccctcgcattgccagcccccgcccaccgcgcccacccccgcaccgcaactcccaccgcgcccgccgctgaggcagcgcgcgccccctccccaacagacgtgcacaccaacgctcctctgttccatcccactgaccagatccaccacagcctcacacgtctagccatgccagcgccgccgcattcaaagctaccacaacacctggccaaccgcgtcgtcggcgctggtgctgacagcattgttgtgacctgtgttaagcacgagtatcagcccgccgaggtcaccaagatggatggtgccatccagagagtgtatacgcgcaagaactggtcctccatggtgctctgcaactgcagccaccccaataatgtggtcccgctcacctcggagatcgtcagcgcccagaccggcacgttcctccacctcctgcctggctcgacgatgacgagatcagggaactgtccttcacctgaaacttcctcatcggtcacaactagattgactcggctgatctggccacacgccccagggccatccactatacctccgacggtggccgtgtgcgtctgggttgtgctctgtcggcctggcacccatgcgagtagcggtgcgagcagcggtagtagccctgctgagcccaactcctgcctctctgatcgcgggcctctggagacttttgcgcagcgaggaggtcggcgctgggacttagattcatgggcgacggtgggcatgctgctcggcggcgaggacatgcacaggttcccggtgcgctccccgcggatggaccgcgacgacctcatccgtagtcccgccgcgcggcagatcgacgtgcgcatcccgtaccagcagaagcgcatgttcggcttcgtcaccttcgtgtacgccgagacggtgaaggccatcctgagcaagggcaacccgcacttcgtgtgcgacgcgcgctcgtcaagccctacaaggagaagggtaaggaagctgcagcacgcgcaccatggcggagccgagttcgctggttgcgcgtcgcccaccggattgctggattccagggacccctacgccctcctgcttctttcaagtgcccagggaaggttgaagaaggcccacgacggttccgctcacgaggccggcagcacacacagctag

SEQ ID NO: 5461 - DNA, 702 bp, Zea mays
  Peptide Sequence Number=SeqID_48836
atgtaccgggaggcgttgtggcagaagagaggtcgtcctcgagagttatatccggatgtatctagtaaggatgctcctgttcctactgatcttcctgtgcctaactgtgactgcggtagaccggcttgggagcacatgaggtgtttctttttccagtggatcaacggtcctgataaatttgaccatcgatatcttcttttcgctaaatggttgtgtggaaggactagtcatgagcgttttaagcggtgggtagctcctcccccgaatcctccaccaatgatggatgaagagaaggatgtagcaatagaaagacgaacggagttgccgcctcgatgcgattgcggagatcgtgctgtcatcgatgaggacactgcgaagcacttcgtgtgtccgaacattgattatctaagtatgaattcgttccttccgacttttgagcttggcgttggctatttttatggacatatggtagaatacgatgaggagacgaggaaatgcggttgggagagatacgacgataaagaagaggacatgcgtaggttcatgaaatcaatgagttttgatagtccgatgcgtgtagagcagaggagattgaaggcggcaaatgagaagagaacacatgatgcaagggaatgggaggcggctagagccgagaaacagatgttggggaatcttgctgatcgtctaagtggaagtgagtga

SEQ ID NO: 5462 - DNA, 768 bp, Zea mays
  Peptide Sequence Number=SeqID_48837
atggcgctccctgttgacgtggcgggcccgcgcccgaggccgggcgacgtgggggctcatccaaagctagggtcgaggctgagcccgagtccgagccctgggtcggacggagcggagttcgccgtcttccggcccgagtccgagccctgggtcgggcggagcggagttcgccgtcttccggggcttagcccgagtccgagccctgagtcgggcggagcggagttcgccgtcttccggggcttagcccgagtccgagccctgggtcgggcggagcggatcggagtggcgcaggcggcgctgtccttctgtcagaccggtcagtggagcagcgaagtgacggcggtcacttcggctctgccggggggcgcgcgtcaggataaagccgcgcccctcgccctcgacgtgccccgcccggccgcgccgcgccgccgcgcgcgctgctccagggccgcgtcccttgccctcgccctcgccgcgccggggccgtccgccgcgcccacgcccctcgccgcgcccgcccggttcgccgccgtcgcgcccctcgccgcgcccctcaccgtccggttcgccgccgtcacgccctccacgccctcgcaagccctccgtcgcgccctccacaccgtcgtgacctccacgccgtcacgctcgttcgccgtcgtgcaccgtccacgccgagcaactagagaagatacttgtcttcctagccgctgcgggtctgtctgcaccgcgtcccatcgccactgcaccgacccgccacagccccactag

SEQ ID NO: 5463 - DNA, 801 bp, Zea mays
  Peptide Sequence Number=SeqID_48838
atggattctttgccgagtgctgcacggaagacactcggcaaaactaacttctttgccgagtgtcacaggggacactcggcaaagccgccgtctccgtcacccgacgccgtaacggccgcttttctttgccgagtgctctctggcactcggcaaagatctttgccgagtgcccgagaaaaagctctcggcaaagaaggctttgccgatgcactgttcaccgagccttctttgccgagtgtaacactcggcaaagcttttgccgagtgttttgaaggcttcgccgagtgcttcaggcactcggcaaagctattgattccgagcttcaacatgctaacagccaagtccggcctcgggcgccataggaaactccgcctcgcccgacccccgggctcggactcgggctcggccccggaagacgacgaattccgcttcgcccgaccccagggctcggactcgggctcggccccggaagacgacgaactccgcttcgcccgaccccagggctcggactcgggctcggccctggaagacgacgaactccgcctcgcccgaccccagggctcggactcgggctcggccccagaagacgacgaactccgcctcgcccgaccgggggctcggacacgacctcgaccttggaagaccgactcgaccccgacctcggaggagcctccgcctcgcccgactcagggcttgaaccgaccacgtcacaggggggccatcattaccctatccctagctagctcaggctacgggcaacaggagcagcgtcccatctggctcgccccagaaaacagataa

SEQ ID NO: 5464 - DNA, 696 bp, Zea mays
  Peptide Sequence Number=SeqID_48839
gagcagcagggctcttccttctcgctccagcaggagatagagtccgtgaggagctgctctcctgtgcttcccctggaggcgccccctgcaccaccactgggcgccccagcctctggagtagctgctggaggagacccagacgacggaggtggcgacgacagcccgagccacgacaccgacttccctgctgaccatgagccggaaggatgggttgctcgacccatcactcgcgacgctgctcgcgggggcgcggaggcctgctcagagcactattctatctctgagcgggactcagctgaggcagccatgcaggatgctgcacggcgtgcgctttcgcactactgctcgattctcggtggggtagctgacggtcttgacctgaagtattacccccgccgtccatctggcagcacaggaggcgtgattgtttcacctgctggtgaggacaatcctaggttgagcagcacagtcaacctagccgccgtgctaaacacggagctggaccatgcattagacgagctgagtagggctcgtgctgagatcgccctgctgcgggctgagcgcgcggaacgtcgtcacttggatgatggttcccccgcccccgttgggactcagcacccgtaccgctcacctcgacgtggacgccagtcttatggcaatcccgactgcaagaccaagataaatctagaaccatag

SEQ ID NO: 5465 - DNA, 234 bp, Zea mays
  Peptide Sequence Number=SeqID_48840
atggcgggcggaattaagcttgccggagctaaggaaaggtggctggccggtgaggagatatggagccaggaaatctggtctgtctccctgcccaaacccgaggcaaatccaagagaaaccctaggtgatactgcagtgtcacagccttccccccttaaaggaatctcgtcccgagattcgggccagagtcctcccagggtgaagcgaagggtgagacttataggaaatgggtga

SEQ ID NO: 5466 - DNA, 162 bp, Zea mays
  Peptide Sequence Number=SeqID_48841
atggggctcggtgtgtatgcggctcgctctgccaaggttgatttgtcccttggggaggagtgtggtggcaatgagtctgatggttttggttttgactatggtgctggtaagtggtattctttccgtttggaaagggtacattgggctaataacttgggttaa

SEQ ID NO: 5467 - DNA, 129 bp, Zea mays
  Peptide Sequence Number=SeqID_48842
atggagggcagaattaagcttgccggagctaaggaaaggtggctggccggtgaggagatatggagccaggaaatctggtctgcctccctgcccaaacccgaggcaaatccaaggttttgtcatgtctag

SEQ ID NO: 5468 - DNA, 750 bp, Zea mays
  Peptide Sequence Number=SeqID_48843
atggcgcctcctattgacgtggctggtctgcgccctagtttgggcgatgtggaagctcctccgaagccgaggtcgagtctgtcttccgtggtcgaggtcgagtccgagcccctgggccgggcgaggcggagttcgtcgtcttctagggctgagcccaagtccaagccctgggtcgggcggagcggagttcgtcgtcttctagggctgagcccaagtccgagccctgggtcgggcggagcggaggctgagcccgagtccgagccctgggtcgggcggagcggagttcgccgtcttccgggacttagcccgagtccgagccctgggtcgggcggagcggagttcgccgtcttccgggacttagcccgagtccgagccctgggtcgggcggagtggagcttcctatggtgccttcgtcagggcctgactgcctgtcagtctcactctgtcaagtggcgccgcagtcggagtggcgcaggcggcgctgtccttctgtcaggccggtcagtggagcggcaaagtgaaggcggtcacttcggctctgccagctggggggcgcgcgtcaggataaaggtgtcaggccacctttgcattaaatgctcctgcgatttggtcggtcggtgcggcgatttagtcagggttgcttcttggcgaaggcagggcctcgggcgagccagaaatatgttcgccgctggagggggcctcgggcgtgacggaaatcctccggggtcggctgcctttgtccgaggctag

SEQ ID NO: 5469 - DNA, 792 bp, Zea mays
  Peptide Sequence Number=SeqID_48844
atggcgcctcctgttgacgtggctggtctgcgccctagtttgggcgatgtggaagctcctccgaagtcgaggtcgagtctgtcttctgtggtcgaggtcgagtccgagcccctgggccgggcgaggcggagttcgtcgtcttctagggctgagcccaagtccgagccctgggtcgggcggaacggagttcgtcgtcttctagggctgagcccaagtccgagccctaggtcgggcggagcggacctgagtccgagccctgggtcgggcggagcggagttcgccgtcttccgggacttagcccgagtccgagccctgggtcgggcggagcagagcttcctatggcctggtcagtggagcggcgaagtgacggcggtcacttcggctctgccggctgggggggcctcgggcgagccggaaatatgttcgccgctggagggggcctcgggcgagacggaaatcctccggctttatgctgatgggggttaccagctgagaattaggagccttgagggacggatgacacaccgaagcggtagctatgaagaccctgacaactttctgtggctaccatcccctggagatgagttggtggagaaggaccaacaggtggaacgattgagccagcgcatcaccaccctggagcaacaggtggagatccgggacaacaccattgatgtcctggaaaacccctggtaccaatgcgactgcctccgagatgcccccttcacccatatccagtgtcgcttccactactcagggttgatgagtcattttgatgctttaggaggatag

SEQ ID NO: 5470 - DNA, 201 bp, Zea mays
  Peptide Sequence Number=SeqID_48845
atgggcttgtacgtggagcctttgattgatgaattggtccatgcttggaaggaaggggcatggacatatgaccgagctacgaagacaaacatcaccaatactccatgcatgacttacctgcttatgggctattctgcgcctggtgagttcacgattaatcatgtgagtgtccgagctgctcaggaccgtgagcacggctga

SEQ ID NO: 5471 - DNA, 429 bp, Zea mays
  Peptide Sequence Number=SeqID_48846
atggtagtaattggaagattatgtgcttctacccatgatgcagtaatgaaagaatgtgttgctccagtatcaaataacacttctgcaatatgggagtcgactgggaacatacctactatcatgccgggggctgagacacattctgctttgctggggcattggggcctggctgctgctaggctgccttcttcggacattgcatcacccagtggccttgctctccacagtggaaacatgctctgtttccaacctgagctggtgctgcctgattgttctgctggtttactagggcaggaagacgaggtgcctgctgattctgcctttgaaactgacctcctgactgattgctctgacggttctggtactggtgttgagaatactgcctttggaactgctgatgctgctgaggtggacgctggttctgcctga

SEQ ID NO: 5472 - DNA, 360 bp, Zea mays
  Peptide Sequence Number=SeqID_48847
atggcggttttctggtttcacggcgtctgcccagttgttgtagtgaaaatctcaagagatggctgggttcttgagattatagcagggataactatgagcatgccagagagtgcatggaagtgtagtcgtggctcaaccttggaagcccacgctggttcacagagcacaaccaggcaagggaagttttcaaagaaaagagttgatggtggatccatcatggccgtgatggattcaacatcggaaaagatgtacctctctcaggtgaggaaacagcggagttttgctgtttctgttcaaaggtggtaccaaaagaggagccaaatccttgatcgtgggtgtgggaggatgcttgcctcctag

SEQ ID NO: 5473 - DNA, 105 bp, Zea mays
  Peptide Sequence Number=SeqID_48848
atgacatattttgaaggcgtgtctgatgatactgatgatgactacagctatgacgtcgcgagctgtacgcataagattctgaagaacgtccctcctgacaattag

SEQ ID NO: 5474 - DNA, 159 bp, Zea mays
  Peptide Sequence Number=SeqID_48849
atggtgggaacaagtgcggtcactgcacggcggcagccggggtcagtggagcattgtaccatgcaggatgtagttgatggtgtgacttggcctaccaccctgccaccgggttggacggtcgagtgggatgttgctccggcaggagaggagcatgagtag

SEQ ID NO: 5475 - DNA, 381 bp, Zea mays
  Peptide Sequence Number=SeqID_48850
atggcgttgtgtggagtttggagaggatttgatctctttgccccaaccaccaaatgtggtcgttggaaggctgtctgttcgatggcacaccggatagtccgatgtaagagaacaggcgcagaggaggaaggcgtgctcaacaggagcgagccgctcagcaggatgaggtgcccagcaacagcacctgccacccccgcccccgatgtcgatcgagtagatgtttctgatgcagactcaggcagttcaagccatcggtcagactctggccgccattcagcagcagcagcagcaacaacagcagcaggcaccacctcaacctcagatgcctcagatgcccagggacaagcgtgtggcagaaccacccgaattattccagcttaa

SEQ ID NO: 5476 - DNA, 423 bp, Zea mays
  Peptide Sequence Number=SeqID_48851
atgatcgtgcctcgcccgagcctagcctcgggcaagggaagccgaccccggagaacctacgtcttgcccgaggacccccctccagcaacgggcacaatcgccgcctgtgttgctccgactgctgagccacccgacagagtgaggctgacagcagccaaggccggcctcgggcgtcataggaaactccgcctcgcccgaccccaggactcggacacgggctcagccccggaagacggcgaactccgctccgcccgacccagggctcggactcgggctcagccccggaagacggcgaactccgctccgcccgacccagggctcggactcgggctcagccccggaaggcggcgaactccgctccgcccgacccagggctcggactcgggctcagccccggaagacggcgaactccgctccgcctaa

SEQ ID NO: 5477 - DNA, 207 bp, Zea mays
  Peptide Sequence Number=SeqID_48852
atggagaaatcacacatgagacaccaatttctcaaggagctttggtactacatcgagttctttgtggattcattactcttggagcttctagctcctagacgactaggtgtcgcttatgttgatgctagggcaatagatcttgccatgagaatcgccgaaaggatgttcctcaaaatgaaaggagatgaggcgaagaaccaggattga

SEQ ID NO: 5478 - DNA, 762 bp, Zea mays
  Peptide Sequence Number=SeqID_48853
atggcgcctcctattgacgtgactggtctgcgccctaggttgggcgatgtggaagctcctccgaagccgaggtcgaatctgtcttccgtggccgaggtcgagtccgagcccctggttcgggcgaggcggagaccgtcggccgaggccagggcggagtccgagccctggggtcgggcgaagcggacccgagtccgagccctggggtcgggcgaagtggagttcgtcgtcttctgggggctgagcccgagtccgagccctgggtcgggcggagtggagttcgtcgtcttctgggggctgagcccgagtccgaaccttgggtcgggcggagtggagttcgccgtcttccggggcttagcccgagtccgagccctgggtcgggcgaagcggagcttcctatggtgcctgcggccgggcctgactgcctgtcagcctcactctgtcaagtggcaccgcagtcggagcggcgcaggcggcgctgtctttctgtcaggccggtcagtggagcggcgaagtgacggcggtcacttcggctctgtcggctggggagcgcgcgtcaggataaaggtgtcagaccacctttgcattaaatgctactgtgatttggtcggccggtgcggcgatttggtcagggttgcttcttggcgaagacagggcctcgggcgagccgggaatatatttgccgctagaggggggcctcgagctagacggaaatcctccggggtcggctgcccttgtccgaggctaggctcgggcgaggcgtga

SEQ ID NO: 5479 - DNA, 300 bp, Zea mays
  Peptide Sequence Number=SeqID_48854
atgggcttgttggaggctaccaagatcaccctggataacaaggaggaacttgtggtagacctatccactgagatggtggaaaaggacgtccaggtggagcagatggccacccagatccaagaacttgaggagctagtaggagatagggagaacactattgaggagattcaggacatggaggccgacgaggatgttgacatcgagggaggagtggagctagagcctgcatccagcctgaacactgctggctcagggagacccccttcccccgagtcaagcgttgcctcatttgctcattag

SEQ ID NO: 5480 - DNA, 1215 bp, Zea mays
  Peptide Sequence Number=SeqID_48855
atggctgcccgcccctttcgcccgctggtctgggcaaaagtggagagtcgcttcccccgcgccgcaggggaggaccttggagcgtgttggagaagactctgcctgcgacggctggggacgcaagtagggagagtcgcttttaaaaggagggtgacccccttggaaggcgaccatgtcttcgcgctcccttatgcatcgtgcctttccaccttccaagcccccggatgggggatacctgccgtcttctcgcctccccttcggccatcgttcgggggaacgcaactccacgggagttggtacctttcggccatcgttcggcttcaaggattttcatcatacagcccggttgcacccctccgctggtggtcaccccaaacggtgacctccagcccctggatggggagaggcaagccgggctgtgatcttggtcccgccctcagcctcgaggatgttcgtcatcctcgctggggcggggagcgaggcgagccgaggctctacctcccgcgcgggccggcgggccacctcttcttccagcttctggtggtggcaaccatcctccagctctacggaggagacgtcctccagccatgctggggaaggcgaactgttgctgcccagctaggatgcaacattccgccctcttcctcgctttcgtggcgaggacaggagcgaggacctgccggcgcgctttggagcggcccgctctttggctttaatagctggttcgcgtcccttgagcgggaacgcgaacgagagacctccggtggccgcgtccgtcctgggaccatggctgctgctgcagaggtcgctggtgggtcccccgactcgcttgttagttgtctgaaccgcttcaccaagcgtgagtcgccccgtgtaaaggtgacgagtgagagcctggccgggccgtccgttagcgggaccgacgcgggaattgacctgccgaggcctcgggtcgagctgatgtcctcgggggacagctggtcgaggcctcggggtggccagccgagccgcctgcccgagccggattctcggagaagaccctggcggcgacggcccaggcttggtgatgacgccgtccttcagagtggagatcttcggaccgcgtcgccgtccgaggctaggtcggatctcgccgaaggtgttgtcgacgccgagggtgctgctgctcccttcaagcatcaaggtccgagcctgcaggatcgggttgtcttgtag

SEQ ID NO: 5481 - DNA, 717 bp, Zea mays
  Peptide Sequence Number=SeqID_48856
atgggccttcgtgtagatttcgcccagcagagaacatcatacatgaagaacgtagaccgacctccgtcaaatccaaagcgaattataattcagtctactcaagagtgctttagtgtcgacataccccgtgttccggcgaaaactgtcagacacaaaccaatgcaggctggtgacgaggacgatgactttatgccattatcgaagaagcgtaactttgatgacagtcctccaaaagtattgaagaagatagttacaaagcggaggaaagcagtggatccccccccccgacagcagaggcttaatgtgagatgcaatccccaagatgttatacgtcaagatattgcacggagggggttctccaatatacttgatatgagagttgacgcgcttggcagtagatatcatttagcttggctgatggaaaagcttgaccataatgatatgacaattcaagccggtctagggaaggagctcaaaattacaaaggagacagtgcaccttattttggggttaccaaatgctggtggaggaaaggcattaggcattgatgaagctgttgctgcaaacaatttaagggctgaacttggtttatccaaagaagaatttggtgttgcagctcttcaagatcatttgaggaaagggttttacgatgatctaagcatcagatccttcttcctgatactgttcaatcggttgttgttccctactgcaagctag

SEQ ID NO: 5482 - DNA, 1155 bp, Zea mays
  Peptide Sequence Number=SeqID_48857
atggaccggatggctgagattgattggtgtcaactagtgtatactgatttgtgtgatgctgccagtcgttggcacaagaggaacagaacaaacattactgcaacagtatatggatgttcacacattgttcctatatattatcttgaccacttacaccaccctgcatcacttgagaacaagtatggtactccccgcatcaagtattttgacaacgagacaataagagatttggctaggggtgacagacgtggcctccgccaaactggggaaccatttggtcatgcagagatgagccatcagatgcttgtttctaagcagattgaactatctgagacatttggcgaaatgatcgacaaagttctaagggctgccacgcagcgtgatactcagcaagaagataacccacccactacctcatcgcccccgacaaatgaccatgtatccactcctcccgttcgaacccctgatcatcaacatcacgatcagccaacccatgttcctactgatgataataaagtatcgaaacaagaaggacaaaatcatgttctacaggatcctcccacatatggtgcaccaaagtttgacagaacccccctgacagaaggattcattgactgtattcgtgatgatgatatattatacaatccagataccataagcaacacactcatactaaatgtcaatgttgggactgttttgaatatcgaggagcttgaacaacacagtacaaatccgcagcccttctcaacatcagttcttaaagatttaatagtaccgatccttcctccagatgaagttctaaaccaaattaaactggtgagccccaatcagtattatttattaataatgagaagacttagcattgcgttacatgaagctcaaccagattctagtttaccaaagtttggcaactacaagattgggcttcttcccaactgtccaaccatgttaccagactccaatgattgtggtttttttgtcgctaacttcttccgatgctatgactttgatgatgacgacatctcagaatttgttgtaccggatgaaccattggaccaacgtgcgtttgttctgcattacctgacctttcatcgcaacaacagggtttaccccatccctgcagaactgctgcctttcaaattgtcagattgttaa

SEQ ID NO: 5483 - DNA, 96 bp, Zea mays
  Peptide Sequence Number=SeqID_48858
atggcgggcaacagcttacgcggcgcagaggtgacaaacggcgacgacggcatggcttcacgaataatgcttcggacaattccaataattagatga

SEQ ID NO: 5484 - DNA, 621 bp, Zea mays
  Peptide Sequence Number=SeqID_48859
atggccgaaaggtaccaactcccgtggagttgcgttcccccgaacgatggccgaaggggaggcgagaagacggcaggcgggcaggagcagcggccacgtcgtcagccaagctcacgtcccatccgggggcagcgagagaaccctctctcacggcgtgaagacaacgcgcccgtgtttcgttcctcgaacggctcgcgcacgcgcaacggccgccccgccaaccactcgccccgtcgcattaactccgcggcgggacatgcggcgcctctggcaggagaagcgggcgacgcttcacgcttcaccttcgccataatgaccgcgtcagaaaagggatcgggaaagggggataccccgaaaagaatccttccccgtgaaggaaccaggctccgagcctccctactgatcagaggttcgaaggctggcccctcggaagggttcaacagccgcctcagatcgcgtgggctccacacccactactggtcagaggttcgaaggccggcccctcggaagggttcagcggccgcctcaggctactcgggctccgcgcccactactgatcaggggttcgaaggctggcccccgaagggttcacagccgcctcagacacagagcgagggatga

SEQ ID NO: 5485 - DNA, 345 bp, Zea mays
  Peptide Sequence Number=SeqID_48860
atggaaattttgggagaaatatataatgtacaaccaaaaccttccaaggatctcatgaaccataagaatataattaaagagtactgtaatctcgctgatggggagtacatcctcgttccggagcaaggagttgctcaggaggtagcccaggagccagcaccagagcctgtcatcgaggatctgcctgccccagctttggaaggttctctggaggacatggttgctgtagtgacttggacgtccatcttgccaccgggttggacagtcgagtgggaccctacctgtgacaccccaggtgtcagtttcgtgttatgtcgggagatttatcccaatctcagatgctaa

SEQ ID NO: 5486 - DNA, 375 bp, Zea mays
  Peptide Sequence Number=SeqID_48861
atggaaaacccaacgggtttgtacccattgccatctctacccggggcgaggagggcgagtctggtgtgggtgactcgggtcgtcgggcgagacgaaggaatggcagttgcatggactatggagaaggagcagtttgtcatgagggaggctgacaattggggccatatgtcgaaggtgccggaggcagaacgagggatttttatgtccttcaagtaccttagaagtctgcaattattttgtagatacttcatgtacacatcaaaagatttggaagagtggtcagagaatcctgagtctgtgcaccacgagcagaatttggttcagtggaccgagaaaaacgaccatgtgttgaagcccttctcattctggttgtga

SEQ ID NO: 5487 - DNA, 606 bp, Zea mays
  Peptide Sequence Number=SeqID_48862
atggccacggggaggctgctacgcgctatccttgggaggccgtcgcagcaaggaaaagctcgcggccatggagaaatggagctgcgcattttgtcgagcacctacagcgcgtcgatttggtggggctgcggggaaaagaagataggggcgctgcttcttgctgctcaagggcgctggccatcggcaactgcaagctcgctgccatgggggaagcttcagcgcgccgagggaggagcagggggcgccatggagcaggggaaaaatggagagggcgccggcttgctgctcgccatggaggggagcacgactccctgctgctgctggaattcctgggcgccgtggacagggagcagggcggccagggagaagaacccgagctcgccgggggctggcggccatggctgggaggaaactcctgcgcgcagccgtgaggaagacaggaacagggagctcgcagggaggagcggcgaccggaagaggagctcggctgcgagatttttcagggtgccatggcagctggtcttgctgctgcgccatgggagagaagctgagctcccagctgccaccgtgaggaagaaaagagaggcaaaaagaagtggcggctag

SEQ ID NO: 5488 - DNA, 57 bp, Zea mays
  Peptide Sequence Number=SeqID_48863
atgcccgccgggtatttgctgttttgtgcagccccatccgcgacgtcgttagagtag

SEQ ID NO: 5489 - DNA, 315 bp, Zea mays
  Peptide Sequence Number=SeqID_48864
atgaaaatttgtgagataatcgagcctaaactacgactgtcaggcgtcataaatcgaacttctgatggtacagtgactcggacagatcagaacgacagcatgaccgtccctcaccgccgacgaccgatctccgttgagattcacgccgccgccgttgcgattcacgtcgccggtgaccagataaggctgccagccgataagctcaccgtcgaccgccgcctcccggccgtgcgccgcgtggctcaacccttccaccgcgtcgctgtaactcgctactgctgtcaaatcaacgccggtgaggttgccacggcgtag

SEQ ID NO: 5490 - DNA, 129 bp, Zea mays
  Peptide Sequence Number=SeqID_48865
atggcgttgagaggggctgacaacgcggcccaagttccagaacgcaaccactgcgcgtgtatcaagaattttgatagggtactcagcataagtcaggtcgtcttgaacactaaggtcctccattggtag

SEQ ID NO: 5491 - DNA, 474 bp, Zea mays
  Peptide Sequence Number=SeqID_48866
atgacgacgcgacgtgggggactagaggaaccttcacgacggagcagcggcgctggtgtgggtgcagcaaccctagcgacagtaaagggtcaaggaacgaccgcggcagcggtggtgaatgagagggtccggatggaggagagagcccgtacctgcgacgacgaagacggggggagaggttcgttcgcgacagggatgaggcggcgtcctcggtgcgcgaaccctaggcaagacgagaatgagacgcggcatacgaggagaacacacaccggcgccggtattgacaaggagttcgcggaggaggtcgcccgtacctacgacgatgcggggaggagacagaccggcagcggcgcgttgcgggcgcagcggcggcgcgatgggttcgcgacggcggaggagcgttgcgtgtgggctagaaccctagcgaagtgggcgcagggcttcgaatcgaagctaactgacgggcgcttctag

SEQ ID NO: 5492 - DNA, 79 bp, Zea mays
  Peptide Sequence Number=SeqID_48867
atggcggtcatcatcaagagcattccccaaatcctcaagcaaaggagggggagaattctacaagccccgctccaagaaa

SEQ ID NO: 5493 - DNA, 393 bp, Zea mays
  Peptide Sequence Number=SeqID_48868
atggagaagtttgaaaatgagaaagaagcagatgagaagcgtattgctgatttagaatatgctctgtctgttcaagtgggattacacagatctgaagtagttcagaaaaatgtcgaggagcttcgtcgggcgaaagaggagtgctacaatgttgctacggaatgttgcaccgaactttctcctcctctggagccatacgaccctgaggctgatccagccctgaagggcgctcttgatgtaattagaatagctaatgaagctgtgaataggctcctgaaagaagttgctgataaaaaacgcttcgtaaaagtaagactctgcatccccttagaaacgactttggagtctcttcaccttttacttaggtggtattttagctctgcatccccgtag

SEQ ID NO: 5494 - DNA, 570 bp, Zea mays
  Peptide Sequence Number=SeqID_48869
atgtcagatgaatccacaactccagccagagtgatgacagaggaagccagcttcaaaggccacagcatagcccacaatcctcagggcaacaacaaagctctttcaggccaccagccccaaggggcagaggcgacaggggcttcggaggaagacaagggccacactacaagaacatgccaggtcaccattcagaagcagaaggagattgccgaagcagaagcacggcagaatcagccgaaaagcaggtcttacatactgcttcgtgctactctccctatatacaagaatacgtgggtaatcaacctgcagcttctgttgcttcggcaagtcattcacaagcttcctagccccagctctcattaccaccaccattgccacctactcacacccgaagccagcagccagaagggcaccagcacacccaacaacaacgcgacttcagggaggagtccaaagctcgtacagtcaatagcgttgtaccagaatcgaaacatatatactgaggaatatcctacttttgatgtacctttatcttttattgcattttatttttctacgagaaacaagtaa

SEQ ID NO: 5495 - DNA, 762 bp, Zea mays
  Peptide Sequence Number=SeqID_48870
atgtcgactgagaaacgccacctagatcagatcgaactcctcagtgttaggcggctcctcctgaacctcctgatcttctcctgtggggggaataacaacaagaattggaacatagagagctatggactgggcctcaatttctggaaatgccaggggccccggagtaaaactacagagacccagcgcatagtgactaatggacggcgggtttatttcagtgaaaccgaggggctcttaagtaaaatggacccgcgaaggggtatcggtgaatctgagccgttggatctccggccccaggatctggaatccacggtgtggattttatttacactagagtctcctgatccatccgatcagatacgaacggatcagatttcccgacctaagcgttacgcagatggcgcccagcagagctctgtcgacgcgggcggcacggccacggcggatgccccagccccggcggcgaattccgggagcactgaccaccaatccacggctgagatgacaccggatcaaaccccgtcgcacggtgaggcctacggacccgaattcgtgggcgcgacggcgaagtacacagaattggaccggcggcggcaaaggtctcacccgcgcggtgcgtggcggcgttctggtggtggcgagaggttggggataaagatgggagaggggaaaggagcgcgtgggcgacctacttgtatcccgtccgggaggccggggagtgggcgcgagccggtcaagtctccggcgatgtcgcggcggtag

SEQ ID NO: 5496 - DNA, 969 bp, Zea mays
  Peptide Sequence Number=SeqID_48871
atggcgcctcctgttgacgtggtcggtccgtggtgccctaggttgagcgatgtggaggctcctccgaggtcgaggtcgagtctgtcttccgtggctgaggtcgagtccgagcccctgggtcgggcgaggcggagaccgtcggctgaggccagggctgagtccgagccctggggtcgaatgaagcggagttcgtcgtcttctggggctgagcccgagtccgagccctggggtcgggcgaagcggagttcgtcatcttctggggctgagcccgagtccgagccctggggtcgggcgaagcggagttcgtcgtcttctggggttgagcccgagtccgagccctggggtcgggcaaagcggagttcgtcgtcttctggggctgagcccgagtccgagccctgtggtcgggcgaagcggagttcgtcatcttctggggctgagcccgagtctgagccctggggtcgggcgaagcggagttcgtcgtcttccggggctgagcccgagtccgagccctggggtcgggcgaagtggagtttcctgtggcgcctgaggccgggcctggctgctatcagcctcactctgtcgagtggcacagcagtcggtgcggcgcaggcggcgctgtcctcttgtcagaccgttggcgtggcgatttggccaaggttgcttcttggcgaagactgggcctcgggcgagccgaagggcgagaggacggtcaaggacagactcgacttttttacattcgcccctgtgtcgcctttccgcaaggagggggggaaagcgccatgttgccctcgaagggcgccgaacatggtgtctccggtgagctgctggcgggtaatccgagtggacgcccgtgccccatttgttaggggtcggctagaggcccggaggcgcgcccaaaagtacctgcgggtgatctgccggacccggtcccctttcgacggggtccgagggctcgatgtctccctctga

SEQ ID NO: 5497 - DNA, 459 bp, Zea mays
  Peptide Sequence Number=SeqID_48872
atggtgacctccagcccctgggtggggagaagcaagccgggctgcgatcttggtcccgccctcagcttcaaggatcttcatcatccttgctggggcggaggccgggctgagccggagctctacctcccgcgcgggttcgtgggtcagcctctccctcagcattcaagggagagggcactcaccggcctagcgggagggtcggactccgataacgtggggctggtcgacggcggacgtcgtcagcttcagcgtgttgggctcgccggcttggctcccggtgcccctcccaccgcgagggcggtgcggcgcacgggaggaccgcccaagacgtcgcgcgctgccagggcggcgttcgtgttctggggctgtcctgcctttgcaccggtacagcgcctccgcgcggaggtcgttgctccactcgtccgggaggatctgagtggggatctgctgaggggctga

SEQ ID NO: 5498 - DNA, 855 bp, Zea mays
  Peptide Sequence Number=SeqID_48873
atggctgaaaggtaccaacttccacgaagttgcgttcctccaacgacaagacggaaggattgcgggtgttccccatctgggggctcggaaggtggaaagacacgatgcataagggagcgcgaagacatggtcgcctttcaagggagccgccctccttttaaaggcgactctccctacttgcgtccccagccgccgtgggctgagtcttctccaacacgctccaaggtcctctcccctatggcgcgggggctgggtcccacgcgtcatgcaagctggcccagggcaaaagaagccaaaccgccgcgcgcggtgcatgcaaccacccagcggttacaagcgtccctccactttcgcccagaccagcgggtgaaagggcggacagccgtgcaggcggcatgcaaccgcgccaagtgggcgcgccccttcgacttccaacgcacccagcatggaggcccaggcccacgcgtcatgcaaccgacgcgccggttgctacgtgcgagcaactgcaccgccgctcgcaccactgccacgcctcctcgactgtggaaccagtaccgcgactcgaggcaaccctgcggaccgggaaagggggataccccgaaaaggatccttctccgtgaaggaaacaggccccgagcctccctactgatcagaggttcaaaggctggcccctcggaggggtttaacagccgcctcagagcgcgtgggctccacacccactactggtcagaggttcaaaggtcggcccctcggaagggttcaacggccgcctcaggccactcgggctccgcgcccactactgatcaggggttcgtaggctggccctcgaagggttcacagccgcctcagacatag

SEQ ID NO: 5499 - DNA, 693 bp, Zea mays
  Peptide Sequence Number=SeqID_48874
atggctcttcctgttgacgtggctggtctgcgccctaggttgggcgatgtggaagctcctccgaagccgaggtcgagtctgtcttccgtggccgaggtcgagtccgagcccctggttcgggtgaggcagaggccgtcggcggaggccagggcggagtccgagccctggggttgggcggagcggagttcgtcgtcttctggggctgaacccaagtccgagccctgggtcgggcggagcggagttcgccgtcttccagggcttagcccgagtccgagccctgggtcgggcggagcggagttcgtcgtcttctggggcttagcccaagtccgagccctggtgcggcgatttggtcagggttgcttcttggcgaagacagggcctcgggcgagccggaaatatattcgccgctggaggggggcctcgggcgagacggaaatcctccggggtcggctgcccttgtccgaggctaggctcgggcgaggcgtgatcgagtccctcgaatggactgatcctgacttaatcgcacccatcaggcctttgcagctttatgctgatgggggttaccagctgagaattaggagccttgagggtacccctaattatggtccccgacaagtccgctctcgggactcgacggcggcgtacaactataaatcaccggactgtccggtggtgcaccggactatccgatga

SEQ ID NO: 5500 - DNA, 348 bp, Zea mays
  Peptide Sequence Number=SeqID_48875
atggcctccggcgccttcagggcagtggcttctcgtgcagtatacactgtagattcaccgatcctcaagggcatcttcgatctggcgacggatccaccgcacgactactacacccgcctccagcgacatcgcggagcgatggacgccaacaccaagctgatcctcgacgaattcgagaaaaagttcggcgccatggacgccaagtgggagtccaagtttgcggatctgcaagtagccaaggaggagcgtctcctcgcgctcgagcaaggtcaagcggacctcggatcatggcgtcctcgattggaatcggccatggaagacatcaagttggagctttctatatattaa

SEQ ID NO: 5501 - DNA, 738 bp, Zea mays
  Peptide Sequence Number=SeqID_48876
atgggtgagatagtcgaagaggacgacagagaggacggggcgatcgacagggcgaagaaccccagcggcccaacgtgtcaccatggggtgcacgtgatgggtgtggcgatggagatgagggggtgggtcggtgtagcgaggagcggaccaccaaccttgatcattgtcacactggacaaccttgatagtcggaagcaagaggtggttgagtgggtgcatgcagctgcatggtgtacaggcgaggaggcgctagatggagcagtggttaaggggacgatgaggggtgtgggcgagggggagtactcccttggcgatctcaagtataagatcgttgtggacccgatggaaggagaaggggaccgagcaaatgatctaggttcagaggtggtcgcagcgctcgttgaggccccaaagacagttgaggatgagcatacgatcgaaggtgcgcttgccgatgtcatggccggagtcgaccatacccttcatcttacgacaatacttagtgatagagagatcacaatggacaaaggtatggaagacaacgtcgaggtggagagcatgaccctccgtgaggtgaacgaggtcacgccagcgggcgtaggaggaagtcgggtcgaggacgacgggaaccaaggaccagatgttttggacaccagtcgcttgagcgtgaaggtggcgctcaacctttgcaagatgacgagcgagggcgtcgacggtagctcgctcctgctcctagat

SEQ ID NO: 5502 - DNA, 270 bp, Zea mays
  Peptide Sequence Number=SeqID_48877
atggatgtccttagcagcctttttaatatggctgaaagcagaggactgctgcaaagcttagaagaggcaaatgtcagaaaccggatctccatttatgctgatgatgtggttctatttgtcaggccaattgaggcagatctgagaaaagttgtgccatccctattagctgcgatgtatcatctatacaagagggttgcagcacccttcaatgtaccccagctgtatttccttgcacttatttggggcttccgatttcggatagaaaattaa

SEQ ID NO: 5503 - DNA, 414 bp, Zea mays
  Peptide Sequence Number=SeqID_48878
atgggtccgtcagtcgcggggacagacgtggcagttggcgtgaccgaaggcggactgacagtgattacgtcagcaagcgcacggaagcggcgcgccaatcgccaatcaagctttggccccacctacaggctcgtatcctcccctgaggtcatggaattaccactagacgcgcagagcagcggaagacgtcttgatgtagacgaacgcgtcgagcatagccgtgcagttgccgacgtccttcacgtcctcgcgcggttcgtccaagtgctccagatgcagcacctccgaggtatccacacgtacagggaggaagcgccgcgtaccgaactgctaggttcgcgacggcggcttggcgagggcgagaggcgagcggcggctgctggttttgcaggtggcgaattaggttatccttaa

SEQ ID NO: 5504 - DNA, 492 bp, Zea mays
  Peptide Sequence Number=SeqID_48879
atgtattgtcaggggatactacctgacggccaagagatcgctattaagaggctatctaagacctccgcgcagggattggaggagttcaagaacgaggtgatggtgctatccaagatgcagcaccggaacttggtgaggcttttcggttgttgtgctcatggagagaagatgatggtgtacgaatacatgcccaacaagagtctagactcatttattttcagtaagttttcagctacctgcagccctgattctatacagatactctatacaggagcctcttcgtacgaaggcaagagctcagatgcagatgcagatgcagtggagaagatgcagatgcagtggaaggcgaaggaaacagcgcagatgcagtggggaccagcagcactcaaggacgaggcagcgcaggtatcttcggaatcaggttacgggtatacaagagcatggtcaagacgaaacttgactgggatggaaggcgatcatgacgaaggataa

SEQ ID NO: 5505 - DNA, 231 bp, Zea mays
  Peptide Sequence Number=SeqID_48880
atggcggccgagaaatggcccaagaaattattcaaaaaagcgaaaaaggcatccatgatgctagaaagtaatatatccgtatcttctcttctctcagaacctgctgagctacctccaggcccccacacgaagggggatgacgaaattagacaaatggccgaagccatcatggatagagttgttgatcagcttctaaacgaagctgtagaagtagtcttaaaggaagattaa

SEQ ID NO: 5506 - DNA, 2097 bp, Zea mays
  Peptide Sequence Number=SeqID_48881
atgctgtaccagaattcttccttctttactcaacagcggcactccaaggtatttgcaggggaagtcttggacctcacaagggaggaggttctggatagtaacaatatcagcctcagagcactgtatggggacaacgctgctcttctgcacccctctcctatgctcaatcatttcaccagggatgccattaaggacctgggtggaagaggtgctcaggtgtgccattggattgcctctgatgcccacgccaagtttgaaaaagcaagcattctgaaaaagcagaaagctgttataaagatcattgcaaagggtatcatgagtttctggcgttcagctgaggctttacagactgctgacaggacagctaaagtgatgccacacaattcaactatgctggaggagatagatccttcgggagtcaaagcaggaaaagaacagggtcacaattcactggaagcgaaagaatccagccagcaacggtcacagattcatgattatgcagttcgatttcttgaatataatagaacagctgatttgcacgtgttgcctgaagctccaccaactcctgacaggctgaatgactttggagtcttgaaagtgtctgatcatctctcagaagaaagtctcttttatacagtagcagcacctggtgcagtgctggcatacagggactctctggaatctcttttcatgtatcacaagtcttgggggtatagtgtggtcggcaacgtcagttcccagctgggattagctcgtgatgtgctgcataggttggaaatggaccaggacagcaggatgttgatgacaaaggaagctcgcctccgcaagaagagaaattttatctccaaattggaggatgagggaaggattgtcaccaaccatgagcaaatgcaggaagttttggatggtttcttttccaatcttttgggttctatagttcagagaccatttactcttgatctgtgcggcgttttctctatcggttgcctgggcatcgtgttcgcggcgctccctgaaggaggaggcatggaggtggtggtggtcgggttgatcaagacgtttcctttggcgttccccctccttgccttcaccagccgctcctccacttctcccggtggtccaaagcaaacctgtgaagctgatcggacactgatgtgctcgaccttcgacgagctgcaccaagcaccttcattgcctacctgcccaatgaagacttggctcgtcgcatctacaatggaggtcaacctcgttttgcccctcctctccgtctacatattcggtggtggtctcgtcaagccctggcatgcgattgtagagctttgtctcagctccttgaagttgaactgcgtggtgtacacgctgactccaagtttggatccatcggcgttcaagttaagaggctggtgtttagatccggagagcattcctgtttcattggatctccatgttgaagagcctcctgttgctgtagacgagggtggcacgctgaagggggctgtggaactcgtggagccgttgccgcagctaggaggcctctgccacgccgttagccacggtgcggtactcggcctctacgctggagcgggagacgacgggctgccgcttggcagcctaggagacgaggttggtgctcaggaatacgacataaccggatgtggaccgacgcgtgtcggggcagccaacccagtcatcgtcggtgtagacgacgagctctgtcgtcgggggtggacggtggagaagtctgtagtcgagggagccatggaggtagcggaggatccgcttgagggcggtgaggtggggctcctgcagggtgtggatgtgcaggcacacatgctagacggtgtaggcgatgtcgggcctgaagaaggtgatgtactggagcgcgccggtgaggctccggtaggacgtcgcgtcagcgaccgggggcccgtcgacctcagagagcttcacctgagtgtcgacgagtgtggagcagggcttgcagtcggacatgccagcccgctccaggatgttgatagcgtattggcgcaggtggaggaagagaccctgaggccgacgctcggcggtgatgccgaggaagtggtgcaggggccctag

SEQ ID NO: 5507 - DNA, 420 bp, Zea mays
  Peptide Sequence Number=SeqID_48882
atgggtgctgttatgtcaacagtgatggacaaggactgccaggaggccttgtggaagaagtggaaggccccacattggctggtggacccacaccgtgatgccaaggtgtcacacacaaagccacaacttgagctcacaacacaacttgaggagttctctactcaaatggtgctcaagtcactatctcaaagaatcaaatgcgcgagaatggagtcttggtgcttaggaatgatcaaggaatgcttgtgtgtctcctccatgcgcctagggacctcttttatagccctaaggcagctaggagccgttggaggcaatctgggaaggcaattcttgccttctgtcagaaggcgcaccggacagtccggtgtgccaccggacagtccctgtagctgtccggtgcggatctcctaccattcctag

SEQ ID NO: 5508 - DNA, 597 bp, Zea mays
  Peptide Sequence Number=SeqID_48883
atggcccgcgcccgcgcctataaaaccctcccagacttcgactgcactcttccgcgcaccctcaagcctcaccggagtccagctcgccgtcgtttgcccgtgcgcagcgtgtccgcggccgcccaatccctctgtcaccgtagaccggccagtagagccattcccaactccgtccagccctcggagaagactgtgcacacctccgtgaagctccccgagcgaggaatcggagtttgcttcgccggagaggccagtccacgctcgccggagctctcaaccccgccggagtacgtggaccgggtaaaccactccaccatccttcgattccttgtgcacacggtcgctacgttaccccgtgaagctcaccgtgccctcggattgaaccagttcgccgtggtttggccgataatacaaatccactatgttatcctaaaagaaaacctaagcctaaaagactgtaaccttgctgacggagagtacatcctcgtgccggagcaaggagctgctcaggaggtagccccggatccagcacccgagcctgcaccagaggaccagcctgccactgctttggaaggcaagccccggttttatgcataa

SEQ ID NO: 5509 - DNA, 858 bp, Zea mays
  Peptide Sequence Number=SeqID_48884
atggagccatgcgagggtgctcaactgctcacaatgagcggcctcgtcgaagcagggttgaggacggcgatcttggccacgctgccgaccctcgacgagagaggcgtgtcggttcgtctaaccggcggccgggaccttcaccacgggatccggatctccgatgcgccggctggaggcccccagcctgccggcgtggctcccagcgcccccaccgtggccccgcgccccttggacaagggtaaagggctgcaagcagcgcctccgccagtaccccgccccagggcttcctccccttctgctcctaaggtcgcacctccaccaccagataccaggcccgccggcgggtctggttctcagcagcagaagtctgctgagcgtggcatcggcggagcacacccagctgccgtcgggaaagctccactagcctcccacgtcccaactgggggtccggctgcagcggcgccagcgtcaggcggtgccacggtggcggaggaggtcccagctgggggacctgcgcccgctcccgacaccgggggtgacctaggaggcgcgtccagctccgtccctccgtcgactctggaggagatggatgtgattttcgggcgacggctccggtcaggtgccgagccggacgcggcgccaatcccccttccccgggtgctgtctcgcgcccaccaagtcctcaatgaaaccgaggcagccatcctgtgggaatgggaggcgctggagtctgagcaccagcgcctcagcgactggcgcacccagctagaggagcgcaccaaggtggcgtcccgccagttcgcctctgagtggttcgaactcgcgcgggaccgcaaagagtacaaaagggacctctag

SEQ ID NO: 5510 - DNA, 684 bp, Zea mays
  Peptide Sequence Number=SeqID_48885
atgcctccccagtacacggtgcagctgttcgagaagcaccgggtgccccgctgtagggtgaggatgaccctggagcctcatgccttacagccaggctggcattcgttggactctgagtctttcggataccaggctgaggatactatcgaggccattgctctccatgggctgacaaccttctatggttttcaccccttggagctgtctactcatcccattggattgtttcccgctgaaaaggaagacgacccaatgtggaaataccgagtggagcatgccaaggatatatgggctctttacctagggcagactgctcacttgacggcatccaagatcaccttggataacagagaggaactggtggtggacctatccactgagatggtggaaaaagacctacaggtggaacagatgtccaatgagatccaggagcttgaggagctagtgggaaccagggagaacaccattgaggttctcgaggatcaactaatcaacactcagcagcaacttgtggaagccatccaacatttggatatgcaccaccaggagatccaggacatggaggccaacgaggatgtcgacatcgagggaggagaggaaccggagcctacatccagcttggacactgctggctcagggagaccaccttcccccgagtcgagcgttgcctcgtttgctcactag

SEQ ID NO: 5511 - DNA, 255 bp, Zea mays
  Peptide Sequence Number=SeqID_48886
atggccaacaaaattataaagaaaaatgaaaaagaaacccatgatgctcgagaagaagctaagcgagccgaagaagctacagaacatgcaaggcgtatagctgaactctcaccgctacccgagccatacgacacccaagccgatcctgttatgaaagaggcgctggatgtgatgagtgttgccaataccatcgtcgacgaagtcgtcgatagactgctgaatgaggcagccgagaaaattctcaaagaagactag

SEQ ID NO: 5512 - DNA, 246 bp, Zea mays
  Peptide Sequence Number=SeqID_48887
atgaactcactcgaccaccttcagcaagctttgaccttcgtcatgccgccaaagaagacaacagggccaggggttgcactacagccactggatgttaatcaggaaacgctacgcgaagctaggagccagaacagggccaggggttgcactacagccactggaccaagagatcaggctaccccatggcccccatcgtacaagccacctcagcttcctatgtatgatgggcattcagaccccaagtag

SEQ ID NO: 5513 - DNA, 327 bp, Zea mays
  Peptide Sequence Number=SeqID_48888
atgaagaagccaatgatgagcaagaggacaacttcgttggtatatggcctgtcactgagcattacacctcaatgtgaagctggaaaagatcgcctcaacacccttgtaggtgtggtggcaggtcttaacactgacctagacagcactaccctggatctctcaagggtacatggagaacttgaagaagcacatgccaggattgcagccctcaaagctcatctcaaaggaaggaatccacccgaagcccaagtccctgccatagctatgtccccatcccacaagaggatttgctatggagaacgaggacctatcaccaggctactctag

SEQ ID NO: 5514 - DNA, 708 bp, Zea mays
  Peptide Sequence Number=SeqID_48889
atgaggctccaaggtcatcctcaccctacagcggggtacccggtgctcttcgaacaactgcaccgcatactggggaggcgtcgtataatcggctccctgcagcacctcccacaaaatgcggggaaaaccctcttgcgcaagttgtccgtgtgggaatgtgcgttccctccttccgaggactcgcagatcctcgacgacaggctctggtgctggcttctaggctacctcctgagcaactccttgctccggaacgaggatgcgggcgggctcgtcggtggcgtgtgctccgacctgatcccggcggtagagttcaatccaagggcacagggagcttcacggggtgctaaggaaactacccgtgcaaggaatctaaggaaaactcactgtggagctcggtctatgtgcgccggcggtcgggtgaagtccagcgacgttgatccggtgtctccggcgaggtacagttcgattcctggctctggaagcttcaccgaggcacgcagagagcgatcgccggtgatcttgcgctccagcgaggttgagagcgagcgggggcgtactgtcgaggcctcagtcgactttatagacgcgggcgcggatatattaatgtacttcaactttggtaaagggtttaagtcattaaatattcatttgcttatcctttccattaacccagtgtttgggggtctaatggctcaagagggggtctag

SEQ ID NO: 5515 - DNA, 321 bp, Zea mays
  Peptide Sequence Number=SeqID_48890
atgacccagctgatgggcctggtggaggctaccaagatcaccctagataacagggaggaccttgtggtagacctatccactgagctggtggagaaggacctccaggtggagcagatggccacccagatccaagagcttgaggagctagtaggagccagggagaacaccatcgaggagattcaggacatggaggccgaaggggccgacgaggatgttgacatcgagggaggagaggagccggagcctgcatccagcttggacactgctggctcagggagaccaccttcccccgagtctagcgttgcttcgttcgctcattag

SEQ ID NO: 5516 - DNA, 483 bp, Zea mays
  Peptide Sequence Number=SeqID_48891
atgaccagagcagccccagccacctccgacgtcgacctgcacaccgacgtgaccgccgtgacctccccgacgtcactgaccaccccgacgtcactgaccaccccgtcggagctctactgccgccgcatacatatatcttattcattgcattcgatagattgcaacctcgctgacggagagtacatcctcgtgctggagcaaggagttgctcaggaggtagcccaggatccagcactagaacctgccatcgaggatctgcctgccccagctttggaaggcaagccctgcagattgccctcctcacgcgacctgagacgtggtctcccattccggttatggtgggtacaagtgcggtcactgcatgacgacagtcggggttctctggaggacatggttgctggagtgacttggtcgtccatcttgccaccgggttggacagtcgagtgggaccctacctcggctgagaaggagcatgaggagtga

SEQ ID NO: 5517 - DNA, 75 bp, Zea mays
  Peptide Sequence Number=SeqID_48892
atggatgacaagtatggtggtgtaatagtgaattctgagattgattcttcgcttgatccaaaggaccagttttga

SEQ ID NO: 5518 - DNA, 1456 bp, Zea mays
  Peptide Sequence Number=SeqID_48893
atggtcgcctttcaaggggatcaccctccttttaaaggcgactctccccacttgcgtcctcagccatcacgggctgagtcttctccaacacgcttcaaggtcctcccctatgacacgggggctaggtcccacgcgtcatgcaagctggcccagggcagaagaagccaaaccgccgcgcgcggtgcatgcaactgcccagtggttacaagcactcctccactttcgcccagaccagcgggtgaaagggcggacagccatgcagtcggcatgcaaccgcgccaagtgggcgcaccccttcgaatccaacacgcccagcatggaggcccaggcccacacgtcatgcaaccggcgcgccggttgctacgtgctagcaactgcaccgccactcgcgccactaccgccactcgaggcaaccctacgtatgacccaacagtgccagccaggcgcatcggtcacgggccagtcagccgcgggagaaggcgcgacggtcgatgcggccaaaaatgggccggcagtaatggcggtggcaggcgggcagaagcagaggtcacgtcgtcagccaagctcacgtcccctcgtgggacaggaccgagaaaggggataccccgaaaagggatccttctccgtgaaggaaacgggccccgagcccccctactgatcagaggttcgaaggctggcccctcggaggggttcaacagccgcctcagagcgctcgggctccgcgcccactactggtcagaggttcgagggccggcccctcggaagggttcaacggccgcctcaggccactcgggctccgcgcccactactgatcagggcgggaacgatcttgtaacggaatcccatcagaaggaggcatcgagccctcggaccccgtcaaaaggggaccgggtccggcagatcacccgcaggcgccataggaaactcctgtcgcccgaccccagggctcggactcggctcagccccggaagacgacgaactccgcatcgcccgaccccagggctcggactcggctcagccccggaagacgacgaactcctgcgcccgaccctagggctcagactcggctcagccccggaagacgacgaactccttcgcccgacccccagggctcggactcgggctcagccccggacgacgacgaactccttcgccgaccccaaggctcggactcggctcagccccggaggacgacgaactccgcttcaccgacccgagggctcggactcaagccctggcctcaagcgacgtctccgctcgccgacccgaggggctcggactcgacctcggccttggagagacgagactcgacctcgacctcagaggagcctccacctcgcccaacccagggctcagaccgaccatgtcataggaggcgtcatcattaccctaccccaagctgactcaggctacgggggaacaaagaccggcgttccatctggcctccgccaaacga

SEQ ID NO: 5519 - DNA, 1155 bp, Zea mays
  Peptide Sequence Number=SeqID_48894
atggggaacacccgcaatccttccgccttgtcgttggaggagtgcaacttcgcggaagttggcacctttcagccatcgttcggcttcaaggattttcatcaggcagcccggctgcatcccctcgccggtggtcaccaagacgcttcaaggatgttcatcatcctggctggggcgggggccgggctgagccggagctctacctcccgcgcgggttcgtgggtcagcctctccctcagcattcaagggagagggcgctcagcggcccagcgggagggtcggacttcgacaacgcggggctggtcgacgacaggcgtcatcagctttagcgtgttgggctcgctggcttggcccgcggtgccccctctcgccgcaaggacggttgtcgcgccgcacgcaccggaggaccgcccaagacgtcgcgcgctgctagggcggcgttcgtgttctgaggctgtcctgcctttgccccggtacggcacctctgcgtggagatcggtgctccgctcatctgggaggatccgagtggggatctgccggtgggcagacggctcctgtcgtcggtgcggaggtggcggcggctggagaagtcctcgtcgccggcgagatcaccgccaccatccgcgctcggggcctccggctctttgtacttgtcctcgcccctcgagcgtagacgtgggcgagggcaaggttgcagcggcgtccgccctgaggccattgctgctgcagttcggccacccggagtgggggtcattgtcgctgctgctggagcgggcgatggcgagccatccgtcggtcttctgttgctctgcaggctccccaatcgagtccctcggctcggtcggccttgctgtccgaggcttctcttgcttagttaaaggaaaccctcggccgctcttcgatgagccgaagccggaggtagcggtgtcagcacagacagaggcagagttggctcgaaaagaagatttggtcggccggagcctagccgggtcgtccactggcgggaccgacgtcggagttgagttgccgaggccacaagctgggccaatgtcctcgggggacagctggctgaggcttcggggtgaccggcccgagccatctgctcgagctggattcctggagaagaccctggcagcgatggcccgggcgtggtgctga

SEQ ID NO: 5520 - DNA, 345 bp, Zea mays
  Peptide Sequence Number=SeqID_48895
atggaccagaaatcctttgataacacaagagataaccatggcatcattgtgtgggtagtccttgagatgaagatcctcttgggagaagctggttctgaggacgaaccacctgtgatcgggagcaccagcttcgggtccgaagcagctccagcttggtcattgaacgaagccatcagttcgagaagtggaagtgagttcaccggaggtgggcgccaatgttggggacttgttctcaaatgctatgaattaagaacaaggcaacataaagtgttaaatgttaaatgtcccttcgtccaacgaagcattattcctttgaggattaatggacctttggacgaaggttga

SEQ ID NO: 5521 - DNA, 723 bp, Zea mays
  Peptide Sequence Number=SeqID_48896
atgtgcaggatccatggagttgagctcaatgtggccgggatcgaagggctggggatagagagaacaacagcaggtggcgaaggactcgttagaccagcaggcactggagaagatcgaggcaggtcggtgtcgacagtggcagcgcaccgagatgatttgggtgggttggcgtcgaccatgataggtgccagagaagatcgttgtgggccggcagcaatcgacagattcacgtttcctgaggggatcaacggggaaaatcgttgtggggcggcggagaacggcggtgccgcccgctggcagcaggcggagaacaacgggaggagggatactttcttgtgtcatgtcactcatgatgatatggaaggcattatgagtgaaccagtacaagatggacaggaaccaaagtcagcaaaagaagctgtttctcaggttgtcaaatcaactacttttcttcgtgttgcaggtgtttgttcagcctccaagagtacctctagaggtgcaatatcatcacaggtccacgatcttcaggttgagcttgagaatgagaagcaagaaaaaaaagaacttcgacaagagttggataatttgaagatggaatcagaaacgtcaagggtaaaacattctgaggaaatagagggtttaaagaagacatcacaagaaatgcatggtctccttcgccaactattgagcttcaaccagggtcaacacaatccagggtcataa

SEQ ID NO: 5522 - DNA, 1014 bp, Zea mays
  Peptide Sequence Number=SeqID_48897
atggtcgacgccaacccacccaaatcatctcggtgcgctgccactgtcgacaccgacctgcctcgatcttctccagtgcctgctggtgacgatgagcagggagccacaggactgtttggcctcgaaggagaaaatgttttggtggatagcaaaataggagaaagtagtggttctttagaagaaaaagttgaatatgacgtagaacaaaagattttcagttctgatgagagagctgtatatgaagaagccctgaagcatatcactcaggaaacgaaggaggaagatctgcccaaaggtgatgatcagggtgttgggaagacaatttcaacgattgcccttatacagaaggagatggttaagcagtctaggttcatgactgctggttcatacagtacaaagtttgtcccaaacagtgattatgacaatggcagtgatgttgtgattagcatggacaagaaagaaccgaaagatgaacccttgaatgagctagatggttctgcacgattgcatgtcgccagcagtcttaagctctgtgatagtaagccaaacactgctactgataaagttgaacctaagaagaaggctagagtgagggactctgcatcaaacttgaggtcgaagactagaccagctgcaggaacagtggtcgtctgccctgctagtgttcttaggcagtgggctaatgagctctctgtgaaggttatggaagacaataaattgtcagtcttggtttatcatggaagttcaaggactagagatcctaatgagttggcaacatatgatgttgttgtcaccacgtatatgactgtggcaaatgaactggtacctcatctgtcgttgtccacccttgagcaaatcggcacatgcggctttgattgcattattgttggtgtccatggtgaattgggcctagtgctgtcggggaccataattaggggtaccctcaagacgcctaattctcagctggtaacccccatcagcataaagctgcaaaggcctgatgggtacgattaa

SEQ ID NO: 5523 - DNA, 177 bp, Zea mays
  Peptide Sequence Number=SeqID_48898
atgggatatcagttgatcctgagaaggtacaagaggattgccaaaccaatgactgaactgttgaagaaaggagtcaagtatgattggagccaaaaagtgcgaagatgccttttcatacttttgaggcagcactttgacaacagccccaggtgctggctcaaccctgacaacatttaa

SEQ ID NO: 5524 - DNA, 462 bp, Zea mays
  Peptide Sequence Number=SeqID_48899
atgggcaagagcaagaagggtgggagttcttcacaccattccggcgataagcggaaatgtgagccgactcctctctcggaggacttcggcgactcggagtactcggaggaggagttctcctccgagtcagagggttcaccggtccctacctctcccccggtgtcgtctgatgattcagacgactcccaggggatcaccgcagaggtatggacctacatccaggccgtcgagcgtgccaggctcgagggctcggatgagttggggggctcctcagacgacgaggactcctcggactcatccgaggagggcggcggtgatggcgatggtgagggcggtggcaatggcggaggcggcggcgatggcaacggcgacggcaagggtggcagcggcgacgacggggacgacagcaagggcagcagcaagggcagcacaaggccagtggctaggcgccactggttttaa

SEQ ID NO: 5525 - DNA, 183 bp, Zea mays
  Peptide Sequence Number=SeqID_48900
atggcagtcggggtcagtgaggcattgtacgccaaggcagtgagccctgatctgctgacggagaatcgatggggacggttgatgttctttggaggacatggttgctggagtgacttggccgtccatcttgccactgggttggactgtcgagtgggacctcgcctcggctggggaggagcatga

SEQ ID NO: 5526 - DNA, 912 bp, Zea mays
  Peptide Sequence Number=SeqID_48901
atggctcgtcttagacacactgcacgaaagtccgtcatccccttcttaccctcccgtcttgctgagcgtccgcttcaccgtcccgtggccggacagtccagccacttggagagactgcaccaccgcctgcatgaggagcaggaacgtcgacgacaggagcagcagggctcctctttctcgctccagcaggagatagagtccgtgaggagctgctcccctgtgcttcccctggaggcgccccctgcaccgccactgggcgccccagcctctggagtagctgctggaggagacccggacgacggaggtggcgacgacagctcgagccacgacaccaacttctctgctgaccaggagccggaaggatgggttgctcgacccatcactcgcgacgctgctcgcgggtgtcacttccacgatgcgctcgacaccctgctacgtcgggcacttaaccagcgtacttggtctatcgagtatcgctgtgtggtctaccagcatagtcgcggggtctacccggaccgctgggaggcgacctgcttggtgcgccgtccggagaacagtctccagggtgcggaggcctcctcagagcactattctatctctgagcgggattcagctgaggcggccatcacaggaggcgtgattgtctcacctgttggtgaggacaatcctaggttgagcagcacagtcaacctagccgccatgctaaacacggagctggaccatgcattagacgagctgagtagggctcgtgctgagatcgccctgctgcgggctgagcgcgcagaacgtcgtcacctggatgatggttcccccgctcccgtcggtactcagcacccgtaccgctcacctcggcgtggacgccagtcttatggcaatcccgactgcaagaccaagataaatctagaaccatag

SEQ ID NO: 5527 - DNA, 339 bp, Zea mays
  Peptide Sequence Number=SeqID_48902
atgagtttgcggtatggccgtatttatacgcttggtgtgttgaaagctgaaagaccccacttgtcattgaatgttgctattctagcaaagggaaggtaccttcggactaaagttggcattgcagtagaccggaacaatacgaaggttgatacagagccgaaggtgaacagtatccccgtactgttcacgctgacttggcattcgttttctgcgtcacgcttgtactgtcatttccttccgattgaagcacttaagaacaagtccccaacacactgctcaggagaagatgaagccgtggaaggagacttccaggagttccaagactacgacgatttctag

SEQ ID NO: 5528 - DNA, 918 bp, Zea mays
  Peptide Sequence Number=SeqID_48903
atgtcttcgcccgagctccgggagtcttcggcgcggatgctggaggttaccgggggtcgatggcccaagaacgttcctatcccccgcgcggctggtgaagacttctttacgtctcgcatggctcgtgacttgagagtgtttccttacggacggaatattgctgttgttgtgtcggcagtgatgaacaaggatcgccaggatgctgcgcagaagcgccgggcggtcatcaggctccccgatgctaggcatgaagcgaagagggcgcaggggagtgcgaaggctaccgtccccggcggtagccagccgacgctggctgcgaagccggccgcccctgggtccagcaaggtgccggagagcacgaaggcggtcggcgccggcggaaccaagtctgccccagacgaacctgcgaaggtccgggaactgccttcgtcggggaaacgcgttgccgacttcggcacaaatattagcgtggacgactatctcgttgggtcgggtgaggggcaacttgttgttgtcccgcctgcggtggcaaccacggcgtctaccgtggtgcttggggtgaagggtggcgctttcagcgctggcagcgagattttggcggccactgccgtcaaggacgaagtgggcactatgtcccgccggctgagggaggcgtcgcagcagctgtcgcagcagctgagtcaagcggccgacttcgccgactgcgtggcgtcgagtgcccttactgcagatgtgtctgccgaagttgagagacttcgggcgcagcacgcggacgccgttcgggagaagtcggctgcggagagcaaaagccgcaggctggtggagaaggtggccgccctggagggcgagaggatggacctccgacgccagctggtggagaaaaggagggaggccaaccaggccatcgccaaggcgtag

SEQ ID NO: 5529 - DNA, 933 bp, Zea mays
  Peptide Sequence Number=SeqID_48904
atggagagggtcgaggtttctacgcgctcggaagttgagcggacgcgcaaacagctcgtggactcataccgcgagctgggtgcgcggactgctcacttcgaggtgcccgaccgagaggcgggccttcgcttcctcgagtggctgcaagaggaattgctggcgctcccgaccatcatggagggattcatgtcctttgcctccctcgtcacctgcgagggggccatgaatgcgctgtcccgcgaggggtgcagtcactatgagggcttcgaccgatccgatgaagactttgggcgtgaaatttttaaggtcgaagaccctgtggtgaaggattccgcgggggccctcttcgaccggatgtggggtccccacggtcgggaggcgatggcgcgtgccgaggacgtggaggacttcagacgtctgaacagcgtgcagcccaaagcggaggtcaacccggtggtggccaaggctgaggtcgacccggcaccgcccccggaaaccggctcgtcgccagccactgtgccgatggcggagggtcccccgaaggcggcgacggagctggcagcggaggatcccatggcggcggctaggtcttcgcaggttcaggattttgggcctgcgcacgcaatcactactgctaattttgtggcggcttcgtccgtggtcgctggaaatgaatcagatgagtctatgtctaagttttttgagtttgatgactctgggagttcagttgtgtggacggaagagtcttcggatgaggacttggattactttgcggccttggatgtggctgcggcggaggcttctccgtgtgttacggatgctgaagtttttcctggtccgagtgctgggtgtaggcggcgaagggcggtggcgaaacgtagaggctggcaagcgggaattgttgtcctcgccggttggggcgagtgtaggtga

SEQ ID NO: 5530 - DNA, 1539 bp, Zea mays
  Peptide Sequence Number=SeqID_48905
atggcgttgtacgggtacaccatgtcgacgatgtcaaacgtgacttgctcacttcgggcattgggtgctacaccgaaggagaggggtaactctattttgccgacaggaaagatcccatcctgccatgctgcagttgataaccatggcgtcgatgtgtggtgcgcagcgcaggtcgacgtcacgggcgtcgaaggtcaatggcacatgggaccacttcgtctgcacgactggatcggtaaccgcgacgtggttgatgctgcggtaatggtccctcttctgccgctttgtgtcgaagtcggcgctggaccccccagtgatcatgtgaatgacgccgcgatacggctgatcggcgaagtcttcttgctttggggcttggaggtggttgtggtggtggacgttttgctgttgctggtgtgggggtgggggaagtatgatttgtacctcctggtggtgttggtatgcgtggtgcggtggatgcggagcggggccgtggttgtatggctgagggggttgctggtatgtgtgcgcgacaactctagggttgtcggctggttgcgctcatgccatcctgtctctggtggacttcgtttctggaaagtctcttgtagggtggacgcagtcttcgtcgtggaacaggcagtaaaatctgcgcggctgctgcgcgcgtccccggccccgaccacgagttccgtttccgcggccctgggggatacacctggaggcgaggggcctcgccagcggggttctggttggcgatgttgtgcacctgctgctgattgtgcccgtcccgaccggagtctgcctgcgagggcctcgtccacgtgcggctggactgtggagtgtctttggctaatacatctcctggaggttcttgggcggatccctgatggagtggctgtaaaggacgctggctcgaaggccactgatggcgtagtggatggcgatctgagtgaaagttcagccaaggcgtcggtgtctgggcggtacccttggaagttgagcaagaatttgtcccggagacttctccaggagtcgatggacaatgggggcaacctggtgtaccaggtgtggcgccaggggacttcgctcgtcaaggtagttgacaccttggaatgccgcggcatgtgggatggcgtggccacgctgagggatgtacaggtctttgacttgtgcgcgctgttggaggggtgggctgtgttgcaggccgaggtggccttcgcgctgcatgagcgcgatctcttgttcgagctcctgagccttctgctcttcgtcacgttgcggttcttgatgcgcaaggcgcgcaattgtagctgctcttccgctgaaacaccgatgacttcgccgtcctcggtgacgtccgcgccctcctgtggagcgaagcctggggaagttgcggttgtcctccagagctgcagtgctgccttcgcggtctcgtcagccttcgagctagctctcttgggtgccatcgcgggtggtttttccgtaccatggccccacggtgggcgccaaatgttggaacttgctctcctgggcaagtag

SEQ ID NO: 5531 - DNA, 54 bp, Zea mays
  Peptide Sequence Number=SeqID_48906
atgccgccctccgccgtggacagtactccagcgcgcgtaacgcgtggtgcttaa

SEQ ID NO: 5532 - DNA, 66 bp, Zea mays
  Peptide Sequence Number=SeqID_48907
gtcaagaacaggtaccgcaggatgaggcgcttggaggatgctgttatgtctttcttagaggtctag

SEQ ID NO: 5533 - DNA, 621 bp, Zea mays
  Peptide Sequence Number=SeqID_48908
atggaggacttaagcaacatgaccccgaccattgtgattgggaaaatcgcggcctttgagatgtcgcgaaaaatgagtcggggagaggagccaacttcctcaagaccatatgcttttgcatgtgatgaaaggaagggcaaaaagaaggctcccactccaagttcctcaagtgaagaagaggaagaagaagaaagtgatgatgatgaagataatcaaccatgcacatcatcctccgaggacgaagaaacgatccgacgcgtcggaaaggataacaccactgcgggagtgaacaagcctatggagggagaaactgtgatttgtgggctatgccacaaggaaggccacaagtctttccaatgcaaggcgatgaccggggataaacaaagacaaaagctcaagcaaaagccatcaagcaaaatctcaaacacctacatcaaaaaggtgaacaaaaaggatgctacaccatatttgatcaagaagaaaaagaacggaaaggtgatagcaatcaaggccaacaagcaagccaacaaaggaaagggggccaaacgcatctgggtgccaaaggagataatttcaaccatgaaaagcaccaagaaggtttggatcccgaaagggaagtga

SEQ ID NO: 5534 - DNA, 246 bp, Zea mays
  Peptide Sequence Number=SeqID_48909
atgggttgggcaaccatccctctagtttttgctcctctaagagggtctcctcaagcgactactccagcagcctggccgccaagtggtggtgcaggggacgcgtccagtgggggcataggggagccgaagactctacctcctgctgaggcggggaggaagagccctactgctctagctcctggcgccaacgctcttgctcctcgtgcaggctgtggtgcaatccctccaagtggttgtactggctag

SEQ ID NO: 5535 - DNA, 141 bp, Zea mays
  Peptide Sequence Number=SeqID_48910
atggaaatgggaagagattggtgtggagttcattaccgtgttgcctcgcacctcaaaaggtatcttcggactcaagtcggtatcacagcagaccagaataatacgaaggttgatacagcgccgaaggtatgtccttcataa

SEQ ID NO: 5536 - DNA, 279 bp, Zea mays
  Peptide Sequence Number=SeqID_48911
atggcgccctcctccctggcgctcgctccctgtagggagcagtttcccttggccgacgccccagccatggcgcctttcttcctcgcgcagcgcctcggctctccttcccccaagctccagcggtcatggaacagcaggagaaaaccccgtgtttgcgtggagaaggcaagccgctcgacgctcgtcgatgttcgtagcgatgcacaaatcggaatcaccgtcgttcttgcaaacgccgatttgggtttgtttatggtcgtaatatggtcgtgctcatga

SEQ ID NO: 5537 - DNA, 459 bp, Zea mays
  Peptide Sequence Number=SeqID_48912
atggatgcaggtgatagagggttcaggactctatcagttcatgagtatctgacgccgctatccacctacgctgcatcggtcagcgatgctgctaggcgaactctgtggtccctcagccacacttaccggcagcagctgcataacacgaagtacatgcatcttcctatgtgtcttcgtggagaaagccagaccaacattattccaggcagagccgaagaagattgcctcaacaccctagttggtgtggtggcaggtcttaacatcgacctggacagtgctaccttggacctctctagggtacatttggagctagagggtgcacacacaaggattgcagccctagaagctcaactagaaggaagggatcctcctgaatcccaagtccctgccatggcgttgtcccctccccacaagaggatccgctatggggaaccaggatccatcaccaggctactataa

SEQ ID NO: 5538 - DNA, 198 bp, Zea mays
  Peptide Sequence Number=SeqID_48913
atgtcaaaaacccccgcggaaccacttcgagcgagggcagcgtctccgccatctagcgacgtcttcggcaccagggttatgatggctggggagcaccgggaggataaggagggggaatgttttgtccggtttagacatggcggtggcctgactccttccggtataaccgttaagagaaggagatcgttgatcgggtaa

SEQ ID NO: 5539 - DNA, 327 bp, Zea mays
  Peptide Sequence Number=SeqID_48914
atggcgcgaattgcgttacggcggcggaacctcaatccaatggcggcgtcagccttttgtggacaatgcggtgcggagcagtacggggcaagcaggggggtagcggaggacccagagggtcttatcccccacgacgcgacaagctcgggcctaccgttccgtatttcccgcggggtggcgggcgactcggtccctgccgttgcggaggtgagggatgacaggtgggggcagcctgtcgaaaaaggagatcggcctcctgggactagtaattgtatcacatttgagtcccagaggatcaggacacttcaatttggtgccagcaactaa

SEQ ID NO: 5540 - DNA, 666 bp, Zea mays
  Peptide Sequence Number=SeqID_48915
atgtgtgcattggaagggcaacaactgcttgaggatgaccccacagtcgtgtacctcactgcatacctgctcaccctggatgcacagtatgatttcttggctcggcaccaccgtcagatgattgcccgagtagaagatacagagaagcacaaccccctgaagcaagccaaggatgagcacgtccagaagttgatggaggcctacttggtaacccataaccaatgtagtgccctgcggatccaagagcccacttcatccaacccagttcaacaacccatgagagctaaagatccccagattcttgaaggtcacccggtctctatcaaaggagagaagaaggcttgggaactccctgaaggatccatagtcttggaaggaattctagtctcccctcaggctatggataagcaagagcaccccaaatcctgccaagatcccccgccaaagttgtttgagcccctcaccatgaagaagattccagcaccctcccttgagatcaaagaagaagctgcaagtaccccaccagcaccgccgccctctgaggagctacgagagccagtcccgcttgaagaagagttcgaccccatcctaccatctcagtcgccgccagaagaagtcctcaacatcagctccctcttgacccatccaggagatgtcttagattga

SEQ ID NO: 5541 - DNA, 1083 bp, Zea mays
  Peptide Sequence Number=SeqID_48916
atggacacagggcgcagtgatttatcccgtggttcggccaatgcctacttccatgttgtgcatagagggttcgcaactcaaatggagctcaaatcactaacacaatcgatcaaatgcgtggaggcagagtctgggagtcttaggatgcttagtgaatgctttgtgtactgctccatgcgcctaggggtcccttttatagccccaaggcagctaggagtcattggagatcaacttggaaggaaattcttgccttctgtcgagtggtgcaccgaacagtccggtgcaccaccggacagctactgtagcagtccggtgcacgatctctttccttttctagcgaagccgaccgttggatcttcggatctgttggcacaccggacattgtccggtgcacattggacagtccggtgcgaccatcccaacatttggttaagccacgtgtcgcctgttgatcgcgcaggcgaccattggccgctggcgccgttgactcaccggacagtccggatcacctattcacccccctctaggtgctctcagaccatcacaaaggagcaggtggagagcctcagggatgaggagttggcgcttgtggaggatagcccgcaagaccactctggttggcacaaggacaagcaggaccatacctctggcaagcacatgtctagggggaggtttgacaaggaggaactaaagaagaatgaaccccagctgggcatggtggttagtgagttcaagaagggaattggtggaccggaaacatgctttgcttctaggtctaggagtgaccttcattttggcaaggttggtccatatcagatgggtgaaaccatctttgtggaggaggagcatgacaacgctgattggggtgatgttgaatcgtctccactgggtggcccagtcaagcctgcttcgactacttcgactactggaccagacatcacattttctacaacttggggtccagtcaagcctgagcctactgagcctgcttttgttgcctcctttgagccctggaatgttggacacactttgtctgatcctaactgggtcaatgttatgcatgaggagcttgaaattttttag

SEQ ID NO: 5542 - DNA, 282 bp, Zea mays
  Peptide Sequence Number=SeqID_48917
atggacgagtctgaaaaaggagaccggcctcctgggactagtaattgtatcacatttgagtcccagaggattgggacgcttcatgtgagcagcccggaccccacacagagggggtccggatcccatcctaggggtccagtttgcgcccgtggaggtggtgatgaggatgatggttttgattatgattatggtaatggttgtccgcgttgcaaccactgctcaggagaagatgaagttgtggatgaggacttccaggagttccaagagtacgatgagttctag

SEQ ID NO: 5543 - DNA, 591 bp, Zea mays
  Peptide Sequence Number=SeqID_48918
atggaagaccttaatgttcaagatgacctgacttatgcagaataccccatcgagattttggatactttgactcgagttacgaggaataaggttataaagatgtgcaaggcggactcgtgggttgtgctcggggagaaatccaggggcacgaggccccacgccgacgtgaatttctcgtcggccttcaccgtccaccgcgtagccgccctgctccgtgggcacggagcatcgtcgctcttcctcgggtatgtagctccgaatcacgttcgccgcattccgtactacgcgtacctatcgccgattaggttttggccaccgtattgcgcgtcggagaaggtccggcgacggccgccaccgcggtgtagcgcgggagtgggcggcgccgccgatcggctgtgtagtgattgggcgaaatcatgtggaccgttggatgcagttcgggcggtcccgattagatctccgcgtaccgcttcgcggggtccctcgtggccgtcagatggtgatcgggcgggtgtcgagcgcctgagtcgtttggtgatccggaccgttgatttggcatccgagggctatgaaccgtgcactggtttataa

SEQ ID NO: 5544 - DNA, 600 bp, Zea mays
  Peptide Sequence Number=SeqID_48919
atgcaggtggcgtgcaaccgcaccgcgagggcgcaccccctcggcttcgtcgcatccagcatggaggcccaggcccacacgtcatggaccgagaaaggggatattccgaaagggatccttctctgcgaaggaagcaagccccgagccctcctactgatcaggggttcgaaggctggctcctcggaagggggttcgaaggctggcccctcagaagggtttgacagccgccccagagcacgcagagcgagggatgactctgggtacgtctgttacatggccgaggctcgggctacgctcccgaggcgcattcaatgcgaggatcgcctgacgccttatcctgacacacgtgcctcagtcggcaaggtcgaacctcaggcgcaacaggaagctccgcctcgcccgaccttgggcctcggcctcaggaggaggtctccgcctcgcccgaccctagggctcggccctcgcctcggcctcaggaggaggctacgggggaacaagaccggcgtcccttccaggctcgccccggtagcaggtaatgatggctcctcggggctcaagcgctcctccgacggccacgacaccgcgtacacagggctctag

SEQ ID NO: 5545 - DNA, 390 bp, Zea mays
  Peptide Sequence Number=SeqID_48920
atggtgacctccagttcgacggcgggggaaagcaagccgggctgcgacctctgcccctccctcagcctcaaggattttcatcaccagggctgggggaggggactgccgcgtgcctggctctcggacccgagtggcttcggagccgctctcggcgccggcttccgccacggcagctggaagagcatccgccctgaggtcatcgctgccgttgtttggccccccggagcagaagtcgtcgtcgtcgccgctgctggagcgggtgacggcgcgccgttcgtcggtcttctgttgctccgcaggctcccccccgtcgagtgcggagactcgcctgttggttgtctgaaccgcttcaccaagcgtgagttgccccgtgtaaaggtgacgagtgag

SEQ ID NO: 5546 - DNA, 336 bp, Zea mays
  Peptide Sequence Number=SeqID_48921
gaccaagggaacaacgagtcgccttcttgcgcgcgcgctcaccattccgcttcccggcacccgccgccttcccgagccgccgcccggctcgcgtgcccgtcgccgccgcggcgccggagcgcaggccgccgggcgcggtggcgtccaccaccaactacgtcgtgccgctcgacgcggcgccgtccgggatcacgcgcccgctcgtcgagatcctccgcgacctcaacaagcgcgtcccggacgccatcgtgcggccctcctcccggcgcgcctccgcctccgaccccgtcatcccctggtaccatgccaataggatgctcagcttttatgctccag

SEQ ID NO: 5547 - DNA, 789 bp, Zea mays
  Peptide Sequence Number=SeqID_48922
atgtgtctcgcgcagatcgcgcagccgaccgttggcccggccgaccgttggctcaccggacagtctggtgcacaccggacagtccgcggttcaggtgccaccacccagggcagtggcaagaataagaagaagaaccgcggtcacgataggccgcaatctggtgctccagtcgctgtagctgcgactgggggccgggatgagcgcggcaagcgcccccggcaacagggaagtgacagtgggtcgtgccctgtccactccaacagtcgccactgcgcctcggaatgccgggagatcctgaagctcgtgaagcgcatcagcgagtggcgcgagcaggcctccagggatggctcgccgcctcatcgccgtcctggcaaggagaaggtcgacgaaggtgacctggccgcgggagaacgagacctctggtatcagacccccgagcaagtcctcaaggatatcatcactggagactccgactctggtgacgacgacgaccgccgcaagaagttgccggccatgtaccggttcatggccattgcccattactggtacttggtcctcaagatgtcgtcccctgctggggtcctcaccgtgcagggcgaccgccccgctgcgcttacagctatcgagaagttgcacgccctggcggcagaagctgctcgcccggatgacggggggagggacccctcgacttcttgtaccaagacgcctgccaaggtgcctaaggtgcaaccagctggggcagacgacgtccccgtcaagaccatccggctcagtgcggattcctcctag

SEQ ID NO: 5548 - DNA, 438 bp, Zea mays
  Peptide Sequence Number=SeqID_48923
atgaggaagtgggagcaagagctcgagggcaaggccagcgacgccgccctcgccgaggagaaccttaaagcgaaggagcagtccttagataggcgggaggcggacctcgccaggcgagagacggatctcaccttctgggaagaaatgctcacccagggaggcgagatggtggccgagcacgagctcgaagcagaagagagggagaggacgctggaggagcagatccaccagttcaacacggcagaggcggcgccggcccccaggcggtggaggccaccaggaaggcccttgaagatcttcaagcggagcaccgtgccgggtctagcgcatcgccgcgtgggccggcaaggcaagcacgacactggtgctgctagggatgagcccccatcccagtgttggagctgccaacgtcgatctctgatgcgctcccggtgctag

SEQ ID NO: 5549 - DNA, 62 bp, Zea mays
  Peptide Sequence Number=SeqID_48924
atggcgcgacggtggcccggggcgacgatggcggacctccgcgactgcacggaggacggcgg

SEQ ID NO: 5550 - DNA, 2303 bp, Zea mays
  Peptide Sequence Number=SeqID_48925
atgaacagacaccagcactcaaggtgccattacaaacgaaactccggttccacctccgcaggtacgaacaaccccccacgttggagggcctgcggagcaacagaacgccgacgagactctaggtggctcaccgccgcccgctccggcagcagcgacaatgacttccgctccgggcgaccaaacagcagcagcgatgacctcagggcagacgctgctgcgacaaggccctcgcccgcgtccccgcccaaggggcgaggacatgcagaaggccgtagagttggaggtcagtccgcgggtggcgccgactatctcgtcggcggagaaacctcttccggctgcctcggtgggaggtggcaccggaagcagcgccgaaaccgctcaggccggagagccagacatgcggcagctgccagcgccacgaacagcgaacgcccttccccccgatcactgagggaaggagcgggccgctgcccgcgcggagaccagccccaactcggcgcactcccctccccagcactgatgatgaacatccttgaagctgagggaggggcagaggccgcagcccggcttgcttctccccaccatggaactggtgccggcgcggaccgagtcttctccaacacgctccaaggtcctccccctacgacacgggggctgggccccacgcgtcatgcaagctggcccaaggcggaagaagccaaaccgccgtgcgcggtgcgcgtaactgcccagcggttacaagcgcttctccactttcccccagaccagcgggtgaaagggcggaccgccatgcaggcggcatgcaaccgcaccaaggggcgcaccctttcgacttcgacgcgtccagcatggaggcccaggcccacacgtcatgtaaccggcgcgccggttactacgtgcgagaaactgcaccgccactcgcgccagtaccgcgccttctcgactgcggaaacggtgccgcgactcgaggcgaccctgcgcatggcccgacagagccaaccgagcacatcggtcacgggtcagtcagccgcgggagaaggcgcgacagtcgatacggccagaaatgggccagcaataatggcggtggaaggcgggcggaagcagcagtcaagtcgtcagcaagctcacgtcccctcctgggacagcgagagagccctctcccacagcgtgaagacgacgggcccgtgttccgttccccgaacggctcgcgcacgcacaacggctgccccgcgaaccactcgtcccgtcgcattaactctgcggcaggacaggcgacacctttggcaggcgacgcttcacctccgccatgatgaccgtgtcaaaaaagggaccgggaaaggggatactccgaaagggatccttctctgcgaaggaagcaggccccgagcccccctactgatcagaggttcgaaggctggcccctcggaagggttcaacagctgcctcagagcactcgggctccgcgcccattactcgttagaggttcgaaggccggcccctcggaagggttcaacagccgcctcaggccactcgggctccgcgcccactactgaccaggggttcgtaggctggcccccgaagggttctgacagccgcctcagagcacgcagagcgagggatgaccctgggtacgttcgatacataaccaaggcaagggctacgctcccgagcgccgcctgcgtcgctccgactgctgtgccactcgacagagtgaggctgacagcagccaagttcggcctcgggcgccataggaagctccgcctcgcccgacctcagggctcggcccccgtctcggcctcggacgatggactccgcctcgcccgaccccaggggctcgggctcagcctcggctccagaagacgacgaactccgcctcgcccgaccccagggctcggactcagcctcggctccggaagacgacgaactccgcctcgcccgaccccagggctcggactcagcctcggctccggaagacaacgaactccgcctcgtcccgagcccagggctcggactcgaccttggtcctcagacgacggtctccgcctcgcccgacccggggctcggactcgacctcgacctcggaagacagactcgacctcgaccttcggaggagcctccgcctcgcccgacccagggctcggaccgacacgtcacacaggggggggcatcattaccctacccctaactagctcaggctacgggaacaagaccggcgtcccatctggctcgccccgtaaaaaaataatgatgccgcccgcgtgctccatgaacgacggggctctcagccctacgagccaggagac

SEQ ID NO: 5551 - DNA, 672 bp, Zea mays
  Peptide Sequence Number=SeqID_48926
atgcaggggcactccgtccccacacatatcaaccgtccccatcgattccccgtcagcagagaggggctcaccgccttggcgtacaatgcctcactgaccccgactggccgtcgtgcagtgaccgcacttgcaggtcctcctgagctggctctggtgctggatctggggctacctcctgagcagctccttgctccggcacgaggatgtactctccgtcagcaagattacagtctatcgaaatgcaatgaacatcggtggtcggagctgctcggtccacgtgcgcaggcggcggaggtcgccggtgatgtctgctccggccaaaatatggcggcaaggttcaatcaaagggtacgaggagcttcacgggatgacacagaggccatacgcgcgaggaatcggaaaatggcgaaggggtttacccggtccacgtgcgccggcgggttcttgaactccggtgagcgcgatttggcctctccggtgacgcgggccctcggttcaagcttgagtcaggctcacggtctcaccaggaagctatctgggtgcttgaatcgaacggagggggactggaaaggggttggccacggcggtggcgctcgggcggcactggcgggtcgcgaggaggtcgccggaggcaacggctggctcgggcgagtccggcgcagtacggaggag

SEQ ID NO: 5552 - DNA, 156 bp, Zea mays
  Peptide Sequence Number=SeqID_48927
atggaaattaagggaagaggaatgaaagatatgaataaagactgtaatcttgctgacggagagtacatcctcgtgccggagcaaggagctgctcaggaggtagccccagatccagcaccagagccagctcaggaggacctgcctgccactgcttag

SEQ ID NO: 5553 - DNA, 456 bp, Zea mays
  Peptide Sequence Number=SeqID_48928
atggtgacctccagtttgatggtgggggaaagcgagccgggctgcggcctctacccctccctcagcctcaaggattttcatcaccagggatggggaggggagtgtgccgagatagggtcgacccccgcgtgggcggtggcccgctccttcccttcagtgatcggggggaagggcggttgtcgtccgtggcgccgacagctgcagcgtgcctggctctcggacccgagtggcatcggagccgctctcggcgccggcttccgccacggcagctggaagagggtcttccgccgacgagatagccagggccgcccacggaccgacctccaactctacggccttctgcccgtccttgctgtggcagaaccacccgaattattccagcttaagtgcctaagtcacgcctcaggggcccggataatcgatgtcgttggtaatgaggaaatgggcaaggcctag

SEQ ID NO: 5554 - DNA, 405 bp, Zea mays
  Peptide Sequence Number=SeqID_48929
atgaggaaaaaacacggctccgtgccaaaattacatacatgttcaggcctcgacagccacaatgaacaaaaacactggcattcaaagtgccattacaaacggaactccggttccacctccgcaggtacgaacaaccccactcgatggggggggcctgcggagcaacagaagaccgacgaacggcgcgccgtcgcccgctccggcagcggcgacgacgatgacttctgctccgggaggccgaacagcggcagcgatgacctcagggcggatgccgctgccaggaggcccccgcccgtgcccaaactcaattctgtaattcagaccttgagccaaagatcagggatgttcaccttgatccctaactcgaatcctaatggccccattgacaaaattgtgtctaactaa

SEQ ID NO: 5555 - DNA, 1656 bp, Zea mays
  Peptide Sequence Number=SeqID_48930
atgccgcgcacaaagaatgcgtcggcatcagggggtggcgacgatgaggaccctcgtcgccccttcaggcaggtgaagggcaagactgtgtatctggagcagcaggaaggccgcaagaagcggcgttcggacagagaggctcgtgcagcagcagctgcacaggcagcacttggagatcagccagatgttccatcagatcagattgctttccgtgctcgtcgtctcgcctcccggtctcgctcctccactcacacctccgcttccactccgccacccactctgcctgctccagtcactcctattgctccatccacctccaccgccatacccactaccagcactacgccagcttccactgcttcccctgcccccgctcccgcttcagctccacctgtccctcctcctcgcttccgggagcgtgatgagactgaggtccgtcccctggtttcggatcctcgtctatttgatcttcagcgtgctactgcagcccgggtacgtcggttcaggtacgtacccgtggagtcttggctgccagctcagagagacccagcagcaggagttcttttcagcacacggattcaggagtcattcttcagggctcagatgtctgctcagattgcgctgcgagtgcaccgcctattggatcttccagctttcttgcttgcagccggtgctgagtctgaggcgcatctcacctatttgccaggccttctgtcctttctgactatcagcggcagatatgttgaggagtgggtccgcgtcttctatgcctctgtttggattgacccggatcatcattggatgagattccgctttgagcgcgaggatgtcacgatcactgccagtcagatccgacagctatttggattccctgagtcgactactcgccttcacagtccctgctacggcacttcagatcctccacgtcgccctcacggcggtgtggctccagggacagctcacgtcgcggctctgttccgcccgcctttcacagatgggtcgcgacgttctccagcagacttcactactacagcgaagtacttatatgagctcgtcagacggacactcctgcctaggatgggatacagggaggctaccactcatattcagctttggctccttggtgccctggtatcccactctgagtttgatgttgtggactttctgatctgtgagattgaggacaccgttctggatgggattcgtgctcgtcggcagctaccctatgctcactacttatgccacatctttgcgcagctaatccagccacctcgttttcagagcacccttgaggcctcacgccttgtgtttggatcttatcgtcctgctcctgagattccagtgccagcttatgctcctgtgtttgacactcaggccgaggatgcagcacttcgacagtttgacacccagggtacagcagctgatgatgatgatgatgatgattttgggattcctcctccgcctcctatgcctccacgctcacatgatcatgaggctgggagctctagtgctgcccctgctactcctcaggctatggaccctgctcttgcttcgattctccagactctcactcagcagcaggctcacctggcagccgagcagacccgtttatcagataggatgctctccatgtttcagaacatgcaggacaggtag

SEQ ID NO: 5556 - DNA, 240 bp, Zea mays
  Peptide Sequence Number=SeqID_48931
atggcgcaccggacagtgaacagttcactgtccggtgcacaccggacagtccggtgcggtgtccggtgtgccactaaaattcaacttcaaactctgcgctctcgggtttctgggaagctttatgctgatgggggttaccagctgagaattaggagccttgagggtaccctaattatggtccccgacaaaagaattcaaaacaataggtcaccttttaaaccacaaatagtgtttttatga

SEQ ID NO: 5557 - DNA, 1644 bp, Zea mays
  Peptide Sequence Number=SeqID_48932
atggctatgccttcctccaccacggcggcgctctcccgcctcgtcgaccgcacccgggttccggaccccacactgcaacgccatgcggttggggccgtcttccgccacctcctctccctccccgcgcccctcccagcggccgcccacgacgccacctcagccctcctcgcttcgccccaccctgcagtcgccgcgcacgctgcggcctccatcgcccgtctcaccgccacccgccccgatctcctcccctcggatgtcgccctcccgctcctcatcgcgcccctcgcggcctcaccgtcccccctgctcgcctcctgcctcgtcaaggcagtctccgcgctcgcaacctgcgccctccgctccggctctcgcttcccggcccacgaccaccccttcatccaggcgctcgcgtcgggggctgacggcgctcgagcggagctgatgcggcaggcagccgggatggttgccgaccgggtggattgggtggtcaagtttctgaggccgttcgtgatgttctccgtggtgaggaagggggacgccgcatttgccagggatttgatcggtgcattggccgcagcagccgtggcagcagggaaggctagtgtcgcgatcccggttctgaagatgctccaagacagcatgctgcatttcggccgcggggacgatcaggaagtgcggctatggcttagttccgcagagtgtttggttgatgcttatgtcgtgctactgaggaagttagctcatggtcaaatgatttgcagtggtatactcctgcatggtgtgatattatggtgttattacatcatttctttgcctacatatgatgctcaagcaagtagtgcgacattgatggaaacactcctatcacaatattcatttcatcaaaaatttctgggaattgattcaacaatttttgggttatcaaaacatttattcttggtgcaaaaggatcttggattatgctatatacctgagatttctgttgtccttagctctctttcttactctctcactgggctagagtttgaacatgaacagctagctgccttgaaacttctgagctttttgattgattggaaatatgaaaatgtgcttgacagtaaagaacaaacacatcacgtcagtgtggagcttctctgtgttctggcagttatcaaccttaccatttcaccatccaaatctgtgaaagcagtggcatatcatgttctgtcaaggttcagcttgtttgttttagacttgccagcttctcattcatcagaggaacaagatatttcaacgagttaccacataagcaaacctgcacttcttcttcctaaacttttgcatcatctatggtccaagcgtggtggggacactgagaacccgaacgtcaccggtggcgacacgctcacggacgaagtgcaggtcgatctccacgtgcttcgtgtgtcgatgctgcacgagattggagaggtagaccacgctggtgttgtcgtagtagatgaggacgacacactagagggggttgtggagctcctggagaagttggcgcaaccaggaggcctctgccacaccgttggccacagcgcggtactcggcctccgcgctggagcaggagacgacgagttgccgcttggcggcccaggagacgagtttggtgcttaa

SEQ ID NO: 5558 - DNA, 1239 bp, Zea mays
  Peptide Sequence Number=SeqID_48933
atgtcgaatgcactgcctcgcggaaccgcacctagccgagctccaccctgtggaactgcccctgctcggctgaaactagctagccacaagcaacctcgaggcatcgatgccaagggccagctccgcccaaccacgcccgacctcggtagtcgcgccagcgccgagcacctccctggccgttgcggtgaactccaccccatgaatccgcccccagtcgagcttcccctgtggaacctcctcttctcaggctgcggctcgaccagccgcgagccccgccgcccgaacagccctggccctgccagcgacttgctctggcggcggcgcatcgggagagggggggggggagagggtgcaccggctagggttgccgcccgagttgcccgtattctgtgcgaccaagttccggtgtctactcctcaagttgttgttaacatagctcttgttattggggcactggccttgattgttccgccaactgctcatttggtagtatcttcggtatcagattttcttttaaaatggttgcttcaatacgagcatgagcacaagcaatgcccaggaaagaggtgtcaagatgtcactgatccaatgccatccttgaaagggaaatgtgcccttgggccatttctaagtattttggtgattgagtgccaacgcaagtgcttttgtgttgatctatgcaatgtggtggacaaagtgcaaatcatgtcaaaaggaaaagatcaattggaaatgtcttggctcgagcagccaagactctgctcagtctgggagcaccggactgtccggtggtgcaccggacagtgtccggtgcgccaggctggctcgtgcgaactcgctactctcgggatttcatcggcggcgtacggctataattcaccggactgtccgatgcgcaccggactgtccggtgagccaacggtcggccgggccaacggttggctgcgcgatctgcgcaagacacgtggccgagccaacggtcgggagggggcaccagacagtgtccggtgcgccaacggctcccaggcgccaacggtcgactacatcacagaaggaaagaaatccgcaccggacagtgtccggtgtgcaccggactgtccggtgcgccaggcgacagaaggcaagatttgccttctaggaatgctctcaacggctcctagctgccttggggctataaaagggacccctaggcgcatggaggagtacaccaagtattctcaaagcattcctaagcactaa

SEQ ID NO: 5559 - DNA, 303 bp, Zea mays
  Peptide Sequence Number=SeqID_48934
atgaactccatcctcggcgatattcataaggggccatacagggtggaagacacattaagggattcggattgggtgttggcaatgcaagaggaactcaacaacttcacgaggaatgaggatgtcaagcccatcaagacacccatgggaaccaatgggcatctcgacctcgacacgggaggttcggccctcgaaggcctagtccccattgaggagtccactaaggacgggtctctttcaaccctttccctctctcaaccgatccccaagatcggcgagctcttcttcttctcaaggatcacttaa

SEQ ID NO: 5560 - DNA, 693 bp, Zea mays
  Peptide Sequence Number=SeqID_48935
atgctcgaaacaaaaggaaaagaaacgcagctttacaacacggcgagggtgtgtttaggccccggcggccgcaggaaacgcacgctacaagacaatccgatcctgcaggctcagatcttgacggctgaagggagcagcagcacccttggcatcgacgacaacttcggcaagggccgacctagcctcggacggcgacgcggtccgaggatctccactctggaggacgacgtcatcaccacgcccgggccaatgccgctagggtcttctccgggaatccggcccgagcaggcggctcggccggtcaccccggggcctcggccagttaccttccaaggacgtcaatccggcccgagcaggcggctcggccggtcaccccggggcctcggccagctgccctccaaggacgtcagcccgacccgaggccttggctggtcaattccggcgtcggtcccgctaacggacgacccggccaggctccggccaaccaggttttcctttcgagccaactccacctctgttcatgttgacgccgctacccctggcctcagctcaccgaagagcggccgaggggttcctttaactaagttagagaagcctcggacaacaaggccgaccgagccgagggactcctacgccaccgggatacggatacctcactcgtcacctgtacacgaggcgattcacgcttggtga

SEQ ID NO: 5561 - DNA, 780 bp, Zea mays
  Peptide Sequence Number=SeqID_48936
atggtgggggaaagcgagccgtgctgcgatcttggtcccaccctcagcttcaaggatgttcatcatcctggctggggtggaggccgggctgagccggagctctacctcccgcgcgggctcgtgggtcaccctctcccgcggcgttcgagggagagggcgctcgctggccctgcgggcgggtcggacttcgacaacgcggggccggtcgacagcaggcgtcgtcagccccagcgcgtcgggctcgtcgggttggcccccggtgccccctcccgcgcggaaggtggctgccgcgtcgtgtgcacgggaggaccgcccaagatgtcacgcgctgctagggcggcgttcgtgttctggggcggtcccgcctttgcaccggtacagtgcccccgcggggaggtcggtgccctgctcgtccgggaggatccgagcggggatctgccggcgggctggcggcccctgtcgtcggtgccgaggcggaggcggctcgagaagtccccgtcgccgacaggatcaccgccaccatccgcgctccgggcctccggctctttgtacttgtcctcgcccctcgagtgtcggcgtgggcgagggcaaggttgcagcggcgttcgccctgaggccatcgccgctgcagtttggccacccgtagagggggtcgttgtcgctgctgctggagcgggcgaaggcgagccgttcgtcggtcttctgttgctccgcaggcctctccaccgtcgagtggggttgttcgtacctgcggaggcggaaccggagttccgtttgtaa

SEQ ID NO: 5562 - DNA, 786 bp, Zea mays
  Peptide Sequence Number=SeqID_48937
atggctgaaaggtaccaactcccgcggagttgcgttcccccaacgacgaggcggaaagacggcggatctcccccatccggaggcttggaaggtggaaagacacgatgcataagggagcgcgaagacatggtcgccttccaagggggtcaccctccttttaagggcggttctccctactcgcgtccccagccgtcactggctgagtcttctccaacacactccaaggtcctcccctacggtaccctaggacatttccgagaccagcaggaacgatcttgtaacagaatcccatcagagggaggcatcgagccctcggaccccgtcgctagggaaccgagtctggcagaacacccgcagagactcgggggctgctctcgcaaacctggctccggccgaaccgttgacagcgtcaacataccagcccgagaacttgggacccgaccgtacacccgggctacggccagctcgcatgagggaacgaccagaccagccgaagcattacgcgaggcattaagacctcgaaggagtgaaaccactcctccgatgcctcgggggctacacccggcgggtgcgctcgcgcgcccccaccggaacaaaacgcaaccgagaaaggctggtccccttgcaaaaaaagtgcgacaaaagcctccaagcgagtgcaaacactcccttcgaggctcggggctactgtcggggaccataattaggggtaccctcaaggctcctaattctcagctggtaacccccatcagcacaaagctgcaaaggcctgatgggtgcgattaa

SEQ ID NO: 5563 - DNA, 639 bp, Zea mays
  Peptide Sequence Number=SeqID_48938
atggatgtccttacaaccaagagacagtgcagcgaagtccaagccaggatccacaaccttatccagcaagagaaagaacgcctccagacccttgagcaacagatttcagaattacaagcccaccaggagccatctcacccttcgcactgtagagcagggcagggcaacttcggcgaggtcgttgtacagtcattgcacccacgatcccccagcgtccctccaagaggtgtaccaactcttagagaaatatgcaaggtgctaaaggttcaacacaaaccaataaaaagatcaaagttagggttcaaaagaaaggagcaaaagaaaccgaagagaaccctgatctggcgcaccggactgtccggtgtgccatcggacagtgtccggtgcctaaggccgtacgacttcaaacttgccacctttgggtttctggagagccgctccgctataattcatcggactgtccggtgtgccagcggcgcaacgactatcgagcgcaacagtcaactccaacggtcgcctgcaaacatgaacagtgcacagacagttcgtgtagagtcagagcagcgccagaaggcgcaccggacagtgaacagtgcctgtccggtgtggcaccggactgttcggtgccccaagatgtaa

SEQ ID NO: 5564 - DNA, 300 bp, Zea mays
  Peptide Sequence Number=SeqID_48939
atggaggtggtggagcaaaaccttgtgcggaagatggattcgaagtggaagacttctgtggcaccaaatgtgttcatggtgttgaaggacgacatcattgatcacgacttgatggctcgtgcagaagcacgaggcgattactcacggatttatacagatcgcgtccctgcaaatccggagcttctatcgtctagccgcccgagctttcgccgaatgccaagcccttcaggtgtttacaactgcctcgcccgacacatccgggctttgtcggcgcttaactcggacgtcagtctccattaa

SEQ ID NO: 5565 - DNA, 423 bp, Zea mays
  Peptide Sequence Number=SeqID_48940
atggacgcccccgcactggccgcatccgccatggaagccctcgccgcgcccgcccctggccccgaccccgtccgccgtggagtggatttggaatttgaccccgctgtcgtgctcgcacgtatggtgtacatttctgcccccgccagtgaactctacgattttctgtatcgaaatttgttcgagtctctggagcgtgaatcatgtgttcttttccggcttaccatgtacgcgaggtgcacgaagaaaaactttggccgttaccacgtgagcgagccaccagttgagcatttgcgcgattcactgtacaagacagagagggatgtcatgaaggtgattagtccagctatgtttggtagtgaagggcgatgtccagagagtaagaatgaggcgacacagtatggactcgatatgactgagcaataa

SEQ ID NO: 5566 - DNA, 648 bp, Zea mays
  Peptide Sequence Number=SeqID_48941
atggccctcatgcttcagcattctggtatctcagcacctccggttcagtctgctccgccttcttcgcttcacgctccagtggtgccttcgatcttgtctgcaccccctgctgttacctctctgctccggccggtcaccttggcgttcacttctccggttctcagctctgtctgcccgcagccgccagtgccaccagcatctgctgttaccactaccgctgtggcagtatctgtgaccgctcctgctccggtagctcctgcagcgcggcctgcgtccgagtcagtaccagctccagcttctaccgcagatcctggatccgagactgactctgaccctccgtcggcggctcggactcgggctcagccccagaagacgacgaactcccgcttcgcccgaccccagggctcagactccgccctggcctcagcctacggtctccgcctcgcccgacccaggggctcggactcgacctcggccacggaagacagactcgacctcggcttcggaggagcttccacatcgcccaacctagggcgtagaccggccacgtcaacaggaggcaccatcatcaccctaccccgagctgactcgggccacggggaacaagaccggcgtcccatctggctcgctccaccagatagccaatga

SEQ ID NO: 5567 - DNA, 774 bp, Zea mays
  Peptide Sequence Number=SeqID_48942
atgggtcggcgcgaggccgagcgcaaaggggggagaaaggtggccggagacgagcgtgagagaggtggaaatcccgcggccttcgtgttcgtcccgcgcccaggtcggcctgagtcagcttggggtagggtaatgatggcgcctcccgtcgacgtggctggtctgcgccctaggttgggcgatgtggaggctcctccgaggtcgagtttgtcttccgtggccgtggtcgagtccgagcccctgggtcgggcgaggcggagaccgtcggctgaggccagggctgagtccgagccctggggtcgggcgaagcggagttcgtcgtcttccggggctgagcccaagttcgagccctgggtcgggcggagcggagttcgtcgtcttccggggctgagcccaagtccgagccctgggtcgggcggagcggagttcgccgtcttcaggggcttagcccgagtccgagccctgggtcgggcggagcggagttcgtcgtcttccggggctgagcccaagtccgagccctgggtcgggcggagcggagttcgtcgtcttctggggcttagcctgagtccgagccctgggtcgggcggagcggagcttcctatggtgcctgaggtcgggcctgactgcctgtcagccttactctgtcaagtggcactgcagtcggagcggcgcaggcgacgctgtctttctgtcaggccgctttatgctgatgggggttaccagctgagaattaggagccttgagggtacccctaattatggtccccgacagtag

SEQ ID NO: 5568 - DNA, 948 bp, Zea mays
  Peptide Sequence Number=SeqID_48943
atggctgctgctgcagaggtcgctggcgagtcacccggaactcgtcgccctgcgggctccccggagtccctcggctcggtcagccttgtcgtccgaggcttctcttgcttagttaaaggaacccctcgaccgctcttcgatgagctgaggccaggggtagcggtgttagcacgggcagaggtagagttggctcgaaaagaagacttggtcggccggagcctagccgggtcgtccgttagcgggaccgacgccggagttgatctgccgaggcctcgggccgggctgatgtcttcgggggacagctggccgaggcctcggggtggccagccgagccgcctgctcgggccggattctcggagaagacccgggcggcgatggcccgggcgtgatgacgaagtcgtccttcggagtggtgaccctcggacagcgtcgccgtctgaggccaggtcagacctcgccgaaggtgtagctgacgccgaggaggagctttcgaacgtgaagacttgttcggtccgcggaatcacttatccgagcgtgagttacttatcacagaaggtgatgagtgagaactttggcgatgacaagcggcccgtcctaggggtgtgtgtagcccccgggtgtctccaacaagggctcggggtgctgcgcgatggtcgcaagcccacgagtgtacggggtctaccagtttcgattaggcgtgaccccgcttcgctcctcctcgacgcgcagtgcctcaccctcgggggccgagggtacctcgggccgaaccgtgggtaccttggaccgagccgagggtacctcgggctgggccgagggtgcctcgggctcgggcgtgtcgtcgatcttgacggagggttgatgcaggtctcgggagaaggcttccgagggaaccgttattcgccccgaggcggtacagaggcaggcctctttcgccgaggtgcgggatga

SEQ ID NO: 5569 - DNA, 1536 bp, Zea mays
  Peptide Sequence Number=SeqID_48944
atggagacgcaagtggcggctccgccacaccagcagcagcaacagcagcagaaggcggccaacctggcgcgcaccttcaccaagctgctccgccgcaagcgcgccgaggccgcggcgcagggcggcgcgcccgaggcgcccgcttctgtggctccaggagacgcgctggaggaggagcggacggagcctccgcccgccatcccgtccctcagcaagctcaagctgtcggggaacctcgccgccgcctactccttcgacgccttcttccgcaacgccgccgagaagaaggcggcggcggcgggagggggagcggtccggcagcctgcgggtgcgggggaggtgacgctggaggccgcggcggatgcgctgctggccaacctcttcgcgggggtctcggcggtgaaggcggcgtacgcgcagctgcagctcgcgcagttcccctacgacgcggaggcgatccagtccgcggacgccgccgtggtcgccgagctgacgaggctctccgacaccaagcggaggtacctgagggaccccgccgccgcggcccggggcgcggcggcggcgggccacaccgcgctcgcggcgcacgccgaggagcagcgccacctcctcaagacgtaccagatcacggcgcgcaagctggagtcggacctccgggccagggacgccgaggccgagcgcgccaggagctccctgaccggcgagctccgcgccgagcgcgccctggaggcgcggctccacccggggcggaccctggcgtcgctggacgagctccacctctcgggcctgaacccgacccacttcctgaccgcgctgcggcacacggtgaagtcgatccggtccttctccaggtcgatgctgagctcgatgcagtccgccgggtgggatctgggcgcggcggccgccgccgtgcacccgggcgtcccgctccggcgcgccggcgacgccaagttcgtgttcgagtcgtacgtggcgatgaagatgttcgccaacttccaccgccgcgacttcaacttcagcttcctgggcgagcgggagttctacgagcggcggcgcttcttcgaggagttcacggagctgaaggcggagccggcgagcgcgttcctggacgcgaggagcccgcggtggggcgggctcggcaagttcctgcgcgccaagtacctgtcgctggtgcacgcgcggatggagacggccttcttcgggcggctggagcagcgcggcatcgtgagcgccgggcccgggttcccggagagctcgtggttcgcggacttcgcggagatggcgcgccgcgtgtggctgctgcactgcctcttcttcgcgttcgacggcggcgccgaggaggacggcgcgtccatcttccaggtgcgcacgggggcgcgcttctcggaggtgtacatggagagcgccagcgacgggagcgccggcgacgacgccgaggaccgcgtggtcggcttcaccgttctgccggggttcagagtcgggcggacactgatccagtgccgcgtctacctgtccaagccggggcggcggccgtga

SEQ ID NO: 5570 - DNA, 1035 bp, Zea mays
  Peptide Sequence Number=SeqID_48945
atggcggccaacgtgtgcgcgcggtccgcggctcgcccagcgtggcgtgcccgcggcgcgtggccccagcgtggtctcttcgtccccgcgcgatggcgcgactgcctagccttggcgtgtggcccccctgccccgaccctgcgctcgctcggtggcccagcgcggcacgacctcacccctcccctcgcgccccctggccccatccgtggcttgcccgtggtggcgcgcgaccgaatctcgcggcgcggtgcgcgtcccacgcagctcggcaggcccggcgcggccgtccgcgatgcgcgcagcgcgactgctcacggtcggcccccggcgcggcctgctcgtggcgtgcgtgaaagtgcattcatcccttttgtgagttttggtgatttggataacaacacatttaaaggtctaacaaagaggattagggttgaaagagacccggctctttgtgggcgcctcaacgaggaagtagggcaccttggtgatgttgatcctagggcaatagatcttgccatgagaatcgccgaaaggatgttcctcaaaatgaaggaagatgaggcgaagaacaaaattgaagaagaaaatgatcgatggagaccaaacgacgaatccacctcttcacaaggttcatctttcaaatccacctctcatatgtgctttattgctaatgggagtgacagtgaaagcaaaagtgaggatgaggaggagcaagaaagtgatagtgaagatgaggacgatcttcaacaattcttcgctcggctaagcaagaaacatcggatgagcttgctcaaactcatgaaaagagcggaagaacaaaaagaaatgcttcataagcaagaagacttcctcatcagaaaaatggaagacttagagaagttgaccaaagagcatgagaagctaaagtgctctcatgatgatttggtccaaaggtatgaagacatttcaattgagcaaattaaagttccacataggaaaaatgaagcacttgagaatgaacttaaaagattttaccttgctttggaaaggatctaa

SEQ ID NO: 5571 - DNA, 660 bp, Zea mays
  Peptide Sequence Number=SeqID_48946
atgggaggaggcacgctggagtacctgtcggatctgctaggcggcggcggcggccggcgccggtacaagaagaggaagcagttccagacggtggagctcaaggtgcgcatggactgcgacggctgcgagatgaaagtcaggaacgcgctctccagcatgaaaggggtgcactccgtggagatcaaccgcaagcagtacaaggtgacggtgcaggggtacgttgagccgcacaaggtggtgaagcgggtgcaggccacggggaagaaggccgagatctggccctacgtgccctacagcctcgtcgcgcacccttacgccgcgccggcctacgacaagaaggcgccgccgggctacgtgcgcagggtcgacgccgtcatgcccgtctcctccacctacggcgggcccgcggcggcggccgggccgccgcaggaggagcggctcgccaccatgttcagcgacgacaaccccaacgcgtgctccgtcatcatcactacagtaaaacgatacaagtccgacggctccattatgtccgacggctgcctaggagaccgtcggacatacgcttatgtccgatggccgggagaatatccgagggctgggaggcggaccgtcggacatacgcttatgtccgacggctgtcagataagccgtcggacataa

SEQ ID NO: 5572 - DNA, 1362 bp, Zea mays
  Peptide Sequence Number=SeqID_48947
atggggagcacccgcggttctttcgtcttgtcatcgttggaggaacgcaacttcgcggaagttggtacctttcagccatcgctcggcttcaaggattttcatcaggcagcccggctgcatcccctcgccggtgggcgggctgagccggagctctacctcccgcacgggctcgtgggccaccttctcctacagcatttaggggagaaggcgctcaccggcctagcggagggggcagacttcgacaatgcggggtcgatcgaccgcaagcgtcgtcagctccagcgtgtctggttcgctggctcagctggctctggcgcagcttccggtgccacctcccaccgcgttgcgccgcgcgcactgggggaccgcccaagacgtcgcgcgctgctagggcggcgttcgtgttcttgggatgtcctgcccttgctccggtacgacgcctctacgcggaggtcggtgctcgcccgtccgggaggacccgagcggggatttgccggtgggcagacggctgccgtcgtcggtgctgaggtggtggcggcggaagaagtcctcgtcgccgacgagatcgccgccaccatccgcgctccgggcctccggctctttggctttgatagcttgtcctcgcccctcgagtggggacgtgggcgagggccttatcgcagcagtgtctgccctgaggtcatcgctgctgctgtttggccgcccggagcggaggtcgttgtcgctgccgccggagcgggcggcggtgagccacctggggttttgtcgccccacaggcctccaatgtggggaattgagtctctcggcttggtcagccttgctgcccgaggcttctcttgcttagttaaagaaaccctcggccgctctgcgatgagccggagccggaggcagcggtgtcagcatggacagaggcagagttggctcgaaaagaggcttcgttggctggagcctggccgggccgtccactggcgggaccaacgccggagtcgggttgccgaggccatgagccaggctgatgtcctcggaggacagctggctgaggctacggagcggccagttgagtcgtctgctcgggccggctacggagcggtgctgacatctttcttcgaggtggagatcctccgaccgtgttgccgtccgaggccgggtcggattccgccgaaggtggagtcggtgccgagggtgctgctgctccccctactgatgtctgatcctgcaggaacagtttatctgtacgttgttgtagacctcgccttgactgttagccagcttgtacgttccgggcttcaaaatcttggcgatgatgaatggcccttcccagggaggcgtgagcttgtgacgccctcgggcgtcttgtcgtag

SEQ ID NO: 5573 - DNA, 801 bp, Zea mays
  Peptide Sequence Number=SeqID_48948
atgcaggcggcatgcaactgcaccaagggggcgcaccctttcgacttcgacgcgtccaccatggggcccaggcccacacgtcatgtaaacggcgcgctggttactacgtgcgagaaactgcaccgccacttgcgccagtaccgtgccttctcgactgcggaaccggtgccgcaactcgaggcaaccctacgcatggcccaacagttccaaccgagcacatcggtcacgggtcggtccgccgcgggagaagacgcgacggtcgatatggccaaaagtgggccggcagtaatggcagcggcaggcgggcagaagcaacagtcaagtcatccgcaggctcacgtcccctcctgggatagcgagagagccctctcccacggcgtgaagacgacacgcccgtgttccgttcctcgaatggctcgcgcacgcacaacggccgccccgccaaccactcgtcctgtcgcattaactctgcggcagaacaggcgacacctttggcaggcgaagcgggcgacacttcacctccgccattatgaccgcgtcaaaaaaggggatactccgaaagggatccttctccgcgaaggaagcgggccccaagccctcctactaattagaggttcgaaggctggccccttggaagggttcgacagccgcctcagagcactcgggctccgcgcccactactggtcagaggttcgaaggctggcccctcggaagggttcgacagccgcctcaggccactcgggctccgcgcccactactgatcagaggttcgaaggctggcccctcagaagggttcgatag

SEQ ID NO: 5574 - DNA, 996 bp, Zea mays
  Peptide Sequence Number=SeqID_48949
atgaaggtgcacaagaagcatatatgtggaccttcctacatcaaagaacatgatatgtttgctgtcgacttcttccacaagatcactgggctcaccactgagttcgttgtcgtcaacacccctttacgcgttgtagaggtcattgcctatctgctggcggggctcccaatcgattacgacccattcgttgcctacataacgatcaaggctgagctactcttcctcgacgacatgttcgtgcacctagttgtgtacaacttcaacacatggccatattacagatgcaacacactgcctttgccaacttcttggatcatgacaacccctctcatggtagtgtctttggtgaccatggccacggtagacactctcatggtgattcttgcggcaataaccctcgtcctcaatgctagatttgtggcaagcttggccacacaccaccatcaaagcccagccgcggacgcgcgggctcattcttcttcgttcactcaaaccgcccctgcccctgcccgaccgtcgccctgccggagcgccgccctgcccgaggccgccgtcgaggccgcccccgagccgccccgcccgaggccgccgtcgaggccgcccctgcccgacgcccgcgcgcctagccgccgtcgaggccgcccccgccccgcccgaggccgccgtcgaggccgcccccggcccgcgctgcgccgccgcccctgcccaacgcccgcgcgcctagccacgccgccgccccggcccgcgctgcgccgccgcccctgcccgacgccccgcgcgcctagccgcgccgccgcccctgcccgagctgcgccgccgctgcgccacgcggccaccgcccccggccgagcgcgcgacgccgccccgacccagttaattcccgtcggcctggggaaccgacgggaattaactaataactcccgtcggcccgccgccgacggggataaacgtatccccgacaagggacgcctggcggctgaaaaccgacgggaataa

SEQ ID NO: 5575 - DNA, 1731 bp, Zea mays
  Peptide Sequence Number=SeqID_48950
atgaagagtagagggtctctgcgttcaggcaaacctgctaagtcgccaaccaactcgtcgtcctgtgccgccgcgtcctcgtcgtccgggcgtcggttgtggaggtgggcatcggaggcggggcgtgtgcatcgcgcgtggggcagatgtgtcaatgttgtttgggcagagacgaagacgagcgagggcgatggtggaagcgaaggcgagagaggcgggcgggcatcggaggcgggacacgggcatcgcgtgaaggtgggcagcgatgttttggaatgctccgcttccgccaaaacctctaaacccttctcgattctcttccgccgccacctctgctcctcaccaccggcaacgccaccgccaacatcaccgcctccagcggtggtatcttctgaccttccggctgtccacgtcaatgaagtttgcccaggatgcgggatcgccatgcaatcctcggaccccgagctcccggggttcttcttgctcccctccgcaaaatcccccaactaccgcgcgcgcctcgcgcctgtcaccgccgacgacacccgaatctccgcctccctcaagtctggtcacctccgggaggatatacagccgtcgggtggcgacaagccggccgcggcggcggctgagatggcggaggccaagggagaaggcaaggttttggtgtgcgcgcgatgccactcactgcgccactacggccgcgtcaagcacccggacgccgagcgcctcctcccggacttcgacttcgttgccgccgtcggcccgcgcctcgcgtcgccttccggggccaggtcgctcgtgctgctcctggcggacgcctctgacttcgatgggtcgttcccgcgcgccgtcgcgcgattggttgccgcagccggcgaggcccatcgcgcggactggaagcacggggccccggccaacctcccacgcgcgttgctcgtggtcaccaagctcgacctgctccccacgccatcgctgtcccccgacgatgtgcatgcgtgggcgcactctcgcgctcgcgccggtgcgggtgccgaccttcggctcgctggggtgcacttggttagcgccacgcgcggatggggcgtccgcgacctgctcgaacatgtgcgcgagctcgcggggacgcgcggcaatgtctgggccgtgggtgcgcggaatgttggcaagtcaacgctcctcaatgcgattgccagatgctgtggcatagtcgggcgaccgaccttgacggaggctccagttccgggaacgacccttgacgtgattaagcttgacggcgttcttggcgctcaagcaaagctgtttgacactcctggtcttctccatgggcatcagttgacatctagactgacgagcgaggagatgaagttggttcaacctcccataggccaggagcgggtaaaggagcttggtaaatgggtgaggaaacagttcaaagtttctgggaacagttgggatacaaactctaaggatatagccatcgctggtcttggttggtttggaattgggctgaaaggagaggcagtgttaggattatggacatatgatggtgttgatgtcatctccaggagctccttagtccatgagagggcttcagtttttgaggaagctggtttcacagtttcacagattgtttctaaggcagatagcatgaccaataagctgaagagcaccaagaagccaaaaaaggagagaatgaaacgtacttcccccacagagccggaagcttga

SEQ ID NO: 5576 - DNA, 573 bp, Zea mays
  Peptide Sequence Number=SeqID_48951
atggggccgcgcgtggcgcggaagaggtcgtcgtggccgcacgaggagcagggcgaagtgaggggtagggtggcgcaccgccttcgagggaagacggttgaggaggtgggtggcagtgtgcagggcctctgcccagtagctggcagggagagacgcctggaagaggaggcagcagagcatattggtggtggtgcggatcatacgttcggctcggccgttctgtgcagaggtgtaggggcacgagagtcgcaactggacgccatgagtgaggaagaaagagcgagaggcgttgttatcgaactcgcggccattatcacactgcagagcacggaccgggcgacgaaactgagtggatacccaggtgaagaagtgtgcgagggtggtgaatgtgtccgacttcaaccgaagcgggaaagtccagagaaaatgggaaaaatcatccaaaatcatcaaatagtatttataaccggaaagactgagtacaggggaggtccaaagatcacagtgaaccaggtcaaaagcctgctcagcccgagaagaagtagtaaatgggagacgagtatgtcggcctaa

SEQ ID NO: 5577 - DNA, 420 bp, Zea mays
  Peptide Sequence Number=SeqID_48952
atggagatattgcatttgccagctcacttgaaacatttggaggaggccacaatgatccaattagtgttgcttttggtgaaaataataaacggtgccaaggactttgccaatttgaagctcccaatattcatagcacgtccagatcgagttgaagatggcacttcaccaaaaaggtgtcctagaggcagaactagatcaggcaacgagaagagtgttccaggacaggatggcgatgactatggaaaggcaacgttcggcatgtccgaagcttccatggatcgtctgtttgctcatgcgtccaaacagtgggaaactgtgaaacgaagtgtggacaaccatgttgatgggcaggttagtgaacctgaaacctctactaaactgattaggagaaattactctggaaacttatctcttaactga

SEQ ID NO: 5578 - DNA, 432 bp, Zea mays
  Peptide Sequence Number=SeqID_48953
atgacggtgctgccccagaccggtatgcacggtggcggtgcggctccaggcctcctcgcacaacggtggcgcggtctcctcgcgggagagtggtgcgactccaggcctcgcgctcctggcggctctacgaccaagcaggtcatggaattaccactagacgcgcagagcagcggaagccgtctcgatgtagacgaacgcgtcgagcagtgccgtgcagtcgccggcgtccttcaagtcctcgcgcggacatcagtcgcgctagtcgaggacgcacattgtgccaaggtcgttccacctagagtcgttctatctcgggagcgtcttgaggagtacatggtctcctgtgtaaggaccctaactcatagggccttaggacctgtcctgcatgtggggcttggccccaggagtagggccccaaaaatgctaggataa

SEQ ID NO: 5579 - DNA, 360 bp, Zea mays
  Peptide Sequence Number=SeqID_48954
atggcgcggaggagctcgtcgcggcgagaggccaggaaggccgcgagcgtggggagcaggtgcgaggagatggcgagcaccagcgcctgcgcggcgggggagaggaaggagtgcggcggcggcggcggcgtctggtgcgaccacgccgcgcgcggtgaggtggagcaggagcgaatcgagcgggaccaaggagcggttgccagcgcgcggagaactgcgtacggaagggggcagagggagctaggttgctcgcgcggacggggaaggggcggacgggaggcgacgcacgtacgacgcacgaaaaacatagatgtgggatggacggtggagattgagggatggcagaacggcagaacgtaa

SEQ ID NO: 5580 - DNA, 81 bp, Zea mays
  Peptide Sequence Number=SeqID_48955
atgatgtatcaagaaaaggagaaaaggctcctattcttaactcttgctcttatctatagtagcaagggtggtaacaactga

SEQ ID NO: 5581 - DNA, 297 bp, Zea mays
  Peptide Sequence Number=SeqID_48956
atgcaagatgttgcacgacgtgtacttttgcagtactgctcattgttcagtggggtagctgacggcctcgacctgaagtactaccctcgccgtccgaccggcagtgctggaggtgtgattgtctcgcccgttggtgagggcaatcataggctgaacaacatggtcaacctggtcgccgtgctcaacacagagctggaccagtcccttgacgtgttgggcaagatgtctgagaacaggcgtagaggtggaagacgtgctcatcaggagcagcaggcaccccaggaggaggcagcctag

SEQ ID NO: 5582 - DNA, 2178 bp, Zea mays
  Peptide Sequence Number=SeqID_48957
atgaccgtggataagcaaaggcaaaaggctcaagcaaaagccatcaagcaaaaaatctccaacacctatatcaaaaaggcggttactgaccagcaggccccacgggctcggcccccctcctcccccgaggccccgagttcgctgcgcttccgccttccgggtaggctccctcctatggatctccgccgcctcgcggtgtttgcggccgccctcgccgccgggtggtggtcccgcggcgcggaggcgtcgatccacacctacgaccgggagcccttccgcgaggtgggcaacgccttcctcctctccggcggcagcgagggcatcgtcgccgacggggcagaccccgccgcccccgcatcctccttcatcaaaggggttgctcgtgatgctttggatatttggactcgggctgaggagctggatgcagacggggatgctatcctatttgaagttgtggacagggataacatcgggggatctgcctatggcggacagaggtccatatgttgtaccccagatcttgctaaactagagggctgcaagcaaggggaagtaatcaggaggccatcctctgatgatccagattggcccttcgtgctagacacacacttcagtgctaatcacctttcagtgaagttagaagatgagccagtgcgcattacaaagacaggcatgtacaacttgttcttcatatcctgtgatccaaaactgagaggccttactatgagtggcaagactatctggaagaatcctggtgggtatctaccgggacgaatggcgcctttgatgaaattttatgttctcatgtcgctggcgtatctgttggtaatgattgtttggtttagccagtacgtaaggttctggagggatatattgccaatacagaattggatcactctaatcattgcacttggtctgtttgagatgacactatggtactttgagtacttgaacttcaacagcagtggtgtgaggccagttggaatcacaacttgggtggtcactgttggagctatcagaaaaacagtttcacgtctactcatcctttctatctcaatgggttatggtgttgttcgtccaactttgggaggtctcacttccaaggtgttgctactcggacttacatatttcctggcgtctgagttgctggacattgcagaaaatgttggaacaattaatgatatatcaggcaaagcaaggcttttcctggtccttcctgatgcatttttggatgcttttctcatactctggattttcacttctctttcccgcacactagagaagctacaggcaaggaggagttctgtgaaattggatatatacagaaagttcacaaatgcattggctgtttctgtgatagcttcagttgcctggattggttatgagtgcggcaagttgcggcagcggcgcggctgtaggcagcggcttgccgtcttcaggctgtggcacatggcttcttggcgcggtgtcaagctcagcaagtggcagcagtggcgcggctgcaggctgcaggctgcagtccgctgttacctggcacaacgacttgcatcgatattgcgcattgaacaacacacgacgcatgtggcggcaaggccttcggaagggttgtccgatcctccactccagttcaccgtcctgatccatagccatgtggacaacaaggacatgtctggttgggtggcgctgtctccactggaactcgcggtagctcaggccgtaggactggtgagttaccacgtcttggcctttgcagcctggacgaggttgttcccatgggatccaggtagctgcacacgtgtaggtccaatgcgcagaggcgaagtcatcgttagcgtcatcgttaggttgcagctcgaggacgagttgcatgtccaggtctatttcaaagcgacagaccccttcagtgagaggtggcagagcgcatggatcataactgccttctgggatgtccttgcgtttgtgttgcttcttgtgatttgttatctgtgggcaccttcccaaagctcgcaaagatatgcatattctggtgaagctgctgacgatgacgatgaggaatctcaatctctgacgaaaggagatggtgaagtagggatggtaaaaattgacaaggacagaaatgctggtgtcagcagtgctttcggcttagaagatgaggctgaggaggacaagcgggaatag

SEQ ID NO: 5583 - DNA, 312 bp, Zea mays
  Peptide Sequence Number=SeqID_48958
atgatgtcctcggggaacagctggccgaggcctcggggtggccggccgagccgtctgctcgagccggattcctggagaagaccctggcggcgatggcccgggtgtggtgctgatgtcgtccttcagagtggagatcctccaaccgcgtcgccgtccgaggctaggtcggacctcgccgaagatcattgggtttgtgtgttggttatagatgatctggatcactgttgtgtgaaaaagttcagtgagaataccggcggtgaggcaatgccggtgacatggggatgctggacccgcaatagcctcgagccataa

SEQ ID NO: 5584 - DNA, 513 bp, Zea mays
  Peptide Sequence Number=SeqID_48959
atgaaggtagtaaaccatgctagtatgtcaaagtcaggaagtgataaggccttggacgcgatggatgaactattggagatgcatgtgcgtttggagccagatataggatgtggtgatgctggtggtgcaagtactggggagggcaaccatggcgaggaggagactgttggaaacgatgaaggggaacatgtgtcacaatgtgataatgaggagcatgtgctagcacgtacactgcaacaggatggaagcagaaatattgatgcggaacatcaatctgagttgcaaatgacgcttgctggaaatgttgattttgaaggggcacgatatggggatgttagaaaggagaatagggttaaattggctagccttgctaatagaaaaagtggacggccgcccgggtctagaaacaagaattcaacgatggcccctcagtggaatgagacattgacttcaaagaaggacaaaatggttgattctagagaccatggatctgatgacgattatgtgacatga

SEQ ID NO: 5585 - DNA, 789 bp, Zea mays
  Peptide Sequence Number=SeqID_48960
atggctgaaaggtaccaacttccacgaagttgcgttcctccaacggcaaggcggaaggattgcgggcgtcccccatccgggggctcggaaggtggaaagacacagtgcataagggagcgcgaagacatggccccctttcaaggaggtcacactccttttaaaggcgactctccctacttgcgtcctcagccgtcgcgggctgagtcttctccaacacgctccaaggtcctccccctacgacacgggggctgggccccacgcgtcatgcaagctggtccagggcagaagaagccaaaccgctgcgcgcagggcatgcaactgcccaacggttacaagcattcctccactttcgcccagaccagcgggcccacacgtcatgcaaccggctcgccggttgctacatgcgagcaactgcacagcccctcgcgccactaccgcgcctccttgactgcgaaaccagtaccgcgactcgaggcaaccctgcgtatgacccagcagtgccagccaggcgcgacggtcaatacggccaaagatgggccgacagtaatggcggtggcaggcgggcaggagcagcggtcacgtcgtcagccaagcttacgtcccatccaggggcagcgagagaaccctctctcacggcgtgaagacggcgcgcccgtgttccgttcctcgaacggatcgcacatgcgcaacggccgcctcgcgaaccactcgccccgtcgcattaactccgcggtgggacaggcggcgcctcaggcaggagaagcaagcgacgcttcgccttcgccataa

SEQ ID NO: 5586 - DNA, 1236 bp, Zea mays
  Peptide Sequence Number=SeqID_48961
atggcatggaggtccagggccctcttacagagggttggccgcgcggggaaggacgggacggcgctcgcgcaaggccgctcgctccctcccgcgtggacgcttgtaaccccctactgcaagcgcacccgacctgggcgcggggctaacacgaaggccgcgggttccacctcccatgcctgtctccctccggctgcttctccccccttcgcgtttcgcctcgcgccgacccatctgggctggggcacgcgacgacaattcactcgtcggtccagggaccccccgggtttcgaaacgccgacaattatttttatgaacattttgttgatgccacataagtgctttgtttatgttgtttttgttcacttatcgattatgtttctagagccatataacataattgaggctgctgcttcaattatgtggaaggttgatcgactcccaaccaatccgaagcgattaatcattgagtctagccaagaatgcttcagtgtcgacatcccgcgctcgacagacactggagaccctccaaatactcgatgtgatggtgatcctccgcaatatagaaagagaggtgctgctgccgatgcaaaaaagctccccatacccagtgtggacgatgatgatgactttgagccccaaaaaagaagtagactcaacatcagatacaacccaggagatgttcttgcgtccattcagataatgaatgaaagacaacgtcgagctatagtcagaaaaggtttctccagcattcttgacatgacgattgatgcaattggatgtcggacacatctttgttggctcatgcagaagctagacccgagagacatgactctttgtattggtctagacaaagaacagaaaatcaccaaggaaactgtccatccgatattgggtcttccaaattcgggtggtgggaagccactaaatattgatgaagcgaatggcacggcaaaccttcggtcctccctgggcattagcaaggatgagtttgtgatttcaaagctacaggacagattgaggctaggcaacgatgatgagctgtcaattcgatgttttttatcctcttcaaccggctgcttttcgcaacggctagctagtcgatatcttacaacgaggtttttaccgacagaagaattggatcgattccctcacattgactggtgccatctcattttcaacgacctatgtgaagctacccagaaatggcacaataggagcactaataacgtctggtga

SEQ ID NO: 5587 - DNA, 702 bp, Zea mays
  Peptide Sequence Number=SeqID_48962
atgcggggcgccatcattactcgtatagtggagcgagccagatgggacgccgatcttgttccccgtagcctgagtcagctcggggtagggttgggcgaggtggaggctcctccgaggtcgaggtcgagtctgtcttccaaggtcgaggtcgagtccgagcccccgggtcggacaaggcggagaccgtcggctgaggccagggcggagtccgagccctggggtcgggcgaagcggagttcgtcgtccttcggggctgagcccgagtccgggccatggggtcgggcgaagcggagttcgtcgtcttccggtgctgagcccgagtccgagccccggggtcgggcgaagcggagttcgtcgtcttccggggccgagcccgagtccgagccctggggtcgggcgaggcggagttcgtcgtctaccagggctgagcccgagtccgagccctggggtcgggcgaagcggagttcatcgtcttccggtgctgagcccgagttcgagccctggggtcgggcgaagcggagttcgtcgtcttccggggccgagcccgagtccgagccctggggtcgggcgaggcggagttcgtcgtcttccggggctgagcccgagtctaagccctggggtcgggcgaagcggagttcgtcgtcttccggggctgagcccgagtccgagccctggggttgggcgaggcggagtttcctatga

SEQ ID NO: 5588 - DNA, 684 bp, Zea mays
  Peptide Sequence Number=SeqID_48963
atgaacaagaacacaagagacacaagatttatctcgaggttcggtcacaccaccaaggtgctaaaagttcacactcagccaataaaaagatcaagagttgggttcaacaaaagggcaaagggtcaaccgaaggcaccagaggactccaactcaaacttgccaccttcgggaatttccagaggcactcgcgctataattcaccggactgtccggtgctccaaggaagaatggcctcaggaactcgccagcttcgggagtctccaacggctagtccactataattcgccggacatgtccggtgtgcaccggactgtccggtgcaaccccggagcaacggctattcggcgccaacggctacctgcgacgcatttaatgcgcgcgcagcgcgcgcagaaggcaggcgagcccataccggcgcaccggacactgaacagttcatgtccggtgcgccaccagacatcgaggcgggcccagaagtcagaactccaacggtcagattccaacggcactggtgacgtggctggggcaccggacatgtccggtgtgcaccggactgtccggtgcgccatcgtgcagacagccccaccaacggccacttttggtggttggggctataaataccccaaccaccccaccattcattgcatccaagttttccacttctcaaccacttacaagagctag

SEQ ID NO: 5589 - DNA, 351 bp, Zea mays
  Peptide Sequence Number=SeqID_48964
atgggtgctaatggtatattgtgtgattctacccatgatgcagtcacaaaagaatgtgttgctccagggcattgggagctggctgctgctgagctgtcttctttgggcaatgattcgcctagtggccttgttcccgacagtggaaacatgtgcaaccttctccttgcactggagctacttggttgttttggttggttgctggggcaggaaggcgaggtgcctggttgttctggcgttgtacttctgctgctgctgttgctaaggaaactgcctctaatactgctactgctggtgctgacactgacactggtgctggtgaccttgcttgaactactgaggtgggtagcttga

SEQ ID NO: 5590 - DNA, 162 bp, Zea mays
  Peptide Sequence Number=SeqID_48965
atgtcgggagatcacgccgagagggagatcgtgaccggcgacaagctcgcaagctcggggagaaccctctcaagggagtccagccacaagcataaggaggaatcctcttcctccaacaagacgcatcagaagggtgacaagaagaagatgatgaagaaagtg

SEQ ID NO: 5591 - DNA, 684 bp, Zea mays
  Peptide Sequence Number=SeqID_48966
atgccccacaccaactcttctggtacctcctcctgtggcatggaaagtaccaactcctcacgctataggacaggatgtgccagccacaccggacctcccacctgcaggttgggaggagctagtcactacttggcaggacatacaagggctaggggagaaccgtctatgttcaaccccatccctttccagccaagcttcgacaccatttctctcaccagcttgtatgctgatcttcctttccccttagggtgtcttgactccgaggaggaagatggtctgggcattggcctagatttctccaggctacgcgaccccgagtccatgctgcagttccttttcacgtgcgacgaattactctccgatggctcggacggccacaacactgacgagggggtttacgacccaactcggatttgcttccacttatatcacgaggaacatgatggcgggaaccagctcagcatgcctcgggaaaatgacgtgccacccccacatgtcggggaagcaagggagccaggtgaagcccgaaccctccagggatttgaaagttccctatgcccagaaataggatctggatgtcgcctagggggggtgaatatgcaaataaaaattatcactgtaaaacttaaaaccttactctactcgaagattggatcacaacataatgaagattgcttcgagtag

SEQ ID NO: 5592 - DNA, 405 bp, Zea mays
  Peptide Sequence Number=SeqID_48967
atggggaagcctgtcccatcactcctcatgctcctcctcagccgagatgtgtacctagctattcatacatggtatcaaacattttatcaatcaacatcttttgccagtaatctcattttcacttattactcaatgcagtacaatggatcaagcagtctcattagctgcgagaagcagacgattcgaatcgagttttatccttgcaagatcagggctcaccgccttggcgtacaatgcctcactgaccccgactgccgtcgtgcagtgaccgcacttgtacccaccataaccggaatgggagaccacgtctcaggtcgcgtgaggggtaaagtctgcgggcaggttcactcaagtactaggcttaccgatttaccatatttctcggtatttgcaaatttcttttga

SEQ ID NO: 5593 - DNA, 453 bp, Zea mays
  Peptide Sequence Number=SeqID_48968
atgggcaagaacaagaagggcggaagttcgttgcaccactccagcaacaagcggaagcgcgagccaagtcccccctcggaggactttggtgactccgagtacttggaggaggagttttcctccgagtccgaggggtcgccggtctacgcctctcccccgatgtcgtccgatgactcggacgattcccaggggatcgctgccgaggtgtggacgtacatccgtgtcgtcgagcgctccgagctcgagggctcagatgagtcggagatctcctcggacgaggagaactcctccgactcgttcgaggaggagagcggtggtgatgacgacgacgagggcgacggtggcgatggaggcgacgacggcggtgatggcgacggcaagggcgacgacgacgacagtggcaaggacgacagcggcagcagcaaggacagtggcaaagcgccactggcttaa

SEQ ID NO: 5594 - DNA, 252 bp, Zea mays
  Peptide Sequence Number=SeqID_48969
atgccgaggtggatggatgagacaatagcgccgaggaaattggatgcggcggcggcggcgatgcgaggaggacggtcgtgggctcgtggcgtagtggctgggaacgaacgccgaggcaaatggatggacgacagcaccgaggcagatggggacgacggtgccgaggtagttggattttgcggcggcgtcggggcgaggaggacggtcgtcaggtcgtggcctcgtggtgggaactgggaaggaatgtattag

SEQ ID NO: 5595 - DNA, 105 bp, Zea mays
  Peptide Sequence Number=SeqID_48970
atgaccggcaaactcaaactatccttgtcagtgaccaatacccaagccaaaataactacgcagtgtggagggtatgaagaacacgattctcaacttccaaactaa

SEQ ID NO: 5596 - DNA, 813 bp, Zea mays
  Peptide Sequence Number=SeqID_48971
atgtcgcgactcgaggcgacccagcgcacgacccagcagcgccagcctggcgcgttggtcaaagcagccgaaagtgggccggcagtaatggcagtggcaggcgggcgagcgcagcagtcacgtcgtcagccaggctcacgtcccatcctgggacagcaagagagcctcctcccacggcgtgaagacagtgcacgcacaacggccgccccgccaaccactcgccccgtcgcattaactccgtggcgggacacgcggcgcctctggcgggagaagcgcgcgacgcttcgccttcaccgtaataaccgcgtcaaaaagagggaccgggaaagggggataccccgaaaaggatccttctccgcgaaggaacccgggctccgagccccccctactgatcaggggttcgaagactggccctccgaagggttcaacagtcgcctcagatcgcgtgggcccgacacccactactggtcaggggttcgaaggccagcccctcgaagggttccatggccgcctcaggctactcgggctccgcgcccattactgatcaggggttcgaaggctggcccccgaagggttcatagtcgcctcagacaccgagcgagggatgaccaggggtacgttcgatacataaccgaggctcgggctgcgctcccgagaggctcgagggctgctctcgcaaaaccggctccggccaaaccgttgacagcgtcaacataccaggccgagagcttgggccccgatcgtgcacccgggctacggccagttcgcatgagggaacaaccagaccagccgaagcattacgcaaggcattaa

SEQ ID NO: 5597 - DNA, 432 bp, Zea mays
  Peptide Sequence Number=SeqID_48972
atgggcaagggcaccaagcgcaagcacgagccgactcctccgtcggacgagttcggtgactcggaatactcagaggaggagttctcctctgagtccgagggatccccggcccccgtctctcccccggcgtcgtccgatgactcggacgactcccaggggatagccgcggaggtctggacgtacatccgggccgtcgagcgctccgggctcgaaggctcggatgagtcggagtactcctcggatgaggaggactcggacggcggcgacgagggtgaagacgacgacgacgacgacgacgacgacgacgacggcgacggtgacggcagcggcagtggcaggggcggcggcgacggcagcagggacagcaccaagggcagcagcaggggcagcaccaagggcggcggcggcggcaggggcagggccagtggctag

SEQ ID NO: 5598 - DNA, 747 bp, Zea mays
  Peptide Sequence Number=SeqID_48973
atggcttcctcctcccttatgcgtcgtgtctttccatctcccaagcccccggatgggggcccggtcgcacccctccaccggtggtcacccaggatggcgacctccggcttgatggtgggggaaagcgagccgggctgcggcctctgcccctccctcagcctcaaggattttcatcaccaaggctggggaggggagagtgccgagttgggaggttctgctgccggcgagatagccggggccggccacggactgacctccaactctacggccttctgcccgtccttgcctcacgagttttggcgtgggcgggggcctcctggcagcagcacccgccctgaggtcagtgctgccactgttcgaccccccggagcagaagtcgccgtcgtcgccgctgctggagcaggtgacggcgcgccgttcgtcggccttccgttgctccgcaggccttccccctcggaggggggttgttcgtacctgcggagggggaaccggagttccgtttgtaatggcacttcgaatgccgtctcgcctgttgattatctgaaccgcttcaccaagcatgagtcgccccgtgtcaaggtgacgagtgagtatgaacagaggcggagttggctcgagaatgggaacctggttggccggagcctagccgggttgtccgtcagcggagccgacgccggagtcgatcagccgaggcctcgggtcgggctggcgcccttggaagatgcttggccgaggcctcaggggtaa

SEQ ID NO: 5599 - DNA, 537 bp, Zea mays
  Peptide Sequence Number=SeqID_48974
atggcgctccccgttgacgtgacgcgcctgtgccttaggtcgggcgacgtgggagctcctccgaagccgaggtcgagtctgtcttccgttgccgaggccgagcccgagcccccggcccgagtccgagccctggggtcgggcggagcggagttcgccgtcttccgggtcttagcccgagtccgagccctggggtcgggcggagcggagttcgccgtcttccgggtcttagcccgagtccgagccctggggtcgggcggagcggagttcgctatggcgcctttggcaaggcctgactgcctgtcagactcactctgtcgagtggcactgcagtcggagtggcgcaggcggcgctgtccttctgtaagactgtcagggttgcttctgagcgaagccaaggcctcgggcgagccggagctttatgctgatgggggttaccagctgagaattaggggtcttgaggcccttacgccgaccgtccggctttccctgctagatagtctggggctgcaccaggaccaccgcgtggtgccccaataa

SEQ ID NO: 5600 - DNA, 126 bp, Zea mays
  Peptide Sequence Number=SeqID_48975
atggctgtgatgggttcaacatcagaaaagatgtacctctgtcgggctgacgcccctggacatgggcaaactgtccagctgaatcagccagaccatctgtctgagcaccagaccgtccgcatgtag

SEQ ID NO: 5601 - DNA, 1242 bp, Zea mays
  Peptide Sequence Number=SeqID_48976
atgtcccagcagatgaggcatgcgtcgcagcagctgaagcatgcggccgccttcgccgaccatgttgcgtcgggcgccctaacttcggagttcactgccgagaggcaacgactcgagggcaggatcgagcgcctcggagcgcagcatacggatgctgttcgggacaagtcagctgtggagaacaagagctgcaggatggcggagaggctggcggctgcggaggccgagaaggaggatctcacgcatcagctggcggcggagaggagggacgcaaacaaagcatgtgctgaggcgcagtctgcgcaagccgaggccaagcttgcgtgggtggaggccagtctcacctgccaacgcgccgaggagatggagacaaggctcggcggcctgcgtgaccgcctagacaaaatggaggcctcgacgcgcgcggaggtcgagcggacacatacgcagctggtggacgcgtaccgggaactgggtgtgcggaccgctcccttcgaagcgcccggtcgggaggtgggcctccgcttccttgggtggctacaggaggagctagaggtgctcccgaccaatatgatgggcctcatgtccttcgcctccctcaacacctgcgagggggccatgaatgccctgtcccgtgaacgatgcgggcacttcgaggtcttcgaccagtcggacgaaggattcgagcgcagaatcttccaagtcgaggacccggtgctgaagccgtcggctggggtagtttttgataggatgtggggccctcacgaccaagagactgtccgggagaggtccgaccgggcgacggatcagatggcgcatgatgaagaggttgaggacctcggtgacctggacagcacgttgcccgaggcattgagggtggagccggcgccgtcgtccgatgctggcgagggccccgcggtgacccccgcgctgactggagctggcgaagaccccgtgccatgcactgcgttgacgggtgaggacgcttcgaaggtggttccgacgtttgggcctgtgcaagcaaccgctgctggcaatactgattttgttgcggcctcaaccgtagtgcttgccgatgataatttatttggctatggatctgagtgttttgagtctgatggtgagtctgagagttcgttttcctggacggaggagtcctcggatgaaggcttggattatttcgctgcgttagatgtggtcgcaggagtcttcaccgcgtgtggagggtgccggggctgttga

SEQ ID NO: 5602 - DNA, 468 bp, Zea mays
  Peptide Sequence Number=SeqID_48977
atggatctaccagctggcgccacgcatcggccaacaccgtggcacccgcacacccacgccctcttggcctcctcggtagacggtgccaaaggttcaacacaaaccaataaaaagaacaagccagggttcaaaagaaaggagcaaaaggaaaccgaagtgctccctggtctggcgcaccggacagtgtccggtgcaccagggaggatcgccttagaactcttcaccttcgggtttctcaggcgcagctccgctataattcaccggactgtctgttgtgacactggactgtccggtgcgccagcggagcaacggtcatctgcgcgcaatggtcgactctgcaaagtgaacagtgcaaatcagatgtcggagcagacggtcagaggggcaccggactgtccggtgtcgcaccggactgtccggtgccacatgaggacaaagcctccaacggtcgaccagctccggccctaa

SEQ ID NO: 5603 - DNA, 228 bp, Zea mays
  Peptide Sequence Number=SeqID_48978
atggggctcggtgtatgcggctcgctctgccaagtttgggttcgccccttggggaggagtgcgagacattatggtacaggtggctatgagatcgatgattctggttatgactatggtgctgataagtggtattctttccgtttggaaaggcatagcaaccactgctcaggagaagatgaagccgtggaaggagacttccaggagttccaagactacgacgagttctag

SEQ ID NO: 5604 - DNA, 1021 bp, Zea mays
  Peptide Sequence Number=SeqID_48979
atggcggcgcatcgatgggtcttgtggagccgatccccctcgaatgcgggcgtgggagatgcagcctctctctgctgcctcgccggggagtggctggcctacggtgtcgggctcgccgccgggaatgctgcctgctgcctgacaactcggcaacggctacagcctcgtcggaagaggatccattcagccgcttcgggatctgctgttggccgttgggcacggcacacgcgcgctccggcatggcgcagccccggcgacgaggcgcagcacccagtgaagctgctgctgggggacggcgtcgaggtgctcgacatctccttgccggaccgcacggtacgcatccagacaaaaatctcgtgggtagagtatgccgccgagttcaacggctcatggtccgttccggcgccggacgggcccttgatggtgtcgaccgcgcgcaactcctttgtggccttcgggtgcaacgtgctggcgaagctcatcccctacggcaccgtgcttagctacgccagcacctgcgccgcagcctgcatgaatacgcccgatgtctcctcctgctccggcgttcgctgctgccagacgtccatcgcatctctcggctcagacctgccttggtacggtatccaggttaaacatctagaaggagaaacgggtaactactaccatagagcagttttcatagttgaccaggactggttcaacagagttgaggccgcgatggcgagcaacttcagcactctattttttggaaatagattttatgagcaggtagtgttggtggatagcgttccagtggtgctggagtggtcgttgaatctaatacgcgactcaggcttgctgcacctctaccacccaaagcaaattatgtgcttcatctttatggttctggtcctcttttccccccattctccagatattgacgagtgccagctgccagatatttacccatgtcatggaacctgcatcattgtgcctgggacatacagatgcttatcaaagaaaaccatcaggagccttccag

SEQ ID NO: 5605 - DNA, 972 bp, Zea mays
  Peptide Sequence Number=SeqID_48980
atggaccgagtcttctccaacacactccaaggtcctcccctacggcgctggggctgggtcccacgcgtcatgcaaggcggctcagagcagaagaagccaaaccgccgtgcgcggtgcgtacaacccgcccagcggttacaagcgactctccacgtttgcccagaccaacgggcgaaagggcgggcagccgtgcaggcggcatgcaaccgcgccaagtgggcgcacttctccgactcccaacacgcccagcatggaggcccaggcccacgcgtcatgcaaccggtgcgccggttgctacgtgtgagtaactgcaccgccacctgcgccaccgccgcgcctcctcgactgtggaaccaataccgcgactcgaggccacccagcgcacgacccagcggctccagcctggcgcgacggagaagcgagcgacgcttcgccttcgccgtaatgaccgcgtcaaaaaaagggaccgggaaagagggataccccgaaaaggatccttccccgagaaggaaccaggctccgagcccccctactgatcagaggttcgaaggctggccccccggaagggttcgacagccgcctcagatcgcgggttcgaaggctggcccccgaagggtttacagccgcctcagacgccgagcgagggatgaccatggaatcccatcagagggaggcatcgagccctcggaccccgtcaccaggggaccgggtctggcaaatcacccgcagctcatcggagacaccatgttcggcgcccatcgagggcaacatggcgctttcccccccttctccttgcggaaaggcgacgcaggggcaggcttgggggctgctctcgcaaacccggctccggccgaaccgttgacagtgtcaacataccagcccgagaacttgggacccgaccgtacacctgggctacggccagctcgcatgagggaacgaccagaccggccgaagcactacgtgaggcagtaa

SEQ ID NO: 5606 - DNA, 2916 bp, Zea mays
  Peptide Sequence Number=SeqID_48981
atgtcgactgcgaaagtggtgcttgagcctgcatttcaaggagctggccataaaccagggacagagatatggaggatcgaggatttcaagccagtcgctttgccaaaatcagactatggcaaattctactgtggagattcttatatagttctgcagacgacatgtaaaggaggtgcttttatttttgacatccatttctggatcggaaaagattccagccaggatgaagctggaactgcggcgatcaagacagttgagcttgacagcatgctcgggggccgtgcggtgcagcacagggagccacagtgctacgagtctgataaattcctctcgtattttaaaccgtgcatcatacccatggagggcggctttgcttctgggttcaaaaagccagaagtggacaagtttgaaacacgtctatatatctgcaaagggaagagagctatcagagttaaagaggttccattttctcgttcatcgttgaaccatgatgatgtctttatcttggatactgagaacaaaatatatcaattcaacggtgcaaactccaacatccaagaaagagccaaagccttggaagtgatccagcatttaaaggaggaataccatgacggagtgtgcgctgttgcaatcgtcgatgatgggaaactgcaagcagaatcagattcaggagaattctgggtcctttttggaggttttgcgccaatagggaaaaaagcaataagtgatgatgatgttgttcttgaaactacatcaccaaagcttttcagtatcagtaacggccaactgaagttagaagacgctgtccttacaaaatcaattttggagaacaccaagtgctttttacttgactgcggggctgagctattcgtgtgggttggtcgggtaacacaggtagaggacaggaaagctgccagtgcagcagttgagaaatacattattaaagaaaatagaccaaagacaacaagaataactcaagtgatccaaggttacgagaatcatacgttcaagtctaagtttgagtcatggcctgtaagtaacacgtcagggagtgccagcacggaggaaggccgagggaaagttacagcactcttgaagcagaaaggtgttgatgtcaaaggaatctcaaaaactagtgtgccagtaaatgacgaagttcctcctttgctggatggcggtggaaagcttgaggtttggtgtattgatggcagtgccaagactgctcttccaaaggaagaacttggaaaattctacagcggagactgctatgttgttctctacacttatcattctgctgaaaaaaaagaagagttctatctagcttattggattgggaaaaatagtgtacaggaagatcaagaggcggcttttcaaatagctaatacaacttttaattctttgaaaggaagacctgtccagggtcgtatttatcaaggaaaagagccaccacaatttgtggctattttccagccaatggttattcttaagggtggtactagctctggttataagaaatttgtagaagagaagggtctgaaagatgaaacgtattgttctgatggcactgctctcattcaaatttctggaacagcggttcataacaataaaacgcttcaagttgatgcggtcgcaacatccttgagttccacagattgttttgttttgcaagctaaaaactcgatgtttatatggaatgggaatgcaagttcttttgaacaacaacagtgggctgctaaagttgctgaatttctgaagataggattagatttgggtcaactagagaccggtgttgctgtcaagcattgcaaggagggcactgagagctctattttctggtcttctattggtggaaagcagagttatacaaatagaaatgctgcacctgatgttgttattagagagcctcatttgtataccttctctctgaggaatgtgaccctaatttttcattttcattttttggcttcaatcgcgataacatcgtcaccatttgtcagggaagctggagatgatctgttgaccgaagacatgatgatacttgatacacactgtgaggtttttgtttggatgggtcagtgtgtggagacaaaagaaaaacagaaagcatttgacattggccagaaatacgtacaacatgccgtggcctttgaaggtatttctcctgatgtgcctctctataaagtcaatgaagggaatgaaccttgcttcttcaggacatacttctcctgggatagcgcacgatccgtgggtggcaataagggctcaggtgatggtgggccaactcaaagggcatcagccttggccgctctttcatctgcattgaatccatcgtcgcaaggaaaacagtcagatgagaagcccacaagctcagatgacagcgagcatactcaacgagcttcagcaatggctgccttgtcctctgcccttaatccatcgacaaaacctagcagcacacagacacaatctcattcaggtcaagggtctcaaagagccgctgctgttgcagcactgtccaatgttttgactgcagagggatctcatagcccccgccacagtaggtcgtccccaacagcagatgcagacaagactgaattagttcctacttctccccatcaattagaaacagggactgcagaagatgtccgaacagagcctgatgtctcacaggaacaaacagctaaagaaaatggaggccagacaacctttagctatgaacgattgatatcaaagtccactgaccctgttagtgggataaacaacaagcgcagagaggcaaggttattcacaataaagagtaaatggacatatttggtggacagtgaattcgagaccgtatttggcatgactaaggaggagttctacgagcagccaaggtggaagcaagagttgcagaaaaagaaagccgatcttttctga

SEQ ID NO: 5607 - DNA, 992 bp, Zea mays
  Peptide Sequence Number=SeqID_48982
atggcatcgctgagtgctgacctcttttacgacatactcaagcgtctcgatgctgcagctctggcaagagcaggctgtgcctgcgctgattttcgtgccatatcaaatgaagaggatctgtgggaaaatgcctgcacatctctgtggccatcaatgagacgagatgacaatgggctgagtcttgactactactactacgacgacggcggcatggacgattctgaaaactcattgccttcggatttcgtgtctttgatcgatgtatggtacaaaggccatgcgctctactcgaaggtcatatggggaattcccagctcagacagtgccaatggatggttctacaactacccgttccggatcgacctgtctcaacactcggctgaaaacaacgagaacaacaacggagatgtattcctatccactgtcagtggcgtgtcaccggtaccctcaatggagcaagaaaggaaagacggcaagctatggagggagttgaacgatggtgtaaagctgagctggattgttgtcaacaagaagatgaagagggcagtgaacctgacgagctggcacccgctgagcgggcagaggcactggccgaccgatgctgacttcgttctgcggttcgggtctgtgcttccggcgaaggaggtcctgccctgccaggtggcggaatgcatcctgctgatgaagttccgcgtgacaggcatgggcggcgaggaggctggggagccttcgacgctcgcgctgacggaactgagcatgcagatccaggacatgggcggcgtccatctcaacggccgctgcagcctcctcctcctcaaggaggcgctgagctgccaccgcagcaggaactacgatgaggtgctggagtcttgcaatttgtacctcaaggcacagagtgagctgaaggaagagaagatacgcagcgagtgccggttcgacacgctgtgtgttttcagtggcattgcaatatttgctgctatctgcaccatgtg

SEQ ID NO: 5608 - DNA, 831 bp, Zea mays
  Peptide Sequence Number=SeqID_48983
atggcgctccccccgcctcctccttgcggaaaggaaaacagcgccgcctgccctgctccgactgctgtgccactcgccagagtgacgccgacagcagctaagtccagcctcgggcgccataggaagctccgcctcgcccgaccccagggctcggcccccgtctcgacctcggacgacggactccgcctcgcccgaccccagggctcggactcaacctcgacgccggaagatggtctccgcctcgcccgaccccagggctcggactcaacctcgacgcaggaagacggtctccgcctcgcccgaccccagggcttggactcaacctcgacctcggacgacggtctccgcctcgcccgaccccagggctcggactcaacctcgacctcggacgaaagtctccgcctcgcccgaccccagggctcggactcagcctcgactccggaagacggtctcagcctcgcccgaccccagggctcggactcagcctcgactccggaagacggtctccgcctcgtccgaccccagggctcggactcagcctcgacctcggaggagtcaccacctcgcctgacctcgggctcggaccgaccacatcacagggggggcatcattaccctacccctaactagctcaggctacggggaacaagaccggtgtcccatctggctcgtcccggtaaaacaagtaatgatggcaccccgcgtgctccatgacgacggcggttctcagccccttacggaagcaaggagacgtcagcaaggatccgacagccccgacagctgtgcttccacagggctcaagcgctcctccgacggccacaacatcacatga

SEQ ID NO: 5609 - DNA, 174 bp, Zea mays
  Peptide Sequence Number=SeqID_48984
atggaggcgaggatgatggcggagcgagaggcggagcgggtggctcgcgaggcagatcatcagaggatggcggagatgttccagtacatgcagagccttgcgccgcagagggtttcgctccgccacctccattgttcccaccctgcttctgttccatactcctggccaatctag

SEQ ID NO: 5610 - DNA, 159 bp, Zea mays
  Peptide Sequence Number=SeqID_48985
atggttggtttacagggtggtgacaaggatgatggttatgactatggtaatggtaaagaagaaggcgtcgaggcgaatctccaggagttccaggacttcgacgagttcgaggatttggctagcgacctcccccagtcagctgcctgtgatgccccctga

SEQ ID NO: 5611 - DNA, 561 bp, Zea mays
  Peptide Sequence Number=SeqID_48986
atgtcatcgtcttcggcgttagcttcaagtagcccccctcttggatcaatcctggatccgccactggctgcgagcctggggctcgccaaagcgggcgagtgggctgcacgcgcacgcaggagctcgcggcggcgcggactgaagcagcagtggcaccggacaacacagctggtgtatggccacggccacgacgtgcggttgcggccaggcgatgcggctaacccccttaacaagagcattgatacacgcttgatgaagatgctgccgattctgatcttgactgatttggaggagttggagattgccaaatggacaggtgcaagaggaaagtatagcgagaaaagaggaataaggaaacgaacaagagcggggaggggtaaaacaacactcttgaactggaatgggagaggaagctttaaaatgcaggtgcaagataagcatcatggtaaagttcaagggatgacaagggttaaggtgataacggacaaacacaaccaaggaggtattttagacaaaacgtgcgaggtatcgaagaatgggaagcaatcaatggtgaagtag

SEQ ID NO: 5612 - DNA, 897 bp, Zea mays
  Peptide Sequence Number=SeqID_48987
atggctcgtcttagacacactgcacgtaagtcgatgattcctttcctgccgtctcgccttgcggagcgtcctctgcgccgcaccgtgtccagtcagtcgagtcacctagagagactgcaccaccgcctgcgtgaggagcaggaacgccggcgtcagcacagagagcagcagggctcttcctccccacctgagcaggaggtggagtccgtgaggcgtcgttcctctgttcctcagctggaggcgccccctgcaccaccgcgggacgccccggctgttggaggagctactggaggaggtcctggaggagaccccgacgacaacgactcagaccacagcacggagtcctctgagccacaggaggcggaaggatggtctaccagcacagtcgcgggaggtgaccgctgggaggctacctgcctagttcgccgcccggaggatgacctccggggtgcggaggccgtttcggagcactactacatctccgagagggacactgcagaggcggctatgcaggatgcatcacggcgtgcactctcccagtactgttctttattcggtggggtggccgacggtcttaaccttaggtactacccccgccgtcctactggcagcacagagagtgtggttgtctcacctgttggtgaggataaccctaggttgagcagcacagtcaacctagtcgcggtgcttaacaccgagctggatcactctctggacgagctaagcagggctcgaacggagattgctgagttgcgtgctgagctggcagagcgccgccaccaggagggtggttcccccgctcctgttgggactcagcacccataccgctcgccgccacatggtcaccacacttatggttcccctgcctgtaagaccaggatagatctggatccttag

SEQ ID NO: 5613 - DNA, 321 bp, Zea mays
  Peptide Sequence Number=SeqID_48988
atggcatctccctgctcgctcgcgctctgccgagcttgcccctgcgcgcgctctgctcaccattccaagctcgccttgctccctgctgctcgcccggtcgagctccctgaccgccgcgccacctcccttccacctcccccacgctgctcgcacgccaaagcgccaccgccattaaccgccgccgtcccgagcccgttcctccgtcgacgttggagccccgtcgtgccctctgccacgtcgccgtggtccgccaccgtcgactcgggctaccgccgctcctacgccgccaccgaggggtccccggagttcaccttgaggtaa

SEQ ID NO: 5614 - DNA, 1380 bp, Zea mays
  Peptide Sequence Number=SeqID_48989
atgtccatgcggctgagggaggtgtcgcagcagctatcgcagaagttgaagcaaaaaaagaaaaaatgggtacccgaattccggatacccgtatccgacccgaatattcgggcggccaactttgccgaccgcgtggcgtcgggtgtcctaactgcggacgtggctgccgaagtcgagagacttcgggcgcagcacgcggatgccgtgcgggagaagtcggcggcagaaagcaagaaccgcaggctggcggagaaagtggctgccttggaggccgagaagacggacctccggcgccagctggtggaggagaggagggaggcgaaccaggccatcgctgaggcgcaggctgcgcaagcggtggccaaagtggcgcgagcggagagcagtctcgctagtcaacgtgccaaagagctggaggcaaggttcaacgccttgcgcggccacgtggacaagaccgaggcctctacgcgctcggaagttgagcggacacacgcacagttcgtggactcgtaccgcgagctgggagcgcggactgctgagttcgaagtacctgaccgggaagctggccttcgcttcctcgaatggttgcaggaggagctgctggtgctcccgaccattgtggagggttttatgtccttcgcctccctcgtcacctgcgagggggccgtgaatgcgttgtcccacgaggcctgcaggcactacgaggtcttcgaccaatcagacgagaactttgaacgcgagatcttcaaggccgacgaccctgtggtgaagcagtcagcgggggcacttttcgataggatgtggggttcgcatggtcgggaggcggtcagggagcgatccgaccgggcgagagagcaggtgaagatggagcgtgctgaggacgtcgaggactttggagctctggccggcgcgccgcccgaggctgcggaggtcaatccggtgctgccctcggatgctgctgaaggcctctcgactgtgcccgtgcctactgtggctggcgaagaccctgtgtcggcccctgcgccgacggtcgaagatgccttgaaggtggtggctgagccggtagtcgaagaccccacggccgcggtcgcgccttcgcaggttcagggttttgggcctgcgcacgcaaccgctactgacaatggtaattttgtggcttcgaccgtggttgctgaagacgattctaatgattctgtgtctaagttttttgagtctgatgattctgggagttcgattgtgtggatagaggggtcttcggatgaggacttagactattttgcagcattggatgtggctgcagcggagacttctctgcgtgtgatgggtgaggatattccgggtgcgagtgctgggcggaggcggcgaagggcggtggcgtag

SEQ ID NO: 5615 - DNA, 747 bp, Zea mays
  Peptide Sequence Number=SeqID_48990
atggctcgtagaagatcccaaaagaacaagaagacaactccgaaggagaacaaggagaaaaaggagatcggaagtcagatggaggttcgctgccaaaccagcttttgccagaatgaagatggtttcccaaagttgctgagagcatgcacagttcgcctcggaatcaggagccagccagagtatgatggtcaagatgcagagaagctcaaccgtaagctccatgtggatctcaccacagctcaagcccgtgtagctgccttgaaaagtcgtgaagccattgttgttgaagccctgaagcaagccaaggatgagcacgtccagaagttgatggaggcctacttggtaacccataaccaacgtagagccctgcggatccaagagcccacttcatccaaccctgttcaacccatcagagctgaagacccccagattctcgaaggtcacccggtctctatcagaggagataagaagacttgggaactaccggaaggagccatagtcttggaaggaattccagtcttccctcaggctatgagtaagcaagagcaccccgagtcctcccaagatcccctgccggagttgtttgagcccctcaccatgaagaagattccagcaccatctcgtgagatcaaagaagaagctgcaagcaccccaccagcatcgccgccctctgaggagctacaagagtcagtcccgcttgaagaagagttcaaccccgtcttgccatctcagtcgccgccagaagaa

SEQ ID NO: 5616 - DNA, 390 bp, Zea mays
  Peptide Sequence Number=SeqID_48991
atggcgcgcgccactacaggcgttggccccggcgcggttcccgagggcactcggcgcggcccacctcggcaccgctccccagcgtggggagccacgacggctccggccagagaccggcctggcatgcccgacgctcggagcggccagccaaggcgcgctcggcgcggcctccaggcggcgctcggcgtggcctcccgcaggcgctcggcgcggcctcctgcggcgctcggcgcgggccaccatggaggctcggcgcggccttctggtggcggctcggcgcagcccaccagacgcgctcggcgcggcccccacaaggcacgctcggcgcggcctcccggaggcgctaggcgcgggcgcatggctcctgctggcggtggctgggagccttag

SEQ ID NO: 5617 - DNA, 1188 bp, Zea mays
  Peptide Sequence Number=SeqID_48992
atgtcttcttcctcccttaagcgtcgtgtcttcccatcttccaagcccccggatggggggcagcccggtcgcaccccttcaccggcggtcacccgagatggcgacctccagcttgatggtgggggaaagcgagccgggctgcggcctctgccccttcctcagcctcaaggattttcatcaccaaggctggggaggggagagtgccgagttggggtcggcccctgcgtgggtggtggcccgctcctccactcagtgatggggggagaagcaggcattgcccgtggcgtccggcagctgcagcgtgcctggtcttcagccgcgagtggcttcggggccacttgcggcgtcggcgtctgccacggcagctggaagaggcgggggcctcctggcagcggcatccaccctgaggtcagcgttgccgctgttcggccccctggagcagaagtcgccgtcgtcgccactgctggggcaggtgacggcgcgccgttcgtcggccttccgttgctccgcaggccttccccctcggagtggggttgttcgtacctgcggagggggaaccggagttccgtttgtaatggcacttcgaatgccagtgttcttcgttcattgcggctgtcgaggcctgaacgtgaatccctcggcccgttcggccttgttgtctggggctcctctagcttagttaaagagacccctcggctgcccttcggtggaccgaggccagggccgacgccaaagtcgatcagccgaggcctcgggtcgggctggcgcccttggaagccggttgaccgaggccccaggggtaaccggttgagccgcctgctcgggccggattcccggaggagtccctggaccgcggcgctgcccgaggctgggtcgggctttgctgaagacgtcgtcgatgccgagggtgctacggcttccttcggcgtgaagactcgagcctgcaggacccgatcatcttgtagcgtgtgctttctgcggccgccgaggccagaagaacacaccctcgctgcgcttgcgaagctgcgtcttttttcctcctgtctcgagcatctggactctgtcggtaacagggataaagggacgagtgaggtatccgtatcccggaggcgtaggagtccctcggctcggtcagccttggctgcttacgtgtacctcgtcgtttccaggatccgctttccgaagtag

SEQ ID NO: 5618 - DNA, 927 bp, Zea mays
  Peptide Sequence Number=SeqID_48993
atggaggtgacgtcgctgagatcgctgacgcaggtctgcgacgtgctcggcgtatcagcccagcggaggaagagcgtgcggctcaacgtctgcccgcaggtgacgcagcaccacgtctggcggggcgcgctcgaggcggtgctcggggatctccaggccgacatggcgtctctggatagcccgagcccagggatcaagatggccgagcagatcgcctccgcttgcaacggcttcctgtcggacacggcgacgtcctcatcgccgtcctggatgcgcccaacgccgttcaagaaaccagcagaaccgacggctcccgccaagaagtggcaagaagtgctggacatgtttactgacctcgccaggagcctggagatggaggatcgactcaccgggcatgtgcagaaggtggaggccatgaaggaggggttgtaccagatacgtgacgtcgtcattgaacgggacatagccttcaaggaggcgcgccggcaggactgcctggtgcagaggaagctgtccaagagcctggggcactcctccaggtgcctgtacacgctgctcctcttctacctctatggctccgtccgggacatggaggtgcacgtcggcaaatgcatttctggcgagggaggcaggaatgttaccgttcacgccgcagaattcctgatcgatggcgatgaatcgacgatcaggagcggcatcaagcaactgagccgtgccctccaaatcttccggtttgtttgggaggccgcgaatactgactgtcatgccgccaatcacaatggtaaagatgttgtgggcaagaagaagaatgaagatgcaaagggtgtgttggagttgcaaggtcatctctggagtttcggtgttgaggagaagactctgacatacagaggagacgtgttccatatgcatcagattcagttaccatga

SEQ ID NO: 5619 - DNA, 537 bp, Zea mays
  Peptide Sequence Number=SeqID_48994
atggatctgccccgagcggcgttcgtccagcaagccattcaccgaactctgcgcgcccagctgagtaatatgaataatgttggagcgaaggcgaagacgctaccctccgctccagccttcgtctatctcgttgcgccgacaggaagcagaacgaccggcgagagccattgccgcctcaagttaaaccatgttcacatctctctcactcccctactggaatcaacctgcccgggaacacaagttccaacattggcgcccaccgttcgtgctacgagaaaaccacccgcgatggcacccaaaagagctaactcgaaggcggccccatccgtcgacgaagcagcgaagacagccctgctagctgagaaaaagggcaaggccctcgccgacaacacccaccaaggagctggcgaagacgaagcacatagtaagagacaaagcaacgatcaacacactccagaaggcacccttcgcacctgcagctccgaaggacagccacaagcgccacccctaggcttcgcaccaccagagggcgagtga

SEQ ID NO: 5620 - DNA, 489 bp, Zea mays
  Peptide Sequence Number=SeqID_48995
atgttgccgacacctccgaaggatgtgccaaaggcccaagctaaagaaattgttctgacaatggttgccactgctccttatgccgaggctggctcactgaaccaatccaaagacaacgtggaaatggatcttgaagaggacaacacggtcattcaccctacgaagcccatccatgtggatttcggaaaatccaaaatcaaagaagggcacatcgaggtgcggttagggggtgatgagttggtaccaagtccgagggaggatgaagttgttgtgttccggtgtttcttaaaggctacacccgaagccaaggttgaagttgagatcgaagagctccctcccatgggggccgaagaagcaaaatttgaagaagctatcgacttgatagcacaaaaatttaagcctttggagatgcttctagagagctacgaagaagaagatgacagggagcgaatagctccaataacgagttcattttttcgaagaacctga

SEQ ID NO: 5621 - DNA, 373 bp, Zea mays
  Peptide Sequence Number=SeqID_48996
cagcggcggagccctggccgagccgccctcccccgacgcgcctacaccgaccgcgcttcagctcggcgcccaggcggaccgacaccggccaccgcccatgccccagctcctagacccctatccgcaggtcgcagcagccgccaacacccagatctcacaccacgccgtcaccacgccaccagagtctggtggccagccaaagccctcgcccacccgcgagccagcgagcgcgagccaaacagtagcggtgacgccgtcacacacagatctagaccaccagatctcgcagctgcgagattgcaagttcatgccggcggtggaggtcaaggcgctatgcgagcaggcaaaggcgatcctcatcgaggaaatctga

SEQ ID NO: 5622 - DNA, 918 bp, Zea mays
  Peptide Sequence Number=SeqID_48997
atgcctcgctccttttgcatctatcacgcccttccacctttcgggcctccagatggagtgcgccgcattcgggggagaagggcgttcgccagccttgcgaaggcggcgaactttggctacgcgggtcggccgtctgaggcgccgtcagctgccgcatgcctggctcctcggcctgggtggctttggtgccgcctccggcgctgcctcctgccgcttggacggggcgtggctgcccgtccaccgcacgggcgatggttgtgtcgtgcgcaggtcggccatatccacggcttctcccgtgtcgacggccgcaccagggtgacgtacaagacgtcatacgctgcgggggcggcatccgcgttcttggatggtcttgtcctcactcctgtagtgaggacaggagcgaggacctcttcgcatgcgctggggcagccgccattcgccggtacggcactggtgcgcaggtggccgctgtcgtcggtgctgaggtggtcgccgccgctcgtgaggctccccactgtagaggtggttgcctccgctggcgagaccgtcagtgccaccttctgccgagcccccgactctttggctttaatggcctcattgtcgccccccgtaggaagacagaggcgaggaccttttcgcagtggcgcatgtgctgaggcggttgccactgctggcgagttgttggtgcagaggcggccgtcaccgtcggtgctaatgtggtcgcctccgctggcgagtcgctcggagctagctatctcgtggccctactgggcggtggagcgtgcaggcccatggtacgggaccgggctgagcggctgcacgggctccggaccaccccaggagactaatgcccattctctagctccggtcccgaggcccatggtacgggaccaggatgagcggctacacgggctctag

SEQ ID NO: 5623 - DNA, 1131 bp, Zea mays
  Peptide Sequence Number=SeqID_48998
atgaccgcgcgttctctggccacgtccaagccccgcgcccgttttgagccccacgccctactcgcccacctcccctctctcatttgtgccttctctctcgctctgcccacgcgaatagggagctccgccaccatccgccgatgcccacctcctgttctatggccgttgttgcgcccgtgcccggtccagtgcccacggaaatcaacccgccgacgccaggagcaggagcagcaggactcatccccctcgcctcagcaggaggtggagtctgagaggccgccttcccctgcacctcagccagagatgccccctgcaccaccacagggcatcctgactgctggaggagaccctgacggagatggagacgacgatgacgctggtggcagttcgagccacgacacggagcactcagaggagcaagagccggagggatggatcgctagacccatcactcgtgacgctgctcgcgggtgtcacttccacgatgctcttgataccctgttgcgtcgggccttcgaccgacacacttggtctatcgagtaccgttgtgtagtctaccagcatcgtcgtaggttatacccggacctgtgggaggctacttgtttggtgcgccgtctggacgatgatctccggggtgtagaggccttctcagagcactattctatcactaagagggacactgtcgaggcagccatgcaagatgcagaacgacgagcactttttcagtattgctcgttgatcagcggggtagctgacggccttgacctgaagtactaccctcaccgttcgaccggcaacaccggaggtgtgattgtctcgccagttggtgagggcaatcccaggttgagcagcatggtcaacctggtcgccgtgctcaacacagagttggaccacgcccttgacgagttgggcaagggattcagcacccttatcgttcactgccctgtggtcgcttcgactatgatgtctgagaacaggcgtagaggtgcgaggcgtgctcagccagagcagcaggcaccccaggaagaggcagctccgcagcagcatttgccactgccacccccgatgaccattgagcaaatgttcatgatgcagactcgggcagttcaggcaattggtcagactttttag

SEQ ID NO: 5624 - DNA, 174 bp, Zea mays
  Peptide Sequence Number=SeqID_48999
atggagagtcatgatctccgggcagaatgggaatcacggcttgtgggtggttatgagactgatggttttggttatgactatggtgctggttgccatcattgcaaccactctttaggcgaagacgaagctgtggaaggagacttccaggagttccaagactacgacgagttctag

SEQ ID NO: 5625 - DNA, 312 bp, Zea mays
  Peptide Sequence Number=SeqID_49000
atgcccacatgcagcaacaaaatagctcgcataaaaaaatccttctcgtgccggctggccgctcggagtcaaggtctgggcggtataaatccatctcctggccatggagccgtgcctctgcacctccatgggcagatcctgcctccatcttccatctggccacctgccgctcgccatggctaccgcgtgagctccagctcttccctctcccgatccatggataacccctccaagcgcccctgctcgttcccaggtcttccaggacctcgtcgagctcctcagcacggcagttgccactgctccctctcctag

SEQ ID NO: 5626 - DNA, 450 bp, Zea mays
  Peptide Sequence Number=SeqID_49001
atggcgccgagctcctgtctcccaccgcggcaagcggcgccaagatctgtgggcaagaccgttcgtcctgcgtgccagactcgcgctcagcttcaagggcctcaagagtatgagtacgtcaaggagatctttggaaacaagagcgagctcctcctcgagtccaacccggtgcacaagaaagtacccgtgctcatccacaacggcaaggctatctgcgagtcacagatcatcgtgcagtacatcagtgacactactacagattcatatacagaaacagaattaataacagattcaaacacagattcaaacacagattcatcatacaaagattcaaacaagttctatagcaggttccatacacagattcatccacatatatatcaagttccatcatacacagatttatacacatcaagttgcataacaactcaacatctcaaagttccatag

SEQ ID NO: 5627 - DNA, 1401 bp, Zea mays
  Peptide Sequence Number=SeqID_49002
atggccggctcggccgccccgcccccctgcctcgcccggctcggccgccccacggccggctcggccgccccctgcgccgccccctgccccgccgagaacgatccggtcgaagagcccgaggaattcgcaggagaagcccctgagcagcagtcggtggttatgagattgatggttctggttatgattatggtgctggttgtcagcattgcaaccactgctcaggagaagatgaagctgtggaaggagacttccaggagttccaagattacgacgagttctaggtgtgggttagcggcaacccccagtcggctgcctgtgaaggccgcgttatctacgtttcttttccgcactttgatttattgtaagaactatatggacgtctcagacatggctcgacttagacacactgcacgaaagtcagtcatccccttcttaccctcccgccttgctgagcgtccgcttcgccgtcctgtggccggacagtccagccacttggagagactacaccaccgcctgcgtgaggagcaggagcgtcgacgacaggagcagcagagctcttccttctcgctccaccaggagatagagtctgtgaggagctgctcccctgtgcttcctctggagccgccccctgcaccaccactgggcgccccagcttctggagtagctgctggaggagacccagacgacggagatggcgacgacagctcgagtcacgacaccaacttctctgctaaccctgagccggaaggatgggttgctcgacccatcactcgcgacgctgctcgcgggtgtcacttccatgatgcgctcgacaccctgctacgtcgggcatttgaccggcatacttggtccgtcgagtatcgctgtgtggtctaccagcatagtcgcggggtctacccggatcgctgggaggcaacctgcttggtgcgctgcccggagaacagtctccagggtgcagaggcctgttcagagcactattctatctctgaacgggactcagctgaggcagccatgcaagatgctgcacggcgtgcgctttcgcactactgctcggttttcggtggggcagctgacggtcttgacctgaagtattacccccgccgttcatctggcagcacaggaggcgtgattgtctcacctgtcggtgagggcaatcctaggttgagcagcacagtcaacctagccgccgtgctaaacacggagctggaccatgcattagacgagctgagtagggctcgtgctgagatcgccctgctgcgggctgagcgcgcggaacgtcgtcatctggatggtggttcccccgctcccgttgggactcagcacccgtaccgctcacctcagcgtggacaccagtcttatggcaatcccgcctgcaagaccaagataaatctagaaccatag

SEQ ID NO: 5628 - DNA, 213 bp, Zea mays
  Peptide Sequence Number=SeqID_49003
atggcggctgggctgggcggcgggcggccggaccgggcgggcagggaggcggccgaaccggccatggggaaaggggagaggggatgggggagggaggagagggggaggggggagctcaccggggaggggcgcgacggcgaggggcggtcggcggcaggggcggccgagggcggcggttgggcagggggcggcggcggcttagggcaggggtag

SEQ ID NO: 5629 - DNA, 195 bp, Zea mays
  Peptide Sequence Number=SeqID_49004
atggccggctcggccgccccgcccccctgcctcgcccggctcggccgccccacggccggctcggccgccccctgcgccgccccctgccccgccggtggttatgagattgatggttctggttatgattatggtgctggagaagatgaagctgtggaaggagacttccaggagttccaagattacgacgagttctag

SEQ ID NO: 5630 - DNA, 579 bp, Zea mays
  Peptide Sequence Number=SeqID_49005
atggcacgcaagaaagctagctcgaaggctgacaaggctgcgaaggcagcactgctggccgcaaaaaagggcaaatccctcgccctcacccactccacccaccaagagcctcccccaggcttcgccccaccggagggcgcggacctcaccgaggacgatgaagtcctcggcgtctcagcggaagaacagctacagctgcgtgccctgcgcctcaagaaccacaatctccagaggcaaaaagagatactggaggccaagcgccagcgcgtgtccgcactagccaaggtgcggcaaatgatacacgacgaagagcagaaggcccaggacctcgagcgggaaatcgcgctgatgcaacgcgaaggccacctcggcctgcatctcgggccacccctgcaacagcgcgtacaactggaagacatacgcgaaggccacctcgtcctgcagcacgtgccacccctatatcagcgcgcgcaaatggaagaccttacttcccctagcgcgaccacgcctcccacacgtctcgccattctaggggtcaactacctcgttgatcgaagtttccctgttccacccctgtaa

SEQ ID NO: 5631 - DNA, 318 bp, Zea mays
  Peptide Sequence Number=SeqID_49006
atgggaagtcttatgttgggtgttggtcgtggtcgaccggaacgggggcatctggcaagctcttatagttccagctcaggcagattggatacaggcatagttcccaaagctttaccctgtagtctggactataagttggttacgcatttacgtaatgaggactctagggagaagcctcgtagtgagaccctggccattcacctcggaaaagttgcagatgaagatatgatgctgaattccagggatgctagtctagtgatacccccggtcatcttcctgtggatggatgtccttgtttcgctgtactttgatgaataa

SEQ ID NO: 5632 - DNA, 828 bp, Zea mays
  Peptide Sequence Number=SeqID_49007
atgggtcagtcagccgcgggagaaggcgcgatggtcgatatggccagaaatgggccggctgtaatggcggtgacaggcgggcggaagcagcagtcaagtcgtcagcaagctcacgccccctccagggacagcgagagaaccctctcccacggtgacaggcggcacctttggcaggcgaagcaggcgatgcttcacctccgccataatgaccgcatcaaaaaaagcgggccccaagcccccctactgatcagaggttcgaaggctagcccctcggaagggttcaacagccgccttagagcactcggggtccgcgcccactactggtcagaggttcgaaggctggcccctcggaagggttcaacggccgcttcaggccactcgggctccgcgcccacttctgatcaggggttcgtaggctggcccccgaagggttctaacagccgcctcagagcacgcggagcgagggatgaccctgagtacgttcgatacataaccaagggctctcgtacgagaaggttggccgcgcgggagaacgggccgacgcgtaagtccctcaccctctcccacgcggacgcttatgacaacccaattaaaggactaacaagtgtgctaagtgttgaacatgtgcttaatgcaaagctaacagggttcaactcaaagaaaatcgatcaagccaaggatggaggcaagaagagcttcgaggtaccgagtgcatgggagaaggtcaaggagaccaagaacccaaagccaggggtgaagaagaagacttgcaaagtcaaggttgatcgagttaagaagagttatggtacatcaaggatcactacataa

SEQ ID NO: 5633 - DNA, 654 bp, Zea mays
  Peptide Sequence Number=SeqID_49008
atgccggggaaggcgaattgttgctgcccagctaggatgcaacattccatcctctatccttgctttcatggcgaggacgggagtgaggacctgctggtgcgctttggggcggtcggcgctcgctggtgcggcgctggtggacagagtggggacgcgaacgggagccttccagctgcagcgtccgtcctgggaccatcgctgctgctgcagaggtcgctggcgagtcacccggagcttgtcgccccgcaggctctccggtgtggaggttgttcatacccgcgggggcagaaccggagttccgtttgtaatggcaccttgaatgtcggtgtctgttcattgtggctatcggggcctgaacatgagtccctcggctcggtcggccttgctgcccgaggcttctcttgctcagttaaaggaaaccctcggccgctctgcgatgagccggagccggaggcagcggtgtcagcatggacagaggcagagttggctcaaaaagaagacttcgtcggccggagcctggccgggccgtccactggcgggaccgacgccggagtcgaattgccgaggccacgagccgggctggtgtcctcggaggacggctggctgaggcttcggggcggccggccgagccgtctgcttgggtcgggtccctag

SEQ ID NO: 5634 - DNA, 324 bp, Zea mays
  Peptide Sequence Number=SeqID_49009
atggctgaaaggtaccaacttccgcgaagttgcgttcctccaacgacgacaaggcggaagaaccgcgggcgcccccatccgggggctctgaaggtcttccccctacgacacgggggctgggtcccacgcgtcatgcaagctggcccaggacagaaggagccaaaaccgccactcacggtgcgcgtaactgcccagcggttacaagcgctcctccactttcgcccagaccagcgggtgaaagagcggaccgccatgcaggcggcatgcaaccgcaccaagggggcgcaccctttcgacttcgacgcgtccagcatggaggcctag

SEQ ID NO: 5635 - DNA, 1551 bp, Zea mays
  Peptide Sequence Number=SeqID_49010
atggttgccatccaagggggtcaccctccttttaaaggcgactctccccacttgcgtcctcagtcggtgcagattgagtcttctccaacacgctccaaggtcctccccctacgacacgggggctgggtcacacgcgtcatgcaagctggcccaggacagaaggagccaaaatcgccacgcgcggtgcgcgcaactgcccagcagttacaagcattcctccactttcgcctagaccagcgggtgaaagggcggaccgccatgcaggcggcatgcaaccgcaccaagggggtgcacccttttgacttcgacgcgtccagcatggtggcccaggcccacacgtcatgtaaccggcgcgccggttactacgtgcaagaaaccgcaccgccactcgcgccagtgccgcgccttatcgactgcggaaccggtgccgcgactcgaggcgaccctgcgcatgacccaacagttccaaccgagcacatcggtcacgggtcagtcagccgcaggagaaggcgcgacggtcgatatggccagaaatgggccggcagtaatggcggtggcaggcgggcggaagcagcagtcaagtcgacaggcggcacctttggcaggcgaagcaggcgacgcttcacctctgccataatgaccgcgtcaaaaaaacaagggaccgggaaaggggatactccgaaagggatccttctccgcgaaggaagtgggccccgagcccccctactgatcagaggttcgaaggctggcccctcggaagggttcaacagccgcctcagagcactcgggctccgcacccactactggtcagaggttcgaaggctggcccctcgaaagggttcaacggccgcctcaggccactcggcctcctcgcccactactgatcaggggttcgtaggctggcccccgaagggttctgacagccgcctcagagcacgtagagcgagggatgaccctgggtacgttcgatacataaccaaggctcgggctacgctcccaagcctcgggcaaaggcagccgaccccgaaggattcacgtctcgcccgagggccccctcaagcaacggacaacaccttcggctcgcccgaggcccagtctttgcagagaagcaaccttggccagatcgccacgccaaccgacccctcggatgccataggaagctccacctcgcccgaccccagggctcggacacagcctcgtcctcgaaagacggtctccgcctcgcccgaccctagggctcgggctcaacctcgacgttggacgacgaactccgcctcgcccgacccccagggctcggacacagccttggcctcggaagacggtctccgcctcgcccgacctagggctcggactcgacctcgacctcgggagacggtctccgcctcgcccgacccagggctcggactcaacctcgacctcggaagacggactccgcctcgcccgaccctaggggtcggactcagcctcgacctcggaggagcccccgcctcgcccgacctagggctcggaccgaccatgtcacagggggggccatcattaccctacccctag

SEQ ID NO: 5636 - DNA, 1149 bp, Zea mays
  Peptide Sequence Number=SeqID_49011
atgcatcgcatccttccaccttccgagcccccggatggggagcactcgcgtcgctttcgtcttgttgtcgttggaggaacgcaacttcgcggaagttggtacctttcagccatcgttcggcttcaaggattttcatcaggcagcccggctgcatcccctcgccggtggtcacccaagacggtgaccaccggtttgatggtggggagaagcaagccgggctacgacctctgccccgccctcagcttcgaggatcttcatcatcctagctggggaagaggccggactgagccggagctctacctcccgcgcgggttcgtgggtcaccttctccctcagcattcaggggagatggcgctcaccggcctagcgggagggtcggacttcgacaacgcggggctggtcggcgacgagcgtcgtcagcttcagcgtgttgggctcgctggctcagttggctctggctcggctcccggtgcctcctcccgacgcaagagcggttgtcgcgccgcgcacaccggaggaccgcccaagacgtcgtgcgctgctagggcggcgttcgtgttcttgggttgtcctgcctttgctccggtacggcgcctctgcgcggaggtcggtgctcgcccgtccgggaggatccgagtggcctgtgggcagatggcttctgtcgtcggcgctgaggtggtggcggctgaagaagtcctcgtcgccgacgggatcaccgccaacatctgtgctccgggcctctggctctttggctttgatagcttgtcctcgcccctcgagtggggacgtgggcgagggtattgctgcagcagcatccgccctgaggccatcgctgctgctgtttggccacctggagcggaggtcgttgtcgttgttgccggagtgggcgtcggcgagccaccaggggttttgtcgccccgcaggccctccaatgtggggggttgttcgtacctgcgggggcggaaccggagttccgtttgtaatggcaccttgagtgtcggtgtctgttcattgtggctgtcggggcctgaacatgagtccctcggctcggtccgccttgccgcccgaggcttctcttgcttagttaaaggaaccctcggccgctccacggtgagccggggccggaggcagcggttccagcatggatag

SEQ ID NO: 5637 - DNA, 1473 bp, Zea mays
  Peptide Sequence Number=SeqID_49012
atgtcttcgcactcccctcatgcatcgcgtctttccaccttccgagcccccggatgggggcgcccgcggttcttccgccttgtcgtcgttggaggaacgcaacttcgcggaagttggtacctttcagccatcgttcggtttcaaggattttcatcaggcagctcggacgcatcccctcgccggtggtcatccaaggcggtgaccaccagctcgatggtggggagaagcaagtcgggctgcaacctccgccccgccctcagcttcaaggatcttcatcatcctggctggggcggaggccggactgagccggagctctacctcccgcgcgggttcgtgggtcaccttctccctcagcattcaggggagagggcgctcaccggcctagcgggagggtcggacttcgacaacgcggggctggtcggcggcgaccgtcgtcagcttcagcgcgttgggctcgctggctcagctggctctggctcggctcccggtgccccctcccgccgcgagagcggttgtcgcgtcgcgcgcaccggaggaccgcccaagacgtcgcgcgctgctagggcggcgttcgtgttcttgggccatcctgcctttgctccggtacggcgcctctgcgcggaggtcggtgctacccgtccgggaggatccgagtggggatctgccggtgggcagatggcttccgtcgtcggcgctgaggtggtggcggctgaagaagtcctcgtcgccgacgggatcaccgccaccatctgcgctccgggcctccggctctttggctttgatagcttgtcctcgcccctcgagtggggacgtgggagtccctcggctcggttggccttgctccccgatgcttctcttgctcagttaaaggaaaaccctcggctgctctgcgatgagccagagccggaggcagaggtgtcagcatggacaaaggcagagttggctcgaaaagaagacttcatcggccggagcctagccgagccgtccactggcgggaccgacgctggagtcgagttgccgaggccacgagccgggctggtgtcctcggaggacggctggctgaggcttcggggcggccggtcgagccgtctgctcgggccgggtccctggagagaccctggcagtgatggcctgggcatggtgctgatgtcatccttcggagcggagatcctccgaccgcgttgccgtccgaggctcggtcggacttcgtcgaaggtggagttgacgccgagggtgctgctgttccccctccatcgacgtctgagcctgcaggatcggttcacctgtaaaaggtttccgagcattaagacttgttcggtcagcgggatcgcttatccgagcgtgagttacttatcgcagaagatgatgagtgaggatcccactttcgaagtagtcgaaaagcacgaaagacgttctggcagaaagaccttttccgaggaaaattttgacgcagagggggttccccccttctag

SEQ ID NO: 5638 - DNA, 400 bp, Zea mays
  Peptide Sequence Number=SeqID_49013
atggatcccaacgttgagattgaagaatgtgtcaccctgatacaattcaatgagctcaaacaaagcatagaagccaagcaagatctgttggcacaagatcttcagacacttatggctgaaatcagaggtcgtcgtcgactccccgatggtgtaagaaaccatgatgaagatggggaagaagatgaaggaaattattctagaagagcaagtgaacatgggaggagaaatcaaggtgctgcatatggtagaggaagaggccggaatcgaagaaataatgacaatgaagaatctgaatttggggatgatcagtctcaacatcgctatggtcgtcgtcatcatagaggcgtcaaccaagaagggagatttgggaaacttaagtttaccatgccaaaatttgatg

SEQ ID NO: 5639 - DNA, 810 bp, Zea mays
  Peptide Sequence Number=SeqID_49014
atggcagaggagcttttcaatcagccttttgattatgagaactgtttgagagataataggtattgttctcttagcccatttggttttctcccaagtctaaggcatgcccacgaaggaatttattctcaatttcgtcacttcacaatcatgcacaggttttgtggtgttttgaattcttttgtcaagcgaacatccaatggaaagcatggagcagacactaagtccgagaaggataattccacaatattagataaggctggcaatggtcctgttgacaaagaacaatcagttgatgcctatgcaagcaaaagtaaagctcaaaatggaaaggccatgcctagtaatggtggatcgctggctaacatgtggggtcgtgcatcagcaaaacctatgcctccaagtaccactaattctacagctgtagcaagtgttgcagctactgctgatgcacaaatttgtgcgaaggaagaagcagatggaaatagcagcgatgatgaacatgggataaactacaagaggggatccactaatgcaaataacagaaagagaacagtggtatttgattattcggatgatgaggaagatgacaatattgtaagcattgcatctcctgagctaccaaaacagcataccccagaccttgttgttggaattgttactatatcggtaaccaaaagcccaatgatcgaagttgttagcttgctgttcgtaatctaccattacgcaacagtagaggaaattggatcaataccattcagtgagccactaacacacatcataatagcattcaaatgtgtatacaaactttag

SEQ ID NO: 5640 - DNA, 621 bp, Zea mays
  Peptide Sequence Number=SeqID_49015
atgtgttcgttcaaaatcccctcaagatcggatgaggaggaagggctcaaagccagatgccactaccggagcgctaaggtggacaacgttgtctactgtcttgaggatgacgtctatgtcaagctgcgtcagatgggcggcgccttccgcgacggggcggcgccggacttgtgcgccaggaagagcttcttgagcagcctgagcatcatgaggaggcccatcctccgccggcggacgacggcgtgcttgcgcgtctccaaggcgccgtcgagccagggctccctcacggcagacaattataagcactccagcttattgggcgtcataaaatctgacaatgcggtccttgggcttccttatgcgttggccaaccaatcattctgcaaatcattcaacttggatctgcttgaagcctcagctacacttactctcgctgagttgtggctggctcttggatcaagccatgcaaagaaggcactgagtcttgtctaccagagccttcccatgattcttggtcatggtgggcttgagctgcgtgctcgagctcacgttgttttagcaaagtgccatttatccgatctgaaattctcaagtactttgcaacacttcgtgttacattaa

SEQ ID NO: 5641 - DNA, 681 bp, Zea mays
  Peptide Sequence Number=SeqID_49016
atggacggcaatacgaggttcgcagcagagagtcagaagaagcccatcgtcccagatgacgacctcgtggagctattgtggcacaatgggagcgtcgtagcgcagccccaggcgcaccacaggccggcgcagccctctgaccgcgaccgcccgggcaccagcggcctcactgccgaggagaccgccgcgtggttcctgaacaccctcgacgacccgctggagaaggacctgtacacgcaactttggtacaacacgatcgccgatgccgccctgcaacacgagggcacgttcccgggccctacctcgcatccttcgtcgccaccgccacccgttgggagcagcggcgtcgagtctagctgggtcggcgacttctgctcgaccttctgcgacagcaaccaggtgcccaggacgccgacggggatcagggggaaggacgcggcattgcagtcggaggtgccgagcgatgctggcgcgcacgacggcacatcgtcatccggtgggtccggaagcaactatgggggatccgggctgcccagtgacagcgtccatggccacaagaggaagggaatgtgtagagacgagtcagatagtcgaagtgagagaagaagggaccggatcaaagaaaagatgcgtgcgttgcaagagctgatcccacactgcaacaaggtacaagtcccttga

SEQ ID NO: 5642 - DNA, 735 bp, Zea mays
  Peptide Sequence Number=SeqID_49017
atggcgagcgacggcgacggtaagggccgcgtcgctacggcgccgggggcagggtacgggtacgcggcgtacggcggctaccagggggcggaggagcggaagtggtggccgtggctcgtgcccaccgtcatcgtcgcctgcatcgccgtgttcgtcgtcgagatgtacgagaacaactgccccaagcacgggagccagctcggcgactgcgtcgccggcttcctccgccgcttctccttccagccgctccgcgagaacccgctgctcggcccgtcctcctccacgagcaggacccccccaattagagtgttacgggtgtgcttcaggtcgaatcgtgctggggagattgatttgtttcgcgtttgggatcttgcggcagcagctataataacactgttgtttattattgcactcaatttggctattgggatactacctcacgttgacaactttgctcacattggtggattcgcgacgggtttcctcttgggttttgttctgttggcaaggcctcaatttagctggatggaaagtcatgagttgccacacactaaccaacctcccaagtacaaagcataccagtatattttgtgggttgtggcactcgtcttgctgttagttgggtttgtgatttcactggtgatgcttttcaaagggaagaacgggaacgatggctgccattggtgccactacctgaactgcgtgccaacatccaagtggaagtgtaacacctag

SEQ ID NO: 5643 - DNA, 447 bp, Zea mays
  Peptide Sequence Number=SeqID_49018
atgttgtttcagttttcgcagcaaccaaacctcttccacagccagggtcctaacatcctgggcaatctccagtctgtgcaacacctcgcgagccaaacccaattgagtcccaacattacccaccgttttgtgcccccaagactgcagtctcttggacaatctcctcagcttcaaggacactttctcaagaggacagaaacagtgagctggctgattccaggaggcagcaacctcctcaaggaacccagggagcttaagccaaaaactttcaaaatgaaatctgcgcttccccctaatatccatcttgagtttgagagtcaagggacagtgatcagaggccacagtggcattactaaagagcatacaatccggaaaaaattcttcccagctgttagtgcagaagacatgatccagcttgacaagggtaggatcttctctctgatttga

SEQ ID NO: 5644 - DNA, 138 bp, Zea mays
  Peptide Sequence Number=SeqID_49019
atggctcgaaaaagatcccaaaagaacaagaagaccaaggagaacaaggaggcgcagctccgctataattcaccgggctgtctggtgcaccagcggagcaacggctatctgcgcgcaacggtcgactatgcaaagtga

SEQ ID NO: 5645 - DNA, 1050 bp, Zea mays
  Peptide Sequence Number=SeqID_49020
atggctaaaaggtaccaactcccacggagttgcgttcctccaacgacgaggcggaaagacggcgggtatcccccatccgggggcttggaaggtggaaagacacgatgcataagagagcgcgaagacatggtcgccttccaagggggtcaccctccttttaaaggcgactctccctacttgcgtccccagccgtcgcaggctgagtcttctccaacacgctccaaggtcctcccctgcggcgcgggggctgggtcccacacgtcatgcaagccggctcagagcagaagaagccaaaccgccgtgcgcggtgcgcacgaccgcccagcggttacaagcgactctccacttttgcccagtccaacgggcgaaaggggcgggcagccatgcaggcggcatgcaaccgcgccaagtgggcgcgcttctccgagtcccaacacgcccagcatggaggcccaggcccacgcgtcatgcaaccggcgcgccgaatgcttcgtgcatgcaactgcaccgccacttgcgccaccactgcgcctcctcgactgcggaaccaataccgcgactcgaggcgacccagcgcgcgacccagcagcgccagcctggcgcgacggtcaatgcggccaaaaacgagccggcagtaatggcggtggcaggcgggcaggagcagtgggaccgggaaagggggataccccgaaaaggatccttcctcgtgaaggaaccaggctccaagcctccctactgatcagaggttcgaaggctggcccctcggaagggttcgacagccgcctcaggtcgcgtgggccctacacccactactggtcagaggctggcccccgaagggttcacagccgcctcagacacggagcgagggatgaccatgggtacgttcgatacataaccgaggctcgggctgcgctcccgagggctcggactcgggctaagccccggaagacggcgaactacgctccgcccgacccagggctcggactcgggctaagccccggaagacggcgaactccgctccgcccgacccagggctcggactcgggctaa

SEQ ID NO: 5646 - DNA, 201 bp, Zea mays
  Peptide Sequence Number=SeqID_49021
atggagcctggcggagggacagctgtcggagctgttgagtccttgctgacgtcctcttgcttccgtaagggggttgagagccgtcgtcgtcacagagttgggcgatgtggaagctcctccgaagccgagatcgagtctgccttccgtggtcgaggtcgagtccgagcccctgggtcgggcgaggcggagactgtcggctga

SEQ ID NO: 5647 - DNA, 570 bp, Zea mays
  Peptide Sequence Number=SeqID_49022
atgagcatcacctccggattgtcctcggaagactcagagcacatcaactctatgctaagctcagcaaatctcggcgccaagatctgtggcgccgagctacgaggccgcgtcgccgccgcgtcgatgtcagctgcatcaccggcgacggcggcgatggcacggaggagaaagacggacgccccgccgcggctggacgaggcagatcgcacgctctactccaccttctgcggcgccgccaactccctctcccagctctacgcgcaggccatggcccagcagaagctcaacttccatgccggcgagcgccacgccttagaaaagctctaccagtggatcttgaggaagcacgatgaagaggctaggctcactgtggctgaaataatgtctcatatccagcatgagatagactatgtaggtactgatgcacatgtctccccaagagtacctcagcatcctcagattgcaaatccattcgccaattcagttgtcccacctggaactggagtctccagaactctcataccactcaaggtgctggcaatggaggccggaatgcagaagcaaacttag

SEQ ID NO: 5648 - DNA, 1434 bp, Zea mays
  Peptide Sequence Number=SeqID_49023
atgaggtggcttgcgcaggcattgctgaggaagcaggtggcgcgcgcgaccactactgaggaagatgaaggcaagacattcgataccagggacccacggaccggcgacgtgctggcccacgtagcagaggcagacaaagctgatgtggacctggcggtgaagtccgcccgggacgccttcgagcacggcaagtggccccgcatgtcaggctacgagcgcgggcggatcatgagcaagctggcggacctggtggagcagcacacggaggagctggcggcgctggacggtgccgacgccgggaagctgctgctgctgggcaagatcatcgacatccccgcggccacgcagatgctgcgctactacgccggcgccgccgacaagatccacggcgacgtcctgcgcgtctccggcaggtaccagggctacacgctcaaggagcctatcggcgtcgtgggcgtcatcatcccctggaacttccccaccatgatgttcttcctcaaggtcagcccggcgctcgccgcgggctgcaccgtcgtcgtcaagcccgccgagcagacgccgctttccgcgctctactacgcgcacctcgcaaagatggccggcgtccccgacggagtgatcaacgtcgtccccgggttcggccccaccgccggcgccgcgctcgcctcccacatggacgtcgacagcgtggccttcaccggctccacagaggtgggtcgcctcatcatggagtcggccgcgcggagcaacctcaagacggtctcgctggagctcggcggcaagtcgccgctcatcatcttcgacgacgccgacgtcgacatggccgttaacctgtcgaggcttgccgtcttcttcaacaaggaagggatctatgacgagttcgtcaagaaggccgtggaggccgcgcggagctggaaggttggagacccgttcgatgtcaccagcaacatgggccctcaggttgacaaggaccagtttgagagggtcctaaagtacattgagcatggcaagagcgagggagcgactctgctcaccggcggcaagcctgccgccgacaaagggtactacattgagcccaccatctttgtcgatgtcactgaggacatgaagatcgcgcaggaagagatcttcggccccgtcatgtccctcatgaagttcaagacggttgatgaggtgatcgagaaggccaactgcaccaggtacgggctcgccgccgggatcgtgaccaagagcctggacgtcgccaaccgggtgtcccggtcggtgcgcgccggcaccgtgtgggtgaactgctacttcgccttcgacccggacgcgcccttcggcgggtacaagatgagcggcttcggccgggaccaggggctggcagccatggacaagtacctgcaggtcaagagcgtcatcaccgcgctcccggactcgccatggtactga

SEQ ID NO: 5649 - DNA, 285 bp, Zea mays
  Peptide Sequence Number=SeqID_49024
atgggcgtgcctgacttctgcgcgcttctggcgcgcattgaatgcgcctgcagcgcgccggctttgaaaattcccgaagctgaggagttcagcgcggagtcccctggtgcaccggacagtctgaagcgcaaggcgggtgcatcgatcttgaccaccgcaaaggtcgtgaagacgtgtgcggggtcatcggccggggctgcggcccacccagtcccctgggtcgacgctgcccgggaggctcttcagcggggtgacgaggcgtccaggcttgccctagaggggtag

SEQ ID NO: 5650 - DNA, 288 bp, Zea mays
  Peptide Sequence Number=SeqID_49025
atgggctcggcggcgctcgggctcggggacggggaaggggacggtggcgcactcggagatgggctcggcggcgctcgggctcggggacggggtggagggcgcctcggagacggtggcgctcggggacggggacgggcgcccgccagctcggagacggtggtggttgggctcgggctcggcggcggcgtggagggcgctcacggctcggagacggggacggggacgggaacggcggcgcagcagcctggcggcgtagtatcagctccgggcgaaaacactaaaccctaa

SEQ ID NO: 5651 - DNA, 447 bp, Zea mays
  Peptide Sequence Number=SeqID_49026
atggcctcccccgacctgctcttcaatctgcggaacctcttctacctgggcgcctaccaggcagccattaacaacatcgacatcctgggcctcgacgccgccgccgccgctgagcgcgacgccatcgtcttccgctcctacatcgccctcggctcctaccaggtgcgaacacatctggcgtcaggcgcctcagccgctacctcgctgcaggccgtgaagctgctcgctctgtacctcactggagacaagcgtaggtatgtcatgaagaagatcaacatctccaagcagaacgacaagttccagcagaccgcttaccaagaggcgttttctaaaccttccgtaggcgttaaggtggcaaagtatcccaggtgcagccatccagagcttgtgatgggtctcagggagcacactgacgctgggggggatcatacttctatttcaagatga

SEQ ID NO: 5652 - DNA, 450 bp, Zea mays
  Peptide Sequence Number=SeqID_49027
atggcgcctcctgttgacgtggccggtctgcgccctaggttgggcgatgtggaagctcctccgaagccgaggtcgagtctgtcttccgtggccgaggtcgagtccgagcccctgggtcgggcgaggcggagaccgtcggctgaggccagggcggagtccgagccctggggtcgggcgaagcggagttcgtcgtcttctggggctgagcccgagtccgagccctgggtcgggcggagcggagttcgtcgtcttctggggctgagcccgagtccgagccctgggtcgggcggagcggacccgagtccgagccctgggtcgggcggagcggagttcgccgtcttttctggggctgagcccgagtccgagccctgggtcgggcggagcggagtttcctatggccggtcagtggagcggcgaagtgacggcggtcacttcggctctatcggctga

SEQ ID NO: 5653 - DNA, 1707 bp, Zea mays
  Peptide Sequence Number=SeqID_49028
atgacgagggtgtgttttggcctcggcggccgcagaaaacacgcgctacaagatgatccgaccctgcaggcacggatcttgacgcttgaagggagcagcagcaccctcggcgtcgacaacacctttggcgaggtccgacctggcctcggacggcgacacggtctaagggtctccgctctaaaagacaacgtcatcaccaagctcgggccgtcgccgccagggtcttctccgagaatccggctcgggcaggcggcttggctggccacccccgaggcctgggccagctgtcccccgaggacatcagcccgacccgaggcctcggcaggcctcgacagccacaatgaacaaaaacactggcattcaaagtgccattacaaacggaactccgggttccacctccgcatgtacgaacaaccccactcgatggggagggggcctgcggagcaacagaagaccgacgaacggcgcgccgtcgcccgctccggcagcggcgacgacgacgacttctgctccggggggccaaacagcggcagcaatgacctcagggcggatgctgctgccaggaggcccccgcccatgcccaaactcgtgaggcaaggacgggcagaaggccgtagagttggaggtcggtccgtgggcggccctggctatctcgtcggcggaagaacctcttccagctgccatggcagaagccggcgccgagagcggctccgaagccactcgggcccgagagccaggcacgcggcagctggcagcgccacggacgacaaccgcccttccccccaatcactaagggaaggagcgggccaccgcccacgcaggggccgaccccaactcggcacactcccctccccagccctggtgatgaaaatccttgaggctgagggaggggcagaggccgcggcccggggcttggaaggtggaaaggcacgatgcataagggagcgcgaagacatggtcgccttccaagggggtcaccctccttttaaaggcgactctccctacttgcgtccccagccgtcgtgggctgagtcttctccaacacgctccaaggtcctcccctacggcgcgggggctgggttccacatgtcatgcaagctggctcagagcagaagaagccaaaccgccatgcgcggtgcgtgcaaccgcccagcggttacaagcggctctccacttttgcccagacaagcgggcgaaagggcgggcagccatgcaggcggcatgcaaccgcgccaagtgggcgcacttcttcgactcccaacacgcccagcatggaggcccaggcccacgcgtcatgcaactggcgcgccgaatgcttcgtgcatgcaactgcaccgccacttgcgccaccaccgcgcctcctcgactgcggaaccgataccgcgactcgaggcgacccagagcacgacccagcggcgccagcctggcgcgacggtcaatgcggccaaaaatgggctggcagtaatggcggtggcaggcaggcaggagcagcggtcacgtcgccaaccaagcctacgtcccatccaggggcgacgagagaaccctctctcacggcgtgaagacaacgcgcccgtgttccgttcctcgaacggctcgcgcacgcacaacggccgccccgcgaaccactcgccccgtcgcattaactccgcggcgggacaggcggcgcctctggcaggagaagcgagcgacgctttgccttcgccataa

SEQ ID NO: 5654 - DNA, 211 bp, Zea mays
  Peptide Sequence Number=SeqID_49029
atggtgcggtggcggccggagaggaaaaaggctactggtgcaagtgaactcgtggcaaccgtcgtggcgacaactccggtgatcggcgggaagctaaaacgaagcgcggcgatgcggtggaggtactcagatacgtggcgcaaggtcgtgcgacggtggttccccggcgagcttatctgctcagccgcaaaacagaagggagatggtgacg

SEQ ID NO: 5655 - DNA, 747 bp, Zea mays
  Peptide Sequence Number=SeqID_49030
atggccgcaccgcatgacatgcacggcgtggactctttcgcgcagctgcccttcgtccgcggcgcggcgccgaggcctccggcggggagcagggacgtcgccaccagcatccgcctcttcggccgggacttttccagcgaccagcagcaggcggtccagctgctgctgctcaaggaggacgcggcggcggcggcggcgtccggggagaggaagttcgagtgccactactgctgccgcaacttcccgacgtcgcaggcgctgggcgggcaccagaacgcgcacaagcgggagcggcagcacgcgcggagggcgcacctcgaggcctccttcgccgcgcactgcggcgccgcctacctacccggcgcgcacctctacggcctcttcggctacggcggcggcggcggcggcggccacaccgcgcactacccggccgtgtgggcaggcgccgcgccggggatctacggcggcgtggggcccgtggcgcggcctcccgtgtacggcgccgtggccgtgccggggacgtggaggccgtccccacctgggagtggcggcgctttcgtcgcggctggccgacccgtggggtacggagagatggctggcaaagacgacaaggcgaagatgagcgtggtggtgtcactgcccgcgtcgttgccgtcgtcgtgcttgtccggccagtcggcggagatgatagggagagttgtttcaagcatgtttcttcagctaaattgcgcgagacatttccattag

SEQ ID NO: 5656 - DNA, 2154 bp, Zea mays
  Peptide Sequence Number=SeqID_49031
atggaccagtccacggccaaggcggccgcggcgtccaataacgcggaccacgtcctcgtcatcccgcccggccacccgccgccactgcacccgagaaataaccagcagccggagactcccaaactctctcagaaccccgagaagccgctgccaacctccagcccctcgcgcccgccgctgccccccgcggccctccgccgccgctcctccatcgccaagcccaagtcgcgcttcgtcgagccgcccaccccgacgcacccgcactccgcccacccctccccagtccaccccgccgccgccgcctcgctgaccgccaccccgacccatcgcgccgcgggcggctccacccctgctgcagaggtcgacgacgacgaggacctcttccgcaacaaggacggctcccgcgcgccggcctccgcggcgcgctgccgccgccgggcccgccttggcgtggagctctgcgtgctcgtcctcttcctcggcctgctcctcgtcagtctcgtggtggcgcccctacagggccgcgtcctgtgggggctggaggtctggaagtggtgcgtcatggtcatcaccgtcttctcaggccacctcctcagccagtggctcgtcacgcttatcgtcttcgttatcgagcgcaacttcctgctgcgcaccaaggtgctctacttcgtcttcgggctcaagaagagcttccaggtctgcctctggctcgcgctcgtgctcatcgcctggtcccagctcttcgacagcgaggtcggccgctcccgtaagaccgccaggatcctcaactacgtctccaggttcctcgcctccatgctcatcggctccgtcatctggctcgtcaagaccttcctcatgaaggtggtcgcgtccacgttccaccggaaggccttcttcgatcggatccaagagagcgtgttccatcagtacgtgctgcagacgctgtcaggcccgccgttgatggagctggcggagaatgtggggcgcgagggcagtggccttgggcgggtcagcatcagcagagccaaggaggagaaaggcgtgccagaggtgatcgatgttgttaagctcaggaggatgagtcaggagaaggtctcagcatggacgatgagagggctcatcacaacaatccgaagttctaggctgtcaactatatctaatactatcgagagcagctttgatgatgtagatggcattgaacagaaggataaagagataaatagtaaatgggaggccgaggatgcggcatatgccatattcaaaaatgtcgcaaggcccggctataagcacattgaagaggtggatctgctgaggtttttcaccaaggaggaggtggacctgctgattccaacttttgagggagcaccagaaaccggaaagatcaaaaaatctgctctaaagaattgggtggtgaaagcatacctcgatcgcaagtcactagcacattctctgaatgacacaaaaaccgcagttatgcagcttcacaacctcgtcagcgttattgtcataatcatatccatcattgttacgctactgttgatgggcattgcgacaaccaaggtccttgttgtcgtctcgtcccagcttctggttgtggtattcatatttgggaatgcatgcaagactgtatttgaggccctcatatttgtgttcatcatgcatccattcgatgttggtgaccgatgtgtaatcgacggaacacagatgactgttgaggaaatgaatatattaacaactgttttcttggagaatgacaacgaaaagatatactatccaaattctgtgttgtccacaaaggcaatcagcaacttctaccgaagccctaacatgtttgacacgattgattttgcaattgatatttcaacttcagttgagagcattggagctttgaggtccaaaattaaagggtacttggagagcaaaccaacgcattggcaccctgtccacacagtaaatctgaaggacatcttggatgtgaacaagatcaacatgtccctctgtgtccagcacaccatgaacttccaaaacatccgggagaagaacatcaggaggtctgagctcgttatggagttgaagaaaatattcgaggagatgtccatccggtaccacctgttgccccagaaagtcgaactcacctatataatggatttgtaa

SEQ ID NO: 5657 - DNA, 945 bp, Zea mays
  Peptide Sequence Number=SeqID_49032
atggcgcaccggacagtccggtgcgccaccggtgcgccaacggtgcaccaccgcccggctgtatccccccgccggtggtcacccaagacggtgaccaccagttcctgggtggggagaagcaagccgggctgcgatcttggtcccaccctcagcttcaaggatgttcatcatcctcgctggggtgggggccgggctgagccggcgctctacctcccgcgtgggttcgcgggtcaccctctcccgcggcgctcgggggagagggcgctcactggccctgcgggcggcccggactttgacaacacggggtcggtcgtcggcgggcatcgtcacctccagcgtgtcgggctcgtcggcttggctcccggcggcccctcccaccggagggcggctgccgcgccgcggaggcggctcgagaagtccccgtcaccgacggggtcaccgccaccattcgcgcttcgggcctccggttcttcgtacttgtcctcgcccctcgagcgtcggtgtgggcgagggcaagattgcagcagcgcccaccctgaggcctgcgctgctgcagctcgaccatccggagcgggggtcattgtcgtcgtagtcagagcgggcggcggcgagccgctcgtcagccttctgtcgctccgcaggcccacccccatggagtggggttgttcgtacctgcggagggggaaccggagttccgtttgtaatggcactttgaatgccgactcgcctgttgattatctgagccgcttcaccaagcatgagtcgccccgtgtcaaggtgacgagtgagcacgaacagaggcggagttggctcgaaaatgaaaacctggttggccggagcctagccgggttgtccgtcagcgggaccgatgccggagttgaccagccgaggcctcggaccgggctggcgcccttgaaagatggttggccgaggcccctggggtaa

SEQ ID NO: 5658 - DNA, 1896 bp, Zea mays
  Peptide Sequence Number=SeqID_49033
atgccgacactcatcatcttgcttctgagtaaaaacgtggcaaggcagaggctatggctccgctcaatgcaactcaccatggttctggacctgttcagcctgatgggggcctatgcagcctatgatgctggaacctgcagggcagtgaagtcctccatctacatctgggttctggtgctctctgttttcacatatattatgatccacatcctagtgttcatgagagttgttccaagatttgtgtccgagaaaagatttgttccaaaacggctgaaagatgtggcgcggtctatggagcgctggatcctatccaggtgtggtgttcacaggagccaaaagaacagctctcacaagaaagatctagaggaagctcgcaagttcactctggtgcttgtgacttttgctgcaactgtggcataccaagcagggttgagtccaccaggtagtttttgggctgaaaatgatgagaacaaaactccagctacatctatgcttcgctctggaaaccttcctcgatataatacttttgttgtttgcaactcgacttccttcattgcgtctttggtcacaatcatactgcttctaagcccagaactgagtcggcatggcatcaaatccagagcggtgaccgtgtgtgttgttgtcaacatattgggccttgttggagcatatgctgcaggaagctgtaggagtgtggtgacatttgtctctgctgttttagtggctgttctagtatggatcttctttgcagttttagctgggatctttgttaacagatctgtagcagagtggtttgggaagaagatcaagccatatattatgaggtgcaccgatagatttggtcgggtcttttcgtcgaaccatggcagaaagagatcaagaaatccagagggagagaattctattgcaagtcaccagcaaactgaagagagcataaaagatattgaagagggtgaatgccctggggagcagcagagtccaggcaaacaacaacctacaaacattatggttgtgtccatctcagagcatgcatctgtaaatgagaagcaagcagaaaatagcagcagtgtcatgtgcaagctgggaagtcagtctacagacccaaattcagctgcaaacgaggctatgactgaaactgaaacagaaaacatacaagatgcaaatatggaggaacaacaatcttccttggtggatggtcttaaaactcccactactgtggctgatcaagaatccacagccgtggagtgcttgtccgacattgcacccaataataattgtaacctgtgggagcgtggtgatggaaatcacaaaccttttgtccgtgatcttgctggagacaaaaggaaagaacaatggttaagagaggatactacatgtatgctcccaatcacaaatcgatcctacacaccaaggatgaagaaacagatcgatctagggttaggaagaaccagatcacaagcatgtgaagtgatagagaaggaggaggagggagagagcgtcgcttgtgcgcacgtctgtgtggcgagtagtgcgcgctgggggcgacaccctggagagcggataaaggtctcaccggcgaggaggcaccttgggagggagaaggacagccgaggaagaggagtgtccccgtgggggaagggaacttgtcacctcgggaggaagaatgtggagctgcggtcgagcttggggaccttgcagcaatggccttgggacgccatctgcggtgatcgccagctgtggtcgagattgatggggacgggtgtcgtcgatggtggggtgaggccggtcggtggcaaggggactccccttccatggagagcgcggatcgagagctggtgcgtcgatccggggcatctgattcgccttccatggagagcacggcgcgaacgcagatga

SEQ ID NO: 5659 - DNA, 411 bp, Zea mays
  Peptide Sequence Number=SeqID_49034
atggccactggtggtctgacacatcgagatccgttcgtccatggttgctacggcggaggcgagaagggccagtgcgtcgagtaccaagtatcgcacccgattccagagcgaggcacaggctgcggtcaagcttggttcggctggcggcggagatgtgacttcaaaagttttgaaagaagagataaaaaaattctaactcaaaacctttggaaaattttacataattctcaaaatgagattttgaggtgttacaccgggacacaccccaatttcccctctccctccccaatttcctctgccagcgctcacccgccgttctctgcgcagtcgccgaggtccgccaccgtcgactcgggctaccgccgcgccttcgccgccaccgaggagtccccggagttcgccttgaggtaa

SEQ ID NO: 5660 - DNA, 486 bp, Zea mays
  Peptide Sequence Number=SeqID_49035
atgaacacccgcggacttaggcctctaggtcaacccctagcgaatgttggggccctcagacctagcacaacccatgacggttactcggttagaccgcaggcgctccatcttccgctccctctccgactcgcgctcggcacgcaggcgacggcggtggcggcgctcaggctcgggctctcagcgacggcggggcagtcccagattcggcggcggcgtcagcggctccccctctctcctttcgccaatcgccttgcgccaatcgccttgcgcctccggtcctccgcacaccggccggcgactctacgtgcgcgcctcctgctcccctcttactccggtggacagtcgacggcgtccggctccggcggctgcactgcgcgccgcgtgcggccgtcgggcagcaggagccagcagccgctgctccaccaaggcgggcgcgccgctttagtaccgcttattccccaaacgaagcgtgacccgtccgcttag

SEQ ID NO: 5661 - DNA, 405 bp, Zea mays
  Peptide Sequence Number=SeqID_49036
atgccccgccatccccacccttccccaccatcctcgcccttccccagatcacggtgccttccatcgtcgccatccaccgcaatccccgtccttccccaaatcatggcaccttccatcgttgccagcgcgtggccccgacaaggtcacatgaagtgcaaatggttttttttccttcttgcgtgttggtgtaaagagcaggtactcatatcgaaagatcaatatggtggtaccatattgaatctattgcgccggctcgggcttcacttgatcgagaggtggtggagcaaggtgttggtagcatattgggtgcagccaaggttggccttgccgtggaacaattgtgagaggacatcatggtggcaggaagttgaagaaggtgttttttacaagatcaagatgaggtag

SEQ ID NO: 5662 - DNA, 702 bp, Zea mays
  Peptide Sequence Number=SeqID_49037
atgagcggctctctcgtcctcggtggcaccggaggcggcgagggcatgcaatacgtgcccttggtgaagagcgcagcgggtgacaagttgtcgtacgacatgtactactacctggcgttgaggggcatgacggtgggcgggaaggcggtgcagctcttggcgtgggagttcgcgaccaacgcagcagggtccggaggcgccatcatggactccggcaccacgttcacgtacctagacccgaccgtgttccagcctgtggcggacacagtggtgacggtggtgggcgggcggtacaaacggtccaaaaacacggaggtcgggctggggctgcacccctacttcgcgttgccgcagggcgccagtcaaccaactgataaaccattcaggactgaacacatgaggcgtcttgaatttgccttctggttcaagattattccggacaggagaagctttttggaaaaacaggccaagcgcggaccgtccgggcccttgcggcggaccgtccgcgacacaaggatgaccctcagacagaaccaatgcaaaaacacaagtttccactacagactgtccggaggaaaagtaaagaccgtccgagccctcgcgcggaccgtccggcctcaggcgcggaccgtccggtcggggcggaccgtccgcaccaggagggcggaccgtccgcgctcagcagaaaggcccaacggctag

SEQ ID NO: 5663 - DNA, 1005 bp, Zea mays
  Peptide Sequence Number=SeqID_49038
atggttgcctttcaagggggtcacccaccttttaaaggcaactctccccacttgcgtcctcagccgtcgcgggctgagtcttctccaacacgctccaaggttctccccctacgacacgggggctgggtcccacgcgtcatgcaagctggcccagggcagaaaaaagccaaaccgccgcgcgcggtgcgcacaactgcccagcggttacgagcattcctccacttccgcccaggccagcgggcgaaagggcgggccgccatgcaggcgacatgcaaccgcaccaagggggcgcaccctttcgacttcgatgcgtccagcatggaggcccaggcccacacgtcatgtaaccggcgcgccggttgctacgtgcaagaaactgcaccgccacttgcgctagtaccgtgccctctcgactgcggaagcggtaccgcgactcgaggcgacactgcgcatgacccgacagtgccaaccgagcacatcggtcacgggtcagtcagccacgggagaaggcgcgatggtcgatacagccagaaatgggccggcagtaatggcggtggcaggcaggccgaagcagcggacaggcggcacctttggcaggcgaagcaggcgacgcttcgcttccgccataatgaccgtgtcaaaaaagggaccgggaaaggggataccccgaaagggatccttctccgcgaaggaaacaggccccgagcccccctactgatcagaggttcgaaggctggcccctcggaagggttcaacagccgcctcagagcactcgggctccgcgcccactactggctggcccccgaagggttcaacagccgactcatacgcagagcgagggatgaccctggatatgttcgatacataaccaaggctcgggctacgctcccgaggctcgggggctgctctcgcaaacccggctccggccaaaccgttgacaacgtcaacataccagtcgagaacttgggactcgactgtgcacccgggctacgccagttcgcatga

SEQ ID NO: 5664 - DNA, 720 bp, Zea mays
  Peptide Sequence Number=SeqID_49039
atgggtcggtgcaagacggagcacggagggcagaaacaaggagacaggcgtaaaggggaaacccgcggccttcgtgtttgtcctgcgcccaggtcgggtgcgcttgcagtagggggttacaagcgtaaggagagggcccaggataatgatggccccccctgtgacgtggtcggtccgagccctgggtcaggcgaggcggaggctcctccgaggtcgaggtcgagtctgtcttccgaggtcgaggtcgagtccgagccccgggtcgggcgaggcggagaccgtcgtctgaggccaagactgagtccgagccctgaggttgggcgaggtcgagttcgtcgtcttccggagccgaggctgagtccgagccctgggtcaggcgaggcggagttcatcgtccgaggccgagacgggggccgagccctggggtcgggcgaggcggagcttcctatggtgcccgaagccggacttggctgctgtcagcctcactctgtcgagcggcacagcagtcagagcgacgccatccttgcattaaatgcttctgcgatacggtcggttggcgtggcgatctggccaaggttgcttcttggtgaagactgggcctcgggcaagccgaaggtgtgtccgttgcttgagggggccctcgggcgagacgtgaatcctccggggtcggctgcccttgcccgaggctgggctcgggcgaggcgagatcgtgtcccttga

SEQ ID NO: 5665 - DNA, 2340 bp, Zea mays
  Peptide Sequence Number=SeqID_49040
atgaagagcctgttcaagagtaagatcaggtggcagcaccggtccaacgacccggcgtccccgtcggggcagccgcagccacagccgcagcaggcgttgggcccgccgtcgccgtcgccttcgagctccccgtcgtctgcggcgccgctctccgtgtcaacggcggccacctcctccccctcctcgcccccctccgcggcggcgacgcccacgggtgctggggcagcagcggcagcgggagcgggagcggcaggggaggactacatagcgtcggaggaggagttccagatgcagctggccatggcgctgtccgcgtcttccaacagcgattgcgtgggggacctggacggggagcagatcaggaaggccaagctcataagcctcgatcgcttcgctgcccaccgcgacgagggccacaccgcggagtcgctctcccgccgatactgggactataactttcttgattatcatgagaaagttattgatggcttctatgacatctttggctctatggaatcctctaggcagggaaatatgccatcattagcagatctccaaacaggcataggggacctaggctttgaagtcattgtagtaaaccgtgccattgatagtaccttgcaggagatggagcaagtggcacagtgcatcctgttggacttccctgttgccaatattgcactcttagtgcaaagaatagctgagcttgttacagataatatgggtggacctgtcaaagatgctaacgacatgctcacaaggtggctggagaagagtactgagttgagaacctcgctacaaacaagtttgttgcctattggttgcatcaagatagggctatcacgtcaccgtgccttacttttcaagatccttgcagatagtgttgggattctatgcaaacttgtcaaagggagcaattatactggtggtgatgatgacgatgctataaacataattaagatggacaatgaaagggagtttttggttgatctgatggctgctcctggtgctcttattccagcagatatcttaagttggaaaggcaattcgttaaattctaatagaaaacttggcctgagtcagacagctggatcatcgagtaccgttggtgctaatatgggtcctagtgtattgccacttgaacctaaaggtgatcagctgcctttgttcagcagtggtgattggatatcagagagtggttctggatatggggcagcagaaactgcagcttctactcaaacctcttctggtgccacatcatctgttcctgctggaagtgcttttgacagttcatggatgctgattaatcatgaccaatcagatggaccatcaacttctgctggtacatcatcccagcagaaagttgtacctcaaaacgaacatccacggaatttaaaccgtcttccagatttgcaggaaattccagagtcaaaaaacctttttgctgaccttaatccttttggggatacgaagtccaagaaaacttcagtaccattcaaaggaccagatcaaaggaacaatgagttgcaaaagcgcagagagaacattgtccctaatggtggaagaccacagcagcggttagttatgaagaattggtctccttataatgatgtttctaacaacaaacagtacaattatgtcgaggattcatttgcacgtagaaatgttggcaacaatgccgcatcatcatcatcccagataacacaacaagccgcaaggtctaatcttaattctggattgcgtaatgatgcatcatatcataattatgatagtattatggctggtacctctgccacgaatattacatctacagctgagactgggaaggttcctgaaagggttctgcgtggtgatttggataaaggtcaaacaaattatagacttcaggatcaacatgttgtaggtcaaccaccacaggaaagacttccatggggtaatcctgctgaaggaagagttccaatgaatagatttcagaatcaagcaaaacaacacatgggaaacattgatacaaagcaagaccataagaaattgctccctgatccaaaaaaatctccccttgacagattcatggacacgtcattgccatcaagaaacttggacgtgaggtcacagaggcttgactttgatgatgtgtctgaatgtgaaattccttgggaagatcttgtgattggtgaaaggattggcttaggttcatatggagaggtttaccgtgctgactggaatggaacagaagtagctgtaaaaaaattcttggatcaagatttctatggtgatgctctggatgagtttaggagtgaagtaggtgaacttttatctgtttctatcttggagttttcgtaa

SEQ ID NO: 5666 - DNA, 300 bp, Zea mays
  Peptide Sequence Number=SeqID_49041
atgccgcgagcaggtggggggaacgggaaatgcgaaggaaagccgaaagcgggtggagtcctagtcgtccgtctccgcggggcgtggcgtgactgcaaaatggcgcggctgctttgtgactgtggcggctggcggatcgggtcccgggttgggtcgggtcggcccagtaccttcggacttatatcaaagagggagaacctcaaaagatacgaaggttggcagtgccgaagctgtgaagcaggaaagcttcggcatgttcgcagaaaagggaaccgacttaaagatgaaaaggtcatttag

SEQ ID NO: 5667 - DNA, 291 bp, Zea mays
  Peptide Sequence Number=SeqID_49042
atgaagagcatgttttatgcgccttatctgagatcagtcaccagactgtccgacgattcatcggactatccaattctcaccaggttgactagaccggttgaaccgccccctgacatctctggcgatgtgtctgccaatctgactggcagactgcaggagagaaaaccccagctcaactgcccagaggcaagttcagctggtgtatggtcaaagaggtccacaactgaagttgaagttcagctggagttgagaaagctcaactcagttgaagttcagctcagctgcagctga

SEQ ID NO: 5668 - DNA, 642 bp, Zea mays
  Peptide Sequence Number=SeqID_49043
atggggagtgattggaaccaggtgatgtctcaatatggaagcttccttagccagattgacgagcagcctatcggaacacaacattctgaatttccagttgatgggcaacccgagggctcaagaacaccagctgttactaaaaagccaactcaaagaactaagctagcaaacttcactactgaagaggacacaaggggcagaaacgtcaaggattttggagtagaattactgaagcatacaactcaagacgaggaacattgccagaaagaagaatctgtaccatcaagcttcacatcgaagaggccacttggtcgagattcttctaaggaaaaggcaaagaggactaaatctgtggacacatcttcatcagattctgagttcatgacacgcatgggagatctttctttggagcgcctgtcagtgtacaaaacagctgttacaactgaggaaaagaagttggattcaatgaacaaaaatgagaggcagaaattgctcctagaaaagaagaagttgaacctagagaaattaaggcttgaaaggcagaaactaaaggaggacaaggaagaggagataatgatcttaagcatggatttgagcaaatgtaaccctctactccgcaagtactatgaagccaagcaataa

SEQ ID NO: 5669 - DNA, 606 bp, Zea mays
  Peptide Sequence Number=SeqID_49044
atgccacccttcgctcgaggccttcgctgcagtcgttggtccaacggagataaagcgggcagggacacccttcgccccacacgacatcaggcgaaggcctgcgacgaggtcatcccaccatgcggcctcgtccaactcggaggcccacaggatgtggcagacactctaaatgtggagggctccgggagtgcgctatccgcgctgctcctccaccagccgccgcgaggaaacttccgcgtcctcctaccccgcgctggcgactgcatcttccggggccgagccctcgatccggcgcgcttcgccgccgacatcgaggcaggagggcgagaagcggccgtgcggaggcgggtatgtcggcgtagagctcgcaccccttcgaaccgaggccgtgcgacccaccgcaacccaagatccaagctagcttccccctgctcgtcgccggagagtcgccatcggcaaaaggcttcgtcgtccgccgacttcgtcgaaggcagccggcaaaaggaagagaagctcgtcgccgccgtcgtcttcctcttcgattcggtccaccgaggcagatccgcgaagagcgaggttcacatagatgcaatgtacattgattaa

SEQ ID NO: 5670 - DNA, 333 bp, Zea mays
  Peptide Sequence Number=SeqID_49045
atggagggcgtcctggagttcgcgccgacgtacaagtacgagctcggctcgaggaggagtttaatagtaagtattatcatccaagcaacgctaggatctggttctatggtgatgatgacccaaaagagcacacattctaagtgtggtgtgcatgaaggatttgagctccccgtgctctactcgccaggccagtcgacatcccagtcttgcgctacagatcgttttgatctggagagcaaagcagttgttgtcccaagaaccatatgctaccagaacaagaaagatgagagcggttggtggccaaggctcatgaaaaaggacttgtgttcttga

SEQ ID NO: 5671 - DNA, 249 bp, Zea mays
  Peptide Sequence Number=SeqID_49046
atgtcggacgaccttgttattcctgtccactttgaagttggccaagaattttgcttttgcctcctggatcatacgctccttgtgctcctcgaattggagctgttcgtcagccggcaagagctatctcttgaaccgaccattgagggccgatttgatgcgtctatatttgctgtccccagcggagtcgccaaaaagggcggactgtccgcggcctggggctggacggtccgcggcctggtgcccggctag

SEQ ID NO: 5672 - DNA, 630 bp, Zea mays
  Peptide Sequence Number=SeqID_49047
atgggcgcaattcaggtcaaggctccgtccactcaagggacacgatctcgcctcacccgagcccagcctcgggcaggaacagtatacccaggcttcgcggagaagcgaccttggccagatcgcctcgccaaccgaccgtatcgcaggagcattcaatgcaaggatcgcctgacaccttatcctgacgcgcgctcctcagtcgacaaggccgaaccaagtccagcctcgggcgccataggaagctccgcctcgcccgaccctaaggctcggcccccgcctcgacctcggaagacggtctccgcctcgcccgaccccagggcttggactcagcctcgacctcggaagacggtctccgcctcgcccgaccccagggctcggactcagcctcgacctcggaggagtcaccgcctcgcccgaccttgggctcggaccgaccacgttacaggggggtacatcattaccctacccttagctagctcaggctacggggaacaagaccggcgtcccatctggctcgccccggactatggctcctctctgccggacacgttagcatacttctacaccccccattgtacacctgggccatctctgaaagcatctaggcccctggttggttttagtgattaa

SEQ ID NO: 5673 - DNA, 1095 bp, Zea mays
  Peptide Sequence Number=SeqID_49048
atgcctctccacgcccgcgcaccgccgctccgccactcccaccttctactcaccgccgccaccgctcggctccgcccgtgcgcagcgccagcgaccaagccccgccgccgctccctcgtcctcgtccgcgcctccagctcggaccctccgcagcagcagctcaacctctccgtgctccgcttcaccctcggtaccagccctcgcctcttctccctccacctcaggtccgaggctgtggggctgtgcctggccgcgttctcggcgacgctgccgttcctggggaggttccttgagggcgctgatgctgccagccgagtgccgttgcccgaggggagcatccaagtattcgtcatgtctgagaacctgtcagctgtgcagaaggaggacatggcgtgggcgtcgtacgtcctgctccggaacacaaacaccacgtctgtggtcatagcaattggggatctcttgtgcgtacgaggatactggaatccacctgcaaatacttcaaaatattccacgatcgagtggttcaaaagtcagatgcagcaactaggacttgttgatttgaggggtgctttatacttccctaattcgtcagattctcagcttgcgaagattctgccagatgggattctttctgtgctagcgcaacctattctgagtcctgatccagctaataatgaaacaaaaactgaaggtgtcatcctgttggcctgcaatgcaaattatgcatataaaatgttgacagtcaggcagtactggaaaatggaccgggaaagattggggagttcatacttttcctctgtgtccaaaacccctgcatttctcctgattgttgagctgacaagtgatgacaacccaattaaaggactaacaagtgtgctaagtgttgaacaggtgcttaatgcaaagctaacagggttcaacacaaagacaaccgatcaagccaaggatggaggtaagaagagcttcgaggtaccgagtgcatgggagaaggtcaaggagaccagaaacccaaagacaggggtgaagaagaagacttgcaaagtcaaggttgatcgagttaagaagagttatgatgcatcaaggatcactacataa

SEQ ID NO: 5674 - DNA, 207 bp, Zea mays
  Peptide Sequence Number=SeqID_49049
atgctggtgatcgacctgggcatatggctcatcccgctggcgctcgtcctcgtcccgtgccgccggatcgcgctcctcctgtcgaggctcgaggagctcggccggagcgtgacggggccgaggctccccacggcggacatgtgggcccgcttcgccaccctcaactccatggctttcatggctttggatattgccctaactgcctaa

SEQ ID NO: 5675 - DNA, 369 bp, Zea mays
  Peptide Sequence Number=SeqID_49050
atgggcaagagtaacaaacgcaagcgcgagccgactcctccatcggaggacttcggcgactcagaatactcggaggaggagttctcctccaagtatgaggggtctccggctcccgtctctcccccggcgtcgtctgatgattcagacgactcccatgggattgccgcagagggctcggatgagtcggaatactcctcggacgaggaggactcttcggactcgtccgaggagggcagcggcggtgatggaggagacgacgacgacggaggcgacggtgacgacggcgacgacaacggcggtggcggtgacggcggcagcaagggcggcaacggcggcagcagcaagggcagcagcaaggctagtggctag

SEQ ID NO: 5676 - DNA, 507 bp, Zea mays
  Peptide Sequence Number=SeqID_49051
atggctgccccgcgaaccactcgtcccgtcgcattaactccgcggcagggcaggcgacacctttggcaggcgaagcgggcgacgcttcacctccgccatgatgaccgcgtcaaaaaagggaccgggaaaggggatactccggaagggatccttctccgtgaaggaagcgggccccgagccctcctactgatcagggccgcctcaggccactcgggctccgcgcccactactgatcaggggttcgaaggctggccccccgaagggttcgaccgccgcctcagaatgcgcagagcgagggatgactctgggtacgtccgatacatggccgaggctcgggctacgctcccgagaggctcaggggctgctctcgcaaacctggctccggccaaaccgttgacagcgtcaacataccagcccgagaactcaaaacctgactatgcacccgggctacgaccagttcgcatgagggaacaaatagaccggccgaggcgccacgcaaggcactaa

SEQ ID NO: 5677 - DNA, 1134 bp, Zea mays
  Peptide Sequence Number=SeqID_49052
atggtcacccaagacggtgaccaccagtttcggtggtgggggagaagcaagtcgggctgcggcctctgccccgccctcagcttcaaggatcttcatcatccttgctggggcgagggcgagctaagccgaagctctacctcccgcacgggggagagggcactcaccggcctagcggagggggtggactttgacaacgcggggccgattggccgcaagcgtcatcagctccagcatgcctggttcgctggctcagctggctctggcacaacttccggtagcacctcccaccgctgggcggagcgtggctatctactcgccgtacgggcggctgttgcgtcgcgcgcaccgggggacagcccaagacgtcgcacgctgctagggcggcgttcgtgttcttgggctgtcctgccatcgctccggcgcgacgcctccgtgcggtggtcggtgctcgcccgtccgggaggacttgagtggggatctaacggtgggcaggtggctgccatcgtcagtgctgaggtggtggcgactggagaaggcctcgtcgccgacgagattgtcggtgccatctgcgctccgggcctccggctctttggctttgatagcttgtcctcgcccctcgagtggggacgtgggctagggccttgtcgcagcagcctctgccctgaggtcatcgctgctgctgtttggccgcccggagcggaggtcgttgtcgctgctgcaggagtgggcggcggcgagccacctggaaattgtcgtcccgcaggccctccgatgccgaagaggcgtagcagcggcggctggaacctggccaggtcgtccgctggcgggaccgacgccggagtcgggctgccgaggccacgagccaggctgatgcgcggtgctgacatcttccttcgaggtggagatcctccgaccgtgtcgccgtccgaggccgggtcagattccgccgaaggtggagacgatgccgagggtgctgctgctccccctattgatgacttgtttgtcggtagcagaatcgtttatccgagcgagagttacttatcgcggaaggtgatgagtgaggagtccctcggctcggtcagccttgccgcttacgtgtactctgccgttttcaggatccctctatcgaagtag

SEQ ID NO: 5678 - DNA, 330 bp, Zea mays
  Peptide Sequence Number=SeqID_49053
atgaaagccggcgccccgctctcccctgctctcgcgctctacatggaaggagttgctggagccctaatcgacggaatcactgctcgcggacggctgcctcgatccgcgctctcccctgctctcgcactctacatggaaggaggtgacaccgcccaaatcgacggcatcaaactgattgcgcacggattccctgctccgcgctctccagtctattcttattgttcatctccggcttcacagccgacaactgacagcacaccgctcaccaaacagtggagaggaggagcggatgcagtgcacttagcactcagtgaggcatatgaacagtag

SEQ ID NO: 5679 - DNA, 200 bp, Zea mays
  Peptide Sequence Number=SeqID_49054
atgggtctgcgactcaccaggggcacccttggatggaaaatgcatatctgcctcgctgagggcatctcgggcgagggtccagccacgagcccgtcctcgacgaaaattctcagaacctcaggaccactcggcaaagccgtcttctttgccgagtgccagttgggacactcggcaaagagcccgccagagagggtccccat

SEQ ID NO: 5680 - DNA, 1536 bp, Zea mays
  Peptide Sequence Number=SeqID_49055
atggttaaaaattttggcagcaaaacagtgcaaatagcaatgaatgctgtggtaacttcacacctactcgtctgtttatatagtactgtaggtaagaaggcgaagcgccaagatttttataccaggcggactcccgctcgcactcgctgcgtggtggaccgcagagaccaaacagtaactctgcaaggtggggccgctatacgctgggaaattgaatcgtttctcgacaacgagctcagggaagcatttgagaacaagtccccaacaggcagtcttgccaagcagcgtgtcgagcagttggaggagcggctcagcgctctgcgggctcgtgtggagagggtcgaggcctcgacgcgcgcggaggctgagcggacacgcaaacagcttatggattcataccatgagctgggcgcgtggaccgctgatttcgaagtgccggaccgagagcctggactttgctgccttgagtgggtacaggaagagttgcaggcgctccccaccatcgtggaggggtttatgtcctatgcctccctggtcacctgcgagggggcgatgaacgcgctctctcgcgaagggtgccggcactatgaggtcttcgaccaagctgatgaggattttgagcgtgatatctacaaggttgaggaccctatagtgaaggaatccgccggagccctctacgaccggatgtggggcccccacggtcaagaggtggtcagggagcaggccgagacggcgaggggtcaggcgacgcgtggcgagagggtggatgacttcggggctttgaacagcacgctgcctggcccggagtcgaacccggcggcggctgtgtccgaggccgccctggaaccgcccccggaaaccgccgaaggcgctcctgatgcccccgcagccgctgcggccggcggaggccggcccccggagaccgccgaaggcgttcctgatgcccccgcagccattgcggccggcggaggcccgccgccaactgctacgccgagggctgaggatcctgtgacggtggaggcggaggcgacagcggaggctctcgcgacggctgggtcttcgcaggttcaagattttgggcctgcgcacgcaaccgctactactaattttttggcggcttcgaccgtggatgatgggaataaatcggatgagtctgcatctaagttttccgagtttggtgactctgggagctctgttgagtggaccgaagagtcgtcgaatgaggacttggactactttgcggccttggatgtggcagcggaggaggcttcgccgcatgctgtggatgctgaagctgtgcctggtccgagtgctgggcgcaggcggcgaagggcgattgcgaagcggagagttagtggggcggacggcggtcggcttcgtgtgagtagggctggcaggcaggaactgttgtctttgccggccgctataagtgcgggtgagggggagttgcgaagtcttttcgcgggtgaggagcttaggataatgttatttaactatagggagatgggaattatcccgaaggttgagccgatgtag

SEQ ID NO: 5681 - DNA, 921 bp, Zea mays
  Peptide Sequence Number=SeqID_49056
atggttaaaaattttggcagcaaaacagtgcaaatagcaatgaatgctgtggtaacttcacacctactcgtctgtttatatggtactgcagcatttgagaacaagtccccaacaggcagtcttgccaagcagcgtgtcgagcagttggaggagcggctcagcgctctgcgggctcgtgtggagagggtcgaggcctcgacgcgcgtggaggctgagcggacacgcaaacagcttatggattcataccatgagctgggcgcgtggaccgctgatttcgaagtgccggaccgagagcccggactttgctgccttgagtgggtacaggaagagttgcaggcgctccccaccatcgtggaggggtttatgtcctatgcctccctggtcacctgcgagggggcgatgaacgcgctctctcgcgaagggtgccggcactatgaggtcttcgaccaagctgatgaggattttgagcgtgatatctacaaggttgaggaccctatagtgaaggaatccgccggagccctctacgaccggatgtggggcccccacggtcaagaggtggtcagggagcaggccgagacggcgaggggtcaggcgacgcgtggcgagagggtggatgacttcggggctttgaacagcacgctgcctggcccggagtcgaacccggcggcggctgtgtccgaggccgccctggaaccgcccccggaaaccgccgaaggcgctcctgatgcccccgcagccgctgcggccggcggaggccggcccccggagaccgccgaaggcgttcctgatgcccccgcagccattgcggccggcggaggcccgccgccaactgctacgccgagggctgaggatcctgtgacggtggaggcggaggcgacagcggaggctctcgcgacggctgggtcttcgcaggtggcctag

SEQ ID NO: 5682 - DNA, 897 bp, Zea mays
  Peptide Sequence Number=SeqID_49057
atgtatattgataatgtcactgaacttgcatttgacgatgtcacacctgaagatcctgattttccattcatacaaggtgaggcatgtctcgaagctaagtttatagctgctgttgagtctgaaatggaagttctgttgaagttgaggagtgaggtagaggaacagctgcagaacgtactgagcaagaaggtggaggtgtcgttcgagaagagtaggattgagaatctccaaaaggaatttgagagtgataactcggctgttgtgcaacttcaggcttgggcagaggaggaagccaaaaaggcccgggagcatgcacgcgcccttgaggaggcccagaaccaatgggagcgtcaaggaatcagagttgttgtcgaaggagaactgaaggatgacgcctcagctagggtgacatgggctaacgctggcaaagaacacgcagtcgacgagtctatcaaccgggcggaagctctgctggagaagctcaagacaatgtctggtgagatggagcaccggactgtccggtggtgcaccggacagtgtccggtgcgccaggctggctcgagcgaagtggccgctctcgggaactcaccggcgacgtacggctataattcaccggactgtccggtgtgcaccggactgtccggtgagccaacggtcggccgcgcgatctgcgcgggacacgtggccgagctaacggctagaagagggcaccggactgtccggtgtgcaccggacatgtccggtgcgccaatggctctcaggctgccaacggtcgactgcgtcatttctggaaagaaatcgggcaccggacagtgtccggtgtgcaccggactgtccggtgcgccagtcgacagaaggcaagatcagccttcctggattgctctcaacggctcctag

SEQ ID NO: 5683 - DNA, 636 bp, Zea mays
  Peptide Sequence Number=SeqID_49058
atggagtccccaacatatacccctgaggttgtacaccctgcaacaaatgcaattgaacctgatggatccacagttaccccctgtgactgggttatccctgaaatcgctagtaacccgttcctgccagcttcaacacatactgaggatgccgattcacttcatatgtctactagaccactaagacataaacaacatgtgccacgtggtgaaagacaagctatcttagcccgtcgaaaccggcaatttgaagcatccatttcaaggaacaaggctactgctactgaggatactatgggtgacgctggggaaggggatgatcggacacaaccccatatgactgcaaagatcaacaacaatgtacaatgtaggaatcaatgccatgatgctatcgtggcaacaaatgagagtgcaagtatgaccgaacaaggaagtggggtggatcatacccagtcgaagccaagggtcatttccaatgttgatgacgatgacggtgttgtatttgaagacgatgctgatgagaatgagggatacctattcgctgggcaatatgattataccgatgaggatatagaggtcgatgttagtcaagatgaatcgactgccactgatgtttgtgacccgtaccacaaggtgtaa

SEQ ID NO: 5684 - DNA, 216 bp, Zea mays
  Peptide Sequence Number=SeqID_49059
atgaccgttgaacaaaaaaacgagaaaagtagaaagcgtcgtgaagtaagccaacgaaataaaggacctcctatacagccagaggtatatgatcatcttggttcagttagtcttttagatggatgtagcacaattgatttcacaaacttcgcaacacaagatggaaacgaaaatgtaaatgcgaatcaagatgatgatagcgattggtttgcatag

SEQ ID NO: 5685 - DNA, 240 bp, Zea mays
  Peptide Sequence Number=SeqID_49060
atgtcttcggtgttcgcaggagggtcgacggcgttgtgcgtttctctgttggtactgttggtcgaggctgactcgggcgaggcggagacttctcccgaggctgaggccgaggccaggtcagcgcacaggtcactcgaaacttggacaaccgtacatgcaaaaatgatattcatgttacttagcataagttacgaccgattgcaggtgcggaccggaaacttcgagcaacatgctcactaa

SEQ ID NO: 5686 - DNA, 543 bp, Zea mays
  Peptide Sequence Number=SeqID_49061
atggcggtggcaggcgggcaggagcagcggtcacgtcgtcagccaagcctacgtcccatccaggggcgacgagggaaccctctctcacggcgtgaagacaacgtgcatgtgttccgttcctcgaacggctcacgcacgcgcaacggccgcctcgcgaaccactcgccccgtcgcattaactccacggcgggacaggcggcgcctctggcaggagaagcgggggccttcgccataatgaccgcgttagaaaagggaccgggaaagggggataccccgaaaaggatctttccccgtgaaggaaccaggctccgagcctccctactgatcagaggttcgaaggctggcccctcggaagggttcaacagccgcctcagagcgcgtgggctccacacccactactggtcagaggttcgaaggccggcccctcggaagggttcaacggccgcctcaggctactcaggctcctcgcccactactgatcaggggttcgaaggctggcccccgaagggttcacagccgcctcagacaccgagcgagggatga

SEQ ID NO: 5687 - DNA, 1083 bp, Zea mays
  Peptide Sequence Number=SeqID_49062
atgtcttcgcgctcccttatgcattgtgtctttccatcttccaagcccccggatgggggatacccgccgtctttccgcctcgtcgttggaggaacgcaactccgtgggagttggtacctttcagccattgttcggcttcaaggattttcgtcagtcagcccggctgcatcccctcgccggtggtcacccaagacggtgaccaccagcccctgggtggggagaagcaagccgggctgcgatcttggtcccaccctcagcttcaaggatcctctccctcagcgttcgagggagagagcgctcactggccctgcgagaggggcggacttcgacaacgcggggctggtcgacggtgggcgtcgtcagcttcagcgcgttgggttcgccggcttggctcccggagccccctcctgccgcaagggcggttatcgcgccgtgcgcacgggaggaccgcccaagacgtcgcgcgctgccagggcggcgttcgtgttctggggcggccctgcctttgcaccggtacggcgcctccgcgcggagcccctcgagcgtcggcgtgggcgagggcagggttgcagcggcgttcgccctgaggccatcgctgctgcagttcggccacccgtagagggggtcgttgtcgctgctgctggagcgagcgacgttaaaggaacccctcggccgctcttcgatgagccgaggctaggggtagcggtgtcagcgcgaacagaggcagagttggctcgaaaagaagacctggtcggccggagcctggtcgggtcatccgttagcgggaccaacgccgaaattgaccagccgaggcctcgggtcgggttgacgtcctcggaggacagctggccgaggccccggggtgatcggccgagccgcctgctcgggccggattcccggagaagaccccgacggcgatggcccgggcgtggcgatgacgtcgtccttcagagtggagatcttcggaccgcgtcgccgtccgaggctaggtcggacctcgccgaaggtgttgtcgacgccgagggtgctgctgctcccttcaagcgtcaagatccgagcctgcaggatcggattgtcttgtag

SEQ ID NO: 5688 - DNA, 726 bp, Zea mays
  Peptide Sequence Number=SeqID_49063
atggcagttgatatgaccgaaggcggaccggcagtaattgcagcaacggacgaagggaggcagcggtccaaccaccaaccaggccctggtcccacctccgggctcgcatcctccctgaagcggcagaagagcctcagagccctctcccacagcataaagacgacgcacctgtgttccgttcctcgaatgactcgcgcacgcgcaacagacaccccgcgaatcgcccgtcccgtcgcattaactccctggcagggcaagcgacacctctggaaggcgaagcgggcgccatttcgtctccgtcatgatgatcgcctcaaaaaagaaaagggatatttcgaaaggatccttctcaatgaaagaaacaggccccgagccctcctactgatcaggggttcgacgattgcgccctacggggttcagcaaccgccccagagcacccgggctctgagccctttactgattaggggatcgaaggctggcccctcggaagggttcgacagccgccccaaagcatgcagagtcagggatgaccctgggttcgtctgttacatggccgaggctcgggctacgctctcgaggtaccataggacatttctgagaccagcgggagcgatttgtaatggaatcccaccggagggaggcaccgagccctcggaccctatcaaatgggtccgggtccagcaaatcacctgcatgtacttttggagcgcgcctttgggccactag

SEQ ID NO: 5689 - DNA, 231 bp, Zea mays
  Peptide Sequence Number=SeqID_49064
atggcaggggcggcggccacagggaaaatggcggctagggttaggatgttgggcctaatgggccttaggctccatgaagatgagttccaggcatcaagaggtcaagattccaggaggcctaaaataggtgtgtggacagacatgtgtattcctcctatgacgaataattcaggctccatgaagatgagttccaggcatcaagaggtcaagattcctggaggcctaaaatag

SEQ ID NO: 5690 - DNA, 726 bp, Zea mays
  Peptide Sequence Number=SeqID_49065
atgtcttcttcctccctcatgcgtcgtgtctttccatcttccaagcccccggatggggggtatccgccgtcttcccgcctcctcattggaggaacgcaactccgtgggagttggtacctttcagccatcgttcggcttcaaggattttcaccatgcagcccggccgcacccctccaccggcggtcgcctgagatggcgacctccggcttgatggtgggggaaagcgagccgggctgcggcctctgcccctccctcagcctcaaggattttcatcaccaaggctggggaggggagagtgccgagttgggcgtgcccggtcttcagacgcgagtggcttcggagccgctcgcggcgccggcgtccaccacgacagctggaagaggttcttccgccggcgcgatagccggggccggccacgggctgacctccaactctacggccttctgcctgtccttgcctcacgagttttggcgcgggcgggggcctcctggcagcggcatccaccctgaggtcagcgttgccgctgttcggccccccggagcagaagtcgtcgtcgtcgccgctgctggagcaggtgacggcgcgctgttcgtcggccttccgttgctccgcaggccttcccctcggagtggggttgttcgtacctgtggagggggaaccggagttccgtttgtaatggcatttcgattgccagtgtttttgttcattgcggctgtcgaggcctga

SEQ ID NO: 5691 - DNA, 234 bp, Zea mays
  Peptide Sequence Number=SeqID_49066
atggtggagaaggtgtatatggggcggatggagctcccccaggtggcctgcttggacttgcccagctctgtccaagaacatggttgtaacaaaagtggcaagaacctgatggaatcatggaaggcccccaccaatatcctcccaagagacatttgggacttcaacaacttggatccagaaatcaaactgagcaacccagaacaagaggagtattattaccattttgactcataa

SEQ ID NO: 5692 - DNA, 423 bp, Zea mays
  Peptide Sequence Number=SeqID_49067
atgggcaagaacaacaagcgcaagcgtgagccaactcctccatcggaggattttggtgactcggagtactcagaggaggagttctcctctgagtctgaggggtctccggctcccatctccctgcgtgagtcgtctgacgactcagacgactcccaggggctcgcggcggaggtctggacgtacatccgggccgtggagcgctccgggctcgagggctcggatgagtcggagtactcctcggctgagaaggactcggacggtggcggcgaggacgaggacgacgacgacgacgacaacgacgaaggcggtggcgacggtgacggcagcagcaggggcggcagcagcggcagcaagaacggagacggcggcggcagcaggggcggtagcggcagcagcaggggcagcaacagggccagtggctag

SEQ ID NO: 5693 - DNA, 768 bp, Zea mays
  Peptide Sequence Number=SeqID_49068
atgcaacggagccatgcgaggataggtcggcagaactacagggagataaactcaaatagttcactatcttttagctacacattgttatcatatccacgtgtattgccccacggtcgagtatataaggcccagggggcaccccatcagaacgatcgaccctactacttagccgcccacttcgactctcggcattctcaattcagagagccctcttgtaaccttattcactcagcatactcaccaggacgtagggtgttacgcatctctaagcggcccgaacctgtaaaccttgtccattgtccctcgtgcaattggcacgaaccattttgctacagtcgtcgacaccgtcctactcctaaaaacaccttgaggggcaaccccggaatttacaaggctgagtaccgccaacccttggtgaagatcgagggcgccagcctcagcatcgcgcaggtggccgccgtggccaccggcgctggtgaggcccgggtcgagctggacgagtccgcccgtagccgggtcaaggcaagcagcgactggatcatgaacagcatgatgaacggcaccgacagcatgatgtggggcggggccgcgggcgggatccgcgtccgctcgcttcggctcctctgttcccaaacctcctcaaccagcatctctagggttttcgcagccaccgcccatggctgccactccggaccgcgtcaatgccgaccttcgtcgtcgccttgtcgtcgacaccccatcgccgccccaggtagcctaaggtgctag

SEQ ID NO: 5694 - DNA, 609 bp, Zea mays
  Peptide Sequence Number=SeqID_49069
atggtagaggttttggaaggaaggaatgattacacagaccgttcaggctacaatggaccacctgattttcgaagtcaaagtcagtaccaagggcatgtaaatccagctgggcaaggtcaaggttacaacaacccccaagagcgtagcaacttctcgcaagggcaggcaggagaacatctattgctccttccgcacctgggtcttatggccaaccatcagcacctggatcttatggtcaacctaatacacctgcatatggtggagataactggcaaagaggttctggtcagtatcctagcccaggtgaaggacaaggaaactggcagaggactcttaacagaccaggttcttgaggaccttacaatgtacctgagacggcagagggaaggaggtgacgatgctggcgcagtagtcgcctcctctagagacgacaacgacgtcgagacgatgccggagagctcagagccctaccagcacgcttcctccagagacgacgacatcaaggcaatgccggagagctcggatccgtaccaggggcctgcacacgcatgccaagagatgggacgtcgacccatttttatcccttgctcatcctacgtgtgggattaa

SEQ ID NO: 5695 - DNA, 681 bp, Zea mays
  Peptide Sequence Number=SeqID_49070
atgtcctcctccaccgcgtcgtggtcgcgctacggcgccctccccacctccccccctgcgccgcagctcaagccggaggacgtcgcggccgcgggcggcgatgcggcgccctcctcctcctcggcggcggcaacggcggcggaggccggggtcgccttcttctcccgcgcgcgagcgttcgccggggccgcggcgggccggccgcgcgcgtggcgtgaggtgctggacccgacggcgttctcgtgcccggacagctgcggggaggcccgcgcgcgggcgcgccgcaacctcgcctacttccgcgccaactacgcgctggccgcgctcgcgctcgtcttcctcggcctcgtctaccgccccgcgtccatgctcgcgttcctggcgctcttcgtcgcctggctcggcctctacttcggccgcggcggcggggagccgctcgtgtgcctccgccgcgaggtggacgaccgcgtcgtgctggccgcgctctcggccgccaccgtgctcgccgtcgcgctcacccgcgcggggctcaacctcctcgtctccctcgtcgtcgccgcggccgtcatcggcgcgcacgccgccttcagggtcaacctgtacctcgacgagagcgacgcgttcgatgtcgccggcgcctcgttcacggacaccgcatacggctacgcgctccctagctga

SEQ ID NO: 5696 - DNA, 414 bp, Zea mays
  Peptide Sequence Number=SeqID_49071
atggcgccagcaagccaacaatacaggtatgtgtcagtgtcgctgcaacttgatctctggtcgctttcttctaagatcagaggcgtcaccgtgttcttgagtgagcacatatccatggagatgaacgacctggctgaatatcatcagggtgcaagcacattccaaaacgactggcaaaagccactggaggagacggtaaccaaccatgcaccatttgccaatggctatgcgagtacttgccaaccggtcgagtggtggacctgctgcccaacaccgccaaaaggaacaatcaatggaaggggctccatgggaggctggactgggagggcagcttcccccacgtccgtgtccgatccccagcctgtgggcaagctcggcatgtgcttccaccctgagcagattctgtacctctaa

SEQ ID NO: 5697 - DNA, 258 bp, Zea mays
  Peptide Sequence Number=SeqID_49072
atgagcactggagttaaacggctaaacgaggctccacatccaccaagtagttttcgacaccatcgactctgtatccgcgagagctccgctgaggagtgcggttcggatcggcattccaatccagatgcaggtggtgcttacggtgtcgcacagttcaggaaaagagcattcatctgggctgctgcaccaggagagacccttcctctggactctggagttggcctgaaccagtgcatgtctccgcaagccctcagctga

SEQ ID NO: 5698 - DNA, 573 bp, Zea mays
  Peptide Sequence Number=SeqID_49073
atggatttcagctgcttccagccccacatgggggtctgtagctacctgccattcgacccgtacatgcagcaagacggacgctacgagctgcatcctgttgagcaccatcatccgtttgaagctatcggggactacacgcctgcaaccttcgacgaccttggacgccagttgttctttgcagagagcaagaagcccgtgtccggccatgcttcgcctatcggtcgtagtagagttgggtcgtctcagctgccgctgctgactcccaaagctgaggtttctcatctcatggacatcagtggccttgctggatcatacaaggcgtacgagacgaacggcaggttcctgccgagaaagaagacctcctcgaacaaagccaatgtcgtgaaagggcagtggacagcagaggaagacagtgaagctggtaaaactagtggaacagtttgggctgaggaagtggtcctacatagcacagctgctgccaggaagagtgggaaagcagtgcagagagagatggcacaaccatttgaggccgaacatcaagatatttcaaaatggaacaacgagataagttaa

SEQ ID NO: 5699 - DNA, 177 bp, Zea mays
  Peptide Sequence Number=SeqID_49074
atggggagcttgatcgtgatgaaggtggccgtcgctccgaagctatgcggaagggagtgcgccaacggtcggctgatgtggcgtgcaccggacactgcacagtggctgttcggtggtgcaccggacagtccggtgcacccgacaacagaaagctgttgctttctgtccaacggctag

SEQ ID NO: 5700 - DNA, 660 bp, Zea mays
  Peptide Sequence Number=SeqID_49075
atgcggagttcgtcgtcttccggggctgagcccgagtccgagccctggggtcgggcgaagcggagttcgtcgtctttcggggctgagcccgagtctgagccctggggtcgggcgatgcagagttcgttatcttctggggctgagcccgagtccgagccctggggtcgggcgaagcggagttcgtcgtcttccggggctgagcccgagtccgagccctgggtcgggcgaggcggagcttcctatggcgctcgaggccggacttggctgctgtcagccgcactctgccgagtggcgcagcagtcggaacggcgcaggcggcgctatccttttgtcaggccggccacctttgcattaaatgctcctgcgatatggtcggtcggtgtggcgacttggccaaggttgcttcttggtgaagactgggcctcgggcgagccgaaggccgttgcagctttgtgcttatgggggttaccagctgagattaggagtcttgaggccggtctggttgttccctcatgcgagctggccatagcccggggcgagaggacggtcaaggacagactcgacttttttacatacgcccctgtgtcgcctttccgcaaggaggagggggaaaagcgctatgttgcccttggagggcgccgaacatggtgtctccagtga

SEQ ID NO: 5701 - DNA, 147 bp, Zea mays
  Peptide Sequence Number=SeqID_49076
atggggaggctagaaccccgggcagaatgggaatcacggcttgtgggtaaagtgtgcaacctctacaatgtgttagaactgtgctcaggaggtgaagctggtaacatggaggactttgaggagttccaggaatacgatgagttctag

SEQ ID NO: 5702 - DNA, 243 bp, Zea mays
  Peptide Sequence Number=SeqID_49077
atggcccaagggcacatttccctttcaggggcaagcacagacaaaggaacaggaacccgtgctgcgcatctcggacggtctgacacacaggcgtggacggtccggccatactcaagacccgcaacgaccgcgtaccttcaaaccacgactttcacaggatgcaaagtggattgcactgaggctctgaggatgcaacacctcaaagaagatattataagactcatagaaggcattacaaagtaa

SEQ ID NO: 5703 - DNA, 270 bp, Zea mays
  Peptide Sequence Number=SeqID_49078
atggccttgcaagacaaaaatctattggaaattcctggccgtccccaacccaatgggtgttttccaatgggtgtgaccaagggacgtcttgccatgggcaaggacaagaaaggtcagggctcgccgcgtcgctccggcgacaaacggaagcgtgaacggagtcccttgtcggaggacttcggtgactccgagtactcggaggaggagttctcctccgagtccgaggggtctccggtctatgcttcccccccccccggcgtcgtccgatga

SEQ ID NO: 5704 - DNA, 132 bp, Zea mays
  Peptide Sequence Number=SeqID_49079
atggacctcttcacgaggcctcttctcctagcgcttgtcagtctgctggtttgcgtcacgccgtggtgtagatggagcaggctttactcccccgatgaggtcctaagcccgttcgtcggcggtgatgtagag

SEQ ID NO: 5705 - DNA, 234 bp, Zea mays
  Peptide Sequence Number=SeqID_49080
atgacgaacaatataatcaaggactttgggggatgcttcgggggcaacagcactgatttcttcagcaagaattcactagaggcactcgcgttggcgtcactcatcgacgactactatatcgaggattgtggcgtcatcttggcgctggaggtgacgcagaggaggatcgacaacagtgaccagttcgtcatcctcgccaccgtcagggtagcttttgtgtcggtctgcctttaa

SEQ ID NO: 5706 - DNA, 402 bp, Zea mays
  Peptide Sequence Number=SeqID_49081
atgcctccccagtacgcggtgcagttgttcgaggagcaccagctgtcgactcatcccattggcttgttcgccgctgaaaaggaggacggcccaatgtggaaggatcgagtcgagcatgccaaggatgtgtgggctctttacccggggcagactactcacctgacggtaggggccagggagaagaccattgaggttctcgaggatcagctcctgaccatgcagcaacaactcgaggaagccaaccagcacttggatatgcaccatcaggaaattcaagacatggaggaagaaggggccgacgaggatgtcgacattgagggaggagaggagccggagcctgcatccagcttggacactactggctcaagaaggccaccttcccccgagtctagcgttgcctag

SEQ ID NO: 5707 - DNA, 465 bp, Zea mays
  Peptide Sequence Number=SeqID_49082
atgaacaagaacacaagagacacaagatttatcccgaggttcggtcacaccaccaaggtgccctacttcctcgttgaggcacccacaaagagccgggtctctttcaaccctaatcctccctttgccgaccacaaaggtcaagctcacacactaatctttgctcaaacgagcggatttctctccaaagatttgaaatgggagaggcaagagatgtgtgagagagagtgggaggtgttcttcaagttagaaatggagtttgggtcgtgctcttatgtggggagagaggaccggttcaaccgcctggggcaggctgacagtcagtctgccagtcagactggcagactgcaggtcagactgcaaaaacaggtcctgacaccggttgaaccgcccctagggccggttcaaccgcctgggggtcagactggcagtcagtctgccagtcaggaggtcagactggtcagttga

SEQ ID NO: 5708 - DNA, 882 bp, Zea mays
  Peptide Sequence Number=SeqID_49083
atgaaaatccttgaagccgaacgatggctgaaaggtaccaactcccacggagttgcgttcctccaacgacaaggcggaaggactgcggccgtcgtgggccgagtcttctccaacacgctccaaggtcctccccctacggcgcgggggctgggtcctacacgtcatgcaaactggcccagagcagaagaagccaaaccgccgcgcgcggtgcatgcaacacccagcggttacgagcattcctccactttcgcccagactagcgggcgaaagggcgggcagccatgcaggcggcatgcaaccgcgccaagtgggcgcgcccctccgacttccaacgcacccagcatgggggcccacgcccacgcgtcacgcaaccggcgcaccggttgcaacgtgcgagcaactgcaccgccgctcgcgccactgccacgcctcctcgactgcggaaccagtaccgcgactcgaggcaaccctgcgtacgacccagcagtgccagcccggcgcgacggtcaatacgaccaaaaatgggccggtagtgatggcggtggcaggcgggcgggagcagcggtcacgtcgtcagccaagcttgcgtccctgttggaacttgctctcagtcgcaagggaatccaacgaggggcccgttacaatgggccggatcacacgtgggcctctaagctcgacgaggccgcacggtgggatgacctcgtcgcaggccttcgtccgatgctgtatcaagcgaagggtgtccctgcccgttttgtctccgtcggaccagcgactgtagcgaaggcctcgagcgaagggtggcgtctttgccttcgccccaacatttgccctccgagggaccagttcgacaaagtcacctggtgccgaagacgtcgctag

SEQ ID NO: 5709 - DNA, 804 bp, Zea mays
  Peptide Sequence Number=SeqID_49084
atgcgagctggccgtagccccggtgcacggtcgggttccaagttctcgggctggtatgttgacgctgtcaacggtttggccggagccgagtttgcgagagcagcccccgagcctctgcacagggcgagaggacggtcaaggacagactcgacttttttacatacgcccctgcgtcgcctttccgcaaggaggatggggggaaagcgccatgttgccctcggagggcgccgaacatggtgtctctggtgtctgagggcacatgcgtccttaacacaaggcgttgggcgctcagacacctataaatacccccgcacagtgcccgtgtgtggcaagattaacagagctattgccatcttgtgtgagaaccccgttgacgtcactgttcaccctcgttggattcctttgcgactgagagcaagttccaacatttggcgcccaccgttcgtgctacgagaaaaccactcgcgatggcacccaagaaagctaactcgaaggctgacgaggctgcgaaggcagcactgcttgccgcaagaaagggcaaggccctcgccctcacccaatccacccaccaagaggccactgaagacgacgttctccgcacctgcgaagatgacactctccgcacctgcggccctgaaggacaatcgcagccccccaggcttcgccccactggagggcgtggacctcaccgaggacggtgaagtcctcggcgtctctgcggaagagcagctacagctgcgcgccctgcgcctcaagaaccgcaatctccagaggcagaaagagatactggaggccaagcgctag

SEQ ID NO: 5710 - DNA, 387 bp, Zea mays
  Peptide Sequence Number=SeqID_49085
atgtctgcaaagaagggctacgctccgataccagctgtgacggaacctcccaagaacgtttcacccgtcttgcagacattacagaacatcggagataaagaaatgcggaagcgattacataacttacatttattaaaaggtttcaaggaaggtaatcaagttcaaggaagcaagcaagtgagaaagattttaaaaacatcaagggaggtggaaaatgcaccggggcttgccttcgttaacagaaagccccttcgacttttatttcttcgcacggccaagcccacgacggcgctccgcacggcagagctccggcgagcatctgtactggccgatttaggcgatgactggcgctctcaagcgacatacaccaaatcggacctatcctaa

SEQ ID NO: 5711 - DNA, 933 bp, Zea mays
  Peptide Sequence Number=SeqID_49086
atggctcgtcttagacacactgcacgtaagtcggtgattcctttcctgccgtctcgccttgcggagcgtcctctgcgccgcaccgtgtccggtcagtcgagtcacctggagaggctgcaccaccgcctgcgtgaggagcaggagcgccagcgtcagcacagggagcagcagggctcttcctccccacctgagcaggaggtggagtccgtgaggcgtcgttcctctgttcctcagctggaggcgccccctgcaccaccacgggacgccccagctgttggaggagctactggaggaggtcctggaggagaccccaacgacgacaactcagaccacagcacagagtcctctgagccgcagggagggcggaagggatgggtcgcccgacccatcacccgtgacgccgctcgcggttgtcacttccacgacgcactcgacaccttgttgcgccaggctttcgaccggcacacctggtcgatcgagtaccgttgtgtagtctaccagcacagtcgcgggaggtacctggaccgctgggaggctacctgcctagttcgtcgtccggaggatgacctccggggtgcagaggccgtttcggagcattactccatctccgagagggacactgcagaggcagctatgcaggatgcagcacggcagagtgtggttgtctcacctgttggtgaagataaccctaggttgagcagcacaatcaacctagtcgctgtgcttaacactgagctggatcactctctggacgagctgagcagggctcgaacggagattgctgagttgcgtgctgagctggcagagcgccgccaccaggagggtggttcccccgctcctgttgggactcagcacccttaccgctcgccgccacgtggtcaccacacttatggttcccctgcctgtaagaccaggatagacctggatccttaa

SEQ ID NO: 5712 - DNA, 117 bp, Zea mays
  Peptide Sequence Number=SeqID_49087
atgtcgtcgtacaccatggtcgagcgctgctgtcactctgcttgcccagtggggtggaaaatggctgttgcgtcggcgtactcgtcgccatgggagcacggtgccgccgcagattag

SEQ ID NO: 5713 - DNA, 105 bp, Zea mays
  Peptide Sequence Number=SeqID_49088
atggagaaagatactaaagaacttgaagttgtttttgaagcaatgtacctagaagaaactggtggaggcaaagaagaggtggaggatctggtggagcggacttaa

SEQ ID NO: 5714 - DNA, 222 bp, Zea mays
  Peptide Sequence Number=SeqID_49089
atggaggtagaagatgcggcggcagacacggttgtggccgcgggtgtacggctcattgcagttgaagcagaggccgaggcggcgccgttccgcctgttcctccgggagggcgagcagcggctgcttgggcgccggcgccgggggaagagcgcgaggggctccccggcggctcgtgggggccagctcggccgccccggcccccagctcggccgcccagcctag

SEQ ID NO: 5715 - DNA, 117 bp, Zea mays
  Peptide Sequence Number=SeqID_49090
atgtcgtcgtacaccatggtcgggcgctgctgtcactctgcttgcccagtggggtggaaaatggctgttgcgtcggcgtactcgtcgccatgggagcacggtgccgccgcagattag

SEQ ID NO: 5716 - DNA, 1215 bp, Zea mays
  Peptide Sequence Number=SeqID_49091
atgacatccgaatcggtgatgttgggcagctcgcagcttcggagatcccaggagtttccagggcgcaaggcggcccgagggttgccgtcgccgagcaagcgcgtcgccgacttcgccaccgatattagtgtggacgactatcttggtgggtcggacgaaggccgacttgttattgttgcgcctgccgcggcgaccacggcggctgccgtagtgccgaaggcgaagggcggtgctcttagtgccggaggcgagatgctggcactcgctgctgtcagggacgaggcgggcgctgtgtcccgccggctgaaggagatgaaggaggcactaagtcaggcggctgacttcgccgaccgcacgacgtcgggggccctcacggcagttgtgtctgccgaagtcgagagacttcggacgcaacatgctgacgccgtccgggaaaaatcgaccgccgacagtaagtgccgcaagctggcggacaaggtggccgcgctggagggggagaagactgacctccggcgccaattggtggaggagaggagggaggccaatgaggccctcgccaaggcgcaggctgcgctggcggaggccaatttggcacgggcggagggcagtctcgccagggagcgcgccgagcagttggaggagcggctcaacgccctgcagagccgtgtggagaggactgaggccgcgacgcgcacggaggctgagcggacgcgcaaacagcttatggattcataccatgagctgggcgcgtggaccggtgacttcgaagtgccggaccgagagcccggactttgctgcctggagtgggtacaggaggagttgcagacactccccactatcgtggaggggtttatgtcgtatgcctccctggtcacctgcgagggggcgatgaacgcgctctctcgcgaagggtgccggcacttcgaggtcttcgaccaagctgatgaggattttgagcgagatatctataaggttgaggaccctatagtgaaggaatccgccggagccgtctacgaccggatgtggggcccgcacggtcgagaggtggtcagggagcgggccgagacggcgagggctcaggcggcgcgtggcgagagggtggatgatttcggggcgttgaacagcgcgctgcatgacccggagtcgaacccggcggaggccgtgtccgaggccgccctggagccgccccccggaaactgccgaaggcgctcctga

SEQ ID NO: 5717 - DNA, 486 bp, Zea mays
  Peptide Sequence Number=SeqID_49092
atgaacaagacaccggcactcaaggtgccattacaaacggaactccggttccacctccgcaggaacgaccaaccccacacgattggggggcctacggagcaacagaaggccgacggacggctcgccgtcgcccgctccagcagcggcgacgacgacgacttctgctccggggggccgaatagcagcagcgatgacctcagggcggatgctgctgccataaggccctcgcccatgccctcactcaagaggcaaggacgggcagaaggccgtagaattggaggcaactctccctacttgcgtccccagccgtcgtgggctgagtcttctccaacacgctccaaggtcctccccctacggcgtgggggctgggtcccacacgtcatgcaggctggcccagagcagaagaagtcaaaccgccgcgcgcggtgcatgaaactgcccagcggttacgagcattcctccactttcgcccagaccggcgggtga

SEQ ID NO: 5718 - DNA, 204 bp, Zea mays
  Peptide Sequence Number=SeqID_49093
atgacgtcgcaagagttaaagcacgggtccccccgaacaaacaaatcagtcgtccccgatgtcgacgaaccaacttccaaagatctcatcgacggagaccgcgtcctcgccctgcaggccctcgacaaatatcaagttcaaatcaaggcttggcccgacaacgcagtcgtcccaagagaattcagcgaaggggacctcgtactc

SEQ ID NO: 5719 - DNA, 555 bp, Zea mays
  Peptide Sequence Number=SeqID_49094
atgcagcacggcgagatggtggcaccgttgtcactgtatgacgatgggtggccgggtggaggagaagttgcaatggggatgaccggcgacggagaactggtgatggggcgaccagaccatctccttgcccccgcctccacgaaacctccacgacatccacgccgactccgcaccggggatgcccagctgggctaccgcttcgagctggtgcccgaccacaacagcaacatcacggactcggccgtgtgcgtggccgagtctagcgtcccggcggtccgcggtgggcagttcgccatcgatcttaccacggccggatcccccgggcggggcagcagcgagttgggccacgcgctctggcccccgggcggcttcgtgatgtcggccgccgtgcaggaggagggccggcgcggcaggccctccgtggggatcagcgtggcgcacttcgggtgcgccgaggacgccgccgcgttcgtcgctctggcagccgccgtcgacctcagcatggacgtgtgtcggctcttctcctgcaagctgcgccgagagctgtcggcgtga

SEQ ID NO: 5720 - DNA, 228 bp, Zea mays
  Peptide Sequence Number=SeqID_49095
atgagtctagtcggaccttggctccttacagtgaaattcggacaactggatggtgtgcggggcccttttgaaaagagaacgatatgtactgcttctgatcctacagcttatggtacacagatatgtgaaaaaattccgactctggaatccggattatattatacatgcatcaagctcattgaacatggtgcatacaagttttacactctgccgacctactacaactaa

SEQ ID NO: 5721 - DNA, 324 bp, Zea mays
  Peptide Sequence Number=SeqID_49096
atgaagctcctgggatcaccgtacatgtgtgtggtcttgcccggggtgatgatagccgtgaaccgccgcaatttcttgccggcagtgaagatccggggcatggcgagaacccacaccctcgtgacattgacgttgggaatcgtgtggatctgggggttgatggcgtttggaccgtgggatcgggatcccgtggctgaggttgaatcccggttcattaaagtgctagatttaatcttgaccgtgggtgcacgatccagtggccctggtggccggataccctttcaatcagacggattttcaaatacgaccctgggttcttcataa

SEQ ID NO: 5722 - DNA, 1056 bp, Zea mays
  Peptide Sequence Number=SeqID_49097
atggaggaggagatgttcctggcggtgaagcggacggagcacgtcgaggtcacttcccgggcgatggattccgcgccggcggcggggcccaggacggtgcgggtcttctgcgacgacaacgacgcgaccgactcgtccggcgacgaggcggagggcgcggccgcgcgcaggagggtgaagcgctacgtgcaggagatccggctgcagcgggcggtgccggtgaaggaggaggcggcgtccgcgagggccgtcgcgggggagcggcccaggccgctggccctcccggggcggaagaggaagtccgacggcgccggcgccggcgccgagccccggttccgcggcgtgcggcggcggccgtggggcaagtacgcggcggagatccgcgacccctggcgccgggtgcgcgtctggctcggcaccttcgacaccgccgaggaggccgccaaggtgtacgactcggccgccatccagctccgcggggccgacgccaccaccaacttcgagcacgcggcggtccccgtccccgtccccgacgaggtcgcgggtcgcctcccgcagccgccgccggctccggcgtccaagaacgcgtcgtcctccgccacgtcctcctacgactccggcgaggagtcccacgccgcggcggcctcgccgacctccgttctccgcacgttccctccgtcctccgcggccgccgacgccacctgcaagaaaccggcgccggccgcggagaccgacgagtcgaccggcgtcggcggcagcaggagcagcgtgtacgcataccccttcttcgccaacgacgactgcttcggcggcgacttccccccgctgtacactgacttcgacctgctggccgacttcccggagccgacgctggacttcctggcggacatccccgaggagaagctgccgccgctgccggagccgttccccgcggcgagccccgacgagtgcccgtccgacgcggaggcggcgtcgccggcgaggtggcagcaggtggacgacttcttccaggacatcaccgacctgttccagatcgacccgctgcccgtcgtctag

SEQ ID NO: 5723 - DNA, 1218 bp, Zea mays
  Peptide Sequence Number=SeqID_49098
atggaccgccgccgctttgccgagacggagggcaagagggcgcacgacccgctgtacagcccgcggcgcgcggcgagggcgacggccaccggcttccccgtcggtgagcacggggaggtgctggcggggccagtgatcgtgggcgcggggccggcaggccttgcggtggcggcgtgcctcaccatgcggggcgtcccgtacgtgctgttggagcgccatggctgcgtcgcctcgctgtggcgccaccgcacgtaccgcaggctgcgcctccacctgcccaaacgcttctgcgaactgccgctcatgccgttcccgccaagctacccggcctacccaacccgggagcagttcctcgcctacctcgaggactacatcgccaccttcggcatcaggccattcttccgccaggccgtcgtcagcgccgagcacgacggcgacttctggtgcgtccgcaccctcgacggcggcggcaccagccgggagtaccgctccaaatggctagtcgtggccacaggcgagaacgcggagcccgtcgtgcctgacatcgacggcatccatgccttcaggggcctcgtcatacactccagtgactaccgcagcggcgagagctaccggggtaagaaagtgctcgtgatcggctgcggcaattccggtatggaggtgtctctcgacctctccaaccacaatgtgcatgttcttccaagagagatcatgggtgtctccacttttggtttgtccctatggcttctcacgcatctatcaattcagaaagtggaccaaatactcctggtgctcacacagcttgtgctaggagacaccgcacgcctcggcattcctcgacctaacattggtccgatggagttaaagagagtctctggaaagacaccagttctggatgtgggaactatagccaagatcaaatctggagacattaaagtgtatccagcaattcaaagttttcaagagcatggggttcagtttattgatggcaagtctgaatcatttgatgttgtgattcttgccactggatataaaagtaatgttccttattggttgaagtgggcacgtgaggccaatgcgcagcaactccgtggtgagttcaatgtcttggtattgaaggagacgaagaacacggaagattttgttgactgcattaccaggcttgttgttgatctatgtctcctcggtgacaacatcactgacaccaaggtagcgtga

SEQ ID NO: 5724 - DNA, 291 bp, Zea mays
  Peptide Sequence Number=SeqID_49099
atgtaccaccataagatggtcaataccaggaagggtggtggaatttatctacctcccaatcgacacactcggaggatatttagacaaccacaacaacttgagatggatcctgcacagcctccaccagccggagctgaccccgctgttgcagcccagatggggataatgcaacagatgacagacaccttggcggatatgcacgcgcagatgcagcaggaacgccaggagatgcaccaagagcgagaggatatacgccaggagatgcgccgagagcgagaggagatacactag

SEQ ID NO: 5725 - DNA, 186 bp, Zea mays
  Peptide Sequence Number=SeqID_49100
atggtttatgtacttcgcttccgcatttctttatctccgatgcactgtaatgtctacaagatgggtgagacgttcctgggtcgggcgaggcggagtccgtcttccgaggtcgaggctgagtccgagccctggggtcgggcgaggcagagtccgtcttccgaggccgaggctgagtccgagccctag

SEQ ID NO: 5726 - DNA, 426 bp, Zea mays
  Peptide Sequence Number=SeqID_49101
atgaccttggagccccatcccttgcagccaggctggtgttccttggattcagagtctttcggtttcagggccaaggatactgtggagtccacggctctgcatgtgctgacaaccttctgcggatttcaccccttggagttgtcaacccaccccattggcttgttccccgctgcgaaggaggacgacccaatgtggaaggatcgggttgagcacgccaaggatgtgtgggctctctaccctggacataccgctcacctgacggttcgatgcatgagtgccctatatcgtctgcaagctttgcgaggtgaggcgatgtcgcagctcatgggtctagtggagtctaccaagatcaccctggataacagggaggaccttgttgtcgacttgtccactgagctggtggaaaaggatctccaggtggagtag

SEQ ID NO: 5727 - DNA, 459 bp, Zea mays
  Peptide Sequence Number=SeqID_49102
atggcgagagtagcgtgtacccttcgtggcaagaggctggacggtggattgtccaaggtgtactgcaatactttacatgaggaagtacatgtactgtattcgcgactacacctggacgtgcctgccaaccctgttgcaatgggagtcggtcatcagggacagcagatgccatcaaggactcgtgcgcatgacggtgcgggtacttcccgtggtcgggaagatactcctaatcccccacctgtactaccaacgctggccgaggctatcgctgccttggtcaatgctactgccgataatactcgcttcttacgtgagatggcgggtaatcaattccaacagcatggcggaagagctcctccacagggaccgtgtgaaacctcgtatctggatttctctgaaacgtgtcccccactctttgttaaagcagaagaccctcttgaagcaaatgagtggatgtga

SEQ ID NO: 5728 - DNA, 759 bp, Zea mays
  Peptide Sequence Number=SeqID_49103
atggatcaaacaatctcattagctgcgagaagcagacgattcgaatcgagtttcaaaccttgcaagatcagggctcaccgccttggcgtacaatgcctcactgaccccgactgccgtcgtgcagtgaccgcacttgtacccaccataaccggaatgggagaccacgtctcaggtcgcatgaggggtaaaatcctcgatggcaggctctggtgctggatccggggctacctcctgagcaactccttgctccggcacgaggatgcgggcgagctcgtcggcgacgtgtgctccggcctatccatggcgataccggtcaatccaagggcacggggagcttcacgtggtgctaatgagtcgacctgtgcaaggaatcgaagaataactcaccgtggggctcagtctacgctcgccggcgatcgggtgaagtccggtgatcttgatctggcgtcttcggcgaggcagagctcgattcctcgctctgggagcttcgccaaggcacgtagaatctattccaagggttggacggggttggggatggctctgttggctggtctacggtggcgggggatcgagcggtcactggcacgccgtctgcagggcaagctccggcgatctcttgcttcgatgaggttgagagcgagtgggggaggcgcgtcgaacacgtggaagtgttcttctgcccatgttcaacagctcgccgagatcgcaaacttgcgaatcttggcaaaaatccggcgcaggcctcctcctagcacctag

SEQ ID NO: 5729 - DNA, 369 bp, Zea mays
  Peptide Sequence Number=SeqID_49104
atgaaggctttgcttaaagtccttgtagtctgtgccgaggatgccacaaaatcccggggtggtttagtagatcatgctttagaccacatgcatgatgaagagatcgtagctagaaccttgtttgccatgaaagaaaaacttgaattgctacagcaagatgccttagaggcaaaagtgcaagcatttccagaaattgctaagtacgacggggatgacataagtgttgaacctacatctccatcgacccctccaacagttactgatccatctgttgatgaagaggagttctactgccctgatgtcagtgatgagtggtacttcagcaattctgataggtcaactcgtaatagctactggaatattaattag

SEQ ID NO: 5730 - DNA, 843 bp, Zea mays
  Peptide Sequence Number=SeqID_49105
atgacttctcacggatcctcggacggagagaatgcacagtcccacatggatggacttgcacgagagggttttccccgcatcttatgggaggtgcttcagggagccagttacacgacacctccccagtacgcggtgcagctgtttgagaagcaccgagtgcctcgctgtagggtgaggatgaccctagagcctcatcccctacagccaggctggtgttcgttggactccaagtctttcaggtaccgggctgaggatactatcgaggcgattgctctccacgggctaaccaccttctgtggttttcaccccttggagctgtctactcatcccattggcttgttccctgctgaaaaggaggacgacccaatgtggaaagacagagtggagcatgccaaggatatatgggctctttacccagggcagactgcacacttgacggtgaggcgaggagaggcaatgtctcatctgacggcattgttggaagctaccaagattaccttggataatagagaggaacatgtggtagacctctccaccgagatggtggaaaaggatctacaggtggaacagatgtccaacgagatccaggagcttgaggagctagtgggaaccagggagaataccattgaggttctcgaggatcagctcatcaacactcagcagcaactcgcggaagctaaccaacatttggatatgcaccaccaggagattcaggacatggaggccaatgaggatgtcgacatcgagggaggagaggagccggagcctgcctccagcttggacactgctggctcagggagaccaccttcccccgagtcgagcgttgcctcgtttgctcactag

SEQ ID NO: 5731 - DNA, 288 bp, Zea mays
  Peptide Sequence Number=SeqID_49106
atgccgcacacgaagaatgtgtcggcgccagggggaggcgatgatgaggatcctcgtcgccccttcaggcaggtcaagggcaagaccgtttacttggagcagcaggaaggccgcaagaagcggcgtacggacagagcaccccgtgcagcggtagcggctgcagcagccgctgcgcaggccgagcttggagatcagccgcagactccatctgatcagattgcataccgtgacttcgctctagctgaggagaaggtcttctccaactcattacaacatttgttggccaac

SEQ ID NO: 5732 - DNA, 444 bp, Zea mays
  Peptide Sequence Number=SeqID_49107
atgacgcatgtgggcctggagtggtcacatggcatggcatatgacgactctagacacacagacgtggctaagagggaggtttctggattggggttgaccgacgagatcgctacaacaatcatgcaactagactcgttaaaaccagtttatgatatatacttacacggtatagcgctcgaggaaaagactggctctttgaagcctgccacgacatatggcaagggaaaggggcctgctaaaattgaggatgccaagaatgccattgaggatgataggccactgggcgaaggtcattttggtcaggagtttggaggtcggcgatacaaggttcaccattcagccaggaaggttatgggtcctaaacaactgaacgaagttgtcggcttcgctgaacaacttggggtatccttcggtgtctacaatctttggggggggggggcgtga

SEQ ID NO: 5733 - DNA, 357 bp, Zea mays
  Peptide Sequence Number=SeqID_49108
atgtccttcaacttctgccatgaagtagttattcctggccgaagcgaggagtaccaagtctgggctacatttttactgccatgccaaatgactgctaaattgtcgctaaaggaggatatgctcgaagagacgaagcgtcttttccttgcgcttctctactcgctaatggattatatcgaggttgtcgatctcgcgatcgagtttgtcatcctgggggtcgaggctgatagctttcctcttatgcagcctgacctcccgaaggagagctttgtctcctttgttggtgtccagggtcgtgaggacaacaccggttgccgatgtcttcttcgacgacatgatgagggttcttgtggttga

SEQ ID NO: 5734 - DNA, 1011 bp, Zea mays
  Peptide Sequence Number=SeqID_49109
atgaagccgccggtgagcagggccgccttcgcgtccgtgctgatagggccgcgcacgctcggggcctctctggtggccgcccgctgcgcctcctcctctgccgccgctgccgtcactgcctatgatcatgcatcgtttgtcaaggaaatcgccgcaaccgatcctccagagcatctcaactctctcctcaatgtgcttcaagcacgaggtgaaaagattgtttctcctggagcaaaaagagggttgattccatgtgttgttcccttatcagaaagtccagcaggtgatttgacatctctccttagatggccaaccgctccaactgggtacactaaatatactgctatttttatatccatggtgaaacagtatatccacagaatacttgttgaggctgacttcagtgctggaactggtgatgatttatgggctgctgtgggcgaagctggtaaaaacctttacgctaaaggcgaattcaaagagtcgcaggtggcagaccttgatgtctatttgttgaagaaggttggacttttccctgatgttatagagaggaaaacattgcgccatctcgaaaaaggagataatgtctcagctctcattactggagaattctatactagagatcaatttccaggatttggaagaccctttgtgttcaatgcagagatttttaaaagagttggacgtacatctgaagccaaagattcagctcgagtggctctgaaatcaccatggtggacacttggctgcagttacgaagaggctgctgaactagctgggtgggaggatgagcagctagagtttataagagagaaggtaactgaggagggtaagcgcgaggacctgaagagaggaaaggctccagaacaggtgattcttgacgaggcggcattcttaatggatttagcgtccgtggatggtaactgggacgaggttgtggatcggattgctgaatgttacagagaggctgggcttcatgacattgcgaatttcattgcctacagggaatag

SEQ ID NO: 5735 - DNA, 147 bp, Zea mays
  Peptide Sequence Number=SeqID_49110
atggcggcagccggggtcagtggagcactgtatgccaaggcggtactcttttggatgtttggttgctggtgtgacttggccttcatccctaccagaagcaaggctgagggggttactgcttccgcaggtgaggaccaggaggagtaa

SEQ ID NO: 5736 - DNA, 606 bp, Zea mays
  Peptide Sequence Number=SeqID_49111
atggcccaagggcacatttccctttcagctatctctgccttcgttgagcccagcatggaaactgtctcgatcaagattccctccaagtgcctgccccctcctagtcaggactcccatgtggaacctcagtctcctttgcctgctgaatccgtcaacaggaagaaacaatcaatcttggtcgacactgaggtcagaaggactgccagacttcgggagaaggctagggctccaggacttccagcactgccatttagaggccaagtgcttcctctagcagcaggactgatatgcaaaggaagcctggagttcagagggatgattctgacgctgaagatgatgcggggtcacgcgccccgactgggaagagacaaaaaggagtccttcgacgactcgtatattcgttatttttgcaacagatctttagataagttcgcttttggtccttctattggagcttttggaggttttattacaatttggaaaggagctcattttgatgctgaggtcattctatctttaagtcggttcgtaataccgaagcttcatgaagaggaaccttcggccatctcatacaaacagcttcagccgaaagccgcttcttcctag

SEQ ID NO: 5737 - DNA, 429 bp, Zea mays
  Peptide Sequence Number=SeqID_49112
atgggtaaaagtaagaagggtagcggttcttctcctcgctctggcgacaaacgcatacgtgagccgactcctccttcggaggacttcggcgactcggagtactcgaaggaggagttctcctctgagtccgagggatccccggctcccgtctctcccccggcatcgtctgatgattcagatgactcccaggggattgccgcggaggtctggacctacatccgggccgtcgagcgctccgggctcgaaggctcggatgagtcggagtactcctcggactcgtccgaggaggacagcggcggcgatggtggtgatggcggcgacgacgggggcgacggtgacggcggcaagggcagcgacggcggcagcaagggcgaccatggcggcggcagcaagggcagcaacaagggcagcaacaagaccagtggctag

SEQ ID NO: 5738 - DNA, 852 bp, Zea mays
  Peptide Sequence Number=SeqID_49113
atggctgaggacgcaaccatcgttcggcttcaaggattttcatcaggcagcccggctgcatcccctcgccggtggtcacccaagacggtgaccaccagttcgatggtggggagaagcaagccgggctgcgatcttggtcccgccctcagcttcaaggatcttcatcatcctggctggggcggaggccgggctgagccggagctctacctcccgcgtgggttcgttggtcaccttctccctcagcattcaagggagagggcgctcaccggcctagcgggagggtcggacttcgacaacgcggggctggtcggcggcgagcgtcgtcagcttcagcgcgttgggctcactggctctggctcggctcccggtgccccctcctgccgcgagagtggttgtcgcgccgcgcgtaccggaggaccgcccgagacgtcgagcgctgctagggcggcgttcgtgttctggggctgtcctgcctttgccccggtacggcgcctctgcgcggaggttggtgctccgctcatccgggaggatccgagtggggatctgccggtgggcagatggcttccgtcgtcggcgctgaggcggtggcggctgaagaagtcctcgtcgccgatgggatcaccgccaccatccgtgctccgggcgtccggctctttggctttgatagcttgtcctcgcccctcgagcggagacgtgggcgagggcattgttgcagcggcgtccgccctgaggccatcgccactgcaatttggccacctagagcggaggtcattgtcgctgctgccggagcaggcggcggtgagccacctggagccttcacggagccgtgtttttcctcatttcgagcactag

SEQ ID NO: 5739 - DNA, 486 bp, Zea mays
  Peptide Sequence Number=SeqID_49114
atgacggtggcaggcgggcaggagcagcagtcacgtcgtcagccaagctcacgtcccatccgggggcagcgagagaaccctctctcacggcgtgaagacaacgcacccgtgttccgtcctcgaacggctcgtgcatgcgcaacagccgccccgccaaccactcgccccgtcgcattaacttcgcggcgggacaggcggcgcctctggcaggagaagcgggcgacgcttcgccttcgccataataaccgcgtcagtaaagggaccgggaaagggggataccccgaaaaggatccttccccgggaaggaaccaggctccgagcctccctactgatcagaggttcgaaggctggccccccggaagggttcgacagccgcctcagatcgcgtgggcccaacacccactactggtcagaggttcgaaggtcgacccctcggaagggttccacggccgcctcaggctactcgggccccacgcccattactga

SEQ ID NO: 5740 - DNA, 438 bp, Zea mays
  Peptide Sequence Number=SeqID_49115
atggagcaggggattacccggtctacgctcaccggcggtcgggcgaagtccggcgaccgtggactggcttctccggcgaagcaaactccgattcctcgctcggggagcttcaccgaggtgtgcatagtcttctccgagggttggacgaggttgggaagggttctgttggccggtctatggtggcaggggctcgggtggccgcgggcacgccatgcacggggcaacgccggtggtttcgggctccgagagatacgggggtgggaagtcggctatgtcagagatgtccaaaccgagacaaaacttgtgccaagtcgtgtcaaacgtcttagggtaggtgtcaactttctccagggcattttaaaggttattaagtgtactacaacttttataaatggcccaagtcatgatcatgaggttttcataatcctttggtcataa

SEQ ID NO: 5741 - DNA, 387 bp, Zea mays
  Peptide Sequence Number=SeqID_49116
atggcccgcgcccgcgcctataaagcacccatggaccttgaccgtacccctccgcacgcgctcgacctcaacggagcccaaacccaccggcgtttgcctgtgcacggcgtgtccgcggccgcccgatccccctgccatcgtagaccggccaacaggaccattcccagccccgtccagccctcggagaagactgtgcacacctcggtgaagctccccgagcgaggaatcgaagtttgcttcgccggagaggccagtccacggtcgtcggactccacccgaccgccggcgagcgtagaccggataatcctctactacattcttcgattccttgtgcacacagcctctacgtcacaccgtgaagctcaccgtgccattggattgaactag

SEQ ID NO: 5742 - DNA, 207 bp, Zea mays
  Peptide Sequence Number=SeqID_49117
atggcccgcgcccacgcctataaatcacctagggacttcggtcgtaccgctccgcgcacgctcgacctcaccggagcccgaaaccaccggcgttgccccatgcacggcgtgcccgcggccacccgagcccctgccatcgtagactggccaacagaacccttcccaaccccgtccaaccctcggagaagactgtgcacacctcgatga

SEQ ID NO: 5743 - DNA, 171 bp, Zea mays
  Peptide Sequence Number=SeqID_49118
atggcgggcggaaatgagctcgccggagctaaggaacggtggctggccggtgaggaaatcagcatttcgtcgctgacccatgctttagagatcagcattctgtctttaggggttgaggattcattgggtgcaccggaggtgggcccaatgggtgtagcccccgagctttga

SEQ ID NO: 5744 - DNA, 471 bp, Zea mays
  Peptide Sequence Number=SeqID_49119
atgggcaagaacaagaagggtggaagttcgtcgcaccactccggcgacaagcggaagcgcgagccaagtcccccctcggaggactttggtgactccgagtactcggaggagttttcctccgagtccgaggggtctctggtctacgcctctcccccgatgtcgttcgatgactcggacgattcccacatgatcgttgccgagctgtggacgtacatccgggccgtcgagcgctccgggctcgagggctcgaatgagtcagagatctcctcgggcgaggaaaactcctccgactcgtccgaggaggagagcggcggtgacgacaacgatgagggcgacggtggcaatggaggcgacgacggcgatgatggcgacggcaacggcaagggcgacggtgacggcggcaagggccacggcgacggtggcaaagtcgacgaaagtggcaagggcagtggcaaagcgccactggtttaa

SEQ ID NO: 5745 - DNA, 306 bp, Zea mays
  Peptide Sequence Number=SeqID_49120
atggccggctcggccgcccccgcaccctgccccgtgcccgcccggctcggccgcccccgtgcccgcccggcctcggccgcccctggccggttcaaccgcccccctggccggttcaaccgccctggccccagctcgcccgcccgttcccccgtcccggcctcgcccgaccgtatcttcgctcgcccgcgctcgcgggggctcgagtggtttctcgagtgcctctccgtaaggacctgttctatggatgaccgcccaggaaaacagtgcaaccatgagggtagaatgggggtgcccttagctgaataa

SEQ ID NO: 5746 - DNA, 1509 bp, Zea mays
  Peptide Sequence Number=SeqID_49121
atggctgaaaagtaccaacttccgcgaagttgcgttcccccgacgacgacaagacggaaggaccgcgggcgctccccatccgagggctcgaaagccgtcgcgggctgggtcttcaccaacacgctccaaggtcctccccctacgacatgggggctgggttccacgcgtcatgcaagctggcctaggatagaagaggccaaaccgccgtgcgcggtgcgcgtaactgcccagcggttacaagcactcctccactttcgcctagaccagcgggtgaaaggacggaccgccatgcaggtggcatgcaaccacaccaagggggcacaccctttcgactccgacgcgtccagcgtgggggcccaggcccacacgtcatgtaaccggcgcgccggttactacgtgcgagaagctgcaccgccacttgcgccagtaccgcgccttctcgactacggaaccggtgccgcgactcgaggcgaccctgcgcatgacccaacagtgtcaaccgagcacatcgatcacgggtcagtcagccgcgggagaaggcgcgacggtcgatctggccaaaagtgggccggcagtgatggaggcggcaggcgggtggaagcagcggtcaagtcgtctgcaagctcacgtcccctcctgggacagcgagagagccctctcccacggagtgaagacgacgcgcccgtgttccgttcctcgaacggctcgcgcacgcacaatggctgccccgcgaaccactcatctcgtcgcattaactctgcggcaagacaggcggcacctttggcaggcgaagcaggcaacggcttcacctccgccataatgaccgcgtcaaaaaaggaccgggaaaggggatactccgaaagggatccttctccacgaaggaagcgggccccgagcccccctactgatcagaggttcgaaggctggcccctcggaagggttcgacagccgcctcagagcactcgggccctgagccctcctactgatcagaggctggcccccgaagggttcgacagccgcctcagagcacgcagagcgagggatgactctgggtacgttcgatacatagccgaggctcgggctatgctcccgagtcacttcgccgctccactgaccgacctgacaggaaaacagcgtcgcctgctccgctccgactgctgcgccactcgacaaacctcgacctcggaagacggactccgcctcgcccgacccagggctcggactcagcctcgacctcagaagacggactccgcctcgcccgaccccagggctcggactcagcctcgacctcggaagacggactccgcctcgaccttggacgatggtctccgcctcgcccgaccctcgagcccagactcgacctcaacctcggaggagcctccgcctcgcccgacctcgggctcggaccgaccacgtcacaggggggccatcattaccctacccctagctagctcaggctacagggaacaagactggcgtcccatctggctcaccccggtaaacaagtaa

SEQ ID NO: 5747 - DNA, 1251 bp, Zea mays
  Peptide Sequence Number=SeqID_49122
atgccagaggtcggacggctggttgcggcgaagccaagggggcgcgctaccgcgggggcgaagaggcacactaccgtaggcggtggcgtgctctccacgcgtcggttcaccttcaccttctccgcacacaggaaccggcgcgccaggtgcatgacatgtgggtctgggcccccatgccagaggttggaccgctggttgcagcgaagacgagggggcgcactaccgtggggcggtagcatgctccttgtacggcggttcgccttcttgactgttggtcgtagcgaagataaaggggcgcactaccgcgtggcggtggcatgctccttgtgccacgattcaccttcttcgcgcctcgggccagctctcgaggtggcactcaacttggtgcgcaacccgcttggatggggtgtgctggcgtttgtcgggaggacctgcgtctgtgtctctcctctcagcgacctcgccgtcgaagagtttgtgttctttgtttccaaactccccagcgggttggctctgccgatcccgtctttcctcgtgcagctgctggaggggcttggcctccagcctctacccatggtgtcttgtttcatccttcaggcagccatcatcgcctacctctacgggatgtccgtggaggcgacactccttcccgcttcttcctccagcattcggggggaggatgattaccagcctcgtgaagaggtggtcgcctccgctggtgggccgctcagagtagaggtggtcgccgccgctcgcgagccgctcggatatagctacccacgcgaccctactggtgtggaggtagttcgtacctgtagagtagagacggagctagaactccgcttgaaggaggatgtaatacttttgctttttgtaaggctcgatttgtcgaggctgcagaccagcatacctaagaaagagttggcaatggcccccaggaggcccacggtacggaaccaggctgagcggctacacgggctccggaccaccccaggagacaagctttcggaccaacaggctgggcttatgagggcggacctccccgggttggcatacacagatgctccagtggtcaggaagaggtactccttcagtcgtagcaagatagtcacccctgggtcggcgcattcccgtcgccttgaagggtccttcccagctgggggagagttgcggagcccttcttggtttgaagcctggacccgtggggagtccagaagggtttccgggggaaggcaggcttcggccccgtag

SEQ ID NO: 5748 - DNA, 1395 bp, Zea mays
  Peptide Sequence Number=SeqID_49123
atggccactaggcaacagatgcgtgtaaagcttgagcttgacggctgccatgagcaccgtgtagctttccgtttgcagtggctgctcggccacaagcccacaatgcccgtgccaccattaaatattttggatttagtgcacgcctcccatgctctgcaaggtatggagcataccgtttccatgcgcatacgccgtatgcgcgaagttcttcatattgttgatgatgcaatgttggaagcgtacaccgttgggcaagccactgcactcccaccggtgcacgagatccctgaacgccgtgtgcaagtgcaaaatgtgcacttctgcgttctccatggatggacagcggtggttccgctgccggtggtggagtgtggactccccactgcattcccgtcgccacaggcgccggtgtttgacgcgggatcgtctgcatcggccccaatggatgtcgatttggaggcaccaccaccgcctccacccactgcagcggcagttgctcgccgttcgccatctccaccagtgcctgtggtcgtcgggaccatcgctgcccgtcgtgggcagcctgctcgcgctgttgatgcccccgagaggtcgcatcatctttcaccggccatcacccaaatggggtggccccatcttcctcctccaatcggagggcctaatggccctcgatccggccgccacgtcggccgtttgggggagggggtggggagtggcgcggcaaaccccggcgcgagcgcgctttgcggtgcacggctcggcgctctgcgcatcagggccggcgctcggcgcagcccccgtcagggcgcgggcgcgggagaaggcaaggcgggcgcgcgcgattcgcgctctgcgtgggcgcggtgtggccccacgcgtggccggcgactgcgcgacccgggcaggcgcggcagcgcgcaacggctccaccaggcggcgctcggcgtgaggcgcgtggcgcagctcctagccggcctcggccaggggcgctcggcgcggcctcctcctccagaggcgcgggaacgaggccccggcgagggcgctcggcgcggctcccaagggcgctcggcgcggcctcctcgggcgcgggaacgaggccccggcgagggcgctcggcgcagcctcctcctccagaggcgcgggaacgaggccccggcgagggcgctcggcgcggctcccaagggcgctcggcgcggcctcctcgggcgcgggaacgaggccccggcgagggcgctcggcgcggctcccatgggcgcccggcgctcgtctcgaggcgcccttcacgaggcgctcggcgctcgtcaggagcgggcgcaggaggagaaccagggcggcggctgggagctccttgctccctggcggcggccaggaacatccctggcggcggctatgtga

SEQ ID NO: 5749 - DNA, 678 bp, Zea mays
  Peptide Sequence Number=SeqID_49124
atgccgtcctcttcctcttctgctgccgatacaccgccggccggcgcatcgtccgaggacacactgagcgacgtggcggcggaggagttgcatcctggtgatacagtggagtttggcgtgttgcggatttcctcggtccgcgtgcaagatatgcaacagcttggatattttggcagcggagttgggcgtgtcccgggggcggaggaggtcctcgagccagaaggcgggttggtcgtttttgaggcttttttcaccgctggccttcgtctgcctgcgcatcgattcatggcggaggtcctgcggagattcgaggtccaggtccaccagctgacgccgaatgccgtggtggccctggcgaagttgaatcgggtcttcgacctgaaccgcttgccgtacggtggttatccaggggaggacgccgccgaccgccgcgggaagaaaccgatgggcgggaccgaggaagggccttcgcaggatgctgccccggccgctaagaagaggaaattaggtcttctgactggtgatatattacagggtcgggcgagggacaatggttgttgtcccgccttcggtggcgaccacttcgccatcggcggtggtaagggcgaagggaaccgcgcaggacccgtgggctgccttctgcgcaagcggcgagattctgacagccgctgccgctaa

SEQ ID NO: 5750 - DNA, 1071 bp, Zea mays
  Peptide Sequence Number=SeqID_49125
atggaggggagggagggtatcgcggtggtggccgcaggcggcggccatggatccgggcagcacggcatgttcggagcggcagacatcgccatggcagaggcgcatgaggcagcggccaaggggtaccagtaccagtcctccccctcgtcgccgtcgacgtccctcacgccgtcgccgccgccggctgcggctggccacgccggggacgccaccgcggcgccacttgcctggagcctgggcggcgggatgccgagcgagcccgcgggggacagcggcgtgcgggcggccgggcagagccagagcgagcacgccaacaacatgagctccgagcgccgccgcggccgcccgcgcggctccggcaggcgccagatcctggccactctcggggaatggtacgcgctgtcagccggcgggagcttcacgcctcacgtcatcatcgtgggtactggggaggatgtggcggcgcgcgtcatgtcgttttcgcagaaaggtccacgctcggtctgcatcctctccgccaacgggacaatctctaacgtgacgctgaggcagccgggctcatctggtagcaccttcacctacgagggccgtttcgagatcctgcagctgatgggctccttcacaatggctgaggaaggtcgtaagaggacaggcggcctcagcgtctctctcgctggcccagacggccgtgtggtcggcggcgtagtggctgggatgctgcgtgccgcaagtcctatacaggtgatcgtgggaagcttcctgcccaacagcctgaagcagcaccagaggcggatgagcgcgcagcagcagctctccccggttccggcactgccagaacctgaagcgcccccacccgtgctcaccgcagccaccccgatctctctggcaggtcctgggaacgggttccatgatgcgccgccaccctccgccgcacctccccagccccacgccagcgccatgaacctgaacgcgacgggcttccccgtggctggctggcccgcaagctcgccgcagcagatggtgtacagggcttcccctgacatcaacgtcagcttgactccccaggagtag

SEQ ID NO: 5751 - DNA, 1539 bp, Zea mays
  Peptide Sequence Number=SeqID_49126
atgcctccgcctccgcgtcacccattctcggcagagggcatgggagcaggcgtctcctccccgtattcgtccgacaccagcctcgacaccgactcacaaagtggctattgcacctccacgaggatgtttggcatacatgcaccatcgttttcactgtcgtcggacgttccgttcgtcttcctggccttcgccctattcttcctccccaacctgctgctctcgcccacggtcgcagtcttgagccgactgacgctcgtcgacgcgggccacagaatcgcagtgtcgagtgccgtccgcctcgtgttcatggctgcctccggagcagctaatgacgccgccgctgctacggggctccgcctccgctacgatgtcatcgtcgtgggcgcgggcatcatgggaagctgcgcggcgcacgcggccgcgtcccgcggggcgcacaccctgctcctggagcgcttcgacctgctccaccagctcggctcctcgcacggcgactcccgcatcatccgcgacgcctatgtgaaggcacagtacccgcccatggtgcgcctcgcccgccgcctgtgggcggaggcggaggcggagtccgggtaccgcgtgctcacccctgccccgcacctctccatgggaccgcgcggcaacgccgcgctcctcgctgccgtcaagagcgctggcgcagaggaggtggatctaagccagatgtggggaggcgcgttccaggcaccggaagggtggttgaccgcggtgagtgagcacggcggcggcgtgctgaatgcgaccaagtcggtggccatgttccaggcgctcgccgtcaagatgggcgccgtggtcagggacaacgccgaggtcgtggacatcaggaaggagccggagggaggcgtcgtggtgaagacgagctccggcgaggagttccgcggcgccaagtgcgtcgtgacggtgggcgcctggacaagcaagctactgaggtccgtggccggcgtcgagatccccatccagccgctgcacacgctgaccctgtactggcgcatcaagcccggtcgcgagcgcggcctgatggccaaggctggcttcccgactttttccagctacggcgacacgcccgtttacggcacgccttcgcttgagctcccgggcctgatcaagatcagctgcgacggcgggccgccgtgcgacccggataaccgcgactgggcatccggcgacagagaaatcaccgagcgggtggctaggtggatccaggagttcatgccgggccacgtggactccgccggcgcgccagtcgtccggcagtcatgcatatgttccatgacgccagataaggatttcgtgatcgactggctgggtggggaattcggggaggacatggtggtcggggctgggttctctgggcacggcttcaagatggggccggcggtggggaggctcctagctgagatggccatcgacggcgaggcgaggactgcagtggaggccggcgtggaactcggtcacttcaagatcaacaggttcaacgttcaagatcaacaggttaaagggtaa

SEQ ID NO: 5752 - DNA, 363 bp, Zea mays
  Peptide Sequence Number=SeqID_49127
atggcgaccaagaaatgccttgtaacgaagcacgagctcttcttgacgaagctgatgtcagcgaaaaatgaagaaccgaacatttttgttcataacgaagcatcttcgttcatatcgaagcattttcgttcttatcgaagcatttttacgctgaaggcagaaaccttcccttctttttcattagtgccttatgagatatgccatgatgcgatgaagctacagatgtctaatgatcttggaatgtcattcccgtccatatcttttaacttgtatgatccaggtcttgacaaagatactaccaagaaggggccttcccacttgagttgtagctttcccactgtgtctgggttggctattctatga

SEQ ID NO: 5753 - DNA, 258 bp, Zea mays
  Peptide Sequence Number=SeqID_49128
atggccagagtcggtgactccgcgcgggcaaagaaggcactgggtggccgcggttggcagggcggtctcggttcgacggcgcgggaccgggacgagggcaaggctaggcctgatggtggcggagcacgatcgcggacggcagccgagctctaccggcgacgaattcgggcgcagagggcctggcgaaggggaatctctggcgagcttgaagaacgggcgcgcgtagctcggggttttccaattccaaattcaaattag

SEQ ID NO: 5754 - DNA, 201 bp, Zea mays
  Peptide Sequence Number=SeqID_49129
atgagattgatggttctggttatgattatggtattggtaagtggtattctttccgtttggaaaggatacattgggttaataacttgggttaatgttaaaacctggctttctactagttgtcagcattgcaaccactgctcaggagaagatgaagctgtggaaggagacttccaggagttccaagactacgacgagttctag

SEQ ID NO: 5755 - DNA, 690 bp, Zea mays
  Peptide Sequence Number=SeqID_49130
atggggcggatcctcggccactttccatcgacggcttggctcccatggcatgtgatggggaagggtaagggaggaggctgttccgtgcgggcgccatcgcgagcggggggagcggacggatggcagcaatctcgagtagagggagaagcggatccgacgcagaggggtaggagatcctcggatccatgggtgagggctcggccgccttccatcgacggggctgggttgtggcggagaggggcgaggaccaccgggatgtgcgagcgaggggaggacagaggcgtagcgtctatggcatggacatgtattgcgggggcagggtggaggggggcaggtaggggcgtcgaacggaggcggggcggcgagggtacctgtcgcggtgggggaggcgggcggaggcctcgcgagcgtgatggagaggggcaaggaccaccgcgagagcgtgccgagaccgggcgagcgggcgggatccatgcacggtggaggcgtgcatcgtgggcgagatccgcgggtgtgttccatgcgcggacacggggaggtggagcacaggcggagggagaggcggtgtggggagaagtgcgggggatccgcggcaccttccatccgcggcaagaccttccatccgcgtggcacaggcagaaccgtgcaccgctcaattgtggacgtctacactctgctcttaagggatag

SEQ ID NO: 5756 - DNA, 618 bp, Zea mays
  Peptide Sequence Number=SeqID_49131
atggatcacatagtcgggggcaagttcaagctcgggaagaagatcaggagtggatcattcgggaaactttacctcaccgtgaacgtgcagaatggcgaggaggtggctgtcaaactggtaactctacacagtggacagaatcataactctgttagcactattttatcaagaaatgtcacttcatctgtgcccctgccgccgccgctaagcctccagccatggcacctcgggcgtgcctctcccgagcccaaacctgagacccatcccgccgtggatcaccgcgcgaggaggggcgcaccgaccggcgggccagatggtgtccggcgccgtaaggggcgagtagcgcggtcagcgtccacgaacgggatcggcggcggcgcagcgaggtggcggtcggggcagggcaccatgtctgcggtagtgtgcagcaagaggtcctcctcgatcttcggcgatgatcttgtaccttccccttcctccgctctgtccccttcctaccaccaccaccaccaccccgccaagagggcccgctgctccccgacccgccggagcgaggttctgcttcaccacctcttcctcgacatggatccccaggttcgtcatgttcttgcttcctga

SEQ ID NO: 5757 - DNA, 177 bp, Zea mays
  Peptide Sequence Number=SeqID_49132
atggaccctaacctcggcgccatcatcattggcgccgaggtaacacacatcgacgccagtaccattggcgccactatgtgttacctcggcgccaatgatgacggcgccgagtgtttgctcggcttcgcggttttagggttcgtgccggacagaaacgatgtctatgacgttgtctag

SEQ ID NO: 5758 - DNA, 405 bp, Zea mays
  Peptide Sequence Number=SeqID_49133
atggatcaacggccaggattgcctcactttcctcccatcgccgaactacggcggcgcaccagagccgacggcggcggccattgccgcgcacccaaatcccatctccccgcgcccgaagctcccatcggccgaactctactctatgcggaggcaaaaacgaactggggcgaagagttctcaccaacaatgccgatggacgcggtgcggtctgcgacgatgcgcggcacggccccctccccgtcgaccgacgagaaatcacgcgagcaccagaggcgcttggtccgtcccaaggacacgggcggccacccaagccgcggcagtatcatacgacgagagggagaagaggtgaagactcggcgctccgctttaaggtcgtcacggaacggattttatctcccccagtaa

SEQ ID NO: 5759 - DNA, 429 bp, Zea mays
  Peptide Sequence Number=SeqID_49134
atggacggcagcgacattcctagatcttggaatgcggatgagcttcggcgctctacaagagcagtatcccccgaagatgtaaatgtaaaaactgggcatgcaccatcgagtgcaatgagaaaagaaaaaacagggagaagctcgaaagacgtccctaaggggatgcagaacacgacgaagctacaaaaagtcgttcctaagggagcacagcctagacttcaaaaaggcaacagctgtgccccgagaagctgccagggcacagaagtcgccatgcccagctataacttcgtcaagatcattaatttcaccttcaatatgctcgaaggcacgaggcaggtcttcagccgaaggagtgaacttttcgctactggctccaacaaaatggaatacctgcttcaactattgaatgcatcgattgctgaactctag

SEQ ID NO: 5760 - DNA, 237 bp, Zea mays
  Peptide Sequence Number=SeqID_49135
atggctgtgctcctcctcacggccatcctgcttggctcatctttctcgcgtgcctcccagaggctggccttgctcgccatctcgcagctgctgcttccccgcccgccaccctctgcgagcgacgctacagccgcagcattgaaggctaaagcagcaacagtgcatcgtgacccgcaagaagcagggtcgcggcagccgcccccctacctgttttacgtgaaaaatgttaatgaataa

SEQ ID NO: 5761 - DNA, 354 bp, Zea mays
  Peptide Sequence Number=SeqID_49136
atgacgaaggtcgatgcttgccaaaggtgttcgaaactcaaaaagtggaaaagaataggaatgatgttgggttacaaatatacctttgacttgaaagaagagaccgacacaaacgaaccgatccatgaacaagtacagatgagatgtcaggaggcataccaagaggagcatacttcattgagagatggtgcagtgggagacattcatcttgatttggatttgttgcacatggataatgaaccaggcaaccctattagtagaaacctcgtcgaacacatccgtcgacagaaacatacaactcaaggtgataacacacacggcgatgaagaagatgaagatgacacctacctttag

SEQ ID NO: 5762 - DNA, 503 bp, Zea mays
  Peptide Sequence Number=SeqID_49137
atgcatgcaactgcccggcggttacgagcattcctccactatcgcccagaccagcgggtgaaagggcggacagccatgcaggcggcatgctaccgcgccaagtgggcgcacccctccgacttccaatgcacccagcgtggaggcccaggcccacacgtcatgcaaccggcgcgccggttgctacgtgcgagcaactgcaccgccactcgcaccactaccgcgcctcctcgactacggaaccagtaccgcgactcaaggcaaccctgccagggaccgggaaagggggataccccgaaagggatccttttccgcgaaggaaacgggccccgagcccccctactgatcagaggttcaaaggttggcccctcggaggggttccatagccacctcagagagcttgggctccgcgcccactactggtcagaggttcgaaggccggcccctcggaagggttcaacggccgcctcaggccactcgggctccacgcccactactgatcaggg

SEQ ID NO: 5763 - DNA, 948 bp, Zea mays
  Peptide Sequence Number=SeqID_49138
atgcaggttccatattttagctcttcattgggtatcatctatgttctggccaaaccagcaatatatgcgatgatttctggtgaagtactgtcaactgaccagggaaaagcgcaaggttttattgcaaccgtgcagtctgtagctatattgttggcaccacaatttatgagtccactgacatcttacttcatttcagaggaagcgcccttcgactgcaaaggtttcagctttattgtggcgagtttcttcttgggatttgccattggttcagctgctcttgtgtctctggcgctttttggtgccttcatcagcagagctggagtgaaggttgtccatgtcctctcccccaaggttttcattggtttgattgttggagccatgcttccctattggttctctgccatgaccatgaagagtgttggaagtgtcgccctaaagatggaggaggaggtccgcagacagttcaacaccattcctgggttgatggagggaactgccaagcctgactatgcaacctgtgtgaagatctccactgatgcttccatcaaggagatgattcctcctggtgctctggtcatgctcactcccctcattgttggaaccctcttcggtgttgagactctctctggtgttcttgctggtgccctggtttctgcaggatttatggatttctgcttgatgtttgccatctttgctcccaacaccggtggtgcatgggacaatgctaagaagtacattgaggctggtgccagcgagcatgccaggaccctcggccccaagggatctgactgccacaaggctgctgtgataggtgacaccattggtgaccccctgaaggacaccttgggcccgtccctcaacatcctgatcaagcttatggcggtggagtcccttgtgtttgaccccttcttcgccacccacggcggcctgttgttcaagtacctgtaa

SEQ ID NO: 5764 - DNA, 408 bp, Zea mays
  Peptide Sequence Number=SeqID_49139
atgacaaccgtccccatcgattccccgttcgcgtccaggcctcaccgccttggcatacaatgctccactgaccccggttgccgccgtgcagtgaccgcacttgtacccaccatagctagcatgggagacccaatctcaggtcgcatgagggataaagtccgcgcccggcttcactcaggtactaggtttaccggttaccatttttcccggcatgtgcttagtacattcaaaagcttgactcagaaattacaacttttgacggtgtatgatctacttgagttagacaaggttaacttcacttatgtaagacccttgggtggtatacttggtaaattgggtcaaactttagctaagggcagaaggggtgctttgaactacaactattatttaacagtgggtaatctctaa

SEQ ID NO: 5765 - DNA, 144 bp, Zea mays
  Peptide Sequence Number=SeqID_49140
atggcgggcggaaaagagctcaccggagctaaggaggggtggctggccggtgatgccttcccccttaaaggaatcttgtcccgagattcgggccagagtcctcccagggtgaagcgaagggtgagacttataggaaatgggtga

SEQ ID NO: 5766 - DNA, 843 bp, Zea mays
  Peptide Sequence Number=SeqID_49141
atgacgattaaaattttattaataaagccgcgcggctgcgctccagcctccaggctcctgctcggctggtccaactccggcgtccggcgtgctactccaatgctccagctcccagattcccccgcccgcccaggtccagcgtccatccggccaacgaaccagcatccgctgcaactccagtgtgccactccctcgctgcaagctccggccacaacgcaagctcttgtttgcactcaagattggatgaggcgtgcatgtcatatcaccaatgaagaggatactgaggagttggccaagctggaagaagcactttttgcggaaatggatagttcgaatattgccaacaatactgatacagcttctaaggacaaggaaattgcgctcaggcatggcgtgagtggagttggtggacaaggacacaaggtggtggactgggctgctgacactggcagcgtgacggttgagcccggccccgccggcgacgagttgaccaacccctttacctcccttttgtcgccgtcattaaagaagccgctccatctgggaaagacgcggtaccaagcttggtaccagggtgcgactcgttgtaagcttcgccagcagtggacagcggatgactacgctgacattgattcttctgacgatgaagaaacggagtacgacctgtccactagactgggaacccaagtggaggcggcacccatcttagatcgagtgggtaacacattgcaacggtcggtagaggacattgatcgccaacttttgactgtgggcgacagcggcatgcgcagcttcttgcaggcgcctacgtggagctgctgcttgctgtggctgcaggactaa

SEQ ID NO: 5767 - DNA, 231 bp, Zea mays
  Peptide Sequence Number=SeqID_49142
atggagacaactagacggatcctagagggaccccgtgttccccggtctatggagctgaagcttgctttcctccggaaacccttctggattccccacgggtccagacttccaacagatggggaccaagggtcgggacctagccctacgacaagtaccaaccaagaagggctccacaactctccccctactgggaaggacccttcaaggtatgaactacctccacaccagtag

SEQ ID NO: 5768 - DNA, 801 bp, Zea mays
  Peptide Sequence Number=SeqID_49143
atggcggcggccacctttgcaccgatgactcgccagcaatggcgatcacctcagcacgtgcgccattgcggaaaggtcctcgcccccgtcttcctacggggggcgacaacgaggccattaaagccaaagagtcggaaggctcggcggcaggtggcactgatggcctcgccagcgaaggcaaccacctctgcaacgggcagcctcacccgcggcgatgaccaccttagcgccgacgacagcagccacctctgcaccggtgggcggcggctgcctcagcacacacgaagaggtcctcgctcccgtcctcactacgggagtgaggataagaccatccaagaacgcggctgccgcccccgcagcataccacgtcttgtaccgccccccggtgcggccgccagcgcgggagaagctgtggatgtggcagacctgcgcacggcgcgaccgtcgcccgtgcggtggacgggcagccacgccccaaccaaacggcaggaggcagtgtcggaggcggcgccgagaccatccaagccggggaaccgggcacatggcggtcggcggcacccgcagttggccggtcccgcgtacccaaagttcgcctcctcctcagagctggtgaacgcccttctcccccgaatgctggaggaagaagcgggccaccagcccatgcgaaaggcgggaccccaactcggctcgccctcctccccagcgtggatgatgaacatccttgaagctgaggacaggggggaggccgcagcctggctcgcttctctccaccacaaggctggtggtcatccctctagatga

SEQ ID NO: 5769 - DNA, 765 bp, Zea mays
  Peptide Sequence Number=SeqID_49144
atggaaaatagaaaggagccccccttctctcttgggtcggctctttggcaggcccagcaggcccccctccttccccctttccccttgggccggctggctcggcggcccagccgccccctcccccgcgcggcccagccggcggcccagctcgcccctcccccacacggcccacctggcccatcccgcgcgcagcagccccacccccttaaccctaggccacgccctcccccagccgccgccgccaccccctctggtggggcccgctcgtcagcccacccccttcccctacctcctctctccctccccgatcccgcgcacatccctctctctccctcgacgccgctcgccctcgccctccctctccccgcccctcccctcggctcggccggacacggcggccccggcggccctggcggcccgacgcgggtggcctgggcgcggttccggcgcgggcacgtcccggcgcgggcgcgtggcccctgcgcgggcgcgcggtctctgcgcgggcgcgcgggcgcgcggtccctgcgtgggcgcggcttcggcgcggcaccggctcggcggcccggcgcggccagctcggcgccccctgcagtgcggccaagagggccggcgtggtgcgcggccggcgtggccagcgcgtggcgcgcagccggcgtggtgcgtggccagcccgctcgcggcgcgttcgcagcagcggccatggcgcggcagcctgcccggcgtggtggctcgcggccagtgagcgcaacgcgcgcggcctag

SEQ ID NO: 5770 - DNA, 432 bp, Zea mays
  Peptide Sequence Number=SeqID_49145
atgggcaagggtcacaaacgcaagcgtgagccgactcctccgtcggaggatttcggcgactcggaatactcggaggaggagttctcctccgagtccgagggttctccggctcccgtctctcccccggcgtcgtctgatgattcagacgactcccaggggattgccgcggaggtctggacgtacatccgggccgtcgagcgctccgggctcgagggctcggatgagtctgagttctcctcggacgaggaggactcggacggcggcggggacgaagatgacgacgacgacgacggcggcgacgacgacgacgatggcgacggcgacggtgacggcagcaacggcggcgggggcagcgccagaggcggcagcagcacgggcagcaccaggggcggcggcggcggcaagggcagcagcagcaaggccagtggctaa

SEQ ID NO: 5771 - DNA, 450 bp, Zea mays
  Peptide Sequence Number=SeqID_49146
atgggcgtaccgcctgccagaggaatagacaggcatgccgcctgccatcggaatggacaggtctcattaaatgctgaggtgacacacttcttgccagtagagtggacaggtcgctgcctgacagcagagtgccaaaggttcatctacaactatactaaatcgactgtccggaatacagtagattattccggacaggagaagctttttggaaaaacaggccaagcgcggaccgtccgggcccttgcggcggaccgtccgcaacaccaggatgaccctcggacagaaccaatacaaaaatccaagtctgcactacggaccgtccggaggaaaagcgcggaccatctgagacctcgcgcggaccgtccggcctcaggcgcggaccgtccggggcggaccgtccggaccaggcaggcggaccgtccgcgctcagcagaatggagcaacggctag

SEQ ID NO: 5772 - DNA, 741 bp, Zea mays
  Peptide Sequence Number=SeqID_49147
atggggctgcttgtccttccggaagatggcctcaactgcctcctggccagaggcgaacttggtggcgatgtccatcagctcgctcgccctggtggggatcttgcaacccagcttgctcaccaggtcacggcaggtggtgccggcgaggaacgcgctgatgacgtccgagtcggtgacgttgggaagctcggtacgctgcttcgagaatcgccggatgtagtcccagagagactctcccggctgctggcggcagcttcggagatcccaggagttcccagggcgcacgtacgtgccctggaagttgccggcgaaggcttggaccaggtcgtcccagttggagatctgccccggaggcagatgctccagccaggctcaagcggtgtcggagaggaacagggggaggttgcggatgatgaggttgtcatcgtccgttccacccagatggcaggccagtcggtagtccgcaagccacagttccggcctcatctcccccgagtactttgtgatgtgcaccctctcgtcgaggtgggctcgacggttgcggtggtggtgctcgttgccgaggcgacccagggccgcaggcgccgtgttgcgcgtacgcccggtgtggaccaaggcttcccgcatgaatcgggaagtcgcggcgcgatgctccgaggggttctggccgaccccactggaagccggtggcggccttgccctgatgtcgtcggcaatgcggtgctagatgccctagggtag

SEQ ID NO: 5773 - DNA, 576 bp, Zea mays
  Peptide Sequence Number=SeqID_49148
atggccttgttagttcatcccgagcgcttccagactaagtgggcactcgacatggtgcaccacctacctagatggagcgcgccggtgttcagcggaaggatccgtgccggcgccatcctcctcgacgatcttgccgccggggagagcgcggcctcgtgggaggtggcgcccttccgccagtgctccgtttcaaggatgttcatcagccttgctgaggtggcaagcgagctgagctacggctccatctttcgcatgaacttcattgcctcctgcagcggcctcgtggcatgcctccatgaactggttgagctccggctccgtttcagtggccaggccactgggcgccgtgtgccgccgcgtttccaactctttggctttaacgtccccgacgtcgcctccaacgatgaggactcctttgtctcgacacacgtgtcgaggaggccaccaccgccggcaagccgcccggaaggtcgtacaggacgccatgaagacggtggccgcacgcgttcagcgctcgacgcgtcgaggctggataccagcatacctaaaagagttggcaacgacccccaggagtag

SEQ ID NO: 5774 - DNA, 3276 bp, Zea mays
  Peptide Sequence Number=SeqID_49149
atggcgacgcctccgctctactccgtttccactcaccaccgcgccccaccaccatggccgcctcccaaggctgccactagtccgcgaataacctttcggtgtagcgtgctggcggcaccggctggccgagtcctggaggcgcccaccgctgctccaagctcatggagcaccaagaatccgccaagtcgggccctgagttccgacgtgaacctgcgaatccagcgcctctgtcaggcgggtgacctcgcgggcgctctgaggctgctgggctctgacggcggcgtcgacgtgcggagctactgcatggtcgttcagctctgcggggaggagcggtcgttggaggctgccaagagagcgcatgccttaattcgcgcgtccagtgccgctgcaacgggtggaaaagggagcgtccttgggaagaggttagtgctggcgtacctgaaatgcggcgacctgggcgaggcaaggacggtgttcgatggaatgcctcctcaagctgctgatgtccgtgtctggacttcgctgatgagcgcgtacgccaaggcgggtgatttccaggaagctgtctccctgtttaggcagatgcagtgctgcggggtcagtccggatgcacatgctgtttcctgtgtcctcaagtgcgtttccagtttgggcagccttacggaaggcgaggtgattcatggattacttgagaagttgggtctcggtcaagcatgcgcggttgcaaatgctctgattgccgtgtactcgaggtgtggacggatggaggatgcggcacgggtatttgacagtatgcatccccgggatgccatctcttggaattctatgattggtggatgcttttcaaacggatggcatggtacagctgttgatcttttcagcaaaatgtggtctcaaggtacggagatcagttcagtgacagtgctcagtgttctgcctgcttgtgcgggattaggttatggccttattggaaaagcggtgcatggatactccgtgaaatccggattgctttggggccttgattctgtacaaagtgggatagatgatgctgctcttggatccaaactggtattcatgtatgtgaaatgtggggacatggcctctgcaagaagggtgtttgatgcgatgtcatcgaaaggtaatgtgcacgtatggaatctgataatgggtgggtacgcaaaggttggtgaatttgaagaaagtctctcgctttttgtgcaaatgcatgagcttggaattgccccggatgaacatgccatttcttgccttctgaagtgcatcacttgtttgtcttgtgccagggatggcttggtggctcatggatatatagtaaaattgggtttcggggcacagtgtgcagtttgcaatgcactgatatcattctatgcaaagtccaacatgattggcgatgcagtcttggtgttcaatagaatgcctcgtcaagataccatttcttggaattctgtgattagtggatgctcttccaatggactaaacagtgaagctattgagttgttcataagaatgtggacacaaggacaggagctggactcagttacgttgctaagtgttttgccagcttgtgcacagtcacgctattggtttgcaggaagggtggttcatggttactcggttaaaactggattgattggggaaacatctcttgcaaatgctcttcttgatatgtactcaaattgctcagattggcagagcactaatcagatattcagaagcatgggtcaaaaaaatgtggtgtcctggacagcaatgatcacgagttatatgagggcaggactgtttgacaaagtggctgggttacttcaagagatggtactagatggtatcagacctgatgtctttgcagtcacaagtgcccttcacgcttttgctggtgacgaatctctgaaacaaggcaaatctgtccatggttacaccatcagaaatggaatggagaagcttcttcctgttgccaatgcacttatggaaatgtatgtgaaatgcaggaatgtggaagaagcacggttgatttttgaccgtgtgacgaataaggatgtaatctcatggaatacactgataggaggttactccagaaataattttcccaatgaatccttcagtttgttcagtgacatgttgctccaattcagacccaatgcagtgaccatgacttgcatccttcctgctgctgcaagcatttcatccttggagcgaggaagggagatacatgcttatgcacttcgaagaggatttctggaagatagttatgcatccaatgcgcttgtggacatgtatgttaaatgtggtgcgttactggtagctcgagttttgtttgaccggttgactaagaagaacctcatatcatggaccattatgattgctggatatggcatgcatggttttgggaaacatgccatcgccctctttgagcaaatgagaggcagtggtattgagccagatgcggcctctttcagtgccatattgtatgcttgctgccattctggtcttgctgctgagggacggagattcttcaaggctatgcaaaaggaatacaaaatagagcccaagttgaagcactacacctgcattgttgacctgcttagccgtaccggcgacctgaaggaggctcttgagttcatcgagtcaatgccgattgaacctgattcaagcatttgggtatcattgcttcacggatgtagaattcacaagaacgtcaagcttgcggagaaggtagcagacaaggtctttaagctggaacctgagaacacagggtactatgttcttcttgccaacatctatgctgaggctgagagatgggaggctgtcaagaagctcaagaacaagattggtggtcgagggctccgtgagaacactggctacagttggatcgaggtcagaagcaaggttcatgtctttattgcagataaccggaatcacccagactggaacaggattgcagagtttctggatgatgttgccagaaggatgcggcaagaaggccatgatcctaagaaaaagtatgctctgatgggtgccgatgatgcagtgcatgacgaggcactatgtgggcacagctcaaagctcgccgtcgcattcggtgtgctgaatttaccggagggacggccaattcgtgtgacaaaaaactcaaaagtctgcagccactgccatgaggctgccaagttcatatcgaagatgtgcaacagagagatcattctgagagattcaagcagattccatcgttttgaaggaggcaggtgttcttgcagagggtacctctga

SEQ ID NO: 5775 - DNA, 813 bp, Zea mays
  Peptide Sequence Number=SeqID_49150
atggcggcggcaggcgggcgcaagcaacagtcaaatcgtctgcaggctcacgtcccctcttgggacaccgagagagccctctcccacggcgtgaagacaacgcgcccgtgttccgttcctcgaacggctcgcgcacgcacaacggccgcctcgccgaccactcgtcccaccgcattaactctacgtcaagacaggtggcacctttggcaggcgaagcagacgacgcttcacctccgccataatgaccgcgttaaaaaagggaccgggaaaggggatactctgaaagggatccttctccgcgaaggaagcgggccccgagccctcctactgatcagaggttcgaaggctgacccctcgaaagggttcgacagccgcctcagagcactcgggctccgcgcccactactggtcagaggttcgaaggctggcccctcggaagggttcgacagccgcctcaggccactcgggctccgcgcccactactgatcaggggttcgtaggctggcccccgaagggttcgacagccgcctcagagcacgcagagcgagggatgactctgggtacgtccgatacatggtcgaggctcgggctacgctcccgaggtaccctaggacatttccgagaccagcaagagcgattctgtaacggaatcccatcagagggaggcatcaagccctcggaccctatcaaacgggaccgggaaaacagcgccgcctgcgctgctccgactgctgtgccacccgtcagggtgaggctgacagccgccaagaccggcctcaggcgccataggaagctccgcctcacccgaccctag

SEQ ID NO: 5776 - DNA, 87 bp, Zea mays
  Peptide Sequence Number=SeqID_49151
atggccaacatccccgagcgccagcggttctcttggccaccgcacaaggccagagggctagttgcagccgcatcacacactctccag

SEQ ID NO: 5777 - DNA, 1227 bp, Zea mays
  Peptide Sequence Number=SeqID_49152
atgctggacgcgtcgaagccgaaagggtgcgccacctttggtgcggttgcatgccgcctgcatggcggtccgccctttcatccgctggtacgggcgaaagtggaggagtgcttcccggctgcatccccttgccgatggtcacccaagacggtgaccaccaattcgatggtggggagaagcaagccgggctgcggcctctgccccgccctcagcttcaaggatcttcatcatccttgctggggcggagggcgagctgagccggagctctacctcccgcacgggttcgtgggtcaccctctccttcaacattcaggggagagggcgctcaccggcctagcggaaggggtggacttcgacaacgtggggctggtcagccgtgagcgtcgtcagcttcagcgcgttgggcttgctggctcagctggctctggctcggctcgcggtgccccctcccgccgtcgggcagagcgtggccgtctgcccaccgtacgagtggtcgttgcgccacgcgcaccggaggaccgcccaagatgtcgcgcgctgctagggcggcgttcgtgttcttgggttgtcctgcctttgctccggtacgacgcctctgtgcggaggtcggtgctcgcccgtccgggaggatccgagtggggatctgccggtgggcagatggctgccgtcgtcggcgctgaggtggtggcggccgaagaagtcctcgtcgccgacgagatcgccgcctccatccgcgctccgggcctccgactctttggctttgatagcttgtcctcgcccctcgagtggggtcatgggcgagggccttatcgcagcagcgtctgccctgaggtcatcgctgctgctgtttggccgcccggagcggaggtcgttgtcgctgctgccggagtgggcggcggtgagccacctggggttttgtcgtcccgcaggccctccaatgtggggggttgttcgtacctgtgggagtggaaccggtgttccgtctgtaatggcaccttgagtgccggtgtctgttcattgcggctgtcggggcctgaacatgagtccctcggctcggtcggccttgccgcccgaggcttctcttgctcagttaaagaaaccctcgaccgctctgcgatgagacggagccggacgcagtggtgccagcacggacagaggcaaagttggctcgaaaagaagacttcgtcggcccaggagctggggacttctcaggccgaggaggcgtag

SEQ ID NO: 5778 - DNA, 342 bp, Zea mays
  Peptide Sequence Number=SeqID_49153
atggacccttgttccgaagccaaaggtgaccagcatggttatcttgccgagtgccacaatctgccttcctccaaaaccacaaagagggacattatggaccagaaatcccttgataacacaagatatgaccattgcatcaatgtggggataatccttgagctaaagatcctcctaggagaagaacttgagcagccagtgattgggagcaccagattcgtggccgaaggtggcacaacttggttaatttgcgaagccatcgttgtagttgtggaagctgaagctattaagcttcaacattttgcactgttgtctcttctcaaagtcttcgtcttgaggagctaa

SEQ ID NO: 5779 - DNA, 681 bp, Zea mays
  Peptide Sequence Number=SeqID_49154
atggcgcctcccgttgacgtggccggcccgcgccctaggttgggcgatgcgaaggctcctccgaggtcgaggtcgagtccgtcttccgtggccgaggtcgagtccgagcccctaggtcgggcgaggcggaggccgttggctgaggccagggcggagttcgagtcttggggtcgggcgaagcggagttcgtcgtcttctggggctgagcccaagtccgagccctgggtcgggcggaacggagttctccgtcttccggggcttagcccgagtccgagccctgggtcgggcggagcggagttcgccgtcttccggggcttagcccgagttcgagccctgggttgggcggaacagagggcgctcgtcaggataaaggtgtcaggccacctttgcattaaatgctcctgcgatttggtcggtcggtgcggcgatttggtcagggttgcttctcggcgaagacagggcctcgggcgagccggaaatacgttcgccgctggaggggggtctcgggcgaggcggagatcctccgggctttatgctgatgggggttaccagctgagaattaggagccttgagggttctctggaggacatggttgctggagtgacttggccgtccatcttgccaccgggttggacagtcgagtgggatcctgcctcggttgaggaggagcatgaggagtga

SEQ ID NO: 5780 - DNA, 432 bp, Zea mays
  Peptide Sequence Number=SeqID_49155
atgctggtagactacacaatggtactcaatggaccaagtgtgtcggtcgaaggaccgacgcagaagggtgtcgagagcgtcgtggaagtgacacccgcgagcggcgtcacaagtgatgggtctagtgatccatccctctggctccagctccttcgagcgctccatgccgtggctcgagctgccaccggcgtcatcgtcgtctcagtcttcgtcaagggggcatcaatagctaaggtgcaggggaaggcggcctctcagactccacctcccgctgaggcgagggggaagagtcctgctgctcctgctcctggcgtcggcgctcctactcctcgtgcaggcgatgatgcagtctctctaggtgactggactaacctagcatcgtacgatgcagtggacgctctgccagacgagaaggcaaaaaggggatcatag

SEQ ID NO: 5781 - DNA, 90 bp, Zea mays
  Peptide Sequence Number=SeqID_49156
atggcggaggcgcaaggatgcgacgggtcgacggtggcggggctccggctgcgcaagaattgctccggtatcttcggaatcggttcatga

SEQ ID NO: 5782 - DNA, 182 bp, Zea mays
  Peptide Sequence Number=SeqID_49157
aacctgccgagccatctgcggacccccacgcgaagggggacaacgaaattaggaaaatggctgaagccatcatggataaagttgttgatcaactactaaacgaagctgcagagatagttctaagcggaatcagcgtttatttttcgctgtatgctctgcattcccttcggaacgacttttga

SEQ ID NO: 5783 - DNA, 456 bp, Zea mays
  Peptide Sequence Number=SeqID_49158
atggctggactgcggctgctgttatgcccttcccagctatttaggactatttcacatcctcacatgcaagcaattatctatccgattctgcaacagcttgagagtagtttgatcgagagggacctgaaagggaagggtcgatgcaaggatatagtgagtaggaggaggatggaggattggaaaaaggtttccggtagggatgtggaaagggaggatgaatgcgggatctgcatggaggcatgcaccaagatggtcctgcctaattgcagtcatgcaatgtgcataaagtgccatagggactggtataagagatcagagtcatgccctttctgtcgaggaagcctcaaaagaatatgctcgacagacctttgggtgcttacaaattccaacgatgtcatcgaccctgcacatttagaaaaggaaaacgtttgtgtgattaaagcaagtgcatcttga

SEQ ID NO: 5784 - DNA, 318 bp, Zea mays
  Peptide Sequence Number=SeqID_49159
atggactgcgtcgcatgtcaccttcgtcacgccgtcctagcaaccgacgtccccatctctatggactacgacacatgccacctttgtcacgccattctggcaaccggcgtccccatctctatggacaacatcggctgccaattttatcaccacatcctggacgctagcgtgtccatcttcaaggacaatgccaaatttcgtcacatcatcttcgttgacggcgtctctgtccctatggacgacgccactaggggcagccacggcttaacaatcaccagctccatcgatgggggacttgtggaccaacataagggctga

SEQ ID NO: 5785 - DNA, 462 bp, Zea mays
  Peptide Sequence Number=SeqID_49160
atgggcaagagtaacaaacgcaagcgcgagccgactcctccatcggaggacttcgacgactcggaatactcggaggaggagttctcctctgagtccgaggggtctccggctctcgtctctcccctggcgtcgtctgatgattcagacgactcccaggggattgccgcggaggtctggacttatatccgggccatcgagcgctccgggctcgagggctcggatgagtcggagtactcctcggatgaggaggactcttcggactcgtccgaggagggcagcagcggtgatggcggagacgacgacgacgacggaggcgacggtgatgacggtgacgacagcagcaggggcggtgacggtggcagcaagggtggtgacggcggcagcaagggcggcaacgacggcagcagcaagggtagcaacggcggcggcaacagcaagggcagcaacaaggctagtggctag

SEQ ID NO: 5786 - DNA, 744 bp, Zea mays
  Peptide Sequence Number=SeqID_49161
atgcgccgaaagatgctcgaggcggccttgatgatcgttgaccttggcacacgggagcgcgacctcgccctgtcggcccgccatcagcagcggcaccgagccgctatctccaagtgcgagcatgatggtgtccatgggatccaggtggttgcacacgtgcaagtccaatgcgtggaggcttccttgctgcaccgagcagctggtgctgaaatgatgtatctctttgagccagataagaagatggaggcaattaaattaattgatgattcaacaaatattacatcatcagggcatagcgtgcttggttctgtaaaagaatggcaaattcaagattgcaatggtgtccataaattgctggaaacagtctttggcgatcaggatgttgcaaatagcgcacggttctgcctcggcgccatcaacgcccgcgacccccgccatcctccccaccgcccgccatggccccccgccatccttggatgcaccgtgccccgcctggtgcctccggcctccaccgcgcccaccacccctgtccgtcttgacgctgcgcccgccccctcggaggaggccatccacgtcgtcatggtgtgcctaggtgcccctgctgtgcctcagtcgtcgtgcttgtcgaccggatcgtggcccatggcgaaggagcaggctggctggccctcagtctctatcttcgtcgaagtttatggtccaatttacaatggcttcgctgtaaatgggaaaacaactcggtag

SEQ ID NO: 5787 - DNA, 489 bp, Zea mays
  Peptide Sequence Number=SeqID_49162
atggtctaccatacgatgctgtcggaggaagagtggtcatgggggtggggtagccaaatggatgctccttggccctctctacaatctgtcaaccgaccacatctccacatggcccggcctagtcccgagtggaccttcaccgtgtctgcctctgtcccaatcggctcatctgacgatgtccgatccgggtatcatcttggcccacttccctctacgtttcatcctggaacctgtggcctgtcctacacatttgtctgtacttcttcgcttggatttccacttagtttgctcgcaccattaagattgcccaatgtgctaatggtcgtgagtttgataactcttcacagtcattcttctcctatggtgtacagctccaaatgtcctgccccctacacttctcataatggcaaggctgaatgcatgattcgcactactaacaacatcatgcgctccttgctatttcaggcatttgttcctgtttgctactag

SEQ ID NO: 5788 - DNA, 288 bp, Zea mays
  Peptide Sequence Number=SeqID_49163
atgaacgtatgtgagctcactcttgctgtctcacacccccccacacaggtcaagaacagaactcctgttatatataaagatgtgacattcgatcctgtgccactatacatcatatgtgtgagacttggtcccagcatatctggtgtttatgttcgcgcccgggtcttggtgcccctaaaacccgggtgtgacagaagtggtatcagaggaatgttgactgtaggacaaaacctagatagaactggacaaccattgtctacttacctttgctactctgattctttctaa

SEQ ID NO: 5789 - DNA, 651 bp, Zea mays
  Peptide Sequence Number=SeqID_49164
atgagttacctaatattctctttcttccagcgtgctaaggaaatctatttcaagtattgggacttgcaaggccctgttattgacagtagtgatgtacatagactcagaaatttcatcaagaatgtatatgttgaacggagatatccagaccaaagaattggcgaacatttagtgcaagcaaagggtaatcaggactcttatggaaataacaatgcatattcatctccaggagttttaagaagtgcatatgtcagaacttatgaagataatcacgatctaaagcgcaccaaagaaagtatctcagaaaatcaaaacaattctaatggacatccagtgagtagtacagtagaccaaaataataattctacaatggcgagagaaaaggtcgaccttagaagccatctgcgtccagacgatctcttgaaaactgatggaaagtcagaaaataatcagaaggttgtgatttcatcagcttcttctgcagcacaagcttccaaagaaataaatagtaacaaggtgtttctgcccatcaaacttcctgatcctcctaggtcacagaaagcaacatcatctaatacctctactgaagcacatgtgatgcagttcttatatgctttggttattttttattctgcattacctagtccatag

SEQ ID NO: 5790 - DNA, 570 bp, Zea mays
  Peptide Sequence Number=SeqID_49165
atggggtcgatcagtatacatcaacattcagaagtttgtgcagtttcagctcactgtcaatgcgaaatttacagacagaagcttcagcagtttgtagctgatggagagctgagcaagaaggaagtggaagctctgatggcattccaagtgcatctttgcatccctcaagaaactgtggacgctgcacatactgagatttgtgggcaactattcgaaaaggttgtcaagttctttaaccagtatttgtgggcaactgttcgaaaagctcacaaaagctattgcctccagatgagctccgtaaacggtttgagcaagaagttaccacacatgctgccatctgaaaaggcattttcagctgctgtatctgctcttggcatctacaacaaagacgggatagtagtttatgatggaaaggggctgttcagtgctgctcgtgtttggtgggttaagaacgtgggtacccacgttcttaacgttaagttcgtgggtaccgtcgaacttaatgtgcagaccacgcagacccacggaggtcaaataagttcgacggccacgtggccccgtcgaacttaa

SEQ ID NO: 5791 - DNA, 201 bp, Zea mays
  Peptide Sequence Number=SeqID_49166
atggatcaagcagtctcattagctgcaagaagcagacgattcgaatcaagtttttatccttgcaagaaaggggctcaccgccttggcgtacaatgcctcactgaccccgactgccgtcgtgcagtgaccgcacttgtacccaccataactggaatgggagaccacgtctcagttcgcgtgaggagggcaatctgcgggcag

SEQ ID NO: 5792 - DNA, 184 bp, Zea mays
  Peptide Sequence Number=SeqID_49167
atggaggggcgcttgctgctgtatgccatggggagctccttgctgctgcttgggcgccatgggaaaacaggaaggaggagcgggctcatggggaagatggagggaggagctgctgctactccgccccccaaggacagagaggagtggttgtgcgtggtgaaggcaacgaatcaagctgattctc

SEQ ID NO: 5793 - DNA, 414 bp, Zea mays
  Peptide Sequence Number=SeqID_49168
atgcacccggctctgtcccttggaatcgggtgtgacataaggggaggaacaataccagctcagaacgcgagtcgaagccggtcctcggcgcagtgcggctccacgacggatgggaagtccggcgagcaattgcttgagtgtcggtggagttcaactcgaattgagggcacagcagctcccccaggcgaagaagattccctcagaccaacaccgaggacagggaacccaaggggaagagattcaccagtggcggatcgtgttcttgttaccgcggcggcaatggagttggcgttggctgtctcggggtcggtgctagtttgttggggaggggagggagtccaggagcgcgactttatagtcggatccgaaaatctggacacgacctggccagcagcacgcaggatcgtgcgatga

SEQ ID NO: 5794 - DNA, 764 bp, Zea mays
  Peptide Sequence Number=SeqID_49169
aaaaaggagatcgggatgttggaatggattggatcattcacctcgatactgatgagttgattcatccagttggtgcccgagagtactccctgaggcgattgcttttagatgttcctaacaacgttgacatggttaacttccccaattatgaaagcagcattgaccgtgatgacattatggattcttttactgaggtttccatgtttaagaaatattatgaccatcttgctaagggtacatactttggcctatacaaagaagcaacacgtggtaatccaaactacttccttatggtaatgggaaatcagctgcaaggtgaaatcaaactggaagaggctgctattctgcattacgcctacacaaagttctcagacctaacctcaaggagggataggtgtggctgcaaaccaactaaagaagatgtgaagcgatgtattatcttggaatttgactgtttggctatcatccgtggcctcaaggaatccgacgtctttaccaatgctgtaacatcagcgaaagcacagtcgaagacgaagccgtcaaacatgggtgggtctcggaaacaaggaggccatccaaccgaacgtaactgctggtcagtccacactggaaggtggtcacgagaggttacaggcaaccgtaagaaagatcctggaaatggtggacgcccaggaacaggaacaggaagaagcaatgccactgaggtcgtcccctggtttgctcgagctctcggaacgcgccactgctttgtcatgacgacttga

SEQ ID NO: 5795 - DNA, 930 bp, Zea mays
  Peptide Sequence Number=SeqID_49170
atggaggtccgctgccaaaccagcttttgccagaatgaagatggtttccccaagttgttgagagcatgcacagtccgcctcggaataaggagccaaccagagtatgatggtcgtgaattcatcgagcatggcacagagaagtgtgtcgtgactgtatacattggatccagtccgcaccatgtggaatggagtgtcactgctgctgggcacagattccaagacacctgccaagtcgtcgctcgcaaggcattgagggtcctgtgtcaaatttatgaagaagaagtggccgacacaccgctcagattctttccgccctttcagagagaccgtcctgtttggatggccaggatgcatgcattggaaggtcagcagttgcttgaggacgacctcacagtcgcgtacctcactgcatacctgctcaccctagatgcacaatatgatttcttggcccgtcaccaccgtcagatgattgcccgagcagaagatgcagagaagcgcaatcgtaagctctatgtggatctcaccacagctcaagcccgtgcaactgccttggagagtcgtgaagtcattgctgttgaagctctgaagcaagccaaggatgagcacgtccagaagttgatggaggcctacttggtaacccacaaccaacgtagagccctgcggatccaagagcctgcttcatccaacccagttcaatccaagaagacttgggaactcccagaaggagccatagtcttggaaggaattccagtcttccctcaggctatggataagcaagagcaccccgagtcctcccaagatcccccgccagagttgtttgagcccctcaccatgaagaagattccagcaccgtcccgtgagatcaaagaagaagctgcaagcaccccgccagcaccgtcgccctctgaggagctacaagagccagactag

SEQ ID NO: 5796 - DNA, 324 bp, Zea mays
  Peptide Sequence Number=SeqID_49171
atggggcggcaaacgggcgtggtccagctcggtgttgagcacggcgaccaggttgaccttgttgttcaccctgggattgtcgtcaccaacgggcgagacaatcacacttccagcattgccggtcgaacggcgaggggtctcctccagcagccgggatgccctgtggtggtgcaaggggtatctctggctgaggtgcaggggaaggctgcctcccagactccacctcctactgaggcgagggagaagagtcctgctgcttctgctcctggcgttggcgctcttgctcatcgtacaggcgatgatgcagtcactccaggtggctag

SEQ ID NO: 5797 - DNA, 423 bp, Zea mays
  Peptide Sequence Number=SeqID_49172
atgggcccttgttccgaaggtatcttcatgcataaatatgctgggatgaagtatcgcttcgaaagcattaagtgtccctcgaccaatgattgcattattaaggtggggaacaagcccaagggcaatggcctttggaattttgccaagggctataatctgccttcctccgaagcaacaaaaagggagaaggtgattgggatgtgggagcattttgacttgatgaagggtccctgcaccccaacatgctgcacccttctctgtgcttccttcttctgcttcttgttagccggctctaaacttaaaccgcctattatcgggagcaccagcttcgtagccgaaggtgctacgacttggttgttgaacgaagccatcagctcaaaaagtggaagtgagttcaccggcggtgggcgccaaggttggtga

SEQ ID NO: 5798 - DNA, 705 bp, Zea mays
  Peptide Sequence Number=SeqID_49173
atgtacaatggatcaagcaatctcattagctgcgagaagaagatgattcgaatcgagtttttatccttgcaagtgaccgcacttgtacccaccataaccggaatgggagacctcgtctcaggtcgcgtgaggggatatgtctgcgggcaggttcactcaggtactaggcttaccgatttaccatatttctcgagaccgtgtgcacaaggaatcgaagaaaggttgagtggattacccggtccacgcactccggcggggttgagagctccggcgaccgtggactggcctctccggcgaaggaggcctcgattcctcgctcggggagcttcactgagatgtgcacacttgtctccgagggttggatggggcgggggcaagctggactggccgatctacggcggcagtggctcggatggccgcggacacgccgcgcacgggcaaacggcggtgaactgggctccggtgaggtttgagcgtgcgcggaagagtgtaaccgatgcttgggagggctttataggcgcgggcgagggacaggacgccggctggccgttggcgcgatgcggggcgcgcgagggcgtgctctggcaagttcagggcgcgtcgaacacgtggagcttacaatctgcccgtgttccacagctcacccaagtcgcaaacgtgcgaatcttggcaaaaatctggcgcgagtcttttcctggcacctag

SEQ ID NO: 5799 - DNA, 693 bp, Zea mays
  Peptide Sequence Number=SeqID_49174
atgtaccctccacctggtgattatggtctgggtggtcttaagaagaagcttgcaggtcgttttaagtcaaagcgccgtcatgcggatgatgcagattataatccagctacagactttgaggcccaatcttcagctgggggcagcatttctatggacacagaagatgctccacatgctcatccagattatccaattgatgtcataggatggacttatccaaagagacgattctctatggctgagtactgctccaggaggacagttaatcagtatgatctgccctcagacacaaacattcagttttttcatactcagcttcagtttgatgtcttctggggaaccctaatggacacaaactttcacaagcatcaattcctggcaactactgagattgacattgatgagcaatcaatcacttggatgactggctttaagaggtattctacaatctttgctgagtttgctactgcaaacagtttggactatgatacaatctcagctgcgattgatttgtatactgaggacaactttgaagaatttgtgcagttctatgagccagcgaggctgggcattcctaggaggtttggtgagactgcaagactgaggcatcatcctgttgtcactaacaaaattaccagagtaacaattctcccaaagagtggagataagagcaagatcagagataagttctag

SEQ ID NO: 5800 - DNA, 357 bp, Zea mays
  Peptide Sequence Number=SeqID_49175
atggagtggaggcatacgtatacgtatgagcatgaggaaagttatgaaggaaatatttgtagggacttgaaaaatgattctgaagccaggcatgacatcggcgtaggagatctgggtgaccggcgccctcttcttccatacaccttgcgccactccaatctccctctccactccccattgaaggaaaccaggaaaccaagattacggactcaccagctaggagtcggtaacaatttggtatcagattcagaagacacaacaacagtcatgtctggcgtcatgcccgatcctgaagacaagagcacgaaacagaagctggacttcctcatggacgcaatgaacaggatgttgggttag

SEQ ID NO: 5801 - DNA, 477 bp, Zea mays
  Peptide Sequence Number=SeqID_49176
atgcagagaaccgatttgggggaagaactgaattggggcgctacggtggctaatcggaggcgagggctggtgctcttgcttcgtaacaacctagcggagctaatggtgcactcaatttatagcctccaagagcggtggctccgaattttgaagaagaaagctggcggccggagggagggtgagtcaccggtgaacgctatcgtggctttcaccgaggcaatgttacaggtgatggacagacttcctatgacggtgtactgcgacgtgataaggcttcgaagcacgtggcatccgggtggcacgcggcagactccggtgaggtcacctagaccggccgcagggcaagtggacaacgagcagttcaaggtttccgagtgtgttgcaggagacttccctgagcagcaacctgatgaaggcaagtgtcctatgacccgttatgtcctacttacttataattcactgtcccacattacttaa

SEQ ID NO: 5802 - DNA, 273 bp, Zea mays
  Peptide Sequence Number=SeqID_49177
atggggcaggtacatgccgtggctaggaggaaactcccaatccgccaccggtaccttctaccctggtcgaggctatcgttgccttggtcaacgccaccgccgacaacacgcgctttctgcgagaaatggcaggcaaccaatttcaacaacacggaggaagagttccccctcaaggaccacgagatactacctatctggagttctctgaaacctgaccaccgctcttcgtcaaggcagaggaacccttggaagccgacgaatgggtgtgagtaa

SEQ ID NO: 5803 - DNA, 612 bp, Zea mays
  Peptide Sequence Number=SeqID_49178
atggataatatgaaccaaccaacgaatttaaagcgcttaacaacaacacacaagaacacgcaatataacccgaggttcggcaaccaccacaaaggtgtcctactcctcgttgaggagcccacaaagggccaggtcttttccaaccctaatccttcacaagccaaccacaaaggagatgcgattgcgggtgtgaaaggtgaaatgaatgcacttgtttggagtttggtcagccaagatttcgtgggagaggtaggagtaaatgagagagagagtgtgagggggtatataaaggatcccccaaaagctggcagccgttgggagagaaagagtaaaaaccggttgaaccggttttcagaccggttgaaccggtttctaccagggagatcccggttcactgacctactcagccggagactcgaccggattcaaaaccggttgagtagaggaaaaatccagttgaaccggttttccaaaaagatctgcagcgacttttctgacagctctgactgtcagacaggtcagagcagggatggcagaggagcagtcccaaaaccggttgaaccggtttcaggaccggttgaaccggtttccagggctgaaaccaaattttga

SEQ ID NO: 5804 - DNA, 414 bp, Zea mays
  Peptide Sequence Number=SeqID_49179
atgagtccgaccgcctgcacacgaggacagccctactcaagccaccatcgccggcgatccacccctcgacttgaccgccagaagcccccggacctcatccgacccttcaccggacctctcccaccgccgggaacgggttacgctatgcctccccagtacgcggtgcagctgtttgaggagcaccggatacctcgctgtagggtgaggatgactttggagcctcatcccctacagccaggatggcgttcactggactcggagtctttcggtttcagggccgatgacactatagaggccacggctctgcacgtgctgacaaccttctgtggatttcaccccttggagatgttgacccaccccatcggcttgttccctgctgagaaggaggatgacccgatgtggaaggatcggtga

SEQ ID NO: 5805 - DNA, 1575 bp, Zea mays
  Peptide Sequence Number=SeqID_49180
atgccgtcctcttcttcttccgccgacaccacgccgccggcggccgcctcgtctgaggagacgttgagtagcttgatggtggaggagttgcgcgccggcgactctgttgattttggtgtgtcacggatgacgtcagcccgcgtcgaagatatgcagcggttgggctactttggcggcggagttgctcgtgctccggggacggaggaagtccccgagccggagggctgcggccccggcggaggcaagccgccgctggcggcgaaggcgggcgccgctgcacctagcaaggcgccggaggcgacggcgggcgccggaggctccaagtcaacgagggtggtgccgccggccagcggagtggcggaggcttcgaaggcggcccaagcgttgccgttgtcgggcaaacgtgttgccgacttcggcaccgatattactgtggacgactatcttggtggactggacgagggccagcttgctatagctgcgcctggcgcggcgatcgcgacggccgtcatagtgtcgaaggcgaggggcgaggcgcttggcgcagaaggcgaggtgtcggccctcgcgttggtcagggacgaggcgggcgtcgcgacccgccagctgaagggagtgacggaggcgttgagtcaggcgacggaggcgctgagtcaggtggctgacttcgccagccgtactgcatcgggggccctcacggcagccgtgtccgccgaagtcgagagacttcggacacaacatgctgacgctgtccgtgagaaatcggcctccgacagcaagtgccgtaagctgatggacagggtggccgccctggagagggagaaggccgacctccggcgccaactggcggcggagaggagggaggcaaacgaggccatcgctaaagagcaggctgcgcaggcggaggccaaactggcgcgggcggagggcaaccttgccaaggagctcgccgaacatctgcaagagcggattaccgccctggagagccacgcgaagtgggccgaggccgcgatgcgtgcggaggctgaacggacgcgcgctcagcttatggatacatatcgcgagctgggcgcgcggaccggcgacttcgagggggcgatgaacgcactctcccgcgaagggtgccggcacttcgaggtcttcgaccaggcagatgaagattttgagcgagatgtctataaggtcgaagaccccgttgtgaaggaatctgccggggccctctacgaccggatgtggggtctgcatggttgtcaggtggtcagggagcgggccgagactgcgagggctcaggcggagcgcggcgagcgggtggacgacttcggggctctgaacagcgcgctgccagacccggagccgaccccggagaccgcagcgatcgcgacggctgcctcctcatccgctgcggccggcgaagacctgcccccgaaggtggccgaaggcgcccctgatgcccccgcagctgctgtgccgagtgctgaagatcccgcggcggtggcggcggaaacaatggcggaggcaacggcggaaccaacggcggaggctcccgcagcgtcagggccctcgcaggtggcgtag

SEQ ID NO: 5806 - DNA, 1437 bp, Zea mays
  Peptide Sequence Number=SeqID_49181
atgcaggcggcatgcaactgcgccaagtggacacgcttctccgactcccgacacgcccagcatggaggcccaagcccacgcgtcacgcaaccggcgcgccggatgcttcatgcaagcaactgcaccgccacttgcgccaccaccgcgcctcctcgattgcggaatcaataccacgactcgaggcgacccagcgcacgacccaacagcgccagcctggcgtggcggagaagcgggcgacgcttcgccttcgccgaaataaccgtgccaaaaaaggctccgagcctccctactgatcagaggttcgaaggctggccccccgaagggttcgacagccgcctcagatcgcgtgggccctacacccactactggtcagaggttcgaaggccggccccccgaagggttccacggccgcctcaggctactcgggctccgcgcccattactgatcaggggttcgaaggctggcccccgaagggttcacagccgcctcagacgccgagcgagggatgaccatgggtacgttcgatacataaccaaggctcgggctgcgctcccgagctcaccggagacaccatgttcggcgcccatcgagggcaacatggcgcttcccccctcctccttgcggaaaggcgacgcaggggcggctcggactcgggctaagccccggaagacggcaaactctgctccgcccgacccagggctcggactcgggctaagtcccggaagacggcgaactccgctccgcccgacccagggctcggactcgggctcagccccagaagacgacgaactccgctccgcccgaccccagggctcggactcgggcttagccccagaagacgacgaactccgcttcgcccgaccccagggctcggactccgccctggcctctgccgatgacctccgcctcgcccgacccaagggcacggactcggcctcggccatggaagacagactcgacctcggcttcagaggagcctccacatcgcccaacctagggcaaaggctcgccacgtcaacaggaggcgccatcatcaccctaccccgagctgactcgggccgtagggaacaagaccggctggtgtcggggaccataattaggggtacccccaagactcctaatctcagccgcctcgggcaccataggaagctccgcctcgcccgaccccagggctcgggctcaacctcgacgctggacgacggactccgcctcgcccgaccccagggctcggacacagcctcggccttcgaagacggtctccacctcgcccgacccagggctcggactcaacctcgaccttggaagacggactccgcctcgcccgaccccagggctcggactcagcctcgacctcgacctcggaggagcctccgcctcgcccgacctagggctcggaccaaccacgtcaaaggggggccatcattaccctacccctag

SEQ ID NO: 5807 - DNA, 129 bp, Zea mays
  Peptide Sequence Number=SeqID_49182
atgacctcagggcagacgctgctacgacaaggccctcgcccgcatccccacccgaggggcgaggacaagcagaaggccgtagagttggaggggcagaggcaacgggaacacgtgttcgaccgcggctga

SEQ ID NO: 5808 - DNA, 219 bp, Zea mays
  Peptide Sequence Number=SeqID_49183
atggtctcccattccggttatggtgggtacaagtgcggtcactgcacgacggcagtcggggtcagtgaggcattgtacgccaaggcgccttgcttgtggcataattttacaggttctctggaggacatggttgctggagtgacttggccgtccatcttgccaccgggttggactgtcgagtgggaccccacctcggctgaggaggagcatgaggagtga

SEQ ID NO: 5809 - DNA, 90 bp, Zea mays
  Peptide Sequence Number=SeqID_49184
atggcgggcggaaataagctcgccggagctaaggggaagtggctggccggtgaggggctgatttggggatttattgagttatttggctag

SEQ ID NO: 5810 - DNA, 591 bp, Zea mays
  Peptide Sequence Number=SeqID_49185
agcgactccgctataattcaccggactgtccggtgtacaccggacagtgtccggtgctccaagggagagccgcctcaggaactcgccagcctcgggttttcacttcagccgctccgctataattcaccggactgtccggtgtacaccgggactgtccggtgcaacagcggagcaacggctatttcggcgccaacggctacctgcgctgcatttaatgcccgcgcagcgcgcgcagaagtcaggcgcgcccatactggcgcaccggacaatgaacagtacttgtccaccccgcccaagcgcaagttcaccggagctcgctttgcgcacggcgtgccagcggccgcccgagccccgaccaccgtggaccggccactccagccctcctccaccccatccaatccctcggagctcctggacctcacccaaccctccaccggacctctcccaccgccggtaagccgcgccaccgctttttatctctacggttactgttccggtgaggagggagtgcgggttaagaaagggaaaagccagggggtttttggaaatgttagtgattctgatgaacagttccccaggggcacgatttga

SEQ ID NO: 5811 - DNA, 732 bp, Zea mays
  Peptide Sequence Number=SeqID_49186
atgccgacgccgtcccggaaaaatcgaccgccgacagagaggagggaggccaatgaggccctcgccaaggcgcaggctgcgctggcggaggccaatttagcgcgggcggagggcaatcttgccagggagcgcgccgagcagttgggggagcggctcaatgctctagagagccgtgtggagaggaccgaggccgcgacgcgcgcggaggctgagcggacgcgcaaacagcttatggattcataccatgagctgggcgcgcggaccggtgacttcgaagtgccggaccgagagcccggactccgctgcctggagtgggtgcaggaggagttgcaggcactccccactatcgtggaggggtttatgtcgtatgcctccctggtcacctgcgagggggcgatgaacgcgctctctcgcgaagggcggcgtgtggcgagcgggtggatgattttcggggcgttgaacagtgtgctgcctgacccggagtcgaacccggcggaggccgtgtccgaggccgccctggagccgcccccggaaactgccgaaggcgctcctgatgcccccgcagccgctgcggccggtggaggcccgcccccagagaccgctgaaggcgctcctgatgcccccgcagccgctgcgccgagggctgaggatcctgcgacggtggcggcgaaggcaacagcggaggcgacagcggaggctcccgcgacggctgggtcctcgcaggtggcgtag

SEQ ID NO: 5812 - DNA, 1149 bp, Zea mays
  Peptide Sequence Number=SeqID_49187
atggggggcgcccgtgttgctttcgtcttgctgtcgttggaggagcgcaacttcacggatgttggtacctttcagccatcgctcagcttcaaggattttcatcaggcagcccggctgcatcccctcgccgatgcttcaaggatcttcatcatccttgctggggaggagggcgaggcgagccggggcctgccttcgcgtgggctggcgtcccgcttcttcctccggcttctgggggtggaaaccatcctccagctctgcggaggaggcgccctccagccgtgccagggaaggcgaactgctgctgcccagtccagggtgcagaatttcatcctttgtccgggcgacggtggccagccgcaccgaggggtctcacaacacgtcgtacgccgcgagggcggtactcgtgttctgggacggtcccattctcattttcgtggcgaggacgggagtgaggacctgtcggtgcgctttggggcgcccggcgcccgctggtgcggtgttggtgggcaggtggacgtcactgtcagtgctgaggtggtggcagctggagaaagcttctccaccgacgagaccgtcagcgccacccgcggaccgaccttaggctctttggctttaatgtctggttcttgtccctcgagtggggacgcgaacgagagccttctagcggtagcgtccgtcctgggaccatcgctgctgctgcagaggtcactggcgagtcacccggagtttgtcgtcccgcaggccctccaatgtgggggggagtccctcggctcagtcgaccttgccgcccgaggcttctcttgcccagttaaagaaaacctcggccgctctgcgatgagccagagccggaggcagcggcgcgatgctgacatcttccttcgagggggagattctccgaccgtgtcgccgtccgaggccgggtcggattccgccgaaggtggagtcgacgccgagggtgctgctgccccctatcgatgtctgaacctgcaagaacagtttatctgtagtgacttgttcgtcggtagcagaatcgtttatccgagggtgagttacttatcgcagaaggggatgagtgaggagtccctcggctcggtcggccttgccgcttacgtgtactctgtcgtttttaggatcccactatcgaagtag

SEQ ID NO: 5813 - DNA, 213 bp, Zea mays
  Peptide Sequence Number=SeqID_49188
atgcacgacttcctccttgagctggcgctacttgattgtgctggttggttgctggggcaggaagacgggctgcttggttgctctgacgctggtatttacttcctccttgctggttgttctgacggtactgctgctgctgaggaaactgcctctggtactgctgctagtggttctgacgatgatgctggtgctagtgcgaatgctggaaggtag

SEQ ID NO: 5814 - DNA, 672 bp, Zea mays
  Peptide Sequence Number=SeqID_49189
atggccgtcaatgggggccggggcgtagtgctcgctctgccaaggttggggtgcagagctagtccactttatccaaacgggacattagctgagtacgttgatgtgtactcacccttgctttacacccgacccacaccccaggttgtccccagtgtatccaatgctcaggaggagatgctggcaacatggatgacttcgaggagttccaggaatatgacgagttctagttctttcttagtggcaaacccccgttctactcttactcttgtgcttacgaggtcttttgtagatggctcgtatcaggtgcactacactggggtagctgatggccttgacctgaagtactaccctcgccatttgactggtagtgctggaggtgtgattgcatcgccagttggtgagggcaatcccaggttgaacaacatggtcaacttggctgccgtgctcaacaaagagttggaccacgcccttgatgagttggcaagttggatctttgcaatgattgtcaccaagatgtctgagaacaggcgcagaggtgcgaggcgtgctcagccagaacagcaggcaccccaagaggaggcagccccgcaacaacatttgccaccgccacccccaatgaccattgagcagatgttcatgatgcagacccaagcagtccaggcaattggttag

SEQ ID NO: 5815 - DNA, 1216 bp, Zea mays
  Peptide Sequence Number=SeqID_49190
atgccgacctcttcttcttctgctgccgctacgccgccggccgacgccacatctgaggagacgccgagtactttggtggcggaggagttgcgcgtcggcgatacggtggattttggtgtgtcgcggatgtcgtcggtccgcgtgcaagatatgcagcggctgggttactttggcggcggagttgctcgcgtcccggggacggaggaagttcccgagccggaaggagagttggttgtgttcgaggcgttcttcgccgccggtccatcagctgactccgaatgccgtggtggctctgtcgaagtatgtttgggcgacgacttcggtacggtggacagccatcagtcgaagtctttgcgaaagtactattgcctgcactggcagaagaggatgattggagatgaagttgcccagtttgggtcctgtacgtttatgccgaagaccggcaagaccacgatggaggtagtcgagttggttccttgcacccgcaacaagtggggcaattggaatgagttttggttttacgtcgcggagggtaccgtcgaagagcatgaggggctccccgtgtccgagatgtgctcgcatttttactcagcatacccgccctttgaggtggcggaggaggatgcggacgaaggggcccttcggtgcgccgccggcctgagcagtgggcgcgatttggttgaagaattcgtggcgtacggggtatggcccttggctcatggctgggcgctgggcgaagtgtgccctcgccagatgccttcccatgatgggaagttggtgcgaagtcctgccttcgcgctggatctgcaaagccgcgatccggccgcctttgtgcgtgaggcagaggatggggcggtgcggatcgttggtcgggtttttgaattaaatcgactgccgtataacggctatcccggccaagacgatgtggaccgccgcgggaagaagccggtggtagagtctggagacgaccctgcgccggcggccgccccatcctctaagaagaggaaactaggtactgctatgggaggacttggggtttccaatggttttgctagagaattgatgaggacatgcgctgccccgggggggaaggatgtcttcgcccgagctccgggagtcttcgcgcggatgttgagggttaccgggggtggtgggcctaagaatgttcctatcccccgcggcggcccggcgaagactcttttacattcttcgcatg

SEQ ID NO: 5816 - DNA, 159 bp, Zea mays
  Peptide Sequence Number=SeqID_49191
atggcgagagtagcgtgtaccctccgtggcaagaggctggacggtggtgtatctgtgctctcggtgaagaagcagcaaatttttgttgcttctattccaaggtggtgcccaaagaggaaaatcaagactgaagctgcgggaggaagtgtcctcctataa

SEQ ID NO: 5817 - DNA, 810 bp, Zea mays
  Peptide Sequence Number=SeqID_49192
atgaggtgcgtggttttctcttctctgtatactctcttaggttgcgagacaaaagcagaagacaagcacaaatggcagggtaaagagccactatcggcccctcttccggggatcgggaatggggacatttcgaaggagcccttcgtagcaaaaagaaacgggccccgagccctcctactgatcaggggttcgaaggttgcgccctgcggggttcggcgaccaccccagagcactcgggctccgagccctttactgatcaggggttcgaaggctggcacctcgaagggattcgacagtcgccccagaacatgcagagtcagggatgacgctgggtacgtccgttacatggccaaggctcgggctacactcccgaggtaccctaagacatttccgagaccagcgggaatggtttgtaatggaatcccaccgaagggaggcaccaagccctcgaaccctatcgaacaggtccgggtccagcaaatcacctgcaggaaaacaacactattcacctgttccgactactatgccaaccaccagggtaagactaacaacaggagctccacctcgcccgaccccaggcctcggcctcagcctcggcctcgggagaaggtctccgcctcgcctgaccccaggcctcgacctcagcctcggcctcgggagaaggtctccgcctcgcccgatctcaggcctcgagagaaggtccccgcctcacccgatctcagcctcggcctcaagagaagtcaccgcctcgcccgacctcggcctcggactgactacgctacaggggatacatcattaccctacctctag

SEQ ID NO: 5818 - DNA, 282 bp, Zea mays
  Peptide Sequence Number=SeqID_49193
atgactggctttaagaggtattctataacctttgctgagtttgctactgcaaacagtttggactatgatataatctcagctgggattgatttgtatactgaggacaactttgaggaatatgagcagttctatgagccaatgagccggtgtcctagatcctgcaaaaggccaacacgtaatgggattggagagatggcaagagtagcgtgtacccttcgtagcaagaagttggacggtggtgtatatgtgctctcggttggcgtaaacccggtctggtcttga

SEQ ID NO: 5819 - DNA, 423 bp, Zea mays
  Peptide Sequence Number=SeqID_49194
atgaccgcagtcacttcgccccctttactgatcgttctgacaggaaaacaacactattcaccctgttccgactactatgccaaccaccaaggtaagactaacaacagtaagtcacagcctctcccgagttcagcctcgggcgcaacagggagctcggcctcgcccgaccccaggcctcgacctcagcctcggcctcgggagaaggtttccgcctcgcccgaccccaggcctcagcctcggcctcgggagaaggtctccgcctcgcccgatctcaggcctcagcctcagtctcggcctcgggagaaggtccccgcctcgcccgatctcagcctcggcctcaagagaagtcaccgccttgcccgacctcggcctcggaccgactacgctacaggggatacatcatttacccttacctctagctag

SEQ ID NO: 5820 - DNA, 450 bp, Zea mays
  Peptide Sequence Number=SeqID_49195
atgaactctttactgatagcggatcgaaggaaccctgcatctgaggctgagccttcccacccacatgaaataaatatagaattcagatcgaagtcacatgccaacatcacgttttgtgaaagtgaccctttcctatttcgagagagtattcacaataccagggtattaagagtgcataaaacattattacaacccagggaggcaaaacaccctcccgcacaaaagtttattgttttcaaggtgggaggcaaacatcctcccgcgaccaacttcactgctaaggctcttccttgggtaccacctttgaacagaaatagcaaaactctgttgtttcctcacctacaacaacatgggttcgaaaaccctgagtacggagtgtactttcgcaagtcttactcgacaaaagaaaaagactctcaaggatatgctggcttgagggagtcaaggtaa

SEQ ID NO: 5821 - DNA, 636 bp, Zea mays
  Peptide Sequence Number=SeqID_49196
atgttggaccctctcactcaagaaagagcgctcataccaccaaaaacagagaacactgagaggaaggagatgaacagtggatgtggccgacgaacgctccggcgagaagctctccctcacctgacatgtcttgatggtgtctatttccattatggagctcatggcgaaatccgcagccaagtcttgttcctctgccgtgagcatggcgtttgggattcgtcgtggcgccagaagggcctacttgctcgagcgaatgagcagcttgctcaaaagagtgccgaggtggcagatcttcaggcgctctactcagagatgagggacgaggcggcctcggcatggcgagaggcggctcctctggatgagaaggttcacgagctggaggaggagcttaagagaatatccagcgaacgggaggggttcctgtgtcaagccgcagaagcctcttcccaagctaggtcccttgctaaggaactcgaggctcatcagaccgaggcccagcaatggaaggctcgagcggagttatgttttgtttacctatgtttcacctgctcggactacttcggctatgctcagcgttctgtttggttgttttcagagtttgagcgggacctccatacctctatcgagatgtcttag

SEQ ID NO: 5822 - DNA, 339 bp, Zea mays
  Peptide Sequence Number=SeqID_49197
atgtcggacgaccttgttgttcctgtccactttgaagttggccaagaattttgctttcgcctcctagatcatccgctccttgtgctcctcaaactggagctgctcgtcagccggcaagaaatatcagagctctcccttgaaccagccattgagggccgatttgatgagcctagatgtgttatccccagcggagtcgccaaaaagtatgttgacgccttttcggagcgccaaatactcaagaagaaccggcggcggtgctctctggtcaggcgcggacggtccgcgtcctggggccggacagtccgcgacctggcgcaggggctaggttttcctgcctga

SEQ ID NO: 5823 - DNA, 309 bp, Zea mays
  Peptide Sequence Number=SeqID_49198
atgggtcatattgtcgtgtccccgtcactcctcaactacaccagtaggtacaccgcaaggtcgaatccggttggaatagtgttctggcttagaggatggaacgagttatccgaccagctaacgcgggaaagtcgggtctctgttgcgattcattcgttcgacgttgtgggccgcccggaggatatctatcccccacaagcccccgatctttgggttgatttagaggtaatcaactcaaagatccaaggattctggacttcattgggtgcaccggaggtgcacccaatgggtgtagcccccgacctttga

SEQ ID NO: 5824 - DNA, 1194 bp, Zea mays
  Peptide Sequence Number=SeqID_49199
atggatgcccaagtacttggaactataagtcctgtgcgtccgacaacctggggtccagaactagagaagcgatgcttgtctcctggggtggtctggaggcgtgtagccactcagcctggtcccgtaccgtgggcctgcacactccactaccctgcggcaggagtcacgctggaagttggctccgagcaacctcaccagcggcggcggctacctctacatcagcggatcgccggcggcagcaaccacctctacaccagcagcgacaacgacctccgctccgagcggcttaccagcggtggcgaccaccccaaggaggaagaagcgagtcaccagcccgcgtggagggtagggccccgacttggctcgccccccactccagcgaggatgatgaacatccttgaagctgaagctggggggaagccgcagcccggcttgcttctccccaccgcgaggctgatggcgcaccccatctgggggcccagaaggtggaagggcacgaaggatgcaaaaggaccaaggcatgactactacccgaggggtcaacccctgtttaaaggggagcggtcaagaatgctaaccgccacgcaggaagcgaacaactgccccgcggttatacgctcccttggcttcgcgccagtcggcggtccaacatgcggacccaggcccacatgtcatgcaaccgacgcgccgaaccggtgcagcgactcgaggcaccccgcgcatggctcaacagtgatattaagtacaaaggtcatgggccagtcagccgtgggaacggacgtgacagtcggcgtagccataggcgggccggtagtaattgcaccaacaggagcgcaggagcagcaggcagatcgacaatcaaactctggccccacctgcaggctcgtatcctcccctgaggcgggcccgggggccactgtcagtaccctcgatcaggggggcaggcacgacctgacggagagcatcgtcaaagggcaggcgcgtttgcggaacaaaagcatagtcgaggccctcttcgctggtgagaaggcgcccctttcgagtcaaaaatttacgtttggacccccagaaattttatttgcacgtttggacccgaagctcggcgccacaggctgtggcgccgaggtaacacagctcggcgccacaggctgtggcgccgagcttcctgacgtggcagtcccgcgtggcacctag

SEQ ID NO: 5825 - DNA, 321 bp, Zea mays
  Peptide Sequence Number=SeqID_49200
atggccggatacctccacaccctcgataaccactacgatgacctctcctcccactgcacccacctaaactctcgggtggaaagcctagagcggcaagtcagagaacttaagcaagagaaggcatccctccaagagtgtctcgacatagcagaaggcgaggaggccaacacccgtgaggcttatcgaaccttaaagatggactatgacaagaagctaaagaagctcgcccccaaaaagaaaatccagaagaagaccaccaaccgaggatgccaaacggagaagaagaagacccctccagccccacccccccagggtagatga

SEQ ID NO: 5826 - DNA, 1158 bp, Zea mays
  Peptide Sequence Number=SeqID_49201
atggagtcagtgacgacttttatggggcctctgaacgaagcgatcttggaggccaacgcattggtggagcggacgagctcgatctatgccaaccatctaaaagcagcagccggtagcctggccgctttggcatggattggttacaccggcaaaggctgcggtatgcctcttccgattgctcatgtagaagagagctggcaaatggcagagttctacagcaataaggtacttgtggaatacaaaaataaggaccctgatcatgtggagtgggcaaaagccctaaaagagctgtacattcccaatttacgtgactacgtgaagaggtattacccattgggtccttcgtggcaaccgccaggaagcgcagccaacaaggcaccttcagctccgtctgttcctcctccatgtctttccatctcttcagcctcgtcgtcccaaccaaaatctggaatgtcagctgtctttgctgaaatcagctctgggaaaccagtgacacaaggcctcaggaaggtaactgatgacatgaagagcaaaaatagaacagacagaacaggtgttgtggctgctgaaggaaaagagactcgcaattcacctccctttagttcaactaaagaaatgcgaatgaaccctcgtaatgaaaaccaagctcactcgataatgccattctctgtcagatgggtagttgagcatcatgttgggaacaagagcttgaccattgaaggttgtgataccaaacagtcggtgtatgtatacggatgcaaggattgtgtgctgcaagtcaaagagaaaataataaccgtccaagcatgtgcagggaaagtgaacaacataacaatcgacaagtgcaccaaagtgggagtcttgttcaagggggttgtagcggcttgtgaaattgtgaactgtagcagtgcagaggtccaatgtgagggctcagttccgactatatcaatagacaacacatctggctgccaactttacttaagcaaggaatctttagaggcatctataacaacagctaaatcaagtgaaatcaatgctcttgttccagatgcaaacagtgacggtgactgggccgagcattccttgccccagcagtacattcacgcgttcaaagacggacaatttacgacatctccagtgtctcattctggggcttga

SEQ ID NO: 5827 - DNA, 510 bp, Zea mays
  Peptide Sequence Number=SeqID_49202
atggcagttattggaagattatgtgcttctacccatgatgcagtaatgaaagaatgtgttgctccagtatctaataacacttctgcaagatgggagtcgactggaaacatacctactatcatgccggggtctcctaaactgcttcagcctccaagtggttcagtctcccgtggttataacatggctgagagcggttgcctgctccaggctgagacacattctgctttgctggggcattggggcctgactgctgctgggctgccttcttcggacattgcatcacccaatggccttgccctccacagtggaaacatgctctgtttccaacctgagctggtgctatctgattgttctgctggcttgctggggcaggaagacgaggtgcctgctgattctgcctctgaaactgacctcctcctgactgattgttctggcgattctgatgctgatgctaaggatactgcctttgaaactgctgctgctgctaaggtggatgctggttctgcctga

SEQ ID NO: 5828 - DNA, 195 bp, Zea mays
  Peptide Sequence Number=SeqID_49203
atggctggggagcaccgggaggataaggagggcgaatgttttgtccggtttggacatggcggtggcctgactccttccggcataaccgttaaggagcaggaagctcattggtggttgaagcgccccaatcctctgggactcaaatgtgacacaattactagtcccaggaggctagtaaccacattccttaattaa

SEQ ID NO: 5829 - DNA, 467 bp, Zea mays
  Peptide Sequence Number=SeqID_49204
atgggaaaggatgtgattcttggaaagaattggttacaaagaactaaggcgcgtgcgccgccaggaacaccgagccgccaggcccctgccgcgctctgcccagcctcccggtcttccctgccttgcagcaccgagccgagctgcccgaccatctcgcgccatgcgcgcccaggccgccgagccccacccgaccgcgccgagcaacgcgcctcgcgcccaggcgtcgacctcgaccgcgcccagaagcccaacgcgcccgacgccgtcgaacgcccgcgcccagctccaccctgcgacccgcgcaaggacaccgagccaccgaccgcgccaagccgaagacccgaccagcccctcatcaccggagttacgtcgtccgccatcgacgtgaccgcgcagtacacctactggaccatccgcgcccaacgtcgaaccccgttcatgccgtgctcgtgcctcgccgtgccgtg

SEQ ID NO: 5830 - DNA, 492 bp, Zea mays
  Peptide Sequence Number=SeqID_49205
atgggtgctagatttcgggtgcgggaactaccgcacgcggtagcacgcctcttcatctccgtcgcaagagacaacagcccagtctatgacacggggccccaggcccacagctcatactccttgggtgctggatcccgggtgcggaaagagcgaacctccgcatgcaccggcagaacacataaggcgctctgtgcgtggcctgacgaaaccaccaggcgtgggggccgtgggccagtcagccacgagaacaaatatggcagttggcgtgatcgaaggcggattgacgcctcgggtgactactctgggccagcaacagcatccgacccccaccacgtgggcggctctggggccgccacgtggccagagaaggtgaggtactccaaggcatcgacagtgagttcggaccccatgggagagtgtcggacccctggatatacggtccggacctctaggttggtccaggacccccacatatacggaccggacccctag

SEQ ID NO: 5831 - DNA, 444 bp, Zea mays
  Peptide Sequence Number=SeqID_49206
atgagggttgtccgcattgtagccactgctcaggagaaggtgaagccgtggaaggagacttccaggagttccaagactacgacgaattctagttcgcattcggtttgccttccaaaaccgggtgtgacaataagtcccatcccagtgttggagcctccagcgtcgatctccgacgccctcccagtgctggactccgccgccgaacgccttcgtcgcctagaccagatcctcggcgcccgcctggaggcagagggcaacaggctctgccgggcgatggtggattacttgctgacgtgcttccggagccatgacccagccatgtccttggcaccggtgctcgatggtccgatggccgccacagaagacgtcgcctgggagagcgtccaagacgtcgtggagacggtggccgcgcgtttccagcgcgaccctgtcgatgccgagtag

SEQ ID NO: 5832 - DNA, 2214 bp, Zea mays
  Peptide Sequence Number=SeqID_49207
atgtacccaagcccgtacgacggttccggcgccggaggaaagatccggcgccgcccgcacctccgcgccgcctccacgccctacgaacggccccccgccgccgcggcggcgcaccgcctcgcggccgctgctgcagcggcttccgcatcctcggagcccggcggggagcgcggcggcgggggcggtggctgggtgtcccggctggtggacccggcctcccgcctcatcgcgggtggcgccgcgcgcctcttcggctcggtgttccgcaagcgcctcgccccgccgccggccccttctccgccgctgtcgtcgcctcctggacgaaacaatgagccaaaacagggcttacctgattcaacacatgttgattcacttccaatcccagagggtggaatggagaaagggaagagcatagttgacacatcagatgtcaaagcaatgtctgaagtagagcacttgttaatgcgaaagacatttactaaggttgagtttgatcgtcttacagacttattgcgtgcaagaaccattgagtctgatccacctaaaccaattgtttctcgtgaggaaaagaatgaagaaagtatcaaagttgatggaattagaggctcagcgttacgtcatatggacctagatgattctcctgctgttaaatgctgctgctccctctctgctggttacacaccctatctgtggccctcttctgcgaccacccttcctgaaggggtacataatcatggtgctagttctcctgcagaactcgcgaaacaatatatgagctctcgttatttgagggaaccccaatccagtagtctgcggagccgattgtttcttgagaataaaggtgaagcaagcaacactgtcaatgataggaggtctgtaccaccaattgttcagacaccacttgaacttcggaatgaaaaccctggtctccctgtaaatggctatgtgacttcgggattacgtgggcgttcagcgatatatagaatgtctcgctctccatattttaagggtcagaactattccagtgatttgaacacgtcttcattgtcccaacgatcacaaagcttgcatgttggtggcaggcaggtcttgaaacgaagcggggctgaattagagaatgaacttggatctataggccccattcgtagaattcggcagaaatcaaatatgatgtcttcatttagagattctcgtgcaaatcctaaaggaaaccttcttactagccatataagtagtactgatttcactgaagacggtgcatccattcagtctccgagctcaaaaaaattattggttgggagtagtcaatctctgcgacccttagaatcccaaaagaatgagggagatggtaaatctagtgatagcattccacccataccagctcaatcaaacaagatggctgaaaagatatttgagcagcttaatataatagctccatcgccaaaacaacaacagtctgttactctgaatgctagtaactctatgtcaaagaaacctgtttttcaagatgctgggtcaagcagtatgtataaccaatctagttccctgaagtttcaagatttggatggtgcaaatggaccccatgatacaaacttgaatggttccctgctgaagaaagacaagctaaatataataaaagacggatcgccaaaagctgccttttctgatagacctgcccttttggggaactcggtttctgcttctaaatcatggacgccagcctttaaaatggctgtgatagaggacttaccagagttggatgatgatctggaggtccttattcaatcaagtaagatagaggttgaaacaactgagcagaaaattgattcaaatagaaaagaacagaaggttgaacaaaatatattagagcaaagggttgaaccgaacttgaagaacattgctggttctacgattagtgaacagcctgtagcatcactgtctaaaactgtcacttcatctggtggtttatttttatcaaatgatcctgggaaggcagttcccaaagcttctgtggacaataataccgaatttgcattctcaaatgggcctcctggcacccgccctgcaactggtgtatcagcaatgccacttgcttcagttaataacgataaacagactggtgcttcaaatttcattttcggcatcaagcagccaattacgtcagattttgaaacatcaactgcaaaaaacaaatcaacactcgggcagaggtga

SEQ ID NO: 5833 - DNA, 1229 bp, Zea mays
  Peptide Sequence Number=SeqID_49208
ctggctgcgctccaaatgcaaaagtgttgcctgaagaacctgattgcccaaatgtaaatgtgctgggtggggatgaacttgagccaaaagggttgctaaaagctgaggctgaagaagctgtagaggtgctggcaaatacactcgtactggccgctgttgatgcaccagcagaagagctaggtgaagaaaatgtgaacccagtgcttgaactagagctaaatggattcgcaaaagtagctccagttccaaatggtgaattgccaaatccagtccctgatgtggaagttgctgcaccaaaagaggcagtgctaggtcctgatgaggaagttcctgccccaaaagagaaaactccaggtgcggaagatgaagctccgacaccaaaagatgcagtgcctgaaccagttgaggaagctccaagtccaaaagatagcgtcccaggtccagacgaggatgctccaactccaggagtcatgaccgggaatgcaagtgacgatgtactgaggccagtagattgggctggggagctgaacccaaaaaggttgtttccagagctcggaaatgtaaatgaaggggttgaagcagactgtaaacctggtgcagtggaagtactagatggtgcagccacagatattccagcagcatcacttgaaggtgcaactgcggtgaaagtaggcgtagatgtggcgggggaacttgaaaagcttgcaatacttgatgacacaggtgaaataaaaagttccgatgatgccttgctgcttgcatctggtgcaacagatttcacttcagcttttgtaccccctataccaaatgataaggtgctagctgccttattttcagcagttgtgccatcagatttagctgatgttaccaatgacaatccaaccggagcactggaagaaaaactaaatcccgtaaatgcaggagacgatgaaatagctggactgctactggatacggcaaatatggaagtggaaacagctgagctgatagcaggtttatcagtaggtggaggagttgtgagctttggtggtgagtatgacaagccattgctcaggctcgaagtagatgccacagatgtaaaatggagaggtgcattcagtgttgttgatgcagctgaaggcaacaccttctcagatgggttggctacatcttctgctttttctgttttatcacctctctctgaactagtgctggctaatgttgtgggcttggtgacactggaaaaataa

SEQ ID NO: 5834 - DNA, 482 bp, Zea mays
  Peptide Sequence Number=SeqID_49209
atggcacgtgtaggagaccggacgaggtacccgtcaatggaccccctcgacaccgtcgtcgctacgatgaagaactgcggaggggaagaccgcagggaggagttagggctcggaggtagagaggggaatggggcgggggcagacggcgccggatccaccttcgcttcctacaacggcaatggtggcgaggtggtggtcatcgctgaagaggaggaggaggaaggcgagcgggggcttgaagacgatgttggtccccgccctaccatcgtggccgtcgatctctcacgctgccaccgctccctgcctcctctccctgcccctctcaccgagtcgcagtcgctcgtgatccccggcatcggcgccgctgccggaccagccatggagctcatggccgtccctaagaagaaggtctccaagtacaagaagggtttgaggaatggacccaaagccttgaagtctgtgccggtcattattcgctgcag

SEQ ID NO: 5835 - DNA, 978 bp, Zea mays
  Peptide Sequence Number=SeqID_49210
atgctgcgcaagtcgggcacccagcgccagcagccggcgttgtggcggcggtgccgcagcctccggcagatcaagcaggtccacgcgctcatggtcctccagggcttcctctcggactcctcggcgcttcgcgagctcatcttcgcctccgctgtcggtgtccggggcggcaccgcgcacgcccgcctcgtgttcgaccgaatcccgcaccccgaccggttcatgtacaacaccctcatccgcggcgccgcgcacagtgatgcgccccgggacgccgtctcgatctacgcgcgcatggcccggcacagcgccgactgcgacctgatgacgctgaggccggacaagcgcaccttcccgttcgtgctccgcgcctgcgccgccatgggcgcgggcgaaaccggggcgcaggtccacgcgcacgtcgtcaaggccgggtgcgagtcggacgctttcgtcaggaacgcgctcatcggcatgcacgctaccctgggggacctaggtgccgcggctgcgcttttcgacggagaagcgcgcgaggacgccgtggcgtggtcggcgatgatctccggcttcgcgaggagaggggacattggtgccgcccgggagctgttcgacgagagccccgtgaaggacctcgtgtcgtggaacgtgatgatcacggcatatgcgaagctgggtgacatggccccggcgagggagctcttcgacggggctcctgatcgtgatgttgtgtcgtggaacgccatgatctctggccatggcggaatggttgacaaggggcacgagtacttcagtttgatgcaacaacggtacaggattgagcccaatatcaaacactacggttgcatggttgacatgctgagtcgtggcgggctgctcaaagaagcatttgagtttattggcacaatgaagatcgagcctaatcctgtcatatggaggaccctgcttggggcttgtaggatccatggttgctgttaa

SEQ ID NO: 5836 - DNA, 2355 bp, Zea mays
  Peptide Sequence Number=SeqID_49211
atgtcgccctccctcgacttcggcgacccgacctccttcaccgcgctgcgcgtcctcaccgacgggggtgccgccacccgccttctccacgagtgcgtggcctaccagcgcgccctcgacgcccgtctcgacgctctcctcgcccgccgcgccgacctcgaccgcgccgctgcttcgctcctccgctccgccccaccactgctctcgctcgcggcctccgacgccgccgcgcttaaggagtcctcctcctccaccgcggcgcttgccgacgcgctctcgtcccgcgtgcgccaccttgacgcggcgcactccagggcggacgccgcgctggcgcgcgccgaggccgcgctcgaccgttcccgcgcgctcgaagcaacgcggagggccttggccgctgacgacctcgccgctgccgccaccgccgcgcacgaattcctcgctatcgacgctcggttccccaccgacgacgatctccgccgcgatctgattgacatcaaacgtcgcctcgaggggctcgcgcgtcggaggctagcggcggtcgtcgacgcacaggaccaccctgccgtgctccgcctcgtccgcctattcccactgctcggactcgctgatgaagggctccaggtatacgtcgcctacctcaagaaggttgtcgctctgcgtgcccgtgcagactttgagcacctcgccgagctgacctccgcgacccagccgacctctgaccggccggattttgttggctgcctcactcgtctctttaaggacattgtgcttgctgttgaagagaatgatggtgtgctgcgtgagctcaggggcgatgatgttgcttatgccatcattgagctgcaggaggagtgtgattcgcggggcacccagatcctacgccgttatgctgattacaggaagcttgcacgtcttgcatcagatataaactcctacacgaagaacctcctttcagtcatgggttccatggccagtgctgctggaggcaatgaagggcctgatcccagggaaattgagctttatcttgaggagattcttgcgttgacacagcttggggaggactacactgaattcatggtgaataagatccgtgtattgagagatgtgaaacctgaacttgggccgcgggcgatgaaggccttccgtaatggtaactttaataaaatggagcaggatctgactgggttctatgttatcttcgaggaatttttcatggtggagaatgtgaggaaagccatacggattgatgagcccatatcagatggtctcacaacgtcaatggtggatgatgtattctttgtactgcagagttgctgccgccgggctacttccactgcaagcataaactccgttattgctgtgcttggtggggcaacgagccttctgagcaatgagtatcaggaggcactacagtggaggatgcgggagccaaatttgggtgcaaagctcttccttggtggtgttggggtgcagaagactggtgaggagattgcgactgcactgaacaacattgacattagctccgagtatgttctgaagctccgccatgagattgaggagctctgtgtagagccaggacgccagccgccgccgtccacccgctggcactgcaggtcgagccagcagccgcgccacctgctggccatcgcgctgtcgcgcctccccacgccgtatccgccccgccgagaccctctccaggccgccgccgcggtggcgggactccagatttttcatactccagctgatcgagagaagatcaagtcctgtttatcagagctaggagagatcagtgcttcctttaagaagatccttcattctgcgctggagcatttagtggcatctgtggcgccacgcatccgtccaatccttgacactgttgctactgtcagttatgggttggatgatgctgaatatggggaaaatgaggtgaatgatccatgggtgcagaagctaatacttgcagttaacactaatgttgcttggctccagccagtgatgacatcaaacaactacgattcctttgtgcacttgatcattgacttcattgtcaaaaggctcgaggtgataatgatgcagaagaggttcagccagcttggtgggctccagctcgacaaggaggtccggtctctgatcaaccatttctcagaaatgtcccagagaccagtcagagacaagttctctaggctttcgcagatgtcgaccattctaaactttgagcgggtatcagagatactggatttctggggtgacaatgctggccatctgacatggctgttgacacctgcagaggtgcggagggtgttaggacttaggactgacttcaggcctgaagctattgctgctttgaggctctga

SEQ ID NO: 5837 - DNA, 300 bp, Zea mays
  Peptide Sequence Number=SeqID_49212
atggttgtgagtgttggcggtggagatgaaattgcccgtaccactagtacacagaggctctatagtgacggttttgagtctttttctactagtgtacacggcgtggcgctccctggctatgtggtcaacgtcgctctctgtccagatctcgtcggcggcaaggaggctcgacgcgacaggacgatgggagcggcacaaggaggtctgcctcggcagagcagggaccggtggaaccttttcttgcatctctggtggctatggcgtgggaaaatgccccttgaagatctgtggacgcgctaa

SEQ ID NO: 5838 - DNA, 339 bp, Zea mays
  Peptide Sequence Number=SeqID_49213
atggacaatgtttacaggtgccaaaggttcatctacaactatactaaatcgactgtccggaataccgtagattattccagacaggagaagctttttggaaaaacaggccaagcgcggaccgtccgggccattgcagcggaccgtccgcaccaccgggatgaccctcggacagaaccaatgcaaaaatctaagtcctcactacagaccgtccggaggaaaagcaaggaccgtccgagacctcgcgcggaccgtccggcctcaggcacggaccgtccggcgcggaccgtccggaccaggcgggcggaccgtccgcggtcggcagaatggagcaacggctag

SEQ ID NO: 5839 - DNA, 675 bp, Zea mays
  Peptide Sequence Number=SeqID_49214
atgtataaggttcagtggagtaaccattcagtagaagaggctacatgggagattgaggattttctacattctcgcttccccgactttctgcctaaaggagtcgagcatgccccggcgctcgaccccgcgcgcaccgcgccgcgccgagccaaacccgtgcccgcgcccgcgcctataaagccgaccgaggcctcgaccgtacgcccccgctcgctctcaacctcgccggagcgcaagttcaccggcgattgctctgcgcgcgagccaggaatcaagctctacctcaccggagataccggatcaacgtcgccggacttcaccagatcgtcggggctggagcacacgccgtcgacgagcctgcccgcctgcgcacgtggcccgaccaattcttgccatcaccgtcgacgagtcgtacctcgtcgtgaccgcaaggacttcccggagctaaccccatccttcgccggacctccctcaccgtcggtaagccgcgccgccctgtttacttccgcggttactgtttcaaagggggagggacctcgggaagaaaggaggagaagtcaggggggttttgaatggtcagagactcaggaggtagcccaggagccagcaccagagcctgccatcgaggatctgcctgccccagctttggaaggcaagccccggttttatgcataa

SEQ ID NO: 5840 - DNA, 2313 bp, Zea mays
  Peptide Sequence Number=SeqID_49215
atggcggtggtgagatcggcaagggccttcgtcatggtgtcgatcttttgctctagcgctgtgttggcggaattggtcgcggcagcagatgcgacatcgctggtgttgttgtcgttgcctggcatctctgataccagattgttggagctacgacttctaagaaggtcatcttctctttgctatggtgatattcatccggatgcactacttaacaaggagaagcacataaaaaaggatgagaaggcatatcatgttaacttgcttaattaccattccaaggataaccctagtaatcagatgcaaggagttatgcagctgaaagctactaacagtggaatgcccatgaaggttgcacaaagaatcgatgtttcaaagtttatgtcatacatcaaagttagtagaacacagctcaaccatataaagagactgaagcaatctggggatggtattcagaccaagcatgtttcacgtgtaattggcggccttgataaatctcatgtgaaaccttatggagctttattagaggatgaacagaggagactgcgcgagcattggctggaaatgtcttgcaatgatttacctgctgcctttgaggttcttagggaaaggaaggtgctgatggagaaatcaataaagttattaggccttgagcttcagcagaagaatgtatctgtcttgagaaaggcagaccagttaacagacataatgaaagggctaggacaacctggtgctagtgaaaatgatggtaccccagtttttcaaaatgaccaggtagaatgctcaccccaaagtatattgcaaggtgggcatgttcagagcacatctcttcaccatcaggatgatgagcagtctgtttaccatattcaccgtatgaatgtggaagatcatgatctcatggtagtcaggggtatagacataactagtcagagtgagaaaaactctgatgtgccagatcaaagtcgtaatggtatcagctgcgtagataaaggcatttactgctgtgccaacaaccctgataagcagagtgatgttctcatggacatcaaattatgtaaaggtggactggttgtttacaatcctgactgcaaaaatacgcaactagaagatcttgatggagtttcttacaaaggtccatcagttcatgcttgtgaccaagatcaggacctggaaagcatcggccatgctgttgtgaaccacaattgtcacaatagtccaaatatttcttcggaaatgagtcatccgacgacgaacgctgtaattgaccaggaaactgagaatgttatggaaccatcttgcagttcttcacaactacctaagtcgtctggagaacaaatgcatgtggaagattttctgtatctaaatgaccaagcagcaaaatttgagaaagtcagtgggcagttggcaggccctcttggccctccagagaatatgatgtataatgactcaggtgacttgcagattaaacagacttatctctcttcaggacaacatttttcttcagtttacttgaataatggcattttaagccatcagcaacctcaacttgccacaccagcttttgctttggacaatccagcatcatttattgagcctttctcaaatctgcagagcaatcgtcagcccgagacagaaaaggacattggagcagtcttctatccctttcgacacgcaactaacatcaaacagtcagcgagtttgcattgtttagtgaataaaggcttggctcaatctgcttcatttcccaggttgttgcaagagcggcatcagttaatcgatcagagtgacagtgacctctatgcacaacctcatgaggattactgcacagatgtgagttgtccaactaaagtgaaccttcatatctccgaacagcattcttatactgcttttgcttcgatggatcataggtataactggttccccgagggctgtcagtcacataataataatgataatctgttggggttgcagtcaggtaacttcttaccccaggccttaccaagtggaagcagcaccgatggagctctgttcagcaccgcatcccagtacaatcagccatcagtacacatgggacatggtgggtcaaaccgcagccaactcattgagccaaggaatcaatttggcccacctcagaattttctttctaagagtcaagacacaaaccctatgtttccggatatgtatggcttcacccagaatatagccagtggcacaagcagtcaggaattgcttttgcaccatacctgtctgaacgcaagcgctgggaatctggagtcaaagctgaggattcccgcttttgctgtcttgccctgctga

SEQ ID NO: 5841 - DNA, 1665 bp, Zea mays
  Peptide Sequence Number=SeqID_49216
atggacgtcggggagaccgcgctatacgtcgccacgaaggccagctgcgaggaggccatgagcctccttctcctgctctacgaccttgagactgccaccgtctgctcacgccacaatctcgacgccttacatgtcgccgccaagcaagggcacaccgatatcgtcaaggcactgaataaacgaattggccacaagaatccaaaagttcaccttcttgcactaattttcattgaaaaggactacaaattagcagatactatgatttggggtctacaagtattggccagtcagaaactgccaagaggcgtccacactgctgcattctgccacccgcagccgccccgccccgacgacctctttgataaggctatgaactccttcaaactcgccaagaaccttcctgcctacaatgagaagcatcgactctccgaggctcttacagaaacagttaagtatggcatttgctactcatgttgttcaattctgcattactttgaactgtgcattacaatctatactcgtgattttccttaccagatagtgttaataattgtatacattgctttgttgttttctctcttcaatggctacttgaagcagggatcaactgctgacaattccttttcttacgaggtgtacttaacaaatgaaacaataaagatgatgacattaatgaaaggtttgattaaaggtaaaggtagtctgcctcccctcgttctgccactcccttgttctgccttctctgaccgaccgtgggcctcctatgtcagcgcgcgtctcttctatgtctccttcacgcgacgcaggcacgcaacaactgctccctctccggtctccgcaccctccgtccattccttccacacccatggtaatgtaccaaaccccactccgttcctcacccgcggcatcgtcgccaccgaggccgtcggcggcttagccaaagaccgttgcggccccgactccgccgtagcccaccacccggcaaccgctgtgacctacacgaaccaaacccgccgccgcggcatagcgcaccacaccaggctcctcgatggtatagactcgagagcccaacccgacctgagccgatctgaaaggagggttgtcatctggcctcccctggttccggcgcccatggtggtggcagcacctgtccagctaaacctcgacgagcagggacaagaccgcctcttccccctccccgcgcttttgctgatcggccttcagtttctcaagcaacagcatctcaggagctatacccgcagccctcgggaacgccaagtccctgaagttcctgtgagtccgggaatacaatggcgtttggatcacaatcgcctgacggggccgatcccaagggagcttgctgggctgcccaatcttggaattgtagatttctccaacaatgacctttgtggcgcgatcccgacagacggagcattccagaacattccccgtagcaggtgccaaaggttcatctataactatactaaattgactgtccggaataccgtaaattattccggacaggagaagctttttggaaaaacaggccaagcgcggaccgtccgggcccttgcggcggaccgtccgcaacacaaggatgtctctcggacagaaccaatgcaaaaatacaagtttccactacggactgtccggaggaaaagctaa

SEQ ID NO: 5842 - DNA, 126 bp, Zea mays
  Peptide Sequence Number=SeqID_49217
atggcgaacttcttcagaggcttcgtctatctgcctttgcaggtgttcgaaactcaaaaagtggaagtgagttcaccggaggtgggcgccaatgttggggacttgttctcaaatgctaagagttaa

SEQ ID NO: 5843 - DNA, 939 bp, Zea mays
  Peptide Sequence Number=SeqID_49218
atgagctgggcgcgcggaccggtgacttcgaagtgccggaccgagagcccgaacttcggcctagagtgggtgcaggaggagttgcaggcactccccactgtcgtggaggggtttatgtcgtatgcctccctggtcacctgcgagggggcgatgaacgcgctctctcgcgaagggtgtcggcacttcaaggtcttcgaccaagctgacgaagactttgagcgagatatctacaaggttgaggaccccatagtgaaggaatccgccggagccatctacgaccggatgtggggtccgcacggtcgcgaggtggttagggagcgggccgagacggcgagggctcaggcggcgtgtggcgagagtatggatgacttcggggcgttgaacagcgcgctgcctgacccggagccgaccccggcggaggccgtgtccggggccgccctggagccgcccccggagatcgcaggaggcgcaccggatacctccgcatccgctgtggctggcggagacctgcccccagagactgccgaaggcgcgcctgatgccttcgcagccgctgcgccgagtgctgaagatcctgcgacggtggtggcggaggcgacggcggaggctccacaggttcaagattttgggcctgcgcacgcaaccgccactactaaatttttggcggcttcgaccgcggatggtggtaatgaatgtggtggatctgcatctgagttttctgattttgctgactctgggagctcggttgagtggactgaggagtcgtcggaggaggacttggactactttgcggccttggatgtggctgcggcggaggcttcaccgcacgccgcggacacagaagatgtgcctggtcctagcaccgggcgccggcgacgaagggcggttgcgaagcgtagagttagtggggcggagggggggtcggcttcgtgtgagtag

SEQ ID NO: 5844 - DNA, 360 bp, Zea mays
  Peptide Sequence Number=SeqID_49219
atggcgcgcggtattgcacgttgtcaacggctgtgccgggcgggactgcgccgccgcaatggccagcgggaggttgacaacgagcgccgaccgtggatctccacgaggatggctgaattagatctgtccagagaggtgtatggggcccgtacaaccccgtggaagatgggtaacatgacttgtgggtacagggtacaacctctgcagagtgtaaaactgctttaccccttatttattgatcagccttacacttcacatgagctcccatctttgttgcgatatataacccccccccccgcaggtgaagagcaggtggtcgaagaggagccgccctacaatgaagcatacgagtttatctag

SEQ ID NO: 5845 - DNA, 360 bp, Zea mays
  Peptide Sequence Number=SeqID_49220
atggcggtggctagagaacgactgaggccagaaacagagcctacgacatggggaagacgccgacatgagggagatgctccccgcgcccacgaatggagccgccggggaggagggggtcatgaccgtgcgcctgctcgcgcgacgacggcgtgcctggtcgacgacggtacgaggggtagggctcgggcacgtccgaggcgcagtctgggtcagcgagggcgcgacctggggcggcgcgaccagggttatcaaggcggcgcgggcgccgaggagaggagggaggaggtggcgtctgggagaagggaggccgccccgggagggaaggttgagtctcccgggggcagcaatggtaggcagtag

SEQ ID NO: 5846 - DNA, 357 bp, Zea mays
  Peptide Sequence Number=SeqID_49221
atggccgagccaacggttagtagggggcaccggactgtccggtgtgcaccggacagtgtccggtgcgccaacggctccaaggctgccactgccaacggttggcttctgttgggggccttcggcttccgaaggtatcttcggactcgaatcggtaccacagccgaagcccaaagaatacgaaggttgatacagcgccgaagatatgagcaggaaagcttcggcgtgatagcagaaaaagaaaccgacttaaagatgaaaaaggctattcagacctcggtggattactatagaattactaccaaatgtaaagggtatgggtgtaattttacatgggctgtgtcccacgcctataaatag

SEQ ID NO: 5847 - DNA, 1542 bp, Zea mays
  Peptide Sequence Number=SeqID_49222
atggcacaccgtggcggcgctcacaatttggcagaaactgcgccgagctccggtcgccgaaaccccaagtcgtggccacgagcaccatcccaggttcatagtgaagcccaggactgcaatcgcatcgcgtatggctatgcaggtgaggctctacgggtggtgcagtatgacggcaaccgcatggcaaagatgcgacggctgttgattccttcccccccccccccttggctgacctttgctggtattggtggcatgcgcccagttgccggtgcccgcggcgaggatcatgcggaatccacggattctgttgaacagcctgatccgaacctcacgggtccgagctctcatggggaagaagggacgacggccgagggggtcccacacggcgatgtcaggcgcgagggtacctctcttccacctctcccacgccgctcacacgccaaagcgccgccaccattaatcgccgccgtcccgagcccgtttctccgccgacgttggagccccgccgtgccctctgccacgtcgccgaggtccgccaccgtcgacccgggccatcgtcgcgccttcgccgccaccgaggagtccccggggttcgccttgagaggaactagaggtgtagttgcttcgccgtcgtgccgtcaatggggtccaggcacagtgcttgctctgccgaggctgagtgccgagagcgtcctctgcgccgcaccgtgtccggtcagtcgagtcacctggagagactgcaccaccgcctacgtgaggagcaggaacgccgacgcgccccctgcaccaccgcgggacgccccggctgttggaggaggtcctggaggagaccccgacgacgacgactcagaccacagcacggagtcctctgagccgcaggaggcggaaggatgggtcgcccgacccatcacccgtgacgccgctcgcggttgtcacttccacgacgcactcgacaccttgctgcgccaggctttcgaccggcacacctggtcgatcgagtatcgttgtgtagtctaccagcacagtcgcgggaggtacccagaccgctgggaggctacctgcctagttcgccgtccggaggatgacctccggggtgcagaggctgtttcggagcattactccatctccgagagggacactgcagaggcagctatgcaggatgcagcacgacgtgcactctcccagtactgttctttgttcggtggggtggccgacggtcttaaccttaggtactacccccgctgtccgactggtaacacagagagtgtggttgtctcacctgttggtgaggataaccctaggttgagcagcacagtcaacctagtcgcagtgcttaacaccgagctagatcactctctggacgagctaagcagggctcgaacggagattgctgagttgcgtgccgagctagcagagcgccgccaccaagagggtggttcccccgctcctgttgggactcagcacccataccgctcgccgccacgtggtcaccacacttatggttcccctgcctgtaagaccaggatagatctggatccttag

SEQ ID NO: 5848 - DNA, 153 bp, Zea mays
  Peptide Sequence Number=SeqID_49223
atggctgccagccagccagctagctggccactggcagaagctgctgcagacttgaacagacagtcagacaggcacggcttctttcatcagccttcgtcggtggacgatgacgatcccatctcccatggacgcctttggaacggcacactgtag

SEQ ID NO: 5849 - DNA, 744 bp, Zea mays
  Peptide Sequence Number=SeqID_49224
atgtgctgcaagcccattgaggaaggcgtggtcgcagcggacgacaacagcgtcgaagctcctttcctcgtccatgtcggtgtggaggaccgtcagcggcccgtgctgctgcaagcccttgaggtctggacccttcccatagctcactgtgatcctgctcgctccttcggtctttccctggaaaacaagctgtcaaatatattgccacttcaattctgtttcagggaaaacaagatgccaaatattgagataattgtagcagacatcagcaagtttgagcacatgaaaaactacaagtcgcttcttaagaagatatccaggtggatgaaagaggatggcctactattcgttcacctcttctgccataaaacatttccatatcactttgaggtgatccgttcatctttgagacgcagcgccacaatggctcatgggtcttatgaccagaaacttagctggtctccaaaactcccatttaaccgaccatttgcaggtggccccaaggaataccatgggagacgtgcctctagagtaatacaagaacgaatagcaacacaaatgattgttgatggaagatcaagaaacgtgataaggaggggcgcattgaggcctacctcaggaacgcacgtgatgccaagaattgagcaaagcagaagagatgatctggaatctctttgttatgtgctcatgtatttcttaagaggaagggtggctgatcatcagagggtgtccatgacattctaa

SEQ ID NO: 5850 - DNA, 279 bp, Zea mays
  Peptide Sequence Number=SeqID_49225
atggggattggttgtctacgggataaaaatttgaataaggattatggtgtggtacctggacatatcccctcacgcgacctgagacgaggtctcccattccggttatggtgggtacaagtgcggtcactgcacgacggcagtcggggtcagtggggcattgtacgccaaggcggttctctggaggaaatggttgctggagtgacttggccgtccatcttgccaccgggttggattgtcgagtgggaccctgcctcggctgaggaggatcatgaggagtga

SEQ ID NO: 5851 - DNA, 1968 bp, Zea mays
  Peptide Sequence Number=SeqID_49226
atgtcttcgcccgagctccaggagtcttcggcgcgaatgctggaggttaccgggggtcgatggcccaagaatgttccaatcccccgcgcggctggcaaagacttttttacgtctcgcatggcttgcgacttgaaggtttttccttatgggcggaatattgctgttgttgtgtcggcagtgatggagagggaccgtcaggacgctgcgcataaacgtcgggcggttgtcaggatcgcggatcctatgcgcgaggcgaaaaaggtgcggtggagcgcgaaggctgctgcctctggcggtagcaaaccggtggcggctgcgaaaccggccgcccccgggcacaacaaggcggcggcgagtgtgaaggctgccgcccctggcgggagcaagccacccccgggcggactcaggaaaggacgaaggccgctttcaccggcgcgacgtattgccgacttcggcacggacatcagtgtcaaggattattttgtcagttcgggtgaggggcaactgattgttgtcccgcctccggtggtgaccactttgccaactgcggtggtgggggcgaagggtgccgcgcgggacccgtgggccactttctgcgcgagcggcgagatcctgtcggccgctgccgctaaggacgtggcgggctccatgtctcagcgactgagggaagcatcgcagcagctgtcacagcagctgaagcaagcggccgacttcaccgatctcgtcgcgtcgggtgccttgactgcggacgttgctgccgaggtcgagcgtctccgggcacagcatgcggatgctgtgcggaagaagtcggctgcggaaagcaagaaccgcaggctgtcagagaaggtggccgccatggaggtcgagaagacggatctccggcgccagctagcggaggagagggaggcgaacaaggccatcgctgatgcgcaggctgcgcaggctgaagccaaattggcgtgggcggagggcagtctcgcccgccaacgcgccgaggagctggaggcgaggttcaacgccctgcgcagccgcgtggacaaggccgagtcctcgacgcgcgcagaggtcgagcggacgcacgcgcagtttgtggacacgtaccgcgagctgggtgcgtggactgctgacttcgaagtgcctggccaagaagcgggccttcacttccttgaatggttgcaggaggagctgctggtgctcccgaccattgtgacaggtttcatgtccttcgcctccctcatcacctgcgagggggccatgaatgctttgtcccgtgaggggtgcaggcattacgaggtcttcgaccaagcggacgaaaactttgaacatgaaatcttcaaggtcgaagaccttgtggtgaagcagtcggcggggcactctttgataggatgtgggatggctcatgccgaagacgtcgaggaccttgttggtctggacggcgcgctgcccgaggccgcggaggttcttgggtctgggcctgcgcacgcaaccgctactaacaatgatatttttgtggtggcttcgaccgtggctgctgatgccaattcgtttggctctgtgtctaagtgttttgagtctgatgattctgggagttcgattgcgtggacggaggagtcttcagatgaagacttggattattttgcggcgttggatgtggctgcagcggagcctttgccgcgcgcggagggttccgaggaactcccgggcatgagtactgggtataggcagcgaagggcggtagcgaagcggagagtgagtgaattgtcgcaaagtggcaggcgttatagtagcgaggtggagagaggtcgtcttcgcgtggacgggactggtaagcgagaattgttgtcctcgccgattggggtgagggtaggtgagggggagctgcgaaatctgtttgagggtgaggaactgaggataatgttgttcaactacagggagatgggtatcatcccgaaggttgagccaatgtaa

SEQ ID NO: 5852 - DNA, 1779 bp, Zea mays
  Peptide Sequence Number=SeqID_49227
atgggaggacttgtggtttccgatgggtttgctagagagttgatgaggacatgcgcggccccgggggaaaggatgtcttcgcccgagctccgggagccttcggctcggatgctgaaggttaccgggggttgctggcctaggaatgttcctatcccccgcgcggccagcggggacgtttttacatctcgcatggttcgcaaatggagagtttttccttacgggcggaatattgctgctgttgtgtcggcagtgatggacaaggatcgccagggggctgcacaaaagcggcaggcggctatcaggattgttgaagccaggccaaagaggcaaaagcgggggtcggcgaaggatgcggcccccagcggaggcaagccgccgctggcggcgaagtcaggcgtccctgcatctagcaaggcgctagaggcagcggcgggcgccggaggctccaaaccgtcgaaggttgtgccgccgctcagcagggtggcggaggccgcgaaggcggcccgagcgttgccgtcggcaggcaagcgtgtcgccgacttcgccaccgacatttgtgtggaggactatcttggtgggtcggacgagggccagcttgctatggttgcgcctgccgcggcgatcgcgacggctggcatagtgccgaaggcgaggggcgaggctcttggctccggaggcgaggtgtcggccctcgcggttgtcagggacgaggcgggcgcagcgacccgccggctgaagggggtgacggaggcgctgagtcaggtgacggaggcgctgagtcaggtggccgtgctggagaaggagaaggctgaccttcggcgccaactggcggcggagaggagggaggccaacgaggccatcgccaaggagcaggctgctcaggcggaggccaaactggcgtgggcggagggcaatcttgccaaggagctcgccgaacatctgcaggagcggctcaccgccctggagagccgcgcgaagggggccgaggccgcgatgcgtgcggaggccgaacggacgcgcacgcagcttatggatgcgtatcgaggaggtgcaggaactccccgctgtcgtggggggtttatgtcatacgcctccctggttacctgcgagggggcgatgaacgcgctctcccgcgaagggtgccggcacttcgaggtcttcgaccaggcggatgaagattttgatcgagatgtctataaggttgaagacctcgtggtgaaggattctgccggggccctctacgaccggatgtggggtccgcacggtcgcgaggtggtcagggagcgggcggagacggcgatggctcaggttcaagattttgggcctgcgcacgcaaccgctactactgaatttttggcggcttcgaccgcggaaggtggtaatggatatggtgaatctgcatctgagttttttgattttactgactctgggagctcggttgagtggactgaggagtcgtcggaggaggacttggattattttgcggccttggacgtggctgcggtggaggctacgccacacgccgcggacgcgccagacgtgccaggtcctagcaccgggcgccgacgacgaagggcggttgcaaagcgtagagttagcgcggaggaaggggctcggcttcgtgtgagtagggctggtcggcgggaactgttgtctttgccggccgccgcgagtacaggggaaggggaactgcgaagtctttttgcgggtgaggagcttaggataatgttatttaattatagggagatgggaattattcctaaggttgagccgatgtag

SEQ ID NO: 5853 - DNA, 183 bp, Zea mays
  Peptide Sequence Number=SeqID_49228
atgcggaagcggcaacaccgccgccgcccgcccgtgcctgccgccccggacgtcgcctgtgccaaccgccgccaccgtccgggtagctgtcctgacgccggctgccccgactcatcctccgtcccgcccacgccgaccaccgtcccgccgtcaagcctaatattaaaatttttgtatgtttaa

SEQ ID NO: 5854 - DNA, 174 bp, Zea mays
  Peptide Sequence Number=SeqID_49229
atggagagtcatgatctccgggcagaaagggaatcacgacttgtgggtggcaatgagactgatggttttggttatggctatggtgctggttgtcagcattgcaaccactgctcaggagaagatgaagctgtggaaggagacttccaggagttccaagactacgacgagttctag

SEQ ID NO: 5855 - DNA, 881 bp, Zea mays
  Peptide Sequence Number=SeqID_49230
gaacggcgcccaaggagggtgactcgtgtgcccgggcccccgcgtcagagcctgggctgttggtttcggtggagatgaaggagcgcactaccgcaggtggtagcatgctcttcacgcggcagactggtccgctgctttcggcgaaggcgaagaggcgcatttaccgcgggcggtggcgtgctcctcacgcggtggactggccgacgcccgaagagtatgactcatgggcccgggcctccgcgctagagactgggtcgttggtcgcggcggaggtgaagaggcgtgccaccatgggtcaatattacgcttcttgcgtggtggttcgccttctcctcacacggaggccgacgcccaaggagtatgactcgtgggtccgggcccccgtgttagagactaggtcaccttggcgcacgtcgggcgaggtcttctatggcgcttcagggcgtcagtgggggaatccttctttaaaaagggactcccccaagcgtgccgccatggccttgccagaccctcctgagcgcctccagcccgaggtggcactcaacttggtgcgcaacccgctcggatggggtgtgctggcgtttgccggaaggatccgtgtcggtgtctctcctcacggcgacctcaccaccggagagtttgtgttcttcgtctccaaactccccaacgggttggtgctgtcgatcccgtctttcttcgtgctgctgctggaggggcttggcctccagcctctacacgttacgccctgcttcatccttcaggcgaccgtcatcgcctacctccacgggatgtccatggaggcgactctccttccctcttcttcctccagcatcccggggaaggatgatcaccagcctcgtgaaggtggacagcgggcttag

SEQ ID NO: 5856 - DNA, 768 bp, Zea mays
  Peptide Sequence Number=SeqID_49231
atggcgcactctggctcaaccagatcgaggccacggtcatcccggcaccaacatgaggcgtcgacgtctgtgcgctcaccctcagtgaggggcgcacagaccaatgacctccgggcagagctcaaccgcaggcgtgcgggagaggatgtccgggtctctctagagagggcgcatgagcgccagctaaacatcgagggtcgcaacctcgatcaagactttgttgcggtagcaccacaacccccagtgggcgcccggtttcaaacgggtgtccccttcactggcgggctacaccgctctcgcggatcacctccgcacggcgacctggccacccaagttccggccgcacctaccagaaaaatacgacgctctgcgcggttcacagcgaacttcgccagcgcttaccaacagcacggcgtggaggcccacctccacgcggtgaggcaggaacccggggaaactctctggacgtttatctcccacttcactaagatgcgaggtactatacctcacattttcgatgcttccatcatcaccaacagtcgccacagcgccgcagagtgtcgcgagatcatcgacctcgcgaaacgcgtcagcgagcggcacgagcagtcttcgaaggacggctccccacctcgtcgccgacctggcaaggaaagggtcgacgacggcgaggtggccacggctgaacaggacctcgggtatcagtcacccgagggggtcttgaaggatgtcatcaccggaggctccgcctccggtgatgacagctag

SEQ ID NO: 5857 - DNA, 294 bp, Zea mays
  Peptide Sequence Number=SeqID_49232
atgaccgagaaaaagaccacgacttcctctgacggcggcactccaaagaaagccaaggtggtggaggatgaggaagaggcaaggttggaggatgaggaagaggcgactgtgacactatccgtggagaaggacgcgctgaagaacgggcattctggatgtgcaaagaaaaactacatgcttcggtttgtcagtgcttttcttctcattgttagaaatgatctgttcagcatagaagacctgtgcagcacgattagcaaggatccatgggtcatctttgtaacctaccttacttag

SEQ ID NO: 5858 - DNA, 165 bp, Zea mays
  Peptide Sequence Number=SeqID_49233
atggagagtcatgatctccgggcagaaagggaatcacggcttatggagacactttggtttacaagtggttatgagatcgatggttttggttatgactatggtgctggcgaagatgaagctgtggaaggagacttccaggagttccaagactacgacgagttctag

SEQ ID NO: 5859 - DNA, 276 bp, Zea mays
  Peptide Sequence Number=SeqID_49234
atgactttggtcggagcaattgacgaggaaaggacgactcccaggaatcaggggcagcgtttcacgtcagcccttatatcttcaggaacgactacggcaaggcctcctcatcagaattcgtcccgctcgaatggccttatccatggccctatcgcgctgggctacagagagtattggaaggctctttcagcggtcttgacagcaactgaagcagctctagctcctgggtatcagatgtctgaagcacgcagattcttgatgacacgtcttagctga

SEQ ID NO: 5860 - DNA, 354 bp, Zea mays
  Peptide Sequence Number=SeqID_49235
atggcggtcagacgggggattcttgcaagtgctcttcccataactgtagcagatattataaatggacatcttagcatgtaccaccataagatggtcaataccaggaaggttggtggaattgatttacctgctagcccattcaaccggagggtacttagacaacaacaacaactagccaagatgaatcctccgaatcctctaccagccggagttgacctagcagttgcagctcagatgaggataatgcaacatatggcagacaccatggcggatatgcacgcgcagatgcggcaggaacgccaggagatgcgccaagagcgggaggagatatgccggaagctgcgccaagagtga

SEQ ID NO: 5861 - DNA, 429 bp, Zea mays
  Peptide Sequence Number=SeqID_49236
atgcaggttcgaatgaccgtaccacgcgttacctgttacggaacctcccaaggtattaaccccacatacagatgtccttgtcctaaggacctcagacaatcatgcaggtgcgctcaatggctcgacaggttcgattacctgtatctccatcatatcgcccaagagcgcttaacccataatgcagatattacacaccatcacaaaacaacagaactcagcaatttcctcacctacaacaacatgggattgaaaaccctgagtacggagtgtactttcgcaagtcttacccatcaaaggaaaaagaatctcaaggatatgctagcctttggtaatcaaggtaaagcttatcaagattcaaagactccttttgcagaaaagcttactatgagtggatccttaaaaattcattttacttatcaggttaagtag

SEQ ID NO: 5862 - DNA, 213 bp, Zea mays
  Peptide Sequence Number=SeqID_49237
atggacaccgcgggcgcgcgcgcgagcgcgttttgcctgtcgtgggccggctcggaaaacgaagaagaagtgactgttgaagaggaagagactactccatcgacagaaaatccacctgccgggaactgcttttttacatctgtggaacagagcccgactctcctacaacacaaggcaagccctagtgcatttgccacctccttgctgttttaa

SEQ ID NO: 5863 - DNA, 174 bp, Zea mays
  Peptide Sequence Number=SeqID_49238
atggggagtagctctctccgggcagaatgggaatcacggcttgtgggtggttatgagattgatggttctggttatgactatggtgctggttgtcagcattgcaaccactgctcaggcgaagatgaagctgtggaaggagacttccaggagttccaagattacgacgagttctag

SEQ ID NO: 5864 - DNA, 390 bp, Zea mays
  Peptide Sequence Number=SeqID_49239
atgtggtgcaaccgcgtgagtcacgtgaaggacgtatgggcgatgtatcctgacttggttgggagggtcactgttaagtgcatgagtgcgttgtaccgccttcaggccctgcagagtgacgctatggcacatcttgctaacctcgctcaaaccaccaagctcaccctcgacagccaagaggacttcaaggacctacaggtggaaaggctgagccagcgcgtcaccaccttggagcagcaggtggagatccgatacaacaccattgatgtcttggagaaccagctccatgatgtgcagcaggaacttgaagaagctaatgtccacctagacatgcaccatctggagatggaggccaatgaggccggaagcgagggagaagaggctccttag

SEQ ID NO: 5865 - DNA, 141 bp, Zea mays
  Peptide Sequence Number=SeqID_49240
atggccatgatgggttcaacattggaaaagatgtacctctaccaggttaagaagcagcaaacttttgttgcttctattccaaggtggtccctaaagaaaaaaatcaagactgaagctgcgggacgaagggtccttcgttaa

SEQ ID NO: 5866 - DNA, 135 bp, Zea mays
  Peptide Sequence Number=SeqID_49241
atggcgctagtgtactcagcaccaccggaaaaggtcaccgccgtcgagtattcgcgtctcaggccagcttgggaaatatgtagaaaaaagtataaaaatggtaaaattatgagaccaatattgttagattgctaa

SEQ ID NO: 5867 - DNA, 456 bp, Zea mays
  Peptide Sequence Number=SeqID_49242
atggcgctcaacgaagtaaagtctcgcggtggtaatcggctgtctctcacaaccaactgcgatgtgataaacggtgaccaccacagtgatggccgcatggccacgtcgccgggcaagtgggtacgacaagcttgctccagggcccaagttcaccccctcggcgatcttttcactctgagcagttatccacacatcaccggcacgaatcgtaatgccggcgtggatcgtggcgcggggatcaccggcggcaggttcagagaacctaggatcttctttagttcactgttcaccactgaatggctcattcaccggcctgacagcccaaattttggggaatttctcttcgattttcatgtagtgaactaccaatccgactgcatcaaagttgttgccctatataccagcttcaattcggtcatagggaccctggtcatttgctcactagatcgaccataa

SEQ ID NO: 5868 - DNA, 519 bp, Zea mays
  Peptide Sequence Number=SeqID_49243
atggatgttattctttttatgatgcgccagttaaatgatctgaatatggacaagaaccagaatctagcatatgcaccatatattatggctttgattaaagccaaaaccagattcgaaggacggtgtgaaactgctcacaccccattcaggccattcaaaaatgaaattggttttcttaccaggcctctcacaccgtttcctgataatgaggaagctcagggacatgcttttgatgatcagcctgcagcgcatcctgctcagcacatgccaccacctccacctccacaacagcaagttgttgacactcaactggatggggtccatactcagttcaatgatcttcgttctcatattcacactactgtgcatgatcctattatgagcagaatgaacaatatgcaacaaagctttcaggacaatatgggtgctttgtccagtcagtttgaaactctctctactagtgatagtgttcacactctggatgaaagacaacaacaacttcagaatgattttagttag

SEQ ID NO: 5869 - DNA, 75 bp, Zea mays
  Peptide Sequence Number=SeqID_49244
atggcgggcggaattaagctcgccggagctaaggggaagtggctggccggtgaggagaacacagatgatctttga

SEQ ID NO: 5870 - DNA, 612 bp, Zea mays
  Peptide Sequence Number=SeqID_49245
atgacgaactacaagcggctcaccggcaaccgctccagcagcagcgacaacgacctccgtctcgggcggcaagacagctgcagcaatggctttagggcaaacgctgtggctgaaaagccctcgcccacgaatgacgagaaccagccattcaagccaaagagacggaggtccggggtgcgagcggcgctggcggtctcgccggcaaagacaacctcctccggctgccaccacctcagcgccgacggccacctgctcaccaacgccgcaccggcgtacgacgtccgctccgaaagcgcaccggcaggtcctcgcccccgcccttgccacaagaacgagaacgggaccgtcccagaacacgaacgccgccctcacggcacctcctcgcttgcaccccttagcatcacaggcgaagtccccactgacatcctccaagaaaccggtggtcgaaagggtggactgccacgcgacaagcatccaactgcaccacaactggaccgggaaagggacattgtggaaaggatccttctcggcggaggaagcgggcctcgagccctcctactgatcaggggttcgaaggctggcccctcggaagggtttcgacagcagccctag

SEQ ID NO: 5871 - DNA, 78 bp, Zea mays
  Peptide Sequence Number=SeqID_49246
aggatatggggcgcttcataccctgcctcgcttctttggtagaggtgtatggggtctgatcaactccgtggcaaatgg

SEQ ID NO: 5872 - DNA, 96 bp, Zea mays
  Peptide Sequence Number=SeqID_49247
atggccagcatcgtagagtgcctatctgccgaaaatccatatgaactccaaattggtccattccagttcctaaatttttgtaatattattgtctaa

SEQ ID NO: 5873 - DNA, 714 bp, Zea mays
  Peptide Sequence Number=SeqID_49248
atggcgcctcctgtcgacgtggtcggtccgtgccctaggttgggcgaggtggaggctcctccgaggtcgaggtcgagtctgtcttccaaggtcgaggtcgagtccgagcccccgggtcggacaaggctgagaccgtcggctgaggtcagggctgagtccgagccctggggtcgggcgaagcggagttcgtcgtccttcggggctgagcccgagtccgagccctggggtcgggtgaagcggagttcatcgtcttccggggctgagcccgagtctgagccctggggtcgggtgaagcggagttcgtcgtcttctggggctgagcccgagtccgagccctggggtcgggccaaagcggagttcgtcgtctttccggggctgagcccgagtccgagccctggggtcggggcggagcagagttcgtcgtcttccggggctgagcccgagtccgagccctggggtcgggtcggagcggacctcactctgtcgagtggctcagcagtcggagcggcgcaggcggcgctgtcctcttgtcagaccggtcagtggagcggcgaagccacctttgcattaaatgcccctgcgatttggtcggtcggcgtggcgatttggccaaggtcgcttcttggtgaagactgggcctcgggcgagccgaagctttgtgttgatgggggttaccagctttgtcttgagggtacccctaattatggtccctga

SEQ ID NO: 5874 - DNA, 681 bp, Zea mays
  Peptide Sequence Number=SeqID_49249
atggcgcttccccccctccttgcggaaaggcgacgcaggggcgtatgtaaaaaagccgagtctacccctgaccgccctctcgctctgtgcagaggctcgggggctgctctcgcaaacccggctccggccgaaccgttgacagcgtcaacataccagaccgagaacttgggacccgaccgtacacctgggctacggccagttcgcatgagggaacgaccagaccaaccgaagcactacagccgaagtgaccgtcgtcacttcgccgctccactgaccggcctgacgaaaggacagcgccgcctacgccacaccgactacagtgccactggacagagtaagactgacaaggctcggactcgggctaagtcccagaagacgacgatctccgctccgcccgacccagggctcggactcgggctaagtcccggaagacggcgaactccgcccgacccagggctcggactcgggctaagtcccggaagacggcgaactccgctccgcccgacccagggctcggactcgggcttagtcccagaagacaacgatctccgcctcgcccgacccagggctcggacttgggctcggccccagaagacgacgatctccgcctcgcccgacccgggggctcggactcaacctcggcttcggaggagcttccacatcgcccaacctagggcgtag

SEQ ID NO: 5875 - DNA, 524 bp, Zea mays
  Peptide Sequence Number=SeqID_49250
gggccttcggcgccggcgccgacgcaggggcagagcgcgggcgcgcgggcgctgtcgtggcgggggcgctgtggcagggcgcggcggcggcgcagggcggcggcgcggtgggcagagcgcgcggcggctgcggcgttgggtcagagggagaggagagaaagaaggaggtttcctccaagtttgatgggtcactggccctcgcctctcccccaacatcgtccgatgattcggatgactcccaggggctggtcgctgaggtgtggatgtacatccgctccatcgagcgcgtcgggcttgaggggtcggatgagtcggaggtctcctcggatgaagaggactccttcggctcgtccgaggagcggagcagcgacgatagcgatgatgagggtggtggcggtggcgacaacagcgatgacggcgatggcggcgagggcgacgacgatggcggcaagggcggtgaaggcagcaacggcggcagtggtagcggtggcggcaaggctagtggcaaagcgcaactagtttaa

SEQ ID NO: 5876 - DNA, 1230 bp, Zea mays
  Peptide Sequence Number=SeqID_49251
atgagggtggaatgggacgcccttagcttagtaattagaggaaccagaggagtagttggtttcgccgtagtgccgtcaatgggattcgggcacagtacttgctttgccgagtgctcaggaggtgatgttggcaacatggaggactttgaggagttccaggactacgacgagttctattttaccctagtggcaaacccccagtcagctgcctgtcggagcgtccactgcgtcgcacggtgccaggtcagtctagtcacctggagagactgcatcgtcgcctgcacgaggagtaggagcaccgacgctaggagcaggagcaggaccaggagcggtaggaccaggagcaggagcaggaccaggagcaggagcaggactaggagcaggagcaggaccaggagcagcaggaccaggagcgcctcagcaggaggtggagtctggaaggctgccttctcctgcaccttagccagagatgcccctgcaccaccacagggcatcccggctgctgaaggagaccctgacggagacggagatgacaatgacgatggtggcagttcgagccatggcacggagctctcggaggggctggagccggaggggtggatcgctagacccatcactcgcgacgccgctcgcgggtgtcacttccacgacgctctcgacaccttgctgtgtcgggcttttgaccgacacacttggtccatcgagtatcgttgtgtagtctaccagcatcattgtgggttatacccggaccagtgggaggctacttgcttggtgcgtcgtctggacgatgatctccggggtgcagaggccttctcagagcactattctattactgagagggatactgccgaggcagccatgcaagatgcagcacgacgagcactttctcagtattgctcgttgttcagtggggtagctgacggccttgacctgaagtactaccctcaccgttcgactgacattgctggaggtgtgattgtctcgccagttggtgaaggcaatcccaggctgaacaacatggtcaacctggtcgccgtgctcaacaccgagctggaccatgcccttgacgagttgggaaaggttcgggtggaggttgtggaattgtgtgctgagtgcgcagcacgccactatctggatggtggttctcccgcccctgtcgggattcagcacccttaccgctcaccgccccgtggtcgcttcgactatggtaccccagactgtaggacctag

SEQ ID NO: 5877 - DNA, 279 bp, Zea mays
  Peptide Sequence Number=SeqID_49252
atggcctccgggtgcttgctgtggcgctccttgtcttgctgttcttcgcctagtggttttgttctccacagtagaagcatgcacgacctcctacttgcgctggaactgcttggctattctggttggttgctagggcaggaaggcgagatgcctggttattctgacgctggtactgatttcctccaggttgggtgctctaacagtactgctgctgctgctgaggaaactgcctctggtactggtgctgatgctgatgctgatgctggtgaccttgcttga

SEQ ID NO: 5878 - DNA, 1224 bp, Zea mays
  Peptide Sequence Number=SeqID_49253
atggggtctggagcccatgcagccacccgaccagagattagggcgggtgcactccaccacccggccggagatttgctcttcgacacataccttcacggggcacctaaagtatcctccatcgcaggacataggaaccgatgtgggaaggtcgtgctgggggaacccgtgccgccgaacaaaggcaggacgagcgaaactatcaacgcggagttcttgggggagggtgacatcgaggtttccgatggggatgaaggtcgagaggacaagcggcgtcgacggaaggggtggaggggtgggaaaaaattatgtttggatcctaaaaaatttaatgtcatttttggaccctttgatcggcaccatagcctctacgccataggctatggcgccgaggtatctagtgcgctggcacaagccagacatcgtggtgccgacgtggcaccgagctcggcgccacaaaccttggcgctgagctcggttgtatctcgcagcaagagagcccaggttcactcgctggcgctgacagcactctcttttactgctgttcaagttaagtgcatgatccacccagggccgtccctgtgcgggtgcccaagccgcttctttcacccacacgcccgcgggttcggaaaactccgaagacagtcttcgaggcgaaccaagtgcgacggtcggcccgccggagaaggtacccgtcgcgccgccctctcccttgattcgatcttcttgctccgggccgcacgcaccgacacgctggagccgccgcagcaagaggcggtgaaaccatcgccgaccaacggtcgcatccgctaccgtacgccctcggcgaccgatctgctccccgctgacgatgtcgcggcggatgccacggcagccacagcggtggccgcgaggatccgccgctactcgagcgccggagcacggcagcagcagcaaacggaggcggtggccgaccacgtgcaccggtaccgtcgggtgctgatggtgttgctctcgccggtactcctcatctcgttcgtgctccttctcatgccgcgcacgccggccaccgcctcagggggtgtgctcctcaccgttggtggtcggaggtggggaccccgggccgtcaaggacggactgaacaagtatgtcgtcatatttgacgccggcagctctgggagccgcatgcacatgtattgcttcgacgaaaacctggatctagctagtgcccatagggaaggagattga

SEQ ID NO: 5879 - DNA, 855 bp, Zea mays
  Peptide Sequence Number=SeqID_49254
atgagctcgcgcccgctgccggccgccagctcgcgcaccccgccgctgccagcccacgcctccaccccacgcgccagctcgcgcgccgcgccgcccgctcgccagccccacaccgcctggccgcccgcgctgcacctccatgggctggacctctcgggcgccgtaaagcctcgctcgagatcccccaccgccctaaagcctcacggcgtcgaccacccgtggatccaccctgcggccctcccgctgacgccttcggctggcctaataggggcgctgccggggggatcagaggggggtgccggcagcatgtggaaggggaagaagagcgggcctctggcgccacggggccggaagcgggagttccccattcgtgcggcggactacgagctgctcgagcccatcggcgacaacgccaccgccgtcgtccgccgagcgcggtgcctgccgcacgggaggtcgtcgtcgtcaagcagctatagcgtggtggaggtggagctcgtcttgcttgacagccccttcgcgtcccccaccaaggaggaggcctcatacgctgatgctgtcaccgctgcagccgctcggaacggtagcagcagcagccctcgccatgtggcttcactgtcccttttcgcacccgcgtcttccaccaccctcgacctgcccccctacagctcctcctgcttctttcagctcggcgtcataagctatggcgccgagataactgcggcactggcacagatcttggcgctgagctcagttgtaaatctgtgcacgtattctgatgagctagccactcgtccaatgtcgcggttacgctttatcgagaagcgtgtgctcgagaacaaggccaaaagatga

SEQ ID NO: 5880 - DNA, 556 bp, Zea mays
  Peptide Sequence Number=SeqID_49255
atattctatgtttaccggtgttatcgattcgacggagttgcgttctcatggcggctcttcatcgcaggcgggttgtggtagtagcagccgtagtcgccgctctgtatctagcatggaggacgctatgagggagcagcaagaaaagtttcgtgaagagctgcggcaacaacaaatggcattcctcaaagagcaatcagagtacatggctgcttacaatgcacaggcgcaacaagcaatgaactcttcgtttccagagcaggcacaacaacaactatttgttttccatgaatttttgccgctgatgcctcagtggggattacatgctccgccacctccacctccacctcagggatccggggtcatgggccacaacacgccaccaccgatgataccagcaccaggaggagcttatgcaagggagggagctactccaggagagaatcaaaacctgttacacgacttcgtcaacgagtttttcgcttctggaggagtggtcacaactccaatgaccccgatatgtgatggtgttagctttgtgccgaattgtgcgttgtaa

SEQ ID NO: 5881 - DNA, 1335 bp, Zea mays
  Peptide Sequence Number=SeqID_49256
atggcggcggaggagctacatcctggtgatacagtggagtttggcgtgtcgtggatttcctcgtttgaggtggcggaggatgatgaagacgaaggagcccttcggtgcgctgcccgcatgagtagcgggcgtgatttagttgaggaatttatcgggtatggggtatggcccttggcacatggctgggcgctggggcaaatgatgaacaaggaccgtcaagacgctgcgcagaagcgccaggcggttgtcaggctcgcagatcctatgcgcgaggcgaagagggcgcgggggagcgcgaagactgctgctgcctccagcagtagcaagccggtgccagctgcgaaaccggttgtccccggacccagcaaggcgtcggcgagcgcgaagactgccgtctctggcggaaccaagcctcccccgggcggacccgcgaaaggacgggagctgccttcgccggggagacgtgttgccgacttcggcatgaacatcagtgtcgaggattattttgctgggtcgggtgaggggcaattggttgttgtcccgccttcggcggcaaccacgtcgccaacggcggtggttggggcgaagggtgccgcacaagacccgtgggccgctttctgcgcgagcggcgagattctgtcagccgctgctgccaaggacgtggcgggctccatgtcccagcggctgagggaggcatcgcagcagctgtcgcagcagctgaagcaagcggccgacttcgccgaccgcatggcgtcgggtgtcctgactgcgaacgtggctgccaaagtcgagagtcttcgggcgcagcatgcggatgctatccgggagaagtcggctgcggaaagcaaaaaccgcaggctggcggagaaagtggtcgccatggaggccgagaagccggacttccggtgccagctggcggaggagaggagggaggcaaaccaggccatcgctgaagcgcaggctgcacgagcggaggccaaagtggcacgggcagagagcagtctcgccagccaacgcgccgaggagctggaggcaaggttcaacaccttgcgcagccgcgtggacaaggccgaggcctcgacgcgcttggaagtcaagcggatgcacgcacagttcgtggacgcgtaccgcgagctgggtgcgcggactgctgacttcgaagtacccgaccgagaagcaggccttcgcttcctcgaatggttgcaggaggagctgctggtgctcccaaccattgtggagggtttcatgtccttcgcctccatcgtcacctgcgaagggaccatgaatgcattgtcccgcgaggggtgcaggcactacgaggtcttcgaccaatga

SEQ ID NO: 5882 - DNA, 564 bp, Zea mays
  Peptide Sequence Number=SeqID_49257
atggcacccaagagagctagctcaaaggcagccccatccgttgacgaagcagcaaaggcagcgctgctagccgagaaaaagggcaaggcccttgcagacaccacccaccaagaagcctgcgaagacgacgccgtcagcaagagacagcgcaatgatcaaccaactcccgagggcagcctccgcacctgcagctccggagggcaaccacaagaaccaccccaatgtttcgctctgcaagagggcgaagacgccacagagcacggcgaagtcattggtgttttagcagaagaacagctacagctgcgggccctgcgcatcaagaaccgcaacctccagaagcagaaagaaatcctcgaggccaagcgccaacgcgtttccgtgcaggccaaggtgcgccagatgatacgagacgaggagcagagggctcaggaatcgagcaagagattgcgctcatgcagcgcgaaggccaacatgatctgcagcacggcccgcccctccaacagcgcgcgccagtcagagacctattcattcctcaacgcggacccttcgccccgcacgccgtag

SEQ ID NO: 5883 - DNA, 510 bp, Zea mays
  Peptide Sequence Number=SeqID_49258
atgggggtggtcctgaccattgtgacgggtttcatgtccttcgcatccctcgtcacctgcgagggggccgtcaatgcttcgtcccgcgaggggtgcaggcattacgaggtcttcgaccaagcggacgaaaattttgaacgtgaaatcttcaaggtcgaagaccctatgctgaagcagtcggcgggggcgctctttgataggatgtggggcccgcacggccgagaggcggtcagggagcggtccgaccaggcaatagatcagatggcgcacgccgaagacgtcgaggaccttggtggtctggacggcgcgctgcctgaggccgcggaggtcgatccggtgccgccatctgatgccggcgagggcccctcagcgacccccgcgccgactgcagccggcggtgaccccgcaccagcccctgcgtcgacgtgtgaggacgcctcaagggcggtggtcgagccaggtaccgaagaccccgtgacggcgaccgggccttcgcaggtggcgggatag

SEQ ID NO: 5884 - DNA, 1128 bp, Zea mays
  Peptide Sequence Number=SeqID_49259
aaggcacccgggggctacacgcacctgctggtcgccatcgacaaattctccgacacactccaaggtcctcccctgcggcgcgggggctgggtcccacacgtcatgcaaaccggctcagagcagaagaagcccaaccgtccagtggttgcaagcgaccctccacttttgcccagaccaacgggcgaaaggggcgagcagccatgcaggcggcatgcaaccgcgccaagtgggcgcgcttctccgactcccaacacgcccagcatggaggcccaggcccacgcgtcatgcaaccggcgcgccgactgcttcgtgcatgcaactgcaccgccacttgcgccaccaccgcgcctcctcgactgcagaaccaataccgcgactcgaggcgacccagcgcacgacccagcagcgccagcctggcgcggtgacaacgcgcccgcgttccgttcctcgaacggctcgcgcacgcgcaacggccgccccgccaaccactcgccccatcgcattaactccgcggcggggacaggcggcgcctcacgcaggagaagcgggcgacgcttcgccttcgccataatgtcgtcgtcaggaccgggaaagagggataccccaaaaaggattcttccccgtgaaggaaccaggctccgagcctccctactgatcagaggttcgaaggctggccccccggaagggttcgacagccgcctcagatcgcgtgggccctacacccactactggtcagaggctggcccccgaagggttcacagccgcctcagacgccgagcgagggatgaccatgggtacgttcgatacctaaccaaggctcgggctgcgctcccgagctcaccggagacaccatgttcggcgcccatcgagggcaacatgacgcttccccccctcctccttgcggaaaggcgacgcaggggcgtatgtaaaaaagccgagtctgtccctgatcgccctctcgccctgtgcggaggctcgggggctgctctcgcaaacccggctccggccgaactgttgacagcgtcaacataccagaccgagaacttgggacccgaccgtacacccgggctacggccagttcgcatgagggaacaaccagaccagccgaagcattacgcgaggcattaa

SEQ ID NO: 5885 - DNA, 459 bp, Zea mays
  Peptide Sequence Number=SeqID_49260
atgaagaagagtgaaaaagatatccacgactctcgagaatcagcaaagaaagctaagaaagccgcagaacttgagagacggatagagaagagggatgatccgatgtggtgcaacagagtgagccacatcaaggatgtgtgggccatgcatcccgaccaggccctgcaaagcgatgccatgacacacctcactaggctcactcaaactgcaaagatcactcttgacgatagggaggacttcgtggtcgaccagtcttcagaattggtggagaaggatctacaggttgaacaaatgagaaaccacatccaagcgttggagcagcaggtggcaatctgggacaataccattgaggtcctggaatatcagctccaagatgtgcaagaggaacttgaggaggcaaactctcacatagaaatgcatcatcaagacatgaacgatatggaggcaggcaatgaatag

SEQ ID NO: 5886 - DNA, 309 bp, Zea mays
  Peptide Sequence Number=SeqID_49261
atggtgtctccggtgagctgcaagcgggtaatccgagtggacgtccgtgccccgttcgttaggggtcggctaggggcccagaggcacgcccaaaagtacctgcgggtgatctgccggacccggtcccctggtgacgggggcccacgtgatctgaggtggctgtcgaacccttccggggggccaggcttcgaacctctgatcagtagggaggctcggagcctggttccttcacggggaaggatccttttcggggcgaagcgtcgcccgcttctcctgccagaggcgccgcctgtcccgccgcggagttaa

SEQ ID NO: 5887 - DNA, 573 bp, Zea mays
  Peptide Sequence Number=SeqID_49262
atggcgcgagggggctccggttggccggacgacgaggaatcgcggcggcagcgagttccgatcggcgcaagggagatgttgagcgtggaccgggtcgaggagttgaggaaaggggaaaccactgcgggtttccagtgcgccgagctcaggcgaagctcactatggccaatgcgttgcagaagcccagcgacaacggcggaacgacgaagcaacagagggggcggcgctgcgggctggatgagtgcgagggcatggagagagcgaatgaggggcaggggcgagctagggggagggcgcagggtcttcaccgagcgctcgggcgacgtgggcgagaagtggggacgtgggcgcgatttaatcgggcgcgggaagcacgccatgggcgcggacgcggcagttgcgggggaggggacggatttgacgagtgggacccgcgggccagcgagagcgagcgagcgcgagtgcgcaacggcgctgacagagcgaccccaatggtcagagagaaggagcgagcgggtgcgcgcgagtgagcgaagcgcgacgccgacaggtgagactatagatggccaataa

SEQ ID NO: 5888 - DNA, 1776 bp, Zea mays
  Peptide Sequence Number=SeqID_49263
atggcgtcgatgcagagctggcgcaaggcctacggcgccatcaaggacaccaccaccgttagcatcgccaatctcaactccgacttcaaggatctggatgtggcgatcgtgaaggcgactaaccacgtggagtgcccgcctaaggagcgacacctgcgcagggttgttgcagcgacgtccatcaccaggcctcgggcagatgtcgcctactgcatccacgcgcttgcccgccgtcttgccaagacccgcaactggatcgtgtttgtggttcttctagtgctatataaggcgtcccctgcttactctccggttgctctaaaagcacttgtagtgatccatagacttcttcgcgagggtgatcctacatttcgagaagagcttctcaactttacacagaggggacggatcctgcaactttcaaactttaaggatgactccagtccaattgcttgggattgttctgcctgggtgcgcacatatggtttgtatttggaggaaaggttggaatgcttcagagttctgaaatatgatgtcgaagctgagcgcttgtccaaacaaggtcaaggtcctgaaaagggtcacagtagaacgagagagttggattcacaggatctgttagagcagctgccagcattgcagcagttactgtaccgacttgttggatgtcggcctgaaggagctgcaaataataactacttggtgcaatatgctcttgctttggtgctaaaagaaagctttaaaatttattgtgcaataaatgatggaatcataaacctcgttgataagttttttgagatgccaagacatgatgcacttaaagctcttgaaatctacagaagggctggccaacaggctgggaatctatctgatttctacgagaattgccggggattagaacttgctaggaattttcagtttcccactctgagggaggaacttcctgagaggctgcttcttacatacaaacctgaagaatcagaggaaattcttgagcctgctcctgttgaagaggaaaaagtaccagttgaagaacctgttcttgtaccacctgttactgaagttgtttcacctcctcccaaggctgaggtgcccgatactggtgacttactgggcttagatgatacaaatcctgctgtatcagctatagaggaaagcaatgctcttgccttggctattgttccaacagatggcgcttcaacaactggtaacactgcatttcaagataaggggtttgatcctacaggatgggaacttgcccttgttactgcaccaagcaatacaacttcatctacttctgttggtcaattggttgtcgtcctcgccttcggcgcttactttgttcgatcttggggtcagaggccggagcagagcctgcatgcactctccatcagtgacctacaaagctgcattttacagggtggtggactcgacaagctcattttggagagcctttatgatgatggggcctacaggcagaggcaacaacaacagctgtatggttcagcagctcctaatccattcatggcaaatgatcctttcgcgatgtcgaaccaagttgctcctccaccatcagttcaaatggctgccatgtctcagcagcatcagcaaatcccaacgatgatgcaaccaaatccctttggaccacctatgcatccacaggtgagcatggcccctgcaacaaacaatccctttctggatgctggcttcggggcattcccagcggcgaacaacggccatcagcaacacaacccatttggcagtgcccaacttctgtag

SEQ ID NO: 5889 - DNA, 402 bp, Zea mays
  Peptide Sequence Number=SeqID_49264
atggcgcgtgacagtggagaccgcaaccggccaatagcaaggtgcccgctaggtgagtacccggacacaaaagaacaacacaaaagacaccaggcccaacaaagaatttgcctccccacacggcccgtcggcatgccactcgccgagcacgagctcgtggctgcggtcgccacctccgcgctcggcgtagcctttggggtgtgcctgctcgtcgccctctcccgctcccgcgcgctcaaggcgctggcggccgccacgtccgccgccgcgctctggacgccgcggacactcgccaccgcctcctccccggtcgccgccatcctagccgcgtccaaggccgcctccaagtcgtgcaaggcggcccgcaagctcggcctcgcctcttacctctctccttcgtag

SEQ ID NO: 5890 - DNA, 288 bp, Zea mays
  Peptide Sequence Number=SeqID_49265
atggcatccctgcgcgaagtcaggccaccagggttgagtcggcaacagcttcagctggcggcacgacccgaggacgatcgaggcagcacatcgacaactcccctccccatgaccgacaccacaatcgtcgataggaggatacgtgtggagtatcggcgctttactccacgtctcagggacattcagtggccccctaacttcaaggtctccaacgtcgacaaagtacgagcccaagcaggacccgggaggctgtttggctgtctacactaccgttgtccgggctgctag

SEQ ID NO: 5891 - DNA, 801 bp, Zea mays
  Peptide Sequence Number=SeqID_49266
atggctgaaaggtaccaactcccacggagttgcgttcccccaacgataaggcggaaggactacgggcatcccccatccgggggctcggaaggtggaaagacacgatgcataagggagcgcgaagacatggtcgcctttcaagggggtcaccctccttttaaaggcgactctccctacttgcgtccccagccgtcgggggctgagtcctctccaacacgctccaaggtcctccccctacggcgcggggactgggtcccacacgtcatgcaagccggcccagagcagaagaagccaaaccgccgcgcgcggcccacgcgtcatgcaaccggcgcgtcggatgcttcgtgcgagcaactacaccaccactcgctccactaccgcgcctcctcgactgcggaaccaataccgcgactcgaggagacccagcgcacgacccagcagcgccagcctggcgcgacggacaatgcggccaaaaatgggccggcaggaccgggaaagggggataccccgaaaaggatccttccccgtgaaggaaccgggctccgagcctccctactgatcagaggttcgaaggctggcccctcggaggggttcaactgccgcctcagagcgcgtgggctccacgcccactactggtcagaggttcgaaggccggcccctcggaagggttcaacgaccgcctcaggctactcgggctccgcgcccactactgatcaggggttcgaaggctggccctcgaaggggttcacagccgcctcagacgcagagcgagggatgaccatgggtacgttcgatacataa

SEQ ID NO: 5892 - DNA, 477 bp, Zea mays
  Peptide Sequence Number=SeqID_49267
atgggtgtagccaagggacggcttgtgactgtggtaggagatgagcggttgcctcctgcccctataaatagagcgcttgcttcactgcggaagcgcgagccgagtcccccctccaaggacttcggtgactccgagtactcggaggagttctcctccgagtccgaggggtcgctatcctacgcctctcccctggtgtcgtccgatgattcggacgattcccaggggatcgccgccgaggtgtggacgtacatctgggtcgtcgagcgctccgggctcgagggctcggatgagtccgaggtctcctcggacgaggaggactcccccgactcgtccgaggaggggagcggtggtgacggcgatgacgagggcgacgacgatggcggcaagggcgacggcggcagcggcatgggcgatggcggcaccggcaaggacgacggcagcagcggcagggccagcggcaaagcgccgctggcttaa

SEQ ID NO: 5893 - DNA, 309 bp, Zea mays
  Peptide Sequence Number=SeqID_49268
atgaaccaacgacttctaaaagtaatccactcaaagctcgggggctacacccattgggtcgccgccgaggtgtggacgtacatctgggtcgtcgagcgctccgggctcgagggctcggatgagtccgaggtctcctcggacgaggaggactcccccgactcgtccgaggaggggagcggtggtgacggcgatgacgagggcgacgacgatggcggcaagggtgacgtcggcagcggcatggacgatggcggctccggcaaggacgacggcagcagcggcagggccagcggcaaagcgccgctggcttaa

SEQ ID NO: 5894 - DNA, 498 bp, Zea mays
  Peptide Sequence Number=SeqID_49269
atgacgccgctcacggttgtcattttcacgacactctcgacaccttgctgcatcgggccttcgaccgacatatttggtccattgagtatcgttgtgtcatctaccagcatcgtcgcggcttatacccggactagtgggaggctacttgcttggtgcgccgtctggacgatgatctccggggtagctgacgaccttgacctgaagtactaccctcgtcgctcaaccggcagtgctagaggtgtgattgtctcacccgttagtgtgggcaatccctggctgagcagcatggtcaatctggtcgccgtgctcaacaccgagctggaccacgcccttgatgagttgggcaaggctcgggcagagatcctggaactacgtgttgagcgcgcggcgcgccaccaacaggcgggtggttccctcgctcctatcgggattcagcacccttactgctcgctgccccgtggttgttatgcttatggcaccactgactgcaggacctag

SEQ ID NO: 5895 - DNA, 396 bp, Zea mays
  Peptide Sequence Number=SeqID_49270
atggttgctctcgggcggctctggcgggtcgcggggaggtcgccggagctaatggcgggctcggggaagtcaggcgtggtacggaggaggcaacggggaaggcagccgagcactgggacgggctttatagccgtggcgcgggcgtggtcacgggcggccgcgggcatgcgagggttcgcgcacgggcgtgctctaagtgtgcccccgggtgtcagcccgcgtcgaacacgtgggagctcgcttctgccatggttcaacggcagatttgagcaccttagcgtgcgtatcttggcaaaaatcaatactggtgttgttgtcaacttcctcttcaacgtctctgaaattgctactgctggtgacgctgatgctggtgtccttgagggtgactttgcttga

SEQ ID NO: 5896 - DNA, 1173 bp, Zea mays
  Peptide Sequence Number=SeqID_49271
atgacgaaagtcatcataccattcatcatcattgattgggctttcttgacgaagctccgtgtgttggggccttcggtcttggtcatcctgagtgaggtgacacatttcttcggtagcttcgtcgatctttctctgaagatcggcgagccgaagcatgttttccctcttcctttgcatctgttggtgaatagcctccaagtccctgatctcctggtccagctcctcctcctgaggtgttgggctagtagcctttctcttttggctcctagcttctgtagggagagtgtctcctggtttgtgtccagtggctgcatggcaacccctggagctgttgtcttcttcggcggcatggtgaaggtggatgcttaccaaaggtggtcgtttgagctcaccggaggtcgaggcactgacgcgtggggcccacgggtcagcgacgtgctgagggcgcggggcccattggccgctagatctcagatcaacagttctggggcggcgctttccgtggtcgtggtgacgcaatcgtcggaggcgaggcagaccggggattctagggtgctgaggggtggtttgggtagccgaagaggttggggaggacttggcaagcactatggcgaggtctgggtagcgagaacgggactgagatgggcaaacggcggaggggcttcggggagagggtgggggtgctctattcctaagttcgggctcggggaggggttgcagtgcccggacgccatgaagacacgacgacccgacgaggggcgactccgacgagccaaatttccccacggtaaagcggaattggcgcaaaagaggggcggtgaaaggtcacttacccaaagacagcgcttggggcagtttggcacggcgcgagggggctttggttggccggacgatgaggagtcgcggcggcggcgagctccgacctgcgcaagggagacgttgagcgcggaccaggccgaggagttgaggaaagggaaaaccaatgtgggttcccggtgcgccaatctcaggcgaagctcaccgtggccaaggcgccggcagaagcccggcgacgatgacagaacggtaaagcaacaaagggggaggcgctacgggctgggtgagtgcgagggcagggagagagtgaatgcgggccaggggcgagctgggggagtgtgcggggtcgtcacatag

SEQ ID NO: 5897 - DNA, 924 bp, Zea mays
  Peptide Sequence Number=SeqID_49272
atgattcagcttgaattcgttccctggctcgctcccgcagcgcgcgtggctggcccaccccgcgcgtcccagcgcgcgtggctggcccaccccgcgcggcccagcgcgcaggcgcccacgcccaggccgccaggccagcgccccctccctggcccagcaactgcggcccacccagcgcgctcgcgagaacgtgtctggccatcgtgcctcgctcccgcatgggcgagcgttgcgcctgccctcgtgccgctaggcccaccggccaccctaagcaactattcatcttctttaggcactcttcgtgatgtgcgctcccattccgccaagaaccacccaactgctcgtgctcctgtcgacctcccacccctccactccctgacggttggcggttgtctcgccgaagcgacccagccagcgcatccgagatggcgaagggcgacgggcgcggaggagggccgcggggacttcgaccggctgtccaagttcctggtggtatgcctcaacgctatccgggatgcggtggcgcccgaggaaggcggcaacagcatccacggcaccggtgactggggcgtggagttctggcggtgctgctccgcccaggcgtcgtccgacgtgctcgacgctagcggtgcgtgcgccacggtgacgcaaaccgcgtggctcgtctccaccgcctgcgacatcatcgctaggaaagagaggcatgggatggtcgtgtcttgccccttcctactttacctcgtctcgtcgcaggataaggctgcgcaggtgcgatcgatatgcaaacccctgaagcctcttgggattcattcagtgagcttgcatcctggcgcatccattgaacaccagatctctggactggaaacttgtgagccagagtttcttattgctacccccgagagcttcttaatcttgtttcgttaa

SEQ ID NO: 5898 - DNA, 1164 bp, Zea mays
  Peptide Sequence Number=SeqID_49273
atgtcttcgcccgagctccaggagtcttcggcgcggatgctgagggttaccgggggttggtggcctaggaatgttcctatcccccgcgcggccggcaaagacttttttacatctcgcatgggagctgcacagaagcgccaggcggtcgtcaggcttcatgaagccaggccgaagaggcagcggggggctgcgaaggctgctgcccccggcggaggcaagccgccactggcggcgaagtcggccacccctgcatccagcaaggcgccggaggctgcggctgccgccggtggttccaagtctgcgaaggctgcgccggcgtccagcagggtgccggaggccgcgaaggcggcccgagagttgccgccgccgggcaagcgcgtcaccgacttcgccaccgacattagtgtggacgattatcttgttgggtcggacgaaggccaacttgttgttgttccgcctgccgcggcgaccaccacggctgccgtggtgccaagggcgaagggcggtgctctgagtgccggcggcgagatgccgacactcactgccgtcagggacgaggcgggtgctgtgtctcgccggctgaaggagatgaaggaggcactgagtcaggcggctgacttcgcagaccgcgcggcgtcgggggccctgacggcagttgtgtctgccgaagtcgagagacttcggacgcaacatgctgacgccgtccgggagaagtcggccgccgacagtaagtgccgcaagctggcggacaaggtggccgcgctggagggggagaaaactgacctccgacgccaactggcggaggagaggaaggaggccaatgaggccctcgccaaggcgcaggctgcgcaggcggaggccaatttggcgcgggtggagggcagccttgccagggagcgcgccgagcagttggcggagcggctcagcgctctgcagagccgggtggagagggccgaggccgcgacgcgcacggaggctgagcggacacacaaacagcttatggattcataccatgagctgggcgcgcggaccgcggacttcgaagtgccagaccgagagcccggactccctgcctggagtgggtaccaggaggagttgcaggcgctccacatcggggaggggggtttatgtcttatgcttccctgtcactgcgaggggcgatga

SEQ ID NO: 5899 - DNA, 291 bp, Zea mays
  Peptide Sequence Number=SeqID_49274
atggcgaagggcgacgggcgcagaggagggtcgcggggacttcgatcggctgtacaatttcctggtgtgagcttgcatcctggcgcatccattgaacaccagatctctggactgaaaacttgtgagccggagtttcttattgctacccctgagaggctacttaatcttgtttcgttaaaggcgattgacatatcagactgtgatccatttccgagcttagaggaattgaagatcaagcgttggcgaccgagtgatccagctcttcgagttctacaaagtttaagatcctga

SEQ ID NO: 5900 - DNA, 85 bp, Zea mays
  Peptide Sequence Number=SeqID_49275
atgaacgggggggctaaggtgacacactgcaacgtgattaaagcaccaaagcacgtggagcaaggtcgtgaggtgcctaactccg

SEQ ID NO: 5901 - DNA, 258 bp, Zea mays
  Peptide Sequence Number=SeqID_49276
atgggcaccaccctaactgtccagatggccaccacgcagcgccccatcctcggccatcctctggtcgctcatgagcctcctctggtccttctcacgctttggtggtacgctctcaccgaccatgtccttggtgacctcgttgccccacggtctctatcatggtgcctaatggacagtgttgtcctctcatggctccacggcaccatcaccattgagctacaagacatcatctgcgaccaggcggacactgctcgatag

SEQ ID NO: 5902 - DNA, 612 bp, Zea mays
  Peptide Sequence Number=SeqID_49277
atggcgcctcctgttgacgtggctggcctgcgccctaggttgggcgatgtggaggctcctccgaagccgaggtcgagtcagtcttccatggccgaggccgagtccgagcccctgggtcgggcgaggtggaggtcgtcggcagaggccagggcggagtccgatccctggggtcgggcgaagcggagttcgtcgtcttctggggctgagcccgagtccgagcccctggtcgggcggagcggagttcgccgtcttccgggacttagcccgagtccgagccctgggtcgggcggagcggagttcgccgtcttctgggacttagcccgagtccgagccctgggtcgggcgaagcggagcttcctatggtgcctttggcagggcctgactgtttgtcagtctcactctgtcaagtggcactgcagtcagagtggcacaggcggcgctgtccttctgtcaggccgggcctcgggcgagccggagatatgtccgccgttggaggggggcctcgggcgagacggaaatcctccggggcctttgcagctttatgctgatgggggttaccagctgagaattaggagtcttgagggtacccctaattatggtccccgacactaa

SEQ ID NO: 5903 - DNA, 231 bp, Zea mays
  Peptide Sequence Number=SeqID_49278
atggatggtggcgaccaacggggagtcggtggcgggtgccatggaggacacaacaatgttagtccaggtgggtgcagcaagtgcgggaaagcccagcggggagccatggcacagttgctgagttgcgatgatcataggaggtgtgtcatggaggggcctgagggcggcgatgtaggggggccctccaacagcgagctcgctacagaagccgtgggggacaatgtcggctag

SEQ ID NO: 5904 - DNA, 360 bp, Zea mays
  Peptide Sequence Number=SeqID_49279
atgcggcgtgtggatgaggagtgggcccggcttgtcaatcatacacggtcagcgcgccatcgcactaccgttactggcagaggggccccgcggagcagtgaccaaggacgcgcgagcggagaaggctgggcgaggcgcggcgcaagggggactgacaggtggggtaggggtgtcggcgccaaggatagcttgggctgcgcggtgaggcttccctgggtgggccgaattggagtctgccggcccagtgtcggcccatacgccgtacacgtgctgcgcacgtgctgccgtgctgcttcgcacgtggcaatttttgtctcgcgtcgttacttcgtctcgcttataatcactaatgctatgtga

SEQ ID NO: 5905 - DNA, 1479 bp, Zea mays
  Peptide Sequence Number=SeqID_49280
atggcgacggcggcggtgccggcctctcggacaggctccggcggcgtcgtgcggcggcggcggcggcgcgtgctgatgttcccgctgccgttccagggccacctgaacccgatgctacagctggccggggcgctgcacgcgcgtggtggcctggacatcaccgtcttccacgccaccttcaacgcacccgaccccgcgcgccaccctccggggtaccgcttcgtccccgtcggcgatggcgtgccgtcggccgacctcgtcccgtccggcgtcgacgccgacatccctggcgcgctgctgcggatcaaccgccgcctgcgggagccgttccgggactgcctgcgtcaggctctcgccctccccgaggacgacggcgacgagggcggcgcgccgccggcatgcctggtggtggactccaacctgcgcggaatgcagctggtggccgaggagctcggcgtgcccacgctcgtgctgcgcaccggcgccgccgcatgcctcgtcgcctacttggcgttcccggcgctctgcgacaagggcctcctcccaccgacatccaaagacaagtcccagctggacataccgctagacgggctcacaccactacgcctaagagacatggtgttctcgcccactactacacatgcgaacatgacagagtgcctaaaatgcctggtcgacgcaacgaggagttgttccggcgtcatattcaacaccttccgagacctggaggactccgacctccagaggatcgccaatggcgtcgtcggagtgccgatctatcctgtcggccccctccacaagatctctccatgcaccgaggacagcttactggcgccggaccgggcgtgtctagagtggctggacaagcaagaggcggactccgttctgtacgtgagctttgggagcctggcacgcgtggacggaaaggagctgctggagatagcatggggcctggccgacagcaagatgccattcctgtgggttcttcgccacggcttgttggtcaactcatcatcatccgacgacgacgacgaccaggacaaagtgaggaggcttcttcttcccggcggcttcgaggaggcgacgcgcggaaggggggtggtggtgccctgggtcccgcagcaggaggttctacggcaccgtgcagttggcgggttctggactcatagcggatggaactccactctggagagcgtctgcgaaggtgtcccgatgatgtgccgaccccagttcgccgaccagatgataaatacgaggtacgtgcaagaagtgtggagggtagggtttgagctagatggcgaccagctggagaggcgcaagatcgcgggggctgttacaaagctgctttgtacggaggaaggaaggcgtatgagacagagggccagagatttaagagacaaagccatcgagtgcgtccaggaagaaggcgcctccaagtctgcaattcagctattgatagatcgcatagcgtcattttag

SEQ ID NO: 5906 - DNA, 204 bp, Zea mays
  Peptide Sequence Number=SeqID_49281
atgtcctccgtccaacgcctcctcgatggcctcctggccgcccccatgagcgctggcccctccctggacgacattgtcccccatggctcccgcggcgagctcgctagtggaggattattccggataggagaagctttttggaaaaacagatcaagcgtggaccgtctgggcccttgtggcggaccgtccgcgacaccaaagtga

SEQ ID NO: 5907 - DNA, 546 bp, Zea mays
  Peptide Sequence Number=SeqID_49282
atgtcatcaattgtgactgttgtatgcaaggagattcttggctgctacaggaagttacttggcattcctgatatgttgaatcaaccaaacatgtcaattctgaagcaacttttgcagactttacaaccaactgaaaattttgatgatgttctttctgagttccaaccatctcttgctccttgcaatgttgattacctatattgtgaagcatttgttgtgttgttggacaaatccgaggaaccaaatgggaaaatatacacatgggatgctctaaagcaatcattccctttctatgaaagcgtcttggatactcagctcataagctgctcagtgctgatttccctagcgaagatgctggaaaaggatggcagagtaaaatgctggatgaacttcaagtggttctcacttactgacatcaagattaatatcaaacgtgtcccaaagaacacaaccctgatcatggttctggaggaagctagcaatgatgaagcttattctgtggaccccttcagcaccattgcactttattcatcttctagattatag

SEQ ID NO: 5908 - DNA, 105 bp, Zea mays
  Peptide Sequence Number=SeqID_49283
atggcgccgccgctggggaccgaagagcccgtgaccgaggatactggtgagaagcaggttgaagtagctgagcaggagctcattgaaggcaagttgtgcccttga

SEQ ID NO: 5909 - DNA, 726 bp, Zea mays
  Peptide Sequence Number=SeqID_49284
atgacaccccctcagtacgcagtgcagcagttcgagaagcaccgagtgccccgctgtagggtgaggatgactctggagcctcatcccctgcagccaggctggcgctccttggactcagagtctttcgggtaccgggcagaggacacgatcgaggcgatcgctctgcatggattgactaccttctgcgggttccatcccttggagctggctactcatcccattggcttgttccccgctgaaaaggaggacgacccaatgtggaaggatcgggtggaacatgccaaggacatctgggccatctacccaggtcagactgcgcacttgacagtgatgcgcggtgaggccatgtcccatctgatggcactgctggaggccaccaagatcacgttagataaccgagaggagcttgtggtcgacttgtctcaagaaatggtagagaaagatttgcaagtggagcagctgtctggtgagattcatgagttggaggagctagtgggcacccaggagaacaccattgaggtcctagaggatcagctcctcaacactcagcagcagctggcagaagcaaatgagcacctggacatgcaccaccaggagatccaggaccaggaggacgacgaggacgtcgacattgagggaggagatgagcctgcctccagtgtggacactgctggctcgggaagaccaccttcccccgagtcaagtgttgcttcgttcgctcactag

SEQ ID NO: 5910 - DNA, 957 bp, Zea mays
  Peptide Sequence Number=SeqID_49285
atgtcttcctccctacattatgcatcgcgtcttttcacattccaagcccccggatggggggaacccgccgtcttttcgcctcatcgttggaggaacgcaactccgcgggagttggtaccttcagccatcgttcggcttcaaggattttcatcacacagcccggttgctcccctccgctggtggtcacccaagacggtgacctccagctcgtggatggggagaggcaagccgggctgtgatcccgccctcagcatcgggggtgttcgtcatcctcgctggggcggggagcgaggcgagccggggctctacctcctgcgcgggtcggcggaccacctcttcttccagcttctggtggtggcaatcgtcctcccacgctgtgacggagacgtcctccagtcatgccggggaaggcgaactgttgctgcccagctaggatgcaacattccgccctctcccttgcattcgcggcgaggatggcagcgaggatctgccggtgcgcttgggagcggcccgctctttggctctaatagctggttcgcgtcccttgagcgggaccgcgaacgagagccctccggtggccgcatccacccgggaccatggctgctgctgcagaggtcgctggcgagcctctcgatgttcgtcgccccgcaggctcgaggttgctcatacccgcggggacggaaccagagttccgtttactcgcctgttgattatctgaaccgcttcaccaagcatgagtcgccccgtgtcaaggtgacgagtgagaagatggttggccgaggccccaggggtaaccgaccgaaccgcctgctcgggccggattcccagagaagtccctggaccgcgtcgccgtccgaggctgggtcggacctcgctgaaggtgtcgtcgatgccgagggtgctacagcccccttccaacgtgaagacccgagcctgcaggatcagattgtcttgtag

SEQ ID NO: 5911 - DNA, 516 bp, Zea mays
  Peptide Sequence Number=SeqID_49286
atggtcgccttccgaaaggggtcaccctcccttttaaaggcaactctccccacgtgcgcccccaaacgtcacgggctgagtcttctccaaacacgctccaaggccctcccctgcggcgcggggggctgggtcccgcatgtcatgcaaaccggctcagagcagaagaagccaaaccgcccgcgcgtggtgcatacaaccgcccagcggttacaagagacccccacttctgcccagaccaacgggcggaaggggcgggcagccatgcaggcggcatgcaactgcgccagggacccggggaaagggggataccccgaaaaaggatccttccccgtgaaggaaccgggctccgagccccctactgatcagaggttcgaaggctggccccccgaggggttcaacagccgcctcagatcgcgtgggccctacacccactactggtcagaggttcgaaggccggcccccccgaagggctccacgggccgcctcaggctactcgggctccgcgcccattactga

SEQ ID NO: 5912 - DNA, 780 bp, Zea mays
  Peptide Sequence Number=SeqID_49287
atggagaatgatgttgtagaaactccaacgctcgatatcgtagcatgcaacattaccggttttgacaagattccagaaggcattgatgctatgggttgtgttgctcatctcaactatggttggggcgaggtggaggctcctccgaggtcgaggtcgagtctgtcttccgaggccgaggtcgagtccgagcccctgggtcgggcgaggcggagaccgtcgactgaggccagggctgagtccgagccctggggtcgggcgaagcggagttcgtcgtccttcaaggctgagtctgagtccgaggcctggggatgggcgatgcggagttcgtcgtcttccggggctgagcccgagtccgagccctggggtcgggcgaagtggagttcgtcgtcttccggggttgagcccgtgtccgagccctggggtcgggcgaagcggagttcgtcgtcttccggggctgagcccgagtccgagccctggggtcaggcgatgcggagttcgtcgtcttccggggctgagcccgagtccgagccctggggtcgggcgaagcagagttcgtcgtcttccggggctgagcccgagtccgagccctggggtcgggcgaagcggagtttcctatggcgcctgaagccgggcttggctgctgtcagcctcactctatcgagtggcacggcagtcggagcgacccaggcggcgctgtcctcttgtcaggcccgtcagtggagcggtgaagtgacaacggtcacttcggctctgtcgactggagggcgtgcatcaggataa

SEQ ID NO: 5913 - DNA, 153 bp, Zea mays
  Peptide Sequence Number=SeqID_49288
atggatccgccgcagcagccggagcctgtcacctacgtctgcggagattgcggagctgagaacaccgtgaagctagtagacgtcgtccagtgccgtgaatgtggccaccgcatcctctacaagaagcggacccgccggaaaaatggtagctga

SEQ ID NO: 5914 - DNA, 924 bp, Zea mays
  Peptide Sequence Number=SeqID_49289
atggctcgtcttagacacactgcacggaagtcagtcattcctttcttgccttctcgtctcgcggagcgtccgcttcgtcgtccggtgactggtcagtctagccatttggagaggctgcaccgctgcctgcacgaggagcaggagcgtcggcgacaggagttggagcagcagggctcttcttccttgcttcagcaggaggtagagtctgtgaggagctactctcctgtgcccccactggaggcaccccctgcaccaccactgggcgtcccggccactggagtagctgttggaggagaccccgacgttggaagtgacgacaacagctcgagccacaacaccgacctttcagaggagcaggagccggagggatgggttgctcgacccatcactcgtgacgccgctccacagtcgcggggtttacctggaccgctaggaggcgacttgcttggtgcgccgtccggagaacagtctccgggtgcggaggtctgctcagaacattactcaatttctgagcgagactcggctgaggcggccatgcaagatgccgcacgacgtgcgctttcgcactactgctcagtgttcggtggggtggccgatggtcttaacctgagttattacccccaccgtccatctggcagcacaggaggtgtggttgtctcacctattggtgaggacaatcctaggttgagcagcgcagttaacctagccgccgtgctaaacatggagctggaccacgctttatatgagctgagtagggctcgtgctgagattgcccagttgcgggctgagcgtgcgaagcgccgtcacctagaggatggttctcccgcccccgtcgggactcagcacccgtaccgctcacctcagcgtggacaccatgcttatggtaaccccgactgcaggaccaagataaatttagaaccatag

SEQ ID NO: 5915 - DNA, 351 bp, Zea mays
  Peptide Sequence Number=SeqID_49290
atgtcggacgaccttgttgttcctgtccactttgaagttggtcaagaactttgctttcgcctcctggatcatccgctccttgtgctcctcaaactggagctgctcgtcagcgggcaaggggccggacggtccgcggcctggtgcgaggcgcggtggtgctatctgcgcaagggcggactgtccgcggcctggggccggacggtccgcggcctggtgcgctgctgggacttctgcctgactgccggacggtccgcgccctggggccggacggtccgcacgtacgcagggacggcggaagatcgccgatggcgcctggatctcgctcccgggagggaccccgtcggggagtag

SEQ ID NO: 5916 - DNA, 240 bp, Zea mays
  Peptide Sequence Number=SeqID_49291
atgaggagcaataagcagaagcaaagcgcaggaggggagaagagctggatcggcaggaagctgttcctgtacaacgtcaccgtcggcctctacgccatggatccgtgggagagatacctcttcaacgacgagaagaagcttggcgactgccagttcgaccttaggaagcagtcctacgtggccgcatgcgccgctgtgtacggcaagctccggcgcagccgcagcttggacgcggtctag

SEQ ID NO: 5917 - DNA, 372 bp, Zea mays
  Peptide Sequence Number=SeqID_49292
atgtcgcgcgcgttcgacgactactatattaaggattatggcgtcatctcggcgccggaggtgacgcagaggaggactgacaacaatgaccactcgccatcgtcgggtcgccgcctggacgcgatccagagcgactgcaccgcgctgtccatcgtcaaacagggggacctcatggtcgtcgccaatgccgacgactctcgagttgttctgggcaccgcaaccgacgacaacgtgtactacctcgctgatgagcccggggtgcacttcatttggcagcccagccaagagtcatcggtactcacaatgtcgcgcgcgttcgacgactactatatcaagaattgtggcgtcatctcggcgccggaggtgacgtag

SEQ ID NO: 5918 - DNA, 153 bp, Zea mays
  Peptide Sequence Number=SeqID_49293
atggggattggttgtccacgggataaaaatttgaataaggatcaaggctctctggaggaaatggttgctggagtgacttggccgtccatcttgccaccgggttggactgtcgagtgggaccctgcctcggctgaggaggagcatgaggagtga

SEQ ID NO: 5919 - DNA, 1566 bp, Zea mays
  Peptide Sequence Number=SeqID_49294
atgaacaaaacaccggcattcaaggtgccattacaaacgaaactccggttccacctccgcaggtacgaacaaccccacacgattggggggcctgcggagcaacagaaggccgacggacggctcgccgtcgcccgctccagcagcatcgacgatgacgacttctgctccggggggccgaacagcagcagcgatgacctcagggcggatgctgctgccataaggccctcgcccatgccctcactcgagaggcaaggacgggcagaaggccgtagagttggaggtcagtccgtgggcggcaccggctatctcgtcggcggagaaacctcttccggctgccgtggcggaaggcggcgccggaagcggctccgaagccactcgggtcggagagccgggcacgcggcagctgccagcgcctcgaacggcgaacgcccttccccccaatcactaagggaaggagcgggccgccgcccgcacagggaccgaccccaactcggcacactcccctccccagcactgatgatgaaaatccttgaagctgagagaggggcagaggccgcagcccggcttgcttctccccacccaggggctggtggtcaccgtcttggagcagaagaagccaaaccgccgcgcgcagtgcatgcaactgcccagcggttacgagcattcctccactatcgcccagaccagcgggtgaaagggcggacagccatgcaggcggcatgcaaccgcgccaagtgggcgcacccctccgacttccaacgcacccagcatggaggcctaggcccacacgtcatgcaaccggcgcgccggttgctacgtgcgagcaactgcaccgccactcgcaccactatcgcgcctcctcgactgcggaaccagtaccgcgactcgaggcaaccctgcgcgggcagaagcagcggtcacgacgtcagccaagctcacgtcacctcgtgggacagcgagagaaccctctctcacggcgtgaagacgacacgcccgtcttccgttcctcgaacggcccgcgcacgcgcaacggctgccccgcgaaccactcgccccgtcgcattaactccgcggtgggacgagcagcacctttggcaggagaagcgagcgacgcttcacctccgccataatgaccgcgtcaaaaaggtgcgccacgtcatctcgattccgtattctttcctttttcctctttctctctcttacaacagggaccgggaaagggggataccccgaaaagggatccttctccacgaaggaaacaggccccgagcccccctactcatcagaggttcgaaggctggcccctcggaggggttcaacagccgcctcagagcgctcgggctccgcgcccactactggttagaggttcgaaggccgtcccctcggaagggttcaatggccgcctcagaccacccgggccccgcgcccactactgatcagggcgagaacgatcttgtaacggaatcccatcagagggaggcatcgagccctcggaccccgtcaaaaggggaccgggtccggcagatcacccgcaggtacttttggagcgcgcctccgggcctctag

SEQ ID NO: 5920 - DNA, 255 bp, Zea mays
  Peptide Sequence Number=SeqID_49295
atggggctcggtgtatgcggctcgctctgccaagggtggtttgccccttgggtggtgatgaggatgatggttatgactatgcttatggtaatggttgtccacgtcgcaaccactactcaggagaagatgaagtcgtggaggaagacttctaggagttccaagagtacgatgagttctaggcgtgggttagcggcgaacccccagtcagctgcctgtgaaggccgtgtgtatctacgtttcttttccgcactttga

SEQ ID NO: 5921 - DNA, 105 bp, Zea mays
  Peptide Sequence Number=SeqID_49296
atggaattgaatgagaaggatactgaagagggaagctcaatgcagatgaaccttgctggctggctagctagctgttggtatttaataactaatacttattactag

SEQ ID NO: 5922 - DNA, 183 bp, Zea mays
  Peptide Sequence Number=SeqID_49297
atggggagtagctctctccgggcagaatgggaatcacggcttgtgggtggttatgagattgatgatgatgatggttatgatcatgcttatggtaatggttgtcagcattgcaaccactgctcaggcgaagatgaagctgtggaaggagacttccaggagttccaagattacgacgagttctag

SEQ ID NO: 5923 - DNA, 759 bp, Zea mays
  Peptide Sequence Number=SeqID_49298
atgtacctggagtgctggcacctcctcgacttccccacgctcaggctccgaccgttctactcccggcgcgctcgtctttgccagcgcagtggagccattctacctgctctccggcctattctatctcctgcctcgttccttgttgagctcacgcgcctctgcgcggccgccaccccggaagacgtcatcctctcaacgccagagacgaccacgggggagcaccaggtgcagctcggcttcttgtcctccatcgcagagcagttccttctgcgaccattcctcgtcgggatattcttcgacccggcgctcgacaagtcgtcccgcctcttcgagcttgtgttcaagcgcctcaccctaggtgacaacgtcctgttggaggacgacatcgacgccatcgcggcgcagctcgcctgcccacggacaggagcgaagaaggcgacgaccatggtgttctcccccgtgggcaccctctccaacaaggtccttgttgggctcacgcgcctccgcgcaaccaccaccctggacgacgtcatcctctcgccgctggagacggccacaaggatgtggatgacggggcgccgaggatgcgaggaggatgggcgggggtggggatcacgccagggtgggggctgcgcgcgtggtggcatgggcaggcatcacggcgacgacgctggatttgcccatgccacgcggatctgttgcggtggcggtggggaggagaggtgggggatccgcgtgggggaggaccgcgggcattga

SEQ ID NO: 5924 - DNA, 1293 bp, Zea mays
  Peptide Sequence Number=SeqID_49299
atgtcttcttcctcccttatgcgtcgtgtctttccatcttccaagcccccggatggggggtacccgccgtctttccgcctcctcgttggaggaacgcaactccgtgggagttggtacctttcagccatcgttcggcttcaaggattttcatcacacatcctggttgctcccctccgccggtggtcacccaagacggtgacctccagctcctggatggggagaggcaaaccaggctgtgatcccgtcctcagcatcgggggtgttcgtcatcctcgctgggacggggagcgaggcgagccggggctctacctcctgcgcgggttggcggaccacctcctcttccagcttctggtggtggcaatcgccctcccgtgctgcgacggagacgtcctccagtcatgccggggaaggcgaactgttgctgcccagccaggatgcaacattccgtcctttccctcgcattcgcggcgaggacggcagcgaggatctgtcgaagcgcttgggagcggcccgctctttggctttgatggctggttcgcgtcccttgagcgggaccgcgaacgagagccccctggtggccgcgtccgcccgggaccatggctgctgctgcagaggtcactggcgagcctcccgatgttcgtcgccccgcaggcccaaggccgttcgtacccgcggggatggaaccggagttccgcttgtgatggcaccttgaatgccagctcctctagcttagttaaagggaccccttggccgctcttcgatgagccgaggccaggggtagcgatatcagtacgaacagaggcggagttggctcgaaaatgggaacctggttggccggagcctagccgggttgcccgtcagcgggggtcgacgtcggagtcgatcaggtcgggtaccgttgtcggtgatgatggagtttgggaccccgaagcgatggatgatgttggtgaagaacgccaccgcctgctcagacctaatgctgttcaggggtcggacctcgatccacttggagaatttgtcgatggcgaccagcaggtgcgtgtagcccccgggcgccttctgcaaggtaccgacgaggtccagaccccatacagcgaagggccaggtgatgggtatcgtctgcagagcctgagcgggcaggtgggtctgcttcgcatagaattggcacccttcgcaggtgcggacaattctagtggcgagttcctgaccttcggcgatggagatgcatcgctggaggatgctcgaggggctccggtggtagagctcctcctcatcgcccagcaagaagaatga

SEQ ID NO: 5925 - DNA, 372 bp, Zea mays
  Peptide Sequence Number=SeqID_49300
atggccaaaagtgggctggcagtaattgcagcggcagacgagcagaagcagcggtcaaatcgcctgcaggactcgcgtcccctcctgaagcggcaagagagccctctcccacggcggactggggaaggggataattcggaaaggatccttctcggcgaaggaagcgggccccgagccctcctactgatcaggggttcaaaggctagcccctcggaagggttcgacagccgccccagagcacacagagtgagggatgtctctgggtacgtccgttacatggtcgaggctcaggctacgctcccgagaggctcgggggctgctcgtgcacccggctacggccaaactgttgacagcgtcaacaaaccagcttaa

SEQ ID NO: 5926 - DNA, 1095 bp, Zea mays
  Peptide Sequence Number=SeqID_49301
atggaaaacccagttggggttgggcaccgcatggagatagatggatgcgaagtttttatttcatcgtatctcaccgctgcactgggccgggccgggccggctcaatacaatcactggcacgacgccacggcccacgagcagcagctcgctagcgtcgtccacgagcagcagccacgcgcgagccgggactccttgtccacgatggtcaccggcggccatggtgaggagatagattctcccaccaatgccgtggaagttgagcatcaaggtgcttgtcgtcgaagatttggaggctcgctcactgctggtggtacggaggcctacagcgccgctcgcctcgctccgactgttgtgccacccgccagggtgaagctgacaacagtcaagttcagcctcaggcgcaacaggaatctccgcctcgcccgacccccggggctcggcctcaacctcggcctcggagggtggtctccgcctcgcccgaccccagggctcggcctcaacctcggcctcggagggtggtctccgcctcgcccgaccccagggctcagcctcaacctcggcctcggagggtggtctctgcctcgcccgaccccagggctcggcctcaacctcggccttggaaggtggtctccgcctcgcccgaccctagggctcggcctcaacctcggcctcagaaggtggtctccgcctcgcccgaccccagggctcggcctcaacctcgacctcgggaggaatcgcgtcctcgcccgaccccggcctcgacctcggcctcaggaggagtctccgctttgcccgaccttaggctcggaccgaccgcgccacgggggatacatcattaccctacccctagctagctcaggctacgggggaacaagaccggcgtcccatccaggctcgccctgggaccccccctcggggtcgaaacgccgacagttggcgcgccagcaacctcttcagcccggaacgctactccgcttcgggagtctcgagttcatgtccctcgacggcagctacgacatgcggaagagcagcatccgggtttgtcccgccgcctacctcgccgcaggaggaggaggcagggtgatagtcgcctag

SEQ ID NO: 5927 - DNA, 441 bp, Zea mays
  Peptide Sequence Number=SeqID_49302
atggcgcaccggacagtccggtgcgccaccggtgcgccaacggtgcgccaccggtgcgccaacggtcacttccaacggctagttctgacagctagccgttggactcatggcgcaccggacagtgaacagttcactgtccggtgcacagcggatagtccggtgcggtgtccggggcctagatgctttcagccgctcttccttggagcaccggacactgtccggtgtacaccggacactgtccggtgtacaccggacagtccggtgaattatagcggagcgcctctggaaattcccgaaggtggcaagtttgagttggagtcctctggtgcaccggacactgtccggtgtacaccggacagtccggtgccccagaccagaggtgccttcggttgtccctttgctcctttgttgaatccaatatttgatctttttattggctaa

SEQ ID NO: 5928 - DNA, 1458 bp, Zea mays
  Peptide Sequence Number=SeqID_49303
atgcagccgggctgcctgatgaaaatccttgaagccgaacgatggctaaaaggtaccaacttccgcgaagttgcgttcctccaacgacagcaagacgaaagcgacgcgattgctccccatccgggggctcggaagccgtcgcggactgagtcttctccaacacgctccaaggtcctcctcctacgacacgggggctgggtcccacgcgtcatgcaagctggcccaggacagaaggagccaaaaccgccgcgcgtggtgcgcgcaactgctcagcagttacaagccttcctgcactatcgcccggaccagcgggtgaaagggcggacctccatgcaggcggcatgcaaccgcaccaagggggcacaccctttcgacttcgacgcgtccagcatggaggcccaggcccacacgtcatgtaaccggcatgccggttactacgtgcaagaaactacacagccactcacgccagtaccgcgcctcctcgactgcggaaccggtgccgcgactcgaggcgaccctgcgcatgacccaacagtgccaaccgagcacatcggtcacagggaccgggaaaggggatactccgaaagggatccttctccgcgaaggaagcgggccccgagcccccctactgatcagaggctggcccctcggaagggttcaacggccgcctcaggccactcgggctccgcgcccactactgatcaggggttcgtaggctggcccccgaagggtttgacaaccgcctcagagcacgcagagcgagggatgaccctaggctcgggggctgctctagcaaacccgactccggccaaaccgttgacagcgtcaacataccagcccgagaacttgggactcgactatgcacccgggctacggccaactgctgtgccactcgacagagtgaggctgacagcagctaagtccagcctcgggcgccataggaagctccgcctcgcccgaccccagggctcgggctcaatctcgacgctggaagatgaactccgcctcgcccgaccccaggactcggactcagccttagctccggaagacgacaaactcttcctcgcccgaccccagggctcggacacaacctcggctccggaagacgacgaactccgcctcgcccgacccagggcacggactcaacctcgacctcgggagaacgtcttcgcctcgcccgatccaggggtcagactcagcctcgacctcggaagacggactcgacctcgacctcgaaggagcctccgcctcgcccgacctagggctcggaccgatcgcgtcacaggaggggccatcattaccctacccctagctagctcaggctacggggaacaagaccggcgtcccatctggctcaccctgggaccccccggggtcgaaacgccgacactacccgaggcctctcggcactggatgatctcccccagggggaaggatgacaccacaatcaccggatga

SEQ ID NO: 5929 - DNA, 367 bp, Zea mays
  Peptide Sequence Number=SeqID_49304
atggcgacgcagggtggaattggaccagcagggcactccacagatgatctctatgtccttgacctcacaaacgacaagtttaaatggcacagggttgttgttcaaggggcagggcctggtcctcgctatggtcactgcatggatttggcagctcaacagtatcttgttactgtctcaggaaatgacgctcatgatgttccagttagggttaagaattcatacaaccctaaagctccaggcacccttattaccagacaaagggacatggataaggttgtactaactagcatagtgctcaagtcaaatgtcactatgttggacattttgagcactcagatgcttggtcagtatggttttcctggcaagg

SEQ ID NO: 5930 - DNA, 858 bp, Zea mays
  Peptide Sequence Number=SeqID_49305
atggcgcctcctgttgacgtggctggcctgcgccctaggttgggcgatgcggaggctcctccgaagccgaggtcgagtctgtcttccgtggccgaggccgagtccgagcccctgtgtcgggcgaggcggaggtcgtcggctgaggccagggcggagtctgagccctggggtcgggcgaagcggatcggagtggcgcaggcggcgctgtccttctgtcaggccggtcagtggagcggcgaagtgatggcggctggcccctcggaagggttcaacagccgcctcagagcactcgggctccgcgcccactactggtcagaggttcaaaggctggcccctcgaaagggttcaacggccgcctcaggccactcgggctccgcgcccactactgatcaggggttcataggctggcccccgaagggttcgacagccgcctcagagcacgcagagcgagggatgaccctgggccaaggctcctctcaaaggacacgatctcgccttgcccgagcccagcctcgggcaaaggcagccgaccccggaggattcacgtcttgcccgagggccccctcaagcgacggacacaccttcggctcgcccgaggcccagtctttgcggagaagcaaccttggccagatcgccacgccaaccgaccggctcggactcagcctcgaccccagaagacggactccgcctcacccgaccccagggctcagacttagcctcgacatcggaaggcgaactccgcctcgcccgaccctagggctcggactcagcctcgacctcggaggagcctccgcctcgcccgacctcgggctcggacccgccacgtcacaaggaaggccatcattaccctacccctag

SEQ ID NO: 5931 - DNA, 1092 bp, Zea mays
  Peptide Sequence Number=SeqID_49306
atggacgagtctggtgtgaaaaaaggagatcggcctcctgggactagtaattgtatcacatttgagtcccagaggaccgggacgcttcaggtggtatcagagctgttaggttggccgcaggacgtaacccttagcctgatcaaaaggagccagccagagtatgatggtcgtgaattcatcgagcatggcacagagaagtgtgtcgtgactgtatacattggatccagtccgcaccatgcggaatggagtgtcactactgctgggcacagattcaaagacacctgccaagtcatcgctcgcaaggcattgagggccctgtgtcagatctatgaagaagaagtggctgacaccccgctcagattctttccgccctttcagagagaccgtccagtttggatggccaggatgcgtgcattggaagagcagcagctgcttgaggacgaccccacagtcgtgtacctcactgcatacctgctcaccctggatgcccagtatgatttcttggcccggcaccaccgtcagatgattgcccgagcagaagatgtagagaagctcaaccgtaagctccatgtggatctcaccacagctcaagcccgtgcaactgccttggagagtcgtgaagtcattgctgtggaagccttgaagcaagccaaggatgagcacgtccagaagttgatggaggcctacttggtaacccacaacccaacagctgaagacccccagattcttgaaggtcacccggtctctatcagaggagagaagaaggcttgggaactactggaaggagccatagtcttggaaggaattccagtcttccctcaggctatggataagcaagagcaccccgagtcctcccaagatcccccgccagagttgtttgagcccctcaccatgaagaagattccagcaccatcccttgaagtcaaggaagaagctgcaagcaccctgccagcaccgccgccctctaaggagctacaagagccagtccagcttgaagaagagttcgaccacgtcttgccatctcagtcgtcgccagaagaagtcatcaacatcagctccctcttgacccatccaggagatgtctcagattga

SEQ ID NO: 5932 - DNA, 408 bp, Zea mays
  Peptide Sequence Number=SeqID_49307
atgagggacacagggagagcaggcgagcagcagcactcaacagatgaattgaggaagaggaataacagaggaagaggaagacctgaggaaagcaccggaggagaggcggcgctagatggagcaggcggcgcggcgcactggagtaggtggcgcggcggcactggagcaaaggccatgcggcgcactgaagcagaggcggcgcggcgcactgaagcagaggtggcactagatggaggagcggcggcgcggcgcactggagcagatagcagaggcggcgctcaggatggaggagaggcggctgcaaaccctaaaacagtaaggctaaaaccctgtctgtacgcgcgagaagcagcggccctcaaaaactccctcgtccgtggcggaactggatgccatggcgacgcctag

SEQ ID NO: 5933 - DNA, 345 bp, Zea mays
  Peptide Sequence Number=SeqID_49308
atggagggcaaggcccgcacacgtgtcagcactggacccctgcacacaccagggtccttctcgttccgggaccctgctggagttcggacctacccggaggctccggacttatatgtatataggggtccagtgtccttctgtgggggtccggacttactgaggtgtggtgtctttccttgccacgtgacgccctttggcctgcccatccggtggggtcaggcgccgtcctccgtgtggctaggagacgtcgcatgggtgcggtgtctttatgctgtagaagagggtacccctgattttgggtaccgacagtttcgtatatcattttattctattttatttatgtaa

SEQ ID NO: 5934 - DNA, 1194 bp, Zea mays
  Peptide Sequence Number=SeqID_49309
atggcgccccgcatgctctgtgacgacggtggctctcagcccccttacggaagcaagaggacgtcagcaaggacccaaccgctccgaaagctgtccctccgccaggctccatcgctcctccgacggccacgacatcacaccagctgggtgccaaaatctctccggctgccacgacggcatggccctcttagagagggttggccgcgcggggacgaggacgagaacaggcgctcgcttggggccgctcgctccctctcccgcgtggacgcttgtaaccccctactgcaagcgcacccgacctgggcgtgggacgaacacgaaggccgcaggattcccacctctctcacgccggtctccggccgcctcgctcttccccccttcgcgctcgccctcgcgctcgacccatctgggctggggcacgcggcgacattcactcgtcggcccagggaccccccggtctcgaaacgccgacaagtagggggctcggggcccgcttccttcgcggagaaggatccctttcgaatcattatggcggaggtgaagcgtcgcctgctttgcctgccaaaggtgccgcctgtcccgctgcagagcagcccggctgcatcccctcgccggtggtcacccaagacggtgaccaccagttcgatggtggggagaagcgagccgggctgcggcctctgccccgccctcagcttcaaggatcttcatcatccttgctggggcggagggcgggctgagccggagctctacctcccgcatgggttcgtgggtcaccctctccttcaacattcaggggagagggtgctcactggcctagcggaaggggcggactccgacaacgcggggctggtcggccgcgagcgtcgtcagcttcagcgcgttgggctcgctggctcaactggctctggcttggctcccggtgcccccttccgccgtacgagaggtcgccgcgccgcgcgcaccagagggccgcccaagacgtcgcgcgctgctagggcggcgttcgtgttcttgggctatcctgcctttgctccggtacgacgcctcttgcgcggaggtcggtgctcgcctgtccgggaggatccgagtggggatctgccggtgggcatatggctgccgtcgtcgacgttgaggtggtggcggctgaagaagtcctcgttgccgacgagatcaccgccaccatccgcgctctag

SEQ ID NO: 5935 - DNA, 573 bp, Zea mays
  Peptide Sequence Number=SeqID_49310
atggcgcctcctgttgacgtggctggcctgcgccctaggttgggcgatgcggaggctcctccgaagccgaggtcgagtctgtcttccgtggccgaggccgagtccgagcccctgggtcgggcgaggcggaggtcgtcggatgaggccagggcggagtccgagccctggggtcgggcgaagcggatcggagtggcgcaggcggtgctgtccttctgtcaggccggtcagtggagcggcgaagtgacggcggtcacttcggctctgccggggggcgcgcgtcaggataaagaggttcgaaggctggcccctcggaagggttcaatagccgcctcagagcactcgggctctgcgcccactactggtcaaaggctggcccccgaagggttcgacagccgcctcagagcacgcagagcgagggatgaccctgggtacgttcgatacataaccaaggctcgggctacgctcccgaggggtcagctaggggcccagaggcacgcccaaaagtacctgcgggtgatctgccggacccggtcccctggcgacggggtccgagggctcgatgcctccctctga

SEQ ID NO: 5936 - DNA, 2079 bp, Zea mays
  Peptide Sequence Number=SeqID_49311
atgccgcgcacgaagaatgtgtcggcgccagggggaggcgatgatgaggatcctcgtcgccccttcaggcaggtcaagggcaagactgtttacttggagcagcaggaaggccgcaagaagcggcgtacggacagagccgcccgtgcagcgacagcagctgcagcagccgccgcgcaggccgagcttggagatcagccacagactccatccgatcagattgcataccgtgttcgtcgtctcacctcccggcctcgctcctccactcacacctccgcttccactccgccacccactctgcctgctcccgtcactcctattgctccatccacctccacagccatacccactacctccactacgccagcttccactgcttcccctgctcccgctcccgcttcagctccttctgtccctccacctcgattctgggagcgtgatgagactgaggttcgtcctctggtttcggatcctcgtctgtttgaccttcagcgtgctacagcggcacgagtacgtaggttcagatacgtacccgtggagtcttggctaccagctcagagagaccctgcagcaggtgaccttttcagcacatggattcaggagtcgtttttcagagctcagatgtctgctcagatagctctgcgagtgcaccggcttttggatcttccagcctttctgcttgcagccggtgctgactctgaggcgcatctcacctatctgtctggccttcagacccttctgactatcagcggcaggtatgttgaggagtgggtctgtgtcttttacgcctctgtttggatagacccggatcatcactggatgaggttccgctttgagcgagaggatgtcacaattactgccagtcagatccgtcagctctttggattccccgagtcgacgactcgccttcacagtctctgctacggcacttctgaccctcctcgttgccctcacggtggtgtggctccgggtacagctcacgtcgcggctctgttccgcccgcctttcacagatgggtcgcgacgttcaccggcagattttactacagcagcaaagtacttatatgagctcatcagacggactcttctgccgaggatgggatacagggaggctaccactcatattcagctttggctcctcggtgccctggtctcccactctgagtttgacgttgtggacttcctgatttgtgagatcgaggacaccgttctggatgggattcgtgctcgtcggcagttgccttatgctcactacttatgccacatctttgcgcagctgattcagccccctcgatttcagagcacccttgaggcctcacgccttgtttttggatcctaccgtcctgcgcctgagattcctgtgccagcttctgcttctgtgtttgactctcaggccgaggatgcagctcttcgacagtttgacactcagggtacagcagctgatgatgatgatgatgatgatgattttggtgttcctcctccgcctccgcctcctatgcctccacgctcacatgatcatgaggctgggagttctagtgctgcccctgctcctcctcaggctatggaccctgctcttgcttcgattctggccaacctggcggccgagcaggcccggttatccgagaggatgctctcgatgtttcagaacatgcaggacaggcaggatgcccttcagcagcagctacttcaggatcgggctgagactagggcattcatggcccttatgcttcagcattctggtatctcagtacctccggttcagtctgctccacctcctccgctccacgctccagtggtgccatcgattttgtcaggaccccctgttggtacctctccgctctggccggtcactttggcgttcacctctccggttctcagctctgtctgcccgcagccgccagtgccaccagcatctgctgttaccactaccgctgtggcagtatctgtgaccgcttctgttccggtagctcctgcagcacggcctcagtccgagtcagtaccagctccagcttctaccgcagatcctggatccgagactgactctgaccctccgccggcgtttgctctgctgcctcgaccttga

SEQ ID NO: 5937 - DNA, 672 bp, Zea mays
  Peptide Sequence Number=SeqID_49312
atgcaggcggcatgcaaccgcaccaagggggcacaccctttcgacttcgacgcgaccagcatggaggcccaggcccacacgtcatgtaaccggcgcgccggttactacgtgcgagaaactgcaccaccactcgcgctagtaccgcgccttctcgactgtagaaccggtgccgcaactcgaggcgaccctgcgcatgacccgacagtgccaaccgagcacatcggtcacgggtcagtcagccgcgggagaaggcgcgacggtcgatacgaccagaaatgggccggcaggaccgagaaaggggatactccgaaagggatccttctccacgaaggaagcgggccccgagcccccctactgatcagaggttcgaagcctggcccctcggaagggttcaacagccgcctcagagaactcgggctccgtgcccactactggtcagaggttcgaaggctggcccctcggaagggttcaacggccgcctcaggccactcgagctccgcgcccactactgatcaggggttcgtaggctggccctcgaagggttctgacagctgccttagagcacgcagagtgagggatgaccctgggtacgttcgatacataaccaaggctcggactacgctcccgaggtaccctaggacatttccgagacccacgggaacgattttgtaa

SEQ ID NO: 5938 - DNA, 831 bp, Zea mays
  Peptide Sequence Number=SeqID_49313
atggctgaaaggtaccaactcccggagagttgcgttcccccaacgacggggcggaaagacggcggatctcccccatccgggggcttggaaggtggaaagacacgatgcataagggagcgcgaagacatggtcgccttccaagggggtcaccctccttttaagggcggttctccctactcgcgtccccagccgtcacgggctgagtcttctccaacacaatccaaggtcctcccctacggcgcgggggctgggtcccacaagtcatgcaagccgactcagggcagaagaagccaaatcgccgcgcgcggtgcatacaaccgcccagcggttacaagcgaccctccacttttgcccagaccagcgggcgaaagggtgggcggccatgcaggcggcatgcaaccgtgccaagtgggcgcgcttctccgactcccaacacgcccggcgcggaggcccaggcccacgcgtcatgcaaccggcgcgccgactgcttcgtgcatgcaactgcaccgccacttgcgccaccaccgcgcctcctcgactgcggaaccaataccgcgacacgaggcgacccagcgcacgacccagcagcaccagcctggcgcggcgggaccgggaaagggggataccccgaaaagggtccttccccgtgaaggaaccaggctccgagcctccctactgatcagaggttcgaaggctggccccccgaagggttcgacagtcgcctcagatcacgtgggccctacacccactactggtcagaggttcgaaggccggccccccgaagggttccacggccgcctcaggctactcgggctccgcgcccattactga

SEQ ID NO: 5939 - DNA, 669 bp, Zea mays
  Peptide Sequence Number=SeqID_49314
atgggggagggcctgcggagcaacagaagactgacgggcggctcgctgccgcccgctctgacggcaacaacaacgacccccgctccgggtggccgaactgcagcagcgcaggcctcagggtgggtgctgctgcaatcttgccctcgcccacgtcggcgctcgaggggcgaggacaagtacaaagagccggaggcccgaagcgcggatggtggcggtggtcccgtcggcgacggggacttctcgagccgcctccaccttggcaccgacgacaggagccgctcccggcagatccccactcagatcctcccggacgagtggggcaccgacctccgcgcggaggcgccataccggcgcggcagccgccttccgacaggaggggccgccgggagccaagccgacgagctcgacacgctggggctgacgacgcccgccgttgaccagccccgcgttgtcgaagtccggcccgcccgcagggccagcgagcgccctcaccctcgaacaccgcgggagagggtgacccacgaacccgcgcgggaggtagagctccggctcagcccggcctccaccccagcaaggatgatgaacatccttgaagctgagggtgggaccaagatcgcagcctggcttacttctccccacccaggggctggtagtcgccgtcttgggtga

SEQ ID NO: 5940 - DNA, 444 bp, Zea mays
  Peptide Sequence Number=SeqID_49315
atgtctttcgtgctttttgactactttgaaaagtggatcctgaaaacgacggagtacacgagacacacgctacaagacgatctgatcctgcaggctcgggtcttgacgctggaagggggcagcagcaccctcggcatcgacgacaccttcggcgaggtccgacctagcctcggacggcgacgcggtccaaggatctccgctctaaaggacgacgtcatcgccacacccgggcaatcgctgccagggtcttctccggaaatctggcctgagcaggcggctcggccggtcactctggggccttggccaaccatcttccaagggcgccagcccgacccgaggcctcggctggtcaactccagcgccggtcccgctaacggacgacccggctgggctccggccaaccaggtttcattttcgagccaactccgcccctgttcatgctga

SEQ ID NO: 5941 - DNA, 513 bp, Zea mays
  Peptide Sequence Number=SeqID_49316
atggccgtggtcgcagttcatggcatggtcgcagcgggcgttcccaagggcccgacgcgaccttcggctacgaggacagagcggctgtgcaacctagcagaggaagctctttgtggttttgcgggtggagaatctggtttcttccaagtttcaacttggggcgtcaaggctgtaactccaaggtctgatggcgtcaccgccttcataacagtcaaggaagactgtaattacagggatgcctttacaaattgggcccgtaacgcgcggtggccacgcagggcccgttacaatgggccggatcgcacgtgggcctctgagctggacgaggccgcactgtgggatgacttcgttgccggtcttcgtctggtgctgatcaagcgaagggtgtccttgcctgttttgtctgtcagaccagtggctgcagcgaagacttcgagcgaagggtggcgtctttgccttcgccccaacatttgccctccgagggaccagttcgacgaagtcacctggtgctga

SEQ ID NO: 5942 - DNA, 285 bp, Zea mays
  Peptide Sequence Number=SeqID_49317
atggcgcactgctacacctcccattgtacacctggaccctctccttacgcctataaaaggaaggtccagggctctcttacaaggaggttggccacgcgggaggacgggacggcgcgtagagtccctcgctctccccccacgcagacgcttgtaacgccctactgcaagcgcacccagggctcggactcgggctcggtcccggaagacaacgaactccgcttcgcccgaccccagggctcggactcgggctcggtccccgaagacgacaaactccgcctcgcctga

SEQ ID NO: 5943 - DNA, 1197 bp, Zea mays
  Peptide Sequence Number=SeqID_49318
atggtcacccggtcggccatcaccaagcagaagaggtggcggtggagaggactgggtgcgtggtttcctttctctggctattccctcgggttgcgaaaacctgagtgggaggcgagcagcagagacaggcggcaccgttggcaggcgaagcaggtgacgcttcacctccgccatgatgaccgcgtcaaaaaagggaccaggaaaggggatactccgaaagggatccttctccgcgaaggaagcgggccccgagcccccctactaatcagaggttcgaaggctggcccctcggaagggttcaacagccgcctcagagcactcgggctccgcgcccactactggtcagaggttcgaaggctggcccctcggaagggttcaacggccgcctcaggccactcgggctccgcgcccactactgatcaggggttcgtaggctggcccccgaagggttctgacagccgcctcagagcacgcagagcgagggatgaccctggatacgttcgatacataaccaaggctcgggctacgctcctgagcgccgcctgcgtcgctccgactgctgtgccactcgacagagtgaggctgacagcagccaagtccggcctcgggcgccataggaagctctgcctcgcccgaccccaggtctcggcccccgtctcggcctcgaacgatggactccgcctcgtccgaccccagggctcgaactcagcctcagctccagaagacgacgaattccgcctcgcccgaccccagggctcggactcagcctcggcttcggaagacgacgaattccgcctcgcccgacctcagggctcggactcagccttggcctcggacgacggtctccgcctcgcccgacccggggctcggactcgacctcggaagacagactcgacctcgacctcggaggagcctccgccttgcccgacccagggctcggaccgaccacgtcacatgggggccatcattaccctacccctagctagctcaggctacggggaacaagaccggcgtcccatctggctcgccccgggctctcgtacgagaaggttggccgcgcgggagaacaggccggcgcgtaaggctctcgctctctcccacgtggacgcttcggaagccattgcggtggcgtcttgcatcgaagacccacctcctcctcctcttcctcaggatgatttctattctcagggtgattaa

SEQ ID NO: 5944 - DNA, 381 bp, Zea mays
  Peptide Sequence Number=SeqID_49319
atgggcgtgcctgccttctgcgcgctctggcgcgcattaattgttgttgcagccgtcgcagtttcccgaagctggcgagttcctgaggcgccgttccttggagcaccggacactgtccggtgtacaccggacagtccgactcttctcttgcatcacgctgctgctgaacttgatattgcccctgaggttgctaactgtgagatgaagttggagctgatgcaggtggctgagatggccaataagcatgaggcccgcgagctcggcacgaagcccactgtttgggcccgggccgagcccggcatggcccggttctatgcgggcctgggccgagcccggcacggcccggttctatgcgggcccaggccgacccggcacgaataa

SEQ ID NO: 5945 - DNA, 111 bp, Zea mays
  Peptide Sequence Number=SeqID_49320
atggccgtgatgggttcaacatcggaaaagatgtacctctaccaggaccgtctcgatgtaggcttgctgatcgaggaccttttaactggtcacaatcctcatcatgggtaa

SEQ ID NO: 5946 - DNA, 1050 bp, Zea mays
  Peptide Sequence Number=SeqID_49321
atgcccgacgcccgcccccgcatgccccgcgtcacaccaagccaggccagcaccgttgcctgcgcccacgcctataaagccaccagaggcttcgaccgtactcccccgcacgcacgcgacctcaccggagcactagatgaccggcgttgccccgcgcacgttacgcttaaccgtatacagatgacttctcacggatcctcggacgaagggaatgcacagtcccacacagacggacttgcacgagagggtttcccccgtatcttgtgggaggtacttcagggagctggttacacgacgcctccccagtacgcggtgcagctgtttgagaagcaccgagtgccccgctgtagggtgaggatgaccctagagcctcatcccttacagccaggctggcgttcgttggattccgagtcttttggatacagggctgaggatactatcaaggcgattgctcttcacggactgaccaccttctgtggtttccaccccttggagctgtccactcaccccattggtttgttcctcgcggagaaggaggacgacccaatgtggaaggaccgagtggagcatgccaaagatatatgggctatctacccaggtcagactgctcacttgacggtgcagcgcatgaatgccctgtatcgtcttcaagtgatgcaaggagaggcaatgtctcatctaatggcattgttggaggctaccaagatcaccttggataacagggaggaacttgtggtagacttgtccactgagatggtggaaaaagacctacaagtggaacaaatgtcaaatgagatccaagagcttgaggagctagtgggaaccagggagaacaccatcgaggttctcgaggatcagctaatcaacactcagcagcagcttgcggaggctaaccagcatctggatatgcaccaccaggagatccaggacatggaggccaacgaggatgtcgacatcgagggaggagaggagcctgcctccagcttggacactgctggctcagggagaccaccttcccccaagtcgagtgttgcctcgtttgctcactag

SEQ ID NO: 5947 - DNA, 519 bp, Zea mays
  Peptide Sequence Number=SeqID_49322
atgggcaaaaaaaacaagcgcgagcgcgagccgactcctccttcagaggactttggcgactcggaatactcagaggaggagttctcctctgagtctgaggggtctccggctcccgtctctcccccagcgtcgtccgatgactcggacgactctcaggggattgccgcggaggtctggacgtatatccgggccgtcgagcgctccgggctcgagggctcggatgagtccgagtactcctcggatgaggaggactcggacggcggcggcgaggacgaggacgacgacgacgacgacgacggcggcgacgacggtgacggtgacggcgacggcaacggcaggggcggcaacggcggcggcaggggcggcgacggcggcagcaggagcggcaacggcggcagcagcaggggcagcggcggcggtggcagcagccaaggcagcaacaagtatcagcgttttagaggcaacgccgagccactgagaggcgacgtcggcgttttagaggcaacgccgagcgattga

SEQ ID NO: 5948 - DNA, 123 bp, Zea mays
  Peptide Sequence Number=SeqID_49323
atggctttggccgtcggaagttacttcgtttactgtagtgcttcacataagccccaccgtcaaggacatgtaccgtcagatgagaagcatgaaggataccgcgatgagttcggagaagattag

SEQ ID NO: 5949 - DNA, 843 bp, Zea mays
  Peptide Sequence Number=SeqID_49324
atggcgcctcctgttgacgtggtcggtccgtgccctgggttgggcgaggcggaggctcctccgaggtcgaggtcgagtctgtcttccgaggccgaggtcgagtctgagcccccgggtcgggcgaggcggagaccgtcggcggaggccaggactgagtccaagccctggggtcgggcgaagcggagtttgtcgtctttcggggctgagcccgagtccgagccctggggtcgggcgaagcggagttcgtcgtctttcagggctgagcccgattccgagccctggcggagttcgtcgtcttccggggctgagcccgagtctgagccctggggtcgggcgaagcggagttcgtcgtcttccggggctgagcccaagtccgggccctggggtcgggcgaagcggagttcgtcgtcttccggggctgagcccgagtccgagccctggggtcgggcgaagcggagttcgtcgtcttccggggctgagcccgagtccgagccctggggtcgggcgaagcagagttcgttgtcttccggggctgagcccgagtccgagccctggggtcgggcaaagcggagttcgtcgtcttccggggctgagcccgagtccgagccctggggtcgggcgaagcggagttcgtcgtcttccggggctgagcccgagtccgagccctggggtcaggcgaagcggagttcgtcgtcttccggggctaagcccgagtccgagccctggggtcgggcgaagcggagtttcccatggcgcctagggccggacttggctggtgtcagcctcactctgtcgtgtggcacaacagtcagagcggcgcaggcggcgctgtcctcttgttag

SEQ ID NO: 5950 - DNA, 345 bp, Zea mays
  Peptide Sequence Number=SeqID_49325
atgacctcgacgtgcggtggtggaggttcctcgatccggattaacggcggtggttcccaggtcggtggcggcggctccccgatccggagggcaagcggcggcgtccccgagttcccgaggaggcgacacttccaaggccggcgagcaagcggcggcgtccccgaggtcccgaggaggtggcacttccaaggccggcgagcaagcggcggcgtccccgaggtcccgaggaggcggcacttcgacgtgcgagtagcgacggcgacgcatgaggcgcgatcttcgagcgagcggcgtcacagaaggcccgagatgcgcgcaacgatgatcgcgcgtgacatcctctga

SEQ ID NO: 5951 - DNA, 246 bp, Zea mays
  Peptide Sequence Number=SeqID_49326
atggctagagaggaaattattgccgaaggtgttactaatgtcgaagctgaacagaccatggctaaggctaagagtgaaaatgaaagcgaggatgatgataacgaaggaaagagccgatggctagcacaagaacgtcggatgctacaactttgcataccagaaggacacaaaggcccccgtgataggctaccgcaccaagtggccgaccgggtggacagacgaatggttttacgtgaaggccgatga

SEQ ID NO: 5952 - DNA, 984 bp, Zea mays
  Peptide Sequence Number=SeqID_49327
atgtcttcgcactcccttcatgcatcgcgtccttccacctcccgagcccccgaatggggagcactcgcgtcgctttgtcttgctgtcgttggaggaacgcaacttcgcggaagttggtacctttcagccatcactcggcttcaaggattttcatcaggcagcccggctgcatcccctcaccggtggtcacccaagacggtgaccaccagttcgatggtggggagaagcgagccgggctgcgacctcagtcccgccctcagcttcaaggatcttcatcatccttgctggggcggagagcaaggcgagccggggcctgccttcgcgtgggctggcgtcccgcctcttccagcttctgggggtggaaaccatcctccaactcttcagaggaggcaccccccagccatgccggggaaggcgaactgttgctgcccagctagggtgcaacattccgtcctttgtccgggcgacggtggccagccgcaccgggaggtctcactccattctcgttttcgtggcgaggatgggagtgaggacctgccggtgcgctttggagcggccggcgcccgctggtgcggtgttggtggacaggtggacgccgccgtcggtgctgaggtggtggcagctggagaggtaggcttttccaccgacgagaccgtcagcgcgacccgcggaccgacctccggctctttggctttaatatctggttcgcgtcccttgagtggggacgcgaatgagagccttcctgtggctgcgtccgtcctgggaccatggctgctgctgtggaggtcgctggcgagtcacccggagtctgtcgtcccgcaagctctccgatgtggaggttgttcatacccgcgggggtgcaaccggagttccgtttgtaatggcaccttgagtgccggtgtttgttcattgtggctgtcggggcctgaacatgtaggtatttttgggtgtaataccgtgtcctttcctcattgtgagcactag

SEQ ID NO: 5953 - DNA, 606 bp, Zea mays
  Peptide Sequence Number=SeqID_49328
atgcagtcggcatgcaaccgcgccaggtgggcgcaccccttcgactccaacgcgcccagcatggaggcccaggcccacacgtcatgcaaccggcgcgccggttgctacgtgcgagcaactgcaccgccactcgtgccactaccgcgcctcctcgactgcggaaccagtaccgcgactcgaggcaaccctgcgcgtgacacgacagtgccagccaggcgcatcgatcacgggccagtcggccgcgggagaaggcgcgacggtcgatgcggccaaaaatgggtcggcagtaatggcggtggcaggcgggcagaagcagcggtcacgtcgtcagccaagctcacggaccgggaaagggggataccccgaaaagggatccttctccgcgaaggaaatgggccccgagcccccctactgatcagaggttcgaaggctggcccctcggaggggttcaacagccgcctcagagcgcttgggctccgcgcccactactggtcagaggttcgaaggccggcccctcggaagggttcaatggcagcctcaggccactcaggctccgcgcccactactgatcaggggttcgtaggctggccctcgaagggttcatag

SEQ ID NO: 5954 - DNA, 243 bp, Zea mays
  Peptide Sequence Number=SeqID_49329
atggaagggtcctcaaagatatatttgactaaggatcaatatcgtgaggtgatggttccatggatggcgcccgtgcctgatgcatactatgcttggtgtcgatattgggcttccgaaggcttccagaaaaagctacaagtggccaaaaccctagtgacattgaggtcaaccaggagggccacaaaggaccagaccctaacaaccctaaccaactatgcagctagacagccacggatcaactga

SEQ ID NO: 5955 - DNA, 3684 bp, Zea mays
  Peptide Sequence Number=SeqID_49330
atgagtgctgaaaagaaaaatgaattgaagaagcgtcgtgagtcacgaaaaaagggaaatgttatgcaccatgagtattcagaagtttgcaacatccctgcaaacaaggacaacaataatcatcaaaacaatgaaattgaggatgttgatgatgattcttatcagttgcataagaataactcatttgaggacttaatcggcattgaggacccgaagtttacaccggagcttgtgtggagttcaacagatgctgaagcacctcatgggtctctatgtagctccgagggcatggctatccctaagttaagtccaacacctttcgttcctaatccatcacagactgaggatgtcgagaaagacagtatgacagagtctcctagacggcaaagacataaacgtcatgtgtcgtccggccaaagacagaccctggtgtctcgtcaaaatcagaaatttcatttagccattggaacaaacttcgctactgcaactagggatcgtgtaatggagaatgatgtggataatgaaattgatcatcagactgtttcagagatcgacaacaatgaggatgatgatgaagctgtactttttgaagatgacgaagacgaaggatacctattcgctgggcaagatggtgaatctggtgaggatatcgatattgatgaaacacaagatgcctttactgttatccctgacatacctgacccgtacgacaaggtgtatagtatcatacctgaagaaacatatttgttgaacactgttgctgattgcgactactgtaaggcaaagaagtttcaatatgaaccacctggattttgttgtcgtaatggacagattgatctagccccattcgagacaccatctcagcataggaggctgtgggagtgtgcagatgctgatgcgaggcacttctatgataacattcgattttttaacggccatttctcgttcacttctctatattgttgccttgacaatatgactactaatatggatcgtgggaagctggggggggaacagaagcaccttgagctttacttctacgatgatgatcccagcctcgagcatagatatcgtaaatgtcgtcaagagcaacttgataaagacaaggcagttattaaacatttagttgagatacttaagggaaacccatactctgagcaccttaggagtatggggcacgttgataacattgaagactaccatattgccttgaaccttgatcaaacattgaaccagaagttatataatgcaaccatcacttcggaggtcgctgcagtttggattgaggggagtgaacgtcgaggtcaattcaataatagtgttatgctgcatgggaaggataggtcaagccatggcatccgttcatatcatggatgctatgatgcactatcatacccattgttctttcccaaaggtgaacttggatggcatgcaaatattccgaagtccaatgtttccatggatgaagtagaggcgtatcgtgaccaacacaggacaagggatgcaaatgatgacgatacaggtatattcaatccaatacttcatgggaagcgtcttttccaacagttcgctgtcgacagctacatcaaggttgagagctctcgtttggatttcatacgtagaaaccaagacagattaagggcagatctatacaaggaccttgttgttcgcatattccgtgcgaaactagaggaattgaagaagagattgactaagcaacatattcttggaaagatccatgcttatgtctatgtcgtggagttccagaagcgaggtttgccccatgcccattttctactcatcatgcagagaaagtacaagctaacatgtcctgaccagtatgatctactgatctccgctgagatccctgataagaagaagtacccgcagctgtacaagatggttatcaagcatatgatgcatggaccgcgtcgtgatgatgggcgtaaggaaacggttcgatgttgtgaattggacaacagatgggtcatcccttacaacccttacctcctctggctcttcaactgtcacatcaatgttgaggcgtgcgagagcatcaaggttgtcaaatacttgttcaaatacatatacaaaggccatgatcgtgcgtttgtggctgtgacagatgcaaacaaggctgatggtgacgttgatgagatcaagcagtatagagatgctaggtgggtgacccctccagaagccctctggaggatattcagctttgatctaagtcaaaactctccaccagtgatgcaactgcagctccatcttgaaaacatgcacatggtgtcatgtcacgagcgtgctaaagtaaatcatgttgtccaacgtccaggtgccgataggtcaatgcttacggcatattttgaggcaaataggctgcacgaggaggctcggggcatcctttaccgtgattttcctgagtggtacactttgcaacagggaaaagtgtggcaaaggaggaaacgaaacacgggtggacaggttggtagaatagtctctgctcatccagctgagggggagcgcttttatcttcgacttctcttaaaccatgtgacgggtgctacctcctatgcggatctaaggacagtagatggtgacacactaccatcttttcgtgaggcagcacaaaggaggggattgcttgaagcagacaacacaatagatgagtgtctcaacgaagccgctatttaccaaatgccatcagcactacgaaggttgtttgcaacaatactggtatactgtgagccgaacgatgtggcagaattatggcagagacaccttgactcaatgtcagaggactatcaccgtagtactcaaagcaaaacccatgtgcagcagatggtcttgattgacattagaaacattttgcagtcaatgggtaaagacataaatacattccctctccctgctatcatcgacatatatgacgattcacatggtactgatagagagatttacgaggaggaatgtatcgagccgacgatagaagatgttgctatgaaagaaaccctaaacgaggagcagagcttccatattgcctgggggaggactgcccattcgcgtttcaagatatcacttactattgatgatggtgttgtatgtagcttcacaaaacaaagcgggacaacaaagttgctacaaaaagcatcgctcattatctgggacgaggcaccaatgactaagggacaagcaattgaggcgctagacaatagcatgcgtgatataatgggacggcctcggctgccctttggtgggaagactgttgtattcgggggtgatttcagacaagtactccctgttgtgcgcaaggggtcaagggctcagatagttgctgcctctctacagagttcttacctctgtgaatccatgtgccacctaaagcttgttcaaaacatgagggcacagagtgacccatggtttgcagaatatttgttgcgcgtcggtgggggaactgaggaaacgaacaacgatggtgatgttcgtcttccagatgagatgatgtaccatagttttgacaccgcagtggatgatcctaataactattacccatcagagtttctaaacacgctgactcctaatggactacccccgcatgttctgaagctcaaagttggatgcccaatcatgttgcttaggaatatagaccctgctaatggactttgcaacggcacgaggttggtg

SEQ ID NO: 5956 - DNA, 813 bp, Zea mays
  Peptide Sequence Number=SeqID_49331
atgactctgggtacgtccgatacatggccgaggctcgggctacgctcccgaggtaccctaggacatttccgagaccagcaggagcgattctgtaacgaaatcccatcagagggaggcatcgagccctcggaccctatcaaacgggaccgggtccggcaaatcacctgcagagtgaggccgacagcagctaagtccagcctcgggcgccataggaagctccgcctcgcccgaccccagggctcggactccacctcgacctcggacgacagtctccgcctcgcccgaccccagggctcggactcaacctcgactctggaagatggtctccgcctcgcccgaccccagggctcggactccacctcgacctcggacgaaggtctccaccttgcccgaccccagggctcggactcaacctcgactccggaagacggtctccgcctcgcccgaccccaggctcggactccacctcgacctcggaaacatgtctccgcctcgcccaaccccagggctcggactcagcctcgacctcggaggagtcactgcctcgcccgacctcgggctcggaccgaccacgtcacaaggggggccatcattaccctacccctagctagctcagtctatggggaacaagactggcgtcccatctggctcgcccaggtaaaacaggtaacgatggcaccccacgtgctccatgacgacggcggttctcagccccttatggaagcaaggagacgtcagcaaggccccgacagccccgacagctgtgctcctacaaggctcaagcgctcttccgacggccacgacctcacatga

SEQ ID NO: 5957 - DNA, 535 bp, Zea mays
  Peptide Sequence Number=SeqID_49332
atgtcttcttcctcccttatgtgtcgtgtctttccatcttccaagccctcggatgggggcccggctgctcccctccaccggcggtcacccgagatggtgacctccggcttgatggtgggggaaagcgagccaggctgcggcctctgcccctccctcagcctcaaggattttcatcaccagggctggggaggggagtgcgccgagttgagctgcagcgtgcccggtcttcagacgcgagtggcttcggagccgctcgcggcgccggcgtccgccacggcagctggaagaggttcttccgccggcacgatagccggggccagccacggactgacctccaactctacggccttctgtccgtccttgcctcacgagttttgtcgtgggcgggggcctcctggcagcagcatccgccctagggtcagtgctgccgctgttcgaccccccggagcagaagtcgtcgtcgtcgccgatgctgaagcaggtgacggcgcgccgtccgacggccttccgttgctccgcaggaccttcaccctcg

SEQ ID NO: 5958 - DNA, 264 bp, Zea mays
  Peptide Sequence Number=SeqID_49333
atggtggtggtagtgggagctggggctaggaagcttgtgaatgacttaccgaagcaacagaagctgcatgttgattacccacgtattctggtatatagggagagtagcacgaagcagtgcactcaaggtcaagatagatacattatcaaggagatgttcaccaacgatgatgtatcaacaaaagttaacgccaagtataagcccctaagaaacaaccatggaagaagggcacttgactacaacccatctaagcatataacatga

SEQ ID NO: 5959 - DNA, 900 bp, Zea mays
  Peptide Sequence Number=SeqID_49334
atgtctgctgccgactccctcacctccggccggggccgccgcgcggagcctcccctgccccgcctgaagcgtgtccgcgtttacttcgtggacgccgacgctacggacaccgactcctctggcaacgaggacgagcgcggcaagcggcgcgtgcgggaggtcatccacatcgacgtggagtccgcctcggctctgacgcggtcggcgcagccgctggtgctcccgaagaagcggccgctgccgtcccaggcggcggcggcggcgctcgtgcggcgacgctcctccggggccgggttccggcggcgcttccccggcgtccggctccgaccgtggggcaagtacgccgcggagatccgcgacccgcaccagcggaagcgcctgtggctcggcaccttcgacacagcggaggaggccgccgcggcctacgacgacgccgcgctccgcctcaagggctcgcgccacgtcgtcaccggcttccccgctgaggcgcctcccccctggccgcgcctggggctccgtcctcgccgggaggtccccaaggaagcggcggagggcgccgcggaagaggacggagaggccctcgcatcggccccggtcccggcggcagcgcccgcgtcactggattcgcaggcggtggacggcaccgccctggtctgcccgttctcgtctccaatctctgttctccgtcacgccgctgacgaggcgccggccgcacccgccctgccggcgttcgagttcctctattcggggcttggggagctcggcgacctcggctcagcgacggcgccatcgaaggcggtggcggcggagttcgactgcctgccgtggtgggagggcgaggacttcgtgacagtgacaggcctcacggcgtcagccggtgccgccgtcagcgtcatataa

SEQ ID NO: 5960 - DNA, 696 bp, Zea mays
  Peptide Sequence Number=SeqID_49335
atggccacagaaggcctcggcgaggtggtctgcgagtgtgacgaagtcgtggaagcagcagtgcacagaatggcggcgttggtcggggcggcatacgctggtgacgaggtaggagacatagctgggcgcagatctggggacgagcgaggcgacgacaggctcggcttctccgggtcgaagacgcgtgcggatctcggcaacgtggaggctatgacgcgtgcggatctcaagaacgtggaggagggcgaggaggcggagcacaaggaggagacggcgagcgtggaagcggcgagatcccagccattgaagtatgtggcgacctcgacggccaggaggagcaaggagatgacgacgagggccttgatgaagtggagaccaccacaccggcttcgcacatcggtcctccccacggccaccttatgcctggccgcacctgccagtgcgacggtggcggaggctagcgaggctaggcacccagcagtcggtgcgcgccttgaggagcagcagccacatggtctggttggtgttcttggaaggccccgttggagaacgacgagggcgaccgagaggccctaccgtcggcgtcaacgactggagatctggcggccggtggcgaggaaggactggagcgagggtttccttggagacctttctgagacggggaatgcgaatcagagatatgttaaagaaaactaa

SEQ ID NO: 5961 - DNA, 771 bp, Zea mays
  Peptide Sequence Number=SeqID_49336
atgaacaggtccacgccacccgagagcacaccaccccttttaggcgatcctttgccaggagggtacgtgccactctcgccatctctccactcccagtgcgcgattgtcttttcatacgtgcggccaacaaggaagctgggcgagtgctggcagcacgacaacaaggagacggttgggagatggcagcgcggttcgggcaaggccacccgagtactggacgaggaaaatgacgggctcgacgacgctgtcgagttgagggcgagctcgatgagaaaaaggactcggctggggctagcatggaggcgagaacgccatggagtccggggcacggatgagcacagtggacccggtgtccaagcgccgagccggggcagactgaagaagccgacgctaggaacggcggtcgagcgctttctgggcgtgatgcagcggcagccaattgctaggggaaggagacggccgtgggagagggagcccgcaggaaatccggcgccgggaatagagaacagggaagcaggggcgcgcgctcaagcagagagcccagcgcggtgcaggagcttgaggggtgcggccatggcaagggaaaataaaacttgggcgcagggaacaaaggggatggaagataggaaaccacgacgccatggaagctccagacccgggagcaggaagccgacagaaggttgcgcgcggggaaggagagagatccggttggccgaagggagaagcaggggcgagcaggggagccagcgcggctggggagagctcgtctag

SEQ ID NO: 5962 - DNA, 501 bp, Zea mays
  Peptide Sequence Number=SeqID_49337
atgaacaggtccacgccacccgagagcacaccaccccttttaggcgatcctttgccaggagggtacgtgccactctcgccatctctccactcccagtgcgcgattgtcttttcatacgtgcggccaacaaggaagctgggcgagtgctggcagcacgacaacaaggagacggttgggagatggcagcgcggttcgggcaaggccacccgagtactggacgaggaaaatgacgggctcgacgacgctgtcgagttgagggcgagctcgatgagaaaaaggactcggctggggctagcatggaggcgagaacgccatggagtccggggcacggatgagcacagtggacccggtgtccaagcgccgagccggggcagactgaagaagccgaagctaggaacggtggtcgagcgctttctgggcgtgatgcagcggcagccaattgctaggggaaggagacgaccgtgggagagggagcccgctggaaatccggcgcgggaatag

SEQ ID NO: 5963 - DNA, 723 bp, Zea mays
  Peptide Sequence Number=SeqID_49338
atggcgcctcccgtcgatgtggccggtccgcgccctaggttgggcgatgtggaggctcctccgaagtcgatgtcgagtctgtcttccgtggccgaggtcgagtccgagcccctgggtcgggcgaggcagagaccgtcggctgaggccagggcggagtccgagccctggggtcgggcgaagcggagttcgttgtcttccagggttgagcccaacccgagtccgagccctgggtcgggcggagcggagttcgccgtcttccggggcttagctcgagtccgagccctgggtcgggcgaagtggagctcgccgtcttccggggctgagcccaagtccgagccctgggtcgggcggagcggagttcgccgtcttccggggcttagcccaagtccgagccctggggtcgggaggagtggagttcgccgtcttccgaggctgagcccaagtccgagccctgggtcggacggagcggacccgagtccgagccctgggtcgggcggagcggagctcgccgtcttccggggcttagctcgagtccgagccctgggtcgggcgaagcggagttcgccgtcttccggggctgagcccaaagttcgccgtcttctgaggcttagcccaagtccgagccctgggtcgggcggagcggagttcgccgtcttccggggcttagcccgactccgagccctgggtcgggcggagcggagttcgccgtcttccggggcttag

SEQ ID NO: 5964 - DNA, 1134 bp, Zea mays
  Peptide Sequence Number=SeqID_49339
atgtcttcgtgctcccttatgcatcgtgtctttccaccttccgagcccccggatgggggatgtccgcggtccttccgccttgccgttggaggaacgcaactccgtaggagttggtaccattcagccatcgttcggcttcaaggattttcatcatgcagctcggctgcacccctccgctggcggtcacccaagacggtgacctccagtttgatggtgggggaaagcaagccgggctacggcctctgcccctccctcagcctcaaggattttcatcaccggtgctggggaggggagagtgtcgagttgggctgccgcgtgcctggctctcggacccgagtggcttcagagccgctctcggcgccggcttccgccacggcagctggaagaggttcttccgccgacgagatagccggggccgcctacggaccgacctccaactccacggccttctgcccgtccttgcctcatgagtttgggcacgggcgggggcctcctggcagcagcatccaccctgaggtctttgctgccgctgttcggcccctcggagcagaagtcgtcgtcgccgctgctggagcaggtgacggcgtgccgttcgtcggtcttctgttgctccgcaggccccccatcgagtggggttgttcgtacccgcggaggtggaaccggagttctgttcgtaatggcactttgaatgccaactcgcctgttggttgtctgaaccgcttcaccaagcgtgagtcgccccgtgtaaaggtgacgagtgagcatggacagaggcagagttggctcgaaaaagaagacttggtcggccggagcctggccgggtcgtccgttagcgggaccgacgccggaattgatctgccgaggcctcgggccgggctgatgtcctcggaggacagctggccgaggcctcggggtgaccagccgagccgcctgctcgagccggattcttggaggaaacccgggaggcgatggcccgggcgtgatgatgaagttgtccttcagagtggagatcctcggaccgcgtcgccgtccgaggctaggtcgaacctcgccgaaggtgttgttgacgccgagggtgctgcggctcccttcaactgtccagatccgagcctgcaggatcggattatcttgtag

SEQ ID NO: 5965 - DNA, 1074 bp, Zea mays
  Peptide Sequence Number=SeqID_49340
atgatgaagatccttgaagctgagggcggggcagaggccgcagcccggcttgcttctccccaccatcgaactggtggtcaccatcctgggtggaacatcggtgagggaatgcagccgggctgcctgatgaaaatccttgaagccgagcgatggctgaagggtgccaacctccgtgaggtcacactcctccaacaacaagacgaaggcaacacgggcgctccccgtccgggggctcgaaaggtggaaggacgcgatgcacgaggggagtgcgaaggcatggctaccgcccggggggtcgatccctttttaaaggcggctctccccactcgcgtcctcaggcgtcgcggactaagtcttcaccgacgtgctccagggtcctccccctacgacacgggggctgggtcccatgcgtcatgcaagctggcccggaacagaagaagccaaaccgccgctcgcggagcgtgtaaccgcctcgcggttatgagcactcctccatcctcgccgaaaccagcggttgaaagggcggaccgccatgcaggtggcgtgcaaaccgcaccacaggggcgcaccccttcgacttcgtcgcatccagcatggaggcccaggcccacacgtcatgtaaccggcgcgccggttactacgtgcaagaaactgcaccaccacttgcgccaatgccgcgcctcctcgactgcggaaccggtgccgcgactcgaggcaaccctgcgcgtggcccaacagtgccaatcgagcacatcgatcacgggggttcgaaggctggcccctcggaagggttcgacggccgccccagagcactcgggcttcaagctcattactgatcaggggttcgaaggttggcccctcgaaagggttcgacagccgccccagagcactcgggctccgcgcccactactgatcaggggttcaaaggctggcccctcggaagggttcgacagccgcctcagagcacgcaaagcgagggatgactctgggtacgtccgttacatggctgaggctcgggctacgctcccgaggtaccctaggacatttccgagaccagcaggagtgattttgtaa

SEQ ID NO: 5966 - DNA, 462 bp, Zea mays
  Peptide Sequence Number=SeqID_49341
atgtaccccctcgtggcatggtcggtccgagcccaaggtcgggcgaggcggagactcctcctgaggccgaggtcgggcgaggacgcgattcttcccgaggtcgaggtcgaggccgagccctggggtcgggcgaggcagagaccaccttccgaggtcgaggccgaggccgagccctggggtcgggcgaggcggagcttcctgttgcgcctgaggctggacttagctgttgtcagcctcaccctggcgggtggcacagtagtcgaagaggggcgagcagcgctgttttcctgtcaggcgagttggccaaggttgcttcacaacgaagcctgcccgagctgggctttgaacgagtcgagggtgcgcccgctgcttgagaaggccctcgggcgaggcgtgaattcgcctgggactactgttcccgcccgaggctgggctcgggcgaggcgagatcgcgtcccttga

SEQ ID NO: 5967 - DNA, 1110 bp, Zea mays
  Peptide Sequence Number=SeqID_49342
atggacggtgacgaagtcgcgtcggggacagactgcatcgttatctcaggtacaaggctaatgcccagcaagcgtgaggtcaacgcccgacatgtcccccgctggggtgccggcgtcgtcgactcgctcgacagccgacgaggtgccgcctcctgcctggccacggttgccccgcctcctcctcctgtggcgaggaaggtggcgggacaaacccggatgctgctcttccaccatggggggaagacgtcgccgagtccgccgccgccgggcgagctgacggccgtcgttgtcgctgttgcgctgcgggggaaggagtaccatgtcgtagctgccgtcgagggacatgaactcgagactcccgaaacggagcagcgtcccgggctgaagaggttgctggagactacccatctggagctcaacgggaagttgttcgtcaacacgcagcaggcccctacctggcgcgccaactgtcgacgtttcgaccccggggggtccctgggccgacaaggggatgcgcttgcagtaggggttacaagcgttcgcgagggagagagagcgagcttgttcgtcagcccgtcctcccacgcgaccaccctctcgtatgtgggccctggaccttccttttatagatgcaaggagatggtccaggtgtacaatggggtccgagcccaaggtcgggcgaggcgaagactcctcctgaggccgaggttgggcgaggacgcgattcttcccgaggtcgaggtcgaggccgagccctggggtcgggcgaggcggagaccacctttcgaggccgagggcgaggccgagccctgggatcgggcgaggcggagacctcctcctgaggccgaggcccaaggtcgggcgaggtggagcttcctgttgcgcctgaggctggacttagctgttgtcagtctcaccctggcgagtggcacagcagtcggagaggggcgaacgacgttgttttcctgtcaggtcggtcagtggaagggcgaagtgactgcggtcacttcgaccttgccgactgaggcacgcgagttggccaaggttgcttcacaacgaagcctgcccgagctgggcttcgggcgagtcgagggtgcgcccgttgcttga

SEQ ID NO: 5968 - DNA, 696 bp, Zea mays
  Peptide Sequence Number=SeqID_49343
atgccaccgccagcagatgccggggccaggggccgcgcccgccgccgctgtggccaggggccgcgtccgccccgccgggagggccgcatgcctcgcactcaccgcgacggagaggagagcgcgcccgccgctctcaccgcgacggagaggagagcgcgcccgccaaagccggggccagaggtcgcgcccgccaccgctgtggccaggggccgcgtcctcgcccgcgtcgtcgagtgggggccgcgcccgctcgcgccggggggccgatggggcagcgcgccgccatcggggctgaggccgggggccacgtccgtgcaggggccaccctctccggtgccatgcaaggccgacatcctccccttgctccaggcatggcgcgcagagcccgtcgggggagggggcgctgtgaccgtgggcatcgcagggacgggggcgggggcagaggcagcacgggcgtgggccgatgatggcggggcagcgatggatagtgcgatgatggtggggcggcgatggaggtttcctgggattgcgcgaccaagagcggggcatggagaggatgtcggagactcggaggcagaaccgtgcaccgcaccactgtggacgcctacgtctgacctgctgactggcagactaaccgtcagcctgccccaggcggttcaaccggtcctccacagccaaaatcagtccaacggctag

SEQ ID NO: 5969 - DNA, 432 bp, Zea mays
  Peptide Sequence Number=SeqID_49344
atggccggctcggccgccccgcccccctgcctcgcccggctcggccgccccacggccggctcggccgccccctgcgccgccccctgccccgccggttcggccgcccctgcgctccgccggttcggccgccccgccctcgccagcccggccgcccgcagccccgcccgcgccccgcctagggccgagaacgatccggtcgaagagcccgaggaattcgcaggagaagcccctgagcagcagtcgtttggtggaggcaaccgtgctcacggttatgagcggccaagggagctccagagattagtgatacttgatcagagacattgtggtacagatggttatgagattgatggttccggttatgattatggtattggagaagacgaagctgtggaaggagacttccaggagttccaagattacgacgagttctag

SEQ ID NO: 5970 - DNA, 573 bp, Zea mays
  Peptide Sequence Number=SeqID_49345
atgtcagaccttggaatgtcaactacaagtgatgtcactaaatgcaaagaatgcggtgtgttggcaagtcaaaacagcattataaataaaacaactgatgaacagacattcaagacacaaaagatgcacaacccaaaccaacagacaagtgaacttggaacattcattcacaaaaccatcgccaccgtgttgtatgatcctcgtataacacattctcttatcagtgcccagtttgcaacaaagtatggtatctttaagtgtcccttaagatcaagaaagaccatcagtacacctgaaggaaaaatgttagtaaactacatatgtccgaaaatgatgaaccccaatggaaatgaagtaaatggtgccaacaacaatattcctaccttaacaactatgaacgagaaaaatgagtcaccgagatattcgatgaatggaatgaagaacaacaaaaggaatagaaaaatgtttggatacatgattagtccaccacaagcaaaagccacgaaacacatagatacccaaacagaagaatcaagtcaggctcagctacatgagatacagacacccaaatga

SEQ ID NO: 5971 - DNA, 101 bp, Zea mays
  Peptide Sequence Number=SeqID_49346
gtggttatgagatcgatgataaaggaaaggagtatgatgctggagaagatgaagctgtggaaggagacttccaggagttccaagattacgacgagttctag

SEQ ID NO: 5972 - DNA, 441 bp, Zea mays
  Peptide Sequence Number=SeqID_49347
atgggtgatgcatggcctcagtatgagatgttggctcggaagaggaggtacgtaccaccgagtatgcgactgtcccatctgtacgccgcttcggttgtcgaatattgttttgaagtcgtgtaccatagggatgtggctgtaatgctgaagcagcaggaggcaccccatcatcaggagccaacaaatcggcagacgcagcagcaccaggacaaacgtgtgcaaaggtatcgggcgccagaggatggagcaaatctggagccggtggagcagatggatcaggggggcatggcgatcccaatggcatcaactccaggtggagtggatgctggcatggatgaaggagaatgtggtggtgatctagaaaaaggaaagacaccctcatcaaagattacatcacgcgaaatatatacacgacccgaatcaacatcaagacacttgtag

SEQ ID NO: 5973 - DNA, 1119 bp, Zea mays
  Peptide Sequence Number=SeqID_49348
atggctgctactcgagggatgaacctctttttaaaggcagattcccccgctcgcgccccgaagcgtcacatgcaaagtctcccccgatgtgcaccagggttcccatcctatgacacgggggcatggcctcacatgtcatacagctgggccgctggtcccaaagcgcgaaaaaggcgaatcgccgcgcgaggagtgtgctaccgccccgcggtaggtgcgctgcttcatcttcgccgcgaccaacggcccaacctcctacgtgggggcccaggcccacatgtcacgcacctggcgtgccggttcctgagtacgaagaaggcgaaccaccgtgtgaagagcgcgcatccgcctacggtagtgcgcctcttcgcctccgccaaaaccaacagcccagtccctggcataagggcccgggcctacgagtcatcctccttgggcgccgcggtatcgaggcaccccgcgcatggcccagcggaaccatcaagtacggaagtcatgggtcagtcagtcgcggggacaggcgtgacatttggcgcaaacatgcagctcgttccctcttctgaggcgggcccgggggccactgtcggtaccctgaatcaggggcaccccttactacagtatgaagacatggtgcccgtgcggcaatctctagccgcgcggatgcaatcagttggaccggacctccacgaggaagcaccagacccctgtacgcacagcccggacccccgaatacggtccgggactcccaaagaggacacgccgtctgtccaccctgctgacaggcgatgtgccgcctcagcatttattgtgacctgtccactcagctggcaggcgggagacccaggccatcctgtaggcggcgtgcctgtccagtccattgccaaacagtacgcccgtgctgcaaggtgcattgtgtccatcatcacttatgcattgccagggaagtttcccctgcacgccaataccacgcagattgcggatgtcagggtgcaagaagattgctccagcaactccaagtattacatccattatattcctgggcccacatgtcggggctcagtactcttggttgttgcaacaatgatggtgtgcgtcgtaccgacggagtacgacggttag

SEQ ID NO: 5974 - DNA, 219 bp, Zea mays
  Peptide Sequence Number=SeqID_49349
atggcgcgcacgctgaggtggtcgccaccgctggggaggctgctcggcgcagagggtctagtctgggaagccaagttgtgcgtccggaccccctggacggtggttctagatactaggacacccgtcacagagtggtggagcgtgcaggcccacggactaggtcccgaccctgggttcccatctgcgtttgatgacggagtcctcgtcctcgtgctgtag

SEQ ID NO: 5975 - DNA, 567 bp, Zea mays
  Peptide Sequence Number=SeqID_49350
atgaacccagcatcagggacagatccggcaggcaacccaacatcctgccgcgacgctagagcggggccgaggcagagcacaaacaaaaggggtggcatcacatcagacagcgcgatctacgactacagggatcctgccgcgcatatgcgcctgcgatcaaggtggtgggctggtggcgaacgggtcgtgcgatgcgtacctgctcttcctgttcctggacgggacggggcgcggcggacgccggtacccaggcgaagcgcggggcggaggaggtggttggagatgaagggtatatttggttgggttgtggctgtagaaaaagctattgtgggctgcaccaaaaggacgcaccagcacagcaagcagatgagaacgaaccctggaagggcgtccttgctcaatgaatctgataagtcaaacgaaatggcagcaattggagagagttccaggtccatgcaggaaaccgtatttgatacaatatcccagatcatgccactgacaagcaagcaaccagaactaccatctgtagggcatggcacattggagcacaacattgaaatgctttga

SEQ ID NO: 5976 - DNA, 636 bp, Zea mays
  Peptide Sequence Number=SeqID_49351
atgtcgaaagtgacctactcacttcacgcattgggtgctacaccaaacgacagggctatcttgccgacggggaaggtcccagcctgctaccctacagttgatcaccatggcgtctgtgtgtggagcgctgcgcatgtcaacgtccctggcgtcgaaaaggatttgggtgatgcggaggcggtgctggtagaacctacacctcttgatggtgctggtaagcatggttgggtggatgctggatttgctcgttgtggtagggttgctggtggtgacaatcccttgttgggtgcgcgctatcttcgccgtgaaacaagcaatagaatctgcgcagctgtagtgtccatctgtggcctcttcctcttgcgccattgctgtggccttgggggggtattcctgacgatgggtggcctccccggctgggtgctgattggctatgttgtgcacctgctgatgattgcgattgtcccggccggagtctggctgcgccgtcctggtccaggttctgctggactacggagggtccttgggctttctttgagattcaaccttgcgttgatggagcttccaaacctggcatacttctcaaataattggtatagctcctgtagcttcttgggtgggtccctgatgcaatga

SEQ ID NO: 5977 - DNA, 885 bp, Zea mays
  Peptide Sequence Number=SeqID_49352
atggagttgcagcctggccataccgtggagtttggtacatcgagaatttcctcggtctgcatcctggagatgcagtggcttggttacgttggtgatggtgttgggcgggcaccgtgtgcagaggaggttcctgagcctgaaggcgagttagtggtttttgaggccttttttgtcgccggtcttcgcctccctacacatcgattcgtggtggaggtgttgcgaaggtttgaactgcaggtccaccagttgacacctaacgccgtggttgcacaagcgaagatggcaaccctaggcgtccagttggtgcgaagtcctgcccttgtggtggatttatgtggtcgcaacccggtcgcgtttgtgcgtgaagtggaggccgaggccgcgaagactgtaggaaagtatgtgccgaagacggaggctctgaggagttgggatatccacggttcaaatgttaggttgaactgcgtttttgagtttaaccgtctgtcgtatgccggctacccgggggacgacgatgccgatgctgttacctacgtggttcccggggagacgatgtcttcgcccgagctccgggaatcttccgcgagaatgccgaagatggagaaggatcgtcaagacgcgccacggaaacgtcgggcattcgctagggttggggacccgaggcgcgaaggcgaggtcctgctggtgagttttttccgcgaagtctgtgtttctaccgtgaccaatgatgtaggaggtgagtccgggcaactggctgttgtcccggcaccggtggctgctggtccggtggccgtggcgaagggatcctcacaggacccatggtctaggttctacgccagcggcgaaattgcctcacccggcgccacgaaggacgtggccgcctaa

SEQ ID NO: 5978 - DNA, 78 bp, Zea mays
  Peptide Sequence Number=SeqID_49353
atggggcaaatttcacatacaggatgggaagtgtcacacccgggttttaggggcaccaagacccgggcgcgaacataa

SEQ ID NO: 5979 - DNA, 1131 bp, Zea mays
  Peptide Sequence Number=SeqID_49354
atgggctccgaacttagcagtcttttgtgccaggtagccgccttcgccgagcacattgcatcgggggcgttgacctcggagttttctgccgaaaggcgacggctcgaggggaggattgagcgcctccgaacgcagcatacagaggctgcgcgagacaagtcggtggtggaaaacaagagccgcaatctgctagaaaagatgtcggcggcggaggttgagaaagaggacctcaaccgccggtttgcgacggaaaaggaagacgcggagaaggcccatgcagaggcccaggctacccgtgccgatgccaacctcaccctcaagcggtggagtccaggcagagaagtctgcgtggctatgtggacaaagtggaggcctccacccgcactggggtcgaccgagcacacgcgttgctcgtggacgcgtaccggtagcttgggatgcaggcatttcgaagtctttgaccgcacaaacgaggacttcgactgtggaatcttccaggtcaaagacgaggtgctaaagtggtccggtggggcgctttatgataggatgtggggccctcacggccgcgatactttccaggagaggtctgaccgggcgctggagcagaggcgtggaaagctcggtgacccggcagaagatgcgaggacgggggttgaagagcaaccggcgccactaactggccctggcggagaccctgcagtggcagctgcgccagctgacgaagaccctacaacgtcggctgctccttggcaggttccgacgtctgggcctgcgcaagcaacccatactgatgatattaattttgtggcggctgcgaatgcagtgcctgttagtgaaattttgtctggttctgaaactgggtcttggtcatctgacgggggtgagtttgggagtcctttttcgtggactaaggagtctttggatgaggatttatattattttgctgcattagatgtggccacggcggagtccttgccgcagcttgaaatgtgcgaagcgtctgctcctcggctgggcgatgaccgaagagcaccgtcggcgaagggtggtgtcgaagcacaatgttggcgagatgtcgtgaagtgggaggcgtcgacatatgggaatggaacgatcccgtcttcggcttga

SEQ ID NO: 5980 - DNA, 435 bp, Zea mays
  Peptide Sequence Number=SeqID_49355
atgacccaattggagacctggaagctcgggtggagcaacttcggtcagaactacgtcataggaataagacacatgccatcacagactcgcgcacatgatggttcggggacatcccgcggtggggaggacactcccaacctgccaccattaccaccgactttggccgaggctatcactgccctggttaatgccaccgctgataagacgcgcttcttgcgcgaaatggcgggcaaccaattccaacagcatggaggcagagttccccctcaaggaccgcgtgatactacttatttggatttctctgagactcgagagtcgctcttcatcaaagaagaggaacctttagaagccgatgaatgggtgagagtaatggaacagaagtttgggttaattcgatgcatgaagacgcaaaagcccctattcgcaactcagtag

SEQ ID NO: 5981 - DNA, 198 bp, Zea mays
  Peptide Sequence Number=SeqID_49356
atggcagcggagatccaggataccggcggcaacatcggagttctgttcaggcgcggcgcgaatctaccggagattggggatgacatgtgggcccaacgcgtaccttcggacttaaatcaaaaccacagcgtgaagatgcacaaagaatatgaaggatggcgcagagtcgaagctatgcgcaggggagcttcggcatga

SEQ ID NO: 5982 - DNA, 393 bp, Zea mays
  Peptide Sequence Number=SeqID_49357
gagttcctcagtactcagccaccgttgttcactagggccgaggacccacttgatgctgatgtatggctgagggtagtggaatccaaattcctgctactccatggagtttgttcagaggccttcaatgacctgtgccagtatgccggatatcatgcagacactgacgagaagaagagggacaggttcaggagggggctcagcactaagctccacgaccgtctcaacacagtcagggccaacagctataatgagttagtcaacatggccatttctcaggaggactgtatcacaacttgtcaggcagagaagaagaggaagacccctgtggcaggaccttcagctcagccacaacgcttcaggatcgtgtctgacactcagaataggggacaatag

SEQ ID NO: 5983 - DNA, 441 bp, Zea mays
  Peptide Sequence Number=SeqID_49358
atggcgtggcatggagctgtcccaaacaccaacacgacggcgtgggtcgggactgcgcagttcgaacgaaacacgcgatttggaggggatccggggctgctgttttgtgggggaggagtggaggttgctgcggctgcattcatggacagggagctgtgttcggccatgaacaagaccctgtgcgctgtttcatggaatgggaagcgcgagcagaggaggccggctggagcacagggagtagggggaggcgcctactggcttaaggaagaagaaggggaggagggcttccagttgccgtgcctgaagggggcgccatggaaaggggctcggctgctcgagctttgccggcgccatgggagtcgcagggaacagagcgccgactggggaagaagccagagagagagctcgcggcgagcagcagcaagggaaatggaggtctga

SEQ ID NO: 5984 - DNA, 726 bp, Zea mays
  Peptide Sequence Number=SeqID_49359
atgggcgggggcctcctggcggcggcatctatcctgaggtcagcgttgccgctgcttggcccctcgaagcagaagtcgtcgtcgtcgccgctgctggagcaggtgacggcgcgccattcgtcggccttccgttgctccgcaggccttccccctcggagtggggttgttcgtacctgcggagggggaaccagagttccgttcgtaatggcatctcgaatgccagtgttttttgttcattgtggctgtcggggcctgaacataggcggagtttggctcgagaatggggaacctggttgtccggagcctagccgtgttgtccgtcagcagagccgacgccaaagtcgatcagccgaggccctcgggtcgggctggcgcccttggaagccggttgaccgaggccccaggggtaaccggccgacccgcctgctcgggccggattcccggaggagtccctggaccgcgtcgccgtccgaggctgggtcggactttgctgaagacgtcgtcgatgccgagggtgctatggctcccttcggcgtgaagacccgagcctgcaggatcagatcgtcttgtagcgatccgctttccgaagtagtcaagaagcacgaaagaaatcctgctaaaaagagatcctttttcgaggaaaaattcgacgcagagggggtctccccccttttagcccccgagggagggtcgggctttgccgaggctaggccgacccttccttga

SEQ ID NO: 5985 - DNA, 488 bp, Zea mays
  Peptide Sequence Number=SeqID_49360
ggtttccgtccaactcccccgccccagccgggggcgaccattccccggccttctcgttcagcaactggccgctgacgcagcgcagcgggacgcggtggtgcggcgcctcgtggagaagctcgcgggagacaccgtcctctgcaagcgctacgacctccgtgccggccgccgacgccgagcccgcggcgcgcgccatcgaggccgaggccttcgacgccgtggccgccgcgggaggcgccgccgcctccgtggaggaggggatcgaggcgctgcagtgctactccaaggagatcttgctccacggcacgctccacgccaccatcttcgaggccgagtcgctctccaacccgcaccgcgccactggcggcgcccccaagttcatccgcaagtcatgccaactcgcgatgagtgatgcggttagtacagcagacagcaggcaggtcaatcattctatgaatttcatgaattccaccactgcctgcctctag

SEQ ID NO: 5986 - DNA, 2037 bp, Zea mays
  Peptide Sequence Number=SeqID_49361
atgagatggcggcgcgggggccgctcgtcatcgcgtctccttcagcgagccctcctcttggccgccttctccgctgcggccctcatcctcctcgtactccagcaccaccacggtcctaaacgcccaaacccttccgccgcgtcccacgcccgcgactcctcagacgagctcctcgacgactcgcctcccgcggagcgggatccggatgccagtgaccctgcggtagttgttgacagggccacgtgcgcaacggtggagatgatgggggaggaggccgctggtgctgggcggggctctccggagcaggccagcctgcgggtccgcgagatgatccggcgccacttcgagctccacgactcattgtacgccaggcctaatacatttggtgaacttatgcgagctattatatctccatccagcaaagtccaagaagcagttgactgggctttgaaggaaccaagcctgcggcagaggggtataacctcgccggagaagacagctatccctatggaccgaaggtccataacacctggtatcagctccaggttatcctcaccaccaccagccgcccatccctcaccaccaccagtcgccgcgccatcagccaccgcaacgccctcccacccgccctctccaactccagatgcattcactcggctcgaagagagttttggccgtctcgaagagaagtgggatcagttcgttgtgatgttccaccgctacaaggagaagacagagaaggaactccaagcagcggtgcggcttcaggcggcagcgcgagggttcctggcacgccgccaggtacagtcccttcgtggggagaagcaccttgctgtggcctccagggccaccccatggtcgtcatcacatgagcaggccgtggtgcgcctgcaagccgcagtgcgcggcttccttgttaggcgggcggtgcggaagctgtacttgctgatcagctcatcgctgcaccaactcgcaccctgcgtgcccaaccaccaggtctcgtctatactttttgaaccccctgcagaagtcgagatctgggtatgcagcccccctgcacggccaaagagggtcgtctccttcattcgggcaactgccttggtgctggacaaacccaacataagaacgggctggttcctccttcacctttcatccaacgtgaagtccgtagttcagctctttccttgggatccaggaggacaggaggacatagctgcagttcaaatttatattttagtttcacaattattttgtattttcgtcttaaataataaagaaccaagcctgcggcagaggggtataacctcgcaggagaagacagctatccctatggaccgccaggttatcctcaccaccaccagccgcccatccctcaccaccaccagccgccgcgccatctgccgccgcaacgtcctcccacccgccctctccaactccagatgcatttactcggctcgaagagaagtgggatcaattcgttgtgatgttccaccgctacaaggagaagacagagaaggaactccaagcagcggtgcggcttcaggcggcagcgcgagggttcctggcacgccgccagctgcacaggccaggtacgcagtcgtcactggagcacatcgtcgtgtggggaccacctacgcacaactcattacagcattggctgcggcaaacaggcatggtcgagagccttcaggcaccaacttcacgttcctaagtagtgtccacagcaacttgctggtggaggggctgtcgacgcaggttggttggggccatatctggaacagatatgctggtcctctaagctgtcggcgccagccacaccaatgcgccttgaccccgctcctccctcctgcttggtgggacggtcgatggcaaagccctattcccagggatgtgaggaggctactggagtacggtgtccggttatcagatactggggaggtggacgagaggcacctgttgtcgtactgcaggtcaaggaaagatcatgtgaagaggttccatgtccttccaccatacaagaacccggcacgactgtag

SEQ ID NO: 5987 - DNA, 501 bp, Zea mays
  Peptide Sequence Number=SeqID_49362
atggtgtctccggtgagctgcaagcgggtaatccgagtggacgtccgtgccccgttcgttgggggtcggctaggggcccagaggcacgcccaaaagtacctgcggcaactggcgcgccggttgcttgacgcgtgggcctgggcttccaagctggcgtgtcagaagtcggagaagcgcgtccacctggcgcggttgcatgccgcctgcatggctgcctgccccttccgcccgttggtctgggcaaaagtggggggtcgcttgggagggccttggagcgtgtcgccgtccgaggctgggtcggactttgctgaagacgccgtcgatgccgagggtgctatggctcccttcggcgtgaagacccgagcctgcaggatcagattgtcttgtagcaaggtgatgagtgaggtatccgtatcccggaggcgtaggagtccctcggctcggtcagccttggctgcttacgtgtactccgtcgtttccaggatccgctttccgaagtag

SEQ ID NO: 5988 - DNA, 981 bp, Zea mays
  Peptide Sequence Number=SeqID_49363
atggcggctccccctggatccctccctgcgcggcccctctcccgtggatggtgccgccccttcctgcagcacgtcgtgctccctcccctggcgccctcgtccccaacgccggaaatgccgctgctgctccaccagccgctactgctcctgaacgccagtgccgaccaccatctcccatggcgcaggagctccccaatctcctcttgccagggcgccgtcgctgagctcgccctgccccagccatggacgccgtcgggccacccgtctcctatctcccctcgccctcatcctctggctgctgccccttcctattcctggtggctgagtcttcttccatggatgctggctgtgctgccctccctggtgctcacctctgccccctgcgttggatggccggttgctcctgccctagattatcctcatgcccggccgcggtacaacagcaacagccatgaaaccccatcgtgtcgcgccctcgacgtgttcgacggaatatcgcagcacgtgccgacccgatctgcagccctggttgcgaggacgtcgaaccccggtaatactggtgttgctgtcatgctttatgagcccagatataagcacagtgtcagcagactagaaagggagcctggggttaaatttaagcatatctctgcgccacaacctactgatgtagcacaatctgctggcagtgaagctgcagatgccattgcgagtgtgtcagacaggcagcaagcagagcagttgctaagctcttccagtctgtctgcagctgacttgcttgtcaaagcacttgcgaaggcagtttacactacatcttcaaactggcagaccgatgtggtcacctggtttgacgtcggcaacgtggtcatggtgaccggcgggaggaacaccgggtgtgtaggagtgatcaagaactgggagaagcacaagggcatcttcgaggtcatcgacgtgctacttggagtttttgcatgctatgtctag

SEQ ID NO: 5989 - DNA, 96 bp, Zea mays
  Peptide Sequence Number=SeqID_49364
atggtggggatcactgcagcagacgagttcgcggttttcctcttgggcgccatcttgtctctcgctggcgaaacagagcaggagtgttacttctaa

SEQ ID NO: 5990 - DNA, 516 bp, Zea mays
  Peptide Sequence Number=SeqID_49365
atgggcaacaacaacaagcgcaagcgcgagccaactcctccatcggaggattttggtgactcggagtactcagaggaggagttctcctctgagtctgaggggtctccggctcccatccccctgcgtgagtcgtctgatgactcagacgactcccaggggctcgcggcggaggtctggacgtacatccgggccgtcgagcgctccggctcgagggctcggataagtcagagtactcctcggatgaggaggactcggacggtggcggcgaggacgaggacgacgacgacgaaggcgatggcggcggtgaaggtgacggcagcggcaggggcggcagcagcggcaacaaggacggtgacggcggcggcggcaggggcggcagcggcggtggcagcagcagcaggggcgacagcggcggtggcggcaacagcaggggcagcaacaggggcggcagcggcggcggcagcaacagggccagtggctagatgccactggtcattagatgttagtatagtatag

SEQ ID NO: 5991 - DNA, 519 bp, Zea mays
  Peptide Sequence Number=SeqID_49366
atgacaggggatcgggaaaggggatatttcgaaaggatccttctcagcgaaggaaacgggccccgagccctcctactgatcaggggttcgaaggttgcgccctgtggggttcggcaaccgccccagagcactcgggctccgagccctttactaatcagggggtcgaaggttggcccctcggaagggttcgacagccgccccagagcatgcatagtcagggatgaccctgggtacatccgttacatggccgaggctcgggctacgctcccgaggtaccctaggacatttccgagaccagtgggaacgatttgtaatggaatcccaccgaagggaggcaccgagccctcggaccctatcaaatgggtccgggtccagcaaatcacctgcagggtaagactaacaatagtaagtcgtggcctctctcgagttcagcctcgggcacaacagggaggtccgcctcgcccgaccctaggcctcggcctcagcctcggcctcggagaaggtctccgcctcgcctga

SEQ ID NO: 5992 - DNA, 429 bp, Zea mays
  Peptide Sequence Number=SeqID_49367
atgggcaagagtaacaaacgcaagcacgagctgactcctccatcggaggacttcggcgactcggaatactcggaggaggagttctcctccgagtccgaggggtctccggctcccttctctcccccggcgtcgtctgacgattcagacgactcccaggggattgtcgcggaggtctggacttatatccagaccgtcgagcgctccgggctcgagggctcggatgagtcggagtactcctcgaacgaggaggactcttcgaactcgtccgaggagggcggcggcggcgatggcggagacgaagacgacgacagaggcgacgatgacgatggcggtgacgacggcagcaggggcagcaagggcggcgacggcggcagcagcaggggcagcaacggcggcgacagcaagggcagcaacaaggccagtggctag

SEQ ID NO: 5993 - DNA, 294 bp, Zea mays
  Peptide Sequence Number=SeqID_49368
atgaacaagaacacaagagacacaagatttatcccgaggttcggtcacaccaccaaggtgcactacttcctcgttgaggcgcccacaaagagctgggtctctttcaaccctaatcctccctttgccgaccacaaaggtcctgacaccggttcaaccgcctgggggtcagactggcagtcagtctgccagtcaggaggtcagaccggtcaggtgaccctgacaccggttgaacctcccctaggaccggttcaaccggttttgaccagtgaggtccgaggaaaataccccggctga

SEQ ID NO: 5994 - DNA, 504 bp, Zea mays
  Peptide Sequence Number=SeqID_49369
atggatgctgaaaatgatgtgactcaagaatggcttgatagggtgaagatagcaaggaaagggcttcgaggaactaagcgaaggaatcgtcgtactataaagggggatccaaaaggaaggttggtgttttgccaaagctcaagcctctatattcaaaagctattttttgaaaaccaaaaatctctttcaaattctatggttgaccgtgctgaacttcaactggggtccaggcaggttcaactggggttcagggcaggttcaaccggtgtccagggaaagttcagccggggtattttcctcggacctcactggtcaaaaccggttgaaccggtcctaggggaggttcaaccggtgtcagggtcacctgaccggtctgacctcctgactggcagactgactgccagtctgaccccgaggcggttgaaccggtgtcaggacctgtttttgcagtctgacctgcagtctgccagtcagactggcagactatctgtcagcctgccctag

SEQ ID NO: 5995 - DNA, 237 bp, Zea mays
  Peptide Sequence Number=SeqID_49370
atggagacccgtgcactcttgttttgcttaggaatcagggagaagaccgaaagggaaaaggatttgaacatgctggattcggactgcagaagaacaccaacttgtgacggtcaccacgatctggacgagtgccctagtggccagggtgtcacgctccacaagatcgtgacagccataggaggtggtgtatcggttgctaaggcgcagcgtcttgtgaaggctgtagtcgggccgtga

SEQ ID NO: 5996 - DNA, 372 bp, Zea mays
  Peptide Sequence Number=SeqID_49371
atggcgagagtagcgtgtaccctccatggcaagaggctagacggtgctgtatctgtgctctcggttggcgtgaacccgatctgtcattggcgctttgccactagccttactgttgctgctgccgcccttgccgtcgtcgcggcccctgccgccgtcgtcgccgtcatcgccgccgtcaccgccatcgtcgttgacgtcgccgccgctcccttcctcgaacgagtcggaagagttctcctcgtccgaggagacctccgactcatccaaaccctcaagcccggcgtgctcgatggaccggatgtatcttcggacttgaatcagaaagggagaagctcaaaagatacgaaggttgacacagtgccgaagctgtga

SEQ ID NO: 5997 - DNA, 498 bp, Zea mays
  Peptide Sequence Number=SeqID_49372
atgacagtcccatcatcgtcacccagagggccggtctcgaatcatccgcctgaagaaagctcttgtattgttgcgccatctggcagaatatcatttctctgctctgacggaacaattggagtgtacaggcaattttctgagtacccaatcctgctcgctgagcaccttaaaaccgaggacgactattatgtcatgctccccacccaaaatcaagctcttctctcgcaactagaccaacaagcgggcgtcccgatgcccacatatgggatgccgcctctggactttgcactgtcgatgccaatgttggcgcctccacctccgcatccgtcacaattccctatgggatttcagacaccaccggcttcagttgccgcacctagagatgggtctggtcaagacgacacatcgcattcttgggtgaacaaccttttcaacacgcagagtccagtcgaaggaagtggctataactcgaaccaactaggtgatggatatgagtga

SEQ ID NO: 5998 - DNA, 390 bp, Zea mays
  Peptide Sequence Number=SeqID_49373
atgagtggaggagatagggctctacataccaaggaggacccgattggttcggaagaccccctttccccgagttcaagtatactttgttcgctcaatagaggtccagatacggatgagaagaagagggacagattcagaagggggctcaacattaagctccgggatcgtctcagcaccgtcagggccaacagctataatgagttggtaaacatggctatctcccaagaggactgcattacagctaggcaggcagaaaagaagaggaagacccccgtggcgggaccctcagctcagccacagcgcttcaggattgtgtccgacacccagggcagggggccccagcagcagcaagggcgatgggtgatccgacctcagcagcagcagcagtag

SEQ ID NO: 5999 - DNA, 234 bp, Zea mays
  Peptide Sequence Number=SeqID_49374
atgcccggtttaaggaaggagaaaaaaacactcgataaactcaccgatcaacctggaaatctgataccaattgatgaagctgaggtgcccgatctttcggcgagtagagataattccgatttggcggaagatgacccttgcgatccgactacgacgagcaagcccgaggcgccaatgcaatcgctgaaccaactccctgtggttaccgaccttgctgatgcgagatcggcctga

SEQ ID NO: 6000 - DNA, 357 bp, Zea mays
  Peptide Sequence Number=SeqID_49375
atgcagattattgaaagaaagtgcgaggctcaaaagggtgctgggataaggagaaaaaaaacactcgataaactcaccgatcaacctggaaatctgataccacttgatagagctggagtgcccgatctttcgttcaattctcttgcacgggcccgagtcactggcccaggtggaaggggtggcgcctggactggcgaagacggtgcctgggctggagaaggtgctgctggtgtagatgtactcgtgttggtgttgatgtcctcatcacatgagatatccactctaataagatttgatagcatccaaaccctagaagtgtcagaaaccctaataaacccctggaaaaccctagactga

SEQ ID NO: 6001 - DNA, 237 bp, Zea mays
  Peptide Sequence Number=SeqID_49376
atgacgacattagatgccgatgaggacagcgatcccatggaccagaggagtataggcttcccgctcacttcccacaagcaggatgtcaaacacatcaagaggtaccttcgtttcactccagagttctttgtgtggttattcggatgcaagttttatgggatgccacttggatcgcaagtccacttctgggacttgtcattttatgggatctgcattggtttcctggtcttttcgtaa

SEQ ID NO: 6002 - DNA, 339 bp, Zea mays
  Peptide Sequence Number=SeqID_49377
atgaaggaaattacggaatgcgatacgaccattgactgggccgtaaactcgcgctcgttcgcctgggattgtgaagccaaagctctaactcgagtagaaaaacttagcacatctctggaaaacctgcaagagtattgcaacaccctgcatgaagacttgcacgtattgtatgaccggctgcacccaaacgtggcaccagaagttgcagcaatgggcgccggaccatctggaacaactgatggggagttggacctttttggggcccctccttccatgaaccttgtagatgaacggtctcttgaagcggacagtggagcagctaaggacgaagaggattag

SEQ ID NO: 6003 - DNA, 201 bp, Zea mays
  Peptide Sequence Number=SeqID_49378
atgacgattctaggcgaggcagtgactgggctccggcgtggtgcatcgcggggctcagtgcggcgcaaggtcgtggcggagcaccagctcaccgcgggcggttctctaggtagtgcttgggcacaggcgggcgagaggaggcgagctgggcacagtctgcgaatgggggaggtcgaacaggggagagagagtgggggatag

SEQ ID NO: 6004 - DNA, 297 bp, Zea mays
  Peptide Sequence Number=SeqID_49379
atgacaaaggaggccagtttcagaggccacagcacagctcacagtcttcatgacagcagcaaagctccgtcaggccaccagctccaaggggccgaggcggcaggggcttcagaggaagatatgggtatcagcccaggaaaatctattgcttattcggtggtgaagacaagaatgaaatatatcttcttcacagatttacgaagctcaaaagtcgttcctaagggagcacagcataagttttttgctcaaaagtcgttcctaagggaatgcagagccagaattgatgaagctacataa

SEQ ID NO: 6005 - DNA, 107 bp, Zea mays
  Peptide Sequence Number=SeqID_49380
atggcggcggccatggcgccgagcggcgaggggaaggggacggagaatgtgtcaagtacattagacttccgtgaggggttcaaatcggataggaggacaacgacgcg

SEQ ID NO: 6006 - DNA, 237 bp, Zea mays
  Peptide Sequence Number=SeqID_49381
atgcccctgcacgcaactgtgccctctgctcgaattcctgttggccgcgccccctatttctccgggccggtcaagttctttccaacctccccacgtgttgtctccgattggtgttcgcaccgacaaaagcattctaaaaagatgtggagaagcaagcccgtggtcgatgccccaagtgctcgacgaaaggctagaacaagaatcatcgctgtttatgcgaagttctacttaatatga

SEQ ID NO: 6007 - DNA, 426 bp, Zea mays
  Peptide Sequence Number=SeqID_49382
atggagactttcacccaggagcatgtcattggaattccattgacttcgtttgcatatgccgatgaggaaagacaaggaaaatcttcctgttctgccatggttcataaaaaagtcatcgccgtgcgggattggcaaccggagtggcggggatttctcgccggggtcgcgacatcgctgttgcgccgcgccatcgcgtgggcggagccgccatctgcccgaattgagttaacgaatccgccgtctagttcaccttttcggttgcaacgtgtatcgcggttcaaatcgcagattcgggcacgggagcgcgtagtcgatttttccggccatggcgtccgccgcgggctcgagcgcgccgccgcgctctcccgtcgtggttggggcgaagtgatctgcaccgtcggatccgtggacgatggttcagattag

SEQ ID NO: 6008 - DNA, 351 bp, Zea mays
  Peptide Sequence Number=SeqID_49383
atggcgagctcgccgggatgcccctgcacgcaactgtgccctctgctcgaattcctgttggccacgccccctatttctctgggccggtcaagttctttccgacctccccacgtgctgtctccaactggtattcgcgccgacaaaagcattctaaaaagatgtggagaagcaagcccgtggtcgatgccccaagtgctcggcgaaaggctagaacaagaatcatcgctgtttatgcgaagttctactaaatatgaagagaaagtgaagctccgttctatactcgtcagcgagttgatcaaagattttattcagaaattatcgacgttctcgcaagcttttagtcggatttaa

SEQ ID NO: 6009 - DNA, 450 bp, Zea mays
  Peptide Sequence Number=SeqID_49384
atgggcaagagcaagaaaggtggtagttcttcgcatcactccggcgataagcggaagcgtgagccgactcctccctcggaggacttcggcgactcggagtactcggaggaggagttctcctccgagtcagagggctcaccggttcatgcctctcccccagcgtcgtctgatgactcagacgactcccaggggctcgccgcagaggtgtggacctacatccgggccgtcgagagcgccggtctcgagggctcggatgagtcggagtactccttggacgaggagaactcctcggactcgtccgaggagggcggcggcgacggcgatggcggtgacgacgacgacgacggaggcgatggtgacggcggcgaaggcgacgacaagggcggcgaaggcgacggcgagggcggcagcaagggcagcagccagggcagcaacaaggccagtggctag

SEQ ID NO: 6010 - DNA, 444 bp, Zea mays
  Peptide Sequence Number=SeqID_49385
atgggcaagagcaagaaaggtggtagttcttcgcatcactccagggataagcggaagcgtgagccgactcctcccttggaggacttcggcgactcggaatactcggaggaggagttctcctccgagtcagagggctcaccggtccatgcctctcccccagcgtcgtctgatgactcagacgactcccaggggctcgccgcagaggtgtggacctacatccaggccatcgagcgcgccgggctcgagggctcggatgagtcggagtacccctcggacgaggagaactcctcaacctcgtccgaggagggcggcggcaacggcgatggcggtgacgacgacgacgacggaggcgatggtgacggcggcgaaggcgacggcgagggcggcagcaagggcagcagcaagggcagcaacaaggcagtggctaggcgccactggttttaa

SEQ ID NO: 6011 - DNA, 684 bp, Zea mays
  Peptide Sequence Number=SeqID_49386
atgacggcacgccggcgctgcgcagacccggcgaatcaagacgcggagacggtcgaaccgcgcagatcaacgacacagcatggggctgtccaaacacccacgcgacgccttgggtcgggactgcgcagctccgtgtcggcgtacagaaattcggagcttgttgctggggagagggagccgaggagagggtcgcttgcaggggaaatggaggctagggaggaagagctactgctcccctgcggccctggacacaggaagaaagctggcgtcgagctcctggacatgggggtcgctggctgctgttgcaagggcgccgcgccatggccgctggccggagctagagctgaagctcggtcagcaacagaggggactcggccatgggggagaagggggggaaaggaggaaggggagccggctgccctgcgtggaataggaatagggagggcgccgggcagaggagatgggagcggggagctcggtggccaccatggctgggctgtgaagcagagggagctcgcaggggtgaacgccgctggtgccctgcgcgcgacggggaaggaccctgctacatgggtactgagtgccatggctggccgaggggaggaagtggaggagctaagctccctgctggctgctcgccgtggacagcagagggagggaggaaggttcctgtgccaggaatag

SEQ ID NO: 6012 - DNA, 129 bp, Zea mays
  Peptide Sequence Number=SeqID_49387
atggaggacgagcaccagaagcaggaagtccacaaccaagtgcgtccatcacctgcaagtcgcggatcaagggttaaaataatggggaagaagccattaccatcagctatgcaagattatggttgttag

SEQ ID NO: 6013 - DNA, 1072 bp, Zea mays
  Peptide Sequence Number=SeqID_49388
gagtgggcgcctcattcgccatggtgagctcttcgaggagaagctcgttccgcacggcgtggaaggtggggaaaggcacgctcctcttgatgagagccttcaggtggccgtagcgggggctgaggccacgcaggaggttcagcaccagggtacgatcagcgactggctcgacgagatcgcggagagagtcagccaggcccttcatctggcggcagtattctcccacggagagccacgagaggacaacgctgtccatgaggcaccaggagcgaggcgacggagcgtcgtggtcgacaaggacgtgatcgtcgaggacgaaacgccgcagcgtgagaaggacctgtcctcgccaacgggggtagtgggaagacgccggatccaacaccacggacacgagggcccggatgttgtgcagtccagcggcttgagcgtggagagcagcgatgaggtcagcgtcgaggtcagaggcgagggggtcctccgggggttccacaggggcgaccggcgagcgaccgaggaggcgctgcgtggtggccatctaggtggtcagagcggcacccagggcacactctcgctccagggcgagggaggcggcacgctcgcgctcccgcgaggccgtcactgcagcctggatcgtagcgagggtgccgacgagcggggagtcggtggcggggagtacggagggcgcgacggtgtggctccaggttggggaagcgaaggcgggaaaacccggcggggagccgcgacacaggggcagcgtggaagcgacgtggagtggcccgaggccggcgatgtagggggcccctccatgggtgagctcgctgctgattgcagcaggggcaatggggggtgcgtggcggggctggtggtgcccatggcggccagcatggccgcagtggtggcgacgttgtccgcgtccatcggggcgatggcgcagcagggggtcggcgcagggtgcgaacgtcggggcggcgcaggtgaacggcgcggcggcgttcctggcggcttggccgcggcgcacggcgtcagcgcggtcgggtcgagcggcgacgacccgcggcgacgggactag

SEQ ID NO: 6014 - DNA, 78 bp, Zea mays
  Peptide Sequence Number=SeqID_49389
atgacgtcgacgacatgggagatgctgctgctgccttgtttggtgtcgatagcactcatcccggaccaggatagctga

SEQ ID NO: 6015 - DNA, 240 bp, Zea mays
  Peptide Sequence Number=SeqID_49390
atggcccacgaaattataaagaaaagtgaaaaagatacccacgatgctagagaagcagcaaaggcagctgaaaagactgcagaacttgaaaggcggatagccgaactatctcctcctccagagcccttcgagtcacaggccgaccccgaagcaaaaaaggaagatgaaattactaagatggccgaagctgttactcgactactaaacgaagctgcagaagcagttttaaaagaagaatag

SEQ ID NO: 6016 - DNA, 939 bp, Zea mays
  Peptide Sequence Number=SeqID_49391
atggaggttcgctgccaaaccagtttttgccagaatgaagatggtttccccaagttgctgagagcatgcacagttcgtctcggaatcaggagtcagccagagtatgatggccgtgaattcatcgagcatggcacagagaagtgtgttgtgactgtatacattggatccagtccgcaccatgtggaatggagtgtcactactgctgggcacagattcaaagacacctgccaagtcgtcgctcgcaaggcattgagggccctgtgtcagatctatgaagaagaagtggctgacactccgctcagattctttccgccctttcagagagaccgtcccgcttggatggccaggatgcgtgcattagaagggcagcagctgcttgaggatgaccccacagtcgtgtacctcactgcatacctgctcaccctggatgcacaatatgatttcttggctcggcaccaccgtcagatgattgctcgagcagaagatgcagagaagctcaaccagccctgtggatccaagagcctgcttccatccaacccagttcaacccaggagagctgaagacccccagattcttgaaggtcacccagtctctatcagaggagaaaagaaggcttgggaactcccggaaggagccatagtcttggaaggaattccagtctcccctcaggctatggataagcaagagcaccctgaatcctcccaagatcccctgccagagttgtttgagcccctcaccatgaagaagattccagcaccatcccttgaggtcaaggaagaagctgcaagcaccccgccagcaccgccgccctcagaggagctacaagagccagtcccgcttgaagaagagttcgaccctgtcctgccatctcagtcgccgccagaagaagtcatcaacgtcagctccctcttgacccatccaggagatgtctcagattga

SEQ ID NO: 6017 - DNA, 900 bp, Zea mays
  Peptide Sequence Number=SeqID_49392
atgggccggatcacacgtgggcctctgagctggacgaggctgcattgtgggatgcccttcgtcgccaatcttcgtctggtgcggtacatgcgaagggtgtccctgcctgttttgtctctgttagctcagctgctgcagcaaagacttcgagcgaagggtggcgcctttgccttcgccccaacacctatgcctccgggatacggatacctcactcgtcacctttgcacggggcgactcacgcttggccccgacagccacaatgaacaaaagaccggcattcaaggtgccattacaaacggaactccggttccgtccccgcgggacggacgcggcgaccggaaggctctcgttcgcgtccccgctcaagggacgcgaaccagacatcaaagccaaagagcgggccgctccaaagcgcaccggcaggtcctcgctcccgtcctcgccacgaaaacgaggaagaaggcggaatgttgcatcctagctgggcagcaacagttcgccttccccggcatgactggaggacgcctcctccgtagagctgggggatggtttccaccaccagaagctggaagaggaggtggccagccgacccgtgcgggaggtagagccccggctcgcctcgctctctgcctcagcaaggatgaccagcgggcgaaagggcgggcagccatgcaggcagcatgcaaccgcgccaagggaagcgagcgacgcttcgccttcgccataatgaccgcgtcaaaaaaggggccgggaaagggggataccccgaaaaggatccttctccgtgaaggaaacaggctccgagcctccctactgatcagaggttcgaaggctgaccccacgggggggttcaacagccgcctcagagcgcgtgggttctgcaccctgaaagtcgcctag

SEQ ID NO: 6018 - DNA, 742 bp, Zea mays
  Peptide Sequence Number=SeqID_49393
tcggttcgacccttcgtctttggatatgctgcagttccaaagctttgtgaacggtgtcttcggcatcatgttcaagcagcttcagctgaaactgtttctttttgcaggaccttcggcgacgaagcatggtcccaacacacaggaatggacgagtctgaaaaaggagatcggaagtcagatggaggttcagtgccaaaccagcttttgcctgaatgaagatggtttccccaagttgctgagagcatgcacagtccgcctcggaatcaggagccaaccagagtatgatggtcgtgaattaatcgagcatggtacagagaagtgtgtcgtgattgtatacattggatccagtctgcaccatgtggaatcgagtgtcactgctgctgggcatagattcaaagacacctgcaaagtcgtcgcccgcaaggcattgagggccctgtgtcaaatttatgaagatgaagtggccgacacaccgctcagatcctttccgccctttcagagaaaccgtcccgtttggatggccaggatgcgtgcattggaaggtcagaagctgcttgaggacaaccccacagtcgtgtacctcaccgcatacctgctcaccctggatgcccagtatgatttcttggctcgacaccaccgtcagatgattgcccgagcagaagatgcagagaagctcaaccgtcagctccatgtggatctcaccacagctcaagccccgtgcaactgccttggaaagtcgtga

SEQ ID NO: 6019 - DNA, 1101 bp, Zea mays
  Peptide Sequence Number=SeqID_49394
atggttttggacctgttccgcggccaccgtcgggtccccaccttgtccgttgccttgctgggccggattgtcgacactagcaactcaggacacccctcagtttgccccttccccctctgtctttcagtgctcgcgctcatgggactcctcaccgtgcaaacgaaggttgccgccgttcaagccccccagagccctctctcaagaggggctcttttgaaagacgcgctggccgaaggggtatgggtgcttttctggccgtctgatctgattccagcgtgtaggattaaatcttgccgactgcgaggcggttcatctcctaaccagcggacacaacccggcggcagaccgaccgcggcggcgccatcaccggaccccacgcaattccgccactgcagtgccctaattctagttctgacacccgcaaaatgggattggcacgacggcgaacacgaagggggtgaatattacctgaaatcgggcgcgcagacaggttgctcacgtgttggggcggctcggcggtgctctcactactccggcgagggattcagtcgacgaccaaggctttctcggccccaatccgccacagacacgatccacgagcccaagcaaatcaccccgacctcctgccagcaccggaacaacggcgaagggacgagtcggcggcggcggattcactcctctgtgcacactctcgctcacggcgctagtggtcgatggctatcacggaggtggaagaggagtcctctacggccccctgcgcatcttatagaggcgaagggtggagagggatttgaccccgagtccgttcccagcttcaatggcgaacccgccatacacgtaacggagcttgcccgagtcaagcggcgaaagagggggaagaccccgacagcgtgggccccgcgtgggagtggaaggtggagtaagctgagcagcgggcccgcgatgtcagcgatcgagcaccaggcgagcgcgcggttagagaggctgcaagtgggacccgcaggtcagcgtgcgcgcgagcgtggggaaagacacggcatggtccgtgcaggtgaaaaagcgtattgggccgaatacgagttcagggcccagttaggctag

SEQ ID NO: 6020 - DNA, 357 bp, Zea mays
  Peptide Sequence Number=SeqID_49395
atggcaccggcgaagctcaagcagccgagcttccctccacggccgagcgttctccctgctccttctccctcgcgcagcagcaagaagcccctgctcagccagcagccttggcgtccaacttcgctgtgcagcggtgccgatccaaaacagcggccccggatcccctccgcaccgcgtgcttcaccggatctgcgcagccccaacatcgacgccgttcaccccggtgagacgacggagaaggcaagccgctcaacgctcgtcgatgtgcgaagctatgcacaaatcgaaatcaccgtcgtccttgcaaacgccatttggttgtatgaatggaagcgtgtagataggaaaatgaagtag

SEQ ID NO: 6021 - DNA, 74 bp, Zea mays
  Peptide Sequence Number=SeqID_49396
atttgaaaccatatatggccgagaatgaggagttgtcgtcgagggacgacttcactttcagaggggagggttaa

SEQ ID NO: 6022 - DNA, 786 bp, Zea mays
  Peptide Sequence Number=SeqID_49397
atggcttcgtctcaggtgcactgccacggcatcctggatgctagaggagatcccgacggagacagagacgacgacgacatcggtggcagttcgagccacggcacggagcgcttagaggagccagagccggacggatggatcgccagacccatcactcgtgacgccgctcgcgggtgtcacttccacgacgctctcaataccctgttgcgtcgggccttcgaccgacacacatggtctatcgagtaccgttgtgtagtctaccagcatcgtcgcggactataccaagaccagtgggaggctacttgcttggtgcgctgtccggacgatgatctccggggtgcagaggccttctcagagcaccattctatcactgagagggacactgccgaggcagccatgcaagatgcagcacgatgggcactttctcagtattgctcgttgttcagcggggtagctgatggccttgacctcaagtactaccctcgccgttcgaccggtagtgctggagatgtgattgtctcgccagttggtgagggcaatcctaggctgagcagcatggtcaacttggtcgtcgtgctcaacacagagttggaccacgcccttgatgagttgggcaaggttcgagcggaggttgcggaattgtgtgctgaatgcgcggcacgccactacctggatggtggatctctcgcccctgttgggattcagcacccttaccgttcaccgccccgttgttgctttgactatggtaccccagactgcatgacttgcatagatttagatccatag

SEQ ID NO: 6023 - DNA, 153 bp, Zea mays
  Peptide Sequence Number=SeqID_49398
atgccgctctccaccgaccccaccatgtcatcggccatcctggctatccaggcggtcggactacagaacatccggtccctcatgttcgtcgtcctggacccggcgccctcccactaccctcgctggagggggtgtaacaccctgaatttgggg

SEQ ID NO: 6024 - DNA, 210 bp, Zea mays
  Peptide Sequence Number=SeqID_49399
atggccagtgcacgcgtcgccaaccttgtccccttcgggcttggcctaccggactacccggtgcccgatctttcggcgagtagagataattccgatttggcggaagatgacccttgcgatccgactacgacgagcaagcccgaggcgccaatgcaatcgctgaaccaactccctgtggttaccgaccttgctgatgcgagatcggcctga

SEQ ID NO: 6025 - DNA, 1023 bp, Zea mays
  Peptide Sequence Number=SeqID_49400
atgccaagcttggtagccaagttcttgggacttgacggattgccctcgccgaaaggcaaatatacagtgaaagacgacaagatcaagacagcgagttcaccaagagctatgttcgatatcgagaggcccaagccgaagaggctactgcaacaattatttagacagaagtctggttctggtactgagatgcctcggccagagaggtcccacgagagcaatttcgtgtccaaaggaattttgccggttcacagaacatcatcgtcttcatgtactaccagagcgattcaagaggctgatgtcgagcctaaacctgtagcttcgattctctacacacttgtagaagctgctgagggaatagatgttgaagccccttccatgagtgctaatgcacaaggttcatcaacgccagatgccaatgaagatgacattgaaaaatatgcagatttggaagaggacaatacagaaagcttgatatctcctggacaagtttttgcttctggtaaagatatacaatcagaatatactgcagttgtcagtcatgtggatgaaggctcgatagagaaaacagatgactttcagctcaatggccttccatttgagcacaaccaaaatctgaatggagatgtgtctacagcgacaacactatttgatcatttcactctgcatgggggacgccttctaggcaagtactatgagaatgtcatggggatgctgcgacagttcctgatgatgattcaattgaccaatcagatggcagatttgagatcgagcgaagctaagcttttcatcaagatggcgctttttcgacttgtggtgtggcatgtcatgatggcctcaaatcatcagtgttacaggtggccaccacaagcgaggggtctgcttcaacttcttgacagagacagatcggaggctttcttgacaatggaaagttttgttggtagtagtattagctttatagggggacatgtcattagggttgatcttgtgcttttgaggccttgcttacaggcacggtactactga

SEQ ID NO: 6026 - DNA, 537 bp, Zea mays
  Peptide Sequence Number=SeqID_49401
atgcctttgtacaacccagatgaagaccccaagcctcattatcacattgggggtcagctgatgaagtggaaactggagtccaactttgaagaagcatcgaaatgctaccacttaatttttctttggcaagaggtagcatcttctcctccgagcctaatcatatcaatatcactaatgtattccaacctcttcatcgcctcaatatgcccctttttcatggttgatttttcgaagtacacgtggcttggctttgacgaccgatcatcgcagtcatcttcatcaaattcaaactctttactatctttgctagactcttcggccagatcggctaaaatgtcttcaatgacttcgtcaaccgcagtagagtcctcaaccacaccaaccaaagcaccgctcgcaacgactgggatttctcatgccctcccaatagcatccgaagatgccacaatggccagctcgatactcgatttatccccttccattgctaatggaatgaacctggcaaagcatgaagattatgagaaagcagaaggctga

SEQ ID NO: 6027 - DNA, 1323 bp, Zea mays
  Peptide Sequence Number=SeqID_49402
atggctcttaaagaagtggcgctagtgggtcataagttcatctggtcgaatgggcacactttggtgaagctgccgccgtcgcggctttccctcaaggacgtcgtcgcggccaatccagatctgtccgccgtctgttcttctccgccgaccagggagcctgtcgtcccctgtgaccagccctgcgtccgccgtcggcctgccgtcccctgcgcccagtccttcttcgccgaccagattcgtccgccgtcgacctgtcgtcccatgcgccctggccgtccagatcccctgcatctgcaccaacgtggtcacctcgcccagatctgcttcgccgacgtggccacctccgactgtccagatccactgcaccatctccacaagggagagtcggtcatctccgtctgcgccgagcccagaatccgcctgccacttgtgccgatctgttgggagttcgcacagttttgttcaggctacctgccaggaattttgactatattaagaggtcatggtttactgtttcatttgactgaagattcacaagtcttagcagccgatagaagcaatgctactgcaatcaagacttggcagatcaatgatggcaaggacagcggtgctcttctacatacccttatgcaacagactcatgtcattgagcaacatgctgtgtcttgcccaacccacaagttcattgagaagttttttacatacagatttgttatgggagttcgatctgaatttgattctcttcatgcaaggctgcttcacagttttgttactctcaccatggctcaggcgttgtctaaattacttgctgaagagactcgtcttaagtctatgtcttctattactgagaagctggctgattttcgtgtctgtcgtgctactcgtggtcgtggtacaggaccatctcctagaggctcagttgtagtggctgctacttcatctgctggtgctttgtcatcatcttgggttcttgattctggagcttcatttcatgtaacatctcatcagtcactgttggcgactactacacctgtcaccgagggtacttttgttcagactgctgatgtcctgaacacaaaggctatcgttgttatgatccatctactcgtcgtattcgaatttctagagatggatatcgtcttcgtgaccgtggtaccattgaacctccagatcgctatggtttcccacgagctggctagattcagaaagaggaagaattttattgctacaatgagcactgaggataggcagctgttttcggcacaagaggataaggcgcagcgttttttgacttctatcagggcctcctcgacactgatgtag

SEQ ID NO: 6028 - DNA, 699 bp, Zea mays
  Peptide Sequence Number=SeqID_49403
atgtcgtcatgtcttctccacctgtcagccttcgccttggtacctcgctcactacagtggggccatgatggcagcagcccacacggtgcagagagtcaaaggtcccgcctcgaacctcagcgccggacgcaagcttcgtaccgaggccctgctgacgctgtttacatacatacatattgtgccgatcgacaggtgaagggaattgaccgagaagtgctgctgccaaaagatgggcaccaggaagtggctgaggtcgcgctgcagctggggaagtactgcatagatgaccccgtcaagtccccgccgggcggacggaggatggttattcgtactgccaaaagaatgggaggttgtgtactgctcggtgccaacctcgccgggcgggctctaccggacgcccttggccgcctggtattcaaaaccgacgagatggtccaggcggtggaagcgcctgacgtggtcaggaacaaggtgtcgttctccgtctttggcctagagggcgcagtgtcattgaaaggtaagctgaatgtgctggacagtaaatggattcaggtcgtgtttgaagcgccggaactgaaggtcggctccttggggtttcagtacggtggcgagagcgaagtcaagctggagaagggaaggagatgggagaagacaacagcgcgcggacggaggatagttattcgttctctcaacgattaa

SEQ ID NO: 6029 - DNA, 1149 bp, Zea mays
  Peptide Sequence Number=SeqID_49404
atggagatgagggcagccccggacagggctacgcctagaatggtcgcggcgatgagtccgcccacgccggagagggggacgctggggaggagggttgcagctgtggctgtgtcggcgggctcgccgcgaagttcgccggacagagggagaccggcgctggtggagagaagctccgctacagcgctggcgggccggagaaggaaagagcgaaggccgccgacccccaagcgctatgcggacgatagggagatggcgggagttaaagttgttccacaacttttagctcttgcccccaaactgcttagggaaatagcccagtcattttcacaacaaaggaaacaaagagagggcggtggtcctacatatcatgaaacttttgcttatgctcaagggccgtttgctcgtgtacctgaagcattaagttctaagcctgggcatttatctgcttcccaacagagagtgtacgaggactttgttcatgtatggcatccccacaatcaaaatgtgggagctacaggttctggtctgtctggtgttgctactgtctcgagtactcttggtgtacttcgagcttacagtccaaattcgacatcagcatcctccagtaatttgtcaactgtccatatgggtggactaacatgtataactcagccgacagaactggggtctgaggatactgttatcgcacaatttttgagtaatcctgcccaagttggaccaagcgagtctcctgtcctatttagtggaacagttggtgctgcatctacattttctccattggcatctaatgaccttcctgttagtgaaataagtgctatggtgccccctccatcaacatctgctgatcgtctgggatctattttacctgaacctttgaatactggggatgctttggagagatacaaacaggttgctcagaaggacaaagttgacgctcgccaagccaaggagaaggctagtgccgctgccctggagcgccagcaagcctacgacgcagcccttgcctgcctcgccaaggtagaggatgaggatcatgtccacctcgacgccccggttccctcaccagattgggatcagatggattgcgtcgtcaagtcctggatcctcgactcgctcgtcgatgacctcgccgagaacgtctcctcctag

SEQ ID NO: 6030 - DNA, 213 bp, Zea mays
  Peptide Sequence Number=SeqID_49405
atggcgtcgcctggctcatccgccgctatcgcctcggcgtcaacgtcgtactcggaattaccatttgatgtgctcatgacaacgtatgacatagccttgatggatcaagatttcctttcacaaatcccctggcactatgcagttattgatgaagctcaacgtcttaaaaatccatccagtgtgagcagacacttaatctttgtaatcacctga

SEQ ID NO: 6031 - DNA, 291 bp, Zea mays
  Peptide Sequence Number=SeqID_49406
atggaacaggcggtggacgtcggtggacagtggttgagctctcggttcgtgcagatagagcgagagagagggcgagggagctggacaaagggcacaaatgagagaggtgaggtgggtgagcagggcgtggggctcaaaaggggcatgagggctcggacgtggccggagaacgcagtcatgggcgcatccacggcggggagatcatgggcgagagggttttcaattcaagtttcaaattcaaaccaaatcaaatatgtgcaacaattcaaagaatatttaggctcaatatga

SEQ ID NO: 6032 - DNA, 333 bp, Zea mays
  Peptide Sequence Number=SeqID_49407
atggcgccctctccctctctgcctaactccggcgaccccggagccaccctagctcacgccagcctcaactccggcgacctcaccgccgcggagaggagcagcgccgcccgcagccattcgtttcccctgtattgtgtctttttaagatgtgttccaatgtttgtacatgtggggtgtgatgttcatttgtactttccaaatgtattgaatgcatgcttgctttatttagacaacgagcagtccgaggttcctgagtgtgttgttggagacctccctgagcaacaacctggtgaaggcaagtgtcctctgacctattatgtcctacatacttga

SEQ ID NO: 6033 - DNA, 357 bp, Zea mays
  Peptide Sequence Number=SeqID_49408
atggcgccctctccctctctgcccaactccggtgaccccggagccaccctagctcgcgccagcctcaactccggcaacctcaccgccgcggagaggagcagcgccacccgcagccgtccgtttccccctggtctgatcccctccatccgattagatcgaacagctcagatcacggataacgcttcgtgcacgcgcgccctaacgccctggcccgcctgtcagcgcccaaaccctctagcgctgggcccgctcgacaacgagcagtccgaggttcctgagtgtgttgttggagacctccctgagcaacaacctagtgaaggaaagtgtcctctgacctattatgtcctacatacttga

SEQ ID NO: 6034 - DNA, 1116 bp, Zea mays
  Peptide Sequence Number=SeqID_49409
atggagcttccaattggcagtgccacgctgcgcgtgcacctcccgcctacggttgacgatcctggcccaccgccagcgctgctgcccgccaacccctcggtgccgtacggagagatttctcaaggccccaattttatgccttggttccggcaaagacgtgctgctgcggagcaagaacagcagaggctctggaggcaggctcgcatgaatgttaacattgaaaagctaatgtcaaatatgtccgaaatagagaggattgattcttttgatgctgttgagcgttatcttctcagagagatggagtttgtgtggcgaaagaagatagagcgtgatgtatctcagggacagaaggtgaacatttctgttaaatctgagaagaagaaacaacaagaaagaatggctgaaatagaaaaggttaagaaaataagagaagaaagagctattgaaaaggcacatcatgaagaggaaatgtttcattttgaccaaagcaaggtcaagtctgagatcaggttgcgggaggggcgtacaaagcctattgatgttctccttaagaatcttaatttctcagatgaatttgacattgagttaaatgacccctatctggtgttcaagctaatgcatggcaacgaatatgaagatgcaattgatcctgaagaagacaaagctgagctgattgttaatcttacttttgatggcaatgctccttatggtggcttaaatttgagggctttcatttctgtattggataagaacgtgggtacccgcgttcttaaagttaagaacgtgggtaccgttgaacttaatgtgcagcccacgcagacccactttcctgtagtgataagcaaactctgccaaggagaggtgcttatcccagttcttgccacaatcgatcgcacaagccctcagcatatcttcaagaatttggttcaccctctcagtctgaccatcagtctatgggtgttgttcccaaaatctggcaaccaatggggctcctcggtcagagacaatggtctggggcaatccgtgcaaacacacgattcggtcaatgtacaactctgcatacttttgagccttatcagtggtgtgcactgggagaaaatgtgccactttcattag

SEQ ID NO: 6035 - DNA, 671 bp, Zea mays
  Peptide Sequence Number=SeqID_49410
atgcaggcggcatgcaaccgcaccaagggggcgcacccttttgactttgacgcttccagcatggaggcccaggcccacacgtcatgtaaccggcgcgccggttactacgtgcgagaaactgcaccgccacttgcgtcagtaccgcgccttctcgactgcggaaccggtaccgcgactcgaggcaaccctgcgcatggcccaacagtgccaaccgagcacatcggtcatgggtcagtcagccgcgggagaaggcgcgacggtcgatatggccaaaagtgggccggcagtaatggcagcggcaggcgggcggaagcagcggtcaagtcgacaggcggaacctttggcaggcgaagcaggcgacgcttcacctccgccataatgactgcgtcaaaaaaggccccgagcccccctactgatcagaggttcgaaggctggcccctcggaagggttcggcagccgcctcagagcactcgggctccgagccccctactgatcagaggttcgaaggctggcccctcggaagggttcgacagccgcctcaaagcactcgggctccgcgcctaccaatggctggcccccgaagggttcgatagccgcctcagagcacgcagagtgagggatgactctgggtacgtccgatacatggccgaggctcgggctacgctcccgag

SEQ ID NO: 6036 - DNA, 528 bp, Zea mays
  Peptide Sequence Number=SeqID_49411
atgggcgcgattaaggtcaaggctcagtccactcaagggacacgatctcgcctcgcccgagcccagcctcgggcaaaggcagccgaccccagaggattcacgtctcgcctgaggcctcgggcgccatgggaagctccgccccgcccgaccccagggctcgggctcaacctcgacgccggacgacggactccgcctcgcccgaccccagggctcggactctacctcgacctcggacgatggactccgcctcgcccgaccccagggctcggactcagcctcgacctcggaagacggtctccgcctcgcccgaccctagggctcggacttagcctcgacctcggaagatggtctccgcctcgcccgaccccagggctcggactcagcctcgactccggacgacgaactccgcctcgcccgaccccagggcccggactcagcctcgacctcgaaggagcctccgcctcgcccgaccccgggctcggaccgaccacgtcacagggggggcatcattaccctacccctagctag

SEQ ID NO: 6037 - DNA, 111 bp, Zea mays
  Peptide Sequence Number=SeqID_49412
atggcccgaagagatccatatgtaggagttctagtggtcttgacatcgtcatcacattttttctacgatgagtacttcccacctgctttcctgcttggcacgctgcacaag

SEQ ID NO: 6038 - DNA, 1947 bp, Zea mays
  Peptide Sequence Number=SeqID_49413
atggagaagtgcaaaccaatcaagacccccatgcctactaatggacatctcgacttagatgagggaggcgatccaccctcaacggcggccaccgtctccgactgtgctccggcgacctcgtgcccctctccttccctctccgtgaccttgattgctcgtgtgccgtctcctatcctgcctggatcgtctcctctcgtacatcagttcaggatgccgcgcacgaagattgtgtcggtgccagggggaggcgatgatgaggatcctcgtcgctccttcaggcaggtcaagggcaagaccgtttacttggagcagcaggaaggccgcaagaagcggcgtacggacagagcagcccgtgcagcggcagcggctgcagcagccgctgcgcaggctgagcttggagatcagtcgcagactccgtcagatcagatcgcataccgtgttcgtcgtctcgcctcccggcctcgctcctccactcacacctctgcttccactccgccacccactctgcctgctcccgtcactcctgttgtgccatccaccaccacagccattcccgctacctccactacgccagcttccactgctcctcctcctcccgctcccgcttcagctcctcctgtccctccacctcgtttctgggagcgcgatgagactgaggtgcaaccacttgctgcggatcctagactgtttgaccttcagcgtgctacagcggcacgggtacgtaggttcagatacgtacccgtggagtcttggttaccaggtcagagggaccctgcagcagttgacctgttcagcactcgtattcatgagtcatttttcagagctcagatgtctgctcagatagctctgcgaacccttttgactaccagcggcaggtatgttgaggagtgggtacgagtcttctacgcctctgtatggatagacccagatcatcactggatgaggtttcgttttgagcgcgaggatgtcaccattactgccagtcagatccgtcagctttttagatttcccgagtcgacgactcgtcttcacagcctctgctacggcacttctgaccctcctcgtcgccctcacggcggtgtggctccgggtacagctcatgtcgcggctctgttccgcccgcccttcacagatgggtcgcgacgttcaccggcagactttactacagcagacaagtatttatatgagcttatcagacggactcttctgccgaggatgggatacagggaggctaccacacatatccagctctggctccttggtgccctggtctctcactctgagtttgacgtcgtggacttccttatttgtgagatcgaggacgccgttttggatgggattcgtgctcgtcgacagttgccctatgctcactacttgtgccacatctttgcgcagctgattcagcctcctcggtttcagggcacacttgaggcctcacgcctcgtttttggatcctaccgtcctgcgcctgagactcctgtgccagcttctgctcctgtttttgactctcaggccgaggatgcagctcttcatcagttcgacactcaggctacaacagttgatgatgatgatgatgatgatgatgattttggggttcctcctctgcctcctatgcctccacgctcacatgatcatgaggctgggagttctagtgctgcccctgctgcccttccagctatggaccctgctcttgcttcgattctccagtctatcactcagcagcaggctcacctggcagccgagcaggcccggttatccgagaggatgctctcgatgtttcagaacatgcaggacaggcaggatgcgcttcagcagcagttacttcaggatcgggctgagagcagggcattcatggctctcatgttacagcattctggtgtctcagttcccccagttcagtctgctccacctcctccgcttcaggctccagttgtgccagcgatttag

SEQ ID NO: 6039 - DNA, 129 bp, Zea mays
  Peptide Sequence Number=SeqID_49414
cctcgggcaaaggcagccgaccccggaggattcacgtctcgcccgagggtcccctcaagcaacggacgcaccctcgactcgcccgaggccaaactcgggcaggcttcgcggagaagcaaccttggctag

SEQ ID NO: 6040 - DNA, 144 bp, Zea mays
  Peptide Sequence Number=SeqID_49415
atggagtctgttctccattactcaaatgtctatccagagctgaaggcctgtgtggatctcacatcggatctaggcctttgttgggtaaagtttttcgtcaaggattctattggccgaaggcagcttcggatgcagcagaattag

SEQ ID NO: 6041 - DNA, 900 bp, Zea mays
  Peptide Sequence Number=SeqID_49416
atgggatccactttagtaagcatttctgcaaaaatagagtcattgatgattgaaaagccttaccttgactcccacataaccagcatacccttgagagtcttttctttagtcgggtggttccgaaagaagaaaaacaagactgaagtgcgggaggactcggtcctccacttaggatcttttgcttttagcttctcgggaggagtttgtgccttccttgaaaaggtgccgccacgtaccaggctaacggcacgcaagtccacgggaccaattggggtgcctcggcatcaattggctccccgacatgaaagcagcagcagtggaagtaacgaccccatcggagatcttgaagcccgtttgagtcgacttcaaacagcgctgcaacataggaccgatgcttgggtcgccgacggagatagaatcaatgaactgagaagggacatccgacacttgcaggatcaactcgctgatcgagacttagcacttgactgggccgtacagtctcgtttgctaatgtgtgctaaggaagcaagggctcaggcccgagttaaagaacttagctcaacggttgataacctgcaggtttactgcaatacgttgcatgaggaagtccatatattatactcacaattgcacccaagtgagcctgcacaacctactgaggcggaagccggaccatctcacgttgcgggacgcgcgctgggtggggagttagatctttttgagccccctccttccttgaggttggttgatgtctggactcccacacctgacgatgaagccgccaagagtggtgatgaggatgatggttttgattatgcttatggtaatggtaaagaaagagaagaaggcatcgaggtggatctccaggagttccaggacgtcgatgagttcgaggattag

SEQ ID NO: 6042 - DNA, 273 bp, Zea mays
  Peptide Sequence Number=SeqID_49417
atggctttgttcagcctaagtcagctctgtctgggtgcactggacagtgtcccggtggtgcaccggacagtgtccgttgctcatccctcccttactccgtgcttctttgtgaacatcaagtgtaagggcgagagactccaagttgtggagattcctcgcaagcgggataaagaaaagcaaagcaaaacaccgtggtattcaagtgggtctttggaccgcttgagaggggttgattgcaaccctcgtccgttgggatgccacaacgtggagtag

SEQ ID NO: 6043 - DNA, 198 bp, Zea mays
  Peptide Sequence Number=SeqID_49418
atggtggagactcgccggagctccaccgccgccgccgggaagcgcacgtctccatcgccatcctcttcgtccgtacctcccccgaagcgccccaagttcgcggacgcagcgatcgaggcctccgatggcacggtccactccagcgacgccagcacgccggccgttccgccgccagaatttgaagacaggaaaagttga

SEQ ID NO: 6044 - DNA, 204 bp, Zea mays
  Peptide Sequence Number=SeqID_49419
atgggcgagggcctcatggcagcagcatccgccctgaggtcatcactgctgctgttcggccctccggagcagaagtcatcgtcgttgccgctgccggggcgggcgacgacgagtcgttcgtcggtcttctattgctccgcaggcccccccaatcgcgtggggttgttcgtaactgcggaggtggaaccagagttccgtttgtaa

SEQ ID NO: 6045 - DNA, 645 bp, Zea mays
  Peptide Sequence Number=SeqID_49420
atggggcggccgagccgggcggcggttgggccggggagggggggagagggaagggaggagagggggagggggacctcaccggggacggggacaggcggccgaaccggcgacgagcaggggcggcggctagggcaggggcggcggctagagagaaaatgggagaaagggagggagagagggggatttggggaaaagagggaggggcggctgggccagctgggcccaaagggggcgcgcgggggggggagcggctgggccggctggggcggcccacggcgcgggagagagaaaaaggaggagaaagagaaagaaaaagaaaaagaaagaaaagtgttgggccatgcgcagggttgcatcgagtcgcggcaccggtttcacagtcgagaaggtgcgatattggcgatggtgaccaccggttcgatggtggggagaagcaagacgggctgtggcctctgccccgccctcagcttcaaggatcttcatcatccttgctggggtggggggcgagctgagccggagctctacctcccgtacgggccggcgggccacctcttccttcagcattcaggggagagggcgctcaccggcctagcggagggggcggacttcaacaacgcggggccgatcggccgcaagcgtcgttag

SEQ ID NO: 6046 - DNA, 816 bp, Zea mays
  Peptide Sequence Number=SeqID_49421
atggggaaggtgacaggacaggcccggatgctgctcttccgccatggggggaagacgtcatcgattccgccgccgtcgggcgggctgacggccgtcgttgtcgttgtcgcgcggcggaggaaggagtaccatgtcgtagctgccatcgagggacatgaactcgagactcctgaaatggagcagcatctcaggcgggagaggttgctggagactacccatctggagcttgacgggaagttgttcgtcaacacgcagcagtcccctacctggcgcgccaactgtcggcgtttcgaccctgggggtacggggttacaagcgttcgcgagggacagagagagcctgctcgttagcccgtcctcccgcgcggccaccttttcgtacgaggtccctggaccttccttttatagatgtaaggagagggtccaggttgactcctccgaggtcgaggttgaggccgagccctggggtcgggcgaggcggagaccgtcttctgaggtcgaggttgaggccgagccctggggtcgggcgaggcggagaccgcctgccgaggttgaggttgaggccgagccctggggtcgggcgaggcggagaccatcttctgaggtcgaggcggggcccgagccccggggtcgggcgaggcggagcttcctatggcgcctgaggctggactcggctgctgtcagcctcaccctagcgggtggcacagcagtcggagcagggcaggcgacgctgttttcctgtcaggtcagtcagtggaggggtgaagtgactgtggtcacttcggccctgccgagtgaggaacgcgcgtcaggataa

SEQ ID NO: 6047 - DNA, 888 bp, Zea mays
  Peptide Sequence Number=SeqID_49422
gtggagataagtctcgtcgggctggaggcctggagcacgcggtccttctcaccaacaacctcgacctcgccggacggaccttcgtcgtcgaaaaagtccaggtgcgccaggcgccggccttgcttgaggtcatccagagggccttctgcgatcccaagaggaagtgggtggtccgcatacccagcaccttgaagctgcgccacatcgccaggatttccaatgagatcgaggtggtcgttgccgtcgtcatccctcaactgctccgcgacaacgttgaccccaccggcgcgcgactcctacgccgctacgcttggtccatctgtcatgcggcgagaaaggtcggccggcccgagcctagacaccacctaggatctctcctccccgacggggtccctcccgggagcgagatccaggcgctgccggcgacttccgccgcctctgcgtacgcgcggaccgtccggccccaggagggcaccgccacggttcttgttgagtgtttggcgctccaaaaaagcgtcaacatacttttggcgactccgctggggaccacatatctaagcttatcaaatcggccctcaatggccggttcaagggatagctctgatatttctccaagcaacatcatagagccgacttgggaaaccttgccggctgacgagcagctccagtttgaggagcacaaggagcggatgatccaggaggcgaaagcaaagttcttggccaacttcaaagtggacaggaacaacaaggtcgtccgacatcgggcgacggatccggcttcgctccaacccacgccagatatccccgatgtaagtaataccaacgatctgcagtctcttagaaattatgtagaagatcagcgtgaacaaatgcagaacatcatagggg

SEQ ID NO: 6048 - DNA, 1017 bp, Zea mays
  Peptide Sequence Number=SeqID_49423
atggatctgctgaagcgggaactggagaagaagcggaaggcggcgacggccgacttcgggggcaagagcttcgtgtggcggtcggagctggagaagaagcagctccagaagcggctcgacgagcaccgccagctcctcgccaaggccggcacgtcggcgccctccgcgaattccgccgcagctgctaccggttccgaggagcgtcgcatcgacgagctcgacctcccacggcacgaggtggtgcggcgcctccgcgtgctgcgcgagcccgtcacgctgttcggggagaacgacgacgcccgcctcgcgcgcttcaagctcgtgctcaagtccggcgtcatcgacgacatcgacatgaccgagggacagaccaacgacttcctccgcgacatgatcgagatgcgcaagcggcagaaggccgggagggacacctacgccaagggcaagagcaagcgtgttgatggtggcgacgggggtgctgccggaggcagtgcagatgatggggatgccaaggggagcggcgatgatgctgacgcagacaaggactccaagaggatgaggaccaagtttgaggagctttgcaatgaagacaagatcttggtgttctttaagaagctgcttaatgagtggaaccaggagttggatgagatgactgagctagagaagcggacagcgaaagggaagtccattgttgcaacattcaagcagtgtgcacggtatctcagcccgctgtttgagttctgcagaaagaagcatccgggaagctgccctgccaggctgccacaccagaccggccgccgccacgtctgcttccgcgcctccctgcctcctcacccgtccgcccccctgcctgtggccgacggtgagcttctggtgcctccggtcgtaagcagaattttaagtgcctccggtgagcttctggcgatgttctgttcgccgctgttccccaccatcgtaagcagcaaacagtttggttttgttgaattcagtctgccgctgttccccgctccgtgctga

SEQ ID NO: 6049 - DNA, 540 bp, Zea mays
  Peptide Sequence Number=SeqID_49424
atggttgcccaccaccctgggtcacttgcacatagcttggcctacacgatgtctaggcgtggtaaatctgctaaacaaaggaagggtccattgaccggaactgccttcgacccgctttctttgccaactggtgtttcagtgcctatgtgtttttgtggtgatccttgcaaggttgacaagtccgaggatcatgtcacctatcgacagaggtattggatgtgtgctaactatgcatttgagccaacgattgttcagcgtcggatgaatttaatgtggattgacacagaaatctcacataaagacaagaagtggttggagaatcttaaaaagtgggatacagaggacaaagagaggatagaggaaagacgggagaagcttgcgatcgagcaacaatcggtagacaagcaggaaatgaggcatattgctgaatgcagggaggagaaggagaagaagcttgagcgtgcacgtcgtgcaaaggacgcaataggggagaactctgatgcttttcgcaagggcaaatggccctattgcactcagtag

SEQ ID NO: 6050 - DNA, 492 bp, Zea mays
  Peptide Sequence Number=SeqID_49425
atggatctcacttcgatcgattaccatttgggaatcatttttgttgtcatattatcgatttgtaggatgtctaggtgtggtaaatctgctaaacaaaggaagggtccattgaccgaaactgccttcgacccgcttcctttgccaactggtgttccagtgcctatgtgtttttgtggtgatccttgcaaggttgacaagtccgaggatcatgacacctatcgacagagcgtcgggatgaatttaatgactcctccaccgctctgtgattttgagcagtggattgacacagaaatctcacagaaagacaagaagtggttggagaatcttaaaaagtgggatacaaaggacaaagagaggatagagaaaagacgagaggagcttgcggccgagcaacaatgggtagacaagcaggaaatgaggcatattgctgaatgcaaggaggagaaggagaagaagcttgagcgttgtaacaccctgaatttgggggtataa

SEQ ID NO: 6051 - DNA, 279 bp, Zea mays
  Peptide Sequence Number=SeqID_49426
atgaatgacgagaccactcgcaagtaccttcagtcaatcaagaggctgatgacgctttcccagcggcgttaccctgcactgccctcaaaatcagtggagttcaacagcctggcaaatgggagtgacctgcaggcgcttctatcggaagagaatgatgcccaggtcttcatcgtgtccttctccggcaatgaacaggacggtgtcaacgactgtagcaaaatggttcgtgccgatcgcacgagggacagtggacaagatttgcaggttcgggccgcttag

SEQ ID NO: 6052 - DNA, 348 bp, Zea mays
  Peptide Sequence Number=SeqID_49427
atgggcaagggtaacaaacgcaagcacgactcccaggggattgccgcggaggtctggacgtacatccgggccatcgagcgatccgggctcgagggctcggatgagtctgagttctcctcggacgaggaggactcggacggcggcgaggacgaagatgacgacgacgacgacggcgacgacgatgatggtggcgacagcgacggtgacggcagcaacggcggcgggggcagcggcggcaagggcagcaccagaggcggcagcagcacgggcagcaccagaggcggcagcagcaagggcagcaccaggggcggcggcggcaagggcagcagcagcaaggccagtggctaa

SEQ ID NO: 6053 - DNA, 747 bp, Zea mays
  Peptide Sequence Number=SeqID_49428
atggcgccaaaaccacttgggttctataccaaatatgtgcaataccacttagggcacccactggaaaaagttgaactcgagacgcggacgtttgacatgccatggcatggcttttgtcgtgttatgcccaccctaggtgccaggaagaggtctgcggcggacttttgcaaagattcgcacggttgcgacctctggcgacctttgaacactggaagaaacaaaccgccacgtgttcgacgccgtctgccgcgccagagcacgcccgcgtgcgcgcccgcgccgcgcccaagccaagccagcgtcctggtccgcgtccgcggctataaaacgcccaggagctttggccgtacccctccgcacgcgctcaagcctcaccggagctcagttcgccaccggttgcccatacgcgacgcgcccgcggccacccgagccccctgccaccgtagaccggccagcccagcccttcctagccccgtccagccctcggagaagattgtgcgcgtctccgtgaagctccccgagcgaggaatcgggctctgcttcaccggagaggccggcccaaggtcaccggacttcaaccgaccgccggcaaccgtggaccgagactgtaatcttgctgacggagagtacatcctcgtgccggagcaaggagctgctcaggaggtagccccagatccagcaccagagccagcaccagaggacctgcctgccactgctttggaaggcaagccccggttttatgcataa

SEQ ID NO: 6054 - DNA, 546 bp, Zea mays
  Peptide Sequence Number=SeqID_49429
atgacaataaatcttctccttagccttagcaaccacctcattaaaggagggtctatcatcgaatatcacagccacacgttgcatgtcaacgaactcagcatttccataacgatcttattccacgatgcatccatggttcttcctgatgacatccgtcgagcattgcttgttattgtggagtgttgcatgaagcgagattatctagcggcaatggaccaatacatcaagctggcaatcgggaatgcaccatggcccattggagtgactatggttggcatccatgagcgttctgcccgagagaagatctacacaaacagcgttgtccacatcatgaatgacgagaccactcgcaagtaccttcagtcaatcaagaggctgatgacgctttcccagcagcgttaccctgcactgccctcaaaatcagtggagttcaacagcctagcaaatgggagtgacctgcaggcgcttctatcggaagagaatgattcggttaaagcttctgaggaaaggctccggttgatgccagcatatgccttcgcagactag

SEQ ID NO: 6055 - DNA, 162 bp, Zea mays
  Peptide Sequence Number=SeqID_49430
atggagagtcatgatctccgggcagaatgggaatcacgacttgtgggtaaagaagaaggtgtcgaggcggatctccaggagttccaggacttcaacgagttcgaggattatgctagcaacctcccccagtcagctgcctgtgtatcgaacaatgttatatag

SEQ ID NO: 6056 - DNA, 438 bp, Zea mays
  Peptide Sequence Number=SeqID_49431
atgttgaggcgaagtacaagctttggccccacctgctggctcgcgtcctcccctaaggtgggtccgggggccactgtcggtaccctgaaactaggggccgccacgtggccagagaaagtgatatactccaaggcatcaacagtgagtccagacccccacgggaaagtgttggacccctggatatacagtccggacctccaagttggtccaggacccccacgtgtacggaccggacccctagaatgggatccagaccccctgtatggggtccagactgcccacagtggggtcctaagaccttacttaaggcctaggcgggggtctagagctgacacgctgagccccgatgctgccacgtggcatactgcgcgtggcataagccaatgggcagaacccggcgtgatgcctctgggctacgcgcgccttcctggcggataa

SEQ ID NO: 6057 - DNA, 603 bp, Zea mays
  Peptide Sequence Number=SeqID_49432
atggcttcgcttggccaccctgagcgtttccagtctgagggagcactcaacctggtgcgcggcctgctcggatggagcgcaccggggctcgccgaaagaatccgcgccggcgctgctcccctcggcgatctcgccaccggggagttcgtgctattcatctcctacatctcctgtgggttggcgctaccgatctcacccttcttcttgctgctgctagatgtcgtatgccacgtggcagcatcggggctctgcctgagcggggagcaggagtgtatgcggataggtctggagcgcaccagagcaggtctagacacgtgtcagctctggacccccgcctgggccttaagtaaggtcttgggaccccactgtgggcggtccagaccccatacgggggggtctggatcccattctaggggtccggtccatacacgtgggggtcctggaccaacttggaggtccagactgtatatccaggggtccggcactttcccatggggtccagactcactattgatgccttggagtatatcactttctctggccatgtggcggccccggagccacccacgtggtgggtcaggcgctgttgctggtccagagtag

SEQ ID NO: 6058 - DNA, 174 bp, Zea mays
  Peptide Sequence Number=SeqID_49433
atggagagtcatgatctccgggcagaatgggaatcacggcttgtgggtggttatgagatcgatggttctggttatgactatggtgctggttgtcagcattgcaaccactgctcaggcgaagatgaagctgtggaaggagacttccaggagttccaagactatgacgagttctag

SEQ ID NO: 6059 - DNA, 192 bp, Zea mays
  Peptide Sequence Number=SeqID_49434
atggttcttcctgatgacatccgtcgagcattgcttgttattgtggagtgttgcatgaagcgagattatctagcggcaatggaccaatacatcaagctagcaatcgggtttttattaacattttacgctgatttaatcaaatgggccgacgggataacgggctggtccggcacattcagcaagccggcatga

SEQ ID NO: 6060 - DNA, 1143 bp, Zea mays
  Peptide Sequence Number=SeqID_49435
atggatctgctgaagcgagaactggagaagaagcggaaggcggcgacggccgacttcgggggcaagagcttcgtgcggcggtcggagctggagcagaagcagctccagaagcggcgcgacgagcaccgccagctcctcgccaaggccggcacgtcggcgccctccgcgaattccgccgcagctgctaccggttccgaggagcgtcgcatcgacgagctcgacctcccacggcacgaggtggtgcggcgcgagcctgtcacgctgttcggggaggacgacgacgcccgcctctcgcgcttcaagctcgtgctcaagtccggcgtcatcgacgacatcgacatgaccgagggacagaccaacgacttcctccgcgacatgatcgagatgcgcaagcggcagaaggccgggagggacacctacgccaagggcaagagcaagcgtgttgatgacgggggtgctgccggaggcagtgcggatgatggggatgccaaggggagcggcgatgatgctaacgcagacaaggactccaagaggatgaggaccaagtttgaggagctttgcaatgaagacaagatcttggtgttctttaagaagttgcttaatgagtggaaccaggaattggatgagatgactgagctagagaagcggacagcaaaggggaagtctatggttgcaacattcaagcagtgtgcacggtatctcagcccgctgtttgagttctgcagaaagaaggttcttcctgatgacatccgccgagcattgcttgttattgtggagtgttgtatgaagcgagattatctagcggcaatggaccaatacatcaagctgacaatcgggaatgcaccatggcccatcggagtgactatggttggcatccacgagcgttctgcccgagagaagatctacacaaacagcgtcgcccatatcatgaatgacgagaccactcgcaagtaccttcagtcaatcaagaggctgatgacgctttcccagcggcgttaccctgcactgccctcaaaatcagtggagttcaacagcctggcaaatgggagtgacctgcaggcgcttctatcagaagagaatggttcggctaaagcttccgaggaaaggctccggttgatgccagcatatgccttcgcaaactag

SEQ ID NO: 6061 - DNA, 1122 bp, Zea mays
  Peptide Sequence Number=SeqID_49436
atggaggtcgacgccgagatccatggcaccgacctcggcactgagattcatggcgccgagatccatggcgccgaggtagtgccacgtcagctcctcgccaaggctggcacgtcggcgccctccgcgaattccgccgcagctgctaccgtttccgaggagcgtcgcatcgatgagctcgacctcccacagcacgaggtggtgcggcgcctccgcgtgctgcgcgagcccatcacgctgttcggggaggacgacgacgcccgcctcgcgcgcttcaagctcgtgctcaagtccggcgtcatcgacgacatcgacatgaccgagggacagaccaacgacttcctccgcgacatgatcgagatgcgcaagcggcagaaggccgggagggacacctacgccaagggcaagagcaagagtgttgatggtggcgacgggggtgctgccggaggcagtgcagatgatggggatgccaaggggagcggcgatgatgctgacgcagacaaggactccaagaggatgaggaccaagtttgaggagctttgcaatgaagacaagatcttggtgttctttaagaagctacttaatgagtggaaccaggaattggatgagatgactgagctagagaagcggacagcgaaggggaagtccatggttgcaacattcaagcagtgtgcacggtatctcagcccgttgtttgagttctgcagaaagaaggttcttcctgatgacatccgtcgagcattgcttgttattgtggagtgttgtatgaagcgagattatctagcagcaatggaccaatacatcaagctggcaatcgggaatgcaccatggcccatcggagtgactatggttggcatccacgagcgttctgcccgagagaagatctacacaaacagcgtcgcccacatcatgaatgacgagaccactcgcaagtaccttcagtcaatcaagaggctgatgacgctttcccagcggcgttaccctgcactgccctcaaaatcagtggagttcaacagtctggcaaatgggagtgacctgcaggcgcttctatcggtagagaatggttcggctaaagcttccgaggaaaggctccggttgatgccagcatatgccttcgcagactag

SEQ ID NO: 6062 - DNA, 261 bp, Zea mays
  Peptide Sequence Number=SeqID_49437
atggagagtcatgatctctgggcagaatgggaatcacgacttgtgggtaaagtgtgcgacctctgtagagggttagaaactgatatatcagtcgtgctcacggttatgagcggccttggatcctctttgattagagatacagatggtaaagaagaaggtgtcgaggcggatctccaggagttccaggacttcgacgagttcgaggattatgctagcgacctcccccagtcagctgcctgtgtatcgaacaatgttatatag

SEQ ID NO: 6063 - DNA, 147 bp, Zea mays
  Peptide Sequence Number=SeqID_49438
atggattcaacatcggtaaagatgtacctctgccaggtgaggaagcgacaaatttttgttgcttttgctccaaggtggttcgcaaggaagaaaaacaagagtgaagccgcgggaggacttggtcctccatatagaacttttgtttaa

SEQ ID NO: 6064 - DNA, 156 bp, Zea mays
  Peptide Sequence Number=SeqID_49439
atggccgtgatggattcaacatcagaaaagatgtacatcttccaggtgaggaagcgacaaatttttgttgcttttgctccaaggtggttcccaaggaagaaaaacaagagtgaagccgcgggaggacttggtcctccatatagaacttttgtttaa

SEQ ID NO: 6065 - DNA, 285 bp, Zea mays
  Peptide Sequence Number=SeqID_49440
atggtgttgccagtggcgcaccggacactgtccggtgccccaggccaagcacctcgtgaactagccactttcgggtttatcagggaggcgctccgctataattcacccggactgtccgagacaatcaatcaagccaaggatggaggcaagaagaggttcgagataccgagtgcacgggagaaggtcaaggagaccaggaacccaaagccaggggtgaagaagacttgcaaagtcaaggttgatcgagttaagaagagttatggtgcatcaaggatcactacataa

SEQ ID NO: 6066 - DNA, 354 bp, Zea mays
  Peptide Sequence Number=SeqID_49441
atgtcggcgacaagcggaagcgggatccaagccctccctcgtaggacttcggtgactcgaaaggtgtggacgtacatccgctctgtcgagcgcgctgggctcgaggggtcggatgagtcggaggtctccttggatgaggaggactccttcggctcgtccgaggagcggagcggcgacgacagcgacgatggtgacggtggcggaggcgacgacgacggcggcacgagcggtgaaggtgacgacggcggcaggggcggtgaaggtgacgacggcggcaacggtggcagtggcggtggtggcggcaaggacggcagtggcggcggcaaggctagtggcaaggcgccactggtttaa

SEQ ID NO: 6067 - DNA, 240 bp, Zea mays
  Peptide Sequence Number=SeqID_49442
atgcgcctcatcctgtggtacctgttcttgacctgtggggggtgtgagacagcaagagtgagctcacatacgttcatcgctcaacaagttgtggggaataatgtgcatgaactcgccaaaggtgggagctcacgtgaagtgtcttctaggaagaagcggcttttggctgaagctgtttgtatgagatggccgaaggttcctcttcatgaagcttcggtattacaaaccgacttaaagtag

SEQ ID NO: 6068 - DNA, 282 bp, Zea mays
  Peptide Sequence Number=SeqID_49443
atgtcggtggccagggacaaccgacgtcgtggtgtgtgggtctcgccggattcgggtcgcaggggttgccgccaaggttccatacccccaccgacgctcggtgtgcgcaacctaggcgcggatggtcgcctaggcatggggagtccatcacttacgtcgatatgggcaatgtcggcctcctcacctggggatttctcgccggcgtcccttcttcctctcggatctgtgggccaccgtgagcagggctatcgccgcaccgggaacagattaaagtggaattaa

SEQ ID NO: 6069 - DNA, 477 bp, Zea mays
  Peptide Sequence Number=SeqID_49444
atgtcggggaaggcgaactattgctgcccagctaggatgcaacattccgtcctctatcctcgctttcgtgacgaggacgggagcggggacctgccggtgcgctttggagcggcctgtgcttgctggtgcggcgttggtggacaggcggacgccgccatcggtgctgacgtggtggcagctggagaaagcttctccgccgttaaggccgtcagcgccgcctacggaccgacctccggctctttggctttgatagcttgtcctcgcccctcgagtggggacgagggcgagggcattgttgcagcggcgtccgccctgaggccatcgccgctgcagtttggccacctggagcggaggtcgttgtcgctgctgccggagcaggcggcgctggctgaggcttcggggtggccggctgagtcgtctgctcgggccgggttcctggagaagaccctggcggcgatggcccgggcgcggtgctga

SEQ ID NO: 6070 - DNA, 2625 bp, Zea mays
  Peptide Sequence Number=SeqID_49445
atgccctcccatggtgggaagctggtgcgaagtcctgccttcgcgctggatttgcaaagccgcgatccggccgcctttgtgcgtgaggcggaggatggggcggtgcggatcgttggtcgatacgtgccgaggacagagggccagcgtagctgggatatccgcgggtcgaatgaccgtttgaacagggtttttgaattgaatcaactgccgtataacggctatcccggccaagacgatgtggaccgccgcgggaaaaagccggtggtagagtctggagacgaccctgcgccggcggccgccccatcctcgaagaagaggaaactaggtactgctgtgggaggacttggggtttccgatggttttgctagagaattgatgaggacatgcgcggccccggggggaaggatgtcttcgcccaagctccgggagtcttcggcgcggatgctgagggttaccgggggttggtggcctaggaatgttcctatcccccgcgcggccgacgaagacttttttacatctcgcatggttcgtgagtggaaagtgtttccttacgggcggaatattgctgctgttgtgtcggcagtgatggacaaggatcgccaaggagctgcgcagaagcgtcaggcggtcgtcaggcttcatgaagccaggccaaagaggcagtggggggctgcgaaggctacggcccccggcggaggccatccgccgaagtcggccgtccctgcatccagcagggcgccggagcctgcggctgccgccggtggttccaaggctgcgaaggctgcaccggcgtccggcagagtgacggaggctgtgaagtcggcccgagggttgccgccgccgggcaagcgcgtcgccgacttcgccaccgacattagtgtggacgactatcttgttgggtcggacgagggccaacttgtcgttgttccgtctgccgcggcgaccacgacggctgccgtaatgccaaaggcgaagggtggtgctcttagtgctggcggcgagatgccggcacttgctgctgtgagggacgaggcagacgctgtgtcccaccggctggaggagatgaaggaggcgctaagtcaggcggctgacttcgccggccgtgcggcgtcaggggcccttacgaccgttgtgtctgccgaagtcgagagacttcggacgcaacatgctgacgccatccgggaaaaatcggccgccgacagcaagtgccgcaagctggcggacaaggtggccgtgctggagggggaaaaatccggcctccggcgccaattggtggaggagaggagggaggccaatgaggccctcgccaaggcgcaggctgcgctggcggaggccaatttggcgcgggtggagggcaatcttgccagggagcgtgccgcgcagttggaggagcggctcaacgccctgcagagccgcgtggagaggaccgaggccgcgacgcgcgcggaggctgagcggacgcgtaaacagcttgtggattcataccatgagctgggcgcgcggaccggtgacttcgaagtgccggaccgagagcccggacttcgctgcctggagtgggtacaggaggagttgcaggcactccccactatcgtggaggggtttatgtcgtatgcctccctggtcacctgcgagggggcgatgaacgcactctctcgcgaagggtgccggcacttcgaggtcttcgaccaagccgatgaggattttgaacgagatatctacaaggttgaggaccctatagtgaaggagtccgccggagccatctacgaccggatgtggggcccgcacggtcgagaggtggtcagggagcgggccgagacggcgagggctcaggcggcgcgcggcgagagggtggatgatttcggggcgttgaacagcgcgctgcttgacccggagtcgaacccggcggaggtcgtgtccgaggccgccctggagccgcccccggagactgccgaaggcactcctgatgcccccgcagccgctgcggccggcggaggcccacccctggagaccgccgaaagcgttcctgatgcccccgcagccgctgcagccggcgaaggcccgccgccaactgctgtgccgagggttgaagatcctgcgacggtggcgttggaggcgacggcggaggctcccgcaacggctgggtcctcgcaggttcaagattttgggcctgcgcacgcaaccgccactactaattttttggcggcttcgaccgtggatggtgttaataaatcggatgggtctacatctaagttttctgattttggtgactccgggagctcggttgagtggactgaggagtcgtcggatgaggacttggactattttgcggccttggatgtggcagcggcggaggcttcaccgcacgctgcggacacagaagatgtgcctggtccgagtaccgggcgcaggcggcgaagggctgttgcgaagcgtagagtgagcggggcagagggcggtcgacttcgtgcgttcgtccggctgtgcccttgggcaacttctgcgtggatggtctttgcagtggacttcggtcttccgcacttgctgtgcttgtccggctgcacccttaggcgacttctgcgtggatttgtcccacgcgagggcggctgctgtggggcctcgtggtga

SEQ ID NO: 6071 - DNA, 84 bp, Zea mays
  Peptide Sequence Number=SeqID_49446
atgtcgaagatagatgatcttccgaaggttgtggaaaaggtaagaatgcgagaatggcacaagagtgattacaatccagcgtga

SEQ ID NO: 6072 - DNA, 679 bp, Zea mays
  Peptide Sequence Number=SeqID_49447
atggcgcttcctgttgacgtggcgggtctgtgccctaggcagggtgacatgggggctcctccgaagccgaggttgagtctgtcttctgttgccgaggccgagtccgagccatggggtcgggcgaggcggaggtcgttcggccgaggccagggcggagtccgagccctggggtcgggcgaggcggagttttgtcgtcttccgggtcttagcccgagtccgagccctggggtcgggcaaggcggaggtcgttcggccgaggccagggcggagtccgagccctggggtcgggcgaggcggagtttcgtcgtcttccgggtcttagcccgagtccgagccctggggtcgggcggagcggagttcgccgtcttccgggtcttagcccgagtccgagccctggggtcgggcggagcggagttcgccgtcttccgggtcttagcccgagtccgagccctggggtcgggtggagcggagttcgccgtcctccgggtcttagcccgagtccgagccctagggtcgggcggagcggagttcgccgtggcgcctttggcaaggcctgactgtctgtcagactcactctgtcgagtggcaccgcagtcggagtggcgcaggcggcgctgtccttctgtcagactgctttatgctgatgggggttaccagctgagaattaggcgtcttgagg

SEQ ID NO: 6073 - DNA, 174 bp, Zea mays
  Peptide Sequence Number=SeqID_49448
atggagagtcatgatctccgggcagaaagggaatcacggcttgtgggtggcaatgagattgatggttctggttatgactatggtgctggttgtcagcactgcaaccactgctcaggagaagatgaagctgtggaaggagacttccaggagttccaagactacgacgagttctag

SEQ ID NO: 6074 - DNA, 360 bp, Zea mays
  Peptide Sequence Number=SeqID_49449
atggataagtttggcttcgtgttcatgatttgtgcctctaggaggactgcacctaaagtcttggctgagtttaaggacatccctgattgtgatgtccgtgcttggaacaaaatgatggttgattttgtgaacagagatgttgatcctgtgtggaaagtgttccaggacatgcctaatcatgatgtccttgcttggaacataatgatgggtggttttgtgacaaatggtatcaacatgaagccctctctgtctgagctattgcgccacatgttccatgtaaacttggcagagtcttctactagtaaagaggctaggatacaagagatcgaagccaagtttatccattgtaaagcaatttga

SEQ ID NO: 6075 - DNA, 1660 bp, Zea mays
  Peptide Sequence Number=SeqID_49450
agaaccacagtctctcaccctcaggcgatcgctggtgtcgtctggtgtcagtgtcaacagcagctcacgaagccaagggaggagaagaggagagcagagcagagattcggaaatgctatgtcgccgtctggctgttgctgcagtagtggcctgcgtgactgggtgggagcggatcgagcagaggggaagaggaaggaatataatggctgagcgggaggtcgtcgaaggcgggacgacgacgggaggcgggctgtggcggaggtatgcgccgcacgtccagatggtgctggcgcagctgtgctacacgctcatgtacttcatcaccgaggccgccttcaaccagggtctcaacccctacgtctacatcacctaccgccatctgctcgtcgccgtcctcatctggcccttcgcatactacctggagaaggggctgaggcctaaaatgacgctcatgctgttcgtggagatattcgtgctctcccttctcggggtgagcttaactctgaacatgtacttcacgagcctgaagtacacgtccccaacgttcgtcacttccgtggtgaacaccatcgcctcgatgacgttcgtcatcgccatcatcctcaggatggagatcgtggacgtgaagagcctacgcggggtcgccaaggtcgcagggaccgtggtgtcgttcgccggggtgaccaccatgactctgtacaaaggagcggccatcacgagcctctggaagtcgcctgttcagatcgccggcagcggcagcggcggcggaggcgtcgcccacgacagctgggtgaaagggtcagtcctcgcagtggccagctgcgtgtgctggtccatctggtacatcatgcaggcgtcgtctctgaagaggtaccccgcccagctctcgctgacggcgtggatgtgcacggtcgggggcatccagtcgaccgtgttcacgctgttcatgcagcacgagccggaggaatggcgcatcggcttcggcgtcaagttctggagcatcgtctactctggcctcgcctgcaacggcttcacggtgttcgtgcagctctggtgcaccgagaagaaaggccccgtcttcgtcaccatgttcaaccccctctccaccatcatggtcgccatcctggcctacttcatcttcggcgaaaacctatacgtcgggagcatcgtcggaggcggggttgtgattctgggcctctacatgctgctgtgggggaaggagaaagaccaggagcggggcacgggcaaagagcgggaacagctcgagacggactgcgagaagcaggcgaagaaggtcagcgactgtgtctacgaagcgcccaagacgacgaaagtcaccgatccggtctcgcctcatcagctattctccacgctcatctgcccgacgctctccctccaggcgctcgccggcgcgatgagggactgggcgccgtcgatcatcgccacggcgctgttcgcgctcctgtgcccgggcggcgtgctgcagatgcccggccggcaccgccccgtcgacctcatgaacatgaagaccagcttcccgtccacgccgtcatctacttcctgctgctcatgctcttcctcgtcatcctgcagcctcacctctacatctgacgtgagcgtgttccccaccccttcacacaagcttctagcatgtttctag

SEQ ID NO: 6076 - DNA, 678 bp, Zea mays
  Peptide Sequence Number=SeqID_49451
atgatgctcttccgccacggggggaagacgtcgtcgaggtcgccaccgccgggcgagctgacgatcgtcattgttgctgtcgcgctgcggggggaggagtaccttgtcatagctgccgtcgagggacatgaactcgagactcccgaagcggagcaccgtcccaggctgaagaggttgctgaagactacccatctggaactcaacgggaagtctcggcaaggtcgaagtgaccgcagtaactttgcccttccactgaccgacctgacaggaaaacagcgccgctcgcccctctccgactgctgtgccacccgccagggcgaggctgacaaacaactaagttcagccttaggtgcaacaggaagctccgcctcgcccgaccttgggcctcggcctcaggaggaggtctccgcctcgcctgacctcagggctcggcccccgcctcggcctcggaaggtggtctccgccttgcccgactccagggctcggcctcaacctcggcctcggaaggtggtctccgcctcgcccgaccccagggctcggcctcaaccgcgacctcagaaggaatcacgtcctcgctcgaccccggtctcggcctcaggaggagtctccgcctcgcccgaccttgggctcggaccgaccgcgccacgagggatgcatcattaccctacccctagctag

SEQ ID NO: 6077 - DNA, 162 bp, Zea mays
  Peptide Sequence Number=SeqID_49452
atggggctcggtgtatgcggcttgctctgccaaggtggcaatgagactgatggttttggttatgtctatggtgctggttgtcagcattgcaaccactgctcaggagaagatgaagctgtggaaggagacttccaggagttccaagactacgatgagttctag

SEQ ID NO: 6078 - DNA, 348 bp, Zea mays
  Peptide Sequence Number=SeqID_49453
atgggaaagtgccggacccctgcatatacggactggacctccgggcaaggtctaggacctccacgggtacaaaccggacccccaggatgggtcccggacccctctgtgtgggtccgggtcacgacagggtcccgggattctgggacaaagaattaccgggccttagtcaaggccaggcgggggtccggagctgacacgtgtccggaccataccgtgtacgcttctgctccccgctcaggcggagacccgatgctgccatgtggcccactgcccgtgacgcggtacgcccatgctgcggcatacactgtgctcatcatggctcgcgcgttaccgagggagcagccgtga

SEQ ID NO: 6079 - DNA, 219 bp, Zea mays
  Peptide Sequence Number=SeqID_49454
atggtctcccattccggttatggtgggtacaagtgcggtcactgcacgacggcagtcgggatcagtgaggcattgtacgccaaggcgccttgcttgtggcacaattttacaggttctctggaggacatggttgctggagtgacttggccgtccaccttaccaccaggttggactgtcgagtgggaccctacctcggctgaggaggagcatgaggagtga

SEQ ID NO: 6080 - DNA, 567 bp, Zea mays
  Peptide Sequence Number=SeqID_49455
atggcgtgtgaccattcacatactacagtctcgaggctaagcctagagatgaggaaggaagaactgctgcctgtggaggaaaagatctcggaattaagtgaatcacaatcagagcttctagggaggctccgtgggcttaaggaggatttgctgagttggaggagtaatttagactcccaagtgacgaaatacaaagtgggatcttttaggattgtaaaggaactctctgacatcaagagtgcactcaataatgaaatagagcagcttcgctcagatttccaagagctgaggaccacccttaagaagcagcaggaagatgtgtcacttagcttgaagaatttggggcttcaagatgctaccgaaaatgatgggaacaaaggaaatggagacggcacaaatgaggtcttgtcagctaacttggggaacttgaaactggatggttcttctgaaaactatgatgaaagcagagagtcaaaggaggacaaggtggaaaacaccgacactgctggtgatggcatcgtcgacaaagctactaaggagacgagctcaactgatgaacaattctaa

SEQ ID NO: 6081 - DNA, 411 bp, Zea mays
  Peptide Sequence Number=SeqID_49456
atggaggacctgattccaaagtttgagacatgtggtgtgtatcactttatgggtcagaggagtgatttcagtgagatggcagtaaagcaattcctggccacatctgagattgatatagatgaggaatccatcacatggatgactggtttcaagagatattctgcaacatttgctgaatttgcagctgccaacagtctggattatggtaccatttcagctgggattgatctatacactgaagataattttgaagactttgtgcaattttatgagccagcaaggctgggaatacctaggaggtttggagagacagcaggactgaggcatcatcctgctatgatcaacaaaattgcaagagtcacaattctttccaagagtggggacaagagcaaaattagagacaaattctag

SEQ ID NO: 6082 - DNA, 750 bp, Zea mays
  Peptide Sequence Number=SeqID_49457
atgggacaaagccctgagtacgaagtgtactttcgcaagtcttacccgactaaggaaaaagactctcaaggatatgctggatttaggaatcaaggaaaggcttttagcaagaatcaacttagatacttttgcaaaaatagcttactaaaaagtatctataaaggtgtggatatcaagatcctcgacggtgaaccgcacagggagacgagctccggcgagctagacgggccggagggagcaaagactggtgcttccgagtggcagaaaccgaatcggaccccgcccgcgcattccccccaacataatttcaccaaaggctacttggtttgctctggccgcagtgaccgtggaccatgtggacagatgcacacattcccggcgattggtgattatctgtcagaattgtacattgaataccaaaaggagcgggttcacatggtggatgacgcgagactagcgtttgaactaagcacagttctctctaaggagccagatgacgccaaatttgctataccacttatggagtctgactttgactttaccaaactggtgccaggatgtccttggagattacctcaaaagatccatctccaggacaagcagtgcgctggcaaggacttcgtcgtgctcatcgctcgcctcctcgtcgccgagctcttcctccgctacgactcctttgacgtccaggtcggcgcctccatgctggggtcatcggtgaccatcacctcgctcaagaaagccaccttctaa

SEQ ID NO: 6083 - DNA, 1260 bp, Zea mays
  Peptide Sequence Number=SeqID_49458
atgaagaatgtgtcagcgccagggggaggcgatgatgaggatcctcgtcgccccttcaggcaggtcaagggcaagaccgtatacttggagcagcaggaaggccacaagaagcggcctatggacagggcagcccgagcagcggcagcagcagcagcagccgctgagcaggccgagctaggagatcaacctcagactccttcagatcagattgcgtaccgtgctcagagggaccctgctgcagttgacctcttcagcacccgtattcaggagtcctttttcagagctcagatcgacaggtatgttgaggaacgagtccgagttttctacacgactgtatggattgaccctgatcatcactggatgaggtttcgttttgagcgagaggatgtcactattcatgccagccagattcgccagctctttggatttcacgagtcatcgactcgtcttcacagcttatgctatggcacatataaccctcctcatcgccctcacggcggtgttgctcctagtacagcccacgtcgcggctctgttccgaccgcccttctcagatgggtcgcgacgctctccggcagacttcaccactgcagcaaagtttctatatcagcttatgagatggacacttctgccgcggatggggtacagggaggctaccactcatatccagctctggctccttggtgctctggtctctcactctgagtttgatgttatggatttccttatttgtgagatcgaggacaccgtattggatggtctgcgtgcacgtcgacaactgccatatgctcactatctatgtcacatttttgctcagctgattcggcctccacagttccagggcacacttgaggcctcacgcctcgtctttgggtcctactgtccagcgcctaaggatcctctgccagcacctgctccagtatttgacattcaggttgaggatactgctcttcatcagttcgaagctcaggacgcaacagttgatgattatgatgatgattttgggattctgcctccgcctcctatgcctccacgctcacatgatcatgaggctgggagttctagtgctacccctgctgcccctcctgccattgaccctgctcttgctttgattctcctgacacttactcagcagcaggctcacttggcagtcgagcagacccgccaggcagcagcccatcagcagttgtccgagaggatgatctcgatgcttcagacaatacaggacatgaaggattctcttcagcagcagcttctttag

SEQ ID NO: 6084 - DNA, 798 bp, Zea mays
  Peptide Sequence Number=SeqID_49459
atgacatcgaaccttggcactgagcacctcctcgccgggatggtgggcaagaactccatgaaggttgctcgtgatctggtcatgcaggaggtcgagagcgcgcacccggcggccatggcggcagagagcgccattgacaccaatacagagcatcctgagcctgagcacaaagaccttctaagagtctatgaagtgggagatggctccactatgggttgcctccactcaattggatctgatcttactcaaactcgggagctgccagaactgcaacagaatgtgtccatgcggagcgggcaagaagcttccacagtcggtaaggattccagcaggactccaacaagtgtgcgtgagctggttgtacctgtttgttccctagaaagtggagtgcttggaaagagaatcaaaaggtctctaactggtggaaatgagatgcagtctacccaggacaagcgatccaggaaggctagcatgaactttggtgttgtgtctgtggatgagagtcaaaatgttgctatccttatcaaacatgggccactggcaattggcatcaatgctgcctacatgcagacatacatcgaaggcatgccatgtccatacatatgtggaagacacctagaccatgttgttctccttgttggctatggcgcagctggttttgcccccatccacctcaaggacaagccttactggatcatcaagaactcgtggggcatgaactggagggagaacgaatactacaagatatgcagggttccaacatttgcaacaagtgcggtaacaccattcatgtattaa

SEQ ID NO: 6085 - DNA, 738 bp, Zea mays
  Peptide Sequence Number=SeqID_49460
atgggcaatggccatgaaccggtacagggccggcctgccaatgatggcattgaatgggaggttaacctccgcaccgtcgaactggatgttcttcgtgcggaagttttcctctgtcccgaatgtaaccgggagcgtgatgctcccaaggggatacaccggttgcgcgcccactctggagaatggacgagagggtcccagtcgggaccctgggatctgcagctacctgaacgcagcgtggctgatgacattgtgcccagccccaccgtcgatcaggacgtgatgcagcttgatgttggcgatgacagggcggtgatgagcagcatcggatgccccgaaggagatagttgtgctccaccaccgttggtgtggggccgctttcgggacccatggggtcaccgacaggacctcacggcgcagggacttcacgttcctgcgggaggtgagctcccagcttccaccgtacatcacgtacaacttcttgcggcggtcggtatcatcaccggagtcggagtctccaatgaggatgtctttgaggacctgctcgggggactgatacccgaggtcccgttctcccgcggccacatcaccgtcgtcgaccctctccttgccaggccggcgacgaggtggggagccatccttggacgtctactcacgccgctcactaacgcgcttcgtgagcttgatgatctcgcggcactccacggcgctgtggcgactgttggggtgcccagggcatga

SEQ ID NO: 6086 - DNA, 357 bp, Zea mays
  Peptide Sequence Number=SeqID_49461
atggcccccgacgaggccgtggagctaggagggtggcgtagcaactccctggctacagacaaggccctaggcgcagcccttgacgccctggacgcttgcacaggagtgtgctaccgcacagagcgcacaacagcagcaccaggcatagggcggctggaggcccgcggcgtggaagacacgacttcttcctcgatcgaagtcttcgggatcgaagtcatggtgctcgacgatctggaccatggtgtcgagcaggaaaacaagcaaaaacctaatgccaaggcccctacctggcgcgccaaatgtcggagaggaaattctccggccgggtggcggaacgcacccaccctaaatccttag

SEQ ID NO: 6087 - DNA, 786 bp, Zea mays
  Peptide Sequence Number=SeqID_49462
atggcggccccgaggaggggcggtgctggcgcgagcggtggttcgacttctctacacgcgggcccgggctcccgtgccagagactgggctgttggtttcggcggagaggcgcactgcggcagacggtggcgtgctcctcacgtggcggttcgccttctccgcacacggagaccggtgcccaaggagcatgactcgtgggcccgagcccccgtgtcagaggctgggccgctgcttttggtggagatgaagagcaccctttcgctcttgagttctccacgctcttctgccgttgtggccgccatggtcttgctagaccctcccgagcgtctccagcccgaggtggcactcaacttggtgcacaacctgctcggatggggtgtgccggcattcaccggaaggatctgtgtcagtgcttttgcttacgacgacctcaccgccagggagttcgtggtctctgtctctaacctccccagcgggctggcactgccggtttcgtctttcttcgtgctgctgctggaggaacttggcctccaacctcagcactttacgccctgcttcatccttcaggcggccgtcatcgcctacctcctcaggatgtccatggggcgacgctccttcccgcttcttcctccagcattcgggggggaaggatgcttacggtacgggaccaggctaagcggctacacggctccggaccaccccaggggacaagcttttgggtatggaaccaagctaagcggccacactgctccggacgaccccatggaacgagctcctgttctttag

SEQ ID NO: 6088 - DNA, 255 bp, Zea mays
  Peptide Sequence Number=SeqID_49463
atgaccaatggaattataaagaaaaatgaaaaagaatcccatgatgcccgagaaggagctaagcgagccgaagaagctgccgagcgcgcaaggcgtatagctgaactctcactgctacccgagccatacgacccccaggctgatcttgttatgaaagaggtgctggatgtgatgagtgttgccaataccattgtcgacaaagtcgtcgatagactgctgaatgaggccaccgagaaaattctcaaagaaaactag

SEQ ID NO: 6089 - DNA, 480 bp, Zea mays
  Peptide Sequence Number=SeqID_49464
atggcgaggaggccctcgccccgtcctcgtatgggggtgaggacaagaccatccaagaacgcggccgccacctccacggcgtacgacatcttgtacgactccccgggcgacattggagcagcgtggcctgcggtggccggcggcgcagggcgtgctacgggtgcggtggacctgcacacggcgcgaccattgcccgtacggtggacgggcagccatgctccgcttggcggcgggaggcggtaccgaagccatcaaagccaaagaaatggagccgcaacacggctcgcttcccaccccaaagagttgggggcgcgagggatggagctgtggcttagcccgctgtccaccttcatgaggctggtgatcatccttcccccgaatgctggaggaagaagcggaaaggagtgtcgcctccatggacatcccgcggaggttggcgatgatggtcgcctaaaggatgaagcagggcgcaacgtgtag

SEQ ID NO: 6090 - DNA, 315 bp, Zea mays
  Peptide Sequence Number=SeqID_49465
atggagcagcgacgcacggcgaggagactccaggggcgcgcggcgtggagggagatgagcacgcgcacggagcacgaggcgcgacgcagggaggacgcgcgtcagggaagagatggagcgagggcgagcctgggcgcggatggctgcttccgcagcaccagaactggaggtcttgccagccccttagcgccacagccaatatctcagagtggtcccgatgcatggatctccgagattcgggactacctgaagaaaaatatccttcctgaagatcatgtgtccgcagagcgtatagtgcggttggctaaacgctaa

SEQ ID NO: 6091 - DNA, 450 bp, Zea mays
  Peptide Sequence Number=SeqID_49466
atgtcttcagttatccccaaccccactggtcaacagcaacaaccatttaatagtgcattaggatattattccaggttgcaggccaacactgaatttgttcttgctcatactgtcaagggaccaacagcccagatgggtgggcgcgagacggagcgcgaaggggggaaaaaggcggccggagacgggcgtgagaggtggaaatcccgcggccttcgtgtttgtcccgcgcccaggtcgggtgcgcttgtagtagggggttacaagcgtccacgcgggagggggagcgagcggcctcacgcgagcgcctgtcccgtcctcttctccgcgcggccaaccctctctaagagggccctggtccttccttttataggcgtaaggagaggatccaggtgtacaatggggggtgtagcagagtgctacgtgtgtagcggaggagagctagcgccctaa

SEQ ID NO: 6092 - DNA, 186 bp, Zea mays
  Peptide Sequence Number=SeqID_49467
atgagaagagtcttgccacctgactacctgactccaatcaaggttgatggtcgcattgccgtctgtgaaggggcgtctgaaggtgttggacttggccacccaattgagtacatctgccttgatctggaggcacctaatgtgtgcaagtactgtggtctccgttatgttcaagttcaccatcactaa

SEQ ID NO: 6093 - DNA, 396 bp, Zea mays
  Peptide Sequence Number=SeqID_49468
atgtctcatctgatggcattgttggaggctaccaagatcactttggagaacagggaggaacttctggtagatttgtccactgagatggtggaaaaagacctacaagtggaacaattgtcaaatgagatccaagagcttgaggagctagtgggaaccagggagaacaccatcgaggtcatggaattaccactagacgcgcagagcagcggaagacgtctcgatgtagacgaacgcgtcgagcagtgtcgtgcagtcgccggcgtccttcacgtcctcgcactgttcgtcctagtgctccagatgcagcacctccgaggtatccacacgtacagggaggaagcgccgcgtaccgaactgctaggttcgcgatggcggcttggcgagggcgagaggtga

SEQ ID NO: 6094 - DNA, 621 bp, Zea mays
  Peptide Sequence Number=SeqID_49469
atggtgttcggtcaggtggtgatcggcccgccgggctccggcaagaccacctactgcaacggcatgtcgcagttcctctccctcctcggcagcttactgctgttcaccttattgatgcccatttatgctgtgatcctggaaacattcaaccttgacttctacactgatgtccaagatctttcttatttgcaatatcatcttgagcaggatccccgctcagccaagtacaggggacttcaggctgaactccccaccttcgggaaaatccagaggcgctccgctataattcaccggactgtccggtgctccaaggaagagcggctctggaactcgccagcctcgggaatttgctccgctataattcaccggacatgtccggtgtacaccggactgtccggtgagccagcggagcaacgactacttcacgccaacggtcacctgcaggcgcatttaatgcgcgccagaagcgcgcagaagtcaggcacgcgggagacggtgcaccggacaatctacagttcttgtccggtgtacaccggacagccaggcgggcccagaagtcagaagctccaacggtcgaatcccaacggcctggtgacgtggctggcgcaccggacatgtctg

SEQ ID NO: 6095 - DNA, 1660 bp, Zea mays
  Peptide Sequence Number=SeqID_49470
cgtccgtatccccaccgccattctcgccggcatcgtcgcgctcccgcccccatacgagccgcccccgcgacgtcgaccccactaccgtcaagccccagcccaccataaaccgcgcacgccccagccctcatccgcgacggagccgccattctcgccggtcgcgcctcatccccgtaagagatccacccccaccgcgacagtcaaccccgtggataccgcggcggcctacatcaggcaaacgacgaagagagtggagaggctcaaggagaggaagcgcgagctggtggcgtccgcgagggcttcgtcgtcgtcccatggctcccgctcccgctcctcctctgttggggccgcggaggtggagcgcaccgccgagcgaggggcgtcgttccactgctctgtgcacgccgtggaggaggccgacggcgaggttcagaacgcgcacttctccatcgtcagcgcaagggccatctacaccatccacgcgctaacaagggcgtcctgcgtccacacccctagtgtcctcgcctgctcctgcccccgcccctgcctgcgttcgcacgcacctgctcgcccgcgtgcctcctgcctgcgccccgcacgccgagcccgcacgccccccgcgcgctcctgcctggagcgtgtccccgccgtgtcgcacgccccccagtcatgcacccgcaacaaccaggcccgcggatctccgcgctcatcgttccctcgcacacgattgcacagtgggcatccacagtggataccccacttcccctctcttgtcttgctcatcacgaatgccgtcctcgccgtggcgcacacgattgttgtagcagctgtcgaacagtctcggttcctcatccctggctgggtttcgttcggatcacgtagcatcgtgcagcagcaacatggcaactacgtcatcgcgaggcgaagcatccagttcatctccaccacgaaaaacactgagtttgagaactgccgggagatgcagttcgctgcaatgaagcggggagacctgttggagctctgtcggcagcacggcttcgccacccgcggctccaaatttgtcctcacatgcgcgctcttgaatttaaagtgcaacgtgctgattctttatataacccttccctttatgcaactcaatgctatgtcctcattctcagctggccatggacgccgacccaagaagaaggtatatcaccgtgaacctggtcttgacagggccatggatcttcaaaagaagcctgcccttctcctttgtctgtgtgacctcattttggcacaaaagacaggatcactacttgtgcgtgaccttgaaaaggaggttggttttgtccaaaaatggaactttctttcacttatcgagcgtcaccctaatatcttccatgtctctggtggaagtgcttcccaagagcccatttctgtcacacttacggagaaggccagaaagatatccagtgaagaggctgaagcgcgagagctaatggagccaatcttggtgagaaaccttaggaagttactgatgatgtcgatggactgccagattcctctggataagattgaactaatccagtctgaactgggcttacctaacaacttcaagagaaacttgattccaaggctgagagagatacaatgcctctacattgagcagcaaaggttttga

SEQ ID NO: 6096 - DNA, 336 bp, Zea mays
  Peptide Sequence Number=SeqID_49471
atgcgatacggtcggttggtgaggcgatttgtccaaggttgcttcacaacgaagcctgcccgagctgggcttcaggcgagtcgaggctgcatcgtgtgctacaggactgatctagcaatcactgaagaatgctttgaacttgtgtcacttattgcaatagcatctgaagatggggcatatgagttttgtgagcctggtgtaatagacatgatcttccttcaaatcttaagcttaacagatgacatagaaggtgttgtcaaagacattgaaggacctctcagagatattgagggaactctgatcgctactgaaggagctctcatggccattgaatga

SEQ ID NO: 6097 - DNA, 1116 bp, Zea mays
  Peptide Sequence Number=SeqID_49472
atggaagtagcaccgaatcatgacgcattcctcaagagtgtgcttgacgggaccctggtgataggggcacgactccttgagcatcttgtcgaacaggttggccacttcgggaggcttccgagggttcctgtgctaggcagcagcgacaagatctgcgtcagcggcgtcgcgcttcgcttgcgacttcttcttggtcttcttcttcgtgccacactgggcggacgcctcggggacgtcttccttctgccgtccctgaggctgcttgtccttccagaagatggcttcgaccacctcctggccagaggcgaacttggtggcgatgtccatcaattcgctcgccttggtgggagtcttgcgtcccagtttgctcaccaggtctcagcaagtggtgccggcgaggaacaccctgatgacatccgagtcggtgatgttgggcaactcgcttcggagatcccaagagttcccaaggcgtacgtacgtaccttggaagtttccaacgaaggctttgaccaggtcgtcctagttggagatctgtgcaggaggcagatgctccagccaggcccgggcggcgtcggagaggaacaggtggagattgcggatgatgaggttgtcgtcgttcgttcctcccaactggcatgccagccggtagtccgcaagccacaactctggccttgtttcccccgagtacttggtgatggtagtcggggcccagaattgggctgggaacggcgcccgtcatatggcccggctgaaggcttgcggacccagtgcttcgggcgagggacttcgatcctcctcactgtcgtagcgtcctccgcgcctggggtggtagcctcggcgcaccttctcatcgaggcgggctcgacggtcgcggcggtggtgctcctcgccgaggcgatccgaggctgcaggcgtcccgtcccgcgtgcgcccggtgcggaccgaggcctcccgcatgagtcgggaggtcgttgcgcgatgctccgaggggcacccttgccttcgggaggcagagctttcggcccgtcggaccgtggcatcctccaggagattcttgagttctccctggatacgccgcccctcggtggtggatggctctggcattgctcggagtag

SEQ ID NO: 6098 - DNA, 1560 bp, Zea mays
  Peptide Sequence Number=SeqID_49473
atgtcgtcctcctcttcttccgctgccgctacgccgccggtcgccgcctcgtcggaggagacgctgagtagtttaatggcggagttgcgcgccagcgattctgtcgatttcggcgtgtcgcgcatgtcgtcggcccgcgtggaggatatgcagcggttgggctacttcggcggcggagttgctcgtgccccggggacggaggaagtccccgagccggagggcgagttggttgttttcgaggcgttcttcgtcgccggtatccgcttgcctgcacaccggttcgtcggcgaagtcctgcgcagggtcggacgaaggccaacttgtttatggttgcgccctgccgcggcgacagcggttgctgctgcagcgccgaaggcgaagggcggggctcttagcgccagaggcgaggtgtcagccctcgcggttgtcatggatgaggcgggcgctgcgacccaccggctgaaggaggtgacagaggcgctgagtcaggtggctgacttcaccagccgcactgcgtcgggggccctcacggcagctgtggctgccaaagtcgagagacttcggacacaacatgctgacgccgtccgtgagaagtcggccgccgacagcaagtgtcgcaagctggcggacaaggtggccacgctggagggagagaaggctgacctccggcgccagctggcgggggagaggagggagaccaacgaggctcttgttaaggcgcaagctgcgcaggcggaggctaacctggcacgtgcggagggcaatcttgccagggagcgcgccgagcagctacaggagcggctcaccgccctggagagccgcgtggagagggccgaggccatgtcgcgtgcggaggcggagcggacgcgccagctgcttgtggatacataccgtgagctgggcgcggggaccggtgattttgaagtgccggaccgggagcccggacttcgctgcctggagtgggtgcaggaggagttgcaggctctccccactttcgtggaggggtttatggcgtatgcctccctggtcacctgcgagggggcgatgaatgcgctctcccgggaagggtgccggcacttcgaggtcttcgaccaagtcgaagaagattttgagcgagatatctttaaggttgaggaccccgttgtgaaggaatccgccggagctatcttcgaccggctatggggcgaacacggtcgcgaggtggtcagagagcgggccgagacggcgagggttcaggcggcacgtggcgagagggtcgacgacttcggggcgctgaacagcatgctatctgacccggagccaacccctgcggaggccgcgcctgggcccgtcctggggccgaccccggaggctgcgggagacgcgccgggtgcctccgcatccgctgaggccggcgaaggcctgcccccagaggtcgccgaaggcgcacctgatgcctccgcagcggctgcgccgagtgccgtagatcccgcagcggtggcggcggagataacagcggaagcaacggcggagccaacggcggaggctcccgcaacgtcagggccgtcgcaggtggcgtag

SEQ ID NO: 6099 - DNA, 402 bp, Zea mays
  Peptide Sequence Number=SeqID_49474
atgcccaagtccttccccggcgtcaagccggagttctgggacgggatgcggtcccgcctcgccgccctccgacccaacaggtccatttcgcgctggttcctagccgacctccctaccgtgcttgtagtgggcgactcggtgttcatccatggggggttcctcgaggccaacgtcgagtacggcctggagcggatcaatgcggatcaacgcggatcaacgggtctgctccggtgttttggtgatgttgttgctgagttttggggcaataaatatatcgccatattgattgttcagcctgccatccgcgactacttcaaagtctacctcaaggtcagctcagccccccatcaatctcggttcaaaatgcatttcagagtcagcttgcttggaagcgacttgtag

SEQ ID NO: 6100 - DNA, 696 bp, Zea mays
  Peptide Sequence Number=SeqID_49475
atggcgccccgcatgccctgtgacgacagcgactctcagcccccttacggaagcaagaggacggccctcatacagagggttggtcgcgcggggaaggacgggacggcgctcgcgcaaggccgctcgctccctcccgcgtggacgcctgtaaccccctactgcaagcgcacccgacctgggcgcggggctaacacgaaggccgcgggttccacctcccacgcctgtctccctccggctgcttctccccccttcgcgttctgcctcgcgccgacccatctgggctggggcacgcggcgacgatttactcgtcggtccagagaccccccggagctgcatccggcgtccattagcctacctgaagggtcttcagaaaaggcagaactcaaaacagcaaagatccctgacgacgattcagctgctatgactgatgaagttggctcatgtgctgacaaggcgggcagccggtcgtcgtcgtacaacacaaaaccggcgcgcaatacaaaatccgctcgccaaagcaacgtccgtcagcggcacagagggagatcggccacttcctcgctcattaggacgccggagggaagcagagcatccgccgcgatctctcagtggacgaggcccgccggcgtgccatcctcgccgcatttccagccgagggagcagaccgtccgcgtcctcgcttcctcttgggtgtag

SEQ ID NO: 6101 - DNA, 615 bp, Zea mays
  Peptide Sequence Number=SeqID_49476
atggcagctcacatggcaaaagaaaagaaaagcctggaaaagagaagggtgtacaacaagcagggacgggtgtcagcgactagagggggaagcgggctgactggtcgggcccaacgccagggggcgcaggcgccaactggtgggacccagaggcagagtgcacgggcgggaatcgttatccacggatctgaaccgcgcgatcgggatcgatcggtggagctcaacgtcgggaaggctttatggctgcgggcggtgccgctcctgctcctcggcggtaaggtcgccggagacaaggggaacgaccatggcagggctctaggggtttggggaaggggctcaagcatgctcaaggcgatctggcaaactcaatcatgggcgcaataccagcgcgggggcaccagagggcgcggaacacgacgaggcgatctaatggcggcgcgaatcaactctggcgaggaattacgtggacgctggggcagaattaggcgaaataaaggcataggaaggttgctcacctcgagtgcgaactctggagcgcttgggcgacggcggagacgcggggaagcctcgggtcgacggtggcagacttcagctgcacggggaagactccggtga

SEQ ID NO: 6102 - DNA, 873 bp, Zea mays
  Peptide Sequence Number=SeqID_49477
atgaaagctggcccagggcagaagaagccaaaccgccgcgcgcggtgcgcgcaactgcccagcggttacaagcattcctccacttttgcccagaccagcggaacaggcggcacctttggcaagagaagcgggcgacgcttcgccttccccataatgaccgcgtcaaaaaagggaccgggaaaggggacaccccaaaagggatccttcttcgcgaaggaaacgggccccgagccccccctactgatcagaggtttgaaggctggcccctcggaggggttcaacagccgcctcagagcgctcgggctccgcgcccgctactggtcagaggctggccctcgaagggttcacagccgcctcagacgcagagcgagggatgacccggggtacgttcgatacacaaccaaggctcaggctatgctcccgagtcacttcgccgctccactgaccggcctgacaaaaggacagcgccgcctgcgccactccgactgctgtgccactcaacagaatgaggctgacagcagccaaggctcggactcgggctcggccccagaagacgacgaactccgcctcgcccgaccccagggctcggactcgggctcggccccggaagacgacgaactccgcctcgcccgaccccagggctcggactcagccctggcctcagtcgacggtctccgcctcgcccgacccagggactcggactcgacctcggcctcggaagacagactcgacctcgacctcggaggagcctccacctcgcccaacccagggctcggaccgaccacgtcagaggaggcgccatcattaccctaccccaagctaactcaggctatggggaacaagaccggcgtcccatcaggctcgccccgataa

SEQ ID NO: 6103 - DNA, 708 bp, Zea mays
  Peptide Sequence Number=SeqID_49478
atgcatcgtgtctttccaccttctgagcccccggatgtgggacactcgcagttcttccgccttgtcattggaggaacgcaacttcacggaagttggtacctttcagccatcgttcggcttcaaggattttcatcaggcagcccggccgcatcccctcgccggcggtcacccaagacggtgaccaccagttcggtggtgaggagaagcgagccgggctgtgatcttggtcccgccctcagcttcgaggatcttcatcatcctggctggggcggaggccgggctgaaccggagctctacctctcgcgcgggttcgtgggtcaccttctccctcagcattcaagggagagggcgctcaccggcctagcgggagggtcggacttcgacaacgcggggctggtcggcggtgagcgtcgtcagcttcagcgcgttgggctcgctggctcagctggctctggcttggctcccggtgccccctcttgccgcaagagcagttgtcgcgccacgcgcaccggaggaccgcccaagacgtcacgcgctgctagggcggtgttcatgttctggggctgtcctgcctttgccccgacggcttccgccgtcggtgctgaggtggcggcagctgaagaagtcctcgtcgccgacgggaccagcgccaccatccgcgccccgggcctccggctctttgtacttgtcctcgcccctcgagcgtag

SEQ ID NO: 6104 - DNA, 585 bp, Zea mays
  Peptide Sequence Number=SeqID_49479
atgcaggccgggaagacggcagtggaggcgacgaaggaggccgcggccaacgtcggggcctcggcgaacgccggcatgcagaagacccgtgccgccgtgcaaggccaggtggagaaggccacggcgcgcaacgcgtcggacaaggtcgcggccgaggagcgccagcgggagcgcgtgcgcgccgcggagctggagaagcaggacgccgtgcgcgccaacgcggccgcgaaggagcgcgccattggcggcgcggccacgtaccagcaccagcacccgtcgcagggcgcgcccgggatcggcgcccagcaggagtatggcggcggaagagtcgcccccgcgggcgggcacgtcgaggccggcgtcggcgagacccgtcccgtcgctaggggcaccggcacggcgcggcccagcgccgcgcacaacccgctcgtcggcagcgacttctcgcaggcgcgcggcaccggcggacagtaccatttcgacggtcttttgagcatcaaaagtgggagacggtttcgccctagtggcggacggttcgccttaaggaataggtctagaccttcttccttaaatataaagggttaa

SEQ ID NO: 6105 - DNA, 1248 bp, Zea mays
  Peptide Sequence Number=SeqID_49480
atggccttgctagaccctcacgagcgcttccagcccgaggtggcactcaacttggtgcgcaacccgctcggatggggtgtgctggtgtttgccgggaggacctgtgtcggtgtctctcctctcagtgacctcaccgccgaagagtttgtgttctttgtttcgaaactccccagcgggcggccatcatcgcctacctctgtgggatgtccatggaggcgacgctccttcccgcttcttcctccatcattcgggggggaggatgattaccagcctcatgaaggtggacagcgggctaagccacgactccatccctcacgccccaactcttttggggtgggaagcgagccgtgctgcggctccatctttttggctatgatggcttcagtgccgcctccaatgctgcctcccgccgccgagcggggcgcaactgtccgtccaccgcacgggcgatggtcgcgccgtgcgcaggtccgtcgcacccgtagcgtcccttgcaccgccggccacgctgttccgacgccgcccggggggccgtacaagacgtcgtacgtcgtggaggtggcggccgcgttcttggatgaggtggtcgcctctgctggtgagccgctcggagctagctacccgcgcgatcctactggtgtggagggtctagtctgggaagccaagttgtgcgtccggaccccctggatggtggttctaggtactaggacacctgtcacagagtggtggagcgtgcaggcccaaggctttctggtacgggaccaggctaagcggccacacaggctccggaccaccccatggaacgggctcccgctctttagagccgaccaacaggccaggcttatgagggcggacctcaccgggttggcgtacacagatgctccagtggtcaggaagaggtactccttcagtcatagcaagatagtcaccctcaggtcggcgtattcccgtcaccttgaagggtccttcctagttgggggagcgttgcagagcccttctagatgcctgaacccgtggggagtccagaagggtttccgggggaaggtccccctcgggcgactaatactcgaggtcccgttcagctacggccacctcgccgtcatcgaccttttctttgccaggtcggtgacgaggtggggagccgtccttggaagactgctcacgccgctcgctgacgcatttcgcgaggtcaatgatctcacgacactccgcgatgctgtggcgaccgttggggtgtacagggcatga

SEQ ID NO: 6106 - DNA, 1056 bp, Zea mays
  Peptide Sequence Number=SeqID_49481
atggccccctgtgacatggtcggtccgagcccaaggtcaggcgagggcggaggctcctccgaggtcgaggatgagtccgagccctggggtcgggcgaggcggagaccgtcgtccgaggtcgaggttgagtccgagccctggggtcgggcgaggcggagaccgtcgtccgaggtcgaggttgagtccgagccctggggtcgggcaaagcctcaccctgataggtggcacagtagtcggagcagcgcaggcggcgctgttttcctgtcaggcgattcttgcattgaatgctcctgcgatccggtcggctggcgaagcgatctggccaaggttgcttctccgcgaagcctgcccgagctgggcctcgggcgagtcgaagagtttcttcaggcgtatggcgacgaaagagaacctttcatcatgtttgacttcgaccataacaccgagattccctggtgtggaccgtggagtctcagggagaagcgcatgcgcacgccaatcggcaatccaccaaagattccgttctcccagtcgcctctcccagtcccagatctcgttcactcgcactcgcgcaaccccgcggccccgcgcctaatggcatcctgtggcgccggcgacgccgcgtcagcgcagccgagggccagtatctcgcacgtcatcttcgatatggacggccttctcctcgacacggagggcttctacacggaggtgcaggagaagatcctagcgaggtacgacaaggtgttcgactggtcgctcaaggccaagatgatgggcaagaaggcggccgagtctgcccgcatcttcgtcgacgagtgcggcctcaacggcctcctcacccccgagcagttcctcgaggagcgcgagagcatgctccaagcgctcttcccatcctgtaccaagctgccaggtgtgtcattgatgaacttggacgctgttggcgtcgatctagtgaacggaacggagcgtgactgtgagagcggaatgggaacggagcggctccgtccggttgattttttggagcggaatggttccggatctgaggagaatattccctaa

SEQ ID NO: 6107 - DNA, 127 bp, Zea mays
  Peptide Sequence Number=SeqID_49482
agatactttgatcagagatggttggtttacaggtggtgacaaggatgatgtttatgactatggtaatgggccgaagcggtatcgcgagaatctggccgtccgatcagcgatggatgtgccagattag

SEQ ID NO: 6108 - DNA, 825 bp, Zea mays
  Peptide Sequence Number=SeqID_49483
atggtcatccgtagggatgaccaccagccttgtggtggggagaagcaagccgggctacggcctctgccccgccctcagcttcaaggatgttcatcatccgggctggggaggagggtgcaccgagttggggacccgcttcttcctccagtattcgggggagaggggcatcctccagttgtgcggaggaggcgtcctccagccatgcgggggaaggtgaactgctgctgcctggccagggtgcagttgtccgtcctccaccctggcgatagtcgcgccgtgcgcaggcggctgctgtcgccggtgctgaagcggcggccgccgctggagaggcttcccaccgcagcggtggttgcttccgccgacgagaccgtcagtgccacctgcgctcggggcctccggctctttggctttaacggctggttctcgtcccccccgcccgagacggaggtcattgtcgcgctgctggtgcagtggtcgccggcaagccaccgggagtttgttatcccgcaggccttccggtgtggaggttgttcatacccgcgggaatggagccggagtcccaaccttcagtcgctctgcgatgagctggagccggaggcagcagtgtcggtgtggacagaggcggagtcaactcgaaaagaggcttcatcggcccgggagcataacccttgcggagagcctggccgtgggggcccaagcgtggtgctggcgtcctccttcgaggtggagatccttccgctcgtgtcgccgtctgaggctgggccaggttccgccgaaggtggaaacgtcgccgagggtgctgttgctccccctgcctatgtctaa

SEQ ID NO: 6109 - DNA, 303 bp, Zea mays
  Peptide Sequence Number=SeqID_49484
atggctgtcggagaagtgcttgagccctgtgtacgcgataacatggccgtcggagaagtgcctgagccttgtagaagcatagctagcggtgcggctgggatcctgctgacgtctccttgcttccgtagggggctgagaaccactgatgtcatggacgcacacggggaaccatcattacctgttaccgggtcttaccctggtgggtggcacagcagtcggagcggggcgagcggcgctgttttcctgtcaggtcggtcagtaaaagggcgaagtgactgtggtcacttcgaccttgccgactga

SEQ ID NO: 6110 - DNA, 121 bp, Zea mays
  Peptide Sequence Number=SeqID_49485
atggggctcggtgtatgcggctcgctctgccaagtttgggttcgccccttggggaggagtgcgagacattgtggtacaggtggttatgagattgatggttttggttatgactatggtgctg

SEQ ID NO: 6111 - DNA, 855 bp, Zea mays
  Peptide Sequence Number=SeqID_49486
atgacttcccatggatcctccgatgacggaaatgcactgtcccacactgacggacttgcacgagagggctttccccgcattttgtgggaggtacttcagggggccggatacacgacgcctcctcagtacgcggtgcagcagttcgagaagcaccgagtgccccgctgtagggtgaggatgactttggagcctcatcccctgcagccaggctggcgctctttggactccgagtcttttggataccgagctgaggacaccatcgaggcgattgccttgcatgggttgaccactttctgcggattccatccgttggagctgtctacccaccccattggcttattccccgccgagaaggaggacgacccaatgtggaaggatcgggtggagcatgccaaggacatctgggccatctaccccggacagactgcgcacttgaccgtacggtgcatgaatgcgctgtaccgtctgcaagtaatgcgcggtgaggcaatgtcccatctgatggtgttattggaggttaccaagatcaccttggacaacagagaggaactcgtggttgacttgtcccaagagatggtggagaaggacttgcaggtggagcagctatccactgatatccaagagttggaggaattagtgggcaccagggagaacaccatcgaggttctagaggaccagcttatcaacactcagcagcagcttgccgaagctaatgagcacctggatatgcatcaccaggaggctgacgaggaagccgacatcgagggaggagatgagcctgcctctagtttggacactgctggctcagggagaccaccatcccccgagtcgagtgttgtctcgttcgctcactag

SEQ ID NO: 6112 - DNA, 1023 bp, Zea mays
  Peptide Sequence Number=SeqID_49487
atggacaggcacacctgcaagctctgcttccgtcgtttccacaatggccgcgcgctgggcggccacatgcgctcccacgtcatggccgcgtcgtcggctgcagcgtactactcgccgccgccgctctccctggcgtccacctcgtcgacagagatggacgacgacgccgatccggcgccgcagaagccacccacgccgtgcgttgcacgcgaagaaggcgccaagaaagcgttctgctttcctgaactctccggcggcggcagggccgcccgcggcgagtcgtcggtcgtgcaggacggggagagcgacacggagtcgtccccgcggttcgccgtgagccggcgacgctccaagcgggcgcgccggcgcgcgccgccgccggcggcgtccgatcccgagcatccggcgagcagcgtctccgacgcgacgccggaggaggacgtggccatgtccctcgtcatgctgtctcgggactcgtggacgcggcggtccaggcccgggcctgggcctgggcctgatccccgctggggcccggcgagctcgggggccgatcggagcaaggacggcggcgtccgctcgttcgtcggcgcggacgacgaggccgatcgcgagcacggcgacgtcgcccgcccgcgcgggaggcaccggtgcggcgtgtgcaggaaggtgttccggtcgtaccaggcgctgggcggccaccgcgccagcgtcaagaaaggcaagggcgggtgcgtgccggtgccggtgccgccttccgccgccgcgccgtcgcccaaggctcgccgcggccagaccggcccggccgtccacgagtgcccgttctgctctcgcgtgttcgagtccggccaggccctgggcggccacaagcgcgcgcacgtggcgcacggcgcccccgccccatggacgccagcgagatgcggcgacagctcggggtccatcgacctcaacgtgccggccgcgacggacgacgacttcgagctctccgccgtgtacgacgccgagttcggcagcgccaggcagtga

SEQ ID NO: 6113 - DNA, 201 bp, Zea mays
  Peptide Sequence Number=SeqID_49488
atggcgcaggcccatgcatggaatgggccatacacagtaccaggaagtttgggccccacgaagtcttcagttcacgccttctccaatgcacatagagatactttgatcagagatggttggtttacaggtggtgacaaggatgatgtttatgactatggtaatggtaaagaaagagaagaaggcatcgaggcggatctctag

SEQ ID NO: 6114 - DNA, 432 bp, Zea mays
  Peptide Sequence Number=SeqID_49489
atgaccgtcgttgttgtcgtgccgcaaggggaggagtaccatgttgtagctgccgtcgagggacatgaactcgagacttccgaagcggagcaccgttccgggctaaagaggttgctaaagactacccatctggaactcaacgggaagctatacgctaacgtgtctggcagagaagtgcctaagccctgtgtacatgccaacgtggctgtcagagaagtgcttgagccttgtgtacgcgataacgtggccgtcggagaagtgcctgagccctgtagaagcacagctggcggtgcggctgggatcctgctaacgtctccttgcttccgtagggggctaagaaccaccgacgtcatggacgcacgcggggaaccatcattacctgttaccggggtgagccagatgggacgctggtcttattccctcgtagcttga

SEQ ID NO: 6115 - DNA, 555 bp, Zea mays
  Peptide Sequence Number=SeqID_49490
atgccggagaagacccgtgtcctcgacgcgcgccaggtgtttgatgggagatggttctcggggggcgtggtttacacggctgtgccgttctacaagagggtgctgatggttgaaggtgaaaggttggccaatgtacaaactgcagtggaggtcgtggagcatgtcgtcgaggtgacagagaagttggctgcagatgcggccagttccctgctagagaacggatccctgcacaaggttgccgtggaggtggagtgcgttgctgaagcggtggataaggatgcacataaggttgaagcagtcatcgataagcacaaggagaaagcatggttttcaagttcagtgaagtcgagattgcagtacttaggaccacagccaggcattccggttctagatgatgagcatgttaaaggcgttcatctcgatcctttagctggtccagtagatgccttttgccttctggttcttgatccggaaaagggtgttctagacaaagaaagcttgtgccttaaaataggaggatacaagaagctggagtggttgtctgaaggcttttga

SEQ ID NO: 6116 - DNA, 84 bp, Zea mays
  Peptide Sequence Number=SeqID_49491
atggttgacagtttgcccattgttgcgataaagagcctaaaagtatctgacttccaaggtacacagtcagggataagctcctag

SEQ ID NO: 6117 - DNA, 132 bp, Zea mays
  Peptide Sequence Number=SeqID_49492
atggcgccgccgtgtggtgtctttgcgccgccgtgtctgttcgccgaagaagagcccgtgactgaggaccctggtgagcagcaggttgaagtagctgagcaggagctcattgaaggcaagttgtgcccttga

SEQ ID NO: 6118 - DNA, 132 bp, Zea mays
  Peptide Sequence Number=SeqID_49493
atggcaccgtcgtgtggtgtctttgcgccgccgtgtctgttcgccgaagaagagcccgtgactgaggaccctggtgagcagcaggttgaagtagctgagcaggagctcattgaaggcaagttgtgcccttga

SEQ ID NO: 6119 - DNA, 279 bp, Zea mays
  Peptide Sequence Number=SeqID_49494
atggcgaacattgccgtatcctcgcgaattagggcatggccgggcttcgatgccgcgatcggattggcgtcgtgggggcgcgcgtaccactatgtttgggcatcgtcggggacaccgtctggttcccatcacgtgtggtcatcgagtttccgcccaaccgtgactgcccccgccatgaccgattgcaacgatatcgcgcccttcattattgcgaaccgaccgttgatctggaatcctggggccatgatcgcaaaccggttcgatgttgttgccatctaa

SEQ ID NO: 6120 - DNA, 716 bp, Zea mays
  Peptide Sequence Number=SeqID_49495
gcgtccactaccctcttggtgcacggttctgccataccccgcctccgcgattcgcgtctctgccgctgctcgtggaaggacgaaattctaggatgcctccccggccgccccgccatcctcgcactcgccccgctcatctaaggaagggcgccattccagggaatacctatgcggcagccccgccatcctcgcccccacccgcccccaccatccacaagggcggtaccatgcccccgctcctctcccctccgcgccatccttgccccgcgcgcgcccgcacatctcgcaagggcgccccttcccctgcccccgtcgtctccgcgcaagggcctgtcgtctcgcaagggcgccccttcccctgcccccgtcgtctccgcgccatccttggatccggggttcgctcaggttgcctcgcctcgcaaggtccccaccacgcgcggtcagggagcatggtgggtggggaagacagggaggagcagaggagtagggcccgcactacagcagagcaggaactgcctcaaaggaggcgcatggcgccatggtattgggcgagggcgtcggtgccgcgcatgcttgagttcgccgagagggcgccaagctcgagcgacgcgagtcgcttccacaagcgcgagatctcccaggcccgcctccagaagtaccatggagtcaccaacttggacatgacctctggtggctcgttcatcgccaccggctaa

SEQ ID NO: 6121 - DNA, 381 bp, Zea mays
  Peptide Sequence Number=SeqID_49496
atggcaactcgtgccgcctgggcccctcgctcgagggtgtcttgcgcggaggccaaccaaccggcatggcgcgctgcagcactggctgcagaagccaacactgtcttaagggccttccggggggccacaccggccgagccctgcctccgtttgctgaaaggaagagatagagcaggatcagggcacacggagaaagagccaaaacagaggtatcctcagatacttacccgctccggagcaaggccaatcgggcctgcggggaggccccttgggcctcggtccccgcaggcgccgccgaggattgccccgctgccgactccggtgccgcctccgcctcgggcgcccgaggcgccaaaggggcggccctcccaggcgtcgtaa

SEQ ID NO: 6122 - DNA, 984 bp, Zea mays
  Peptide Sequence Number=SeqID_49497
atggagttcaccgctcccccgcccgcgacccggtcgggcggcggcgaggagagggcggctgctgagcaccaccagcagcagcagcaggcgacggtggagaaggagcacatgttcgacaaggtggtgacgccgagcgacgtcgggaagctgaaccggctggtgatcccgaagcagcacgcggagaggtacttcccgctggacgcggcggcgaacgacaagggcctgctgctcagcttcgaggaccgcgcggggaagccctggcgcttccgctactcctactggaacagcagccagagctacgtgatgaccaagggctggagccgcttcgtcaaggagaagcgcctcgacgccggggacaccgtctccttcggccgcggcgtcggcgaggcggcgcgcggcaggctcttcatcgactggcggcgccgacccgacccgcccgtcgtgcaccaccagtaccaccaccaccgcctccctctcccctccgccgtcgtcccctacgcgccgtgggcggcggcggcgcacgcgcaccaccaccactacccagcagctggggtcggtgccgccaggacgacgacgacgacgacgacgacggtgctccaccacctgccgccctcgccctccccgctctaccttgacacccgccgccgccacgtcggctacgacgcctacggggccggcaccaggcaacttctcttctacaggccgcaccagcagccctccacgacggtgatgctggactccgtgccggtacggttaccgccaacgccagggcagcacgccgagccgccgccccccgccgtggcgtcgtcagcctcgaagcgggtgcgcctgttcggggtgaacctcgactgcgccgccgccgccggctcagaggaggagaacgtcggcgggtggaggactagtgcgccgccgacgcagcaggcgtcctcctcctcatcctactcttccgggaaagcgaggtgctccttgaaccttgacttgtga

SEQ ID NO: 6123 - DNA, 3676 bp, Zea mays
  Peptide Sequence Number=SeqID_49498
agatgagctacgtcttgtctatggtgtttctgagcgtacagaaagcgatggtgcagctaatttaattcagaagttgagagctataaactatgctctgggtgaactaggacagtggtgtgcttacaaggttgcactgtcattcttgacagcactacagaatgatgaaagggccaactatcaggttgatgttaagtttcaagagtcatacttgagaaaggtagttgatttgttacactgccagttgactgaaggggctgcaatgaaaagtgacagtaatgatgttgaaatgcataattctgaaaaccccaagccaaatgaacttgaggagggagagctacctgacagtcatggtgaacatgtagatgaagtcattggtgccgcagtggccgatggaaaagttaccccaagggtgcaagctttgataaaaatacttctcaagtatcagcacactgaggattttcgtgctatcatatttgtagagcgagtggttacagcattagtcctccctaaggttacactgttagttgcaactagtgttgcagaggaaggacttgatattaggcagtgcaatgttgtcattcgctttgaccttgcaaagactgttttggcctacattcagtctcggggtcgtgctagaaagcctggatctgactacatattgatgcttgaaagaggaaatatgtctcatgaagctttcttgagaaatgctcggaatagtgaagagacattgagaaaagaagctattgagagaactgatctcagtcatctcgatggcacttctatgctaagccctgttgatatatcacctgattctatgtatcaggttgaatcaacaggtgccgttgtcagtctgaactctgcagttggactcgctgtttgtttagctgcttgtaagaagctacatgagatgggtgccttcacagatatgcttttacctgacagaggaagtggggaaggagaaaagactgaacaaaatgatgaaggtgatccactgcctggaacagcacgccatagagagttctttcctgaaggggttgctgaaattctacatggagaatggattttatctggaagagatggttaccaaagttcacagtttattaagttatatttgtattctgtgaactgtgtaaacattgggacttcaaaggaccctttcgttacacaactttcaaattttgctcttatttttggcaatgagctggatgcagagctgatcctgcttaagagctttcatgttaggctcatgagcattgtacttgatgttgatgttgatccctcaacaactccttgggatccagcaaaagcatacctctttgttcctgtgggagctgagaaatgtatggatcttttaagagagatagattggactctagttaatagcattgtgaattctgatgcctggaacaaccctcttcagagggcacgcccagatgtctatctaggcacgaacgaaaggacacttggaggggataggagggaatatgggttcgggaagttgcgccatggaactgcatttggacagaaagcccaccctacgtatggtatcagaggagccatcgctgaattcgatgttgtcaaagcgtctggattagttcctggtcgtggatggggacattttaatgattatcaaaataaaggcaagttgttcatggcagattcatgttgggatgccaaagatcttgctggaatggttgtaactgccgcccactcaggaaaaaggttctatgtggacagtatttgctataatatgaatgcagaaaattctttccctaggaaagagggctatctgggtcccttggaatacagctcgtttgctgattactacaagcagaagtatggtgtggagttagtttataagaaacaacctcttatacgggcacgcggtgtttcatactgcaaaaatctactttctcctagatttgagcattctgaagctagcaatggagagttctcagagaatcttgacaagacatactataggttaccctcaataatgagaagggtggagagcatgcttcttgcaattcaactgaaggacataattgggtatccagttcctgcaaataagatattagaagccttgactgctgcgtcatgccaggagacattctgctatgaaagagcagagctgctgggtgatgcatacttgaaatgggttgtgagtagattccttttcctaaaatatcctcaaaagcatgagggacagctcacaaggatgcggcagcagatggttagcaacatgatcctgtatcaatacgccctgaataaaaacctccaatcttatatccaagcagatcgatttgctccatcaagatgggcagctccaggagtgttacctgtatttgatgaagaaacgagagattctgaaccatccatctttgatgaggaatttactcctagcagtgagttacaaaagaacttgtatgatgactatgatggcgatagcatgcaagaagacggtgaaattgagggagattctagctgctatcgtgttctatcaagcaaaacattagcagatgttgtggaagcacttattggtgtctattatgtagctggagggaaaattgctacaaaccatctgatgaaatggatcggtattaatgcagagttggatcctcaagagatcccatcttcgaagccatataacatacctgagagcataattaaaagcatcaattttgacacattagagggtgcattgggtatcaagtttcagaataaaggcttacttgttgaagctataacacatgcatcaagaccatcatcaggtgtttcctgttaccagcgcctggaatttgttggtgatgctgtattggaccatctcattacgaagcacttattttttacttatacggacctacctccaggccgcttgactgacttgagagctgcagctgttaataatgagaactttgcaagggttgcagttaaacataagctacatgtacatcttcgccatggatcatctgcattggagacacaggaggagctttcgaaaccaggtttcaattcttttggccttggggattgtaaggctccaaaggttctcggagacatttttgagtctattgctggcgcaatattccttgatagtgggtgtgctacctccgtagtctggaagcctctgcttgatccaatggtgacgccggacacccttccgatgcaccctgtaagggagctccaagagcgctgccagcagcaagccgaaggattagaatacaaagcatcccgtacaggcaatgtagctacagttgaagtcttggttgatggcatacagattggtgtagctcagaacccacagaagaagatggcacaaaagttggcggctagaaatgcacttgttgtcttgaaagagaaggaaaccgcagcaaagaaagacactgaaaaggatggcgagaagaaaaacggttctcagttcactaggcagactctgaacgacatctgcttgagaaggcaatggccgatgccacagtacaggtgtataaacgagggtggccctgcccatgccaaaagatttgtttatgcggtaagggtaaatacatctgacagtggatggactgacgagtgcattggagagccaatgccgagtgtgaaaaaggccaaggactctgcagctgttcttctgctcgagctgctgaatcgaaattaccgtggcaagcctgatggaaaataa

SEQ ID NO: 6124 - DNA, 498 bp, Zea mays
  Peptide Sequence Number=SeqID_49499
atgaactccagactcccgaaacggaggcactgtcccgggctggagaggttgctggagactgcccatctggagcttgacgggaagctgttcgtcaacacgcagcagggcccctacctggtgcgccaactgtcggcgtttcgagaccggggggtccctcgggccgacgagttgggcgaggtggaggctcctccgaagctgaggtcgagtctgtcttccgtggccgaggccgagtccgagcccctggtcaggcgaggcggaggtcgtcgtctggggccagggcggagtccgagccctggggtcgggcggagcggagttcgccgtcttccgggacttagcccgagtccgagccctgggtcgggcggagcggagttcgccgtcttccggggacttagcccgagtccgagccctgggtcgggcggagcggagttcgccgtcttcccgggacttagcccgagtccgagccctgggtcgggcggagcggagttcgccgtcttctag

SEQ ID NO: 6125 - DNA, 333 bp, Zea mays
  Peptide Sequence Number=SeqID_49500
atggtgtctccggtgagctgcaagcgggtaatccgagtggacgtccgtgccctgttcgttgggggtcggctaggggcccagaggcacgcccaaaagtacctgcggcaactggcgcgccggttgctcgacgcgtgggcctgggttcccaagctggcgtgtcagaagtcggagaagcgcgtccgtctggcgcggttgcatgccgcctgcatggctgcccgccccttctgcccgttggtctgggcgaaaatgggggtcgcttcctccgagtcgcaggggagggccttggagcgtgttggagaagactcagcccgcggcgcctgggggcgcacgtag

SEQ ID NO: 6126 - DNA, 1341 bp, Zea mays
  Peptide Sequence Number=SeqID_49501
atggggaacactcgcagtctttccgccttgtcgtcggaggaacgcaacttcgcggaagttggtacctttcagccatcgttcggcttcaaggattttcatcaggcagcccgaccgcatcccctcgccggtggtcacccaagacaagagcgaggtgagccggggctctacctcccgcacgggtcggctggccacctcttcttccagcttctggtggtggaaaccatcctccagctctgcggaggaggcgtcctccagccatgccggggaaggcgaactgttgctgcccagctaggatgcaacattccgtcctcctcctcgctttcatggcgaggacgggagcgaggacctgccagtgcgctttggagcggcccgcgctcgccggtgcgggcgttggtggagaggcggacgccgccgtcggtgctgacgtggtggcagctggagggaagcttccccaccgtcgaggccgtcagcgccgcctacggaccgacctctggctctttggctttaatgtctagttcgcgtcccttgagtggggacgcgaacgagagccttccggtggctgcgtccgtcctgggaccatggctgctgttgcagaggtcgctggcgagtcgcccggagcttgtcgccccacaggccccccggtgtggaggttgttcatacccgcggggacggaaccggagttacgtttgtaatggcaccttgagtgccggtgtctattcattgtggctgtcggggcctgaacatgagtccctcggctcgttcggccttgccgcccgaggcttctcttgcttagttaaaggaaaccctcggccgctcttcgatgagccgaagccggaggcagcggtgtcagcacggacagaggcggagttggctcgaaaagaagacttccggagcctggccgagccgtccactggcgggagcgacgccggagtcgagttgccgaggccacgagccgggctgatgtcctcgggggacagctggctgaggctttggggtggccggccgagccgtctgctcgggccggattcctggagaagaccctggcggcgatggcccgggcgcggtgctgatgtcgtccttcggagtggagatcctccgaccgcgttgccgtccgaggctaggtcggacttcgccgaaggtgttgttgacgccgagggtgctgatgctccccctccatcgagaatcgtttgtccgagcgagagttacttttcacggaaggtgatgagtgagaaggtgatgagtgaggtatccgtatcccggaggtgtaggagtccctcggctcggtcagccttggctgcttacgtgtactccgtcgttttcaggatcccactttcgaagtag

SEQ ID NO: 6127 - DNA, 372 bp, Zea mays
  Peptide Sequence Number=SeqID_49502
atgcaggtggcatgcgaccgcaccaagggggcacaccctttcgacttcaacgcgtccagcatggtggcccaggcccacacgtcatgtaactggtgcaccggttgctacgtgcaagaaactgcaccgccactcgcgccactatcgtgcctcctcgactgcggaaccagtaccgcgactcgaggcaaccctgcgcacgacccaacagtgccaaccaggcacatcggtcacgggacgggcggcacctttggcgggcgaagcaggcgatgcttcgcttccgccgtaatgaccgcgtcaaaaaagggaccgggaaaggggataccccgaaagggatccttctccgtgaaggaagcgggccccgagcccccctactga

SEQ ID NO: 6128 - DNA, 165 bp, Zea mays
  Peptide Sequence Number=SeqID_49503
atggcgcccagctctgcgtccttctgcagcagtgctgttaccaacatgctcgccgaggcacctgccagggaggacgcatcggccatgctgagcgacagcgggagcagcgggttggcagtggtgtcatcggacatgtgggcagtggttaatgatcaattcaattga

SEQ ID NO: 6129 - DNA, 933 bp, Zea mays
  Peptide Sequence Number=SeqID_49504
atgcagcttccgcgcgtcgtcgccgccctggcatctcgcacaaaaccctccagaggggcatcgacatgccggctaccgcagcagccgctgagctgcgtcggccgccacgctctctggctggatacacggaaccaggcacacatcgtgcggcgtgtaacacactcccgcacaccagagctgatgttggctgatgctgtcggccctggcacccgcgaccaccaaccagcgctttcccgagccactggtcgtcgccgccataccaccaaacgagaggagggcctcgccgacgccaaaccggccggctgcacagccttgccggtgcacctcaccgagcgactggacgccttactccatccgtgcagctttccaacacccaagcaggccccacccctcgaggaccaccacctccatggcgcagatccgcaagtggggaagtgcaattctattgaatctcttaacactgcaattgtgtctggcaaaacagagaatgggaacaatggctatatatccacgccacctgaaacaaaagcgtctatcagatcattgagcagctattctctcttggatggacatgtggacggaatgctgtctccaaatagcgcatcacacaagccagaaacaacaaataattctgtgctcagcaatgctgcaagcactgatgtacaaaatgggtgtctcaccactgtcgattctggacagcaggaggcgtctcattctcacagctcagtggagtttacccagtatttccaagagggctattgtaaaatatcagaactcgatgactgccgtgagttaactgaagctgttactgatgctgacagcagcagcagccactgcgagagagagaagcccgaggaagatggggataacgatgatttgctcggaggagtttttgccttcagcgaagaaggttctagccatctattcatataa

SEQ ID NO: 6130 - DNA, 1335 bp, Zea mays
  Peptide Sequence Number=SeqID_49505
atgaaaatccctgaagccaaacgatggctgaaaggtaccaactcccacagagttgcgttcctccaacgacaaggcggaaggattgcgggtgtcccccatccgggggctcggaagccgtcgtgggctgagtcttctccaacacgctccaaggtcctccccgtacggcgcgggggctgggtcccacgcgtcatacaagctggcccagagcagaagaagccaaaccgccgcgcgcggtgcatgcaaccgcccagcggttacgagcgttcctccactttcgcccagaccagcgggcgaaagggcgggcagccatgcaggcggcatgcaaccgcgccaagtgggcgcgcccctccgacttccaacgcgcccagcgtgggggcccacgcccacgcgtcatgcaaccggcgcgccggtcgccacgtacaagcaactgcaccgccactcgcaccactgccacgcctcctcgactgcggaaccagtaccgcgactcgaggcaaccctgcgtacgacccagcagtgccagccaggcacgacggtcgatacggccaaaaatgggccggcagtaatgggcggcggcaggcgggcaggagcagcggtcacgtcgtcagccaagcttacgtcccatccaggggcagtgagagaaccctctctcacggcgcgaagacggcgcgcccatgttccgttcctcgaacgactcgcgcacgcgcaacggccacctcgcgaaccactcgccccgtcgcattaactccgcggcgggacaggcggcgcctcaggcaggagaagcaagcgacgcttcgccttcgccataatgaccgcttccaaagagaaggacagcgccgcctgcgtcgctcggactgctgtgccactcgacagagtgaggctgacaggcagccaggcccggcctcaagcaccaaaggaaactccgcttcgcccgacccaggtctcggactcgggctcagccccggaagacggcgaactccgctttgcccgacccagggctcggactcgggctcagccccggaagacggcgaactccgctccgcccgacccagggctcggactcgggctcagccccggaagacgacgaactccgctccgcccgactcagggctcagactcgggctcagccccggaagacggcgaactccgctccgcccaacccagggctcggactcgggcttagccccgaaagacgcccctaaagacgacgaactccgcttcgcccgaccccagggctcggactcggccctggcctcagccgacggtctccgcctcgcccgacccaggggctcggactcgacctcgacctcggaggagcctccacatcgcccaacctag

SEQ ID NO: 6131 - DNA, 1317 bp, Zea mays
  Peptide Sequence Number=SeqID_49506
atggcacgccaccctctcgcggctgctgtcctcttcctctgcctgctgtcggtctgccgcgcggccggcgccggcgccggcgccgctggcaaaggcaaaccgagcgccgtgttgctgccggtgagcaaggacggcgccacgcagcagtacgtgacggggttccggcagcgcacgccactggtgccggtgaaggccgtgctggacctggcgggagccacgctctgggtggactgcgaggccgggtacgcgtccgccacatacagccgcgtgccgtgcgggtccagcctctgccgcctctcgcggtcggcggcctgcgccaccagctgctccggcgccccgagcccgtcctgcctcaacgacacctgcggggggttccccgagaacacggtcacgcaggtcagcaccagcggcaacgtcatcaccgacgtgctggcgctgcccaccacgttccgcccggccccgggcccgctcgccacggcgccggcgttcctcttcacctgcggggccacgttcctgacgcagggcctggcggcgggcgccgcggggatggcgtcgctcagccgctcccgcttcgcgctgcccacgcagctcgcctccacgttccgcttctcccggaagttcgcgctctgcctgccgcccgcggccgcggcgggcgtcgtcgtctttggcgacgcgccctacgcgttccagcccggggtggtgctgtccgacacgtcgctcagctacactccgctcctcgtcaacccggtgagcacggcaggcgtgtccaccaggcacgacaagtcggacgagtacttcgtcggcgtcacgggcatcaaggtgaacggccgcgccgtgccgctgaacgccacgctgctggccatcgacaggaagggcgtgggcgggaccaagctcagcacggtggcgccctacaccgtgctgcagtcctccatttacaaggccgtcaccgacgcgttcgcggccgagacggccatgatcccgcgggcgccgcccctggcgccgttcaagctgtgctatgacgggagcaaggtggggagcacgcgcgtgggcccggccgtgcccaccatcgagctggttcttgggaacgaagccacgtcgtgggtggtgttcggggcgaactcgatggtggccaccgagggcggggcgctgtgcctcggcgttgtggacggcggcaaggcgccgcggacgtcggtggtgatcggcgggcacatgatggaggacaacctgctgcagttcgacctggaggcgtcgcggctcgggttcagctcctcgctgctgttcaggcagaccaattgtaacaacttccacctcggctag

SEQ ID NO: 6132 - DNA, 303 bp, Zea mays
  Peptide Sequence Number=SeqID_49507
atgccgtcaggaggaaagcccaaagaaaaagtgccctcgagggagaagcacaagggaaagaaagaagaatcccaaggatcctccagatcgcacaagatgaaggacgacaataaggaaaggatgagaatgaatatatcagagatcggtaatgaggactacgacccagatgaggtggcccaaatcatccaccgcaacccaagccataatggtattacatacctctttgtgtatggaagaatacaacaaggtgaatgggttgagaaccgccaaggagatttaggacacactcaagataacaaatga

SEQ ID NO: 6133 - DNA, 568 bp, Zea mays
  Peptide Sequence Number=SeqID_49508
ccgcggcggagaaaagggcggaggggcttaccggcggcgagattgttccggtgaagtggtcgaggatgaaggggaggtcgcggggatcacaacgggaggtccacgggatgccagagaagttatgagcgaaaggaattgggcggagactcactggatagctcggtccacgcgcggcggcggaagaccgaagtccggtgaggtcgatctcgggcctccggtgaagtccggccgggtccgagggcttggcaagcttcacgggctactggcggagctagccgaagcactggcttgcccagaggatggctggagggggctggccacggtggccgaagctctggcggcaatggcgggcggaattgagctcgccggagctaagggaaagtggctggccggtgagggtgagtgcggggcgaagagagccgcggtcgaacacgtgttcccgttgcctctgcccctgttcaagcgccgattgggagcaaatcttcgcgaatttgggcaagatcactgcaagggatttgttcaccagaccaagctttgtcttttgtgtatggacgacgtgcggttttag

SEQ ID NO: 6134 - DNA, 336 bp, Zea mays
  Peptide Sequence Number=SeqID_49509
atggcgcctcctgttgacgtggcaggtctgcgccctaggttgggcgacgtggaagctcctccgaagcctaggtcgagtccgtcttccgtggccgaggtcgagtccgagcccttgggttgggcgaggcggagaccgttggctgaggccagggcggagtccgagccctggggtcgggcgaagcggacccgagtccgagccctgggtcgggcggagcggagttcgtcgtcttctggggctgagcccaagtccgagccctgggtcgggcgaagcggagcttcctatggccggtcagtggagcggcgaagtgacggcggtcacttcggctctgtcggctga

SEQ ID NO: 6135 - DNA, 912 bp, Zea mays
  Peptide Sequence Number=SeqID_49510
atggtgacctccagtttgacggcgggggaaagcaaaccgggccgcgacttctgcccctcccttagcctcaaggattttcatcaccagggctggggaggggactgccgcgtgcctggctctcgggcccgagtggcttcggagccgctctcggcgccggcttctgccacggcagctggaagaggttcttccgccgacgagatagccagggccgcccacggaccgacctccaactctatggccttctgcccgtccttgcctcacgagtttgggcatgggcgggggcctcctggcagcagcatccgccctgaggtcattgttgccgctgttcggccccccaaagcagaagtcgtcgatgtcgccgctgctggagcgggcgacggcgcgccgttcgtcggtcttctgttgctccgcaggccgcccccatcgagtggggttgagtccctcggctcggtcagccttgttgtccgaggcttcccttgcttagttagaggaaaccctcggccgctcttcgatgagccgaggccaggggtagcggtgccagcgcgaacagaggcagagttggctcgaaaagaagacctggtcggccggagcctggccgggtcgttcgttagcgggatcgacgccggaattgacctgccgaggcctcgggtcgggctgatgtcctcggaggacagctggccgaggccccggggtgatcggccgagccgcctgctcgggccggattctcagggaagaccctggcggcgatggcccgggcttggtgatgacgttgtcattcagagcggagacccttggaccgtgtcgccgtccgaggccaggtcggacctcgccgaaggtgttgtcgacgccgagggtgctgcggctcccttcaagcgtcaagatctgagcctgcagggtcggatcatcttgtag

SEQ ID NO: 6136 - DNA, 453 bp, Zea mays
  Peptide Sequence Number=SeqID_49511
atggaattgggagaggcagatgaagggtttgctccagcgcaacctgcagatgagcgagggagagcggctgggtttcctgcgctccgcctttcttggaaaacagcgccgctcacccccgctccgactgttgtgccagccacccgggcaaggctgacaacagcaagttcagcctcggacgtaacaggaagcttcgcctcgcccgaccttaggcctcggcctcgggaggaggtctccgcctcgcccgaccccaagactcggcctcagcctcggcctcgggaggaatcgcgtcttcgcccgacaccggcctcggcctcaggagaagtctccgcctcacccgaccttgagctcggaccgaccgcgccacaagggatacatcattaccctcccctagctagctcaggctacgagggaacaagaccggcgtcccatctggctcgtcccggtaacaagtaa

SEQ ID NO: 6137 - DNA, 738 bp, Zea mays
  Peptide Sequence Number=SeqID_49512
atgagcagtgagccagtgaccctcactcccttagtcaagatgagcttgtcatctgaagcgcccgtcctcgcggtacccgcctcgccgcccccagctgcggcgctggcaccggcgcccgtgggagcgagcgctcctacgctctcccaccagtacatcggcaacgccgccactcacggtgcagcccctgctctgaccgccaccatcctctccctcggcttcccttccatcgccttctccctgccggatgccgccttgcttcgctctcagctgttggcgccgggttttccccatgtcccgctcggcacaatggttggggctcccgtgcgtgactgcacttcaccgatgaccgcctacagccagccctccgccatcacctcatccctgtgcgctccttcggatgacgctgccgccatcctcgccgccacccgggcagccgttacgacggctcgccagcgggcccaggacgccgctcgtgctcttgagcaggagcaggcggttgttgacgccattgagcgccactacactaagacctgccgccgtctcgccggcaagggcgtgtcggatggttctcccacgtccgcccatcactgcgtcgacaccttcaagtctgcgcccgccccagcctcaactcttcgcgcctctcttcacgctcaggcggcggcctttacaagcatccgggcaaccatcaccgacgttctcgtgccggactccagtcagtaccctcggtggcacgactag

SEQ ID NO: 6138 - DNA, 720 bp, Zea mays
  Peptide Sequence Number=SeqID_49513
atggcggacactctccgcaccctcggggcccccatcaccgatgagagcctcgtgttcaacctcctacacggtttgagccctcgtttcgatcgcatgacgcccatcctcacccgcatgaagccgtttgccacttttgcgaaggtgaagaacgatctacttctcgaggagcttcgcctctccgccactacgacctccgctcccgccatgacactctacagcgtgcctcgggctaccccctctgactccggggggttcctcttcaccgcacttcggccccaccggcctctggagctcttcgatagcctactggctccgtgggggtcacggccgcggtcgcaagagtggtcgcagcagcccgtcgggcggccggggcacctctccgggtggctcttagtggccctccctctacaacccgtggattggcaccatccacatgtggcccgagccatccgcgggtgctgcggcccctcgctccaccacctctcagcaggtcttctttgtcgctcccccaccggctgcgtcctcggctcccctccggtctcagcaggggctcctccctctcctggggcctccggctcagcccgtgtgggggacctggaccaatgggtgggacacgcagtctttcgccagctccttttccacgatgacgctgaccccacccacctcggtctgactgggtggctgactccggtgcctcctaccacaccaccccggacgtag

SEQ ID NO: 6139 - DNA, 714 bp, Zea mays
  Peptide Sequence Number=SeqID_49514
atgacttcccacggatcctcagatgatggaaatgcactgacccacactgacgggcttgcacgagagggctttccccgcattttgtgggaggtacttcagggggccggatacacgacaccccctcagtacgcggtgcagcagtttgagaagcatacagtgccccgctgtagggtgaggatgaccttggagcctcatcccctgcagccaggctggcgctcattggactccgagtcttttggataccgagctgaggacacgattgaggcgatcgctctgcatgggttgaccactttctgcggattccatcctttggagctggctacccaccccattggattgttccccgccgaaagggaggacgacccaatgtggaaggatcgggtggagcacgccaaggacatctgggctatctacccaggacagactacgcacttgaccgtggagcagctatccactgatatccaagagttggaggaattagtgggcaccagagagaacaccatcgaggttctcgaggatcagcttattaatactcagcaacagcttgctgaggctaatgagcacctggatatgcatcaccaggagatccaggacatggaggccaacgaggacgtcgacatcgagggaggagaggagcctgcctctagtgtggacactgctggctcatggagaccaccttcccccgagtcgagtgttgcctcgttcgctcactag

SEQ ID NO: 6140 - DNA, 741 bp, Zea mays
  Peptide Sequence Number=SeqID_49515
atgtcgtcgggcacgggcacgggcaggtcgtccaccaggaggggaaggggcggcagcttcacgctgaggcatcagccgccggtggtggacatcggctgtaactgccgccgccccaagctgttctccgtcttctcgtcgtcgctgttccgcggcgggggcaagcccaagtcccccaacgcgtcgtccacctccaccaccacggcgttcacggccaccaccgcgggcgggcgcagccgcagcggcacgacgacggccacctccaccgactcctcctcctggggccccgcgtcgttcgtcgccaccaactcgctgtacgaggagccggtggcggcggcggtggcgccgccgcaggagcgggagcagcaggaggcgaggcggcggcgtaggcagcagcagcagcgccggcgccgcagcaggcgggcgccggcgcccgcgcgccacggcgcggtggcggaggaggaggtggatggggaggagcaggagcaggagtacgggcggcgggtggcccgggagagcgtggcggtggcggtggattcggcggagccgtacgaggacttccgcgagtccatggtgcagatggtggtggagaaggagatctacgcgtgggacgacctcaacgacctcctccaccagttcctctccctcaactcgccgcgccaccacccgctcatcctccacgccttcgccgacctctggacccgcaacggcctcttctgcccgccatctccctgccagttctag

SEQ ID NO: 6141 - DNA, 153 bp, Zea mays
  Peptide Sequence Number=SeqID_49516
atggcggtgggtggggcggccatgtcgatggaaggtgagcggggcggcctcgtcgatggaagtagtcggaatggggtgaatagtgttgttttcctgtcagaacgatcagtaaaggggccaagtgactgcggtcatttcgaccttgccgactga

SEQ ID NO: 6142 - DNA, 633 bp, Zea mays
  Peptide Sequence Number=SeqID_49517
atggaggtgcccactaatcagatccccgcaggctggttcactgagccggcttccgagcagcccatgggcttgcccaggaccggctcttccagtcgcctcaacgcgcaggcgccggagttcgtgccgcggggcccgccaccaccgacgccggcggttgtgctgccgcctccgccgcagggtagtgcggcggtgttgggggttgtggcgggcctcgccctcatcgtcggcttcgtccgctgcgatacctgtgaagttaacaatctctggaagctgggaagtttgtactgcatccgatgcaagaaagaattggagctgcagctagatccaattgctcaaggtctagctctcccccctgctagacacgtagcgctctgctacacccccattgtacacctagatcctctccttacgcctataaaaggaaggaccagggccttcttagagaaggtggttggggttgtatttatagccacaaactacttcacagtcgttgcccttgttctgccaaccgtggacgataaagtagttgcggacggtctagccgtgcaccccggacggtccgcgagcttgaagtctagccatctaggagctttggagactctcaagctttggagactctcaagcgaggtctag

SEQ ID NO: 6143 - DNA, 369 bp, Zea mays
  Peptide Sequence Number=SeqID_49518
atggagaagggcgcgggcacgcggcggtggcggctggtggaaagagggtcggatcgtctcgccttcatcaacagccagacacgcagcctttcctgcgacccgattccagatgttgagactggaccgaaactccgcaaacaccatcgtcggaagcccctttgtgaagacgtcgacgaattgggaggtggtcgggacgtgaagaacgcgaacagctccacagacgacccattcgcggacaaagtgaagatcgatctcgacatgttttgtgcgctggtgctggacggggttggtggagaggtagacggcgctgacgttgtcgcagaagatcagggtgctcgtggccagcggactgtggagctcttagagtag

SEQ ID NO: 6144 - DNA, 477 bp, Zea mays
  Peptide Sequence Number=SeqID_49519
atgaatacgagcaattgcgtgtcagtgcagcttcaagttttactgccgcgccataaagcgcaggaggaagaggaggaggaggaggaggggggagccccggtccggctccggcctccactgaacccatcgatggcttcgctctgcaaccatgcaaatgccacgcgcagtactggagcccgtctaactgaccgctgctctcggcgtcaccgtaccatcgtacacacggagcagtcagaaaatacagtaaagcaagctaccgctgtagctgtagagtacagttttggggctggcggcgggccaagcgccaagcgccaagacagtgaagcccacacactgtgcccagacccagatccagccgagagcaacgttgaatcgcagacgccagcgctagctagctgtgtggatcggatccgtttcgcgtccgccgggaacagtgcgagcacaggcacagcttatgagcttcgtggtggcgcgtag

SEQ ID NO: 6145 - DNA, 513 bp, Zea mays
  Peptide Sequence Number=SeqID_49520
atgggggacgccggtttcgctctcctcgtcgcgttagcggccgccctggccgccctgttcctcgtcctgctcggcgccgccgtcctccggcactactgctggcggcggcgcctcgacgctgtggcgcccccacgccgcggcttcgtcctgttcgacgtctgcttcgccgacgacaggcagcagcggcacgccgtgaggccgccgccgccgtccgtggagcggggctgggcgcggcgggcggcgggcgagggccgggtggagcacgcgcccggcggcggcggcgaggccgcggcggacgacgacccggtcgtggagcccgacgagctcgagatcgcgcggtggaggaagatcttccgcggcccgaacaggtccatgtccacgatcgacgaggggacggagaaggacggcacgacgcccgccttctccacgccgtcggcgtcgcctgaccgacgcgacgcccgggccccggccctcggcatggagaccgtcgcggtgcagcttcgtcaggcgtaa

SEQ ID NO: 6146 - DNA, 717 bp, Zea mays
  Peptide Sequence Number=SeqID_49521
atggcagcctacgagaagcagcagcggccggagacgccgctgaacgccgcgtactacggccagccgatccctccgccgcagccgcccgcgtactacccgccaccgccgccgccgccacccgtcccacgccgcggcggccgctcacgctgcctgctcggctccgtcgtggccctcgtcgtcgcgctcggcgtcgccaccctggtgctctggctcatcttccgcccggacaacctcagggcctacgccgactccgccgcgctctcccgcttcgacctcggcagcggcggggacctcctccagtacaacctcaccgtggacatccgcgtgcgcaaccccaaccgcttcgggatccgctacgactacgccgaggcgcaggcgttctacgacggcgaccgcttcggcggctcggcggcgatggacgacggcggcgacgcgctgcgcacgtaccggagggagagcggggagggcttctactacgtcacggtgaaggtgtactcggaccttagcttcagggttagggtcgtccgccgccatgacttcaagagcaagatcacctgcgtgctgcggctgcccgtgcccgctgccggcggcaacgccaactccaccacggcgatgacgacgctcgggacgagacgccgtacacaattcacctccgcgttccgttggccgcctgcctgcgcgggtcaaggacgcaacggcaacggcaacggcccgtaa

SEQ ID NO: 6147 - DNA, 1047 bp, Zea mays
  Peptide Sequence Number=SeqID_49522
atgagtcggggagaggagaaacgacctcaaagccatatgcttttgcatgtgatgaaaggaagggcaaaaagaaggctcccactccaagttcctcaagcgaaaaagaggaagaagaagaagaaagtgatgatgatgaagataatcaatcatgtacatcatcctccgaggacgaagaaacaatccgacgcgtcggaaaggtcgaggatcttctctttaatattgacaggaaaaagcaaaggaagagaggatgcttcgcatgtggggagaagggccacttcagggacaactgtccaaatatggccaaacccaaaaaggagaggagcaaaggcaaggcgctcacaagtgttagaacttgggatgactcttcaagtgaagatgaatctccaaggacgcgcagccaccggtcctcgtcacgatcatcacggacatcacacaaatgccttatggcaagagaaagatgcttctacttcctgctttgacttaattgatgattctaacccctgcaaccaagttgttgttgagaatattgttgtagagacatgctctgatgaggttgcaaaggaaaatgaacaattaaagcaagaagtggctcgtcttggcaaggctttgtatgacaagaaaggcaaagccaaacaaatccgacctccacaggataacaccactgcgggagtgaacaagcctgtagagggagaaactgtgatttgtaggctatgccacaaggaaggccacaagtctttccaatgcaaggcgatgaccgggaataaacaaaggcaaaagctcaagcaaaagccgacaagcaaaatctccagcacctacatcaaaaaggtgaacaaaaaggacgctacaccatatttgatcaagaagaagaagaatggaaaggtgatagcaatcaaggccaacaagcaagccaacaaaggaaagggggccaaacgcatctgggtgccaaaagagataatttcaaccatgaaaagcaccaagaaggttttggatcccgaaagggaaatgagtgaaccaaaggtcatcgggaaattttggagacttggctaa

SEQ ID NO: 6148 - DNA, 378 bp, Zea mays
  Peptide Sequence Number=SeqID_49523
atggctccagtgccaagtgttaagctcgactcaggatcaaacttcgttgggtcattgctctacatcgataacaagtccacgcttgccctcaccaagaatttggtgcttcatgatcgaagtaagcatattgaaatttgtttccacttcattcaagactacatcagcaacaaatcattggagacattacaggctcgacttagactccagatgcatgcgcccacaccccctgaattagttgtgccatccacaaccaaggaacgtggtcaccatttacggtctccaagctccaccgttcacacgactctgcatgaagcaggaaagtctctgatcatgttgcgagaaagacacaatgcataccactatgctaaacttagatag

SEQ ID NO: 6149 - DNA, 453 bp, Zea mays
  Peptide Sequence Number=SeqID_49524
atgggctatctagatgctcctttatcaccaccaacagatgttcgtcctgctatgaaacgacaagaggatgaaaacgaagatgatgagtacgaggaactgcactcacactacaaatgttctaaaattcaggataagagcaagccaccacagtcacgacgtgaagcactccatgctagtagagtttctgcatcaataaaggtttccacagatattttcttaaagagcacaagatatccaaacaggaaggttgccttaggcagagtacttagccaggaccccaaaaccaaagttggagatgttgctttaggcaaagaattttggatggtgtgtgttagtctggtatctgtgcgcaatgaaccactaataaggccatataacaacttccaggttcttggacaagtaggcaataatccaattgcatggccttcaagttgtattgaaaaggttaactga

SEQ ID NO: 6150 - DNA, 444 bp, Zea mays
  Peptide Sequence Number=SeqID_49525
atgctggtagactacacaacggtactcgatggaccatgtgtgtcagtcgaaggcccgacgcaacagggtatcaagagcgtcgtggaagtgacaccctcaagcggcgtcatgagtgatgggtctagcgatccatccatccgactctggctcctccgaaagttccatgccgtggctcgaactgccaccgatgtcatcgtctccgtctccgggaaagcggcctctcagactccaccttttgctgaggtgaggggtaagagtcctgctgctcctgctcctactcctggcatcaatgctcctgctcctcgtgcaggcgacgatgcagtctctctagatgctaagcctacacaggcagctgactgggggtttgccactaagaaagaactagaactcatcgtagtcctgaaactcctcgaaatcttccatgttgccagcatcacctcctga

SEQ ID NO: 6151 - DNA, 471 bp, Zea mays
  Peptide Sequence Number=SeqID_49526
atggcgtatagattgttgtcggcgtgggttcatatttatacgcctagtgtgttgcagcttgaagggctccgtttgtcattgactgttgctattctagcaaagggaagatcattatatcctaagggagataatgcttcgaaggacaaagggcgttgtcggtaccctgaaacaggggtacctcttactacagtaagaaggcacggtgcccgcgcgactatctctagtcgcgtggtaaacagcacccgaccccaccacgtggacgactctggggtcgccacgtggccagggaagacaatatcctccaaggtttcaacggtgggtccggacccccatgggaaagtgccggacccctgcatatacagactggacctccgggacgggtcccggacctctctgtgtggggtccgggccacccttagcggggtcctgggattctgggacaaagaatacccatgccttaatcaagcctag

SEQ ID NO: 6152 - DNA, 324 bp, Zea mays
  Peptide Sequence Number=SeqID_49527
atgaaccttaatgaatggcaccaacatgagtttggtgtgccatttgttactcctgaggatgaggccgaggagtttgatgactccttctacacatctgctcctcctccctaccgaggtccgggacccattcctggtgacccgaggctgtccggatctagtcaccctcctcctccttaccagggtcctagacctattcctggtgatcccagaccttccagctctagtcaccatcaccctcctcctccatacccgagtccttcatcttcatcaggttttccttctactgatgaccccctcgggaatcgtcatttggggaatatatga

SEQ ID NO: 6153 - DNA, 696 bp, Zea mays
  Peptide Sequence Number=SeqID_49528
atggacccgtcgtacgatggcagcgcccccgccgccggtggaagcgccgacgaccatggccaaacgtgggcgtgccggcgtgcggagatccgcgccgccgccggaggaatccggcggctgttggatcacgtcggcgatctaacagtagaggaatcctaccgagccagcgatctggttgatgccagtgccaaagattggatgggggagaatatgggttcacgtggggctggaatggggctttcagatgctactaaattcgtgtgggattgcctcaatcaagatgacgatgagctaatgggattgcttggaaatcaaaccccgttgagagactgccgtgatttctttgctgaccttggtggaacaagtgagactggaccaatgacagaaagtttcataatgcaggaaactagaaagctttgtacactcaaagtgtccaaaggatcaagctcaacactagttaaggtgaaggaaaacttaactacctcagtagcatatccttttactcttatcaaaccatcttgggaggaaggcgatgttaccttgcaggatataaatcagcgaattcgtgctcctcctaagaaggcccccgagatccttggaacttcagcattctctggcaagccagtgattggcaagacaagaatcagaacagaaggggggaaaggaagcatcacaatactaagaacaaagggctga

SEQ ID NO: 6154 - DNA, 367 bp, Zea mays
  Peptide Sequence Number=SeqID_49529
gatgccgcgcacgaagaatgcgtcggcgccagggggtggtgatgatgaggatcctcgtcgccccttcaggcaggtcaagggcaagactgtctatttggagcagcaggaaggccgcaagaagcggcgtacggacagagaagcccgtgcagcggcagcagctgtagcagccgctgcgcatgccgcacttggagatcagccgcagattccatccgatcagattgctttccgtgctcgtcgtctcacctcccgcgtgctactgcggcacgggtacgtcggttcagccggtgctgactctgaggcgcatctcacctatctgcctggccttctgacccttctgactatcagcggcagatatgttgaggagtgg

SEQ ID NO: 6155 - DNA, 1215 bp, Zea mays
  Peptide Sequence Number=SeqID_49530
atgaggttgagggcgcatccgacagactggcttgaggtgtgcttgggccattgggtgcgtcagcctggaccagtctatggcgccgaggtaacacagctcgacgccataggctatggcgccgagctggtaaaccccatcagcacaaagctgcaaaggcctgatgggcgcgattccggtcaaggctccgtccactcaagggacacgatctcgcctcgcccgagcccagcctcgggcaggaacagtagaccaaggcagattcaagcctcgcccgagggtctcctcaagcaacggacgcaccttcgactcgcccgaggcctagctcgggcaggcttcgcggagaagcaaccttggccagatcgctacgccaaccgaccgtatcgcaggagcattcaatgcaaggatcgcctgacaccttatcctgacgcacgctcctcagtcgacaaggccgaagaagctccgcctcgcccgaccctagagctcggactcaacctcgacgccggacgacggactccgcctcgcccgaccccagggctcagactcaacctcgatgctggacgacggactccgcctcgcccgaccccaaagctcggactcagcctcgggcgccataggaagctccgcctcacccgacccccagagctcggactcaacctcgacgccggacgacggactccgcctcgcccgaccccagagctcggactcaacctcgacctcggacgacgatctccgcctcgcccgaccctcggggctcggactcagcctcgactccggaaggcggtctccgcctcgcccgaccctagggctcggactcaacctcaacctcggacgacgatctccgcctcgcccgacccccggggctcggactcaacctcgacctcggacgacggtctccgcctcgcccgacctccgggcccggactcagcctcgacctcggaggagcctccgcctcgcccgacctcgggctcagacccgaccacgtcgcagggggccatcattaccctactcctagctagctcaggctacggggaacaagaccggcgtcccatctggtttgccccagtaaacaaaataatgatggcaccccgcgtgctccatgacgacggcggctctctgccccttacagaagcaaggagacgtcagcaaggatccgacagccccgacagttgtacttccacggggctcaagcgctcctccgacggccacgacatcacatga

SEQ ID NO: 6156 - DNA, 477 bp, Zea mays
  Peptide Sequence Number=SeqID_49531
atggcgcaccggacagtccggtgtgccaccggtgcgccaacggtgcgccaacggtgcgccaacggtcacttccaacggctagttctgacagagagccgttggactcatggcgcaccggacagtgatcagtccactgtccggtgcacaccggacagtccggtgcggtgtccgatgctttcaacggggaaggtgacgggacagacccggatgttgctcttccgtcacgcggggaagacgtcgtcgattccgctgccggcgggcgggctgacggccgccattgtcgttgtcacgcggcggaggaaggagtaccatgtcgtagctgccgtcgagggacatgaactcaagactcccgaaacgaagcaccgtcccgggttggagaggttgctggagactacccatctggagcttgacgggaagctgttcgttaacacgtggcagtcccctacctggtgtgccaactgtcggcgtttcgagtaa

SEQ ID NO: 6157 - DNA, 660 bp, Zea mays
  Peptide Sequence Number=SeqID_49532
atgacaaagccagatgctaggaagtttgcatgtgccaagaaggagaccatccatctcggtctcaccgagtcggaccatatttgcatgcgggggacgagagagagcaccgaaggggagcgaggacttactggtggcaccggtgatgaggacgataacggggcggcagccctcttgaacccagatggatggcgttcctgcgggtgcctcgggcgggtgccagtgcgtcgggacagggccgggcgagagaagtgggaggacgcccgcgactgcgatgccgtggagggggaggggcgatgcttgcgcgagcccgcggctatgatggggggcgagggatgcatcttaggaggcgagagaagctgcgatgtcggggaaggggcaggtttggcggcgaaaaaaaggcgaacggattgcggcgggcgggcggttcgcggagctggaggagtggcgggcgattcgtgggagattgaggagcggctccacaggcggggtgcgggtggaggcgggttccgtgtcgggggaggcgcgagattcgtggtgcttgaggcgcggacgggcgtgcgggtgggattcgccacgggggaggcgcgggattcgcggagcttgaggagcgagcgcctgtacgcggagcttgaggcgcggcgggggattcgtggagcttga

SEQ ID NO: 6158 - DNA, 363 bp, Zea mays
  Peptide Sequence Number=SeqID_49533
atggcgcttcctgttgacgtggtcggtccatgccctaggttgggcgaggtggaggctcctccgaggtcgaggtcgagtctgtcttccgaggtcgaggtcgagtccgagcccccaggtcggacaaggcggagcccgtcggctgaggctagggctgagtccgagccttggggtcgggcgaagcggggttcgtcgtcttccggggctgagcccgcgaagcggagttcgttgtctttcggggctgagcccgagtccgagccctggggtcgggcgaagcggagttcgtcgtcttccggggctgagcccgagtccgagccctggggtcgggcggagcggagttcgtcgtcttccggggctgagccttag

SEQ ID NO: 6159 - DNA, 600 bp, Zea mays
  Peptide Sequence Number=SeqID_49534
atggccgaaaggtaccaacttccaagaagttgcgttcctccgatgataagacggaaggattgcgggcgtcccccatccgggggctcagaaggtggaaagacacggtgcataagggagcgcgaagacatggccgcctttcaaggaggtcaccctccttttaaaggcgactctccccgcttgcgtcctcagccatcgcgggctgagtcttctccaacacactccaaggtcctccccttacggcgcgggggctgggtcccacgcgtcatgcaagccggtcaagggcagaagaagccaaaccgccgcgcgcgggaccgggaaaagggggataccccgaaaaggatccttctccgtgaaggaaacaggccccgagcctccctactgatcagaggttcaaaggccggcccctcggaggggttcaacggccgcctcagagcgcttgggttctgtgcccactactggtcagaggctcgatggccggcccctcggaagggttcaacggccgcctcaggccactcgggctccgcgcccactactgatcaggggttcgtaggctggccctcgacgggttcacagtcgcctcagacacagagcgagggatga

SEQ ID NO: 6160 - DNA, 390 bp, Zea mays
  Peptide Sequence Number=SeqID_49535
atggcccggtgtggcaccggctgcagaagccagtaccgtcttaaggaccttccggggagccagaccggtcgaaccgtgcctccgtttgctgggaataaaaggaaaagcaggatcaggacacacgaagaaggagccgggacagaggtatcctcagatacttacccactccggaccaaggccaatcgtgcctgcggggaggcccctcgggcctcggtccccacgggcactactgaggtttgccccgctgccggcttcggcaccatacccgcctcgggcgcccgggacgccgaagggacggtctgcccaggcgcagtcgcaacgaccggaggatcgacctcttgtgcggccggcacgggcgacagttcttgggggacaggcgggtcggcctga

SEQ ID NO: 6161 - DNA, 774 bp, Zea mays
  Peptide Sequence Number=SeqID_49536
atggttgccccgcctcctcctcctgcggcggggaaggtgacgggacagactcggatgctgctcttccgctacgcggggaagacgtcgccgattccgccgccgtcgggtgggctgacggccgccgttgtcgttgtcgcgcggcggaggaaggagtaccatgtcgtagctgccgtcgagggacatgaactcgagactcccgaaatggagcagcgtcccgggctggagaggttgctggagactacccatctggagcttgacgggaagctgttcgtcaacacgcagcaggcccctacctggcgcgccaactttcgacgtttcgaccccggggggtccctggaccgacgacccaaggtcgggcgaggcgaagaatcctccgaggtcgaggttgagtccgagccctggggtcgggcgaggcggagaccgtcttccgaggtcgaggctgagtccgagccctggggtcgggcgaggcggagaccgtcttccgaggtcgaggctgagtccgagccctggggtcgagcgaggcgaagaccgtcttccgaggtcgaggcgggggccgagccccagggtcgggcgaggcggagcttcctatggcgcctgaggctggactcggcggctgtcagcctcaccctggcgggtggcacagcagtcagagcagggcaggcagcgttgttttcctgtcagccaacttccattggaggcgattttggaggtctagaattcacaaaatacatggggagaggttttgatcttcattttttggaagaagattgctaa

SEQ ID NO: 6162 - DNA, 642 bp, Zea mays
  Peptide Sequence Number=SeqID_49537
atggcagcagcatccgccctgaggtcatcgctgctgttgttcggcccctcggagcagaagtcgtcgtcgtcgttgtcggagcgggcggcggcgagccacccgtcggccttctgttgctccgcaggcccccctatcgtgtggggttgttcgtacctgcggaggtggaaccggagttccgtttgtaagggcactttgagtgccggcgtcttgttcattgcggctgtcgggcctgaacatggttctgtcgccgtcgtagtcgagaaggcccgaaaaatcgtttcggcagaggagctttcgagcgtgaagacttgttcggtccgcggagtcacctatccgagcgtgagttacttatcgcagaaggtgatgagtgaggtatccgtatcccggaggcgtaggagtccctcggcttggtcagccttgactacttacgtgtacccggaggtagcggtgtcagcacggacagaggcagagttggctcgaaaagaagatttggttggccggagcctgaccaggtcgtccactggcgggaccgacgccggagttgagctgtcgaggccacaagtcgggctgatgtcctcggggaacggttggctgaggcttcggggtggccggccgagccgtctgctcgagccggattcctga

SEQ ID NO: 6163 - DNA, 984 bp, Zea mays
  Peptide Sequence Number=SeqID_49538
atggcccaggctccggcgcgcgccgcttccgccgtacgtctcttcgacgcgcactgccacctgcaagacccccgcatcgcggccgtcgcccctgcccttatacgagccgccggcgcatccggcgtcgcacgcttcgctgtcaacggcacctccgagaaggactggcacctggtgaagcagatggccgaggatcacccagccgtcgtcccctgcttcggcctgcacccttggtcccatcactttggtaggtgggtacccgagaggtcgccggattggatgaatttgctccggcggttcttcgccgaaaccccggaggcggctgttggggagattggtctggacaaaggttcacatggaaaaaccatcaacttcggagaacaggtccataacaacagcaaactcttatcacaggttgaagtgttccagcgacagctcgaactagctaaggaattggagagacctgtttctgttcattgtgtgcgggcatttggtgatcttctggaagtattgaagcaaactggacctttcccagcaggcgtgttgttacattcttatatgggatctgcagaaatggtgtctgcccttgcaaatttaggctgttacttttcactatctggcttcttgacaggcatgaaatccactaaagctaagcacatgctgaagtcgattcccctggataggattcttttagagacagatgcacctgatgcattaccaagattggacaatgtttctgtatcaccagtccatgttcacagttcagatgcagatactgaaaagcgtcacatggattcagagtcacaggctgctaatgcatcaaatgagtccttgaaccatccagaaaatatccatattgttttggagtatgtcgcatcactccttgaaatgacagagtcagaattggcggagttgagttacaagaatgctaccaagctgttttcttatcctggctccaaagttcaacatgaacctgaagacatctaa

SEQ ID NO: 6164 - DNA, 576 bp, Zea mays
  Peptide Sequence Number=SeqID_49539
atgggttctgcaacacttgccgcttccgcccgcagcgctgcgtcggtccagttgccgttgggagtggcgggtggccagtggccaccaaaccgacgagtccagagaccagagggggccaaagctaggcggctcctcgccgcctgtcgaaatcggagaaagcgccgtgcaccaagaaccgaaatcgaaatgtttgtgggcgaagcaacgcgcgcgcactcattttgctctctcagctttctgggtgcacatcgtcttcagaagggcagagatgccagtaaagcagtggggtcaagcgacgtctctagctcagagatagggcttgctatgtcgccaagcttgttcgtcgcgaagacgggtcacatcattgcgacgagcgagacctggctttgtcaggcgggccgatgtcgcgacgacgacggggcgggggtggaggcgccaggaagggtcggggtcgggcagcgttgcgtcaagaggaggcgacagtcgaaacgggcatcgaggcaaactggtttaggtggcatcgaaaacattagggtcgaagtgatagatgcgaggactgggttggagaggatctga

SEQ ID NO: 6165 - DNA, 402 bp, Zea mays
  Peptide Sequence Number=SeqID_49540
atggaagcgggagctaccggggacggagcgggcggtggcggcagtgggcttcgtggggagctcgggcgcggcagtgggcgggcggagctccggcgacctcggggcggcagtgggcgggcgggcggagctccggcgacctcggggcggcagtgggcggagctcgggcgcggcagagggcgggcggcgagctcgggcgacgtcgggcggggctcgcggcggcgagccggagctgggccggggcgggcgggcggcggcgagccggagtcctggcaggcggcggcgattgaggacggcggcggcggcgttggtttggaacgagcagaagacaagaaacgcgcgcacagagaaggcggtttgcagttttttcctagctcggcgccaagatctgtggcgccgagctag

SEQ ID NO: 6166 - DNA, 1074 bp, Zea mays
  Peptide Sequence Number=SeqID_49541
atgggggaggcctatagtgccaaacccggaggggaggggagtagggatggcattggagaggtggggagggatcgagatggtgccgacaacagtgatgacgggttcatgtctaggccaaatccaggggaccaggcactcgacacgcctgtgcccaggtgcgatgttcctgccccgactggcggtgggatgacgactgtgagaggttcaccgttccacaaaaattcttcttccatttttatgtggtcggtcctgagacgcctatatgagactgaacatgtcttccactacagcccttcagctcgaatgcacatcataggatatctaacgggtattttctactatgtggctgcacctttatcgcttgctagttcttgtcttcctgaaacaatacagtatcttcggtatcaaatagctgagttcattgtgaagggtcgggcaaaaatgccagatctagcaattgtcccatcacatcttttgaagcctcttctaaagctggggtggtgccagtggattggtgctattattttcatctggggctcactccatcagatccactgccatgcaattcttgtatgtattcgcttctgtcattctactagttatttatttgttgcaaatgcgaacaacatacaacagcaattgggatcattgcgtgaacacaaagattctgatgaatatgtaattccttgcggcgactggtttagtcgtgtgtcgtgccctcattaccttgctgaactaataacaaacttgtcctttgcagcggtacaaacacataaatggtatcttcggaaatttgaagattaccctcgttctcgttacgcaatcattccatttaaaagccacaatttggaacggagtagtgactatctagctgataatgagacaaatggtgttattgttcattatactttcattgtctcagccttccatgtcatcaatgatacttgtttgatctcatggtcacgctttgttcccacacaagtcctttctgcaccttgcattattagtcgctggcacctctgcaaagagaggcctaaacccatcgcctatagcaaaactccagagaaactatga

SEQ ID NO: 6167 - DNA, 282 bp, Zea mays
  Peptide Sequence Number=SeqID_49542
atggctgctgctgctgcagcccctccgtgggcctccttaggccctaacactacacccctcctggacaagcagctcgtcctcgagctgcagcataacggtggcgtcgcccatggggatggagacgccgtcaacgaagatgatgtgacgaaatttggcgttgtccctagggatgggcacaccggcgtccaagatgtggtgacaaaattggcaggcgatgctgcccatggagacagggacgtcggttgccaggatgacgtgacgaaggtggtatgcggcgcatga

SEQ ID NO: 6168 - DNA, 474 bp, Zea mays
  Peptide Sequence Number=SeqID_49543
atggcgagagctagcagaagccgcggggcttggtgcttgaaccctcgatcattcttggaggtccccgttccttctccttgcattgctcgcgttcctcgacgcgagagcagaccagcacagagagaagaaaagaaaaaggagggttctttctcgcgtttcttctgtctattctgcggttctttcttgggagcagtaatgaggcggcatgggtggcagctcccgtaccatcctctccaggtggtggccgtgtccgtcttcttggcgctggccttcgcgttctacgtcttcttcgcacccttcgttgggaggaatgtgttccagtacgtggtcatagggctctacactcccctggctaggtgctgcctgatgggcctagcaatggttgctggaggcctggagctaaggaaggcgccgaataagtgtggcctaatcatgaaacgtgttgcttggcagtcttgcgtttttttttggtag

SEQ ID NO: 6169 - DNA, 552 bp, Zea mays
  Peptide Sequence Number=SeqID_49544
atggtgttggtggtaaagcagcaccgctgcacacactctgcgagctgcgtttgcatcaagggccacctcagtgaggatgctctgttcctcgtcttccgccacatgaactggaacccgaggctgattgctatcttgtcgtgtgtgtgcaagtggtttgacgaggttgccaagcaggtgctgtggaaggagttctgtcatgcaagggctccaaagatgatgctggatttgcattcagatccatgcgagcatcttgatcagggggaagaaggcgacataggtttcttccgaggcatctttatgtcatttgccacttcaagggtaaagaagatgttgattgagaagcgggcgaggtttcatccaagggagttgtgcccttattgtaaggccaagctatggaacatgtttcaggaaaatatgatcccaaggagtgcttccgcaaggctgggtgcctatgatgactctgtggagtattttgtatgcctgaatggacatgttattggactcggtaccctactaccactctcagactcagaggaggcagcagatgagtga

SEQ ID NO: 6170 - DNA, 3819 bp, Zea mays
  Peptide Sequence Number=SeqID_49545
atggtctacaagcaggctcgcagggactttatacagcagttctttcccttgaatccccagccttcacatttgagatatctgcactatataacaagacaaggaggtggttcagaatggcctcctattagcagacccctcatcttggattcaatagttctccatgttgttccgcggtttgacacagatggtggttgtaggccatacttgattgtacatgggcaagactcaagtcctggtaacaagagtgcaaaggtcctttatgagatgccaaaaacaaagaagcaccttcagcgttatggacaggcagaggttcccataaaattaagtgtgtcctgccatgttcatggagatgtggtacttgaattcatccatattggcgataatatagagaataaggaaacaatgttccgggtcatgttcaacactgcattcgttcaatcaaacatccttgaactgaatcgtgatgatattgatgttgcttggaatgtgaataatcagttcccaagggactttcgagctgaggtacacttttcagaccctgtttcatttaagcctgctgctaccatcgaggaggtagctgatgatggagacgagactgatgttgcttcggtagacacaggagaggagttttatgaagcagaggagtattggcatgatgctagaaaagacccagcaactcattcaattgatggtggaatatcattaaatgacattgcagaatttgatggtggggcaacaactgaagaaaggagcagcctagagaagcaccgatctgatgagggtgtgaagattgctgtctcccagaattttggtagtatgaatgaaaaagtggcaattgcacctacctcaagttttgagaatcaagaaggattgcagcagcctcgtgaagttcttccaaatgctaaactaagcaaaaataatgatcaagagaacagtgatgtgcatgatatacaggtggttgctacatctgttgattcagagggacacaagtttggatctaccggtcaggaggacacgaaaggtgtaattgcacaaactttagtcacgacagtcgatctaagtggcagtgatggaattcactgccagactgatgaacaaacaaaaatgtcagaataccctgatttggactacactgcttttggctctcctagaagtttgtcacgtacagatggggatgcccacatgagaactaagaaaaatgaagggttgcagaatggtgatattaagattatcactgagaacacaataagtgtggacaacgagctagtgatctatgaagagaaaactatagttgtcaatggtaatgcaatacaggtagtaaaaaacgttgtcaatgaagagagcatcgcggctaagataggcaaaccaattactgagagtaggacctcattggacaatgacaatggcaagattcaaactgctaaaccttctgatatagccaatggcaaattggatgggtgtagattagaatcttgccttgaaaccgtgcctaccaagaaaaccactgtccatgacagaattgttgtcttaccagccactggagtagcaactgagataaaagccaagcaagaggtgcttgttgacaaacaggattttggtatagttcttcctcaaagtcgaacagtagccagggctaggagtccgaggcttggaagtgatgaccgagggcaaatccctgataaagctgtgttatcagtattgaaggagatggtagtaggcaatgcaaagatggaagatcaaccaaagcttgccaaaccaaaaataatgcgtagatggatctcaccaaagaaggaatctgacgctacctctgtgcgcagaccatctcaccctccatctagatactacagttcaccagctgcactaggtattcgatccatatctacagatggtaaaatcagcgttgtgaatgatgcacctttattatcactaaaacaaccatatggcagcaacttgacacgagaagcaacatctgcacagtctgctccatcgcctccacaaaaatccttgttactaggtgcacaaagtgcatcaagaagccaggtcaccggtagcacaaaaacatgcatttgcccctcccgctcctcccccgcccccacctccacccccgagcagcaccatctcccccgccacctcctcctagccgaggagcacccccaccccttccccttggtcgaggagcacctccacccccacccccaccaccaccacctggccgaggagcacccccacccccacctcctcctggccggggagcatccctgcccccacctcctccccctagccgaggagcacccccgcccccacctcctcctgtttcacgtgcaggacctccaccacctccgcctcctccaggtgctcgctgtggacctccacctcctccaccccctccaggtgcaagtgctccacctccacctcctcctccaggagcgcggccaggagctccacctcccccacccccacctggaggtggtggaagaggacctctaccacctcgtgcaccagaggacgtggggctgtacgccctatgggatcagctattggggctgctgcctcacgcaagtcaactttgaagccattgcactgggtcaaagtgacaagggcccttcaagcgtttcagagttcgatgtatcagaacttgagagcctttttcctgcagctgttccaaagtctgatgacagctcaaaatctgaacgtagaaaatcacttggatcaaaaccagaaaaagtgcatctaagtgcagctctcacgctagatcaatctaccttggatgttgatcaagtggagaatctcataaagttctgtcctacgaaagaagaaatggaacttctcaagaattacactggagacaaacagattcttgggaaatgtgaacagttcttcttagaattgatgaaagtgcctagaatggagtcgaaactgcgagtattctccttcaagatccagtttggttcacaagttgctgatctgagaagaaacttggatatcatagactcttcttgtaatgagatgggaacagacgacgtggatgttggggtgagcaacgctgaagggtcgacggggaacaggtgcgatggttctgggacaatcacgtcacagaccactggagtcgggcttaaggaggtggtacttgctgcaagatctccacagcttttaaacttctatgcggatcttgttagcttagacgccgcatcaaagatacaactaaaaatgttggccgaggaaatgcaagcagttagtaaagggctggaaaaggttcagcttgagtatgatgcttcagaaagggatggtccaaaactgaaagagttcaccgacaatgctggatctgatgtgcagtcgttatcttcattgttttctgaagtgggtaaaaaggctgacgcgttgatcaagtattttggcgaggatcctgtccgttgccccttcgaacaagtgatctccaccctcttaacttttgtaacaacatttcgaaaagcacatgaggagaacctgaagcaagctgaacttgagaagaaaaaagctgaaaaagaggcagaagcagagaaggccaaaaacgcacaattaactggcaaaaataggctaggaaatgagactgaggcgctagaaaagaaggttgtggagtggggtgagcccagtgtgccgtccggcaagcagggtaaaaaggctgacgcgatgatcaagcattttggcgaggatcctatccgttgccccttcaaacaagtagacgaagatgaggctgcagttgagcgctcagacgcggtggaagatgttcttgaggagtcgaggacatcccagagcttcttcaccccatcgccaccgctgtag

SEQ ID NO: 6171 - DNA, 4809 bp, Zea mays
  Peptide Sequence Number=SeqID_49546
atggataatgacaatggcgatgtggatgacctgggttcagggtggtttgaagtgaaaaagaaacatcggtccagctcaaaatacacattgcagaggtcttcaggtggttccagccataaaattccaaacttactatcacggtcaggtgctaacagtgacagttcaaggtggcatgacaaactgcaacacccatctccgagcataaatgctaatgttggtgttgatgggtctggtagtggagagacaacaaatgttcatggtgaagggtgcaatgatgtaagcaccagccccagtggcctgaatagtggcttaaatgcttcagcctcagaggatagagtagaaagacttgaagaactggcggtggctgaaaaaacaagtgaatctcccgaaaatgatctggctgatcatgcagatccttcactgcctcatgaaccatccacctgttcaggcagtcctgcaaaatgcgcagatctttctcagcatgtaaaatgttctccaaaaacagagtctgtaggtgttttgtccattactcctgtcaagtttggagactttgatgaagttccaggtctatcattaccttcagattcatacagagacaataatacttctagaggccacagacatactgaagatgttgcacatttaaaaaatgtgcaaaaagatgcaagtgaactcaaaccggagacagacacttgtactacaattgatgaggcatctccaattatggtacaaggaacagagacacccaatcatgatagtggtttgatagcctcagttgattctgttaccctatcctgctccaaaaatgatcatgaagttccagttacatcttcatctgttcctgttgcttccatggaaggtagaacgttacttcatgacgaagcaccagcttctgcagattttggatctgaaactgctgagagcaaagaaagattcaggcagaggctatggtgttttctttttgagaatctgaatagggctgttgatgaactttacctcctctgtgaactagaatgtgacatggaacagattaatgaatccatacttgtccttgaagaagctatttctgattttcaagaacttaaatccagagcagagcattttgataataccaaaaaatctcctggtgtaccaaaggagggcatgccaatggctgtgaaagctgaccataggagacctcatgccttgtcttgggaggtcagaagaatgacaagttctccacacaggcaagaaatactgtcttcatctctagaggccttccagagaatccaattggaactggcatgcaagcaggctggtatagcagcagaaagatttacatccagctcttctgaaaaagttttgggtagttcatcaaagctgactacagcatcggcaactgttaggaatataagtttgaaagttgagagtcaggtgaaacttcctgataccagcgtgaaaaagattgctggcgagaagctaagtagggatgcattcaagtctggtaagtcgtatccacaaagtatgccttcatattctgcaaggagtagaagagggtcattagaaccaatctctgaaatagagaaacacacctttaagaaggacagggagttgctagaaaacaaatttgacaggctcaagtcaaccgatgttgttaaaaagactacagctcatcttgaaaaggaaaagcaaattacagcaccttggaagtccatggatgcctggaaggagaaaagaaactgggaagatatactgaaatctcctgtacggagttctcgtgtttctcactctccaggtgttggaagaaaagttacagaccgcgctcgtgttctacatgacaagttgatgtctcctgaaaagaaaaaaagaagtgctttggatatgaaaaaagaagcagaagaaaagcatgcgcgtgcactgcgaattaggagtcaactagagagcgagagggttcagaggctacaacgtacctctgaaaagttgcatcgtgtcaatgagtggcaggctgtacgcagctcaaaactgagagaagtaatgaatgcacgtcatcaacgtggtgaatctcgtcacgaagcatatcttgctcaggttgcaaaaagagctggtgatgagagtactaaggtcaatgaggtccgttttataacatcactgaatgaagaaaacaagaaattcttgctgaggcagaaacttcatgattctgagatgcggagagctgaaaagctacaggtgatcaaaacaaagcaaaaggaggacactgcaagggaagaagctgttttggagcgaaggaagttccttgaagctgagaagatgcaacgccttgctgaaatacagcgcaagaaagaagaagctattttcagaagagaagaggagcgcaaagcatctagtgctgcacgggaagcaagggctgcagaacaacaacgtcgaaaagagataagagcaaaagcgcaacaagaggaagctgaacttttagcccaaaagttagctgaaaaacttcgtgaaagtgagcagcggcgcaagtattacctagaacaaatacgagagcgagcctcaatggatcttagggatcagccttcaccttttcagcgtcgctttccaagtaaagattgccaaaaccgttctagttctgctaacagcggagaagattcacagacaactggcaattccagtgctgcagattctatggttaagtcatcgaataatgcacagataaaacgaaggattaaaaagattcgccagagattaatggctctaaagcatgaatttattgaaccatccataggtgaaagtacaggaatcacgcacaggtctggtcttggagctgccaaagctaagctaagtagatggcttcaagaccttcagagacttcgtcaagctagaaaagaaggtgctgccagtattggattgattgtcagtgacatagcgaagtatttagaagggaaggatcttgagctgcatgcatcaagacaagttggtttgcttgactttattgcgtctgcattacctgcgtcacatacttcaaagcctggagcttgtcaagtcactgtctaccttttgcgcctgttgagagtgttgctctcacttccagctaatcgaacttattttctagtacaaaatcttttacccccaattattcccatgctatcagcatcactggagaattatattaaggtggcagcatccaactctggaagttcaaatcttttgtctaataaaacatcagctgagactacagagtcatcgggtgaagtgttagatggatttttatggactgtggccatgatcgttggccatgtacacatcaatggtgaacaacttcaaatgcagggaggtttgatagaactgattgtagcttatcaaataattcatcgtctgcgagatctgtttgcactttatgataggccacaggtggaaggatccccactcccatcatctatactgtttggcctcaaccttttgtccgtattaacatccaaaccgggaaatttctctactatcgattgggagtcctgcaaatgcaggacactaggtggaaatatagtgcaagaatatgaatatcttagttcacaggacagtttggggtgtcaatcaatgacacttgatcagtttggtgatgccaaatcgccaaccatatacagtgaactggctgaagatagcaaatcctgtaaacaacatgacttgagcattcctgtggacagaaaattggttgatgaagctagtaaagacttgttagtgatggctgctggcctgaacaactcagcaatgcaaccatctgatttgggcattactacagagaagcattctggaaatcctagccagggagatgaaaataacacagtggacagttttcttgaaggaagaaagacgaataatgtatgtgcattgtatagtagttcaggaaaaggcaatgagatgaaccttaagcagcctgcaatgctcttactttctgcactggctgagactggccttgttactctaccatcacttttgactgctgtgttgctccaggcaaacaacaacaggtcatcatcagagcagacattggcgattcttccatcaaattttgaagaagtagccactggtgtattgaaagttttgaataatatggcacgtttggatataacccttttgcagcacatgctgtctagatcagatctaaagatggagttcttccatttaatcagcttccttttgagtcattgcatgaacaaatggagagtgccaaacgatcaggttggtttgctgcttctagagtctctgctacttcttggctacttttctttgttccatgctgggaaccaagctgttcttcggtggggaaagagtcccactatacttcacaaggtgtgcgacctgccatttgttttcttcagcgaccccgagttgatgcccatcttggctgctgctctgatcgctgtttgctacggttgcgatcagaacctaagcgttgtacagcaggaaataagcacggatatgctgcgctgcttgctcaagtcctgccaaacttcaggatcaaattctccagattccattgctgtggatggttctggaaacaattccactgaaagcattctggatatcaggaactcacagggtgacatcccaacaaggtcaagccgcaaaattggacggccagttattgggaagggtgtttcagggggtatcagattcaacagaaataaggttcagaaggatggtaggggaacaagagcaattgacgatgggcctctgaagcaaagagctcaagaagctgcatcgaacttcatgttgcatagaaagatcccagcttcttttttggacagagccgaggagttcttctgcagtgagacatga

SEQ ID NO: 6172 - DNA, 354 bp, Zea mays
  Peptide Sequence Number=SeqID_49547
atgaggacttcaaagccgactccagcgatttggatttggagctcacagaaggggctgactccagaagggctttctccagagaatctacgagttggttggggtgccgccgccaccgcagggaacccctcgctggcgggtctggtcgagtctggtgcgcttgtacgcgtatcgtggcgacagtttggccctgtcccggcgtggtggctgctaaacttcatggagctcgaggacgtgtggatcctcggcacctcgcacctctccgcgtcctccacaccgtcaaacccgacaacgtcgtcgtctagctctgccggagcaggcaaggacgtgcatccccttaaatgttatgctgcttaa

SEQ ID NO: 6173 - DNA, 423 bp, Zea mays
  Peptide Sequence Number=SeqID_49548
atggttgttgtcccgcttcggtggcgaccacttcccatcggcggtggtaagggcgaagggaaccgcgcaggacccgtgggctgccttctgcgcaagcggcgagattctgacacgtctgccgctaaggacgtggcaggcaccatgtcccagcggctgtcacagcagatgagtcaagcggccgacttctccgaccgtgttgcgtctggtgtcctgactgcggacgtggctgccgaagtcgagaggctttggggcagcacgcggatgccatccaggagaagtcggctgcggagagcaaaaaccgtactatggcagagaaagtggcctacttggaggccgagtagacgtactccggcgccaactggtggaggaaaggaaggaggcgcccaaccatctcagaggcacctcaagcagcggagctcctga

SEQ ID NO: 6174 - DNA, 387 bp, Zea mays
  Peptide Sequence Number=SeqID_49549
atggttgggttgtgtgtgcttgttgatcctacagttagcgtgaacgaggccatgtacaatttgttcaagaagatcagcagtgctgttatcgatgatgggctgattaacaaggttagcaaacttggctcaggaggtacaaatttcatggcatgggataataaactgaaaaagggtgactttgtggatgagaacttagcaacaactgaatcagacatcaaggagacactaaagaggcttatgcatcagcttaagaaatactctctcgaggctcaacagtcaatagaagaaggggatgatgaagctgtgctcaggggcccacctggtagtgagatggaaaacccatacgcgcacgccacagcgactgacagcgtgggccccgcctattag

SEQ ID NO: 6175 - DNA, 246 bp, Zea mays
  Peptide Sequence Number=SeqID_49550
atgggattaccactagacgcgcagagcagcggaagacgtctcgatgtagacgaacgcgtcaagcagtgccgtgcagtcgccggcgtccttcacgtcctcgcacggttcgtccaagtgctccagatgcagcacctccgaggtaccttggatgacatggttgctggagtgacttggccatccaccctgccaccgggctggacagtcgagtgggaccctgcctcagcaggagaggagcatgaggagtga

SEQ ID NO: 6176 - DNA, 834 bp, Zea mays
  Peptide Sequence Number=SeqID_49551
atggagccgagcgtcccttccctccaacctcctacccctgctcttccctacccgtggccagggaacacccaggacccaacggcccctgcgtatgcgccctctcggcgtccgagatccactacgccctcagccatggtgcgatgcctctgctccatcccctatctagcgtgcccctacatctcccatggaaaccagccgacctcctctcatcctccccacacagccagcgccggggaccttcttccccatggaggccgaacccctctcccagccatcgccttcccattttcctccctactactcctccctaggtgcaggcgcatggagctgtccctatggccgacgccctgctcagaggatgaagcccgacactccttgcccggcctccctgggatggcgcagcaccactcgccaaggctccaagatcgtggacagtccctgccctcgctccttttcgctgtgcgcagggtgttcaacataatgcctgagagggagatgtgttgttgcagcaccgccgaggctcaccggctgctttatgttttgcgcagccctaacatcgacgtcattcacccccgtatagtcatgggattaccactagacgcgcagagcagcggaagacgtctcgatgtagacgaacgcgtcgagcagtgccgtgcagtcgccggcgtccttcacgtcctcgcacggttcgtccaagtgctccagatgcagcacctccgaggtatccacacgtacagggaggaagcactgcgtaccgaactgctaggttcgcgacggcggcttggcgagggcgagaggcgagcggcggctgctggtttgcaggtggcgaattag

SEQ ID NO: 6177 - DNA, 789 bp, Zea mays
  Peptide Sequence Number=SeqID_49552
atgaaacaatattcccttgaggataatgaaccatggacgaaggttgatgagaatataattacgaagatatcagtcctcgcgaaatccattcacactcttgcacgtatggaagacccaatcaaccaaatactcaaaagaacagaggtttctgaaaatttaattctcgagaaaacatcatgtcctttgggtgtcctattggttatttttgagtccaggcctgatgccttggtccagattgcatctttagcgattcgaagtggcaatggtcttctcttgaaaggtggaaaagaagccatgagatcaaacaaagtattgcataaggttataactggtgccattcctagcaacgtgggtgaaaaacttattggccttgttacaagtagagacgaaattgctgatttactaaagcttcatgatgtaattgatcttgtcattccaagaggtagcaataagctggtttcacaaatcaaggcatcaactaagatccctgttcttggtcatgctgatggtatctgtcatgtatacatcgacaaatcagctaacatgaatatggcaaaacaaatagtgatggacgccaaaattgattacccagcagcctgcaatgctatggagacattgcttgttcataaagatcttataaaggctccacgtcttgatgacttactgctatcactcaaaacagaaggagttgctatttttggggggccagttgcacatgaagtattgtgcattctagaagcaaattcattccatcataaggctgcaacaccatctagtggaggtagataa

SEQ ID NO: 6178 - DNA, 357 bp, Zea mays
  Peptide Sequence Number=SeqID_49553
atgttgggagaagaatcccaaaagatgaaggagaaggaggtggataacaacaaaaagaatgaagtggagaagccacaaggaaataatgagaaatccatcgactcaagccataagaagaacgatgggaaaaataaaaggatgaagaaggtcgtctactatgagacagactcatctacatcaacatcaacatcaacatcaaaggacaagaaagggaagaaggtagagaagaaaaagtccaacaggaagaagaaaggtgaagcccacatcggcaaagaatggcattcggacgttagctcctcagactcttacaatgaaggcctcaccaatcgtcttaaacaagtcttttctctttcctga

SEQ ID NO: 6179 - DNA, 426 bp, Zea mays
  Peptide Sequence Number=SeqID_49554
atgactctcatgcttcagcatactggtgtatcgattcccccagttcagtcagcaccgcctccacctcttcaggctcctattgtgccagctattcagccaggaccccctcttcctacatttggttcttcttcctctccgctccgcccggtcaccctggttttcacatcaccggtcattggctccatcagctctcagccgccagtgccaccagctcctgctgttaccactgccactgtggcggtgtctgtgacttcttcggctccgacagctcctgtagctcagcttctgtctgagtcagtaccagctccagcttctacagcagatcctggatccgagactgactctgacccacagctagcgttcgctctactgcctcgaccgcgaccggatgcacccccgccacctcctccctcttctgatgtgtag

SEQ ID NO: 6180 - DNA, 720 bp, Zea mays
  Peptide Sequence Number=SeqID_49555
atgctgctcttccgccacggggggaagacgccgtcgagtccgccgccgccgggcgagctgacgaccgtcgtggttgctgtcgcgctgcggggggaggagtaccatgtcgtagctgccgtcgagggacatgaactcgagactcccgaagtggagcaccgtcccgggctaaagaggttgctgaagactacccatctggaactcaacgggaagttgttcgttaacacgcagcaggcccctaccaggcgcaccaactatcggcatttcgaccccgaggggtccctggaccgacgagtaaatttgtcgctgtgcgtcccatcccagatgggttggcgcgagatggaacacaagggagaaacgcggctcatgttatcccgcgccaggggggataaggtgtcaggcgatcctcgcattgaatgcgcctgcgatacggtcggttggaaatgcgatttggccaaggttgcttctcgacaaagccagctcgagttgggcctcgggcgcgccgagggtaccttggagaggaccagcaaggacttgggaaaggccaaggtgttgaggaggagccgcaagggcgtccacaataggaaggagatcaagtccgagtcggctgcgactccatctcgggtttcaggaccagtctgcactaaaatgtacgcccaagatgcatctggactccgattgcgaaggactggatatggttggaaagataacgagattatctaa

SEQ ID NO: 6181 - DNA, 585 bp, Zea mays
  Peptide Sequence Number=SeqID_49556
atggcgcggttggtccgagcccaaggtcgggcgaggcggagacttctcctgaggccgaggccggggtcgggcgaggacgcgattcctcctgaggtcgaggttgaggccgagccctggggtcgggcgaggcagagaccaccttccaaggccgaggttgaggccgagccctggggtcgggcgaggcggagcttcctgttgcgcccgaggctgaacttggctattgtcagcctcaccctggcgggtggcacagtagtcggagcggggcgagcgacgcttttttcctgtcaggtgtcaggcgatcctcgcattaaatgcgcctgcgatacggtcggttggagaggcgatttggccaaggttgcttctcgacgaagcctgctcgagttgggcctcgggcgcgccgagggtgcgcccactgccttcggaggccctcgggcgagacgtaactccgtccgggactacagttcccgcccgaggctaggctcgggcgaggcgagatcgcgtcccttgggtagacgaagccttgacctgaatcgtgcccatcagtctctgcagcttgtgctgatggtggttaccagccgtgtttag

SEQ ID NO: 6182 - DNA, 243 bp, Zea mays
  Peptide Sequence Number=SeqID_49557
atggtccacatcgtcgagcaccatgatttcttgcccgaggacttcgtggtggaagaggaggctgcctcttccacaccgcgggccaccaacttcccggcgcctggggaagcttcttgtagaagggatgatgagcacagtgcgccgcacgacacgggtgcactgtttgttaacaaactggataggtgcgccgtctgctggatgaccctgacgccgtctgccagtggattggacaggacgcattaa

SEQ ID NO: 6183 - DNA, 462 bp, Zea mays
  Peptide Sequence Number=SeqID_49558
atgtgggcccagggacataatgaatatgagctacaaatgttcgctgatggggaaatcttcttgtgccctgacatccgagatctgcgtatctttggcgcgcaggggaagcttcttgtagaagggatgatgagcacagtgcgccgcatggcacagaggctgcgcggctttaggggccttacgtcaggctcggtccgttggcttatgtcacgggccacaagccacgcggcagcagcgggtctccgcctgagcgaggagcgtagggcaaggcctggacacgtgccagcaccggacccttactcatgctggggtcctccccgtcccgggaccttgccaaggcctggaccttactcgaagggacctggggcccacccgagggactcagcatgccttcttgagagctccggacttcgtcttcatactgtagaagagggtacccctgatttagggtaccgacaagggtga

SEQ ID NO: 6184 - DNA, 288 bp, Zea mays
  Peptide Sequence Number=SeqID_49559
atgatggtccaagaactggattatggatacataatggacatcacaagtaagatggacattgcaaaagtgatactcgggtgcgtagctcggagacaactgatcaagccaaggacgaaggcaagaaaagcttcgaggtaccaagtgcacgggagaaggtcaaggaggctgaggaacccaaagccaagggatgttggagccaataagtgtcaatctagatcaagtcaagccgacttgatgatttatgagtccaacatcaaagctcaagcatatgaaatgttgcagatgtaa

SEQ ID NO: 6185 - DNA, 720 bp, Zea mays
  Peptide Sequence Number=SeqID_49560
atggcagtctccacacctgggcaggggctcggctggcctggccggggcagtccgccgcgcgcaccacgctggcaggccttcaggccgccgcgatgggcaacggagcaggggctgggcgagctagagccacgcgtgggggctaggcgggctagccggccggctgccgcgcgcaggagctactggcgcggggggcagggagtcgcgaccaggagctatctagcctgggcgtgcctgcagggacctgaggtcggctgggggcaaggccggccatgggtgctggaaggagagggatggagcaggacgttccgggacggagctgcagcagcgccgctacggccagggaactcgccagcctcgggaaatcagaacgcctgctccgctataattcaccggacatgtccggtgtacaccagactctccggtgaaccagcagagcaacggatacttcgcgccaacggtcacctgcaggcgcattcaatgcgcgccagaagcgcgcagaagacaggcgtgcccatactggcgcaccggacaatgaacaggagatgtccggtgtgcaccgggcacccaggcgggcccagaagtcagaagctccaacggtcagaatccaacggcattgatgacgtggcgggggcaccggacatgtccggtgtgcaccggactgtccgacacaccaaagagatcaaatcctctccaaactccacacaacgccctagtgattag

SEQ ID NO: 6186 - DNA, 894 bp, Zea mays
  Peptide Sequence Number=SeqID_49561
atgccttgctcctcttgcattcatcgcacccttccgccttctgggcctccagatggggtgcactggtactctctggagagatccgtgtcagggtcgtcccctccggtgatctcaccgctggagagctcgtgctcgtggtggcgctgtcgatcttgtcttcttcttgctgttgttagaggagcacaaccctgtgagggttggcgctctttcgccatcgctcggcttcaaggattttcatcatgcagcccggctgcaatctcccgccagtggtcatctagagggatgaccaccagccttgtggtggagagaagcgagtcgggctgcggcctccccctgctatcagctttaaggatgttcatcatccgcgctggggatgagggcgagccgagttggggccccgccgtctgcatggactggtggcccgcttcttcctccagcattcgggggagaagggcgttcgccagccttgcgaaggaggcgaacttcgggtacgcggggctgaccgactgcaggcgccgccagccaccgcgtgcccggtgcctcggcttgggtggctttcggcgccgcctccgacgctgcctcctgctgcctggccagggcgtggctgcccgtccaccgcacgggcgacgggtcgcgcccgtgcataggtccgccacatccacgggcttctccccgcgccgccggccacactggaggggtcgtacaagacgtcgtacgccgcgggggcggcgaccgcgttcttggatggtcttgtcctcactccggaggaggacgggagcgaggacatcatcgcgcgtgctgaggcagccgccgcccaccggtgcagagatggccgctgtcgtcggtgctgaggtggtcgccgccgcttatgagaaatcgtcgaatttcgtatag

SEQ ID NO: 6187 - DNA, 411 bp, Zea mays
  Peptide Sequence Number=SeqID_49562
atggagtggtggagtgtgcaggctttcgggtacggaaccagcctaagcggccacacaggctccggaccaccccatggaatggggtcccgttctctagggccggctcccaggctgtcggacctcccaactttcgtatcgggggccctaagctgcaagcctagctgctcaatttggatgtcgtcacgccagtacagatgggaaccatatgggtggaccaacatgacgggtttatggggacggaccctaccgggttggcgtacctgcctaggtcccaaccctgggtccccatctgcatttgacacgggagccctcgtctttggctgtggccattcctgcatgtacctatcagaagcctggacccgtggggaatccagaagggtttccggaggaaggcaagcttcagctccgtag

SEQ ID NO: 6188 - DNA, 1284 bp, Zea mays
  Peptide Sequence Number=SeqID_49563
atggttggccgcctgggtgaacagtcgtcggtagccctcggcgtcaggagtccgaggaagtccatcagctatccgagccaatactcctccgacttcgctcggcgtgttcatagctcgggcgaagtcgggattcaggttgcgcccgaagaatggattctcccggcgctgccttgcatcttgctcagcctattcctgagctcatcggcgatcacgtcgtcgggagttccttcgttctctgaagacgcgttcttccggagtttctcctatttccgagacctcatctcgcgagacaggctgctccggattccgctctccggccgcatgatgtcgtcaaacgttcctgcgccggttcctccgtcgtcgggactctcgttgaggcggttcttccccgggtacggtcggctcgtcgtcggagacgataggcgactccactctcctgatgaagaggacgtcggggtagaatggtgctgctgtcgtggcagtggagttctccgggtcagcgagccctcggcccctgacttttcggagacgatcttcgtccggaaagctggaggttgtgcttctccgaaggtgacggccattgagctagcttggatcgtcgacacaccccctacctggcgcgccagctgtcggtgttttgggtccgaccgcacacccggggttgcccctcaaggtgtttttaggagtaggacggtgtcgacaactgtagcaaaatggttcgtgccgatcgcacgagggacagtggacaagatttacaggggatatctatcccccacagaaactgtccccacgctctttgctctggccgataagtgcgccaaagccgccgagggtcgtgcatggcactcggccccacagaccggagctgcccagtcgggtggcttgggtgccatcccccgagacggaaagaagaaaaagaagaaggaccgcgactaccacaagccgcagtccactgctctggttgtcgcagccatggccggaggccagggcgaccgcaacaaacgtccacggccgcagcggggtaacagcggctcatgccctatgcaccccaacggtcgccacaacgccgcggagtgtcacgagatcattgacctcacgaaacgcgtcagtgagcggcgcgagcagtcttccaaagatggctccccacctcatcgccgacctggcaaagaaaaggtggacgacggcgaggtggccgcggctgaacgggacctcgggtatcagtcacccgagggggacctgaaggatgtcttcgctggaggctcctactccggtggagacaactag

SEQ ID NO: 6189 - DNA, 225 bp, Zea mays
  Peptide Sequence Number=SeqID_49564
atgaagactcacttgcgcatagggaaggaatgtgggctatcaatagagctacttggtcgagagcttgtccctcgcatgggcatccttgctaggggctccaatccgctgcgggtctgcctgcaccgcgtcgcgtcgccactgcaccgacccgccacagccccactagcctggctccaccgccaccctaggtataacctctacatccgcatcatggtcgtagatcac

SEQ ID NO: 6190 - DNA, 2322 bp, Zea mays
  Peptide Sequence Number=SeqID_49565
atgtcgcgggtggcgtcgttgtcgccgtccttatcgggcgacgaggtggaggtggaggaggaagacgacgagggcgtcgacgggtaccgcaagggcggctaccacgccgtacgccccggggaccagttcgccgccggccgctacgtcgctcagcggaagctcggatggggcaacttctccaccgtctggctcgccttcgacgtccaatcacagagatacgtggccctgaagatccaaaagagtgcgcctgagtttgcgcaagctgctcttcatgaaatcgagttcctatcagagatcaccaagagggacccgttgaactgcaaatgcaccattcagctgatagatcacttcaagcacacggggccgaacgggcagcatatctgcctcgtctttgagttactgggagatagcttgcttaagctggtacagtacaaccggtacaaaggcatcgggttcgatagggtgaggcaaatatgcaagtcgattttggtaggtcttgattacttgcacaatgagcttggcatcatccattcagatttgaagcttgagaacattctccttgtctccacaattgatccctccaaggaccccattcgctctgggcttaaacctaaccttgagaggcctgaggggtaccctaacggtgaggctggtcttaacgcgattgagaataagctaaagatgagagcaaggagggtgcttgcaaagcttgctgagaaaagaaaatcagctgtggaatcttcacgctcagaaaggagcttggatggaattgatctgacatgcaagattgtggactttgggaatgcttgctgggctgacaagcaatttacagattttattcagacaaggcagtatcgggcgccagagatcattctaggtgcaggatactcgttttctgttgacatgtggtccttcgcatgtattgcttttgagctcgcaacaggagaaatactatttacacccaaggaaggccatggatacagtgaagatgaggatcacttggctttaatgatggaactacttggcaagatgccgaagaagattgcaaccatgggaacacgatcaaaggaatattttgaccgccatggagatctgaagcggatacgaaggctgaaattgtcatccattgaacgtgttctcgttgacaaatacaaaatttctgaatctgatgcccgggaattcgccaattttctttgccctttactcgactttgcaccagagaagaggccaacagctttagattgcctaaagcatccatggcttaaacatgacgaggataaaacatgtgggtctcttaacaataatgatgccaagagcattgatctggtccaaagcacagggagtatcaccaccgttgactgtacaaatattgatttgacgagcaaaaaaggcagctccactggaacttgtgataagactgttgatgcaaaatacaacacaagaagcattaccagcaatgctaccatgaacacttatgtacaacccacttctggaagttttgccaacagacttgcgaaaaatgttgatgtaaatccgaacattggatccatcagtaatagagatgccaagagttctgatatgaaggcccacatgggaagcaacaccatcagtgacgccaaaagctctattgtaaagctagatacaggtaacatcactgatagaaatgccaaacctgtcgatataaaacccaactctgacaacatctccagcagagatgacaagagcagtaatgtggatactaccacttcctgtgttgtaaagaaagacgtgaagcacagcattagaagtgttgttaattcttatatcaagaactttgatgcaaaatgcaacactgcaagcactgctaacagtgatgctagtaactcatcagaaataaaacccagcactagaatttttaccagtactgataatgccaagtgtatggacataaaaccgatcagcgaaagtgctaagagcaatgacaccagtgctaagagcaatgacaccatcaatgctaatgtgaaatccaacactggaattgttgcaaacactgatgccaagagcactgatgaacagactaacactggaagtgttgacagcagcggtgattacagcgctgactcaaaacaaaacattggccgggttgctgcaagcatacagaggttggagagcagcatgagtaaagtgcaaatcgggaaatacaggataataactacttatccagggacaaccttcctcaagattgaggatctggcagtggtagagaatatcgctgttccttttatggtggatgcactggaaagggaagaattgtactctgaccagccacagcatctcttttga

SEQ ID NO: 6191 - DNA, 2730 bp, Zea mays
  Peptide Sequence Number=SeqID_49566
atgaggtcgctccgccgggtcctcatcccgctcgtcctcctcgcaggactcgtcttccgcgtggacgacggcggcggcgcgttcctcccgcccccgccccccgcgctccccgctcccccgccccgcctcgcacttaacggagaagcggctccggaggatgatggggcggcggtttcccgctccacggagatcgtcgcggcggaggcgcgctccaccgagttcgtcgccccagcgaggcccaagaagcagagcttccgggagctccttgtccggccgcagcctgcgcgccacgagccggctagtttggttaccgacgaggcgaaagccgaatccagctctgtgcttcagttttgggataatggcacaattcagcttgtggacaaactgtcgcaatctcctctgtgggagatcaccacagggcctccactatcagaccagattaataccgctgagtctggtctgaattacctcatttatcctttcaatgagaacaagaacatgaatggtactgaactttgggaggtttataatgggaacaccgtgaggctcccatggaaattggaggaattcgttgccagaagcccatacattcgggattctgttgttactattggatcaaaagtttcaaccgtttttgttgttgattctgatagtggtgagattatttacaggcacagtattccagctgtgttaaatgaattggaaggaccagggattgaaggaacaccatccaagctaaatgcccgtactaattatgacagcgataatatcatggtgcttgtgagaaatgactattctcttagtgcatcagatcttggcaagcatttatttaactggacaagaacttctttctctgtgaaatacaaccaccctgacattccatgcatcagaagtgagggtttgccacttgctttacctgattcacgttcagctaatgtaattgtcttgaaagaaggtaccccttttatttccatccatggttctgatgccctggaaccagttcaaaccccaaggaagctaccaaacactgctgggaagtcagatatcgtattggatgattctcaaaatcaaacgtatgatggtgctcgatctcatgtcatctctgctgattctgaagctaccgaaacccccactaggaacacttatgtatggttattttcttttttccccatatttttggtcattggttatctgttgagcttgacctctgcaagcaagtcttgcaggcaatttgtgattcagcttattaagccattcacgcgcgacaagaaatcggtggacattagaggcaggtcagagggatctcctaaaagaagaaaaacacggaagaaggatggacttgtcaatagccctgagaccttgacagcatctgacaaggagtgcagtgaaactggtgggtcaactgaggcaccaatggaaaattctgcactaaaagatgcccttggtggtcgtcacattggtaaactatatgtctccaataaagaaattggtagagggagcaatggcacagttgtttttgaaggatcgtatgatggtcgtcaagttgctgttaaacgtctgctgcgttcccacaatgacatagctgaaaaggagactcagaatcttattatatctgatcatgatccaaatattgttagactatatggttgtgactatgacagcgattttgtttatatctcccttgagaggtgtcactgcagtttggctgatctaattcaaaaacactcatatctgtcttctggagagtctgtttctaacaatgaggccagtttcagcatcaagtcaaagatttcaaatgttaagggaatggatgtggaattgtggacacatgatgggcttccttcagcacaactcctgaagctgatgagagatgtggttgctggccttgtgcatctgcatgacttgggaattattcatcgtgatttgaagcctcaaaatgtcttaataagcgcaggaggacctattagagcaaagctttctgatatgggtatcagtaagcacctgcaagatgacatgacttctgttagccatcatggtacaggatttggaagctctggctggcgggcacctgaacagcttcgtcatggtcgtcaaactcgtgcaatggatctttttagtttgggctgccttattttctattgtatcactaaaggcaagcatccgtttggtgagtactatgaaagggatgtgaacattgcaaacaatcgctttgatctctttatggtggactacataccagaagcagtccatcttatatctcatttgttacaaccaaacccagaggcaagaccgacagcagtatatgtcatgcaccatccactcttttggagccctgaattgcgtctttcgtttctaagggataccagtgacagaattgagaaaaccagtgaaactgacctcataaacacactggaaagcataggatctttggcgtttggtggaaaatggggagagaaattggatgctgctttggttacagacatgggtcgttatagaaaatataactttgggtctattcgtgatcttctgagtcaattcaacctttcttttgtttctcataagctcacaattgatggatacaaattccagggcatacttgggtcactaccagaggggtttgatcgctattttgctagccgatttccaaagttgctaattgaggtgtacaaggtcttgtgggtgcactgcaaggacgaggaagctttcagtaaatatttcaaaggaagttag

SEQ ID NO: 6192 - DNA, 891 bp, Zea mays
  Peptide Sequence Number=SeqID_49567
atggaggccaccacgctgacggcgctgctcaaggaggcggcggccgccttcccgacccgtcgtgtagttgtcgtaccgggcaggctggagctcacgcacgtcgccctcgacgctctcatcgacgcggcggccgcacaactcgccgccgacgccggatttctcccgggccacgtcgtcgcgttctccttccccaacaccgtcgaggaggagttcgagttctacctctctgactcggagccgtgcctcctcgtcaccaacgtggagggcaacatggcggcgcaggcggccactgccaagctcaggctcgcacacgctgccaccagcctccatgacgcagtcggccctgtccacctcgccggcctcccagtcccggctctggagaacgggtctcacgtcggtggcgcggcgggctctctctcccccggcgctatcgcgctcgcctgctccctctacgccacatctgctgcgagaccctcggctaggggtgggcattttttaccccctaccctcggcgcgctccttgaccctaatgacatcgccttcctcaccaatcgtgccaccgcctaccttcacatgggcaagattgagtatggtctctacgctgtctccctggaccacgaggctgtcaagacatggatctatccaagtgaggggcctcgggcgcaacagggagctccgcctcgcccgacctcaggcctcggcctcagcctcggcctcgggagaaggtctccgcctcgcccgaccttaggcctcgacctcgggagaaggtctccgcctcgcccgaccctaggcctcggcctcagcctcggcctcaagagaagtctccgcctcgcccgacctcaacctcggaccgactacgctacaggggatacatcattaccctactcctag

SEQ ID NO: 6193 - DNA, 357 bp, Zea mays
  Peptide Sequence Number=SeqID_49568
atggcactcggcaaagaaggaaacctgggaaccggcaaagacatctttgccgagtgctattgccaaggcactcggcaaagggactggcaaaggggcccactggagggttctttgccgagtacctgtccaacagacactcgacaaagagtcctcctttgccgagtgcctactagggctctcggcacagggactggcagtggggcccactgggtcagtctttgccgagggcctctcgagcgaacactcggcaaagttgaactctttgccgagtgccgcaggtggcactcggcaaagtatccgtcaccgttacttggcgccgtgatggtgacttttctttgccgagtgcccgacaaatag

SEQ ID NO: 6194 - DNA, 684 bp, Zea mays
  Peptide Sequence Number=SeqID_49569
atgggggagggcctgcggagcaacggaagactgacgggcggctcgccgccgcccgctctgacagcgacgacaacgacccccgctccgggtggccgaactgcagcggcgcaggcctcggggtgggcgctgctgcaatcttgccctcacccacgccgacgctcgaggggcgaggacaagtacaaagagccggaggcccgaagcgcggatggtggcggtgaccccgtcggcgacggggacttctcgagccgcctccaccttggcaccggcgccagaagccatcagccctctggcagatccccactcaaatcctcccggacgagtggggcaccgatccccgcgcggaggtgccataccagtgcaaaggcaggaccaccccagaacacgaacgccgccctagcagcgtgcggcgtcttgggcggtccttccgtgcacacggcgcggcagccgccttccggcaggaggggccgccaggggccaagccgacgagctcgatacgctgggggtgacgacgcccgccgtcgaccagccccgcgttgtcgaagtccgggccgcccgcagggacagcgagcgccctctccctcgaacgtcgcaggagagggcgacccacgaacccgcgcgggaggtagagctccggctcagcccggcctccaccccagcgaggatgatgaacatcctagaagctga

SEQ ID NO: 6195 - DNA, 565 bp, Zea mays
  Peptide Sequence Number=SeqID_49570
ccaagactctgctgagtctgggagcaccggactgtccggtggtgcaccggacagtgtccggtgcatcaggctggctcgagcgaagtggccgctctcgggaattcaccggcgacgtacggctataattcaccggactgtccggtgtgcaccggactgtccggtgagccaacggtcgggccgggccaacggtcagccgcgcaatctacgccgggacacgtggcccgagccaaacgggctagaaggaggcaccggactgtccggtgtgcaccggaccatgtccggtgcgcccaacggctctcaggctgcccaacagtcgactgcgccattttatggaaggaaatcgggcccccggccagtgtctggtgtgccaccgggactgtccggtgccgccagtcgacagaaggcaagatcagccttcctagattgctctcaacggctcctacaagatgaaggggctataaaagggacccctaggcgcatggaggagcacaccaagcattcctacaacattcctaagcaccaagacatcgattccgcgcctttgattctttgcgatagcaattag

SEQ ID NO: 6196 - DNA, 1398 bp, Zea mays
  Peptide Sequence Number=SeqID_49571
atgaagggtgcacattcagattctaatttttatggttacaaagctattaaaagggcccaaaactgcatcccaagaaagaagaaactgaaacatgctagaagcttgtgtgaaggggtggggaacacgctcacgtcagatgtagaggtgaggccgcaggatgacgaggaagagcatgagcagcaggaagtagatgacggcgtggacgagcatggacgggaagctggtcttcatgttcatgaggtcgacggggcggtgccggccgggcatctgcagcacgccgcccgggcacaggagcgcgaacagcgccgtggcgatgatcgacggcgcccagtccctcatcgcgtcggctgtgcagagccgtattccgtatattccgttctgttgcaaactttgacgaaaggtggtccgcttcgccgatgtccgaacgcccgtgatgtccgactgcccctacctataaaaccagggcaccacgcccacgttccaagatcaaaacgtctcgacaaggcacaaccacctgaagcaatgccgatgtactccaagtcagaactcatccacgtgccgccaccgccatgcagccgtccccgttacgtcatggcgccacccctggtcttcacgtccatcggcgcgtcgatgaacgccgccgtgcgcgacgtttgggccagcaacttcgacgaagagctctccaacctatcggcggtgctgccgcgctacccctgcgtgtgcgtggacaccgagttccccggcgcggtacacgactcgaacttgccgcggtacatgcgcggtccgcgcgagagctacgagctggtgaagcggaacgtagacgacctcaacctgctgcaggtcgggatcgcgctgtcgggccccgccggccggttccccatcgcgtggcagttcaacatccggggcttcgaccccgcgcttcacccgcacgcgccggcctccatcgccatgctccgcgagcaggggatggacttcgccatgctgaacgagttcggcatcgaccccgaagacttcgccgccgggttccgccgcagcggcctcgcctgcgggtggctcacctggaccgccttctcgggctcctacgacttcgggtacctcgccaaggcgctcaccggcggccagccactgccggacacgctggacggcttcctcgccctggtccgtcggctgttcggacacagtgtgttcgacgtgaagcacctcgccagatgctgcgccatgcgcggggggcttgagcaggtggccaccgcgctcggcgtcaagcgcgccgccggccgcgcgcactgcgccggctccgacagcctgctcaccaccgacgtcctcctgctaatgatgcatcgcttcttcaggaacgtcgatgtgctcgcgcacgccggaaccatcgtagacctcacctag

SEQ ID NO: 6197 - DNA, 1227 bp, Zea mays
  Peptide Sequence Number=SeqID_49572
atggatctcgcccaccagcggatctcgtccttccctcgtcgtgcccccagcagcatattttctccaggccagccagccatagtgccccaccgggcaccgcgccaccacaccacgtctctctctcctaacaaagaggagacgaggaagaagaaaacctcgcgcgggggaggcgcgagaggaatcgcgggggctggaggagcagcaaccggtgaaggtggcgcgcgcggtggctgtccgagtgtcaccacattttttcgcgggtgctggattgctttctcggggaaccaggagagggaggcgaacaaggagatggttgtctaccttgtcgacgcctcgcccaaaatgttcacccctaccaccacccagatccgagagcccaacaagcgcacccgcctctggctcggctccttcgccactgccgaggaggccgcgctcgcctatgacgaggccgcgcgcaggctctacggccccgacgccttcctcaacctgccgcacctccgcgcctccgccgtctcctccaccgccgcgcaccagaggcttaggtggctcgctgcctccgccaggggcgccgccgccgtcccggcctacgacctgctcaacctcaacgcgcagcacaacatatacaatcttttggcacatgttcctttgatggattttcaaaaggaatcaacgtttgatatgtggagtactgttggtctgattagtgttcttactcttgacttctggttttgtacttctgatgaaggtctgtcttctaaaggagaaaatgactctttcaaggtccttgctttaattcatcaaaatgtcattccttcaatgtcaaacccttccatcttatgtgatttcttgactagatcatatgatattggtggtgttatcagtgtgatggccttaagtggtcttttcattcttatgacacaacacggtctggagtatcgaaaattctatgaaaagctttatgcactactcactcctgttgttttcatggcaaaacaccgatcagtatttttgcaagataagcagttgaagtctcatcctccaaagaatgttgaatcggaaatcttgtgtgagcatatcaagaaagagagggaggcagcaaaggctggaaaacgaccatactatctgaagaaatctgaacttcgcgaaaggaagctaatgaacaagtacaacgagctcaagctttatgatagtgccatcgaattcgtcatcttatcgatagacctttga

SEQ ID NO: 6198 - DNA, 1374 bp, Zea mays
  Peptide Sequence Number=SeqID_49573
atggaggacatgatagattggatgaatggtggaggtcaggttggtatatttgacgcaacaaacagcacaagaaagcgaagatatatgctaatgaaaatggctgaaggtaactgtaagattatatttttggagacaatatgtaatgatccaaacataattgaaagaaacatacggctgaagatccaacaaagtccagactatgctgaacagctagattatgaagctggactggaggacttcaaggaacgtttgattaattatgaaaaggtctacgagccagtaggggaaggttcttacatcaaaatgattgacatggtaaaggggcaagatggtcagttacaggtaaataatatcagcggttatctccctgggaggattgtcttcttcttggtgaactctcatcttacaccacgacctattttgcttaccaggcatggtgagagtttacataatgttagaggaagagtcggtggtgatacagttctaaggattctacgctttatggtgggcgtcctggctctgttgtcgtctggacttcacgtcttcacctcgtcccctccacccatcattgtggtgatgactgcggacaggccgatgcatccaaactaccctctatgggccgtcgcggtgacgatcgtggagggtgctcggatccgcaccgcctgccgtgcactgcccgggttcagcgaccgcgcgccgccttcgcctgcctggatccggcggtcgcacgccgccaatgcctgccttgcgaggccacgtagcctggatccatcggctgcacactgcctccgtctgccctgggggccatgtcgtgaaactggcgaactttatgcaaagaaactagccaactttatagaaaagcggctcaaatgtgagaaaacagcaactatatggaccagtacccttcagagaacaattttgacagcaagtccaattgttggattccccaagatacaatggcgtgctcttgatgagatcaattctggagtgtgtgatgggatgacttatgaagagataaagaaaatcatgcccgaggaatttgagtcacgaaagaaggacaagctaagataccgctacccccgtggagaatcttacctcgatgtgatacagagatttcagttcccgtgtaactataccctaacagctgatgtcataataacccttaggctggaacccgtcatcatcgagctagaacgccagcgtgcaccagtggttgtcatatctcatcaggctgtactgcgagcactgtatgcatatttcgcggaccgtcctttgagagaagttccagagatagagatgccactacacaccataatcgagatacaaatgggcgtcacgggtgtggaagagaagaggtacaaactcatggactga

SEQ ID NO: 6199 - DNA, 510 bp, Zea mays
  Peptide Sequence Number=SeqID_49574
atggcggcacccccgtccgcgccgttcttcctgctgctcagtgtggcagcagcgtcgctcgccggcgccgccgacccctactgctacttcacctggaccgtcacctacctcgtgcacatgacaaccctctccctggcgttccccctcctccacctggtcgcgtcgccgcccctggcgtgcaccctcctccacttggtcgcgccgctgcccctggtgcctcgtgtgtcaacagtggtaagagtacgtgcagatactcaatgcagcgtgaaaaccatcaacaaaaaagaagtaaaagcgcatcgcaacgccgaagataatgcatatattctagacaaggtggggactaagggatccatttgtggtgacgtcaggctcaccttccacgcgcgagcatttggcgtccatgccacttctgttcgcctccgtgtcagtgcaacaacagatgcaatggtgcggttggatctgaccagcctcgtgatgagagctccgaaggacattattggtgcttaa

SEQ ID NO: 6200 - DNA, 252 bp, Zea mays
  Peptide Sequence Number=SeqID_49575
atgcctccgaagctggtgccgttcgagaccttgcacgggggatcgacaattaggtttttggggagcgtctacgcgactggccaaaacatcttcttcttcctgcgcgacatgacaagagaagctggacaaggatctggatcctcagagcgcatgggaggattatatatgtttcatatattcacctctgttgtttcatatgtagtcatggaattatctcatctggttctgtcatattataatatgttatatcag

SEQ ID NO: 6201 - DNA, 894 bp, Zea mays
  Peptide Sequence Number=SeqID_49576
atggccctggcctccctcgcggcctcgctcccagtcgccgccaccgccgccgcggtgagattcccattccgtttccgcatcggtcgcgccatggcctccgccgccgcaggggcctcgccggcgagggtggccgtggaagcagctgcttctggagtgaaatttctttgcttccctgaggtcttctcattcattggatccaaggatggcgaggctatgaagctagctgaaccattagatgggccaataatgcagagatactgctcacttgcaaaagaatcaagcatgtggctatctcttgggggttttcaagaaaagggacctgatgattctcaccagtacaatactcatgtattaattgatgacactggaaaagttaggagctcatatcgaaaaatacatttgtttgatgttgatgtacctggcaatatggtgtacaaggaaagtcgtttcacagccgcaggtgatactattgttgctgtggatagcccttttggacggttggggcttactgtttgctatgatttgagattcccagagctttatcaaattttgcgttttaagcatcaagcacaggtattactagtgccatctgcattcacaaagataacgggagaggcacactgggaaattctcctccgagctcgtgcaattgagacacaatgttatgttattgctgctgctcaagctggaaagcacaatgaaaaaagagaaagttacggtgattctataattattgacccatgggggacagtgatagctcgacttccagatcggctctccactggatttgcagttgcagatcttgatttgtcaaaagttgaggctgtgagaactcgaatgccaatttcagagcaccggaagttcgacagcgattggaaacccacgcctctttag

SEQ ID NO: 6202 - DNA, 705 bp, Zea mays
  Peptide Sequence Number=SeqID_49577
atggcgaactccgctccgcccgacccagggctcggactcgggctaagccccggaagacgacgaactccgcttcgccccgacccagggctcggactcgggctaaggccccggaagacgacgaactccgcttcgcccaaccccaggggctcggactcggcctctgcggacgacctccgcctcgcccgacccaggggctcggactcggcctctgctgacgacctccgcctcgcccgacctaggggctcggactcggcctctgctgaggacctccgcctcgcccgacccaggggctcggactcggcctctgctgacgacctccgcctcgcccgacccaggggctcggactcggcctctgctgacgacctccgcctcgcccgacccaggggctcggactcggcctctgctgacgacctccacctcgcccgacccaggggctcggactcggcctctgctgacgacctccgcctcgcccgacccaggggctcggactcggcctcggccatggaagacagactcgaccccggcttcgggggagcctccacgtcgcccaacctagggcacaggccagccacgtcgacaggaagcgccatcatcaccctaccccgagccgactcgggccgcagagaacaagaccgggcgacgtcagcaaggacacaaccgttccaacagctgtccctccgccaggctccgtcgctcctccgatag

SEQ ID NO: 6203 - DNA, 1452 bp, Zea mays
  Peptide Sequence Number=SeqID_49578
atggctgaaagaccaacgggcgagagaggcgggcagccatgcaggcggcatgcaaccgcgccaagtggatgcacttctccgactcccgacacgcccgcatggaagcccaggcccacgcgtcgcgcaatcggcgcgccggatgctgcatgcaagcaactgcatcgcctgcgccaccaccgtgccttctcgattgcggaaccaataccgcgactcgaggcaacccagcgcgcgacccagcggcgccagcctgacacggcggccaacgcggccaaaggagggccagcagtaatgacggtggcagacgcgcgggagcagcgggcacgtcgacagccaagctcacgtcccatccgggggcagcgagagagccccctctcacggtgtgaagacaacgcgcccgtgatccgttcctcgaatggctcgcgcacgcccaacggctgccccgccaactactcgccccgtcgcattaactccgcggctggacaggtgacactcctggcaggagcaacgggcgacgcttcgccttcgccgaaacaaccgcaccaaaaaaggctccgagcctccttactgatcaggggttcgaaggctggcccccgaagggttcaacagccacctcagatcgcgtgggccctacacccactattggtcagaggttcgaaggccggccccccgaagggtcccacggccgcctcaggctactcgggctctgtgcccattactgatcagggcgggagcgatcttgtaacggaatcccatcagagggaggcatcgagccctcggaccccgtcgccaggggaccgggtccggcagatcacccgcagctcaccggagacaccatgttcggtgcccatcgagggtaacatggcgctctcccccctcctccttgcggaaaggcgacgtaggggcaggctctggggctgctctcgcaaacccggctccggccgaaccgttgacagcgtcaacataccagcccgagaacttgggccccgaccgtacacccgggctacggccagctcgcatgagggaacaaccagaccagccgaagcaatacgcaaggcattaagacctcgaaggagtgaaaccactcctccgaggcctcgggggctacacccggcgggtgcgctcgcgcgcacccaccggaaccaaatgcaaccgagaaaggctggtccccttgcaaaaaagtgcgacgaaagcctccaagcgagtgctaacactcccttcgaggctcgggggctactgtcgaggaccataattaggggtaccctcaagacgcttaattctcagttggtaacccccatcagcataaagctgcagaggcctgatggggctcggactcgggctaagccccggaagacggcgaactccgctctgcccgacccagggctcggactcgggctaagccccggaagacggcgaactccgctccgcccgacccagggctcggactcgggctaa

SEQ ID NO: 6204 - DNA, 432 bp, Zea mays
  Peptide Sequence Number=SeqID_49579
atgggcaagagcaacaagcgcaagcgcgaaccgactcctccatcagaggatttcggtgactcggaatactcggaggaggagttctcctccgagtccgagaggtctccggctcccgtctctcccccggcgtcgtccgatgactcggacgactcccaggggatagccgcggaagtctggacatacatccgggccgtcgagcgctccgggctcgagggctcggatgagtcggagtactcctcggatgaggaggactcggacggcggcggcgaggacgaggacgacgacgacgacgacgacgacgacggtggcgacggcgacggcagcggcgacggcaggggcagcggcgacgacggcaagggcagcaccaaaggcggcagcagcaagggcagcaccaagggcagcggcggcagcaggggcagggccagtggctag

SEQ ID NO: 6205 - DNA, 99 bp, Zea mays
  Peptide Sequence Number=SeqID_49580
atgaagctatctcagtcttcagacatggacttctaccaacaacgtaaagacaactccaccattttgcaacaaagtatggtatctttaagtgtcccctaa

SEQ ID NO: 6206 - DNA, 567 bp, Zea mays
  Peptide Sequence Number=SeqID_49581
atgcggaaagggttctcgaacatcctttatatgacagtagatgcgctttgcagtagatcccaccttcgctggttgatggataagcttgaccacaaggacatgataattcgccctggtccaggaaaagaattaaaaatcacaaaggacactatgcaccttatcctttgtgtaccaaatcatggtggtggaaaaccattggggattgatgaagcagttgctgcaaaaaaacttgttggatatgacttggaggttggcaaggcatgctcagccataaaagacacccttagcaagattattgagaagcaatatgatctagcagacaactttatagtgctgatcgacgagcaatgtttagcctataatggaggtgacacgactgcagatgacatagaacacaacgacagcggaccagtatttgaccagacaccatcttctcatgatgaaacacgcaagtgcacaacacgatctggatctactccacaccttacagagctcaactatgttcgttctctgtgggatctattatgttccaaggacattgacccaagcagatgggaagtgtcttga

SEQ ID NO: 6207 - DNA, 357 bp, Zea mays
  Peptide Sequence Number=SeqID_49582
atggatgagcttctggaggtactttcgcgtttggagacagatataggagttgacgagtcttgtggaactagtggtggtgatggcatgcatgaaattcaggttaattcacaggtgaacgcggatatgaatgagagtggtggacatgcacaaaatgtagatgctaaaaaggagaatagggttcgattggctagccttgctggacataagagaggacgaccgcttggatctaggaaaaagttggaagtaatgctcctcattggaatgagacgacaacttaaaaaatatgcagttgatatcgacaatagatatgagaactgtataatggataaactatctgaccagaaaagtgatgaatga

SEQ ID NO: 6208 - DNA, 201 bp, Zea mays
  Peptide Sequence Number=SeqID_49583
atgaagctgtggaaggagacttccaggagttccaagactacgacgagttctaggagtgggttagcggcaacccccagtcggctgcctgtgaaggccgcggttatctacgtttcttttccgcactttgatttattaacaaggaatgaagaggaaaatctcaactacaacttcttcctccatgctgaagccggaaagaactaa

SEQ ID NO: 6209 - DNA, 786 bp, Zea mays
  Peptide Sequence Number=SeqID_49584
atgcaggtggcatgcaactgcaccacggagactcaccctttcgacttcgatgcatccagcatggaggcccaggcccacacgtcatgtaaccgacgcgccggttgctacgtgcgaaaaactgcatcgccacttacgccaatgccgcgccttctcgactgcggaaccggtgccacgactcgaggcaaccacgcgcatggcccaacagagccaaccaagcgcatcggtcacgagtcagtcagccgcgggagaaggcgcgacggtcgatatggccaaaagtgggccgacagtaatggcggcagctggcgagcggaagcggcggtcaaatcatctgcaggctcacgtcccctcctggagcagcaggggagccctctcccacggcgtgaagacgacgcacccatgttccgtccctcgaacggctcatgcaacggctgccccgcgaaccacccatcccgttgcattaacttcgtggtagggcaggtgaagcgggcgacgtttcaccttcgccatgatgaccgcgtcaaaaaagggaccgagaaaggggatactccgaaagggatccttctccgcgaaggaaacgggccccgagccctcctactgatcaggggttcgaaggctggcccctcggaaggaggctcgggggctgctctcgcaatcccggcttcggccaaactgttgacagcgtcaacataccagcccgagaactcggaacctgaccatgcacccgagctacgatcagattacatgagggaacaaccagaccggccgaggcatcacgaaaggcattaa

SEQ ID NO: 6210 - DNA, 1029 bp, Zea mays
  Peptide Sequence Number=SeqID_49585
atgatgaccactagttcgatggtggggagaagcaagccgggctgcggcctctgccccgccctcagcttcaaggatcttcatcatccttgctgtggcgggaggcgagctgagccggagctctacctctcgtatgggccggcgggccacctcttccttcagcattcagaggagagggctctcaccggcctagcggagggggtggacttcgacaacgcggggtcggtcggccgcaagcgtcgtctgctccagcgtgtttggctcgctggcttagctggctctagctcagcttccggttccacctcccaccgctgggcggagtgtggctatctgcccgtcgtacgggcggctattgcgccgcgcgcaccgggggatcgcccaagacgtcgcacgccgctagggcggcgttcgtgttcttggtttgtcctgccctcgctccggcacgacgccttcgcgtggaggtcggtgctcgcccgtccgggaggacttgagtggggatctgccggtgggcaggtggctgccgtcatcggtgctgaggtggtggtagccggacaaggcttctccgccaacaagaccgtcgttgcccccccccccccacggactgacctccggctctttggctttgatagcttgtcctcgcccctcgagtggggacgcgggcgagggccttgtcgcagcagcgtctgccctgagccactcaaggcttctcttgctcagttaaggaaccctcggctgctctgcgaagagctagagccggaggcagcggtgtcagcatggacagaggcggagtcggctcgaaaaggggcttcgtcggcccaaaagcaggaccaaccccggagtcgggctgccgaggccatgagccaggctgatgtcctcaggggcgcggcgccgacatcttccttcgaggtggagatcctccgcccgtgtcgccgtccgaggccgggccagatcccgccgaaggtggaaacaacgccgagggtgctgctgttccctctgttgatggttgaacctgcaggaacagttcgtctgtag

SEQ ID NO: 6211 - DNA, 564 bp, Zea mays
  Peptide Sequence Number=SeqID_49586
atggccatcggaggagcgcttgagccctatagaagcacagttgtcggggctgacgggaccttgcttacgtctccttgcttccgtagggggctgagaaccgccgttgtcatgggagcacgcggggtgtcatcattacttgtttaccggggcgagccagatgggacgccgcccgagcccaaggtcgggcgaggcagtggctcctccgaggtcgaggttgaggccgagccctggggtcgggcgaggcggagaccgtcttccgaggtcgaggttgaggctgagccttggggtcgggcgaggcggagaccgtcttccgaggtcgaggtcgaggccgagccttggggtcggacgaggcggagtccatcttccgaggtcgaggcgggggccaagccctggggtcgggcgaggcagagcttcctgttgcgcctgaggccggacttggctattgtcaacctcaccctggcgggtggcacagcagtcggagcagggcaggaggcgctgttttcctgtcaggtcagtcagtggtggggcgaagtgactgcggtcactttggtcctgccgacttag

SEQ ID NO: 6212 - DNA, 357 bp, Zea mays
  Peptide Sequence Number=SeqID_49587
atgcaggatgttgcatgcggggtagctgacggcctcgacctgaagtactacccccatggttcgacaggcagtattggaggtttgattgtttcaccagttggtgagggcaatccaatattgaacatcatggtcaacctggtcgccgtgctcaacattgagctggaccacacccttgacgagttgggcaaggctcgggtggagattctggaactgcgtgcggagcacgtggagcgctgccatcaggaggatggttcccccgttcctatcaggactcaacaccgataccgctcactactctgtggtcatcatgcttatggcacccctgactataggaccgagatagacttggagccatag

SEQ ID NO: 6213 - DNA, 435 bp, Zea mays
  Peptide Sequence Number=SeqID_49588
atgcaggaatcccttgcaggaccgccatcgcagcaaaatcctcccgagggcctccctacactgaccactcccctactgcccttgcccctttcggaacatggctgggtaaaagaagtgatcaagggcacaacttgcttgggacttgagattccaggtgccaacttgctcttcaggaaaccacagggacttttgcgcaagaaatctgagacccaatccaatgtcacgggtggacggcgggttcaatctataaaactacggggtctcttttgcgaaagtgccacgacgaagggttacggtggatcccccgccgcaggattagaaatcaagggccacgatcaacttcgtcgattcaatgaaacaatgctcatccagaaccgtcgatcgcgtgatccacgaccgagattctatgtggacgaaggggtatacataatctaa

SEQ ID NO: 6214 - DNA, 606 bp, Zea mays
  Peptide Sequence Number=SeqID_49589
atggcgagacagacaacaatagagcaagtgtggacgagagcgaagaatgaacagcagcaggtgcgtgacaccgaggcgagcgcatgggaaatgggcgagcagggaaaaggcaaggggcttgcaggcacggtgtcagattttatagaggagaagggtgagaggaagagacaccagggggagaggaagggtcggccgggtgcttcatggccattgatggcattcatagagcttgaatggagggagaaagaagaggaaacagaagcattgatctccaataacgcagaggaagacgaacggctgggcacgagcgtctctgtcgcgggtgcggcgccggtccttggcacggtcgggttgcatagctccctggcggctgcgcgcggggtacggggttcctgtcgcggctcctcggctggcggcttggtcggccctggcgcctgggctgctcagggtcggcgcagggagggcgcgcgggtggtgtggggcacgcgcgatgcccaggcgacgacgcggttggggaagaaggccagggcgggcccgcctgcaagtgagaggaggggagggggaaggaaggtgggcgtgcggttgggccttaatgggccattttga

SEQ ID NO: 6215 - DNA, 174 bp, Zea mays
  Peptide Sequence Number=SeqID_49590
atggagagtcatgatctccgggcagaaagggaatcacggcttgtgggtggctatgagatcgatggttttggttacgactatggtgctggttgtcagcattgcaaccactgctcaggcgaagatgaagctgtggaaggagacttccaggagtttcaagactacgacgagttctag

SEQ ID NO: 6216 - DNA, 447 bp, Zea mays
  Peptide Sequence Number=SeqID_49591
atgggcaagagcaagaaaggcggaagttcgtcgcaccattccggcgacaagcggaagcgcgagccgacccctccctcggaggacttcggcaattccgagtacttggaggaggagttttcctccgagtccgaggggtcgccagactacacctctccctcggcatcgtccgatgactcgaacgattcccaggggatcgccgccgaggtgtggacatacatccgggccatcgagcgcttcgggctcgagcgctcggatgagtcggaggtctcctcgggcgaggagaactcctctgactcatccgaggaggagagcggcggtgacggagacgacgagggcgacggcgacggtgatggtgacggcgacggcggcaagggcgacggtgacggtggcgacggcaagagcggcagtggcagcagcaaggccagtggcaaagcgccacagacttaa

SEQ ID NO: 6217 - DNA, 408 bp, Zea mays
  Peptide Sequence Number=SeqID_49592
atggagcctggcggagggacagctgtcggagcggttgagtccttgctgacgtcctcttgcttccgtaagggggctgagagccgccgtcgtcacagagtatgcggggcgccatcattgcctatctggcggagcgagccagatgggacaccggtcttgttccctgcggcccgagtcagctcggggtcgggcaatgtggaagctcctccgaagccgaggtcgagtctgtctcccgtggccgaggtcgagtccgagcccctgggtcgggcaaggcggagttcgtcgtcttctagggctgagcccaagtccgagccctgggtcggacggagcggagttcgtcatcttctggggctgagcccgtgtccgagccctgggtcgggcggagcggagttcgccgtcttccggggctga

SEQ ID NO: 6218 - DNA, 360 bp, Zea mays
  Peptide Sequence Number=SeqID_49593
atgggcaggccaaaggacgccacgcgacagggaaagacaccacaccccggcggtgtcaaggtcatccagcagacagcccgcctgccgagtttgctggtggacagtatgtctgtgctgagcggcgcgctatactcacctactcttccgccagaagcttcccctgtacaccaaggatacgccgatcttgggcgtcaggccgcaggaggattgtctcgacaacagatattagaggatccaagcactatattctttatgtccctgggcccacatgtcggggcccagtccctttgtgcatgccccccttcagctataaaaggggaggcatgcgacgttacacacacgcaatctcagactcgctaa

SEQ ID NO: 6219 - DNA, 396 bp, Zea mays
  Peptide Sequence Number=SeqID_49594
atggggtgcgccggtgttctctggaaggatccgtgtcaaggccatctcttccggcgacttcaccgtcggagagcgtgcgcttgtggtggtgtcgccgatcttgtcttcttgaaagggaaatgtgcccttgggccatttctaagtattttggtgattgagtgccaacacaagtgcttaagtgttaatctatgcaaagtggtggacaaagtgcaaatcaagtcaaaagtgctggaaacagtagaaatcaaactgaaaaggagatggctttgttcagccaatgtctgctcagtctgggtgcaccggactgtccggtggtgcaccggacagtgtccggtgcgccaggctggctctggcgaactagctgctctcgggacttcatcggcggcgtacgactaa

SEQ ID NO: 6220 - DNA, 378 bp, Zea mays
  Peptide Sequence Number=SeqID_49595
gtgtcgatattgggcttccgaaggcttccaaaaagcatcagcgcatcacaggcaatgtcgaggaaccaaaaaaaatggaagctacgcgtggccaaaagcctagtgacattgaggtctacgaggagggccatagtagaccagaccctaacaaccctgaccagctctgcaaccagacaatcatggatcggctgaagatggtttggcgccatagccctaacttcgactggcgacatgaaccggtggatccctcggtggatacgcaagtggtggtggaaaagtgcatggacgcagggactgtatttgttgactcgctcttcgcgttccctcctcctggtggtggtggcggcagcggtcaaagctctaaccacccaagtggtg

SEQ ID NO: 6221 - DNA, 315 bp, Zea mays
  Peptide Sequence Number=SeqID_49596
atgtcatcaaaccgttggattccgaccattggagcttctgtcttctgggccaccagacagtctggtgacgaccattggcgcgaagtagccgttgctccgctggcacaccggacactgtccggtgcaacaccagacagtccggtgaattatagcggagcggcctccagaattcccgaaggtgagcagttcggaattggagtccttggtgcaccggacactgtccggtgggacaccggacagtccggacccctctacgaaagcagggggtccggcagcctgggggccagttctagagaatgggtactcgtctcctag

SEQ ID NO: 6222 - DNA, 489 bp, Zea mays
  Peptide Sequence Number=SeqID_49597
atgctggagaagttggccacgcatgacgtggaaactgtcaccacgctcttcgctctagccgacaagtgcgccagggccgccgagggtcgtgcatggcactcggcaccacagatcggggttgcccagacgggtggctcgagtgtcgtctctcaagacggcaaaaagaagaaaaagaaccgcggccacgagaagccgtcgtctgccgctctggtcgtcgcagctgcgactgggggccgaaacgagcgcaacaagcgcccacgaccgcagattggtaacaacggctcatgccctgtacaccccaacagccgatatagagccgcggagtgtcgtgagatcatcgagctcgcgaagcatgtcagcgagcagcgcgaacagacctccagggatggctccccacctcgtcgccgccctagcaagaaagggttgacagcgtcgaggtggccatgggagaacgggacctcgggtatcaatcacccgagggggtcctga

SEQ ID NO: 6223 - DNA, 168 bp, Zea mays
  Peptide Sequence Number=SeqID_49598
atgtaccctgactaccgctacccgtcacgggggcagaaaagaaaaagtgcaacttccgggaaggatgatgcttcagctgctcaaagcgagcccgcgccgaagaggaaaaaggaaaaaggttatctgaagaagaaaagcgagaagctcaatactatgcccggaaactga

SEQ ID NO: 6224 - DNA, 855 bp, Zea mays
  Peptide Sequence Number=SeqID_49599
atggtcgccttccaagggggtcaccctccttttaaaggcggctctccctactcgcgtccccagccgtcgcgggctgagtcttctccaacacgctccaaggtcttcccttacggcgcgggggctgggtcccacacgtcatgcaagccggctcagagcagaagaagccaaatcgccgtgcgcggtgcgtacaaccgcccagcggttacaagcgactctccacttttgctcagaccagcgggcgaaagggcgggcggccatgcaggcggcatgcaaccgcgccaagtgggcgcacttctccgactcccaacacgcctggcatggaggcccaggcccacgcgtcatacaactggcgcgccgagtgcttcgtgcatgcaactgcaccgccacttgcgccaccaccgcgcctcctcgactgcggaaccgataccgcgactcgaggcgacccagagcacgacccagcggcgccagactggcgcgacggtcaatgcggccaaaaatgggccggcagtaatggcggtggcaggcgggcaggagcagcggacaggcggcgcctctggcaggagaagtgggcgacgcttcgccttcgccataatgaccgcgtcagaaaagggaccgggaaagggggatatcccgaaaaggatccttccccatgaaggaaccaggctccgagcctccctactgatcagaggttcgaaggctggcccctcggaagggttcgacagccgcctcagatcacgtgggccctacacccactactggtcagaggttcgaaggccggcccctcggaagggttcaacgaccgcctcaggctactcgggctccgcgcccactactgatcaggggttcgaaggctag

SEQ ID NO: 6225 - DNA, 294 bp, Zea mays
  Peptide Sequence Number=SeqID_49600
atggagcctggcggagggacagctgtcggagtggttgagtccttgctgacgtcctcttgcttccggctgagcccaagtccgagccctgggtcgggcggagcggagttcgtcgtcttctggggccgagcccaagtccgagccctgggtcgggcggagcggagttcgtcgtcttctggggccaagcccaagtccgagccctgggtcgggcggagcggagttcgccgtcttccgggacttagcccgagtccgagccctgggtcgggcggagcggagttcgccgtcttccggggctga

SEQ ID NO: 6226 - DNA, 633 bp, Zea mays
  Peptide Sequence Number=SeqID_49601
atgctacggcggaacatacgtcagcgtcgggagtacctgtactccaagagcctcgagggcccccagcgggcgctgttcgagaagaagcgccggatccgggcggcgctcgaggagggcaagcccatccccaccgagctccgcaacgaggagcacgacctgcggaggcagatcgacctcgaggaccaggagcgtcaagttcccaagagcatcgttgacaacgagtacgctactgccaccattcgggagcccaagatactattgaccacttctcgcaatcctagcgcgcccctaactcagtttgttaaggagctcaaggttgtcttcccaaactcacaaagaatgaaccgtggtggacaggtcatatcagaaattgtggaggcctgccgctcacatgatataacagatcttattctggtccatgaacaccgtggtcaacctgatggtttgattgtctcccatctaccacatggtccaactgcatactttgggttgctcaatgtggtgacacgtcatgatatcaaggacaggaagacgatgggcaaaatgtcagaagcttacccccatttaatactggacaacttctcaacccaggtggaccatacatgcattgtttcatatgcacagtttttttag

SEQ ID NO: 6227 - DNA, 510 bp, Zea mays
  Peptide Sequence Number=SeqID_49602
atgggggatacccgccgtctttccgcctcgtcgttggaggaacgcaactccatgggagttggtacctttcagccatcgttcgacttcaaggattttcatcacacagcccggctgtacccctccgccggcgcttcaaggatgttcatcatcctcgctggggtggaggccggggctgagccggagctctacctctcgcccaggtccgtgggtcggcctctcctacggcgttcgagggagagggcgctcactggccctacgggcgggtcggacttcgacaacgcggggctggtcgacggcgggcgtcgtcagcctcagcgcgtcgggctcgtcggcttggctcccggtgccccctcctgccggaaggcggctgccgcgccgtgtgcacgggaggaccgcccaagatgtcacgcgctgctagggcggcgttcgtgttctggggcggtcctgcctttgcaccggtacgacgcctccgcgcggaggtcggtgccccactcgtctgggaggatctga

SEQ ID NO: 6228 - DNA, 84 bp, Zea mays
  Peptide Sequence Number=SeqID_49603
atggactccatggtatttgaggtcgctgaattggatggagcagcaatgatttgtcacgctaacattaaaaggaaagaaacatga

SEQ ID NO: 6229 - DNA, 225 bp, Zea mays
  Peptide Sequence Number=SeqID_49604
cggtctcctgtcgacgcgcgaacgactgcgagcaattgccgccaacgggcaagcaaatccgacccgggagtcggtcctacacatgcggcgggaccctctggtgcacctggaaccgtccgtcgcgaccaaggagctgaccgatggcgtggggccgcacgacagtgcaaccagggatgcggtgcgcgcgaagcaagtctgcccgtggggtcaatcggtcagcgtctg

SEQ ID NO: 6230 - DNA, 243 bp, Zea mays
  Peptide Sequence Number=SeqID_49605
atggggcggttgcgactgcgagatacggggatggggcaggcgcggatcggtcgcgagattagcggggggcggggggagggcgagggcagaggcgtggatcacgcggctccgatgtccccgctggtgacggttgctgcggggatgcggagacggggcgggcgcggatcggcgggggcgcgactgcgagccgcggggacggggcgggcgcggatcggcagcgagattagcggtggaaggatataa

SEQ ID NO: 6231 - DNA, 1536 bp, Zea mays
  Peptide Sequence Number=SeqID_49606
atggcggttcgccagaccggcggccggaacccccaccgcgggatccggatctccgatgcgccggctggaggcccccagtctgccggcgtggctcccagcgccttcgtcgcggccccccgccccttggacaagggcaagggggctgcaggtagctcctccaccccaggtggcaccgggaggtcggaggaagagaggcggcgtcgactgcgctgcgccgatgggtcattcatcttggaccccccagaagcatcagaggactactggtggggccgaggaggccggctcccaagcccagggcatgcagagacgcgggcaccaccaccagcagcagcaacaaaagcagcggtcgccccgcttccagggttgctagaaggtccagggccccaaggcttcctccccctctgctcccaaggccgcacctcctctgcccccggctactgccaccgagacagcgccaccgggctcccatgctccagctgggggtccggcagctgcggcgccaacgtcaagcggcgtcgcagcggtggagggggtcccaactgctccgacggctaccacagcctcaacaatggcgatgccgtcgactccatcccgccgcccactccggaagagacggaggtggtttttgggcgacggcttcggtctggcgccgagccagaagcggcgccggttcccctcccacggctggaggagcgcaccaaggcagtgtcccgccagttcgcctccaaacggtccgagcttgagcgggaccgcatggactacaaaaaggacctccagaaggtgtacgcccgggagctggaggtgggccagaaggagaagaggctggccaagaaggtggaggccttgaaccagagggaggaggtcgtcacaaagctccaggccaagctgagtgccttcaacgaaatcctgaaggagcagcgggtccagcagaccgcggctgtggagagtctacaaaagctgcagcaagagctcgagggcaaggcccgcgatgttgccctcaccgaggaaaagcttaaagtgaaaggagagtccttggataggcgggaggcggacctcgccaggcgggagaaggaccttgcctttaaggaggaaatgcttgaaaggcgggagaagttgttggccgagcatgagctcgaggcagaggagaaggagcggacgttggaggagcggcgcatcgctacatgggtcggcaaggcgagcacgacactggtgccgctagaggtgagtcccatcccggtgtcggagctgccgacgtccatctccgacgcgctccctgtgctggactctgccgccgaccacctccgacgcctggaccagatccttggcgcccgcctggaggccgaaggcggcaggctctgccgggcggtaatcgagtacatcctgacatgcttccggagccacgacccgtccatcttcttggagccggtgatcgctggtccggtggccgatactgaagacgccgcccgggaggccgtacaagatgtcgtggaactggtggtcgaacgtttccagcgggatcctgctgatgatgagtag

SEQ ID NO: 6232 - DNA, 4335 bp, Zea mays
  Peptide Sequence Number=SeqID_49607
atgtgggcggcggaggcggcgttctcgcgctccgggtcgtggcgggaggcggaggacgagcgggaggcgctgcggtgggccgcgctgcagcggctgcccaccgtcacccgcgcgcgacggggcctgctcaggtccccggctcccgacggggccgcggccgtcgagggcgacgacgtgctctgcgaggtcgacgtcgccgggctctcctccggggaccgcaccgcgctcgtcgaccgcctcgtcgccgactctggcgactccgagcacttcttccgacgcatacgcagccgcttcgacgcagtgcagatagagttccccaagatcgaagtgaggtatgaggatgtgacagtggacgcttacgtgcatgttgggagcagggctctaccgaccatcccgaacttcatatgcaacatgacagaggcttttctgaggcatctgaggatctatcgaggaggaagagttaaactgccgattttggacaacatcagtggggtaattcgcccatcaagaatgacactgcttttgggccctccaagttccgggaagaccaccttgcttcttgctcttgctggacggctcggtcctggactaaagatgtctgggaacattacttacaatggccaccatttgaacgaattcgtgcctcagcgaacatctgcttatgtcagtcagcaagactggcatgcttcagaaatgacggtcagagaaacgctggagtttgccgggcgctgtcagggtgttggaataaagtatgacatgcttgttgaactgttgaggagagaaaagaatgcggggataaaacctgacgaggacctagatgtgttcatgaaggcgttggctcttgagggtaagcagacaagcctcgtagcagagtatataatgaagattttaggactggacgtctgtgctgatactattgttggagatgaaatgatcaaagggatctccggagggcaaaagaagcgcctgacaacaggtgaattgctagttggttctgcccgcgtgctgttcatggatgagatatcgacaggccttgacagtgcaactacatatcagattatcaaatacctaaggaattcaacacatgctcttgacggaactacaatcatatccttgcttcagccagctccggaaacatatgagctatttgatgatgtcattcttatagccgaaggtcaaatcgtataccaaggtccacgtgaatatgcagttgacttttttggtgctatgggattcaggtgtccagaaagaaaaaacgtggctgattttttgcaagaagtacacacctcttcacttttgaattctataccgactggaatttctcgtggattcacgtttctttcatcgcaggttttgtccaagaaagatcaacagcagtattggtgccactatgattatccataccaatttgtttctgtatcaaaatttgctgaagccttcaaaacatttattattgctctttgtacatcaagttacggtgtcaagaggcttgagcttctcaagtccaactaccagtggcagcgtctgctcatgaaaaggaactcattcatatatgtcttcaaattcattcagcttctacttgttgcccttatcacaatgacagtgtttttcagatcaacaatgcaccatgactcagttgatgatggaatcatttatctcggtgccctttactttgcaatagttatgattctgttcaatggcttcactgaagtctcaatgctggttacaaagcttcctgttctttacaagcacagggacctgcacttctacccaccttgggcgtacacacttccttcttggctcttgagcatccccacctcactttacgaatccggaatgtgggtgcttgtaacatattatgtggttggttatgatccccaatttacaagatttttgggacaatttttgttgcttttctttctgcaccaaacatctttggctcttttccgagtcatggcctctttgggccgcaatatgatagtcgctaacacctttggatcattcgctttgttggttgttatgatccttggaggattcatcataaccaaagaaagcataccagtatggtggatatggggttattgggtatctcctatgatgtatgcacaaaatgctatttctgtcaacgaattccatggtcattcttggaacaagcaatttgcaaaccagaacatcacaatgggtgaagcgatactcactggatatgggttattcaaggaaaaatactggttttggatcggtgttggagcattgtttggttatgcaattattttgaacatcttgttcacaatgttcttgacacttctcaaccctattggtaatctgcaagctgttgtggccaaagatcaagtacggcacagggattctaggaggaagaatgacagggtagccctagagctaagatcatatctgcattcaaattcactaagtggtaattctagaagaatgaattatttttccgtaacaccaacatcgcaaaaacaattctctgttcaggaaactgcttttgccatgaatattgactgtgttccacctaagggtggtaatctcaaggaacagaaggggatggtgttaccttttcaacccctttctatgtgcttcaggaatatcaactactatgttgatgtaccagtggaattaaaaaagcaaggtgtagcagaagaccgcctgcagctgcttgttgatgtcactggagcttttaggccagggatactaacagctcttgttggagtcagtggagctggcaaaaccaccctcatggatgttttagctggcaggaagactggaggtctcatagaaggaagcatcactatatccgggtatcctaagaaccaagagactttcactaggatatccggatattgtgaacagaatgatgttcactcaccttgcttgactgtgatcgagtctttgttatactcagcatgccttcggttgccttctcatgttgatgcagacactcaaagggcttttgttgaagaggtgatggaacttgttgagttgaatcccttaagcggtgctcttgttggtctgcctggggtaaatggtttatcgactgaacaacgtaaaaggttgacaatcgctgtggaacttgttgcaaatccttctattgtgttcatggatgaacccacgtcaggattggatgctagatctgcagccattgtaatgaggacagtgcgtaatattgttaatacaggacggaccattgtctgcacaatccatcagccaagtattgacatatttgaatcttttgatgagcttttattcatgaagcgtggaggacagcttatatacgctggtcccttaggtgccaaatcgcgtaatctggttgacttttttgagaccagagaaatcgtcgaggccctaagcagaccgagcagtgaatcaaaagaacttactttcgccacgaagtatgctcaaccattttgtgctcagtatatggcttgcctatggaagcacaacctatcgtactggaggaaccctcagtacaccgcagttagattcttctacacagttattatttccttgatgtttgggacaatttgctggaaattcggttctagaagggggacccaacatgatatattcaatgcgatgggtgccatgtatgcagcggtgctgttcataggaattaccaacgccacttctgttcagcctgtgatctccatcgaaagatttgtatcttatagagagcgagctgctgggatgtattcagcgttgccttttgcattttctctggtcactgtggagttcccttacatccttgtgcagtcactcatatacggttcaatcttctacagtttgggatcatttgagtggacagcagccaagtttctgtggtacctgttcttcatgtacttcacgttgctgtacttcactttctatggcatgatgacgacggcgatcactccaaaccataccattgcgcctattattgcggctccattctacacgctgtggaatctcttctgtggattcatgatcccaagaaagctagagggtgctcttgcagcactgttgactgaccgtctgttttctctggtgaacgcattgcatgtgcagcgcatcccagtttggtggaggtggtactactgggccaacccggtgtcgtggacgctctacgggctcctgacctctcagttcggcgacctggaccagcccctgcttatggccgacggcgtcacctccaccaccgtggtggctttcctggaggagcacttcgggtttcgccacgacttcctcggcgccgttgcggccatggtggccggcttctgcgtcctcttcgccgtcgtcttcgccctggccatcaagtacctcaacttccagcggcgatga

SEQ ID NO: 6233 - DNA, 249 bp, Zea mays
  Peptide Sequence Number=SeqID_49608
atgccctgggggaggatcaagggcctcaggaatgaaggacacaccggtaatccccttcaccaggacttccagctcatcccaagacagcgacgcgatccggcgcttcaggaagtctccgaccacgtgcatcgacgtcagactgcccaccgccaggctcttaatcctgtccagtacaagctggaactcagacgccagggatggcttggccctccactgcttccagtcgagtcttggcccgtcgctaggtag

SEQ ID NO: 6234 - DNA, 1215 bp, Zea mays
  Peptide Sequence Number=SeqID_49609
atggcctcgtgctcgaggatgaggacgactcgttcttcgtcatggaacgttggggaggttgtggtcacactcgatctcgatctcccaccacaggtttctgaggttgtcaaattttcatttcaaagcaaatccagctggacagcacaaggtcacaagcaggtatttaagcagatttacaaaattgaaaacttgtctgttgatttcaatggaaatttttcaactttatctaattttgttgggcatctcactttaaaggaagatgtttttcttttcgagattattggagaccaacttaccgagtggctctctttaagcatcatattgtactctgaaatgcaacaaggacaaattattgttcatcttgagaacctttggctcaagatgaagcagcgacttcttcaagctgcactcaatcacccacaccgccccatttcagttgcaacagcatcagtttgcagagtagcaacacatggcaacacaaccctgcaccctggtcgcttaatttctgaatttgatgagctattaatgcatagaagaaaggctcgtgatagctccaggaaaacagtcatcacatccaatcctactgatctcacagccgagaggtatgatggatctgtgaatgtctcggtgggtttggggaggaagaggctgaagatcatgaagtattcaactaaaccaaaggaactcaacaaaaatagagccaacatgggcatctcaccagaggaagacatagttaccttaccaccatgcatccaattaatcacgaagagagatcgatgtgctaaactcatgcttccgaccgatccatatacgtgccctgcagacctgatgctgatgagcggcacggagctgttcatgcgggaggatgtggggctcaccgacggcgaggtcgaggtgttggcggggtccatgaacgtgttcatgctcgcgtccatcctcgccgccggctgggtggccgaccacctgggccgccgccgcaccctcgtgctcgccaacgccttcctcatggccggcgcgctcgccatgtcgctcggcaccagcttcgccgcgctcatggcggcgcgcttcgtcaccagcgtcggctccgggttcgcccgccggatactggggacggacgcggacgaggagggggcgggggaggaggcggtggtggaaggggaggtccagacgatgagggccacggacgcgagcgtctggttccatcgaattcaataa

SEQ ID NO: 6235 - DNA, 330 bp, Zea mays
  Peptide Sequence Number=SeqID_49610
atgtatagctgtaccatgcactatgagaagatttttcatgggagactcgttgaagcagatgcacgcagatactttcagcagcttattgacggtgttgatttttgtcacaagaaaaggagtctaccattgagacttaaaggtatactcataactgagggtaaaacagagttcaggaagttattgctcttttttgttggcatttcaaaatggcaaccacgcaaattagaaggcaacatggaattgctcaggagcataggcacacaacaattttatttactagcagtaagccgcatgtcccttaggatacaatcatttcaatccagcatctag

SEQ ID NO: 6236 - DNA, 696 bp, Zea mays
  Peptide Sequence Number=SeqID_49611
atggcagtccccaaatcaacggaaggtgtcgaggatctcctatcccgccatcaacggaaggtttcaaggatcttctacccctgccgaggccgccatcaacgccctcctacccacgccgtccatggaaggtgcccgaggttccaccccatcgcgccctcctccccgtctgctctgccccaccctcctctccacactgtcgatggcgcgcgcagatcccaggtggccgaggatccgcccctgccgtgcccccgcatgcggattctcgggctggacatgtgcgcggatatcatcgtcgacaacgagctaatacgcggcatctccggcggccagaagaagcgcctcaccacaggggaggtgctggtcggcccaaccaaggtgctattcatggacgagatctccatgggcctcgacagctccaccaccttccagattgtcaagtgcatccagcagatcgtccacctgggcgaggccaccgtcctagcctcgccactccagcccgcgccggaggtcttcggcctcttcgacaatgtcatgctgctgtccgaggggcagatcgtctaccaggggcccaggatgttgggactatgcttcgtcgccgaaggtcttgaaggaagaagcggctttcggctgaagctgtttgtatgggatggccgaaggttcctcttcatgaagcttcggtattgcaaaccgacttaa

SEQ ID NO: 6237 - DNA, 387 bp, Zea mays
  Peptide Sequence Number=SeqID_49612
atgaacgtatgtgagctcacccttgctgtactcacatccccccaggtcaagaaccggtaccactggatgaggcgcatgaaggatgttgtgaggagttctagccttcatctgataatgaagctcatggatgttgcaaaaacaatcggcatccagctctatgccctgactcctcactacccagataaaaaacccactataatcagagccttggggctaaagagcaaggtagatgttggtcacttgttctcgaatgttgtaggtcaagaacaaggcaatacaattgttaattattatggacattcgtcttccgaagcattaattccacatgagtataatgctcatcagacgaaggtcaagaaggacataccttcatcatttaacatgtga

SEQ ID NO: 6238 - DNA, 1047 bp, Zea mays
  Peptide Sequence Number=SeqID_49613
atgccctcgcccccttacccgacgcgcacacgcacgccaccgtcctcatccgggagccgccccgacgccccgctctcccgtcttcttcgcctcggcgtcgccgcctcccacaagcccaccccatgcgcgcgcttctcccattggatgcgccccttgcccttcgatgccctcgcgctggcggtgtcccccgccgatgaggcgttcgcgttgcgcgaggtgctgaccgagaaggagatccaaacagccaagtcccatattctctccaccatgctcaccgccacgtgcctattggagtaccgccgcctcctcaaccatcgcatcgccgacctcacaacccacaccgccgacctcacaacccacgtccttctcctcgtggcccacgcggcccctccactcgcactgcagcaaacacgacaacaatgctgcgcacaggtggatgtgggcctcagcgacagcagctatgagagggggtggcacatccactgcaatctgaaatacaatttcccttgccgaaacattttagttgagcaatctgcgggaaatatgatattttcattcatccaagatgaagctgttcaaaaggtgatagagtttatggatacatactctttaagccaggaagactttgacacgattgtggaagtatccaaatttaagcccgccccttccatacttctcctcgcatcccttccatcctcgtccgtactcctccccacgtccacagtggataccgtgagctcgcccccgcctccatggctccatcctccgctcgcgattccccgtgcccgttggaagggggtcacggatcctcacgcggttcctgctgcactacctccgcgccgccacgcgctcgccggcctcgcagacacggccgtccacggcgtggcgctcgtcgggggcacgacgttctcgtgccggggcctcttctgggtgctccggatcgggtcggcggtgtgcctgagcagggagtggcagcacaagctagagcggctcatggggctgatgctggaccaggccacactcgacgacctcctcgtaagaccctaa

SEQ ID NO: 6239 - DNA, 492 bp, Zea mays
  Peptide Sequence Number=SeqID_49614
atgaagaccttgctgcaggaccgtgaagagatcaacaaaagtggctgtttagtgataactgatgcttggacatacatgaagagaaagagcatcacgaatgtgtgcacacatacttctgatgaggcaagttttgtgaaatctaaggagatgtcagatgtttcacacaagttcaagaaaacgattgaccaagcaaaggcattcactatatttgtgtatgggcaccacaaaaccttggcatacatgcggtacttcactttgaagaaggatgttgctgtatgggcgattagttggccagcccaacttgcagtgccatccttgggccagggtgtatgtggaacaaatacagctgaagaaatggaggatgaagattctggtggagctagagatggacctgcaaggctgcaacaaacattgatggaggaggcttccaagtggatgttcaactgttgtggagaaaggaagaggacaagaggcaaggaattattgttgtaa

SEQ ID NO: 6240 - DNA, 576 bp, Zea mays
  Peptide Sequence Number=SeqID_49615
atgagcaatcgccaggctgagagggcaaacgcagaaatccttaaggggctcaagacacgcacctatgactgcttaaaaaagcatggtgcaaattggtcaacgagcttccgtgcgtactatgggggaaacagaccacacccagcagagctaccgaggagaccccgttcttcttggtctacggggctgaagcctgtcttcccccggaaatcattatgggctcgccatgggtccagtctttcgatgaatctatgcaggaacaactgcggcgtgaggacgtggacttcatcgacgaacggtcgaggacctagtcctaaggcgagtactgaaccaagaagggttccacaaactctcccccagttgggaaagacccttcaaggtgatggaaatatgccggcccagagctgtgcaatgcttagcatggttccgtaccctaagcctgcacgctccaccactctacaacgggtccggttgcatgaatcaagggatgaaagataccagatggtgggtcctgtgggtgtgctcctaaaacttcaaagccgaagctatgtgcaggtccaggtcccattccagaggtag

SEQ ID NO: 6241 - DNA, 444 bp, Zea mays
  Peptide Sequence Number=SeqID_49616
atggggaccagcccaggaagatctaatgtctattttgtggtgaggacaagggccacaatacaagaatgtgtcaaatcaccatccaaaagcaaaaagaaattgcagaagccgaagcccagaaaaatcagccgaagcaggtcctgcacactgcttcgtgtcattcaccctacataccagaatatgtgggtaatcatcccgcatcttctgttgctttggctagtcagccgcaagtttcttggccacaacttccacctccgccgccactacagcctgtctactcacgagactcacgaaaatgtcgaagctacaaagagatattccttcgggaatgcagtgctaaaaatcccagtaaaagtttcaccgaagctacaaaaagtcgttcttaaagaatgcagcccagtgggtcgaatggctctgggggaggagatagttcagttgcggtag

SEQ ID NO: 6242 - DNA, 975 bp, Zea mays
  Peptide Sequence Number=SeqID_49617
atgaacgcgctctctcgcgaagggtgccgacactatgaggtgttcgaccaagctgatgaggattttgagcgcgatatctataaggttgaggaccctgtggtgaaggaatccgcgggagccctctacgaccggatgtggggcccccacggtcgggaggtggtcagggagcgggccgagacggcgaggggtcaggcgacgcgtggcgagagggtggatgacttcggggctttgaacagcgcgctgcctgacccggagccgaacccggcggcggctgtgtccgaggacgccctggagccgcccccggaaaccgccgaaggcgtccctgatgcccccgcaaccactgtagccggtggaggcccatcgccaactgctgcaccgagggctgaggatcctgtgaaggttcaagattttgggcctgcgcacgcaaccgctactactaattttttggcggcttcgaccgtggatgatggtaataaattggatgggtctgcatctaagttttctgattttggtgactctgagagctcggttgagtggactgaggagtcgtcggatgaggacttggactacttcgcggccttggatgtggcagcggcggaggcttcgccgcatgctgtggatgctgaagttgtgcctggtccgagtactgggtgtaggcggcgaagggcggttgccaagcgtagagtgagtggggcggacggcggtcggcttcgtgtgagtagggctggcaggcaggaactgttgtccttgccggccgctgtgagtgcagtagtgctccaggtcttcgccgtttggcgttgcgagcctgtaagcactgggggaggcctttgtcttgacaatgaaagggccctcccacttgggctccagcttgcccctggactctgtccgagctgttcggacgagtacgagggcgaagactcggtctccatcgatgagatccttcgaagtgggctcgtccacgtcggggacggctga

SEQ ID NO: 6243 - DNA, 321 bp, Zea mays
  Peptide Sequence Number=SeqID_49618
atggcgaggcactccgtcctcacacatatcaaccgtccccatcgattccccgtcaacagatcagggctcaccgccttggcgcagatcctcgatggcaggctctggtgctggctcctgggctacctcctaagcaactccttgctccggaatgaggatgtactccccgtcagcgagattacagtcggtgacaagggaggtccaacgaagggcggggcgggcgggctcatcggcggcgtgtgctccggccgtggagctcggtctacgtgcgccgacggtcggttgaagtccggcgacgtcgatccggtgtctccggcgaggtag

SEQ ID NO: 6244 - DNA, 198 bp, Zea mays
  Peptide Sequence Number=SeqID_49619
atggagcaccttggaatttctctaccttcaaaggtgtttcatctcatcttcgtgctcctttttgtaaagccgaaggatgcaagcctcttcctcatgatgaagacacatgagatgaagccagatctaaagaggataagagtaaacgtcgaagctatcaccagatggacaacttcggctcataacggagatgaagtataa

SEQ ID NO: 6245 - DNA, 1725 bp, Zea mays
  Peptide Sequence Number=SeqID_49620
atggaggtagttgagttggttccttgcgctcgcaacaagtggggcacctggcatgagttttggttctacgtcgcggagggcacagtcgaagaccatccggggctccccgtgtccgagatgtgctcgcattattactcagcatacccgccgtttgaagtggcggaggaggatgcgaacgaaggggcccttcggtgcgccgccggcctgagcagcgggcgcgatttggttgaggagtttgtggcgtacggggtatggcctttggcgcatggctgggcattgggcgaagtatgcccccgccagatgccttcccatggtgggaagcttgtgcgaagtcccgccttcgcgctggatctgcgtagccgcgatccggccgcctttgtgcgtgaggcggaggatgaggcggtgcggatcgtcggtcggtacgtgccgaagacagagggccagcgtagctgggatattcgcgggtccaatgatcgcttgaacagggttttcgagttgaaccgtctgccgtatggcggttatccctatcaagacgatgtggatcgtcgcgggaagaaactggtggtagagactggagacgaccccacgccggcggacgccccgtcctctaagaagaggaaactaggtattgctatgggaggtctggggatttctgatggttttgctagggagttgatgaggacatgtgcggccccggggggaaggatgtcttcgcccgagcttcgggagtcttcggcgcggatgctgagggttaccgggggttggtggcctaagaatgatcctatcccccgcgcggccggcgaagacttttttacatctcgcatggttcgtgattggaaagtgtttccttacgggcggaatatcgctgctgttgtgtcggcagtgatggacaaggatcgtcagggagctgcgcagaagcgccaggcggtcgtcaggctccatgaggccaggccgaagaggcaacggggggctgcgaaggctgctgcccccggcggaggccagccgccgctgccggcgaagtcggccgtccctgcatccagcagggcgtcggaggctgcgaaggcggctgccgccggtggttccaagtctgtgaaggccgcccctgcgtccagtagggtgccggaggctacgaaggcggcccgagagttgctgccgccgggcaagcgcgtcgccgacttcgccaccgacattagtgtggaagattatcttgttgggtcggacgaaggccaacttgttgttgttccgcctaccgtggcgaccgcggcgactgccatggtgcccagggcgaagggcagtgctcttagtgccggcggcgagataccggcactcactgccgttagggacgaggcgggtgctgtgtcccaccggctgaaggagatgcaggaggcactaagtcaggcggctgacttcgcagaccgcgcggcgtcgggggccctgacggcagttgtgtcttccgaagtcgagagacttcggacgcaacatgctgacgccgtccgagaaaagtcggccaccgacagtaagtgtcgcaagctggcggataaggtggccgcgctggagggtgagaaaactgacctccggcgccaactggcggaggaaaggaaggaggctaatgaggccctcgccaaggcgcaggctgcgcagacggaggccaatttggcgcgggcggagggcagtcttgccaggcagcgcgccgagcagttggaggagtggctcagcgctctgtag

SEQ ID NO: 6246 - DNA, 465 bp, Zea mays
  Peptide Sequence Number=SeqID_49621
atgggagaccacatctcaggtcgcgtgaggggtaaagtctgcgggcaggttcactcagaatcggtcgggccacgtgcgcaggcaggcgggctcgtcggcggcgtgtgctccgaccatggagctcggtctacgtgcgccgacgatcggttgaagtccggcgacgtcgatccggtgtctccggcgagtgtttgggggtctaatggctcaagagggggtctagggtttgagccactttgtccaagattcaaagggcaggtgggggtgggtgttttgggttacgtaccgactcctttaggcagaaagtcggggaagcgagatcgtagaaaatcctcagtctcccacgtagcatttccgtgggtaagcggacacacttctgtaactgagatacgtggaacacatcatgaactgctgacatatgaggtggcaacttcaactggtatgctacaggtccataagtctctttga

SEQ ID NO: 6247 - DNA, 888 bp, Zea mays
  Peptide Sequence Number=SeqID_49622
atggcccctagccccttggacaagggcaaaggggctgcaagcagtgcctccgccccagatgggaccgaggaggccagctcccaggcccacgacgcgcataggcgcgtcagtcccatgatcccgccgccaccaccaccatccggggggcttcttcctccactgctcccaaggccacgcctcctccgccagataccaggcccaccgacgagtctggctctcagcagcaggaatccactgagggtggtgccggtggcggcggagaaggtcccagctgggggatctgcgcccactcccaacactggaggggacacagggggcgcgtccagctccatccccccgcctgctccggtggagatggaggtggcatttgggcggcgactccggtcgggtgctgagcgagaagcggcgccagtccccctccctcgcatgttgtcccacgcccaccaggtttttagtgaaattgaggcagcaatcttgcgggagtgggaggcacttgaagctgagcaccagcgcctcagtgacttgcgcacccaactggaggagcgcaccaagacggcatcccgacagttcaccttcgtgtggtcccaactcgagcgagaccgcaaggagtacaagaaagacctccagagggtgtgtgccagggagctggaggcgacccggagggagaagaaagtggccaggagggaggaagccgtgacccagagggaggccctcatgacggagtaccagaccaagctgagtgctctagacaagactctggaagcccagcgggcccagcagcgaggcgagttgctggccgagcatgagctcgaagcagaggaaaaggagaggaagctggaggagcagatccgccaattcgatgcggcgcaggcggcgctgggtccctag

SEQ ID NO: 6248 - DNA, 1095 bp, Zea mays
  Peptide Sequence Number=SeqID_49623
atgggatgcttccattccacggccaagcggcagcatcctggctacgaggaccccgtgcacctcgcctcccagacctcctttagtgttagtgaggttgaggctctattcgagctgttcaagagcataagtggttcagtgattgacgatggcctgatcaacaaggacaatccttcggagaaggatattaaccaggggatgcttgctatatttaatgttgacccctctataacaaacaatgatatccatcagatatttagcgaatatggtgacataaaagagattcatgatgcaccgcaaaagggccatcacaaaattatagaattttatgatgtcagagcagccgaaggtgcagctcgtgctttaaacaggagtgatcttgctggcaagaaaataaaactggagactggccatctgagtggtgctagacgttcaacacagcacatgtccaaggagttggggcaggaagaatttggcatatacaacctgggcagtccaagcacaaatagcccttcattgccttcattgggcttgggtgctattcatccccattctcttcctgatgttcacaatggagcaaataatggcaccccttacaatctgaacaccatcacacctgttggtgtcaataagaactcaagaacagctgaagcagttgacaacagacatcttcataaagtgggttctggaaatctcaatgggcactcatttgatcgtgccgagtatagacctgtgctcctctttcgtctggacgctcttgcgccgttcctgcatggccttgaagcaactattccccatatcagcatcggtgccactcttccattcttcgcacttcatctcgacgccaaggacaacggtgttcgtgccgcggacggcctcaagagcgtactccacctagaagatgtggccgccattggctgtggggccgccatgcctccagtggcgctgcccgacaaggaggctgggtatttgagggattatcggcgaagcatcatgactcccgacgaagcaggggttgcgactagcgcgttggacgttgctgggggccgcctgatgctggcggtggctgctgcctgggggcagcggcagagctcatga

SEQ ID NO: 6249 - DNA, 636 bp, Zea mays
  Peptide Sequence Number=SeqID_49624
atggagcaccgtcccgggttggagaggttgctggagactgcccatctggagcttgacgggatgttgttcgtcaacacgcagcatgcccctacctggcgcgccaactgtcggcgtttcgagaccggggggtccctgggccgacgagtgaaatgtcactgcgtgccccagcccagatgggtcggcgcgaggccgagcgcgaaggggggagaaaggtggccggagacggccatgagagaggtggaaatcccgcggccttcgtgttcgtcccgtgcccaggtcgggtgcgcttgcagtaggggattacaagcgtccacgcgggagagggagcgagcggcctcacgtgagcgcctgtctcgtcctcgtccctgcgcggccaacccccctcctgagtcagctcggggtagggtaatgatggcgcctcctgttgacgtggctggcccgcgccctaggttgggtgatgtggaggctcctccgaggtcgaggtcgagtctgtcttccgtggccgtggtcgagtccgagcccctgggtcgggcgaggcagagaccgtcggctgaagccagggctgagtccgagccctggggtcgggcgaagcggagttcgtcgtcttctggggctgagcccaagtccgagccctag

SEQ ID NO: 6250 - DNA, 447 bp, Zea mays
  Peptide Sequence Number=SeqID_49625
atgacttcccacggatcctcagaggacggaaatgcactgtcccacactgacgggcttgcacgagagggctttccccgcattttgtgggaggtacttcagggggccggatacacgacaccccctcagtacgcggtgcagcagttcgagaagcaccgagtgccccgctgtagggtggagcagctatccacttatatccaagagttggaggaactagtgggcaccagggagaacaccatcgaggttctcgaggatcagctcattaacacccagcagcagcttgccgaggctaatgagcacctggatatgcatcaccaggagattcaggacctggaggccaatgaggacgtcgacatcgagggaggagaggagcctgcctctagtgtggacactgctggctcagggagaccaccttcccctgagtcgagtgttgcctcgttcgctcactag

SEQ ID NO: 6251 - DNA, 303 bp, Zea mays
  Peptide Sequence Number=SeqID_49626
atggagcagtggccgcggagaaggaaagaggcggaggggcttactggcggcgactctgctctgagagcttcacgggatgctagggaagacgtgggtgcaaggaattggaaaaagacttactggttagctcggtccacgcgcggcgttggaagaccgaagtccggcgagggtgaaaccgcctctccggtgaggcaatgcctcggctcaagcttggagaagcttcatggcttcactgatccaggggctagggcgaggctggggttcaacagaaaaggctggccacgacggtcgtgcttgggctga

SEQ ID NO: 6252 - DNA, 609 bp, Zea mays
  Peptide Sequence Number=SeqID_49627
atggcgcgtacaaggaaaactgcacgcaagtctactggaccttttggcgtgcctcgccatcagctagcccccagacatgaagggagtaatagtggcagcaatgacccgattggagatttggagggcaaggtggaacaacttcggtcagagctacgtcactggaatagggcatgggcgcaggacagccagcgtatagctgaattgtcagctggcctcagccacttgcaatatgagatatccgaacaagatttggccattaattgggccgtcaactcgcattcgatcgcttgggaccgcgaagcaaaagctcgagctcgtgtggcagatcttagtgcggcccttgacaacttgcaagtgtactataatactttacatgaagaaatgccatcatggactcgagaacatgatggtgcgggaacttcccgctgttcggaagatactcctagcccgccaccagtaccaccaactttggtcgaggctatcgctgccctggcaatcagttccaatagcacggaggcagagctcctccccaaggactgtgtgatactacatattcggaattctctgagactcgacccccgctcttcatcaaagcagaagaacctttag

SEQ ID NO: 6253 - DNA, 216 bp, Zea mays
  Peptide Sequence Number=SeqID_49628
atggccatgatggattcaacatcgaacaagatgtacgtctgccaggtaccaaactttgggattttaaatgataaagctaagaccggactaataccagaaaggccaacacgcaatgggagtggagagatggcgagagtagcatgtaccctccgtggcaagaggctggatgatggtgtatctgtgctctcggttggcgtgaacctggtctggtcttaa

SEQ ID NO: 6254 - DNA, 126 bp, Zea mays
  Peptide Sequence Number=SeqID_49629
atggtctcccattccggttatggtgggtacaagtgcggtcactgcacgacggcagtcggggtcagtgaggcattgtacgccaaggcgctaatgagactgcttgatccatgctgctacattgagtaa

SEQ ID NO: 6255 - DNA, 1506 bp, Zea mays
  Peptide Sequence Number=SeqID_49630
atgacaagacgcccgaggacgccacaagctcacgcctccctgggaagggtcgttcatcatcgccaagattttgaagcccggaacatacaagctggccaacagtcaaggcgagacatcaataggggggcagcagcaccctcggcgttgactccaccttcggcggaattcgacccagcctcggacggcgacacggtcagagaatctccccctcaaaggaagacgtcagcaccgcgcctaggccatcgccgccatggtctcctccagaaacccggcccaagcagacggcttgatcagccgccccgtagcctcagccagctgtcccccgaggacgtcagcccgactcatggcctcggcagcccgactccagggttggtcccgctagtggacgacccggccaggctccagccaccgctgctacgcatcctcggcctgggaagtcccctgctcctggccgacgaagagaatcctcgggcggcaaggccgaccgagccaagggactcctacgcctccgggatacggatacctcactcgtcaccttccgcacggggcaactcacacttggttaagcgggctcggactcaacctcaactccggaagacggtctccgccttgcccgaccctagggctcggactcaacctcaactccagaagacagtctccatctcgcccgaccccagggctcggactcaacctcgactccggaagacggtctccgtctcgcccgaccccaggggctcaaactcaacctcgactccggaagacgatctctgcctcgcccgaccccaaggctcctcgacctcggaggagtcaccgcctcgccccgacctcgggctcggaccgaccacgtcacaggggggggtcatcattaccctacccctagctagctcacgctacggggaacaagaccggcgtcccatctggctcgccccggtaaaacaagtaatgatggcaccctgcgtgctccatgacgacgacgcttctcagccccttacggaagcaaggagacgacaacacgaggccgcggttccccttactgtttccccccttgtgttccgtctcgcgccgacccatctgggctgggacacgcagcggcaatttactcgtcggtccagggaccccctggggtcgaaacgccgacaacagggcaccatgggacagggagccgagcgccatgggagaaaggagctgagctcgaagaggggcgctgctgctgggcgccggccatggagttcctgctgggcaccatggaaggagaggagccggcagccaggaaggaagcgctctgcgcacgtacaggaaaaacagagggaagagacgtggggggaaatggagaggggcgctggcttcttgcggatggaggtacaagaaaaggggcgctgcgcagggaggaatgagggcgccgctggcttgaggaagaagaagggcttgggcgccatccatgggagtggctgctccctgcttgcagccgtgtgcgcgctgaacagaggagaagagagttgtgcgtga

SEQ ID NO: 6256 - DNA, 990 bp, Zea mays
  Peptide Sequence Number=SeqID_49631
atgtcccgccagccgccatcgccgatcgcccatcgccctgcccctgtgctcagcgccctgcgccccaagccccagccgccactccgagccggccagccccgcccagccgccactagtccagcccgctgcggcgctcctgccccgagcggccgagctgcaactgcgcgatttatattttacagtagcatatccaccggataccagatacccgacggatacccggtgggtacggattgcaatctcgctgacggagagtacgtgctcattcccgagcaaggagttgtccacgaggaagaccaggagcaagctcccaagactgccatcgaggatctccccgcagccccaacaattgaaggcaagccccgctatggagggtacaagcgtggtcactgcacggcggcagccggggtcagtggagcattgtatgccaaggcgatgccatcgacgctgcgacgacttttttccacaatactagtgtactgtgagccaagcaatgtggcggtactctggtggaaacgcttagatgctatgttagaggactatcacgcaagatcaatgggaaatgacataaaggcattccctcttcctgctatcatcgacatgtatgatgatgctataggtactgctagggaggtgtatcaagaggaaagtattgaactggcagcggcatatgtggctcttaaagacactcttaacgaggaacagagggtcgcctttgatacaattatgtctgtcattgacactgatcacggtggattgttctttgtgaatggacatggtggcactggaaagacttatctatatagagtgatcctcatgacactacgcagccgggacaagattgtagtggcaacatctacatctggcgttgtggattctataatgcctggaggaagaaccacctattcacacttcaagatacctcttactattgatgacattgttgtatgtagcttcatgaagcagagtggaaccgcagagttgctatag

SEQ ID NO: 6257 - DNA, 234 bp, Zea mays
  Peptide Sequence Number=SeqID_49632
atgatcctcaagacctcccctacatcctcgaccacctcatcggagcagtctcgccgccgatgttcaaatctcattgagacactgtttaaaaatagtgagcaccccaatattgaaagtttaaattgcaatctcgctgatggagagtacgtgctcatccccgagcaaggagttatccacgaggaagaccaggagcaagctccagagactgccatcgaggatctccccgcagcctag

SEQ ID NO: 6258 - DNA, 360 bp, Zea mays
  Peptide Sequence Number=SeqID_49633
atgagctccaggtccctaggcctatggaccactcatgacctatcgagcctaggcctaagagcactagtcgcctacaggaccctcaacacgatgggccgcaccgagacccagtctacgatggccagggttcggtgcgacatagagacgtcaatgatggcgccgatgctcttcggcacccacgccgccacccataaagagcgactagggaagcctagacgaccaaggcacatacggacaaacacaactttaccaaggtcgaacactccagtgtaccacaacagagtagctccttccttgggaagctaccggtattcgacccccaccttgtccaataaaaaggaggaggtcgccaaaacatag

SEQ ID NO: 6259 - DNA, 357 bp, Zea mays
  Peptide Sequence Number=SeqID_49634
atgtcagacgcaattaatgcaacccgcaggacggctggctcaagcgaccgaggagatgttatcttcttttcgtcttcccccacaacctctccagatgaggagtcaggggctggccctcggtacgccatagggctggtcaaggctgggcccaccctggtcgtgtcatcccatgtagaagggtcgtcgcttcttcccttcatgtcggacctgcgcaacctagtggatccatgccccagaccttccactacttgtgatagccgaggtgccgccatcaccctcgctatcgcccagtttcgcactgggccaaccttcgcgttcgatgaggcttcctcaaggcgccttgcccatggcgtttga

SEQ ID NO: 6260 - DNA, 177 bp, Zea mays
  Peptide Sequence Number=SeqID_49635
atgcaggttgtagtggtggcggaggtggatgctatggccaggatgcctgtggctgactggccgaagcaacagacgttgcaggatggttacccacatactctggaggagtggattgatctgacgtgccttgggtggattctccctccgaagcccctggtcatctcagagaacctgtag

SEQ ID NO: 6261 - DNA, 351 bp, Zea mays
  Peptide Sequence Number=SeqID_49636
atgtggaagagaaggtcgagtgcggcggaatcgaaagggctgggattaaatcggatggatattcgtgagctggcgtccggttgtgagggcgacgtgcgcgcgagacatcgcctcgcgagacaggggaagggcggtgctggggctgccgagacgagacgacacgagactggcttgcgtttccatgcgtggttggttgcggactgcaggaaggcagtttacatccatcgcgcgtcttctcggatcagcagcgtgccagtgggaaaacagtggcgcacggcaccgactgaaggagatgagggcaggttcacgtgccctgggatcaataggcagttgtctgtgtgtgcggtataa

SEQ ID NO: 6262 - DNA, 3261 bp, Zea mays
  Peptide Sequence Number=SeqID_49637
atgtcgtcgctcagccgcgagctcgtcttcctcatcctgcagttcctcgacgaggagaagttcaaggagaccgtgcacaagcttgagcaagagtcagggttcttcttcaatatgaagtacttcgaggagaaggtccatgctggggagtgggatgaggtggagagatacttgtcaggattcaccaaggtagatgacaataggtattcgatgaagatcttctttgagatcaggaagcagaagtatttggaagcgcttgataggcatgatagagcaaaggctgtagatattcttgtcaaggatcttaaagtcttctcgacattcaatgaggagttgtataaggagataacacaacttctcactcttgagaattttagggaaaatgaacagttgtctaagtatggggatactaaatcagctcgaagtattatgctggttgagctaaaaaaacttattgaagcaaacccccttttccgggaaaaacttgtcttccctactcttaaggcatcacgcctccgaactctaatcaatcaaagcttgaattggcagcatcagctttgtaagaaccctcgtccaaatccagatatcaaaactttattcaccgaccatacatgttctccacccaatggagctcgtgcatcgccggtatctgtaccactggcagctgttccaaaggctggtgctgcatatccaccactcacagctcatactccgttccaacctccacctggtccatctttagctggttggatggcaaatgcagccgcctcttcatctgttcagtctgctgttgtagcagcagcatcaatacctgttccacccaatcaagctgtctccatgttgaaacgcccagctctaacagactatcaaagtgcagagtctgagcaactaatgaagcgcttgaggcctggtggacatggcattgatgaggccacatatcctgctcccacccctcaacctgcatggtcagtggatgatcttccaaggacagttgcttgttcattgtcacatggatctaatgtaactagcatggattttcatccaactcggcatacactgcttctagtgggatctgctaatggtgaatttacactttatgagatcggtctgcgtgaaacattactttcaaagcccttcaaaattcgggatataaatgcatgttcaccacaatttcagaatgctgttgtcaaagattcctccatatccattaatcaagttacctggagccctgatggagaaatgattggcgttgcattcacgaaacatttgatccatctgcatggataccaaccaccaaatgagacacgacaccttctagagattgaggctcattctggaggtgtaaatgatatagcattctcccgaccaaataagcaactttgtgtggtcacttgtggagatgataaactaataaaggtatgggatatgcatggacataaattattcacatttgaagggcatgaggcacctgtgtattctatatgtccgcatcacaaagagagtattcagttcatcttctcaacttcccttgatggaaaaattaaggcctggctttatgacaatatgggatctagggtggactacgatgctcctggcaagtggtgtactactatgctatatagtgctgatggaactaggttgttctcatgtggaactagcaaagagggagactcctatttggttgagtggaatgaaagtgaaggatctatcaagaggacatattctggattccgtaaaaggtcagctggtgttgctggtgtagtgcagtttgatacagctcagaatcacattctggctgctggtgaagataaccatattaaattttgggatgttgacaataataacatgctgatctgcaccgatgctgaaggaggcctcccagctcttcctcgcttgaggtttaataaagaaggcaatcttcttgctgttactacagcagacaatggttttaagatacttgcaaatgctgatggacttagaactctacgcgcattagggagccggcctccttttgaagcatttaggccgcaatacgaagcttcttctatgaaggtctcaggtgctcctgttgttgctagcatctctcctaacataggccgaatggatcacttggataggaattctcctgcaaagccatctcctatactgaatggtggggatacagcatcaaggagcatagatataaagccaagaatctcagaagaaaagcctgataaagcaaaaccttgggaactaatggaagttctaaatccccagcaatgccatgtagcaacaatgccagaaactccagaccaagccagaaaggttgtccgacttctgtacacaaattctggtgttgggttgctagcactagggtctaacgccattcaaaggctatggaaatggagtcgaaacgaacaaaatccgagtggaaaagccacagctagtgttgtgccacaccattggcagccaaatagtggtcttgtcatgacaaatgatacagcagataccaatccagaggaggcagttccatgcattgcactctcaaagaatgattcctatgtgatgtctgcttgtggtgggaaggtttctttgtttaacatgatgacattcaaggtgatgacaacattcatgccacctccaccagcatcaacatttttagcatttcaccctcaagacaataacatcatagcaataggaatggaagattcaaccatccacatatacaatgtcagggtagatgaggtaaaaactagactcaaaggacatcaaaggaggataactgggttggcattctccaccaaccttggcatacttgtttcttcaggcgctgatgcacagtggataccccaggacacattgtcagcttccatatcgcatgcatcatactcatgtaacagccagctagtttttgctgccttcactgatggtaacttaggtgtttttgatgcggagaacttgagattaagatgtcgaattgcaccatcggtgataaacagatcaatccgtagtgtcattgagcttactcagggcttcaggcagctggggtgcctattctgcctctgcaatccacctgttcaccctcttgtcgtcgccgcacatccccacgagccaaaccaatttgcggtcgggctgtcagatgggtccgtcaaagtgctggagccattggagtccgaagggaaatggggagcgcccgctccggcagacaatggcatcattcccaatggcaagacgccagcttcgtcggctactagcaaccctgctgcggatcaaatccaaagatag

SEQ ID NO: 6263 - DNA, 549 bp, Zea mays
  Peptide Sequence Number=SeqID_49638
atgagggtgtccaccgaagcgaagtcgcttggtgggtcgaggccgaatccaaaaggcacgagatgggaatcggtcggtacctcttggtcgacgggcggtgacgaagtcacgtctggggctgactgcaccgtcgtctcagacggcgctcgtcttcgtctcagacgcgaggacgatgcccgacgtgcccccagttggggcgccggcgccgtcgactcactcgacagccgacgaagtgccgcctcctgcttggccttggttgccccgcctcctcctccatcggcgggtgaggggacggtacaagcccgaatgttgttcttccaccacgtggggaagacgtcgtcgattccgccgccggtgggcgggttgtcggccgccattgtcgctgttgcgcggcgggggaaggagtatcatgtcgtagctgccgtcgagggacatgaactcaagactcccgaaacggaacaccgtcccgggctggaaaggttgctggagactgcccatctggagcttgacgggaagctgttcgtcaacacgcagcaggcccctacctga

SEQ ID NO: 6264 - DNA, 1143 bp, Zea mays
  Peptide Sequence Number=SeqID_49639
atggagagggccgaggcttctacgcgcttggaagttgagcggacgcgcaaacagctcatggacgcatatcgcgagctgggcgcgcggaccgctgacttcgaagtgcccgaccgagagtcaggccttcgctgcctcgagtggctgcaagaggaattgttggcgctcccgaccattgtggagggatttatgtcctttgcctccctggtcacctgcgaaggggcgatgaacacgctgtcccgcgaagggtgcagtcactatgaggtcttcgaccgatctgatgaagatttcgagcgcgagatttacaaggtcgaggaccctgtggtgaaggactccgcgggagccctctttgaccggatgtggggcccccacggtcgggaggtggttagggagcggtccgaccgtgcgagggatcaggcggcgcgtgccgagaacgtggaggacttcggagctttgaacagcacgcgacctgaagcggagtcgaacccggtggcggccgaggccgaggtcgacccggcgccgcccccggaaaccggcgaaggctccctcgctgcccctgcggctactgtgtccggtggtggctcgtcgccaaccgatgtgccgagggctgaggatcccccgaagacggcgacggagccggcagcggaggatcccacggcggctgggtcttcgcaggttcaagattttgggcctgcgcatgcaaccgctactgctaattttttggcggcttcgaccgtggatgatgggaatgaatcggatgagtctgcttctaagttttctgattttggtgactttgggagtttggttgagtggacggaagagtcgtcgaatgaggacttggattactttgcggccttgaatgtggcagtggcggaggcttcgccgcgtgctgtggatgctgaagttgtgcctggtccgagtgctgggcgtaggcggcgaagggcggttgcgaagtgtagagtgactgaggtggatggcggtcggcttcgtgtgggcagggctggcaagcaagaattgttgtcctcgccggccgttgcgagtgtaggtgagggggagttgcgaagtctttttgagggtgaggagcttaggataatgttatttaactatagggagatgggaatcattccgaaggttgaaccgatgtga

SEQ ID NO: 6265 - DNA, 357 bp, Zea mays
  Peptide Sequence Number=SeqID_49640
atggacacatcaagccctgcagcacttgtcaatgcaaagattatgaacatgtttgttgggcaaagagtgcgcacagttgttcaagtccaacacaatgatggtggaatgcttgtcgggcagtcccctgatgggcatcaattgagtatcaaaagcgccatggatgtccctgtatcacactttatggaagtttatggaattgctgaaaacagccagaccatccgcgctgaagtttgcacagattttggtcctgactttggcaatccaaagctaagcttgttatgttgctgtcacttacatttggaccctgagaagttgctacaatggctaatgcagcttgatgagaggaaagagttctaa

SEQ ID NO: 6266 - DNA, 282 bp, Zea mays
  Peptide Sequence Number=SeqID_49641
atgtccggtgctctcagtctgccacggtgcctggggcgaagggtagcgctctcagcgctggcggtgagatttcggcgctcactgccgtcaaggacgacagcgggcactgtgtcccgccggctgagggaggcgtcgcagcggctaagtcaggcggctgacttcgctgaccgcgtggcgtcgggggcccttacgacagttgtgtctgccaaagtcgagagacttcgggtgcagcatgctgacgccgtccgggaaaagtcggccgccgatagcaagtgccgctag

SEQ ID NO: 6267 - DNA, 114 bp, Zea mays
  Peptide Sequence Number=SeqID_49642
atggacttggagctaccttttttgcgagtagaagagccactagcaaaggagtctggtgttcagcaggtagaagttaatgagcaggggctcattgaaggcaagttgtgccgttga

SEQ ID NO: 6268 - DNA, 801 bp, Zea mays
  Peptide Sequence Number=SeqID_49643
atggctgctgccaccggcaatagagttggaggtgtggacggacagcggcgtgcaccggtgttgaggactgttggaacttgctctcctggaaaagcggctgccttcaccgaacggattgcgtcgggggccctgacctcagagttcgctgtcgaaaggtggcaactcgaagggaggaatgagcgcttccggacgcagctcactgaggctatgcgggacaagtcagccgcggaaagcaagagccgcaacttgatggacaagttgtcggctacggaggccaaaaaagaggagctcggctgcctggtggcagctgaaaaggaggatgctgacaaagcctgcatggaggcgcgggctgcgtgcgctgatgccaagcttgcgtgcgccgaggctagcctcgccctccaacgtgctgcagaggcggaggcgagccataggagcctgcgcggctttctggacaaggcagaggcctctacccacacaggggtcaaacaggcgcgtgcgttgctcgtggacgcgtaccgacagcttggtgctcgtacggccccctttgatgcgtctggtaaggaggtgggcctctgctttcttggatggttgcaggaggaactggaggtcctaccgacgatcgtggcgggtctcatgtcctttgcttcactcatcacctgtgagggagctgcgaatgccttgtcccgtgagggatgtaggcacttcgaagtctttgatcgatccaacgaatacttccaacgtgaaatcttccaagtggaagacgcggtgctaaagcagtgcgctggggcaacgaatctctag

SEQ ID NO: 6269 - DNA, 510 bp, Zea mays
  Peptide Sequence Number=SeqID_49644
atgcgcctcatcctgcggtacctgttcttgacctgtggggggtgtgagacagcaagaaactgcgagggctcttttgcatatcgcatccgcgaagggggtatcgcgatcacagggccgtcagatctgagatcaaggctaccaggcggcggcgccaccagccattacggcgaggccttgccggagagtcgttactccgacgatccagagccccgatccctaccctgcaagagcgccaattcgcaccaggacggccccaaccgtggcggcaatgtttttatcttatgcggctccatcaatggctacgggagcgctggttcttatatgcccaagagccccgaccgagttatggactccgatgaagttcgcccggagatcccgcgagaccgtggagaccaggtcgacgaaggaggcgggtctgccaacacggtcccacacgacggtgaaacaacagtcgcggccgagcaggggaaggaaacagcggttggtgggctggctgcgtggagtttgtag

SEQ ID NO: 6270 - DNA, 516 bp, Zea mays
  Peptide Sequence Number=SeqID_49645
atgcgcctcatcctgcggtacctgttcttgacctgtggggggtgtgagacagcaagaaactgcgagggctcttttgcatatcgcatccgcgaagggggtatcgcgatcacagggccgtcagatctgagatcaaggctaccaggcagcggcgccgccagccattacggcgaggcctcgccggagagtcgttactccgacgatccagagccccgatccctagcccgcaagagcgccaattcgcaccaggacggccccaaccgtggcggcagtgtttttatcttatgcggctccatcaatggctacgggagcgctggttcttatatgcccaagagccccgaccgagttatggactccgatgaagtcaacgaaggaggcgggtctgccaacacggtcccacacggcggtgaaacaacagtcgcggccgagcaggggaaggaaacagcggttggtgggctggctgcgtggagtttggagatgggccgagaagagaagaaacggcccaggacgaatctctag

SEQ ID NO: 6271 - DNA, 321 bp, Zea mays
  Peptide Sequence Number=SeqID_49646
atggctccaagaattaggttcaacaagatagtgagggcaggtcgacaaccagaggagcaaccttcaaaaaggcttcactctacagagacagatggccacaatgtacaagaacaaacagatgctaatgatgacataccaaacagccctactacacctggtgatgaagctgaggtgcccgatctttcggcgagtagagataattccgatttgtcggaagatgacccttgcgatccgactacgacgagcaagcccgaggcgccaatgcaatcgctgaaccaactccctgtggttaccgaccttgctgatgcgagatcggcctga

SEQ ID NO: 6272 - DNA, 237 bp, Zea mays
  Peptide Sequence Number=SeqID_49647
atgaaggggtgtcggttctgccttcaccggcggggcgtcatggccaaacagtgggcgccacggcgtttcagggcgactggatggctggaggagggtgatgagccctgtgccatcagatctagagacgagtgccctagtggccagggtgtcacgctccacaagatcgtgacagccataggaggtggtgtatcggttgctaaggcgcagcgtctttggaaggctgtagtcgggccgtga

SEQ ID NO: 6273 - DNA, 255 bp, Zea mays
  Peptide Sequence Number=SeqID_49648
atggcacagtggcttacccggtctacgctcgccggcggtcggagggagtccggcgaccttgggctagcctctccggcgaagcagacttcgattcctcgctcggggagcttcaccgaggccatgtcgtcggctggtctttggtgcgacgcggggcacgcgaggtcgggcgcgggcgtgccctggcgcgcgcagaacgcgtcgaacacgtggaagtgttcatctgcccgtgttcaaacgcctgctgagattgcaaac

SEQ ID NO: 6274 - DNA, 243 bp, Zea mays
  Peptide Sequence Number=SeqID_49649
atgacatttggtgcttcggagagtagccaatccagacacagtaggcaaattacagctgaagtgggaaggaccttttctggtggtatctttggaatcaggttacgggtatacaagtgtctggtcaagacgaaggataagatgatcatgacgaaggataagacgatcatgacgaaggaaaagatgatcacgaagctatgcgcagaaaagcttcggcatgacagcagaaaaggggaaccgacttaa

SEQ ID NO: 6275 - DNA, 285 bp, Zea mays
  Peptide Sequence Number=SeqID_49650
atgtacaatggatcaagcagtctcattagctacgagaagcagacgattcgaaccgagtttttatccttgcaagtgaccgcacttgtacccaccataaccggaatgggagaccacgtctcaggtcgcatgaggggatatgtctgtgggcaggttcaatcagaccacgcatccccatggatccgtgtccacagaccaacatcaataggatatgaaagtgggtacaatcaatgccctgacctcgcgcgagtgctagaaaaatcactcgacttctaccaagatccctaa

SEQ ID NO: 6276 - DNA, 630 bp, Zea mays
  Peptide Sequence Number=SeqID_49651
atgacttctcacggatcctcggacgaagggaatgcacagtcccacactgacggacttgcacgagagggtttcccccgtattttatgggaggtacttcagggagctggttacacgacgcctccccaatacgtggtgcagttgttcgaaaagcaccgagtgccccgctgtagggtgaggatgaccctagagcctcatcccctgcagccaggctggcgttcgctggactctgagtcttttggataccgggctgaggatactatcgaggcaattgctcttcacggactgaccaccttctgcagattccaccccttggagctgtccactcaccccattggtctgttccccgcggagaaggaggacgacccaatgtggaaggaccaagtggagcatgccaaggatatctgggctatctacccaggtcagacggctcacttgacggtgatgtgtggagaggcaatgtcccatctgatggcattgttggaggcgaccaagatcactttggacaacagagaggaacttgtggttgacttgtccactgagatggtggaaaaggacttacaagtggagcaactatcaaatgagatccaagagcttgaggagttagtgggaaccagggagaacaccatctag

SEQ ID NO: 6277 - DNA, 594 bp, Zea mays
  Peptide Sequence Number=SeqID_49652
atggccttactacactcggcgtggtatcagcagtccctgcgactcccgagacctccaggtgggcgacttggtgcttcggctgcgacaagacgcccgagggcggcacaagctcacgcctccctgggaagggccgttcggcatcgccaaggttctgaagcccgggacatacaagctggccaacagtcaaggcgaggttcagacgtcgacggagggggagcagcagcaccctcggcgtcaactccaccttcggcgaagtccgaccgagcctcgaacggcaacacagttggaggatctccgctccgaaggatgacgtcagcaccacgcccgggccatcgccgccagggtctcctccaggagtccggctcgagcagacggctcggccggccgccccgaagcctcagccagctgtcccccgaggacatcagcccggctcatgacctcggcaactcgactccggcgccggtcccagcagtggatggcccggcgaggctccagccgacgaagtcttcttttcgagcgaactctgcctctgtccacgctgataccgctgcctccggcttcggctcatcgaagagcggccgagggttcccttaa

SEQ ID NO: 6278 - DNA, 717 bp, Zea mays
  Peptide Sequence Number=SeqID_49653
atggaggcgacatgcaaccgcaccaagggggcgcaccctttcgacttcgacgcgtctagcatggaggcccaggcctacacgtcatggaccgggaaaggggatatttcgaaagggatccttctccgcgaaggaagcgggccccgagcccccctactgatcagaggttcgaaggctgtcccctcggaaggtttcaacagccgcctcagagcactcgggctccacgcctactactggctggcccccgaagggttcgacagccgcctcagacacagagcgagggatgaccctgggtacgttcgatacataaccaaggctcgggctacgctcccgaggctcgggggctgctctcgtaaacccggctccggccaaaccgttgacagcgtcaacataccagcccgagaacttgggactcgactgtgcacccgggctacggccacggccaagtccggcctcgggcgccataggaaactccgcctcgcccgaccccagcgctcggactcggcctcggctccggaagacgacgaactccgcctcgcccgaccccagggctcggactcgggctcggccccggaagacgacgaactccgcctcgcccgaccccagggctcggactcagcctcggctccgaaagacgacgaactccgcctcacccgaccccatggctcggactcaggcttggccccggaagacgacgaactccgcctcgcccgaccctag

SEQ ID NO: 6279 - DNA, 309 bp, Zea mays
  Peptide Sequence Number=SeqID_49654
atgactcttggttgggctgccaaacgaagtgcacaccgggctcatcagcgaggttgggcttcagctggacggcgagctggatggcgtgatggcgtcatcgttggatgcggtgtccagaacaaccgagagtcgtcgacgttggcgacaaccatgaggcccccctgcttaacgatggacagcgacacatgcgaccacgtaggactgcttctagaggtcgaactgacagtcgccaagcttcttctcgtcatcgatgagcgacgccaacgcgagtgcctcctgctaatggtgtttgttcggggtttcaagtaa

SEQ ID NO: 6280 - DNA, 450 bp, Zea mays
  Peptide Sequence Number=SeqID_49655
atgtcttttgtagatggcccgtatcaggtgcactgcacgtcagtccaatcacctggagaaactgcatcgtcgcctgcacgaggagcaggagcgccgacgctaggagcaggagcaggagcagcaggactcttccccttgcctcagcgggaggtggagtctgagaggccgccttcccctgcacctcagcgagagatgccccttgcaccaccacagggcatcccggctgctggaagagaccctgacggagacggagacgacgacaacgccggtggcagttcgagccatggcacggagcgctcgaaggagctggagccggaggggtggatcgctagacccatcactcgtgacgctgctcgcgggtgtcacttccacgacgttctcgataccctgttgcgttgggcctttgaccgacacacttggtctatcgagtaccgttgtgtagtctactag

SEQ ID NO: 6281 - DNA, 189 bp, Zea mays
  Peptide Sequence Number=SeqID_49656
atgtccctcaccaaaaacaagaatggacaacaagcatcataccaaattgagcgacgcttctgctacaagtgtggtgagcaaggtcatctacaaaagagacctaaatcatacacttgtgctagacccatgttgagatcacctagaactagcacaaatgctatttccgtgcccaaggctcttttagattaa

SEQ ID NO: 6282 - DNA, 768 bp, Zea mays
  Peptide Sequence Number=SeqID_49657
atgctgccccagacgagaggaggtcccaccactgcaattccggccgacacgccgacctccaccccggctcatgcgctagcccgggaccagtctgtcggcgcctccgacggatggcatgcggaggccgccaacctcgcgcaccagatccagcccaccgcgcgccgacgccgctcccctgggggcgtcagatccagccctccgcgcatccggtacgcgagcacacagcccaggcacacctccaaccccgagcagcagcgattgccgtcgcggcgcgtaggcgccgccatcgggccagcctcgtggacgcgcacccagccgcaggcccgttgcctgagtgggcggacgccgccaccgtgggctggacgcgcgacaaccgacaaggcagcaagcatccgcccgacgccttcaccgctagctgtgcgagcaacccgccagctagctccggcggcggcaaggcaaagagatggggagggaggggagttggcagccgcccgagtcacgagggggcgaagccggggccgaccacgccgacgagcaactcacggcgaccttggcggccgcgcccgcccagatccgctggagggagatgaagatgccccgccgccgccctccccgcaagcagccggaccttccggcggccagctcaggcagcggcgcggcagggagaggcccacgaaggggcggtggcggctgctagggattatggggagcgtccgagtcacccgacgcgggggcaaccaggacgcggcgtttccggtgaaactctga

SEQ ID NO: 6283 - DNA, 177 bp, Zea mays
  Peptide Sequence Number=SeqID_49658
atggcgaccgagctgggcggcgggcggccgaacggcgaggggaaagggggaggggagatgggggagggaggagagggggagggggacctcaccggggacggggacgggcggccgagcggcgggcacaggaattccaagccataccccgctataactttggaaaagatcaaggtttag

SEQ ID NO: 6284 - DNA, 528 bp, Zea mays
  Peptide Sequence Number=SeqID_49659
atggctggagcacaccttggcactcaagactatgatcacatgtggaagaacttaaggagcaaaagccgtatctgccccggcgtctcacagttgagtgacagccctaggtgccaggaagaggtctgcgccggacttttgcaaagattcgcacgtttgcgacctttggcgacatttgaacactggaagaaacaaaccgccacgtgttcgacgccgtctgccgcgccagagcacgcccgcgcgcgcgcccgcgccgcgcccaagccaagccagtgccctgccattcccaaccccgtccagccctcggagaagactgtgcacgtctccgtgaagctccccgagcgaggaatcgggctctgcttcaccggagaggccggcccaaggtcaccggacttcaaccgaccgccggcaaccgtggaccgaggttctctggaggacatggttgctggagtgacttggccgtccaccttaccaccgggttggactgttgagtgggaccctgcctcggctgaggaggagcatgaggagtga

SEQ ID NO: 6285 - DNA, 636 bp, Zea mays
  Peptide Sequence Number=SeqID_49660
atggttgccccgtctccgtctcctccggtgaggagggtggtggggttgacccaggtgttcctcttccgccacgtggagatgccgtcttcgtcgggttcgtctccgccgggcttgccgacgaccgtcgtcgttgtcgtgctgcgaggggagcagtaccatgtcgtagccgccgttgagggacatgaactcgagacttccgaagcgaagcaccatcccgggctgaagaggctgctgaaggctacccatgtggaactcaacgggaaagtattcgttaacatgcagcgagcccctacctggcgtgccaactgtcggtgttttggacccgtgaggaccctcaaccaactagtgaatttgttgctgataaggtgtcaggcgatccctgcattaaatgcgcatgcgatacggtcggttggtaaggcgattttggtcgaggtcgctgcacgacaaagtctgcccgagctgggctttgggcgagccgggggtgcgcccactgcctggggaggccctcgggcgaggcgtgaatttgtccgggactactgttcccacccgagactgggctcggatgaggtcgcgtccctcggtagacgtggccttgacttgaactgtgccttatcagccgtgtatggtttgttctga

SEQ ID NO: 6286 - DNA, 930 bp, Zea mays
  Peptide Sequence Number=SeqID_49661
atggcggtggcaaccagtgcttctcatcctctcctctacctcgacggcaagccctacgggcagctctccgtcgcgctccccttctctctcacgccagatgaaggggacgactgtagcctccgctacgcgctctactcgcggaagccgacgcccgcgcgagacggcggaaagttccaggtcgacttctcttcctctagacggctcttggcaacgggggcgagaaggggcgacgcggcggcggatctggcggcgcaaggccgattccgagccggtggagcacatttgatcatggcatcctcgaaagaagataacatgaaggctttgctgaaagtccttgcggctgctcccgtaggtgctgccgcctccttccactctccatcctcctcccagatctatccacaggggcgtctgatcttggtggagtacgagatggaggcgatcggcaacaccttgccagccctcgggaccctggcggataatgacatggtcctcgtcgaggagcaacaacaggctttagaggtggtgtgcccgtcgcctcctccgttgctgccgttaccagagccagtgtgtgggaccgtgttcctggagctgctggagtctgcgtcgtgggtcgctttgacgttgcgaccaccgttggtgagcactgcaatggaggccgtggagggcaggtgggaggcgaatgtcacactgcgttgcacgagtgcacataggcccgcccaggttccttctccggttttggcattcagcgtgtgcccaacagcgacgatgattatcgttcgtaagatgggcgaggtggcaccgcggatcccagctacccggaggaggacggtgtctcgcaaggccgcgggagcagtggaggctgaccgacctgctgaagatgtatctgaggagaagacattgaagattacaatagctttgaatatcgcataa

SEQ ID NO: 6287 - DNA, 342 bp, Zea mays
  Peptide Sequence Number=SeqID_49662
atggcgactgcctcctccttcaccgccatctttttcagcagtgccttcgtcgcatgcttcgcggaggtgaaggctttcttcgtcagatgtgctgttgtgggtgatgtcagtttactaagcaagattcttgctgcgcttgccacaggtgtgatagctattgttgtggcaaatccaactgatctcgttaaagttaggttgcaagctgatggaaaggctaacacagtcaagaggagttattctggagcccttaatgaaggtattggagctttgtggactggccttggcccaaatgtcgcacacaatgtcataattaacgctgccgagttggacagctatgattag

SEQ ID NO: 6288 - DNA, 246 bp, Zea mays
  Peptide Sequence Number=SeqID_49663
atggaggagaaggctgtcgcaaatggagcagcgtttgttgatgttgctactcctgataataaggataacaccaaggaagaggctagcgagaccaaggaggcagaaaatcaggatgctcaagagaagaacaaaggctcagaaaatggcaagcacattacatctaacctaaagctacctgctgatgatgctgtaaaccacaacgatcacaaagaagggtccttctatgacgccgagacagtgcattag

SEQ ID NO: 6289 - DNA, 420 bp, Zea mays
  Peptide Sequence Number=SeqID_49664
atgtggaaggatcgggtggaacatgccaaggacatctgggccatctacctaggacagactgcgcacttaacagtacggtgcatgaatgctctgtaccgtctgcaagtgatgcgcggtgaggcaatgtcccatttgatggcactgctggaggcaacaaagatcacgctggataaccgagaggagcttgtggttgacctatctcaggaaatggtggaaaaggacttgcaggtggagcagctatccactgatattcaggagttggaggaactggtgggcaccagggagaacaccatcgaggaccaggaggacgacgaggacgtcgacattgagggaggagatgagcctgcctccagtgtggacactgctggctcgggaagaccaccctcccccgagtccagtgttgcttcgttcgctcactag

SEQ ID NO: 6290 - DNA, 900 bp, Zea mays
  Peptide Sequence Number=SeqID_49665
atgcgcctcatcctgtggtacctgttcttgacctgtggggggtgtgagacagcaagagtgagctcacatacgttcatcgctcaagaagttgtggggaataatgtgcatgaactcgccaaagaggttgcgcatctttacccacaagtcatgttacccatctgccacggggttgtacgagccccatacacctctaccaaggaagcgaggcaggggatccctcgactgatcgccatcgcagcaaaatcaaccaaggacctccctacactgaccactctcctactgcccttgcccctttcgggctggcgtttgttggactccgagtctttcggatacagggctgaagacactatcgaggccattgctctccacgggctgacgaccttttgtggctttcaccccttggagctgtctactcatcccattggcttgttccccgcggaaaaggaggacgacccaatgtggaaagatcgagtagagcatttcaaggatgtgtgggctctatacccagggcagactgctcacctcaaggtgcgatgcatgaatgccctgtaccgcctgcaagcgatgcgaggagaggcaatgtctcagctaatgggcttgttggaggctaccaagatcacactggataacagggaggaacttgtgatccaagagcttgaggagctagtaggagccgagaacaccatcgaggttctcgaagatcagcttataaacactcagcagcaacttgaggaagctaaccagcacttggatatgcaccatcaggagattcaggacatggaggccaacgaagatgttgacattgagggagtggagccggagcctgcatccagcctggatactgctggctcagggagacccccttcccccgagtcaagcgttgcctcgtttgctcactag

SEQ ID NO: 6291 - DNA, 369 bp, Zea mays
  Peptide Sequence Number=SeqID_49666
atggccgtgatggattcaacatcggaaaagatgtacctctgccaggtaccaagtttttgggttaaaaagattaagctgagaccgggcgggatccactttagtaagcatttctgcaaaacagagtctttgattattgaaaagccttaccttgactcccatataaccagcatacccttgagagtcttttctttagtcgggtggttcccaaagaagaaaaacaagactgaagtgcgggaggactcgatcctccacttaggatcttttgctcataacttatcgggaggagtctgtgcctcccttggtttgtataatattactactctgcactcacttttagctctgattagcgatactggtagaagagattag

SEQ ID NO: 6292 - DNA, 249 bp, Zea mays
  Peptide Sequence Number=SeqID_49667
atgcgcaattcgggcgtgctggtggacgatcgagggtgggagcgggtgctacagcttcacaactatatggcgcagctacgggcgaggtcaatttatagagctagagggcggtggccggtgaattttgaggaggacgcgcggcggccggaggtggaagagagcactggtgcacgcgagttcgtggccaacggcgtggcaacctccccggcgatgatgggatggcccaagggagtcacggcgacacggtag

SEQ ID NO: 6293 - DNA, 459 bp, Zea mays
  Peptide Sequence Number=SeqID_49668
atggaaacatgtgatagagggttcagggctctgtcacctcatgagtctctgacgccgctatccaccaacgcttctttggtcagcaatgctactaggcgaactctatggtccctcagccacacttacccacagcagctacacatcacaaagtacagacatcttcctttgcgtcttcatggagaaagccagaccagcattgttccaggtggagctgaagaagatcgccttaacaccctagctggtgtggtggcaggtcttaacaccgacctggacactgctaccctagacctctccagggtacacttggagctggaggatgcacacgcaaggattgcagccctggaaggtcagctagaagcaagggacccccctgaagctcaagtccctaccatggcgttgtcccctccccgcaagaggatccgctatggagaaccaggatccatcaccaggttgctatag

SEQ ID NO: 6294 - DNA, 404 bp, Zea mays
  Peptide Sequence Number=SeqID_49669
atggcacgcccggcacgccacgacaagcatcaaatatgtcgggaaataagggagacggggaggctcaccgcggggaacgacgacgacatggacggacgacacggcgtggacgaacgacggccgtggacgaacggcgtggacggcgggcacggcgtggacgagtctgctcctatgaacggcgtggacgaacggcgagccacgcgcggcgacgcggagcggcgagggcgcgcgcgcgggccacgagcggcgacgcgtggagagcgggcgggcacgggcggcggtgcagtgagggagggccacgaacggcggcggtgcagtgagcgggcgggcgcgggcgacgcgtggacgccggcgcggcgatggtggacgggggcacgactatggtgggcggcgcgggaggtcgg

SEQ ID NO: 6295 - DNA, 390 bp, Zea mays
  Peptide Sequence Number=SeqID_49670
atggtgaccaccagttcctgggtggggagaagcaagccaggctacgatcttggtcccaccctcagcttcaaggatgttcatcatcctcgctggggtgggggccgggctgagccggcgctctacctcccgcgcgggttcgtgggtcaccctctcccacggcgttcgagggagagggcgctcactggccctgcgggcggcccggacttcgacaacgtggggctggtcgacggcgggcgtcgtcacctccagcgtgtcggagtcgtcggcttgaccgtaccgaacttgtcaagtgatttaggaacatctacaaggttgtctgatgaacgtttcacccgtcttgcagacattacagaacatcagagatatagaaatgcggaagctattacataa

SEQ ID NO: 6296 - DNA, 1209 bp, Zea mays
  Peptide Sequence Number=SeqID_49671
atgcaggcggcatgcaaccgcgccaggtggacgcgcttccccgattcccaacgcgcctgcgtggaggcccaggcccacgcgtcacgcaaccagcgtgccggatgctgcatgcaagcaactgcaccgccacttgcgccaccaccgcgcctcttcggttgcggaaccaatacagcgactcgaggcggcccagcgcacgacccagcagcgccagcctggcgcgacggtcaatgccgccgaaagacaagcggcgcttctggcaggagaagcgggcgacgcttcgccttcgccgtaataaccgcgccaaaaaagggaccgggaaagggggataccccgaaaaggatccttccctgtgaagggaccgggctccgagccccccctactgatcagaggttcgaaggctggccccccgaggggttcaacagccgcctcagatcgcgtgggccctacacccactactggtcagaggttcgaaggacggccccccgaagggctccacggccgcctcaggctactcgggctccgcgaccattactgatcagaggttcgaaggctggcccccgaagggttcacagtcgcctcagacgccgagcgagggatgaccaggggtacgttcgatacataaccaaggctcggctgcgctcccgaggtaccctaggacatttccgagaccagcgggagcgatcttgtaacggaatcccatcggagggaggcatcgagccctcagaccctgtcgctaggggaccgggtccggctgatcacccgcagctcaccggagacaccatgttcggtgcccatcgaggggctcggactcgggctaagccccggaagacggcgaactccgctccgcccgacccagggctcggactcgggctaggccccaaaagatggcgaactccgctccgcccgacccagggctcggactcgggctcagccccagaagacgacgaactccgcttcgcccgaccccagggctcggactccgccctggcctctgccgaacgacctccgcctcgcccgacccaggagctcgggctcggcctcggccatggaatacagactcgacctcggcttcggaggagcctccacgtcgcccgacctagggcgcaggcccgccacgtcaacaggaagcgccatcatcaccctaccccgagccgactcgggccgcagagaacaagaccggtgtcccatctggctagctccgccagatag

SEQ ID NO: 6297 - DNA, 291 bp, Zea mays
  Peptide Sequence Number=SeqID_49672
atggtgaccaccagttcctgggtggggagaagcaagccaggctacgatcttggtcccaccctcagcttcaaggatgttcatcatcctcgctggggtgggggccgggctgagccggcgctctacctcccgcgcgggttcgtgggtcaccctctcccacggcgttcgagggagagggcgctcactggccctgcgggcggcccggacttcgacaacgtggggctggaacgtttcacccgtcttgcagacattacagaacatcagagatatagaaatgcggaagctattacataa

SEQ ID NO: 6298 - DNA, 825 bp, Zea mays
  Peptide Sequence Number=SeqID_49673
atggcgggagcgaacttcctctccaccgcggcgctcgtcgcccgcggcgtcgctgcctgctcttctatttcaactccgacacggaggcacccgcaagttccatttcaaacccgagggaaccgcgtgattcttggtttgcctctgcagatccgggtgtgctgccgggctgacgttgaggctatggaggcctatgcccatgaagagcgccttcgattccgtcggagagatttcatcggcacctgcgtcggcaccgctattggtttggaaatgatcgacggctctacgagtttctctggagtggctactgcagctgatctcattgagcgtagacaaagcaaaaatcaaagacaccctttacgtagccataaagcacaatcagcactgaagagatcgtttcttgacgctgccattgccaaatgtggtggaaatgaagagaagggaagaacactgtactctgcatatggttcaaatgggcagtggggtctgttcgatagaacgttcgggagagcagacgcacaggaagcagatccagagggaagagtgcctgactggagcaaggcttctgtgcaggagatgaaggataggttcgtcgctgttgggttgggtcctcgccaggctgctacggagggacgactgatagctgatccggattgccgtccatgggtggagaagtaccagcggagccgcgagaccgtctcccggactgactatgaggttgacctgataactacactcacaaagctgagctcccttggccagaagataaactacgaagcctacacataccctaagcagaagattgacctgggaaaactgaaactgtaa

SEQ ID NO: 6299 - DNA, 555 bp, Zea mays
  Peptide Sequence Number=SeqID_49674
atgtcgggtcccttggatggggtccagatccctccgagtaaggtccgggccacaacggggtcccgggacaggggataccctggcataagcaagggtccgatactgacacgtgttaggctttatcctgtgcgcttgcgctccccgctcaggcggagacccgctgctgccgcgtggattgtagctcgtgacataagccagcaggcggagcctgaccatgatggtgcaaatcgtggagcaccgcgtcgagacttcaacggatttcctggtggaggaagaagttgtttcttccatgccacaggttcccaaccgcccaatgacgggcattgctgctgtgcacgcagcacgacagcatacaactgcgcagacatcccggactccgtcgagggtggctccgggagcattgtcagcagccagggagttgctatgtcaccctccaagctccacggcctcaccgggggccatgaagcagtggcggggcgacgtcgactggctactcggcatggcacattctacctcaaccaggtcgaggccacggtcatcccggcgccaacatga

SEQ ID NO: 6300 - DNA, 1101 bp, Zea mays
  Peptide Sequence Number=SeqID_49675
atgtcgtcgccgtcggtagccagcctccgtctcccgatgctcccagcgtcgccgcccctctcccgccgcgctatcgccggagttaccccgagcgcggccgcaccccgcgctcttctcctacaacccctcgcgcccaaggcgctcgcggcgtaccaccagcctgcgctcctcctccaccagcgacgccggcatggaccgccccccgtcgccgctgtcactgcctccaagccggttctcaaggacccgaagaagtaccaggagtgggactccatgacggccaagttcgctggcgccgccaacatccccttcctactgctccagctcccgcagatcgtcctcaacacccgcaacctcctcgccggcaacaagaccgcgctcttcgccgtgccgtggcttggaatgctcactgggctgctgggcaacctctcgctcctctcctatttcgccaagaagaaggaaacggaggctgtcatcgtgcagactcttggcgtcatctccacctatgcggtcctcgtgcagctcgcaatggcggagtccatgccggtgccgcagttcgtggccacttcggttgttgtggccgcagggctcatcctaaacttcctcaactactttggctggatccctggaaccctcttgctgctgtgggaggatttcattacagtcggcggccttgccgtgctccctcaggtcatgtggtcaacttttgttcccttcatccccaatagcgtactgcctggcataatctctggttctttagctgttgcagctgttgcgatggcaaggatgggcaagctttccaatgcaggggttaaatttgttgggtcattgtctggttggacagccacacttctcttcatgtggatgccagtggcacagatgtggacaaattaccttaacccaagtaacatcaaagggctgtcagctttcagcatgttgcttgcaatgcttggaaacggacttatgattcctcgcgctgtattcatccgtgatttgatgtggttcactggttctgcatgggcatctgtcctacagggttgggctttaatagcatcagcggagaagttttctttgcaacatcagctggtctgcttctatggctag

SEQ ID NO: 6301 - DNA, 207 bp, Zea mays
  Peptide Sequence Number=SeqID_49676
atggaggcccaggcccacgcgtcacgcaaccggcgcgccggatgctgcatgcaagcaactgcaccgccacttgcgccaccaccgcgcctcctcgattgcggaaccaacaccgcgactcgaggcaacccagcgcacgacccagcagcgccagcctggcgcgacgggaccgggaaagggggataccccgaaaaggatccttccccgtga

SEQ ID NO: 6302 - DNA, 1374 bp, Zea mays
  Peptide Sequence Number=SeqID_49677
atggaggcgggcggcgcgggcgcgggagcgggaggaagggacgagagggtaccgcagtggggcgcgcaggagacgcgggagctaatcatggcgcgcggggagatggagcgggagaccgtcgcggcgcgccgcagcgccaagacgatgtgggaggccgtcgccgcgcgcctccgggagcgaggctaccgacgaaccgccgagcagtgcaagtgcaagtggaagaacctcgtcaaccgctacaaggggaaagaaacttcagatccagaaaatggtaggcagtgtcccttctttgaagagctgcatggtgtcttcacagagcgtgctagaaatatgcagcaacaactccttgagtctgaatctggagtttctgtcaaaacgaaactgaagcgacctggtggtgactggtcatctcgggagtctgacgacaaggaagatgatggtgaagaaagtgacgatgagaagccgatgcacaacagaaagaggaaagctgatgacaagaaacagcaacatcaaagaatgtctgagaagtcaagaacaggaatttcgagcatccatgaactgctgcaggatttcctggtgcagcaacagcacattgatgtccggtggcgggagatgatcgagagacgtgcccaggagcgggtgaaggccactgcctggacggcgactccgagaacgaaccgggcagcaccccagcggcaatggagggccagccgctccctctcctcctcggtcttcgcccagccccaccaccctcgcctcatcctcaaccaccctacccgcctccgactccgccggctgggagcgggtgccgacgctctggcggcgctggtgttccagctgaccgtgtcctcgctcccttttctcttccccaaccgtgcccgagtcctcgcgctcccgccccctctgggggccgctgcggtggttgaggcgacgcaggaggactggaggaggacaaggagtgggacttgggaggctgcgctgcagaagtggaagaccaagacttacgcgctctcggtgcccctccggaaaggcgcgctacgcggctccttccctccatcttggattaaggatttcgttgaagttcaggggaagaagctcaaattcagtgccgagctccgtgctaatcttgatgggatcttctctgagatgtcacggtgtatggacaagggtcaagttcagccaaagtccgcaatggcagctgatgtcgtgtcccttggtgactcctggcttggctatgctatctgtaaggaattgctagagcctgtcaagaatgctgaagaacaggattggttccgtagactgagtgacagatggaaggactgggaggatttatggaggcccgaacttgctgggaggatttcaatggtctactag

SEQ ID NO: 6303 - DNA, 1308 bp, Zea mays
  Peptide Sequence Number=SeqID_49678
atgggagcctgcaactcgtgcgaggccacggcggtggcggcggcgccggggccggcgacggcggaggcgagggtggtgctcgcggacggcgcgctgcggcggttcccgggcggcacgcgggcgtcgcaggccgtgaaggcggccgccgccggggcggcctcgtggttcctgtgcagcgcggacgggctggagctcggcggcgccgtggtgcccgtgcggcccgaggaggcgctgcagcccgggcagctgtacttcgtgctccccgccgcgatgcggcgccgcccgctgcaggcggaggagatggccgcgctcgccatccgcgccagcgccgcgctggccggcgaccacgacggcccgctcgtgttcccggaggccgccgctgccgccggcgccggggcgcggtgcggcaaggggccagctcgcttcacccctttcggtctcggcggccgtcgggcccacgccgcagaagccccgacggcgctagccgcgctacgctacgctacgctacgcaccgcgtttctccgcttcagcggttcgcctctgcgccgcaagctcctagagatggcggcgaagtctggatacacacgccggctcccgctcaccggggagaccgctcctccacctcccagcgccgtcctctatgtggccaactgcgggcccgcggtgggagtgaccgacgccgacgtccgctcgacattcggcgccttcggggaggtcgcaggagtccaggctgccgacgacagcggcgcccgcatcatcgtccggttccacgagcccgccgccgcggaggccgccatggctgcgctccacgggcgcccctgcgacctccttgcgggtcgcgtgctgcacataaggtactcggtgcccgtgaagccaaaggctcgtcctgggggctctgtaccggtggctcacgcggcatcggagctcggaatccccgggatttacatggttcaggagttcgtgactgccgctgaggaacaggagttactttcagctgtggatagcaagacgtggaaaagactggcgaaaagacgagttcagcattacggttatgagtttctgtacgaaacaaggaatgttgattcgaagcagttcttgggtgaactgcctacttttgtttcaactgtccttgagaagattgcttcttttcctggtgtgaaggactgcgccaccagattagttgatcaattgaccgagaaggtcgttatgcctggcatcactatataccacatcataaaatcgatgccgtgggtggtcaagtcatcaaaaggaattcaaggcgagtttctttcactttccgaaaggtga

SEQ ID NO: 6304 - DNA, 180 bp, Zea mays
  Peptide Sequence Number=SeqID_49679
atggacacgggcgttgtggagatggtgtcagtttcagtcattttgatgcctgtgctcgaggacatacaggctccatcacaatcgtttgacttttcaccttcatcagcacttgatcctgctaattgggaccctaattataggtatggaatactcaaatcgattcttgtaaacttgtattaa

SEQ ID NO: 6305 - DNA, 441 bp, Zea mays
  Peptide Sequence Number=SeqID_49680
atggccgttcctcctcctcttctcttcttattcatcctgttatgcatggtaattatcactgtatctgacatggatgagcacatgggaagacgaacagtcggcggcctcctcttcaccaagggaggatccatccttctcttcagagaagacggctcgcgccccaaggccaagaactgctgcacgcgccatggctgtagcggtcagcatcctgctgacagagccaagggcaaggagctcgagaactatttcatattcaatgatcggcatagaggaatgaggatggatatcgacggcatgtcctacgaagaggagtatttagcaggcgaggaggtgggcgagatggcatgtaaacactactaccacctttcctgcatagatcactggcttcggcagaagaactggtgtcctatctgcaaatctgtcgccctgaaaatcaactag

SEQ ID NO: 6306 - DNA, 1233 bp, Zea mays
  Peptide Sequence Number=SeqID_49681
atggagctggattcctccggccgctgctcggttgctcccgtgaatgctgagagtggcggcagctgcggaaagcgggaggacgcggcgccgccgtggaggccgagcgactccacggcgttcggccgttttgcggcggccgcttctccgccggaggcgtccccgtcggcctccgccaatggggctgctgcccgcgtcagcagccttcatggggtcaggcggaaaccgtctgttgcgagattaacagcaggcatcattcagacatatctacaatgtgatcccgagtttaagtactcagaggttctaaatccaaaacgtttcctcacgaatccctctaccccagcccacaacgatgggcttgacaatgcaaattgggatctcatattgtttattgtcaaggaaatgcttgggcagggaacttttggtcaagtagttaaatgctgggacacagaaactaacgactatgttgctgtgaaggtgataaaaaaccagcctgcattttaccatcaagctatcatggaggtttcactattaagaacgttaaatcagaaatttgatcctgatgatcagcataacattgtccgtatgcttgattatctgtcatttcaaaaccatttgtgtatagcttttgagatgcttggccaaaacctatatgaactgctcaaaaggaatcacttaagaggtctgaaattgaaatatgttcaagccttctcaaaacagatattggatgccatggttgtgatgagagaagctggaatcatccattgtgatttgaagccagaaaatatcctgttagctcccagtgtcacaacagctgcagaagtgaaagttattgattttggatcagcctgcctggaggccgctattacaggtctccagaggttctccttggctatccgtatcctgggccaaccaccagatgaactgctaagggaagctaaaaacactgcaaggttttttaaacatgttggaagtatctatcctggcaatgaggcacctactggtctttgtagtgcgtacaaaagtttaagtgaagaagatgttgaagtgagagactccaagaagccacagatgggaaagtggtacttcccacacctaaagcttgacaaactcatatgtacctatccttggaacaattccgaactgacagagtgggcagttgatcaccccgttagtgatggggggtcagggttcaggggttttctcggccgggaccatgtttcggtctcttcttaa

SEQ ID NO: 6307 - DNA, 306 bp, Zea mays
  Peptide Sequence Number=SeqID_49682
atgtccggtgcaccagaggactccaactcgaactcgccaccttcgggaatttccagaggcactcgcgctataattcaccggactgtccggtgcgccaaggaggagcagcctcaggacagtgtccggtgcgccaaggaggagcagcctcaggaactcgcctgcttcgggaatctccaacggctagtccgctataattcaccggacatgtccggtgtacaccggactgtccggtgcaactccggagcaacggctattcggcgccaacggctacctgcgacgcaattaatgcgcgctctgcgcgcgtag

SEQ ID NO: 6308 - DNA, 2031 bp, Zea mays
  Peptide Sequence Number=SeqID_49683
atgccgcgcacgaagaatgtgtcggcgccagggggaggcgatgatgaggatcctcgtcgccccttcaggcaggtcaagggcaagactgtttatttggagcagcaggaaggccgcaagaagcggcgtacggacagagcagcccgtgcagcggcagcagctgcagcagccgctgcgcaggccgagcttggagatcagccgcagaccccgtcagatcagatcgcatatcgtgttcgtcgtctcgcctcccggcgctcctccactcacaccacctctgcttccactccgccacccactctgcctgctcccgtcactcctgttgcgccatccaccaccacagccatacccactacctccaccacgccagcttccactgctcctcctcctcctcctcccgctcccgcttcagctcctcctgtccctccacctcgattccgggagcgcgatgagactgaggtacaaccacttgttgcggatcctcgactgtttgaccttcagcgtgctacagcggcacgggtacgtaggttcagatacgtacccgtggagtcttggctaccagctcagagagaccctgcggcaggtgaccttttcagcacacgtactcaggagtcgtttttcagagctcagatgtctgctcagatagctctgcgagtacaccggcttttggatcttccagcctttctgcttgcagccggtgctgactctgaggcgcacctcacctatctgcctggccttcagactcttttgactaccagcggcaggtatgttgacgagtgggtacgagtcttctacgcctctgtttggattgacccggatcatcactggatgaggttccgctttgagcgagaggatgtcacaattactaccagtcagatccgtcagctatttggattccccgagtcgacgactcgccttcacagtctctgctacggcacttctgaccctcctcgtcgccctcacggcggtgttgctccgggtacagctcacgtcgcggctctgttccgcccgcccttcacagatgggtcgcgacgttcaccggcagactttactacagcagcgaagtacttatatgagctcatcagacggacacttctgccgaggatgggatacagggaggctaccactcatattcagctttggctccttggtgccctgctgattcagccacctcgatttcagagcacccttgaggcctcacgccttgtatttggatcttaccatcctgctcctgagattcctgtgccagctactgcttctgtgtttgactctcaggccgaggatgcagctcttcgacagtttgacactcagggtacaacagctgatgatgatgatgatgatgatgatgatgatgattttggggttcctcctccgcctccgcctcctatgcctccacgctcacatgatcatgaggctgggagttctagtgttgcccctgccactcctcaggctatggaccctgctcttgcttcgattctccagactctcacccagcagcaggctcacctggcagccgagcaggcccgtttatccgacaggatgctctcgatgtttcagaacatgcaggacaggcaggatgcgcttcagcagcagctccttcaggctcaggctgagagtagggcattcatggctctcatgctacagcagtctggtgtctcagtacctccggttcagtctgctccacctcctccgcttcacgctcctgtggtgccatcgattttgtcaggaccccctgttggtacctctccgctccggccggtcactttggcgttcacctctccggttctcagctctgtctgtccacagccgccagtgccaccagcatctgctgttaccactaccgctgtggcagtatctgtctccgcttctgttccggtagctcctgcagcgcggcctctgtccgagtcagtaccagctccagcttctaccgcagatcctggatccgagactgactctgaccctccgccggcgttcgctctgctgcctcgaccgcgaccggatgcgcccccgccgcctcctcctgcttcagatgtttag

SEQ ID NO: 6309 - DNA, 905 bp, Zea mays
  Peptide Sequence Number=SeqID_49684
ggcacaccccctccagctctccgccgtcggccatgggtcaagcctggggtaatctccaagataggctccaagggcggcggtggaaggagcaccaggtgaggaagatcaccgacaaggtgttcgaccgcctcacggaggacgcccagaagcgcgacaaggaggccctcagattcgaggaggtctacatcgccgtcctctgcgtctacaatgacatcaataagtacttgccggggccgcaccacgaccccccgtccaaggagaagctcagggccatgatggagtatggccaatcgaatatcgtgttcttccggctgttccttgaactggaagcaaaatcccagttgcttcagctgccacagcctacaggtagttcttgggttgagtcattgagtgtggtttatcactggcttggttcctgcaacgcgcaggagtacgacgtgaacctggacgggctcctggaccgcgaggagttcgcggagttcatccggaagctgaccgcggactcgctgtgctcgatcagcgtgaagctgctgatcacgctggtggcggcgccggcgctggcgatggcgaccaagcgggcgacggagggcgtccccggcgtgggcaaggtggtacgcaaggtgcccaacgcgctctacgcctccgccatcaccctgggcgttgtgctgttgcagagatcaaccgagggcgtcgaccacatgctagcgctccgaactcgtgatgagcgctccactaccactagtgaggacactgtgcacaccgatccactcgcatgtgcacgtcgcccctcgtcagttggtcctctgcgtcagcgcctgtctggccgaccggggcggcgtgctcgcaatcgcaaggcgcacgtccgcccgtggccgtgggacgtcgacgcctgccgtggcagctaa

SEQ ID NO: 6310 - DNA, 93 bp, Zea mays
  Peptide Sequence Number=SeqID_49685
atggcgggcggaaaggagctcgccggagctaaggaggggtgtctggccggcgatgaattccctaatgaaatcccacttgagaggcttgtttag

SEQ ID NO: 6311 - DNA, 345 bp, Zea mays
  Peptide Sequence Number=SeqID_49686
atggctgccgcgccgccgcgccgactggccgccgggctgcgcgttagagggccgcgcccaggccgcccgagccagggtcgcgcccgcgccgaggccacgcgcgcaggggccactcgcccgtgccggagccgccgtggccgaggccgcctgcccggccgagatcgacgcgcgcccatgccgccggggctggctggggccgcgcccgcgagccgtacggccgccgggctgcgcccgccaccggggccgatgcccgtcgcgcgcgcctattcgccgtggggccgaggccgccgcgccgactgctcgccgagccggggacgtgtgctcgcgccagggggccgtgcgtag

SEQ ID NO: 6312 - DNA, 198 bp, Zea mays
  Peptide Sequence Number=SeqID_49687
atggaaggaaaacagatgatgatgaggatggttatgatcatgcttatggtaatgccaaacgggacatttgctgagtacgttgatgtgtactcacccttgctttcacaaaacaccaggttgcctttggtgcaatctatgctcagatgctcgagaccaattgatgcagttcttgaggatcttcctggacctgtgggttag

SEQ ID NO: 6313 - DNA, 204 bp, Zea mays
  Peptide Sequence Number=SeqID_49688
ttttacggcatctcgtatattgatgtatacttggtggtctccaatctggctcgagagaatctcgagtgcctcagcggtggctatgagatcgatggttctggttatgactatggtgctggttgtcagcattgcaaccactgctcaggagaagatgaagccgtggaaggagacttccaggagttccaagactacgacgagttctag

SEQ ID NO: 6314 - DNA, 291 bp, Zea mays
  Peptide Sequence Number=SeqID_49689
atggggtccaggcacagtgcttgctctgccgaggctgagtgccgaggttcttttgttttgcttttgttagtcaccctcctgcggggagagagggtaatgaaactggtatatcagccgtgctcacggttaagagcagccttgggatcctctttgattagagatacttcgatcagagatggttggtttacagatgatgatgaggatggttatgatcatgcttatggtaatggtaaacaaggcgtcgaggcggatctccaggagttccaggacgtcgacgagttcgaggattag

SEQ ID NO: 6315 - DNA, 178 bp, Zea mays
  Peptide Sequence Number=SeqID_49690
tgataccctgccggaccacctaggaagtgatcaatggggagtcatgatccccgggcagaacgggaatcacggctcatgggtaaagtgtacgacctcagcagagggtaatgaaactggtaaacaaggcgtcgaggcggatctccaggagttccaggacgtcgacgagttcgaggattag

SEQ ID NO: 6316 - DNA, 228 bp, Zea mays
  Peptide Sequence Number=SeqID_49691
atgggggcgcaggggggagttttgggcgccaggggcgcgcaggccggggcgggccgggccggctgggctggactagattgggctgggtcgggccacttcgcggatcaaaaacccacgacgagcgcgaccactaacggattaaatcgcgaaccgaaatccggaacggaacgagacgaacactcatcatcagacaaagaaatgtgcttcggcatgatgcaacacccatga

SEQ ID NO: 6317 - DNA, 1000 bp, Zea mays
  Peptide Sequence Number=SeqID_49692
atggccggttctaaggatcacaccaagatctccaccaccaacatcatcaagccggccatggaggcgctcctggctgatgaccaaagaccctttaaagacctcgtaatgcgcgatgagaaggaggtgatgcggcaatggaacgaacaacgcgacaaggaagaggcggaactgctgtataaactctccgaacggcgcaaggaggcggcagaaaagtacttgtcacacttcacggtggatcgccaccagaagatcatccgtcaaggggagatcgatatatggaatctctcctacctccacttcagggtcccgctaccgtccgacccgatgcaggcccgcacacaaaacactcaagtcgcaccgtacatggtcgaaccatcagggtacaaccccgaacaattcggccccatcacggaccgtccggtgcatcacgccggaccgtccggatatgttgcggaccgtccgccatcttacgtcggaccgtccggatatggcatgaaccggccgacgtattacaccggaccatccgactctacacgagtccacgtgcagactgcccaagtcgcgccatatatgaccgatctgtctaggtacagccctagaccattcagaccgatcgcggaccgtccagttctttacgacagacggtctgggtacgagactacccacgtagcaccttatacggctggacattccggatataccttcggactgtttggccaggtcgcggaccatccggcctcttatgccggaccgtccggatatgcgtacgcagagccgagagctgcgcaatacgcacagtttccacattcatcgcagcaacattatggtgcctcaccagcaacacattataatcatgccataccacctcatggacatagggctgaatactattcggccacgagagagcctgagaggaatagggcaggagctgacatggcggagaggatcagagacgaggtggccgggatgttcagagacaaactcggtgttagtgtgtcag

SEQ ID NO: 6318 - DNA, 735 bp, Zea mays
  Peptide Sequence Number=SeqID_49693
atgacccaggcaaaactgtccctgccctcgccacgccgcccgcccacacagagcagccggtcacggctgtgcatggccacggcgcgaccgagtaggcgtctggccacgggcgacgcgcacgccacgccggcggtcggccccgtgtccggcggcggcgggcgggcgcagttcaacctgtcgtcgggcgcggccacggccgtggtgttcgtgtccatcctgctctgcttcgtcctcctctgcacctactgccgctgcgcccggcagcgggccatcgcgggggcgcgccgccgcgtcatgcgcgacctggtcgtcccgggcgtgtcgctcttcctccgcccctccgcggccgcgctgccgcccgtgctgccgtacgcggccgcggccgccaggaagaagggcctgccagaggactgccccatctgcctcgacgccttcggcgaagacgacggcgtcagggtcgtccccgcgtgcggccacctctaccacgcgccctgcatcgaccgctggctcgacgtccgcaactcctgccccgtgtgccgctgcgccgtggccagcctctacgccgccgaccgcgacaggggcgccgatgcgttgaccgccttcgacgacgacaacgacgatcaggaggccgtcctgcagcgcgtggtcgcgatgatcgaggccataagagacgagcagcagagagaagacgcggtggcgcggcgcgcgccggccggtggaggcggagggtcatga

SEQ ID NO: 6319 - DNA, 561 bp, Zea mays
  Peptide Sequence Number=SeqID_49694
atggctgccgcgccgccgccccgactggccgccgggctgcgcgtcagaggaccgcgcctaggccgcccgcgccagggtcgcgcccgcaccgaggccacgcgcgcaggggccactcgcccgcgctggagccgccagggccgaggccgcctgcccggccgagatcgacgcgcgcccatgccgccggggctggctggggccgcgcccgcgagccgtacggccgccgggctgcgcccgccaccggggccgatgcccgtcgcgcgcgcccgttcgccgcggggccgaggccgccgcgtcgactgctcgccgagccgaggacgcgtgctcgcgccagggggccgtgcccaggccgcccgcgccgggccgccggggccgccgaggccgagcccttgtcgcggctgcggctgcgccctggccactacgcgctggcgagccgcgccgggccgcagcgacgccgctgcaggggggcggggagagggaggggcgggggaaggggagggcgagggcgagcggcgtcgagggatagagagggacgtgcgcgggatcagggagggagagaaggag

SEQ ID NO: 6320 - DNA, 528 bp, Zea mays
  Peptide Sequence Number=SeqID_49695
atggcggcacgctgcagcgaggaggggccagtggggcttaccagctggggtgacggcgatggcatgctgcttggcgcttcggtgaggaacagtggcgagcgcaacacggactccttgcacgacggcgagctcagcgtggggcggctgctgtgcagttgcaagaatgcggcattttacgagatcgagggaggggagagcaggggagagaatgcaaccaaggtcaagataggtaaaacatcattctcaaatcgaaatgggaaagatgatatttcgaaaggtaggcataggcaaggtgtcaaagaagggggagcagtcaatgatgaaacagatgaggcattatccctgaacagggatggaaaagaggaggcttcaaagggtaggttcaataaggcctcaatatcacaagggtcaaaggcgataatagacaagtacataagggagaagacgaaagcacaaaagagccagtggtataagtacaacaaagaatggaggtatgtcaaggcatacgcggtaaagaagaggatatag

SEQ ID NO: 6321 - DNA, 105 bp, Zea mays
  Peptide Sequence Number=SeqID_49696
atggggctcggtgtatgcggctcgctctgccaaggtaaagaaagagaagaaggtgtcgaggtggatcgccaggagttccaggacgtcgatgagttcggggattag

SEQ ID NO: 6322 - DNA, 2478 bp, Zea mays
  Peptide Sequence Number=SeqID_49697
atggctagatcgttcaacatttgtccgcagatcgaccccttggtggtcacgcgcgtccccggcgtggccctcgacatgctgttcctcgtaatcatccaagcgcttgccgtcatcctcctcgccaagttcatccacctcttcctccaacgctacaaccagccgagcgcagtctctcagatcctcgccggagttgcggtgggcggcatgggcctgcgcaacgccatcctgcacgtggacgtggacgacgtcgaggacatgtacggcggctacatcaccttggcgcgcgtcgtgtacatgttcctcgtcggcctcgacctggacctcgccgcgctgcggaactccacgcgccggtgcgtcgccctggcctacgcgaccgtggccgccagcctgctcgtggccgccatcgtgtccagcgggatgtacggcagcatgatgcactccccggtgaagacgcccgagctgctcgccgccactctcatgctggcgctcaccaacacctcatccatcaccatctcgcggatcgccggcgagctcaacctcacagtgacggagaatggccggctcctcgttgccgcggccatcatcacgaacctcatctgcgtcgtcggcgacagcgtcctgtcgtccacggcactggccaaggagaagagccaggacctgtaccacacctcgccccagatcaagaagggcttcctggcgctcgccgtggcaggcgtcgctgtgtggcaggtgcgccccgttgtgacgcgcatcaaccagcgcaacgttgggcagcaccacgtcaggagccgcgacctggtgatcatactcctgggcatctggttcatcagcaacatacagcagctgctgggtttcgacgggatgccgacgagcctcgcgctggggatggcgttcccgagggaaggccccgccgcgcgttccgtcgccgacgcgcttatgccccccgtcaacggcttggtcctgcccttctacttcgctaccatcgggatgaggctcgactacaactccatgtccggcgccatcatcgtgcccggcctgctactgacgctgctcggcctggtggcgaaggccatcggcgccacggccgcctccacgtacctcaacatcccaatctccgacgcgctccgctacagcgtactgctcaacgtcaagggccacgtcgacaccatgaacatgaagttcgccaaatcggaaggggttggtagctactccgcccaagtgtgggcggagcaggcgctgtacgcgatgatcatcggcaaccttatcagcaccatcatcgccgggccggccgccgccgcggttctgagcagggaaaaggaagagtacaagacaaggcaccaagccatggaatcgttgagcgcagagaaagagctgcgcatgctcgtctgcgcccacagcgcgcacgccgcgcccggcgtcctcagcctagtcgagctcctggtgatcacgccccacgagcagccggccgtgccagtcctccatttcttcgaggccccccgagaccgatccgcccggacgccgtaccaccagcggacgcggggtgacgaaggcgccgaggacaaaggcggccccgatcccgttacgcagatgaacatggtggtcgacgtgttctccaagacgacgggcatctccttccgccagatcgacgtggtgagcctcggcgcgtctcgggacgcggccgtcgcctgccgtggcgcggaggaagcgcacgccagcctgctactcctcccctgctacaaggagcagcggttcgacggcaagatggcgtgccgcctcgaggagcggtggaagctgaaccacgacgtgctggagcgggcgccctgcaccgtggggctcctcgtggaccgcccgtaccgtggcggcggcactagcttccaaacgcccatcgacatcgccccggagaccgggaggacgctggtgcatccgtgcagcgaccgtacggtgacccacgtgatagcggccgtgttcctgggcgggcccgacgaccgcgaggcggtgtccttcgcgtgccggcttgcggagcacccggccatcgggctgacggtgttccgtttcgtgaagcgcagcacgtacgacaccgtgacgtcctccacctcacgcgccgccgcggcggtggcggccggcggcgacgagcttgacgtgccgttcaaggaaggccacgtggacgagcggttcctgtggcggttctacgagaactacgcgtcacgagagctggccatgtacgtggagaaggtggtggagagccccgcggacgtggtagagacgctagaagggatgtccggaatgttctcgctggtggtgctggggcggggcggtcggcagccggtggagctgatggccgggctggagcggtggtcggaggccggcagcgaaatagggcctgtgggagagatcctggcgtcccacgagtcgctagagatgggctccgtgctcgtcatgcagcagcacacggtggcgctctcgccgccatgccaatga

SEQ ID NO: 6323 - DNA, 663 bp, Zea mays
  Peptide Sequence Number=SeqID_49698
atggggacgccggtcttgttccctgcgggcccgagtcagctcgggggtagggtgatgatggcgcctcctgttgacgtggctggtctgcgccctaggttgggcgatgtggaagctcctccgaagctgaggtcgagtccgtcttccgtggccgaggtcgggtccgagcccctgggtcgggcgaggcggagaccgtcggctgagcggagttcgccgtcttctggggctgagcccgagtccgagccctcggtcgggcggagcgaagttcgccgtcttccggggcttagcccgagtccgagccctgggtcgggcggagcggagttcgccgtcttccgggactttagcccgagtccgagccctgggtcaggtggagcggagttcgctgtcttccgggactttagcccgagtccgagccctgggtcgggcggagttcgccgtcttccgggacttagctcgagtccgagccctgggtcgggcgaagcggagcttcctatggtgccttcgaccgggcctcactgcctgtcagcctcactctgtcgagcggcaccgcagccggagcggcgtaggcggtgctgtctttctgtcaggccgctttatgctgatgggggttaccagcttagaattaggagccttgagggtacccctaattatggtcacctacagtag

SEQ ID NO: 6324 - DNA, 651 bp, Zea mays
  Peptide Sequence Number=SeqID_49699
atggatcttggcacacatatgctatgcattcggttttgcccccagaaccggcatggagtcatcctggaagacagctcggaggaacttctgtcgacgcccaccccgttggcaaagtcactggccttcgcagctaggtcatcgacctcagcaccgcctgcaccagccgttcaagctcctgcacccggaggcgacgacccagacgactctggggacgatgatgaggatgacgatgatgacgaggatgacgaggaaaacatcaacgaggaggccaacgatgcccagcaggactacttcatggggtttggccgccacacctaccagcagcagctgcatgacatgaggttctgccatcttcctctatgtctgagtggaggaagccatatcagcattgttccaggtggagctggtgaggatcgcctcaacaccctagctggtgtagtggccggtctcaacaccgacctggacagtgtcaccctgaatctctctagggtgcacttggagctggaggatgcccatgctaggattgcagccctagaagccctacttcaaggacgggatccgcctgaagcccaggtcccctccatggcgttgtctcctccccacaagaggattcactatggggaacccggatccatcaccaggctgctctga

SEQ ID NO: 6325 - DNA, 489 bp, Zea mays
  Peptide Sequence Number=SeqID_49700
atggcctcagggcgaatgccgctgcaaccctaccctcgcccacgccgacgctcgaggggcgaggacaagtacaaagggccggaggcccaaagcgcggatggtggcggtgatcccgtcggcgacggggacttctcgagccgcctccgccttggcaccgacgataggggccgtcagcccgccgacagatccccactcggatcctcccggacgagcagggcaccgaccttcgcgcggaggcaccgtaccggtgtaaaggcaggaccgccccagaacacgaacaccgccctagcagcgcgcggcatcttgggcggtcctcccgtgcacacggagagggtgacccacgaacccgcgcgggaggtagagctctggctcagcccggcctccaccccagcgaggatgatgaacatccttgaagctgagggtgggactaagatcgcagcccggcttgcttctccccacccaggggctggtggtcaccgtcttgggtga

SEQ ID NO: 6326 - DNA, 435 bp, Zea mays
  Peptide Sequence Number=SeqID_49701
atggtcaatcccaaagatcacaacaacgttgtgctagacattaacacaaggctgactaactcgccgactgatgaggatgagaaattagaagaccacatgaaaaggctggacgaggaattccaacgacaacaggctcagataagcaaggtggcgaaaaagtggtacctctcgcacttcaaggtagatcaccaaaagaaggtcgtcaagaagaggaaagtaaagtacgattcactgtcagccttgctgcatcagctccccattgccttcgtcaaagcgtcgagtcctgcgaagggtgtccctgcccgctttgcctccggcggaccagcggctgcagcgaaggcctcgagcgaagggtggcgtctttgccttcgctccaacatttgccctccgagggaccagttcgacaaagtcacctggtgccgaagacgtcgctag

SEQ ID NO: 6327 - DNA, 528 bp, Zea mays
  Peptide Sequence Number=SeqID_49702
atggcatggctacgtaccgtcggcggcggcgggcggtttgcttcactcgagccagaacgacggcgagcaaagggagcagcggaggaaacggagcagcaagacggcgggcggctagggttttacggagcgcggaaagcagaattcaaacagcgccgccccccgcccccttttataggcagggcgcggctcctcggaaaacccacaacccgacaggccgcgacgcttcgggaaacccgcaatccaacagtacgccgtccatcaacggtcacatcaaaaacccccgcggaaccacttcgagcgagggcagcgtctccgccatctagcgacgtcttcggcaccaggcgtctgagggcacatgcgtccttaacacaagacgctgggcactcagacacctataaatacccccgcacagtgcccgtgagaggcgagatcaacagagctattgcccccgtgcacgtaaccctgttgtcgccattgttcacccccgttggcccacttgcagcagagagcaagttccaacagacgtag

SEQ ID NO: 6328 - DNA, 1260 bp, Zea mays
  Peptide Sequence Number=SeqID_49703
gtggctgacttcaccagccgtactgcgtcgggggcccttacggcgacgttgtccgccgaggtcgagagacttcggacgcaacacgcggacgctgtccgtgagaagtcggcctccgacagcaagtgccgcaagctggcggagaaggtggccgcccttgagaaggagaaggcagacctccggcgccagctgatggaggagagaagggaggccaacgaagccatcgccaaggagcagtctgcgcaggcggaggccaggctggcgcgggcggagggcaatgtcgccaaggagctcgccggggagctgcagcggcggcttgctgccttcgagagccgcgcggagggggccgaggccgcggcgcgagcggaggccgaacggacgcgcacgcagctcatgacttcatatcgcgagctgggtgtgcggacgagcgacttcgaggtgccggagcgagaggccggacttcgctgtctggagtgggtgcaggaggaactgcaggagctccccactgtcttggcggggttgatggcgttcacctccctggtcacctgcgaggcagcgatgaacgcgctctctcgcgaaggctgccggcactttgaggccctcgaccaggtggatgaagattttgggcgagatatctttgaggtcgaagaccccgtggtgaaggagtccggcggggccctctatgaccggatgcggagcgcggcgagcgggtggacgatttttggggcgctgaacagcgcgccgcctgagccggagaccacccgtgcggaggccgccactggagtcgccccggttcaagattttgggcctgcgcacgcaaccgctactactggttttttggcggcttcgaccgcggaaggtggaaatgaatgtggtgggtctgtttctgagttttttgattttactgactctgggagctcggctgaatggaccgaggagtcgtcggaggaggacttggactattttgcggccctggacgaggctgcggcggaggctgcgctacatgctgcggacgcgccaggcgtgcccggtcctagcaccgggcaccgacgacgaagggcggttgcgaagcgtaggattagtgcggaggaaggggctcgtcttcgcgttagtagggttggtcggcaggagctgctgtctttgccggccgtctcgggtgtgggggaaggggagctgcgaagcctttttgctggtgaggagcttaggataatgttatttaattatagagagatggggattattcctaaggttgagccgatgtag

SEQ ID NO: 6329 - DNA, 894 bp, Zea mays
  Peptide Sequence Number=SeqID_49704
atggagcttgggaggcgccatcattgcctatctggcggagctggtcagatgggacaccggtcttgttctctgcggcccaagtcggctcggggtagagtggtgatggcgctccctgttgacgtggcgggcccgcgcccgaggccgggcgacgtgggggctcctccgaagctggggtcgaatctgtcttccattgccgaggccgagtccgagcccctgggtcgggcgaggcggaagtcgttcggcacaggccagggcggagtccgagccctggggtcgggcgaggcggagttcgtcgtcttccggggccgagcccgagtccgagccctggggtcgggcggagcggagttcgccgtcttccgggtcttagcccaagtccgagccctggggtcgggcggagcggagttcgccgtcttccgggtccgagcccgagtccgagccctggggtcgggtggagcggagttcgccgtcttccgggtcttagcccgagtccgagccctggggtcgggcggagcggagttcgccgtcttccgggtcttagcccgagtccgagccctggggtcgggcggagcggagttcgtcgtcttatgggtccgagcccgagtccgagccctggggtcgagcggagcggagttccctatggcgcccctggcgaggcctgactgcctgtcagactcactctgtcgagtggcaccgcagtcggagtggcgcaggcggcgctgtccttctgtcagaccgcaactggcgcgctggttgcgtgacgcgtgggcctgggcctccaagctggcgtgtcagaagtcggagaagcgcgtccacctggcgcggttgcatgccgcctgcatggctgcccgccccttccgcccgttggtctgggcaaaagtggggggtcgcttgtaa

SEQ ID NO: 6330 - DNA, 651 bp, Zea mays
  Peptide Sequence Number=SeqID_49705
atgaaaaccccacccagcacccgccatccaacttctcacgcgctccgagcccaccccctccccaccccataccagcctcttgcctcctttgtgtcgactgtgtataaagtcgcccctacttgtcccatgccgtccctggccataccttttgatctagctgacccgtgcgtggcggaggcccgaaccttcacagccccagctagaagagcccgagcgctaggcccattcaccccacggggtcacaccagatcgccaaccgccctctccctcacgccaatccaaaccctagccttcgccagcctaccgctcccctccgtctccccacccgcggcgcacccgcggaccggccccgtgctcgacgcggctaccggggagggggccgccggtgccaccaccgtgctgctcgacgtgaacggcatgatgtgcggcggctgcgcggcgtgggtgcggtccatcctggcgtggacgctcgtcgcgctctgctgtggctcgctcggtatccatatcggccacggaacgtttttggatctgttgcataatccttatgtgaaatgtggcattgctacaactgctttgtttgggcctggaagagggagtaacagacttatcctgaagggcatcgagcaaactggctcatcagtatgcaagtaa

SEQ ID NO: 6331 - DNA, 642 bp, Zea mays
  Peptide Sequence Number=SeqID_49706
atggagttcccatttatgatttatgtcacttacgtatcagaattcctggattccaaatctgagacagatgttgatgttgactataacagcttgtactcaaagcattactttctacagggtgagaaaactggtagagatgagaatgaagtccttaaagctattgattatgtgcatgaattgagtatgaggtgccctggccaaagcgagtgttctactctacccaaaaactttagaaacccctcgtatgaaaaagcttcatactgtcaaggctgctacaatggtcttagtaaaatagtaaaggaaggccctgaatgcccaaaattggccacaatatttcaccgtcaggtggatttagggagcacgaggacgaagccgctgccagaacagaaggcactggagatgatttttgagaagcttcaaagtgatgagggtgttcattgggcagtgcaaaatggtctccatctatcaagaagcactgttgtgtacttcaagcacaatgatgtggcttcacttgcaagcactttggaaaaacttactcgtggaaataaacgtgctgaaaagattagacgctacattgttgtagaatccatttacaagattatcccagtgttttggtttgatttagagtacacttatgtatga

SEQ ID NO: 6332 - DNA, 170 bp, Zea mays
  Peptide Sequence Number=SeqID_49707
atggaggccaagtcacatcatcaaccaaaccaaggaggtacctgcaaaaattatgccacaagcaaggctgagtatgctaatactcagctagacttacccgcagcatggatcaagcaatctcatagctgcgagaagcagacaattcgaatcgagtttttaacctttgcaag

SEQ ID NO: 6333 - DNA, 81 bp, Zea mays
  Peptide Sequence Number=SeqID_49708
atggcgatggaaggaagagcgccgccacccatacttacggccaacgccgtcgtgccgttggaaaataaaatggaaatctaa

SEQ ID NO: 6334 - DNA, 396 bp, Zea mays
  Peptide Sequence Number=SeqID_49709
atgaacacgggtgttcccgacgacctggcgcggttcagctcaattgaatgggtcgaggagcatcaggagaacctaaggacactcaaacgggagatcagagagcatgaacagacctggaacaagctagccacggcgaggactctttcacggtggtggaaaacagatttgggggaactgagcaattcgtgggctctagtgagtaattggaggcacgagcgggtggattggatgctggaatacccaacggagccgagggtgtgctcaatttatagggctcttgagtggtggccggtgaatttgaacttgcgcggtggcggtcggagaggagttgcactggcgcacacgattggtggccattaccgtggcaacctcaccggtgatcactggatgggctaa

SEQ ID NO: 6335 - DNA, 762 bp, Zea mays
  Peptide Sequence Number=SeqID_49710
atggtcgtgatgggttcaacatcagaaaagatgtacctctgccagcccttcttcctaacgggcgagatatgcatgtgcaagtacatccccacggtgggggcgcacatcctgcacacgaaccgggagctgctagaggcgctgtgtgtgaacctccgtggcatggccatcagcaatgggctcacgcacccggtggcgaaggtggccacgcacgcagacttggcctacttcctgagcaacttgaacgcgcggcagaagcaggagctagaggcactgcaatcggagttggtgtcactgacacatgcccagcggtgggtcgcgtcgtcggacatgcgggggcaggtgttgtcgcggttgcagaacatgacggggcaagccacgctgtacgactatgcgaagcgggccaaggcggcgttggacgtgcgtggggacgtggcgtgggaggagtgcatcgacacggtgggcgcggcgatgcaagcggacgtgatgcgcaacgtggtgccgcagatggagtcgctgttgtggagcacgacatgcgtgctgctatatcagggcgtccgcgacctttgggacgacgtcgtgtccacgaaggcgtggctgggcgggcagtcgggcgcgttggcgcacttggtggtgtatggcatggggcacctagtgccggtggacaacgggcgtgtggcacaggagatgattgagggatgggatctggggacaggaatgttcagccacggtggtggtggcgacgtctggagtgccgtcgtatga

SEQ ID NO: 6336 - DNA, 216 bp, Zea mays
  Peptide Sequence Number=SeqID_49711
atggctttgccgagagccgcactcggcaaagttcggctctcggtaacgaggctcgttaccgagtgcaggacactcggcacaggtccgcactcggcaaagcaggcgctcggcaaagggccgtcagcgcccgtcctaaagctgacggccgttagtctttgccgagagccgaggactggcactcagcaaagaggcttctttgccgagtgtcttctatag

SEQ ID NO: 6337 - DNA, 579 bp, Zea mays
  Peptide Sequence Number=SeqID_49712
atggaggcgaggatgatggcggagcgccgggcagatcatcagaggatggcggagatgttccagtacatgcagagccttggcgccgcacagggcatcgctccgccacctccattgttccctccagttgaccctctctcttccacactcctggccaatctggggcggcatccaacaaccctccggaagggttcagcccaacgcagccccgggacactcggcaaagccgccgtctccgtcacccggcgccgtaacggctgcttttctttgtcgaccttctttgccgagtgcgacactcggcaaaggctttgccgagtgtttttgcggctttgccgagtgcttcgggcactcggcaaagcctgcgaatccgcgtggacggtgcaccgcggtgaagggcgcgagcacgacggcgtgggggcgcgatggggtgacggtgtaggggacgagctgagcagcatgaacgcgctgctggagaggctagccagctcagatgcgcttgatccgcagaccaaggagtggagggaccaggtgagggagatgagctacgacatcgagggttgcgtcgatgattacatgccctag

SEQ ID NO: 6338 - DNA, 261 bp, Zea mays
  Peptide Sequence Number=SeqID_49713
atggcgccccgcacgctctatgacgacgacagctctcagcccccttacggaagcaagaggacgtcggcaaggactcaacagccccgacagctgtccttccgccaggctccagcgctcctccaacggccacgacaccacacgaaccggggaccccccggtctcgaaacgccgacagttggcgcgccaggtaggggcctgttgcgtgttgacgaacagcttcccgtcaagctccagatgggcagtctccagcaacctttctag

SEQ ID NO: 6339 - DNA, 255 bp, Zea mays
  Peptide Sequence Number=SeqID_49714
atggtcgagtggattacccggtccacgtactccggcggggttgagagctccggcgacccgtggactgacctctccggcgaagccttcgtcaaagcgccgagtcctgcgaagggtgtccctgcccgctttgcctccggcggaccagcggctgcagcgaaggcctcgagcgaagggtggcgtctttgccttcgctccaacatttgccctccgagggaccagttcgacaaagtcacctggtgccgaagacgtcactag

SEQ ID NO: 6340 - DNA, 432 bp, Zea mays
  Peptide Sequence Number=SeqID_49715
atgcagtcatcgaaggggaaggaggcaacaatggtgtttggggtgtttgacgaattatatttgaagaagcagaaagcaggacctagcaaagtcatggctaaggccaccacatctaccggccctgcagaggcggccacaaagatgacaaccgaggcagtcgtattagccctttcgagctctatgattgataaggtagaagagccaagtgtgggtggtgctcgtctagccgtggacccgtttgtgacagacttcaaggtcgccgatatcgagctaacattggaaatgaatgcgttggcgccaagttattataattggattgtttttattttgaaaggcattatcttaattatttcatttctagatgatcctgcggtggtgccgctggggtattcgtcactaggtcgtcctatgtcgaaggcgggcatagggtag

SEQ ID NO: 6341 - DNA, 813 bp, Zea mays
  Peptide Sequence Number=SeqID_49716
atggagattttgatgaatactgaatctaacgatgtgccggtcatcttcctgtgggagattacccatatgattcgtacccttcaaaccacccgagttaacaccaactacgcccctccacctcggcaagctcctgtctacccagtggtagtggaggaagttctagtggatctccctcgcattcgagtggagcatggagtcatcctcgaggatagcttggaggaacttccgccgacgcccaccccattggcagagttactggccttcgcagctaggtcatcaacctcagcgccgcctgcaccagcagttcaagctcctgcacccggaggcgacgacccagatgactctagggatgatgatgaggatgacgacgacgaggaggatgacgacgaaaacgtcaacgaggaggccaacgatgctcagcaggactatttcatgggcgatgctgccaaacggactatgtggtctctcagccacacctactggcagcagctgcatgacacgaggttcaggcatcttcctctgcgtccgagtggaggaagccagaccaacattgttccaggtaaagctggtgaggatcgcctcaacaccctaggtggtgtagtggtcggtcttaacaccgacctggacagtgccaccctagatctctctagggtgcacttggagctggaggatgcccacgccaggattgcagccctggaagccctacttcaaggacgggattcgcttgaagcccagttccccgccatggcgttgtcccctacccgcaagaggattcgctatggggagcctggatccatcaccaggctgctttga

SEQ ID NO: 6342 - DNA, 624 bp, Zea mays
  Peptide Sequence Number=SeqID_49717
atggagggaggcgagagcaagagccggcggcggcgcgaagccgaggtggaggagggagaggatatcgccgacgaggaccgagatggtggggcggctcgtgaggggatggggggtggcgacgcgcgcgaagccaaggaagtcgcgcgtacggcacggcgccgacgccggactcccgaatccgcgcgtgcgctgcctccatctgcgtggcctcgcagcatcttgcgcgcctcctccaccgtgaggctcgccgcggacagcgccgcatccggctcccgcttggccggcgccagcgccggcgcgggcggcacgaggccgtcgaggttgatccgcaggaacgcgatgccgaccccgaggtcccggatccggtcggccaggggcatgaagcagtcgggcggcacggcggggcggaatgccggctgctcccgcaggaaccgccggagcccgaacgtcgtcggcgctcaaccgcacggcggcaaggaggaggcgaggcgatggcaggaccttgatgaccacgcggaggccgaagcgcgtgggccggcgcctcgggaggaacatgaccgaggatcccccgccgccggtggaggagagggagggggacagagctcgcggaggttggcgaggtag

SEQ ID NO: 6343 - DNA, 1065 bp, Zea mays
  Peptide Sequence Number=SeqID_49718
atgggcactgcgcagcagcacgcaagcagggagggggtggagctcgcgcccgtggagcagggaaggcgctcggctgctgggctgctcgccgtggacagcagagggaggcgccatggttggagcagagggagagggagccggcttccatggggaagaagggaggccgaccatgggagggagatgacgttggctgtgctccctgcttgcttcgtggggaagaagagggtggcgtgggggagatggccgatggcggctagggcaggagatagagtctgtgaggagttgctcccccgtgcttcctctggaggcgccccaaactctggagtagctgctaaaggaggcccagacgacggaggtggcgacgacagctcgagccacgacaccgacttttctgctaaccaggagccggaaggatgggttgctcgacccatcacttgcgacgctgctcgcgggtgtcacttccacgatgcgctcgacaccctgctacgtcgggcacttgaccgacgtacttggtctatcgagtatcgctgtgtggtctaccagcatagtcgcggggtctacccggaccgctgggaggcgacctgcttggtgcgccgtccggagaacagtctccagggtgcggaggcctgctcagagcattattctatctctgagcgggactcagctgaggcggccatgcaagatgccgcacggcgtgcgctttcgcactattgttcagtgcttggtggggtagctgatggtctcaacctgaagtattacccccgtcgtccatctggcagcacaggaggcgtgattgtctcacctgttggtgacgacaatcctaggttgagcagcacagtcaacctagccgccgtgctaaacactgagctggaccatgcgctagacgagctgagtagggctcgtgctgagatcgccctgctgcggggtgagcgcgcggagcgtcgtcacctggatgatggttcccccgctcccgtcgggactcagcgcccgtaccgctcacctcggcatggacaccagccttatggcaatcccgactgcaagaccaagatagacttggaaccatag

SEQ ID NO: 6344 - DNA, 915 bp, Zea mays
  Peptide Sequence Number=SeqID_49719
atgaacaaaaacactggcattcaaagtgccattacaaacggaactccggttccccctccgcaggtacgaacaaccccactccatgggggtgggcctgcggagcaacagaagaccgacgaacggcgcgccgtcacctgctccagcagcggcgacgacgacgacttctgctctggggggccgaacagcggtagcactgacctcagggcggatgctgccgccaggaggcccccgcacatgccaaaacttgtgaggcaaggatgggcagaaggccgtagagttgaaggtcggtccgtggccggccttggctatcccgccggcagaagaacctcttcaagctaccgtggcggacgccagcgccgcgagcggctccgaagccactcgcgtccgagagccaggcacggtgcagctgccagcgccacggacgacgaccgcccttccctccgatcactgagtgaaggagcgggccgccgcccacgcgggggccgacctcaactcagcacactcccctccccagccctggagatgaaaatccttgaggctgagggaggggcagaggccgcagcccggctcgctttcccccaccatcaagccgaagagcagaagaagccaaagcgccgcgcgtggtgcacacaaccgcccagcggttacaagcgaccccccacttttgcccagaccaacgggcggaaggagcgggcagccatgcaggcggcatgcaactgcgccaagtggacacgcttctccgactcccaacgcgccagcatggaggcccaggctcacgcgtcacgcaaccggcgcgccagatgctgcacgcaagcaactgcaccgccacttgcgccaccatcgcgcctcttcggttgcggaaccaataccgtgactcgaggcggcccagcgcacgacctagcagcgccagcctag

SEQ ID NO: 6345 - DNA, 297 bp, Zea mays
  Peptide Sequence Number=SeqID_49720
atgagcttaagtcgaaggacgactccacttcaagagggggaggatgatgaggacatcacttctatacatacaataaaatggaccgataacacgatcgtgtgcacgacagctaattctccagagcttacgcttagggccatggatgttttaatgattaggaaccttggagaggaccagaaaggacttgggaaaggcctagttgttgaggaggaggagcaagggtgcccacaacaggaaggagatcaagtccgactcggctgcgactccatctcgggttccaggaccagtctgcactaa

SEQ ID NO: 6346 - DNA, 1185 bp, Zea mays
  Peptide Sequence Number=SeqID_49721
atggaagctaaggcaaaggaatttaatgaggtcatacaagaacagtattatccttggtttgcacaatacatggtcatgaaaagggcaagcattgaaccaaatttccatgatttgtatctgaagttctttgataaagtaaactcaaaatccttgaacaaggaaatactgaaagccacatatgagaactgcaagttccgaggagcgctccttgctaaaaacctaggcagttggttgggaaagttcaccattggtaggaatcaggcactaagggctaaggagattgatccaaaatctcttatcgtggaggcatatgagaaaggattgatgattgtggtcataccattcacttcaaagatccttgaaccttgccagtcaagtatcgcatatcgacctccaaatccctggaccatgggaattctaagtctacttgctgaaatttataatcttccaaacctcaagatgaatctgaaatttgatattgaggtcctcaacattcctttttttgatagtttctttattgactttgtatctgccctagctacccatggccatgctaaatgttcttttgggatttcagcccatgtatgccactggtgtggtacctggaaaggtgataaaatatgtagtagttgtaagaaagcaagatactgttctgagaaacatcaggcactgcattggcgtactggtcataaaaatgattgcctccagataataagttcttccgctgcttcaaattcagttttgccaactattggaaaagttcctgctaacacttcttggccagaatttgagataaaaatagactatgaaggtatatttgattccaatagtggtgatgagaataactcgaagttgttggtgatgcaaagacatgggaaacctgatgctatgatgcagtcatggatggatcaatttgaggccgattctgacaacaaatgtgggacatcttttcaagagcgggtctcaagagcaccaaatcaagtgttgaggtattgtcgagaaccaaatgccaaacgtaacatgtgtattatgcaggcaaggatcatcaagtttgacgtcggcaacgtggtcatggtgactggcgggaggaacaccgggcgtgtaggagtcatcaagaacagggagaagcacaagggcagctttgagaccatccacgtgctgcttggagctttttgctatgtctag

SEQ ID NO: 6347 - DNA, 864 bp, Zea mays
  Peptide Sequence Number=SeqID_49722
atgagattgtatgtgatgattctggtgaggacccgacctatagcagcagatcatcttgagtactacagtgtcacactatatgctgatttaaggggaacctgtcagttcgtgattggtacagccaaccaactcatgaaatactgttgtgtacagctcatgaaatactgggctctccagaggctggtaaccccatcagcacaaagctgcaaaggcctgatgggtgcgattaagtcaaggatcggtccactcaagggacacgatctcgcctcgcccgagcccagcctcgggcaagggcagctgaccccggaggatttacgtctcgcccgaggaccccctccaagcaacggacacaccttcggctcgcccgatgcccagtcttcaccaagaagcaaccttggccaagtcgccacgacgaccgaccgtatcgcaggagcatttaatgcaaagggctcggactcgggctcagccccggaagacgacgaactccgcatcgcccgaccccagggctcggactcgggctcagccccggaagacgatgaactccgcatcgcccgaccccagggctcggactcgggctcagccccggaagacgacgaactccgcatcgcccgaccacagggctcggactcgggctcagccccggaagacgacgaactctgccctcgcccgaccccagggctcggactcgggctcagccccggaagacgacgaactccgcctcgcccgaccccagggctcggactcagccctagcctcagccgacggtctccgcctcgcccgactcaggggctcggactcgacctcgacctcggcctcggaagacagactcgacctcgacctcggaggagccaccgcctcgcctaa

SEQ ID NO: 6348 - DNA, 90 bp, Zea mays
  Peptide Sequence Number=SeqID_49723
atggctaccgagctcagggatgccaggaacaggcttgcttcacaggaactgttgctggctcaggagatagaagccagaaaggaaagctga

SEQ ID NO: 6349 - DNA, 807 bp, Zea mays
  Peptide Sequence Number=SeqID_49724
atggaggaccttagtgttccagatgatctgacttatgcggagtaccctatcaagattctggacactttgactcgagttacaagaaataaggaatatatttaccttccattaatatatgaattgataaatttttaccaaaggtgcttgcgtgcactccatgtcaggtggggccgggcgaccagcgcctccctcaacctcgcgccgaagtcgtcgcatgccatttccactgactccgtggaacccacgtggggaccgaatccctcgctcgcgcaagccaccatcctgcgcatcacggcttcgagtgggacccaccggtcgagtctatccccttctcccttccgatcttttctcggcctcgtgcgatgctgcgatcagaacctcgtgcatcaccataagaaccgtgccctcatcctcgcggtcgccaatggcacagaatccacgcgggctcaacaaccctgccgcagcctgcgcatgcctataaatcttaggttccgccattaccgtagcatcaccaccgcggcaactccacacacaaagatagagagggaaaacaagggaggccgctgccacgggcaatcccttcgtaggtcgccggttttgcctctgtcggtggtcagggagctttgcctcgatacctggggagcggtgaattcatcgtcggtgttggacttcgccatggttccgccgtgctgcatgggcaaggccactgccgccccaatccatgacgagcaagctatagatgatcctgaggttcagctggtagagactgctgagcaggagcttgtggaaagcaagttgtgcccttga

SEQ ID NO: 6350 - DNA, 147 bp, Zea mays
  Peptide Sequence Number=SeqID_49725
atggcgaaatccaacaccgacgacgaattcactgctccccggctgccaaatcccgcagggatttataggcacgcgcaggctgcggcagggttgttgagcccgtgcggattctgtgccattggcgaccgcaaggatgagggcacttga

SEQ ID NO: 6351 - DNA, 255 bp, Zea mays
  Peptide Sequence Number=SeqID_49726
atgagtggtaggaaaacaaagcacactgttaaggggtttcttaatgtggctagcaggatagtccctggtgcacgttcccttttccaagggagttcttctagccaaagcagacaggaggaagagaaggacgaggaggaggaggtgcaacaccatgaggaggaggaggtgcaggcccatgaggaggaggagaaggaagtcgcaggcatagatgctgaggcggatgacgataccaccgaggctcctgtcgttcgatga

SEQ ID NO: 6352 - DNA, 1626 bp, Zea mays
  Peptide Sequence Number=SeqID_49727
atggaggagatggagacgaacacggccacggacgcggagcgaggggccacggtttttgctgttggtgaacagatcaaccagattgttgttgggaggaggagaggaattggagatggcaagactgtgaagcgcgatgtttggagtcccaaatatgcaattctcttggagcgagctccgcagaccgcagcaggttactgctcgccgatgtgctcggctttcgggacgtacgcggcacgggataggagatgctggaacgctcctgtcggcggggttcggaggcccagagaaatcgaggtgaaggtgagggaggggcaggctgcgaggcttttctccggcagcgaaggggagataggaacggatagacagaagccgaggtggggaggtcggcggcgcttgcgcatcagctcgtggccgatggattatggatgggattggggaaaggatccgtgccggttctgcgctgtgggtccgaccacaggggaagcgctcgcgttggcgtcgctaatcgacgacgagaaaaagcttggcgactgccagttcgacctctggaagcagtactacgtggccgcatacgtcgctgtgttcggcaagctccggcgcagccgctgcttggacgcggtccagagcggctgcaccgcgttgtccatcttcaaacaggggacctcatggtcgtcgctaacgccggcgactctcgggttgttctgggcaccgcatccgacaacggcgccgtcacgccgtccagctcatcatccacctgaagctcaacctgccaccgtgtatggtggtgcatgcctgatgactgacaatgtacgagggaacttctaccggcagctcgagcacggcatcgaccacaccggaaagtacgtcggcgactctgacctccagctcaagcgcatcaacatctactacaacgaggccagcggtggccgctttgtcccgcgcaccgtcctcatggacctcgagcccggcaccatggactccgtgcgctcgggtcccttcggccagatcttccgcctcgacaatttcgtcttcggccagtccggcactagcaacaactgggccaagggccactacactgagggcgccgagctcatcgactccgtgctcgacgtcgtgtgcaaggaggccgagagctgtgactgcctccaaggtctgtcactcgctgggaggaggtacaggttcagcgggacgcccagcccgcaggatcacaccgagaaggttgttgccctgaaggatccgctcgatgtgctagacgtttctatcgttggtggaggcatggtgggcttgcctgttgcttgtgcattgtgtaggaacgccgccgaaggggatgacggcatgggcgccgccgccgaagccgagcgacgacggcagcagggcgaagtagcgagagatgggaggcgacatagacggtgcttcgtgcccgggcccggtcgtcgggcgggtcctgcaagcgccaaagctgagggagttcacgctcgccgagccgcgggccccacgtgcgggttcaagccgaagatggtgctcggggagggcggcttcggccgggtctacaagggctgggtcaacgagcgcacgctcaacccggccaagagcaacgctggcgtcgttgaaagtcgcctagagggg

SEQ ID NO: 6353 - DNA, 342 bp, Zea mays
  Peptide Sequence Number=SeqID_49728
atgaacgagctacctagagcggattattgcgacgtgggggactccactaatgttggtgatgatcgaggcaagcaagtgaaggcccgggccaacgagggcacctcaaaagggaaggctccagttgtggccacccggaagaggaaattaggtatgggggacgatgagactgggccgagggcatctgggatttttgttgaggagttaatggggacaagaaatattggtgctattgtgtcagtagtgatggagaaatatcgccaggatgctcaatggaagaagcgtaaggccccctttggctggtggacccacaccaagaagctaagctggcacgagccggcgtga

SEQ ID NO: 6354 - DNA, 1179 bp, Zea mays
  Peptide Sequence Number=SeqID_49729
atgagggcctcggattcagcgagggcctcggcgtactccacgcactccacgtcgcattcgtacgcgtgtcggtacgtggagccggcggtgatgaccccgttaggggcccgacatcttgagcttgaggtaggtgtagttggggacggccatgaacttagcgtagcatggtctccccagcactgcgtggtaggttcctcggaacccgaccacctcgaacgtgagggtttcctttcggaagttggagggagtcccgaagcagacgggcagatcgagttgcccaaagggttggatgcgtttcccggggatgatcccgtgaaagggcgccgcgccagcccggatcgaggacagatcgatctgcaggagcccgagggtctcggcgtagatgatgttgaggctgctgcctccgtccatgaggaccttggtaagcctgatgttgctgatgacgagatcgacaacgagcgggtacttcctcgggctcggcacgcggtcggggtggtcgccctggtcgaaggtgatgggcttgtcggaccagtaaaggttggcgcctccgggaggcttccgagggttcctgtgctcggcggcggcgacaaggtccgcgtcggcggcgtcgcgtttcgcttgcgacttcttcttgcccttcttcctcgcgccgcgctgagcggacgcctcggggacgtcttccggctggcgcccctgaggctgcttgtccttccggaagatggcctcgaccgcctcctacccagaggcgaacttggtggcgatgtccatcagctcgctcgccctggtgggggtcttgcgacccagcttgctcaccaggtcacggcaagtggtaccggcgaggaacgcgccaatgacatccgagtcggtgatgttgggcagctcggtgcactgcttcgagaatcgccggatgtagtctcggagggattctcccggctcctggcggcagcttcggagatcccaggagttcccagggcgcacgcacgtgcccttgaagttgccggcgaaggctttgaccaggtcgtcccagttggagatctacgtaggaggcagatgctccagctaggctcgggcggcgtcggagaggaacaggggaaggttgcggatgatgaggttgtcatcgtccgtcccacccagctggcaggccagccggtagtccgcgtgccacagttccggttttga

SEQ ID NO: 6355 - DNA, 306 bp, Zea mays
  Peptide Sequence Number=SeqID_49730
atggcgccccctgtgacgtggtcggtccgagcccggacgtcaggcgaggtggaggctcctccgaggtcgaggttgagtccgagcccctggggtcgggcgaggcggagtccgtcttccgaggtcgaggctgagtccgagccctggggtcgggcgaggcggagtccgtcttccgaggtcgaggccgagtctgagccctggggtcgggcgaggcggagaccgtcgtccgaggtcgaggtcgagtccgagccctgggatcgggcgaggcagagtccgtctttcgaggtcgaggccgagtccgagccctag

SEQ ID NO: 6356 - DNA, 552 bp, Zea mays
  Peptide Sequence Number=SeqID_49731
atggagaagcagagcagttcagatgcctttgttgggttagttaataatgcacttgaagaactgtcaaggcgggtactgtccggtttgagctgctcttgtttgccagaagagcttgctgataatgtttggggacatcagtatagcttcaaagcacctccttatcctggggaagactctttgcaacatgttataattttgggggatatggacaaggtgccaaaggttcacaataagccaataaaaagaccaagaaaggggtcaaacaaagagagcaaaagacaacccaaaggcaccctggtctggcgcaccggattgtccggtgtgccaccggatagtgtccggtgcaccagggcacttgaagctgaactcgctaccttcgggaaattccaagggtgctccgctataattcaccggactgtccggtgcacaccagactgtctggtgtgccagcggagcaacggctacttcgcgcgcaacggtcgtctgcaaccgcattcaatgcgctacagtgcactccagagtcagagcacgcgcagttggcgcaccggatag

SEQ ID NO: 6357 - DNA, 987 bp, Zea mays
  Peptide Sequence Number=SeqID_49732
atggggagcgcccgtgttgctttcgtcttgtcgtcgttggaggaacgcaacttcgtggaagttgcttcaaggatcttcatcatccttgatggggcggagagcgaggcgagccagagctctaccacccgcacgggtcggcgggccacctcttctgggggtggaaaccatcctccagctctgcggaggaggcgccctccagccatgccggggaaggcgatctgttgctgcccagccagggtgcaacattccgtcctctgtcctcgttttcatggcgaggacaggagtgaggacctgtcggtgcgctttggggcggccggcgctcgctggtgcggtgtcggtggacaggtggacgccgccgtcggtgctgaggtggtggcagctggagaaagcttctccgccatcgggaccaggttgccggcgagtcaccaggagtttgtcgtcccgcaggctctccgatgtggaggttgttcatacccgcgggagtggaactggagtttcatttgtaatggcaccttgagtgccggtgtctgttcatcgtggctgtcggggcctgaacatgagtccctcggctcggtcggccttgccgtccgaggcttctcttgcttagttaaagaaaccctcggccgctctgcgatgagccaaagccggaggcagcggcgccagcacggacagaggcagagttggctcgaaaagaagcttcgtcggccggagcctggccgcgccgtccactggcgggaccgacgccggagtcgagttgccgaggccacgagccaggctgatgtcctcgggggacagctggctgaggctatggagtggccggtcaagccgcctgctcgggccgggttcccggaggagaccctagcggcgatggcccagaaggtggtgagtgaggtatccgtatcccggaggcgtaggagtccctcggctcggtcggccttgcctgcttacgtgtactccgtcgttttcaggatcccactttcgaagtag

SEQ ID NO: 6358 - DNA, 279 bp, Zea mays
  Peptide Sequence Number=SeqID_49733
atggggattggttgtctacgggataaaaatttgaataagaattatggtgtggtacctggacatatcccctcatgcgacctgagacgaggtctcccattccggttatggtgggtacaagtgcggtcactgcacgacggcagtcggggtcagtggggcattgtacgccaaggcggttctctggaggaaatggttgctggagtgacttggccgtccatcttgccaccgggttggactgtcgagtgggaccctgcctcgactgaggaggagcatgaggagtga

SEQ ID NO: 6359 - DNA, 456 bp, Zea mays
  Peptide Sequence Number=SeqID_49734
atgggcaagagcaagggaggtggcagatcttcgcatcactcgggtgacaagcgcaagcgcgagccgactcctccctcggaggacttcggcgagtcagaatactcagaggaggagttctcctccgagttcgagggctctccggctcctgcctctcccccgttgttgtctgatgattcagacgactcccaggggatcgccgtggaggtatggacctacatccgggccgttgagcgtgccgggctcgagggctcggatgagtcagagtactcctcggacgaggagaattcctccgactcgtccgaggagggcagcggcggcggcggcggtgacggcgacgacgacggaggcgacggtgacagcgacggcggcagcggcaagggcggtgatgacagcgggaagggtggcagcggcgacggcgccggcggcagcaagggcagcaataaggccagtggctag

SEQ ID NO: 6360 - DNA, 354 bp, Zea mays
  Peptide Sequence Number=SeqID_49735
atggcgcctcctgttgacgtggctggcctgcgccctaggttgggcgatgtggaagctcctccgaagccgaggtcgagtctgtcttccgtggtcgaggtcgagtccgagcccctgggtcgggcgaggcggagttcgtcgtcttctggggctgagcccaagtccgagccctgggtcgggcggagcggacccgagtccgagccctgggtcgggcggagcggagttcgccgtcttccgggacttagcccgagtctgagccctgggtcgggcggagcggagttcgctgtcttctgggacttagcccgagtccgagccctgggtcgggcggagcggagttcgccgccttccgggacttag

SEQ ID NO: 6361 - DNA, 210 bp, Zea mays
  Peptide Sequence Number=SeqID_49736
atgtccaagctgcgcctgtcactcgcagaaaacttaggaaatttatatcttgagcaaattcaagattgcaatctcgctgacggagagtacgtgctcatccctgagcaaggagctgtccacgaggaagatcaggagcaagctcccgagactgccatcgaggatctccccgtagccccagcaattgaaggcaagccccggttttatgcataa

SEQ ID NO: 6362 - DNA, 222 bp, Zea mays
  Peptide Sequence Number=SeqID_49737
atggcgagcggaggagagctcgccggagctaagggaggggtgtctggccagcgagggcttgcgggtttcgctgactggatcaagagatatggaggggtgaagttgggtttgtctcactgccgaacactgagagaagatcctgagtttgacatgtccagggcacccgtcccaatgtcgtcttcagatttccccattaaaccttcacttgaatggcttgcttga

SEQ ID NO: 6363 - DNA, 543 bp, Zea mays
  Peptide Sequence Number=SeqID_49738
atggagatgaacgagctgaagacaagcaatggatcaaagaggctcgtgcagccaccagaacttcagcggcgacaaggcgaggaagatgactggcgagtagcgagcgaggttggctgcttcttccccctgttcgctgcgcctgaactcctgatgcttcatgtgggcgcgagcgcggaccgaccatgggcactgcagacaagcacggccggtggagtgactggtctggaggaagaagacaggttgtgcgccgtagaagagactgacggcaccagaggccctggtgatctccccatggtgatgcagtggtacatgtacccgagccccatcccgccgtacactatggttgaagctcggaagccagggagaggggcgcggcagagggggttcaaggagatgggcgagctgcagcagggaggagatgggacggcgctagggaggaggccgagctggcctgagacgtggaggcgcgtcgcaggggagctcgccacggccaccaaggagcgacgaaggtggaagacaggctggggtggtgtgacagcctag

SEQ ID NO: 6364 - DNA, 519 bp, Zea mays
  Peptide Sequence Number=SeqID_49739
atgccggggaaggcgaactgttgctgtccagctaggatgcaacattccgccctcttccttgcattcgcggcgaggacggcagcgaggacctgccgtatctggactttttttgtcggtaactgggatgtttgtgcgagcgagagttgcttctcgcggaaggtgatgagtgaggtatccgtatcccggaggcgtaggagtccctcggctcagtcggccttgccgcttacgcgcactcttacccgtccatggggctctgccaccgactcagtcgagaaggctcgaaggatcgcttcggcagaagaacttctgaacgtgaagacttgttcggtccgcggaatcacttatccgaacgtgagttacttatcgcagaaggtgatgagtgaggtatccgtatccgtaggagtccctcggctcggatccacttttcgaaatagtcaaaaagcacgaaagacattctggcagaagagatcttttttcgaggaaaatttcaacgcagaggggttccccccccccctttag

SEQ ID NO: 6365 - DNA, 279 bp, Zea mays
  Peptide Sequence Number=SeqID_49740
atggggattggttgtctacgggataaaaatttgaataagaattatggtgtggtacctggacatatcccctcacgcgacctgagacgaggtctcccattccggttatggtgggtacaagtgcggtcactgcacgacggcagtcggggtcagtggggcattgtacgccaaggcggttctctggaggaaatggttactggagtgacttggccgtccatcttgccaccgggttggactgtcgagtgggaccctgcctcggctgaggaggagcatgaggagtga

SEQ ID NO: 6366 - DNA, 1176 bp, Zea mays
  Peptide Sequence Number=SeqID_49741
atgacttctcacaaatccttggaaggagggaacgcacattcccacacgtacgggcttgcacgagagggttttccccgcatctggtgggaagtactgcagggagccggttatacgacgcctccccagcacgcggtgcagctgttcgaggagcacccggtaccccgctgtagggtgaggatgaccttggagcctcaacccttgcagctaggctggcgtccattggactccgagtctttcggataccgggctaaggacactattgaggccattactctccacgggctgacgaccttttgtggctttcaccccttggagctgtccactcatcccattggtttgttccccgctgaaaaggaggacaacccaatgtggaaggatcgagtggagcatgccaaggatgtgtgggctctttacccagggcagactgctcacctgacggtgcgatgcatgaatgccctgtaccgtctgcaagcgatgcgaggagaggcaatgtctcagctaatgggcttggtggaggctaccaagatcaccctggataacagggaggaccttgtggtagacctgtccactgagctggtggagaaagacctccaggtggagcagatggccacccagatccaagagcttgaggagctagtaggagcgagggagaacaccatcgacgttctcgaggatcagcttatgaacacgcagcagcaacttgaggaagctaaccagcacttggatatgcaccatcaagagattcaggacatggaggccgacgaggatgttaacatcgagggaggagtggagccggatcctgcatccagcctggacactgctggctcagggagaccaccttcccccaagtcaagcgttgcctcagaattaaaggcaggccagcacaaaagctaccctgatggcggcgaggatgacgaactgaacaacccaagagtcgtcgacgttggcgacaaccatgaggcccccctgcttaacgatggacagtgtggtgcagctgctctggaccgcgtccaagcggcggcttcgcgggaacttgtcgtacacagcggtgcatgcgaccacgtaagactgcttttagaggtcgaactgacagtcgccaagcttcttctcgtcatcgatgagcgacgacaacacgaatgcctcctgctcatggagtttgttcgaggtttgaagtag

SEQ ID NO: 6367 - DNA, 450 bp, Zea mays
  Peptide Sequence Number=SeqID_49742
atggccggccacggcgatcacgcatcctaccggtctaaaccagacaattctagccctacgcgatgcccagtgaaaagtgaaagtactcgtgggtcacttaccaagaatggaggggccgcagaggctaaccacggcgcggcgcggatccgcggtgatcccaatcgccgacaagcaattgccgaagccaagtgcaggcacaagactcgtccaccaccagagcatgtgccctgcggccacacgaagctctgggatcccgccctggccaccattctccagtgccaccaagttccacgcgcagagctccccaatctctctctcggttgggtgaagttctctgcagtcgacagtgagcgcttcggcgcgacccatgcgagggaagaggaacaggggcgagtggccgacgctgagggcccacctgtcattggcgcgcgtgaacgggccgctggttga

SEQ ID NO: 6368 - DNA, 1003 bp, Zea mays
  Peptide Sequence Number=SeqID_49743
atgtgcaccaatctttcatgtgcaccaaatatattctccatacaaaaaaccaagctgccgtcgcaacgccaacagcaacaagaactgccaccagaagatggcgtcatcgtgcaagctctcacgtcgcaagacgagcagcaacaggcggcgcaaggtcgccatggcaccgtgcaaggcgatcagcaccaccggagcagcagcaagctgacggtcctcccgctcatcttcctcatctacttcgaggtggctggcggtccgtacggctccgagcaggcggtccgtgcggcgggccctctcttcacgctcctcggcttcctcgtcttccccttcgcgtggggcgtcccggagtcgcttgtcacggctgagctctccgctgcgatccccggcaacggcggcttcgtccggtgggccgacctcgccttcggcccgctcgccggctcgctgctcggcacgtggaagtacctcagctgcgtcatcaacatcgccgcgtacccggccctcgtcgccgactacctgggccgcgtcatccccgccgtggccggcacgggcaggacgcgcacgtgcacggtggttggcatgaccgtgttcctgtccttcgtcaactacaccggcctgagcatcgtcgggtggggcgccgtggctctggggctggtgtccctggcgccgttcgtgctgatgaccgggatagcggtgcccaagatgcggccgcggcggtggacggttccggtggaggggaggaaggactggcggctcttcttcaacacgctgttctggaacctcaactactgggacagcgccagcaccatggccggcgaggtggagcggccggagccgaccggcgccacggacgcgccgccggacacgtgggcgaacggctacctggtcgatgctgccggcgtcattggaggcccatggctcaagttctggatcgaggccggcgtggtgctgtcgtccatcggcatgttcgaggcccagctgagcagcggcgcgttccagctgctgg

SEQ ID NO: 6369 - DNA, 516 bp, Zea mays
  Peptide Sequence Number=SeqID_49744
atggcgctgggtgctcgccggagccagctggctggccaccgcacagccggaggggaggctgactggtctggccgcagccgtgctgcagggggcacgctggctgccggctggccttgcaggcagcacgacggtgatggattcagaggggcaagcagcacgcggaggcacatacgcgcaccgtctcgccgaaggacccggaggcgaggcgaggacgttgccatgggggctgaaggagacgcagaagacgtagttggtgtggcccgtgagcgtcttggggaggcgggctcctccgccgacggcgagatcccagatgtggatggtgcggtcatcagatgtgggggcaagccggcaaggaggcggccgtcgggggagaaagagagatgcttgagaccgatcaatgcaattcttgaggatctcttggacctgtgggttaggacccacacacgctatcgttgcgccactctgatcttgttggttgatgttgatcgcattatcttcattggggttagcggctaa

SEQ ID NO: 6370 - DNA, 408 bp, Zea mays
  Peptide Sequence Number=SeqID_49745
atggagggtaggggtatgagcataataaaggatggagctaaagcaatgattgtaaccgacaagggagagaatgcaaccaaggtcaggatagataaaacaccattctcaaatcgagatggtaaagatgatatttcaaaaggtatgcctaagataagcatcatggaaagatctagatattacaaaggtaagggagaggaaaagggaacgaacaagagcgggatgggtaagacaacactcttgaactggaatgggagaggaagctttaaaatgcaggtgcaagataagcatcatggtaaagttcaagggatgacaagggttaaggtgataacagacaaacacaaccaaggaggtattttagacaaaacgtgtgaggtatcaaagaatgggaagcaatcaatggtgaagtag

SEQ ID NO: 6371 - DNA, 162 bp, Zea mays
  Peptide Sequence Number=SeqID_49746
atggatactttgtttacagatgatgatgatgatgatgatgatgctggtttctattgtgattatgattatggttttctggtattctttccgtttggaaagggtaaagaaggtgtcgaggcagatctccaggagttccaggacttcgacgagtccgaggattag

SEQ ID NO: 6372 - DNA, 1215 bp, Zea mays
  Peptide Sequence Number=SeqID_49747
atgcataagggagcgcgaagacatggtcgccttccaagggagtcacccccttttaaaggcggctcgccctacttgcgtccccagccgtcgtgggctgagtctcctccaacacactccaaggtcctcccctacggcacgggggctgggtcccacacgtcatgcaagccgactcagagcggaagaagccaaaccgccgtgcgcggtgcatacaaccgcccagcggttacaagcgactctccacttttgcccagaccaacgggcgaaaggggcgggcaaccatgcaggcggcatgcaaccgcgccaagtgggtgcgcttctccgactcccaacacgcccagcatggaggcccaggcccacgcgtcatgcaaccggcgcgccgaatgcttcgtgcatacaacagcaccgccacttgcgccactaccgcgcctcctcgaccgcggaaccaatatcgcgactcgaggcgacccagcgtgcgacccagcagcgccagcctggcacgacggtcaatgcagccaaaagtgggccagcagtaatggcggtggcaggcgggcaggagcagcggccacgtcgagaagcgggcgacgcttcgccttcgccataatgaccgcgtcaaaaaagggaccgggaaagggggataccccgaaaaggatccttccccgtgaaggaaccaggctccgagcctccctactgatcagaggttcgaaggctggccccttggaagggttcgacagccgcctcagatcgcgtggccctacacccactactggtcagaggttcgaaggccggcccctcggaagggttcaacggccgcctcaggctactcgggctccgcgcccattactgatcaggggttcgaaggctggcccccgaagggttcacagccgcctcagacgccgagcaagggatgaccatgggtacgttcgatacatagccgaggctcgggctgcgctcctgagccgacccccaacgaacggggcacggaagtccactcggattacccgcttgcagctcaccggagacaccatgttcggcgcccatcgaggaggctcgggggctgctctcgcaaacccggctccggccgaaccgttgacagcgtcaacataccagcccgagaacttgggactcgaccgtacacccgggctacggccagctcgcatgagggacgaccataccagccgaagcattacgcgaggcattaagacctcggaggagtga

SEQ ID NO: 6373 - DNA, 621 bp, Zea mays
  Peptide Sequence Number=SeqID_49748
atgcccccctgtgacgtggtcggtccgagccctgggtcgggcgaggcggaggctcctccgaggtcgaggtcgagtctgtcttccgaggtcgaggtcgagtccgagccctgggtcgggcgagggcggagaccgtcgtctgaggcccaggctgagtccgagccctggggtcgggcgaggcggagttcgtcgtctttccggagccgaggccgagtccgagccctggggtcgggcgaggcggagttcgtcgtcttccagagccgaggccgagtccgagccctggggtcgggcgaggcggagtttgtcgtcttccgaagtcgaggccgagtccgagccctagggtcgggcgaggcggagttcgtcgtcttccggagccgagacgggggccgagccctggggtcgggcgaggcggagttcgtcgtcttccggagccgagacgggggccaagccctggggtcgggcgaggcggagcttcctatggcgctcgaggccggacttggctgctgtcagcctcactctgtcgagtggcacaacagtcggagcgacgcaggcggcgttgtcttcttgtcaggtcggtcagtggagcggcgaagtgactgcggtcacttcggctctgtcgactga

SEQ ID NO: 6374 - DNA, 162 bp, Zea mays
  Peptide Sequence Number=SeqID_49749
atggcgcaccggactgtgtccggtgcaccaggccgtacaacagatgaaccagccactctcaggaaactccagggcgcactccgctataattcaccggactgtccgagtcgaccgttggcgcagatagctgttgctccgctggcacaccagacagtccggtga

SEQ ID NO: 6375 - DNA, 813 bp, Zea mays
  Peptide Sequence Number=SeqID_49750
atggtgaccaccagcccctggatggggagaggcaagccgggctgtgatcttggtcctgccctcagcttcaaggatgttcatcatccttgctggggcggagagcgaggcgagccggggctctacctcccgcgcgggccggctggccacctcttcttccagcttctggtggtggcaaccatcctccagctctgcggaggaggcatcctccagccatgccggggaaggcgaactgttgctgcccagctaggatgcaacattccgccctcttcctcgctttcgtggcgaggacgggaacgaggacctgccggtgcgctttggagcggcccgctctttggctttgatggctggttcgcgtcccttgagcgggaacacgaacgagagccttccagcggccgcgtccgtcctgggaccatggctgctgctgcagaggtcgctggcgagtcacccggaactcgtcgccccgcaggctccccggtgtggaggttgttcatacccgcggggacggaaccagagttcgtgggaccgacgccggagttgatcttccgaggcctcgggccggtgtcttcgggggacagctggccgaggcctcggggtgaccagccgagccgcctgctcgggccggattctcggagaagaccctggcggcgatggcccgggcgtggtgatgacgtcgtccttcagagtggagatcctcggaccgcgtcgccgtccgaggctaggtcggacctcgccgaaggtgttgtcgacgccgagggtgctgcggctcccttcaactgtccagatccgagcctgcaggatcggattatcttgtag

SEQ ID NO: 6376 - DNA, 2727 bp, Zea mays
  Peptide Sequence Number=SeqID_49751
atgtgttctcatttttactcagcgtacccgccctttgaagtggcagaggatgatgtggacgaaggggcccttcggtgcgccgccggcctgagcagtgggcgcgatttggtcgaagagtttgtcgcgtacggggtatggcccttggcgcatggctgggcgttgggcgaagtgtgccctcgccagatgccttttcacggtggaagggtggtgcgaagtcctgccttcgcgctgaatctgcaaagccgcgacccggccgcctttgtgcgtgaggcggaggatggggcggtgcggctcgttggacgttacgtgtcgaggacagagggccagcgcagctttgatatccgcgggtcgaatgaccgtttgaacagggtttttgaattaaatcaattgccgtatgacggctatcctggtcaagacgacgtggaccgccgtgggaagaagccggtggtggagactggagacgaccctgcgccagcggccgccccatcctctaaaaagagaaaattaggtactgctatgggaggacttggggtttctgatagttttgctagagagttgatgaggacgtgcgcggccccggggggaaggatgtcttcgcccgagctccgggagtcttcggctcggatgctgagggttaccgggggctgctggcctaggaatgttcctatcccccgcgcggctggcgagtacttttttacatctcgcatggttcgtgaatggagagtttttttttacgggcggaatattgctactgttgtgtcggcagtgatggacaaggaccgccagggagcagcacaaaagtgccaggcggttgtcaggctcgttgaagctaggccgaagagacagcgggggtatgcgaaggctgcggcccccggcggaggcaagccgccgctggcggcaaagtcgggcgcccctacgtctagcaaagcgccggaggcaacggcaggcgccgggggctcaaagtcgacgaaggcagtgccgccggccggcagagttccggaggtcgcgaaggcggcccgagcgttgccgtcggcaggcaagcgtatcgccgacttcgccaccgatattagtgtggaggactatcttggtgggtcggacgaaggccaacttgctatagttgcgcctgccgcggcgacaacgacggttgccgtagcgctgaaggcaaagggcggggctcttagcgccggaggtgaggtggcggccctcgcggccgtcagggatgaggcgggcgttgcgtcccgccggctgaaggaggtggtggagtcgctaagacagcatgctgacgccgtccgagagaaatcggccgccgacagcaagtgccgcaagctggcggacaaggtggccgcgctggagggagagaaggctgacctccggcgccaattggcgggggagaggagggagaccaacgaggccctcgccaaggcgcaggctgcgcaggcggagaccaatctggcacgggcggagggcaatcttgccagggagcgcgccgagcagctgcaggagcggctcatcgccctggagagccgcgtggagcgggccgaggccgcggcgcgcgcggaggccgaacggacgcgcactcagcttatggatacatatcgtgagctgggtgcgcggaccggtgacttcgaagtgccggaccgagagcccagacttcgctgtctggaatgggtgcaggaggagctgcaggcactccccactgtcatggaggggtttatgtcgtacgcctctctggtcacctgcgagggggcgatgaacgcgctctcccgcgaagggtgccgacacttcgaggtcttcaaccaggccgatgaagattttgaacgagatatctataaggttgaagaccccgtagtgaaggaatccgccggggccatctacgaccggatgtggggtccgcacggtcgccaggtggtcagggagcgggccgagacggcgagggctcaggcggcgcgtggagagcgggtggacgacttcggggcgttgaacagcgcgctgcctgacccggagccgaccccggcggaggccgtgtctggggtcgccctggagccaaccccggagactgcggaagacgcaccggacgcccccgcatccgctgcggccagcgaggacctgctcctagaggtggccgaaggcgcgcctgatgcccccgcagctgctgcgccgagtgttgaagatcccgcggcggtggcggcggaaacaacagcggaggcgacggcggagccaacggcggaggctcccgcaacgtcagggccttcgcaggttcaagattttgggcctgcgcacgcaaccgctactactaaatttttggcggcttcgaccgcggaaggtggtaatgaatgtggtggatctgcatctgagttttttgattttgctgattctgggagctcggttgagtggactgaggagtcgtcggaggaggacttggactactttgcggccttggatgtggctacggcggaggcttcgccacacgccgcggatgcacaagatgtgccaggtcctagcaccgggcgccgacgacgaagggcggttgcgaagcgtagggttagtggggaggagggggctcggcttcgtgtgagtagggctggtcggcaggaactgttgtctttgccgaccgccgggagtacaggtgaaggggaactgcgaagtctttttgcgggtgaggagcttaggataatgttatttaattatagggagatgggaattattcctaaggttgagccgatgtag

SEQ ID NO: 6377 - DNA, 936 bp, Zea mays
  Peptide Sequence Number=SeqID_49752
atgacttcccacggatcctcggacgaagggaatgcactgacccacactgacgggcttgcatgggagggctttccccgtattttgtgggaggtacttcaggggtccagttacacgacgcctcctcagtacgcggtgcagcagttcgagaagcaccgagtgccccgctgtagggtgaggatgaccctggagcctcatcccctgcagccaggctggctttcgctggactttgagtcctttggataccgggctgaggatacgatcgaggcaattgctctgcacgggttgaccactttctgcggattccaccccttggagctgtccacccaccccattggcttgttccccgctgagaaggaggacgacccaatgtggaaggatcgggtggagcatgccaaggacatctgggctatctacccaggtcagactgctcacttgacagtgcggtgcatgaatgccctgtaccgtctgcaagtgatgcgtggtgaggcaatgtcccatctgatggcactgttggaggcaactaagatcaccctgaataacagagaggagcttgtggttgatttgtccactgagatggtggaaaaggacttacaggtggagcagctgtcaaatgagatccaagagctggaggaattagtggggaccagggagaacaccatcgaggttctcgaggatcagcttatcaacacccagcagcagcttgccgaggctaatgagcacctggatatgcatcaccaggagatccaggacatggaggccaacgaggatgtcgacatcgagggaggagaggagcctgcctccagcttggacactgctggctcagggagaccaccttcccccgagtcgagtgttgcctcatggccgggagagcacgtcatggtcaaaatgagcgcgttcctccaccgccgccaccgcctcccactctacaggagctaa

SEQ ID NO: 6378 - DNA, 417 bp, Zea mays
  Peptide Sequence Number=SeqID_49753
atggcgtgcatcccggacagcggcaaaagcggacacgggaggttcgctagctgttgcgaggttgaagctgacaaccccggcccaccagtcgttgcccgtaacgcgcggcggccacgcagggcccgttacaatgggccggatcgcacgtgggcctctgagctggacgaggccgcactgtgggatgacatcatcgccggtcttcgtctggtgccgatcaagcgaagggtgtccctgcctgttttgtctctgtcagaccagcggctgcagcgaaggcttcgagcgaagggtggcgtctttgccttcgccccaacatttgccatccgagggaccagttcgacaaagtcacctggtgccgaagacgtcgctagatggcggagacgctgccctcgctcgaagtggttccgcgggggtttttga

SEQ ID NO: 6379 - DNA, 1059 bp, Zea mays
  Peptide Sequence Number=SeqID_49754
atggctaccactcggggggtcgatccctttttaaaggtgactctccccactcgcgtcctcaggcgtcgtggactaagtcttcaccaacgcactccagggtcctccccctacgacacgggggctgggtcccacacgacatgcaagctggcctgggatagaagaagccaaaccgccgcgtgcggagcgtgtaaccgcccagcggttacaagcactcctccatcttcgcctaaaccagcaggtgaaagggcggaccaccatgcaggcggcatgcaactgcaccacggggacacacccttcgacttcaacgcatccagcgtggaggcccaggcccacacgtcatgtaaccggcacgccggttactacgtgcaaaaaactccaccgccacttgcgccagtaccgcgccttctcgactgcggaaccggtgccgcgactcgaggcaactctgcgcacagcccaacagtgccaaccaagcgcatcggtcacgggtcagtcagccgcgggagaaggcgcgacggtcgatatggccagaagtgggccggcagtaatgacagcggcaggcgggcaaaagcagcagtcaaatcgtctgcaggctcacgtcccctcccggagcagcaggggagccctctctcacggcgtgaagacgacacgcccgtgttccgtccctcgaacggctcacacaacgcgaagcgggcgacgcttcacctccaccataatgaccgcgtcaagaaagggattgggaaaggggatactacgaaagggatccttctctgcgaaggaagtgggccccgagccctcctactgatcagaggttcgaaggctagcccctcggaagggttcgacagccaccccagagcactcgggctccgcgcgcactactggtcagaggctgggccccccgaagggtttgacagccgcctcagaacatgcagagtgagggatgactctgggtacgtccgatacatggccgaggctcgggctacgctcctgaggtcaaagctccgtccactccaggggcacgatctcgcctcgcccgagcccagcctcgggcaggaacattag

SEQ ID NO: 6380 - DNA, 1032 bp, Zea mays
  Peptide Sequence Number=SeqID_49755
atggggagcgcccgcgttgccttcgtctcgttgtgggaggagcgcaacctcatggaggttggcagcccggctgcatcccctcaccaatggtcacccaagacggtgaccaccagttcgatggtggggagaagcaagccgggctgcggcctctgccccgccctcagcttcaaggatcttcatcatccttgttggggcggagggcgagctgagccggagctctacctcccgtatgggccggcaggccacctcctccttcagcatttaggggagagggcgctcaccgtcctagcggagggtgtggacttcgacaacgcggggccgattggccgcaagcgtcgtcagctccagcatgcctggttcgctagctcagctggctctggcacagcttccggtgccacctcccaccgctgggtggagtgtggctatctgcccaccgtacgggcggctgttgcgtcgcgcgcaccgggggaccgcccaagacgtcgcacgccgctagggcggcgttcttgtccttgggttgtcctgcccttgctccggcacgacgcctccgcgcggaggtcggtgcccgcccgtccgggaggacttgagtggggatctgccggtgggcaggtggctgccgtcgttggtgctgaggtggtggccgccgaagaaggcttctccgccgacgagatcgtcggcaccatctgtgtttcgggcctccggctctttggctttgattgcttgtcctcgcccctcgagtggggacacgggcgagggccttgtcgcagcaacgtctgccctgagtcggccttgccactcaaggcttctcttcctcagttaaggaaccctcggctgctctgcgatgagccggaggcagcggtgtcagcatggatagaggcggagttggctcgagaagaaacttcgtcggcccaggagcaggtgacttcccaggccgaggagctggctgaggctacggagcggccggtcaagccgtctgcttggaccgggttcctggaggagaccctggcggcgatggcccgggcgcggtgctga

SEQ ID NO: 6381 - DNA, 450 bp, Zea mays
  Peptide Sequence Number=SeqID_49756
atgtctaggtcgtttcttcaatcagataacggtggccatcacagtcgaactggtgggcctgctagcgtccccaatggtcgtgtcctgatcgtagtggaagcatcatggatgtttaatattgcagtccaaggtaagaaactcatgctcatgtggtattttaagccctacctctacatggacgtcgtcctcgcttccacggtcaccgcgctccggatctgcaccgatgttgcgcacgtgctcgagcagttttgcctcgtctggtgcggcaagctcgtccgggacgcacgcgccgtcgctctgtcaagagcctctgcttcgacctcttcatcattaggggtggaaacagagctttcaatgcatgctggaggtgcgcgatgtgatcgatattatccatacttgataaatgatgacaatggtgatggccatgatatatggtcaatattgtattga

SEQ ID NO: 6382 - DNA, 762 bp, Zea mays
  Peptide Sequence Number=SeqID_49757
atgacttctcacggatcctcggaaggagggaacggacaatcccacatggatggacttgcacgagagggttttccccgcatcttgtgggaggtacttcagggagccggttatacaacgcctccacaatacaaggctgaggacactatcgaggccattgctctccatgggctgatgaccttctatggttttcaccccttggagctgtctactcatcccattggcttgttccctgcagagaaggaggacgacccaatgtggaaagaccgagtggaagatgccaaggatatatgggctctttacccagggcagactgctcacttaacggtgcgatgcatgaatgccctgtaccgcctgcaagcggtgcgaggagaggcaatgtctcagctaatggcattggtggaagctaccaagatcaccctagataacagagaggaactcgtggtagacctgtccacggagatggtggaaaaagacctacaggtggaacatatggccaaccagatccaagagcttgaggagctagtgggagccagggagaacaccatcgaggttcttgaggatcagctgataaacactcaacaacaactcgaggaggctaaccagcatttggatatgcaccatcaggagattcaggacatggaggccaatgaggatgttgacatcgagggaggagtggaaccggagcccgcttctagcctggacactgctggctcagggagacccccttcccccgagtccagtgttgcctcgtttgttcattaa

SEQ ID NO: 6383 - DNA, 297 bp, Zea mays
  Peptide Sequence Number=SeqID_49758
atggaccggctgattccggcccgtcgagctgtacctcgtcgtgaccgcaaggacctcccgaagccaaccccgcccttcaccggacctcccacgtcgccgtcaaaccaattttgccagattctaaataagctcaaagttaaagaaaccagaaaagactgtaatctcgctgacggggagtacatcctcatgctggagcaaggagttgctcaggatgtagcccaggatccagcaccagagtctgccgtcgaggatctgcctgccccaactttggaaggcaagccccggttttatgcataa

SEQ ID NO: 6384 - DNA, 150 bp, Zea mays
  Peptide Sequence Number=SeqID_49759
atggcaatcggggtcagtgaggcattgtacgccaaggcgataggatctctggaggacatggttgctggagtgacttggtcgtccatcttgccaccaggctggccagtcgagtgggaccctacctcggtagaggaggagcatgaggagtga

SEQ ID NO: 6385 - DNA, 321 bp, Zea mays
  Peptide Sequence Number=SeqID_49760
atggataggccggagcagccgacgagttcgcccgcctgcgcacgtggactagccgattccggccatcaccgtcgtcgagccgtacctcgtcgtgaccgcaaggacctcccgaagccaaccctgcccttcgccagacctccctcgtcgccgcatatatcttattcattgcattcgatagactgtaatctcactgatggggagtacatcctcgtgccggagcaaggagttgttcaggaggtagcccaggatccagcaccagagtctgtcgtcgaggatctgcctgccccagctttggaaggcaagccccggttttatgcataa

SEQ ID NO: 6386 - DNA, 417 bp, Zea mays
  Peptide Sequence Number=SeqID_49761
atggcggttcggaaagggccaaccacggtgaagtggcggagctcaaacggcggtgaggtcgctggcgaggccttggggtatgactggggagggtatgcaatgtttcgtgctcgtgacaaagtggccatcggagagtggagggagagcttactagagtggaggaggggcggcggcgccgacttgattgagctcggggaaagggttggttctttggacgacaatattcatacagacaagggaccgagttgttacataaaaatgggagaacaaagctctccaaatcgcgctgtcagaatgtctcatgaagatcgccatggtacagtgaccataaagatctccggtgccgtgagctcaacatcgatgatctgccgctacaatttgcgcccgcctgggagatttgtgccacaggaagagtag

SEQ ID NO: 6387 - DNA, 474 bp, Zea mays
  Peptide Sequence Number=SeqID_49762
atgaatcatgtttctactggaaaaccccaaacaaacaccactggcaggaagcgctcgcgtggcatcgatcatcgacgacgagaagaagcttggcgactgccagttcgacctctagaagcagtactacgtggccacatgcgtcgctgtgttcgacaagctctgtcgcagccgctgctgggacgtggtccaaagtgctgcaccgcgctgtccatcttcaaacagggggacctcatggtcatcgccaacgccggtgactctcgggttgttccggggcaccgcatccgacaacgggcgctgtcacgacgtccagctcatcatccacctgaagctcaacctgccactcaagagtcatcggtactcgccatgtcgtgcgcgtccgacgactactatatcaaggactatggcgtcatcttggcgccagaggtgacgcagaggaggaccgacagcaatgaccactcgccatcgtcggggtag

SEQ ID NO: 6388 - DNA, 323 bp, Zea mays
  Peptide Sequence Number=SeqID_49763
aggcgctccgctataattcactggactgtccggtgcaccaccggacagtgtctggtgcctcaggggagagcgactctgaactcgccatcttcggatttccgctccgctataattcaccggactgtccggtgagccagcggagcaacggctacttcgcgcacaatggtcgactgcaacgcattaaatgcgcgcctgcgcgcgcagaggacagagcacgcgcgggtggcacaccggacagtctacaggacttgtccggtgcacccaccggacagccaggcgggcccacaagttcaaagctccaatggtcggaacccaacggccag

SEQ ID NO: 6389 - DNA, 414 bp, Zea mays
  Peptide Sequence Number=SeqID_49764
atggggaagcctgtcccatcactcctcatgctcctcctcagccgagcaatcaacaacttttgccaagtcatcacatttccacttgttactcaatgtagcagcatggatcaagcagtctcattagctgcgagaagcagacgattcgaatcgagtttttatccttgcaagatcagggctcaccgccttggcgtacaaggcctcactgaccccgactgccgtcgtgcagtgaccgcacttgtacccaccataaccggaatgggagaccacgtctcaggtcgcgtgaggagtaaagtctgcgggcaggttcactcaggtaataacatgcttctgtgccaaaaaatcccagaaggttacttagtggtaattaggtatgcttttctaaagtttaatgctaaaaagacactttacaactaa

SEQ ID NO: 6390 - DNA, 389 bp, Zea mays
  Peptide Sequence Number=SeqID_49765
atggaccaagaaaagggttcaacaaagagagcaagggataaccgaaggctgccctggtctggcgcaccggactatccggtgtgccaccggatagtgtccggtgcaccaccggacagtgtccggtgcaccaggggactccaagccaaactcttcaccttcgggaattctcagaggcgctccgctataatcactggactgtccggtgcaccaccggacagtgtctggtgcctcagggagagcgactctgaactcgccatcttcggatttccgctccgctataattcaccggactgtccggtgagccagcggagcaacggctacttcgcgcacaatggtcgactgcacgcattaaatgcgcgctgcgcgcgcagagacggcaccccggcgcg

SEQ ID NO: 6391 - DNA, 678 bp, Zea mays
  Peptide Sequence Number=SeqID_49766
atggccagagaagacaaaatcctccaaggtatcaacagtgggtccggacccccgtgggaaagtgctggacccctgcatatatggaccggatctccgagcaaggtccaggacctccacgggtacaaaccggacccctgggatgggtcccggacccctctgtgtggagtccgggccactcatggcagggtcccgggattatgggacaaagaatgcctggaccttaatcaagaccaggcgggggttcggagccgacacgtgttcggaccatgccgtgtacgcttcggctccccgctcaggtggagacccgatgctgccacttggcccactgcccgtgacgtaagccagcgggtggagcctgacgtcctagggtggggtcacaaagggccatcaacctgtgtggactgggtggggtcacaaagaacctttggagctcgcgaacagggagcacccgacctcggcgtcgcgcgccattcaccgccaccattgtcttgctcattcgctgcgatgttgcctcggtgggagttccagatggggcggcaaaccatgtgggagatgtgcaggaccattgctgaacgaaggagtgcgtgctggcgggggaatttctcgccgtcgcgtagcgacgccatgaacccgctgggccgcgtggacagcttcacccagcctcccagccatcggtaa

SEQ ID NO: 6392 - DNA, 1206 bp, Zea mays
  Peptide Sequence Number=SeqID_49767
atgcacgtggttggagacttcctgaagcaccggatcacgctgctgcagcagaaggcgcgtctatgttgctggttcaccggctcaaacgacatcgaccagatccagcgcgggccagggaccaacctgtcttgggaggagctggaggttctggtgaaggggattactggtgagtccttcggccctaagtctctaatcctccccgagggcatccctgcgctctgcgacgacgcagggttgaggacggtgattttggccactttgtcgaccctcgacgagcgcgacgtcgcggttcgccaaaccggcggccgggacccccatcgcaggatctggatctctgatgcgccggctgaaggccccccagactgccggcgtggcccccagtgttcccgccagagcttcccacgcctccgccgcggccccccgccccttgggcaccaccagcaggagcaacagcagcagcagcagaagcagctgtcgccccgcttccagggtcgctggaaggtccagggccccaaggcttcctccccctctgctcccaaggtcgtgcctcccccgcgccccggctgctgccgccaagatagcgccaccggccccccaggcccctgctgggggtctggcagcagcggcgccaacgccaagcggtgccacagcaacggagggggtccccactgccctggcggctaccacagcctcaacgacggtgatgccatcgactccgtcccgccgcccactccagaggagacggaggcgatctttgggcggcggctccgttccggcgccaagccagaagaggcgccaattcccctcccctgggtgctatctcgtgcccaccaggctctacacgagaccgtggcagcgatcctgtgggagtgggaagcgctggaggccgaacaccagcgtctcggcgactggcgagttggaggtgacccggaaggagaagaagctggccaagaaggaggatcacttggactagagggaggaggtcatcacagagctccaggcgaagctgaacgccctcaacaaaatcctggaggagcagcgggtccagcagaccgcggctgtggagaggtggaaatgtttgaaaggcggcagaagctgctggccgatcatgagctcgaggcggaggagaaggagcgaatgctggaggagaaggagcagacgctgggggagcgggtctgccaattccaggcagcgcaggcggcgtag

SEQ ID NO: 6393 - DNA, 324 bp, Zea mays
  Peptide Sequence Number=SeqID_49768
atggaagcatcggagatacggggtatagtccctcgtaccttggtgaagcgggagatgaaggctcagagagtttcctcgggctcctgcctcactgcatggagacagcgccccaggcgcagccctagacgccctggacgtttgcgcgggagtgtgatgccgctcagagtgcacagcagcggcacccagcgcaaggaggttggtggcccgtggtgtggaagaggcagccgcctcttccaccatgaaatcctcgggcatgaaatcatggtgctcgacgatgtggaccatggtgtcgagcaggaaaacaagcaaaaacctaaagcctaa

SEQ ID NO: 6394 - DNA, 462 bp, Zea mays
  Peptide Sequence Number=SeqID_49769
atgggcaagaacaacaagcgcaagcgtgagccgactcctccatcggaggagtttggtgactcagaatactcggaggaggagttctcctccgagcctgaggggtctccggctcccgtctctcccccggcgtcgtccgatgactcggacgactcccaggggatagccgcggaggtctggacatatatccgggccgtcgagcgcgccgggctcgaaggctcggatgagtcggagtgctcctcggatgaggaggactcggacggcggcgacgagggtgaagacgacgacgacgacgacgacgacgaccggggtggcggcgacggcagcagggacagcaccaagggcagcagcaggggcagcaccaagggcggcggcggcggcagcagggacagcaccaagggcagcagcaggggcagcaccaaaggcggcggcggcggcaggggcaggggcagggccagtggctag

SEQ ID NO: 6395 - DNA, 615 bp, Zea mays
  Peptide Sequence Number=SeqID_49770
atgaagacgcggtgcccgcgcggctatctcaagtcgcgtggtgaacaacacccgaccccaccacgtgaacggctccggggccgccacgtggccagagaagacaaaatcctccaaggtatcaacagtgggtctggacccccatgggaaagtgtcggacccttgcatatacggaccagacctccgggcaaggtccaggacctccacgggtacaaaccggacccctgggacgggtcccggacccctctgtgtggggtccgggccacgcacggcagggtctcaggattctgggacaaagaatacccggaccttaatcaagaccaggcgggggtccggatccgacatgtgttcagaccatgccgtgtacgcttctgctccccgctcaggcagagacccgatgctgccacgtggcccactgcccgtgacgtaagccagcgggtggagcctgacgtaagacctctaggccgcgtgacctctgcatttattgtggataagttgcgccgcctgtccattccactggcaggtgatgtgtcgcctcagcatttaatgagccctgaccactccactggcaggcgatgtgccgcctcagcatttaatgagccctgtccacttcgctga

SEQ ID NO: 6396 - DNA, 378 bp, Zea mays
  Peptide Sequence Number=SeqID_49771
atgacgacagaggaagccaacaacagaggccacaatattcctcccaggcttcagggcaacaacagagctatcctcggcccccagctccaaggtgcagaggcgccaggggcttcggaggaaggcgaagaagctcctaagggaggcttacaacgaaaaataaacgttgataccgctgaagtaaaaggcgaagaagctcctaagggaggcttacaacgaaaaataaacgctgataccgctgaagtaaaaggcgaagaagctcctaagggaggcttacagcgaaaaataaacgctgataccgctgaagtaaaaggcgaagaagctcctaagggaggcttacagcgaaaagtcaacgctgatacaccgaaaaataaacggtga

SEQ ID NO: 6397 - DNA, 375 bp, Zea mays
  Peptide Sequence Number=SeqID_49772
atgaagcacaaaaccgcagctctcaagctcactcaaagatttctctccaaagatttgaaatgggagaggcaagagatgtgtgtgagagagagggaggtgtttcttgggttagaaatggagttcaaatcgtgctcactactttggggagagagactattggtcagaggtcagaggggtcagagaccagctgaactgcccctcaggaccagttcaactggtcttgaccagagagttttaggagagaaaaccccagctcaactgcccggaggccaagttcagctgctgaagaagctcaactcagctgaagtcaagttcagctggaaagctcagctgcagttgaagaagttcagctgcttttcagcaagaacactctag

SEQ ID NO: 6398 - DNA, 102 bp, Zea mays
  Peptide Sequence Number=SeqID_49773
atgtcgtgcgcgtccgacgactactatatcaaggactatggcgtcatcttggcgccagaggattacaaatggattatgaaacattttcttataacaatataa

SEQ ID NO: 6399 - DNA, 759 bp, Zea mays
  Peptide Sequence Number=SeqID_49774
atgcatgatcgatcccacaagccgcagccggcggaggccggcaacggcgggccggctggcgagggcggcggcgggaacgtggatcgggtgctcttcaagaacctcgtcgagatggtgccgctcgtcgagtcgctcatggaccggagggtcaacccggcatactcgcgtcgcgcttcgctggtctacacgccggcgccgcccaagaaggcaagcgatttgaaaagtgtcaaattgccacagagcgtatcagccaaaaagcggagagaccctggtgatatagccaagaagagcaccccagattctaacggcgacaacggttcagttgtgccattatctctgtcaggtgctgaaaatatgcccaaggatgaggttgctgtgctaagcgagcagatcaatgacctacaaaagaagctgcttgagaaggaggaggcactgaggtctgcggagagctctgtgactgagatgaatgcagcatatgcaactatcgatgaactcagacgcctggtggctgacaaagaagctttgatcagatctaccaattctcagttgcatgatgcaaagattatgcttgcagacaagcaagcgtctttagagaaacttgaatgggaggtgaagatgtcaaataaaaaggtcgaagatcttcaaggagatatgtcgaatatgggattcgagataaggcatatgatgatatttttcgatccatattcagagagtaattcaggtgactattgcgatgatgtaattccatctacagattga

SEQ ID NO: 6400 - DNA, 288 bp, Zea mays
  Peptide Sequence Number=SeqID_49775
atggctaagtctgcaagtcagactggcaaacaggtcgccagaggtgtcaggggcggttcaaccgccctggggggaggttcaaccggtctggtcaaccctgaccagtctgcagaaaacgaagaagagattgaagtgaccgaagagaagacaccaccaccttcggattctcaggctggcaattgtttctacttcgatatctgcgggtccgagcctgactcacctactaacgaaggcaagccccggtgcatttgccacctccttgatgcttttaaaatctttctcacttga

SEQ ID NO: 6401 - DNA, 782 bp, Zea mays
  Peptide Sequence Number=SeqID_49776
atgaatgcgctctcccgcgaagggtgccggcacttcgaggtcttcgaccaagccgatgaagatttcgagcgagatatctttaaggttgaggaccccgttgtgaaggaatccgccggagccatctacgaccggatgtggggtgcgcacggtcgcgaggtggtcagggagcgggccgagacggcgagggctcaggtggcgcgtggcgagagggtggacgacttcagggcgttgaacagcgcgccgcctgagccggagccgaccccggcggaggccgtgtctggggccgccctggagccgaccccggagactgcggaagacgcaccggatgcctccgcatccgctgcggccggcgaagacctgcccccagaggtcgccgaaggcgcgcctgatgcccccgcagctgctgcgccgagtgctgaagatcctgtggtggtggcggaaacgacagcggaagcaacggcggagccagcgacggaggctcccgcaacgtcagggccttcgcaggttcaagattttgggcctgtgcacgcaaccactactactaaatttttggcggcttcgaccgcggaagatggtaatgaatgtggtggatctgcatctgagtcttttgattttgctgactctgggagctcggttgagtggactgaggagtcgtcggaggaggatttggactactttgcggctttggacgtggctgcggcggaggcttcgccgaacgccgcggacgcaggagatggctggccggcgggaactgctgtctttgccggctgccaagagtacag

SEQ ID NO: 6402 - DNA, 459 bp, Zea mays
  Peptide Sequence Number=SeqID_49777
atgggacagacccgtatgttgctcttccgccacgtggggaagacgtcatcgattccgccgccggcgggcgggctgacggccaccattgtcgttgtcgcgcggcggaggaaggagtatcatgtcgtagctgccgtcgagggacatgaactccagacacccgaaacgaagcatcgtcccgggttgaagaggttgctggagactacccatctagagcttgacgggaagatgttcgtcaacacgcagcaggcccctacctggcgcgccaactgtcggcgtttcgaccccggggggtccctggaccaacgagtaaattgtcgccgcgtgtcccagcccagatgggtcagcgcaagacggagcacaaggggtgagaaacagcaaggggaacccgcggccttcgtgttgccctgcgcccaggtcgggcgtaaggagagggcccaggtgtacaatgggagggtgtag

SEQ ID NO: 6403 - DNA, 414 bp, Zea mays
  Peptide Sequence Number=SeqID_49778
atgggtccgatcgccgcggtggaaaaatctcaccgccgacgacctatccgcgccacgattggtgccggagtcgagatgttcgggcagcgagcatcttcccccgaagatctttttcctctggataggaccgccgcggtggaaggcactaactccggctgccacacggtcattcctccttccggccgtgtccgatcaccggcgccgctctcctctgttcggccacgccatcacggatttgacggtcttccggccatggttgaacgtggcaagctctgggggaatgccgtgttcggtgccatcgctgatcgccagctcaggctggcaatagttatcaccgtgaccgcgattgtgactctccgcagctataaattcaccccgacctcgccctcccttctcaaatcaaccaagccctga

SEQ ID NO: 6404 - DNA, 1320 bp, Zea mays
  Peptide Sequence Number=SeqID_49779
atggcggtccgccccttcacccgctggtctgggcgaaagtggaggagtgcttgcagcccggctgcatcccctcgccggtggtcacccaagacggtgaccaccagttcgatggtggggagaagcgagccgggctgcggcctccgcccctccctcagcttcaaggatcttcatcatcctggctggggcggaggccgggctgagccggagctctacctcccgcacgggttcatgggtcaccttctccctcagcattcaggggagagggcgctcaccggcctagcgggaggggtggactccgacaacgcggggccggtcggcagcgagcgtcgtcagcttcagcgtgttgggcttgctggctcagctggctctggctcggctcccggtgccccctcccacctcacaagcggttgtcgcgccgcgcgcaccggaggaccgcccaagacgttgcgcgctgctagggcggcgttcgtgttcttgggctgtcctgcctttgctccgatggcttccgtcgtcggcgctgaggtggtggcggttgaagaagtcctcgtcgccgacgggatcaccgccaccatccgcgctccgggcctccggctctttggctttgatagcttgtcctcgcccctcgagtggggacgtgggcgaggggctcattgcagcagcgtccgccctgaggccatcactgctgctgtttggccacccggagcggaggtcgttatcgctgctgccggagcgggcgtcggcgagccacctggggtttcgtcgccccgcaagccctccaatgtggggggttgttcgtacctgcgggggtggaaccggagttccgtttgtaatggaacctgtagtgccggcgtctgttcattgtggctgtcggggcctgaacatgagtccctcggctcggtcggccttgtcgcccgaggctgctcttgcttagttaaaggaaccttcggccgctctgcgatgagctggagccggaggcagcggtgccagcatggacagaggcagagatggctcgaaaagaaggcttgtcggctggagcctggccgggccgtccactggcgggaccgacgccagagtcgggttgccgaggccacgagccgggctgatgtcctcgggggacagctggctgaggctacggagcggccggtcgagccatctgctcgggccgagttcccggaggagaccccggtgacgatggcccaggcgtggtgcctacaggttccttcgaggtggagatcctccgaccgtgttgccgtccgaggccgggtcggattccgccgaaggtggagtcgacgccgagggtgccgctgctccccccactga

SEQ ID NO: 6405 - DNA, 696 bp, Zea mays
  Peptide Sequence Number=SeqID_49780
atgggaagctccgcctcgcccgacccagggctcggactcagcctcgaccccggaagacgaactccgcctcgcccgaccccagggctcggactcagcctcggcctcggaagacggtctccgcctcacccgacccagggctcggactcagcctcgaccccggaagacggactctgcctcgcccgaccccagggctcggactcagcctcggcctcggaagacggtctccgcctcgcccgacccagggcctgtaacacccctgagttgaacttatgttgtcataggagtttaagagaaaatgaagctccaaaacgctctgtcaggctgtctgatggagttggccatggtacagtgcttcagggaaagcagatatgggtccgatcgccgcggtggaaaaatctcaccgccgacgacctatccgcgccacgattggtgccggagtcgagatgttcgggcggcgagcatcttcccccgaagatctttttcctccggataggaccgccgcggtggaaggcactaactccggctgccacgcggtcattcctccttccggccgtgtccgatcaccgacgccgctctcctctgttcggccacgccatcatggatttgacggtcttccggccatggttgaacgtggcaagctctgggggaatgccgtgttcggtgccatcgctgatcgccagctcgggctggcaatag

SEQ ID NO: 6406 - DNA, 588 bp, Zea mays
  Peptide Sequence Number=SeqID_49781
atgggaagctccgcctcgcctgacccagggctcggactcagcctcgaccccagaagacggactccacctcgcccgaccccagggctcggactcagcctcggcctcggaagacggtctccgcctcacccgacccagggctcggactcagcctcgaccctggaagacggactccgcctcgcccgaccccagggctcggactcagcctcggcctcggaagacggtctccgcctcgcccgacccagggcccatactcgggcctcggcccctgaagacggactccgcctcacccgaccccagggctcggactcagcctcgacatcggaagacgaactccgcctcgcccgaccccagggcccagactcgacctcgacctcggaggagcctccgcctcgcccgacctcgggctcggacccgccacgtcacaggaaggccatcattaccctacctctagctagctcaggctgcgggggacaagaccggcgtcccatctggctcgccccgggaccccccggggtcgaaacgccgacagttggcgcgccaggtaggggcctgctgcgtgttgacgaacatcttcccgtcaagctctag

SEQ ID NO: 6407 - DNA, 249 bp, Zea mays
  Peptide Sequence Number=SeqID_49782
atgtacgacaagctccggtgcagccgccgcttggacacggtgcggtgcggctgctccgcgctgtccatcgtcaagcagggggacctcatggtcgtcgccaacgtcgacgactctcggaggagtagcgcatctggtggtgcaacggccaggggtactaccttgctgatgagcgtagggtgcacttcgttttacagcgcaaccaagagtcatcagtactcggtgtcaaaggttcatctacaactatactaa

SEQ ID NO: 6408 - DNA, 1356 bp, Zea mays
  Peptide Sequence Number=SeqID_49783
atggggcagagaatcgatatcaattggactgaggtgtttggcaagtcatcctcccccgaccgcgaggccgacgtctgcttcgcctccccctcgtcggcgtcggcagcaccgcggacgcgggcgcgggcgttgggcgccgcgaaggtgttaccgggcgacgagcggcggcgggggtccccagacagacaccaacggaagaggctcgggaagctgcgcatcgacgatgactggtccgtcggcgggcagcgccacaccgccgtgcatggggatgacggggcgcgccgaccacggacccgcggggccgccaaggtccagaagatgagcaggcggaacgtgtgggcaacagattctgttcgagcttttaagactttgatagatttcaataatgaacttgtgtttgttacacagtttaatcggagttggttcaaacctgaagaagcatctggtctaaggcggagaataagagagcttctgctggaagaatttgaaagtgccaagctggatgatgctttaccaggagcggatgcatctgagcgtgatgacagcataaatgatggagaattgaaaccagatgcatcttctgacagttcagaaatggtcgtagaggtggtaggagggttgggaggcactgacaagagcaatgaaggcatcaaggttgtagcatcagaagaggcaagtggagagtcaggagatgctggtaagagtaccgaaggtactgttgcagcatcagaagaaaagagtattgaaggcatcaatgttgcagaaccagaagatgcttgtgagagtataggaggcatctatgttgcagaatcagatgaagcaagtggggagtttggagagattggtaagaccaacaaaggcaccaaagttgcagtgtcagaaggagcaagtgtgtctggatacactgataagaatatggaagacatctctgactctgaggttgcagtattagacaaagctcccactagcagctacagacgtggagagaagaccacagcctgtgttctatcagaagcagcttcactttccgatagcgtcaaagatgaacaaggtatggtgaaaccagattctggcagctcaaaagctgagagagaaggagatttgattgtaattgcatcgccggaaagatcggaagggaatgatgagatcattggtagcatgccaattacagatgtagtttgtgacagctgcgacagcgacaccgagaccaagcaattgacacaaggggccatgcaccgtgcaaaccttctggttgcgttctcacgaagatgcgaaattgtgacagattttggtaatgatattttgaggttcctgtggccgtataccaagcacatagatgaccaggccaggcggtga

SEQ ID NO: 6409 - DNA, 1041 bp, Zea mays
  Peptide Sequence Number=SeqID_49784
atggtggagctcacctccttatccccagggccaccacgtccttctcggctgactcctcgccgccggccgccgccgccgacacctcatgttcatacctcctcgcgtcgtcgcgggaggatcctcggcgccgcgaccgccacgcctggcgccgacgactaccactccaccatccgctccctcaactcccgcggccgccacgtcccccgaaaatccctcgggcagaactacacgctcaactccaaggtgaacgaggagctggtggcggcggcgggggtggaggagggtgacgtcgtgctcgagatcggcccaggcaccggctcgctcacttccgcgctgctccaggccggcgctaccgtctttgccgtcgagaaggacaagcatatggctactctcgttaaagataggtttggatctacagaacagttgaaggtagcatctagttcttcatttgacattgtggtcattgaagaagacatcacaaaatttcacatccgttcccattttcttcctttcatgaaggagaaatacggtgccaccaaaaaacttgcaaaggttgcatcaaacttaccattcaatgtcagcaccgaagttgtcaaactactactcccaatgggggatgttttctctgtcgtggtgcttatgcttcaggatgaaacagcagtacgccttgcagatgcttcaatacaaagtccagagtaccgatctatcaatgtgtttgtggatttttactcggaacctgaatacaagttcagagtagacagagagaattttttccctcggcctaaggttgatggtgctgttatcagcttcaaactaaagaatgcggaggagtatccgccagttagttccccaaaaagcttcttttcaatggtgaattccgctttcatggggaagcgcaagatgcttaggaaatctcttcagcacatatgctcttcttctgagattgaggctgctcttgacaacattggccttccagttacagctagaccttctgatttgattttggatgatttcgtgagattgcacaatcatttagcgaaa

SEQ ID NO: 6410 - DNA, 411 bp, Zea mays
  Peptide Sequence Number=SeqID_49785
atgggcaagagtaacaaacgcaagcgcgagccgactcctccgtcggaggacttcggcgactcggaatactcggaggaggagttctcctccgagtccgaggggtctccggctcccgtctctcccccggcatcgtctgatgattcagacgactcccaggggattgccgcggaagtctggacgtacatccgggccgtcgagcgctccgggctcgagggctcggatgagtcggagtactcctcggatgaggaggactcggacggcggcgaggacgaggacgacgacgacagcgacgacgacgacggtggcgacggcgacggtgatggcagcggcgggggcagcggcggcgacgacgagagcaagggcagcaccagaggcggcggcggcggcagcagcagcaaggccagtggctaa

SEQ ID NO: 6411 - DNA, 957 bp, Zea mays
  Peptide Sequence Number=SeqID_49786
atggcggcatcggtggcgctgagcagcgggcaccggatgccggcggtggggctgggcgtgtggcggatggagaaggcggacatccgcggcctcatccacacagcgctccgcgtcggctaccgccacctggactgcgccgctgactaccagaacgaagctgaagttggtgacgcgctcgcagaggcattccagaccggactcgtcaagcgggaggacctgttcatcacaaccaagctgtggaactcagaccatgggcatgtgcttgaagcctgcaaggacagcctgaagaagctgcagctagactatctcgacctctacctcatccatttcccagtagccactcggcacaccggagtcggcacgacttctagcgctctgggtgacgatggcgtgctggacatcgacaccactatctccctggaaacgacatggcacgcgatggaagagcttgtttccatggggctgcaaatagtaatactggggcaattgtcgagtgactggtgcagcaactacgacatcttcctcaccagagactgcctggcctacgccaagataaagccggcggtgaaccagatcgagacgcacccctacttccagcgcgactcacttgtcaagttctgccagaagcacgggatctgcgtgaccgcgcacaccccgctgggtggctccaccgccaacgccgagtggttcgggacggtctcgtgcctggacgaccctgtcatcaagagcttggctgataagtacggcaagacgccggcgcagctcgtcctccgctggggtctgcagcgggacacggtggtgatccccaagacctccaaggtggagaggctgcaggagaactttgacgtcttcggtttcgacatctccggcgaggacatggagaggatgaaggccatcgaccggaagtaccggactaaccagcctgccaagttctggggcatcgacctctatgcttag

SEQ ID NO: 6412 - DNA, 870 bp, Zea mays
  Peptide Sequence Number=SeqID_49787
atggccgcgccgctcacggccgtccgggcccgcctcctcctcctcccagtgacctgcacggcagccggtaccaccggccggccggcccctccgtccaagagcagcaggccgcgtctactaccaccaggcaccacccggtgccggtgctccaggcctcccatggaggcggtggcgccggtgtccgcggcggcggtggcggcgctgctgctgctgccggcggacgcggcgctggcggtgggcggcgagttggggatcctcgagggccgcagcttcgcgctgctgcacccgctcatcatgggcgggctcttcgcgtacacgctctgggcggggtacctcggctggcagtggcgccgggtgcgcaccgtccaggacgagatcaacgcgctcaagaagcagctcaagcccgccgccgcggccactcccgcggcggtcggcgccggcgcggactcctcctccaccacaaccccgccgcccgctgcggccagcaagtcgccgtcgccggcggaggcccggatcgaggagctcaccgacgagcggaaggcgctgctcaaggggtcgttccgggaccgccacttcaacgcgggctccctcctcctcggcctcggcgtgctcgagtccgtcggcggcgcgctcaacacctggttccgcaccggcaagctgttcccgggcccgcacctcttcgcgggcgccgccatcaccgtgctgtgggccgccgcggccgcgctcgtcccggcgatgcagaagggggacgagacggcccgcagcctgcacatcgcgctcaacgccgtcaacgtcctgctcttcgtctggcagatccccaccgggctcgagatcgtcggcaaggtcttcgagttcaccacctggccatga

SEQ ID NO: 6413 - DNA, 3831 bp, Zea mays
  Peptide Sequence Number=SeqID_49788
atgcttgcgttcgagcagcaggtgttggcggatctggtggaagatccgaacggaggtctggtggtgctctcctcgggtctccctctcgcttccctagccgctaccctcctcctccatctccaccagacccccggcaacgcggctggaggaggatgtctcctcgtcctctccgccaccgataccctcaaggcccggatccggcgccgcctccaagacaagctgcaggttcacgacgtgccccctgacctcgccgcgcagcagcgcgccaccctttacgcctctggcgctgctctcttcctctctccccgcgccctcgccgccgacctcctcacctcccgcctcctcccctcccgcgtccaagccctactcctcctctccgcccaccgctccaccgatacctcctccgatgccttcatctgccgcctcctccgtcaacgcaatcttctccccgtttacgccttctccgattgcccccatgccatggtcgccggtttctccaaggccgagcgtaccatgaagagcctctacgtccgccgtctccacctctggccccgcttccacgttctcgccgcagccgacctggaacgcgccccgcctgacgtcgtagacgtgcgcgttcccatgacgccgcccatgaggggtatccaggctgctgtcctcgctaccatggacgcttgtctcaaggaacttaggcgcaccaacaaggtggatgttgaggacctcaccgtcgacaagggcctcttcaagtccttcgatgagatcgtccggaggcagctcgaccccatctggcacactcttgggaagaagacaaagcagcttgtggctgacctcaggacgctacgcaagctgcttgattacctcgtcaggtatgacgccgttacatacttgaagtaccttgacacattgagagtatcagaaggtgtcagatcagtttggatacttgctgactcaagccataggatatttgagcttgcaaaaaggcgcgtttaccaggcagtgagaacagatggtgttaatgttagcatagataataagggcacaccaacaaagaagaggaaagtggcacataattctaccaagaaaggaaaagtaactggtagctgctcttggccccttcatttgcaggaattgttgcaagagatagcagaacaacggatgaagagcagtgccgggaatgtgcatgatgaggacaaaaatgatgaaagtggcatagttttggtatcatgtaaagatgaacgcacatgcttgcagctgcaggaatgcatattaaaaggcccctgtcaggttatgcgagaagagtgggagaagtatctgattggaaaagctgagctgcatggattgaataaggacaagagaaaatctgagcaaccaaaaggtgttggtgtcctggatggtgaagttcaaatgggatctagtgagagtgtgtgtccagttagcattagcaaactcgaaactaatgccttacttgccgctgcctctgaattaagaaatatatcaaatgaagcagatgtcaagagtagctcaaatagcagctgcagcaaggctgggggagcaaaggggaaaccaaagaaaaccacttcaaagagacaaggcagcaatcgaaaaaataaaagtaaggagggaaatgacaatagccaaggtactggtctggattctgaaggtcaatcaggaaaagcagatgtacaggctgagattgttgcttctaagatgtccgcatatgatgcttccatgtcagcctctacttctaatgttaaatttaaccattcatctgctttcggaaacttggcaaacgccaagccactacctcctgtgcagtttcatgctctagacagtgaccaccaggttcttgatgtatggaagccatctgtcattattgtttatcatccagatattacctttgtaagagaaattgaagtatacaaggcagaaaactcatcaaggaagttaaaagtttacttccttttttatgaagattccactgaggtgcaaaaatatgagtccagcattcgacgggaaaatgaagcatttgaatctttgatcagacagaagtccctgatgatgatacctgttgatcaggatggccgttgcattggaccaactgttgcaaatgaaccagagcctcctttatgtcagaactcaattacaagaaaggcaggtggtaaaaaggcgcccgagaaggagatgcaggttattgtagacatgagagagttcatgagcagccttccgaatgtattacatcaaaaaggtatccgaatcgtaccggtcacccttgaagttggtgactatgtgctctctcctttgatctgtgttgaacggaaaagtattgcggacttgttccaaagctttgcttctggtcgtctgtacaatcaggttgagacaatggcacgttactacaagatcccggttctcctcatcgagttctcacaagataagagcttttcctttcagtctgcaaatgagattggtgatgatgtctctccgaccaacattatctcgaagctttctctgctagtgctgcattttcctcggcttcgcataatctggtcacgcagcttgcatgctacagcagaaatatttatgtcactgaaaacaaaccaggatgaacctgatgagaaaaaagcaacaagagttggcgtgccatccgaggatggtatcgtggaggatgatgtgaggtctgaaaattacaacacatcagccattgagttcttaagaaggcttcctggggtgacggattctaactaccgagcaatcatggatggatgcaatagcttggccgagctggccctgcttccaaatcgtgtgcttgtgggccaaagcaaacatgcagaaaatgagcagcagattatgggctgggcaggctctaacccagcccaggaactccccctctcccccacgttcttctttgttgttgttgggcaagtagtgcggctgtttgagtctacgctacagaatgactatctaaatcacacctcctgtggagcctttcatgctcagatggaatcttgggaaagaattttgtactggatggcagttttgtgggagcgtgggttcagtcatgagaatcctcaagtgagatgcctggttatgcaatcctttttggatattgcatgggaacgctacaaggattgcactcagataattccaaggggttttgtgcttggtcctctgatacgtggtttgaatgatgtggttcatcataaggattttgttatgaatagacagcttgttaacttgaagtctagtgcagtttgtgaacaggttataaaagttgcaacatcactgataaatgccactgaaattccacttaacccgcttctgcatttcattgccacaattcctcgagagttctctgattatattggaccattgagagtagtagttcaaaaatggtttgttcagaaggaagaatgttctcctggtgacactttgttgagtaagctgattgatttctctgccaccttcgtaagtcaaaaacggaatgaaggttcgaatgtttttgatgacgaggatgtggatgcatgggaagctgaagcaaggtgggctagaacccttcttgtaacctcggaggaggaacatttgaaacgaatcttcaggtttttggaggcatatggctacaagctctctgagcaatgtcccagtggagatttcatacccataaaaaattttatcattgttttaagcttcattgaggaacttgagtattacagggtgtatgttccgtccttcttggagtggtggaagagggctgcagagacagtgcagggaatggtcaagaaagctggattctctcgtcattttgggagcctggaagatttggaaccactacaatag

SEQ ID NO: 6414 - DNA, 219 bp, Zea mays
  Peptide Sequence Number=SeqID_49789
atggcgcacagcgccgccgaggggacgctacggcggggcggtaccagcgaggacgctggtcaaggggaggaggacggagcggtgccaaacttccctgtgcggcaggatggcagaggggaggacggaggcgacggccggagaaaaactttagtggagaacttagaattagaggatgaagggaggggaaaaaggtggattagggtttcaaacctagattag

SEQ ID NO: 6415 - DNA, 597 bp, Zea mays
  Peptide Sequence Number=SeqID_49790
atgtccaaaccggacaaaactttccccctccttatcctcccggtgctccccagccttcttaaccctggggttggaccgcacgagttcggattgagtgactgcccacacagtctcgagtggttgtacgataaaggagtacagaaagtatatgttaatgcgggccatctctcactcacaatgcaatattcccccatgattcccggcctaggcagtggtagagagaatagaggggtcgggagggggctgcccacggggagggggcggagttccgcggcggggatcaccgccggtgggctctgggtggggaacgggggctggaaagtggcgcttcgggttcgtggctacgcgagggagctgctcggctcactcaattccttgccggaccaacagagaaggagagggaggagaaggaaaagactcaccggagaggaagacgacgccggcgccttgcgaattgagctcggggaaggggaggagggggatggccgaagctggtgcgaggaagaaggagctcgggggggagctttttataggcgcgcgggggaagtggggcggtggagctccctgactccggcaagcttcccggtgctgccataa

SEQ ID NO: 6416 - DNA, 330 bp, Zea mays
  Peptide Sequence Number=SeqID_49791
atggctggagatttttctgcgccatgtacagggaaggagagagctgtgcgtgtgggggagaggaggaagaaggctgtggcggctgggaagaaatggagggtgggagtgaaaaattgccaatttgcaagggagagaggtgctatttatagaaggggcactagggttagggttttaaatgggccaaatgggctggcccaagcacgaaatcgggctgcgttaaattatttccggaataaaaatgctctcgcggaattcgtcgctacggaaaaacagagcgaaaagagttcggacgaacgaaaggttgagcgattaactcagccgggagtttga

SEQ ID NO: 6417 - DNA, 189 bp, Zea mays
  Peptide Sequence Number=SeqID_49792
atggcgaagctaaccgaagcgctggcgcgacttgagggtgactggagtgggctggccacggtggtcgaggctctggcggcaatggcgggcagaaaggagctcgctggagctaaggaggggtgtctggccggcgatggtgagcacgggggagaagatctctggtttgacgtgtccaaggcacgcgtctga

SEQ ID NO: 6418 - DNA, 276 bp, Zea mays
  Peptide Sequence Number=SeqID_49793
atgggagaccacgtctcaggtcgcgtgagggataaagtctgcgggcaggttcactcagggcaggcagatcctcgatggcaggctctggtgctggctcctggactacctcctgagcaactccttgctccggaacgaggacgtactatccgtcagcgagattacaatatatcaaatgcaatgaataagagggtagacattgacctctgtggtttattctacaaatttgaggttggaattaattcagatactccttgtgcaaaaataacaaaagtttga

SEQ ID NO: 6419 - DNA, 1305 bp, Zea mays
  Peptide Sequence Number=SeqID_49794
atggatgaaggaactcccttcggtggtctggagtctgaggacaacgccaagccgagccacgagcttcacgtcgttttttctagtctatggggccgaggctatcttgcccacagacttagaatacggttccccgaggacgagggcgttcagacatcagtaaggggagcagcagcaccctcggcatcgactccaccttcggtggaatccgacccggtctcggacagcaacacggtcagaggatctccacctcgaaggaagatgtcaacactgcacctgagccatcaccgccaggatctcctccaggaacctggcccgagtagacggctggaccggccgctccatagcctcagccagctgtcccccgaggacgccagcccggctcatggcctcggcagcccgactctagggttggttccgccagtggacgacccggccaggctccggccgacaaagcttcttctccagccgactccgcctttgtccacgctcacaccgctgcctccggctccggctcatcgcagagcggccgagggcctcgacagccgcaatgaacatacaccggcactcaaggtgccattacaaacggaactccggttccgctcccgcgggtatgaacaacctccacatcggagggcctgcgggacgacaagctccggcgacctctgcagcagcagcgatggtcttagggcggacgctaccgctggaaggctctcgttcgcgtccccactcgagggacgagaaccagacattaaagccaaagagccggaggtcggttcgcgggtggcgctgacggtctcgtcggcggagaagctttctccagctgccaccacctcagcaccggcggcggcgtccacctacccaccaacactgcaccagcaggcgccgaccgccccaaagcgcaccggcaggtcctcactcccgtcctcgccacgaaaacgagaatgggaccctcctagaacacgagtaccgccctcgcggcgtacgacatgttgtgagaccccccggtgcggctggccaccgtcgcccggacagaggatggaatgctgcaccctggactgggcagcagcagttcgccttccctggcatggctggagggcgcctcctccgcagagctggaggatggtttccacccccagaagccggaggaagaaacgggacaccaacccatgcgaaggcaggccccggctcgcctcgccctcctccccaataaggatgatgaagatccttgaagctgagggcggggcagaggccgcaacccggcttgcttctccccaccatcgaaccggtggtcaccgtcttgggtga

SEQ ID NO: 6420 - DNA, 1002 bp, Zea mays
  Peptide Sequence Number=SeqID_49795
atgcaggcgacatgcaaccgcaccacggggatgcaccctttcgacttcgacgcgtccagcatggagtcccaggcctacacgtcatgtaaccggcgcgccggttactgcgtgcgaaaaactgcaccgccacttacgccaatactgcgccttctcgactgcggaaccggtgccgcgattcaaggcaaccctgcgcacggcccaacagtgccaacccggcgcatcggtcacagatcagttagccgcgggagaaggcgcgacagtcgatatggccaaaagtgggccgacagtaatggcggcagcaggcgagcggaggcggcggtcaaatcgtctgcaggctcacgtcccctcctggagcagcaggagagccctctcccacggcgtgaagatgacgcgcccgtgttccgttcctcgaacggctcgcgcaacagctgccccgcgaaccactcgtcccgtcgcattaactccgcggcagggcaggcgacacctttggctggcccctcgaaagggttcgacagccgcctcagagcactcgggctccgcgcccactactggtcagaggttcgaaggctagcccctcggaagggttcgacagccgcctcaggccactcgggctccgcacccactactgatcaggggttcgaaggctggcccccgaagggttcgacagccgcctcagaacacgcagagcgagggatgactctaggtacatccgatacatggccgaggctcgagctacgctcccgaggtaccctaggacatttccgagaccagcaggagcgattctgtaacggaatcccatcagagggaggcatcgagccctcggaccctatcaaacgggaccgggtccggcaaatcacctgcagaggctcgggggctgctctcgcaaacccggctccggccaaaccgttgacagcgtcaacataccagcccgagaactcggaacctgactatgcacccgggctacgaccagttcgcatgagggaacaaatcagaccggcctag

SEQ ID NO: 6421 - DNA, 360 bp, Zea mays
  Peptide Sequence Number=SeqID_49796
atgcgggtggtctgggaggggtccgcgctgacctggatggtcttcgcgggtccgccgtctgccccggacggctgtactttcggcgacttggagggtgccctgggctggcctcccgataatggcgttaaaagggaggttgacctccacgacgtcgaactggacgttttctgtacggaagttctcttccgtcccaaatgtaaccgggagcgttatgctcccgatgggatatacgggctacgggcccaccccggaggatgggcgagagggccccagccgcgaccccgggacctgcagctgtctgaatgctgcatggctgataacattgaggctggcccctccatcgatcaacacgtgatgtag

SEQ ID NO: 6422 - DNA, 1086 bp, Zea mays
  Peptide Sequence Number=SeqID_49797
atggatcctggcacacatatggtatgcgctcggttctaccccctggaaccgggtgtgacagaagtggtatcagagatggttcgcactctccaaactacccgcatcaacaccaggtacgcccctcagccccggcagatcccggtctacccagtggtagtcgaggaagttccggcggatctccctcccgtccgagtggagaatgtaatcaacctggaggacagctcggaggaacagctgtcgacccccactccgttggccgaatccctggctttcgcagctggatcatcgacgtcagcatcgtctgcaccagccttccaagcacctgcacccggaggagacgatcccgacgactccggagacgatgatgacgaggatgacgacgacgacgaaggaggagaagacggacacgtccatgaggaagctgattacgcccagcaggacaacttcatggggtttggtcctgttgtcgaacattacacatcaatgttcgagacggggcacttccccaacctgctgcaagaggtgctgcacgcgctaggcacctacgtccgccccctgtacgaaacaaggcgagtgagcgagcctccccgggcttgctattacatcactcgcatccacgtcagggtgatggatacaggtgacaggggattcaggaatctgtctgctcatgagtccctgacaccactatcgacctacgctgcctcggtcagcgatgctgcccgtcggaccctgtggtcgctcagccacacctaccggcagcagctgcagaacacgaggttcaggcatcttcctcagcgtctgcgtggaggaagccagaccaacatcgtcccaggagaagctggtgaggatcgcctcaacaccctagctggtgtagtggccggtctcaacaccgacctggacagtgccaccctggatctctatagggtgcacttggagctggagaatgcccacgccaggattgcagccctggaagcccaactgcaaggactagatccgcccgaagctcaggaccccgccatggcgttgtctcctccccgcaagaggctgcgctatggagagcccggatccgtcactaggctgctttag

SEQ ID NO: 6423 - DNA, 468 bp, Zea mays
  Peptide Sequence Number=SeqID_49798
atgaggtgtcccgcttgccccgagcgcccaattgtgtcgcagaagcttttggtgaccaccggcgaaccttctggccagggatccgcgcttcaattgccgtcagcggtagagaacggccacgacggcgacccaccctcaactcacacggcgtcaatgccaatggcgattagggttttatccgtcacggtcccgggaagaacatcccgacagaagggtcccacacgacagcaagagccttggggcttgcggcggagcgagtggatgaccgggcggtgtggaatcgtggttcgcgaggatctcgcgcggcgcacaaaccatgccgccccaccggcgcaaagctcggcggaggacgtgagtcgtgctgttgaggacgagcgtggcaaggggctgacggttatggcccacagccagagtcacgtgcaggatgatggcggctggcgcatgtggaaaaagaaggttttggtttaa

SEQ ID NO: 6424 - DNA, 486 bp, Zea mays
  Peptide Sequence Number=SeqID_49799
atggctccggtgaagtggtcgaggacggaggtctcggggatcacaacagtgtgcgggtcgccgtcggagatggctggagtcggtcggtccacgcgcgcaggcggggatgctcgtcggcggcgaggagtccggcctggtcacggcgagatagaacaattggacgggtcagagaggttcatgggatgccagagaagatatgggtgcaaggaattggtcgcagactcactggatagctcggtccacgcgcgacggtggaagaccgaagtccggctagggacagggagttgtagcgtcaccaaggtgccagtgtcagaatgcctggtcccgaggtcaaactgcgccaaaaccgtgtcaaatgaatttggtttgagttcaaacttttccaggatgtgttcaagggaatttggcacaactttgatatttggatctcctggctttgagtttcgaaaaacagagaacgcagatgatctttgggaagaggtctga

SEQ ID NO: 6425 - DNA, 1404 bp, Zea mays
  Peptide Sequence Number=SeqID_49800
atgaggaggggcctaagcgttttgcttgttagttggaaaagtgggaagaacacaagaacacacaaggatttagagtggttcgggccgccggagcgggaaacttcttgtagaagggatgatgagtaccgtacgccgctcggcatgggcgcactgttccccaacagactggtcaggctcgccgtcttctgggagtccggtgtccctctgtggaggtttggacccatcgatacaccccgggatcatcttcatactgtagaagagggtacccccgattcagggtaccgacagtggcccccgggcccacctcaggggaggatgcgagcctgcaggcttcttgcgtggcggttcgcctttttgaccgctggttatggcaaagatgaaggggcgcttaaccgcggggcggttgcatgccccttgtgcggcagtttgcccttcctgaccgctggttgcctcgaaaatggagggacacataaccacgaggtagttgcatgctccttcttcggatggggtgcgccggtgttctctggaggaattcgcgtcagggccgtctcctccggcgatctcatcgccgaggagctcgcgctcgtggtggtgccgccgatcatcccggtcgcaacctccgaccggtggtcatccacaaggatgactaccagtcttgtggtggagagaagcgagccggcctgcggcctcccccctgccctcagcttcaaggatgttcatcatccacgctggggaggagggcgagccgagtcggggctgcgcctttcacgtgggctggcggcccgcttcttcctccagcattcgggggagaagggcgttcgccagccttgcgaaggaggcaaacttcggctacgcggggttggccacatccacggcttctcccgcgccgccggccacaccgggggggggtcgtacaagacgtcatacgccgcgggggctgcggcagcgttcttggatggtcttgtcttcactcccgcagcgaggacgggagcgaggacctcttcgcacgtgctggggcagctgccgcccatcggtgcagaggtggtcaatgccgctggtggggctcaggtggtcgctcccgctggtgaggctgcccactgcagaggtggttgcctttgctggcgataccatcagtgccacctgataccggacctccggctctttggctttaatggcctcgttgtcgcccctgtagggagacgggggcgaggacctttccacagcggcgtacatgctgaggtgatcgccgctgctgaggtggccaccaccgtcggtgctgatgtggtcgcctccgtcggcgagccgctcggagctagctatcccgcggtccttactggtgtggaggtgcttggggagggagatgatgttcttgccatcggattctcatccaacggtggtgattag

SEQ ID NO: 6426 - DNA, 420 bp, Zea mays
  Peptide Sequence Number=SeqID_49801
atgttgatagactacacaacagtactcgatggaccaagtgtgacgatcgaggccccgacacagcaaggtgtcgagagcgtcgtggaaatgacaaccgcgagcagcgtcatgagtgatgggtcgggtgatccatccttctggctcctactcctccgaaagctccatgatgtggctcgaactgccactgtcgtcgtcgtctccgtcaaggtctcctccagcatctggggtgccctgtggtggtgctgggagcacctctggttgaggcgcatgggagggttgcctcccaaactccacctcctactgaggcgagggggaagagtcctactgctcctgctcctggcatcggtgctcctgctcctcatgcaggcggcgatgcagcctctccaggtggctcgactgtcctatcaccatgcggcgtag

SEQ ID NO: 6427 - DNA, 306 bp, Zea mays
  Peptide Sequence Number=SeqID_49802
atgacgcccgcccatgcgcctagctcccttcttagagccccgctagtgccccgcgcacacccctcgcctcatttcgctcagcttcaccctctctcgtgctctgctcacgctgtcagccgccgccggagacccgcacccgcgttcctggccatccagctcgtcggagaccgctccaagcctccccgagctccgccccgagacaatgagcagttcgaggctcctgagtgtgttgttggagacctccctgagcaacaacctggtgaaggcaagtgtcctctgacctattatgtcctacatactttatga

SEQ ID NO: 6428 - DNA, 189 bp, Zea mays
  Peptide Sequence Number=SeqID_49803
atggggctcggtgtatgcggctcgctctgtcaaggtggcaatgagactgatggttctagttatgactatggtgctgatgctaagcctacacaggcagctgactgggggtttgccactaagaaagaactagaactcgtcatattcctagaactcctcaaagtcatccatgttgccagcatcacctcctga

SEQ ID NO: 6429 - DNA, 366 bp, Zea mays
  Peptide Sequence Number=SeqID_49804
atgaggaacatgggattcccgaagcttgagctcggccaatctgcaatgccaaaggatgatcttgcagatagccttgcttatattagcttgaagggcggtcgtgagatggctgatgaagccattaaaaagaatttgaaagaatctcacgatacccgagaggaggctaagcaagctgaagaagctgctgaacgcgccatgattatagccggcctttcaccaccaccggagccatacaatcctgaagttgacccggctacgaaagaagctttggatataatgaaggttgctaacgaagtcgttgacgaagtcgtcgacagactattacacgaagctgctgaaaaagtgctaaaggaagattatattttt

SEQ ID NO: 6430 - DNA, 423 bp, Zea mays
  Peptide Sequence Number=SeqID_49805
atggagcttttcttggatgcagaccgaagaccaacattgcataggaacacactggagcccggtgatagagggttcaggactatgtcagctcatgagtctcttacatcgctatccacctacgctgcttcggtcagcgatgctgctaggcgaactctgtggtccctcagcaacacctaccggcagcagctgcacaacacaaagtacatgcatcttcctccacgtctttgtggagaaagccagatcaacattgttccaggtggagctgaagaagatcgcctcaacaccctagttggtgtggtggcaggtcttaacaccgacctggatagtgctaccctggacctctctagagtacttagagctagaggatgcacatgcaaggattgcagccctggaagctcagctagaaggaagggatccccctaa

SEQ ID NO: 6431 - DNA, 501 bp, Zea mays
  Peptide Sequence Number=SeqID_49806
atgcccactgcaccaccacagggcatcccagctgctggaggagaccccgatggagacggagacaacgatgacaccggtggcagttcgagccacgacacggagctctcggaggagcaagagcctgagggatggatcgctagacccatcactcgcgacgccactcgcggcggggtatccgatggccttgacctgaagtactacccttgccattcgaccggcagtgctggaggtgtcattgtctcgccttttggtgagggcaatcccagcatggtcaacctggccgccgtgctcaacaccaaactggaccacacccttgacgagttaggcaaggttcgggcggaggttgcggaattgcgtgctaagtgcgcaacacgccactatttggatggtggttctccttcccctatcgggattcagcacctttaccctttcacccgccccgtggtcgcttcgagtatggtaccgctgactacaggacgcagaaaagatttggatccatag

SEQ ID NO: 6432 - DNA, 483 bp, Zea mays
  Peptide Sequence Number=SeqID_49807
atgaaccccaatggaaatgaagtaaatgatgtcaacgacaatactcctgtcttaacaactatgaacgagaaaaatgagtcacagagacattccatgaatggaatgaagaacaacaaaaggaatagaaaaatgtttggatacatgattagtccacctcaacctcaagcgaaagccacgaaacacatggatacccaaacaaaagaatcaagtcaggctcagctatatgagatacagacaccaaatcaaccctcaccccctgttggtcaagcaaagttgactcggaaagaactcaaagcaagaggtgcttgctactactgcaaaaatgaaggacatcttattcgcgaatgccccaagaagcgtctagaccgaataaagaagaaagctgccaagcatgacctaagcaatacttcagaagacccaccattttataagtatgatgatgaaggtcgcttatttagcattcattgcggagcaaagaagtaa

SEQ ID NO: 6433 - DNA, 363 bp, Zea mays
  Peptide Sequence Number=SeqID_49808
atgggaagtcttatgttgggtgctagtcgtggtcgacaggaatgggggcatctggcaagctcttatagttccggctcaggcagattggatacgggcatagttcccaaagctttaccctgtagtctggactataagttggttatgaagtttgcagatgaagttatgatgctgagctccatggatgctagtctagtgatacccccggtcatcttcctgtggatggatgtccatgttcgctgtactttgatgaataaagacaacgagcagtctgtggttcctgagtgtgttgctgaagaacttcctgagcaacaacctgctgaaggcaagtgtcctctgacctattgtgtcctacttactccataa

SEQ ID NO: 6434 - DNA, 96 bp, Zea mays
  Peptide Sequence Number=SeqID_49809
atggcgccccgcgcgcgacaaccagtaaatgcccctagcggctacgtgaggttcctggtctgcggcggcactcgcgtttcactggtctacgagtga

SEQ ID NO: 6435 - DNA, 351 bp, Zea mays
  Peptide Sequence Number=SeqID_49810
atgaacagactctacttccttgccgacaccgtgggaagcctcttcattatggcacttggtgagaacacggtaggtagcgacgataagtacatcagcgatgactccacctctgaggtatcactttccgacgatgatctcaccattgaggtagatgagctgatggctgcttcggcgagtcaggacaagtcgcttaggcttgcttcttgtgagaggaaagaattcaagagcaagtatgagagcatgcttagggagcttgagtcttctagagctactgttgtggtgtctaacaagactaaatgtgatgggtgtgcccttcacatgtcgaacatcaccacattgcagaccaaataa

SEQ ID NO: 6436 - DNA, 564 bp, Zea mays
  Peptide Sequence Number=SeqID_49811
atgaagcgcaagaactcgggcagattaacacgaccacgtgttcgacgcgccctggcaacgccagagcacgccccggcgattagccccgcgcccacgcccatgcccgcggctgtaaagcccaccccggtctcgaccgtacgcccccgctcactcccaaccctgcccgagcatgagttcaccggcgtttgcctagagaacagcgtgccagcggccgagcgagccccagccaccgtagccggccacgccagccctcctccaccccgtctgaccctttggctagcttccccggagctcagtgaagctcctcgagccacagattggacaccacctcaccggaaacgccggatcgacgtcactggacttcaaccggccgccgttgcacgtagaccgagccacacggccagagcacacgccgccgacgagcccgaccgcctgcgcatagagtacgtcctcattccagagcaaggaattgctcaggaggtagtcccggagccagcaccagagcctgctacggaggacctgcctgcccaagcttttgatggcaagccccggttttatgcataa

SEQ ID NO: 6437 - DNA, 369 bp, Zea mays
  Peptide Sequence Number=SeqID_49812
atggggaagcctgtcccatcactcctcatgctcctcctcagccgagataggatcccactcgactgtccaacccggtggcaagatggacgaccaagtcactctagcaaccatgtcctccagagaacctgtaaaaattatgccacaagcaaggctgagtacactaatactcagctagacttacgtggtcagcatggatcaagcagtctcattagctgcaagaagcagacgattcgaatcgagtttttatccttgcaagtgaccgcacttatacccaccataacaggaatgggagaccacgtctcaggtcgcgtgaggggatatgtctgcgggcaggttcactcaggatttggtaaacattatgctaagtaa

SEQ ID NO: 6438 - DNA, 975 bp, Zea mays
  Peptide Sequence Number=SeqID_49813
atgagattgatggttcttgttatgattatggtattgatggctcgacttagacacactgcacgaaagtccgtcatccccttcttaccctcccgccttgctgagcgtccgcttcgccgtcccgtggccggacagtccagccacttggagagactgcaccaccgcctgcatgaggagcaggaacgtcgacgacaggagcagcagagctcttccttctcgctccaccaggagatagagtctctgctggaggagaccccagacgacggagatggcgacgacagctcgagccacgacaccgacttctctgctaaccttgagccggaaggatgggttgctcgacccatcactcgcgacgccgctcgcgggtgtcacttccacgatgcgctcgacaccctgctacgtcgggcatttgaccggcatacttggtccgtcgagtatcgctgtgtggtctaccagcacagtcgcggggtctacccggatcgctgggaggcaacttgcttggtgcgctgcccggagaacagtctccagggagcggaggcttgctcagagcactattctatctctgagcgggactcagctgaggcagccatgcaagatgctgcacggcgtgcgctttcgcactactgctcggttttcggtggggcagctgacggtcttgacctgaagtattacccccgccgttcatctggcagcacaggaggcgtgattgtctcacctgtcggtgagggcaatcctaggttgagcagcacagtcaacctagccgccgtgctaaacacggagctggaccatgcattagacgagctgagtagggctcgtgctgagatcgccctgctgcgggctgagcgcgcggaacgtcgtcacctggacggtggttcccccgctcccgtcgggactcagcacccgtaccgctcacctcagcgtggacaccagtcttatggcaatcccgactgcaagaccaagatcaatctagaaccatag

SEQ ID NO: 6439 - DNA, 243 bp, Zea mays
  Peptide Sequence Number=SeqID_49814
atgagggagaaaggcagaacagtcccctccgggtatcgaaattccggcgatctcatctctaaacccgttggcaccacggggagagagagccaccacgtggccgctcctcatactggtgctcctcaactgcatcaagagggcatcttggggaagaagcatggtgccaccaagagcgttgttgttcgtatgttccgcgttgttgtccagtgtgtagaggatctcaagctatcaggttggctctga

SEQ ID NO: 6440 - DNA, 473 bp, Zea mays
  Peptide Sequence Number=SeqID_49815
ccgctgccgccaaggatgtggcgggctccatgtcccagcgactgagggaggcgtcgcagcagctgaagcaagcggcctacttcgccgaccgcgtggcgtcaggtgtcctgacagtggacatggctgccgaagtcgagaggctttgggcgcagcatgtggatgttgtccgggagaagtcggctgcggaaagtaaaaaccgcaggctggcggagaaagttgccgccatggaggccgagaagacggacctccggtgccagctggcggaggagaggagggaggcgaatcaggccatcgctgaagcgcaggctgcgcgagcggaggccaaagtggcgcgggcggagagcagtctcgccagtcaacgcgccgaggagctggaggcaaggttcaacgccttgcgcagccgcgtggacaaagccgagtcctcgacacgctcggaagttgagcggacgcacgcatacgggggcactctttga

SEQ ID NO: 6441 - DNA, 483 bp, Zea mays
  Peptide Sequence Number=SeqID_49816
atgaccctagagactcatcccttacagccaagctggcgttcgttggactctgagtcttttggatacagggctgaggatactatcgatgagattgctctccacggactgaccaccttctgtggttttcaccccttggagctgtccactcatcccattgaattattccctgctgaaaaggaggacgatccaatgtggaaggaccgagtggagcatgccaaggatatctgggctctttacccagggcagactgcgcacttaacggtgaggcggggagaggcaatgtctcatttgatggctttgttggaggtcaccaagatcaccttggataacagagaagaacttgtggtagacttgtccactgagatggtggagaaggacctacaggtggaacagatgtccaacgaaatccaggagcttgaggagctagtggggaccagggagaacaccattgaagttctcgaggatcagctaatcaacacttag

SEQ ID NO: 6442 - DNA, 351 bp, Zea mays
  Peptide Sequence Number=SeqID_49817
atggtgcagaggctcacccggtccacgtgctccagcggggttccgaactccggcgagcacgattgcgctattccggtggcgggggtcctcggttcaagctcgggcaagcttcactgcctcctaggggagctatctaagggcttggatcaagcggaggagggcgggaaagggttcggcccacgatggttgccctcgggcggctctggctggtcgcggggaggtcgccggagctatcggcgagctcgggtagcacttccgtgggtaagcggacacacttccgtagctgagatacgtggaacacattatgaactgccgacatatggggtggcaacttcaattgatatgctatag

SEQ ID NO: 6443 - DNA, 234 bp, Zea mays
  Peptide Sequence Number=SeqID_49818
atggatcaagcagtctcattagctgcgagatcagggctcaccgccttggcgtacaatgcctcatcgattccccgccagcagatcagtgctcaccgccttggcgtacaatgcctcactgaccccgactgccgtcgtgcagtgaccgcacttgtacccaccataaccggaatgggagaccacgtctcaggtcgcgtgaggggtaaagtctgctgccaggttcaatcaggctcttaa

SEQ ID NO: 6444 - DNA, 129 bp, Zea mays
  Peptide Sequence Number=SeqID_49819
atggcgagcggaattgagctcgccggagctaaggaaaagtggctggccggagaggagatatggggccaggaaatctggtctgtctccctgcccaaacccgaggcaattcccaggttttgtcgtgtctag

SEQ ID NO: 6445 - DNA, 678 bp, Zea mays
  Peptide Sequence Number=SeqID_49820
atggccggtgtggtagcaggagagggatgggcaacgaccgacgcagtggaggggacgacggtgcagaagaggacggcagctgcgactgcgagggtgccagggaggagatcgcatcaggctaggagaaggtcgttgtgtgcgcctgctgggagaagggcgtccaaggcaccaacgacggcgatgtgcgctctctcggtcgcatggagcccatcctcgagtgtgccaatagcggtggcatggcggcctgcgctggtggcggcgacgaggccgcccgcgcccataggggagaggaggccgcccgcgagtgtgccagcagtggtggcgtggcggcccgggctggcaatggtggggaggtcgttcgcgcctgtaggggaggggaggtcgcccgcgcctaggagaacggtggcgccagtgttggagacgagatctgcggtgggagcgtcgcaggaggatgccatcggtcggcggacggggccgccgatgggacgagcgagggtggcagcgtccgcggcggcgacacgacctagagacgaggtggggagggtggcgcttccgcagcggtggcacgacgaggagatcggagcgtgcccaggaggtggcacgactaagcagggaggttgggcggccagggaaggggggatgacgatggctggggagggaagagagagacctagttag

SEQ ID NO: 6446 - DNA, 576 bp, Zea mays
  Peptide Sequence Number=SeqID_49821
atggagacgggcgtcatgcaggagttgaagatggcaagccatgtgcctagttcactacacttgaaaggggcctgcagagcaaggcccaagcttgcccttagatcggggctccggcgagcgtatcaggtggtggagaaggtggagccacacccaatcaccaacctcgaacttgagctcgcgatgttggtcgtcatattaccgcttggcatactgttgagcctaaagaaggcagagtttgacgccgagcatcttgaagaggccgcgccacatgtgactggtgaagatcgtttatcaaggtcgctgacgatggaggtgggaaagctgtgcagacaaacaatgtcctcggagaaggcacaagcaaccgagaggtgccccgagagtcagggtaagaggtgccgcggaggcaatacgtctacgctaggtgatgcaagggttgatgcgcctacatctggttccccaagggctgatgctcgaggtaccttgaggatcggggcaagagttggcttctgcgtcaagtcccatggcaacacaaatttccttgaggagacaaaaagaggaggtcgacagggtgagtag

SEQ ID NO: 6447 - DNA, 975 bp, Zea mays
  Peptide Sequence Number=SeqID_49822
atgacttcgtatggtggtcagtcctctgtggaggtcttcgcaaaacattattgtctgcattggcaaaagaggaaaattggacgtgagattgcacagtttggatcgtgcacatttacgccgaggaccggcaagacttcaatggaagtcatggagttggttccatgcgcccgcaataagtggggcaactggtgggatttctggttttacgtttccgaaggcgcagttgaagaccatctaggactccccatggccgtcatgtgctcccattattatgtggcgtacccgcagtttgaggtcgcggaggatgatgaagacgagggagcccttcggtgcgctgcccacatgagtagcgggcacgacttagtggaggaatttatcgggtatggggtgtggcccctggcgcatggctgggcgctgagtgaagtatgccctcacgagatgccttcccggagcgggcagcgggtgcgaagtccagccttcgtgttgtatttgcatggtcgggatcctgccgcattcgtgcgcgaagcggaagacggtgcggcgaggatcgtgggacgctatgtgccgaagacagagggtctacggagctcggatatccgtggggccaacgatagattgaatcgggtcttcgaattgaaccgtttgccatacggtggttatcccggggaagacgccgccgaccgccgtgggaaaaaaccggtgggcgtgaccgaagaagagccttcgcaggtggctgccccggccgctaagaagagaaaactaggtactgcagtggggggactgggggtcttcgatagtttcgctatggagttgatggggacgtgcacaaccctcgggggatggatgtcttcgcccaagctccaggagtcttcggcgcggatgctggaggttaccggggtcgatggcctaagaatgttccaatcccccgcgcggctggcgaaaacttcgttacgtctctcatggctcgtgacttaa

SEQ ID NO: 6448 - DNA, 600 bp, Zea mays
  Peptide Sequence Number=SeqID_49823
atgacgacaaaacaaattacacctaaggtggttgggggtatttatagccccgaaccaccaaacaaccgttggggcaggctgctgtcgatgggcgcaccggacagtccgatgcgccagccacgtcatccaaccgttagggttcgggcgcagtcgactgttggagctttgtcttctagtggcaccagacagtccggtgccgcaccggacagcttttgcagtcgaccgttgcgcgaaggagctgttgctccgctggtgcaccggaaagtccggtggcacaccggacagtccgggtctgagctgctcatgaccgtgagcacggctagtataccagttttagactctgcagaggtggcgcatctttacccacaagtcatgttacccatctgccaagggatcgcgacttcccatacacctctaccgaggaggcgaggcaaggtaacactacgaggcctttacaaagttccactagcttcagaaaacccgctacagtttatgggaagctccaatgcagggttcttgcctgaccgccatcgcaacaaaatcaaccaaggacctccctacactgaccactcccctactgcccttgcccctttcgggtaa

SEQ ID NO: 6449 - DNA, 387 bp, Zea mays
  Peptide Sequence Number=SeqID_49824
atgacgagggtgaaaccatggtttgctggctatgtcataaggaaggccacaagtcttacctgtaacaccccaggagccgccggcgacctccgccgcctacgctcgtggccagggcagctccaaaccacctctgacgtcgacccgcagatcgacgtgaccgccgtgacctcccctacgtcactgaccaccccaccggagctctactgcctccgcatacatatatcttattcattgcattcaatagattgcaacctcgctgatggagagtacatcctcatgccggagcaaggacttgcacaggaggtagctcaggatccagcaccagagtctgccatcgaggatctgcctgccccagctttgaaaggcaagccccggttttatgcataa

SEQ ID NO: 6450 - DNA, 153 bp, Zea mays
  Peptide Sequence Number=SeqID_49825
atggggacggttgatgtgtggggggacggagtgcctcgcccacgtcgttctttggaggatatggttgctggagtgacttggccgtccatcttgccactgggttggacagtcgagtgggaccctacctcggctgaggaggagcgtgaggagtga

SEQ ID NO: 6451 - DNA, 687 bp, Zea mays
  Peptide Sequence Number=SeqID_49826
atggcgccaccaagtggggccctttcgtcagtcggacggtgctcatctgtgatcgcccctcacctcttcactggcgcgtgtgccccaggcgttaggctcgtctcccaccccggaacagaactcgcgaagaaggcgtggcggaagaccaaatcaggcgagggtttcggcgatcattccctccctgggactcaagatatatggatgggattgggttctcgccgagcccgccttgcgactcgccctgccacgcctgccgcgatttcttcttcccccaaagccacccaaaggtctgcgccacaccgccattgccgcacagctcggcctcgcgaaaacgctggccattccggcactgggtcgcctctgggagctccgcgctaccgtgagggatcgtgcctgaagttgggagcgcagtggtgtcaccaagccggcgtcaattcctcaccgtcgctgtggatccgcagagcagcgtggcccgatctcctcggcaccagaattgggtgtctctgttttgacatgaaagcaatttttattgtatcttttatttatctgtttgatgtgatattaatttatgctatactatgtatgtattgtgtgatgcgagtagacgagcaagccactgtggattctgaagttcagcaagtagaagtagctgagcaggagctcattgaaggcaagttgtgcccttga

SEQ ID NO: 6452 - DNA, 480 bp, Zea mays
  Peptide Sequence Number=SeqID_49827
atgaggtggcgcagtccggctaaaagggttcaccaggcgctcactgtggccctgtccgcgcggaacagtcccttgtcgccggagtgctccgtgatccgccacccaacgtggaccgccttctctgcccttcattccgcccattcccctaccgttctaagcttctgcgcgtcgtggtcttgggaccaagccctgcgaacctcggtgtccgccctaaaccaagcaacatggactatagtccacaacagtccgattggggtagggcatgggtcggttacgcccattgaagccgccggtaaaaagtgtcagctggcgcttcgcgattatttgaacgtgtggaggcctttatgtaaaacctaccgcgcggtcggggatcttcgtacatgggatgaagatatacataatacaaagagcacggtcctagagaaggatgaaccagcaccgaagctacccgaggaaaagcttcggctcagcgatggataa

SEQ ID NO: 6453 - DNA, 537 bp, Zea mays
  Peptide Sequence Number=SeqID_49828
atggtgcagagggttacccggtccacgtgctccggcgggttcacgaactccggcgagcgcgattacactattccggtggggctggtcctcggctcaagctcgggcaagcctcacggcctcctggggaagctatccgagggctcggatcgagcggaggtggacgggaaaaggtttggccacggtggttgccctcgggcggttctggcgggtcgcggggaggtcaccggaggtgcgggcgagcttggaaaagttgggcgcggcgcagaggaggcaacggggaatatgttcgtgcacgaggggtggaaccatttgggttggttagatattctctttatttttccaaccatatcaagtccgtcgcaatcggagtccggatgcatcttgggcgtccattttagtgcagactggtcctggaacccgagatggagtcgcagccgagtcggacttgatcgccttcctgttgtgggcacccttgctgctcctcctcaacacctaggcctttcccaagtccttgctggtcctgtccaaggttcctaa

SEQ ID NO: 6454 - DNA, 297 bp, Zea mays
  Peptide Sequence Number=SeqID_49829
atggccccaagcgctggcaggcgcactgttcaccgtggttcagtgaacctcgccggggataagaacgcccccgcggctgagacactgctcggacttgcggccgcgtcccttgtcaccggagtgctccgtgatccgccacccaacgaggaccgccttctcttcccttcattctgcccattcccctaccgttctaagcttctgcgtgtcgtggtcttgggaccaagcccggcgaacctcggtgtccgccctaaaccaagcaacgtggactgtagtccacaacagtccgattgggggtag

SEQ ID NO: 6455 - DNA, 402 bp, Zea mays
  Peptide Sequence Number=SeqID_49830
atggtcctaggttggacgcggccgccggagggctctcgttcgcgttcccgctcaagggacgcgaaccagctattaaagccaaagagcgggccgctcccaagcgcaccggcagggaccgggaaaggggataccccgaaaaggatccttccccgagaaggaaccaggctccgagcctccctacagatcagagtttcgaaggctggccccccggaagggttcgacagccgcctcagattgcgtgggccctacacccactactggtcagaggttcgaaggccggcccctcggaagggttccacggccgcctcaggctactcgggctccgcgcccattactgatcaggggttcgaaggctggcccccgaagggttcacagccgcctcagacgccgagcgagggatga

SEQ ID NO: 6456 - DNA, 144 bp, Zea mays
  Peptide Sequence Number=SeqID_49831
atgtctagaggtagaggagtagactcctcacacccgggttctctagaggacatggttgctggagtgacttggccgtccatcttgccaccgggttggactgtcgagtgggaccctacctcggctgaggaggagcatgaggagtga

SEQ ID NO: 6457 - DNA, 465 bp, Zea mays
  Peptide Sequence Number=SeqID_49832
atggaacagtggtcgcggaggaagaaaggggcggaggggcttaccggcggtggggttgctccggtgaagggtcgggtgcggtccaagagtctctggcgatcacgtcaaggtgcggatcaccggcgatggtggtcgaaggagatgggtcagggagcttcaccagagatcaaggaagatgtgcgtgcaaggaatcggagaatggctcaccggattgctcggtctacgcgtggccacgggcgaccgaagtccggcgaggatgatcttgggtctatggtgaggttctgttgggtccgagcgcttggaaagcttcacgggtcactggcaaagctaaccgagaggccggcgcaacttggacgcgactggagcgggctggccgtgggggccgaggtttgggcagtggtggcgggcggtggcgcggcgtgctcgaggcgaagtccgatgaacttcgtcttaggcaaggcctaa

SEQ ID NO: 6458 - DNA, 306 bp, Zea mays
  Peptide Sequence Number=SeqID_49833
atgacaaaggaggacagcttcagaggccacaacatagctcatagtcttcaggacagcagcaaagctccttcaggccaccagcttcaaggggccgaggcggcaggggcttcggaggaagatatggggatcagcccaggaaaatctattgcttattctgtgtgtcacttagggttcttctcagcactagctcaagtaccattatttcatgtttctgaattttcagcctttgaaccaaaaccgagcacgttcaccttgatccttagctctaatcctgatgctcccattgacaaaaatgtgcctaactaa

SEQ ID NO: 6459 - DNA, 600 bp, Zea mays
  Peptide Sequence Number=SeqID_49834
atggcgccgccaagtggggccatttcgtcagtcggacggtgctcatctgtgatcgcccctcacctcttcactggcgcgtgggccccaggcgtcaggctcgtctcccaccccggaacagaacacgcgaagaaggcgcggcagaagaccaaatcaggcgggggtttcggcgatcgttccctccctgggactcaagatatatggatgggattgggttctcgtcgagcccgccttgcgactcgccctgccacacctgccgcgatttcttattcccccaaagccacccaaaggtccgcgccacaccgccattgccgcacagctcggcctcgcgaatacgctggccattccggcactgggtcgcctctgggagctccgcgctaccgtgagggatcgtgcctgaagttgggagcgcagtggtgtcaccaagccggcgtcaattcctcaccgttgctgcggatccgcagagcagcgtggcccgatctccttggcaccagaattggggtgagtagcacatcatcgcattctccatccttccctcttcgcgtagtacctatcgggatagccaatgcggtcctagatcaccagggcgcggtgcaccggtga

SEQ ID NO: 6460 - DNA, 102 bp, Zea mays
  Peptide Sequence Number=SeqID_49835
atgtctttcgtgcttttcgactacttcgtaagtgggatcctgaaaacgacggagtacatgccttctcgactatatcgatggcagaaccatacggacgagtaa

SEQ ID NO: 6461 - DNA, 438 bp, Zea mays
  Peptide Sequence Number=SeqID_49836
atgcggtcgggctgcctgatgaaaatccttgaagccgaacgatggctgaaaggtaccaacttccgcgaagttgcgttcccccaacgacaaggtggaaggactgctgagtcttctccaacacgctccaaggtcctccccctacgacaagggggctgggtcccacgcgtcatgcaagctggcccaaggcagaagaagccaaaccgccgcgcgcgggaccgagaaaggggataccccgaaagggatccttctccgcgaaggaaacgggccccgagcccccctactgatcagaggttcgaaggctggcccctcagaggggttcaacagccgcctcagagcgctcgggctccgcgcccgctactggtcagaggttcgaaggccggcccctcggaagggttcaacggccgcctcaggccactcgggctctgcgcccactactga

SEQ ID NO: 6462 - DNA, 258 bp, Zea mays
  Peptide Sequence Number=SeqID_49837
atgtccttaagcttctgccatgacgtgattgtccctggctggagagaagagtaccatgtatgggccacacttcagactgccatgacgaaggacttcgccatgactgcagtattgccccctgcagcccctagccctgaagaagttttcttcggtggcatgacgaaggtcacaactttccaaaggtggtcgattgagttcaccggaggtgggtgccaatgttgcaatgttggggacttgttctcaaatgctatgagttaa

SEQ ID NO: 6463 - DNA, 243 bp, Zea mays
  Peptide Sequence Number=SeqID_49838
atggagacccgtgcactcttgttttgcttaggaaccagggagaagaccgaaggggaaaatgatttgaacatgctggattcggactacattcggactacagaagaacaccaacttgtgacggtcaccacggacgagtgccctagtggccgaggtgtcgcgctccacaagatcgtgacagtcataggaggtggtgtatcggttgctaaggcacagcgtctttggaaggctgtagtcgggtcgtga

SEQ ID NO: 6464 - DNA, 792 bp, Zea mays
  Peptide Sequence Number=SeqID_49839
atggccaggcgcgagagagtatttaaggtggtgatcaaatttgcggcccgtgctgatctccaccatctggctatgtttctagctggaaggcaagcagatgcccctcaggaagctcttcaagtgcttgacattgtactacgtgaattgcctaccgcgaggtattctcctgttggtaggtcattttactctcccaacttagggagacgtcaaaaacttgatatgtcctctactgcatttatcgagcctctccctatgatcgattttgttgctcagcttcttaacagagatatcttagttagaccattatctgattctgatcgcgtgaagattaaaaaaaccctaagaggtgtgaaggttgaggtgactcacaggggaaacatgcgcagaaaatatcgcatttctggcctcacctcacaagcaacaagagagctatcattccctgttgatgatcgtggtactgtgaagactgtggtgcaatacttcatggagacttatggttttagtatccagcacaccactttaccatgcttgcaagtgggcaatcaacaaagaccaaattatctgcctatggaggtttgcaagattgttgaaggacagcgttactcaaagcgactcaatgagaaacaaatcacttctctactgaaagtgacctgccagcgccctcaagagcgtgagctagacatcttacaggattccggctctcatcaagtgactcctccccatcacgatgactttgcggacaaatgtctcaattctagtggtggagctacgaacaacaatctgatgtcctga

SEQ ID NO: 6465 - DNA, 369 bp, Zea mays
  Peptide Sequence Number=SeqID_49840
atgcagcgcctcacctcgcttcgaactctcgacttgagttattgtgacgcgttgacccagcttccggagtggctaggcgaactctctgcccttcaaaaactcagcctcctgcagtgccttggccttacctctttgcctcgctccatacaatgccttactcctctcgaggaatctctactacttattaagtcggaggcgctcgcgttggcgtcgctcatcgacgacgagaagaagcttggcgactaccagttcgacctctggaagcagtactacgtggccacatgcgtcgctgtgttcggcaagctccggtgcagccatcgcttggacgcggtccagagcgactgtaccgcgctgtccatcttcaaatag

SEQ ID NO: 6466 - DNA, 618 bp, Zea mays
  Peptide Sequence Number=SeqID_49841
atggggagaggcaatccgggctgtgatcccgatcccgccctcagcatcgagggtgttcgtcatcctcgctggggcggggagcgaggcgagccggggctctacctcctgcgtgggtcagcgggccacctcttcttccagcttctggtggtggcaatcgccatccagccctgcggcggagacgtcctccagccatgccggggaaggcgaactgttgctacccagctaggatgcaacattccgccctctccctcgcattcgcggcgaggacggcagcgaggacctgccggtgcgcttgggagcggcccgctctttggctttaatagctggttcgcgtcccttgagcgggaccgcgaacgagagccctctggtggccgcgtccacccgggaccatggctgctgctgcagaggtcgctggcagactcgcctgttgattatctgaaccgcttcaccaagcatgagtcgccccgtgtcaaggtgacgagtgagagtggggatccctggaccgcgtcgccgtccgaggctaggtcggacctcgctgaaggtgtcgtcgatgccgagggtgctactgcccccttccagcatcaagacccgagcctgcaggatcagagtgtcttgtag

SEQ ID NO: 6467 - DNA, 1240 bp, Zea mays
  Peptide Sequence Number=SeqID_49842
atggagcaacagaagactgacgagcggctcgccgccgcccgctctgactacgacgacaacgacccccgctccgggtggccgaactgcagcagcgcaggcctcagggtgggcgctgctgcaatcttgccctcgcccacgctgacgctcgaggggcgaggacaagggccatcagcccttcggcagatccccactcaaatcctcccggacgagtggggcaccagcctccgcgtgaagatggcacgccgcagccgccctccggcaggaggggccgccgggagccaagccgacgagcccgacacgctggaggtgacgacgcccgccgtcgaccagccccgcgttgtcgaagtccgggccgcccgcagggccagtgagcgccctctccctcgaacgccgcgggagagggtgacccacgaacccgcgcgggaggtagagcgccggctcagcccggcccccaccccagcgaggatgatgaacatccttgaagctgagggtgggaccaagatcgcagcccggcttgcttctccccacccaggaactggtggtcaccgtcttggaccaacgggcgaaagaggcgggcagccatgcaggcggcatgcaaccgcgccaagtggacgcgcttctccgactcccaacgcgcccagcctggaggcccaggcccacgcgtcatgcaaccggcgcgccggacgcttcatgcgagcaactgcaccgccatttgcgccaccacctcgcctcctcgattgcggaaccaataccacgactcgaggcgacccagcgcacgacccagcagcgcagcctggcgcggcggtaaatgcggccgaaagtgggccggcagtaatgacggtggcaggcgggcgggagcagcggtcacgtcgtcagccaagctcatgtcccatccgggggcagcaagagaacctcctctcacggcgtgaagacaacgcgtccgtgatccgttcctcgaacggctcgcgcacgcgcgacgaccgccccgccaaccactcgccccgtcgcattaacttcgcggcgggacaggcggcgcttctggcagaagaagcgggcgacgcttcgccttcgccgctggccccccgaggggttcaacagccgcctcagatcgcgtgggccctacacccactactggtcagaggttcgaaggccggccccctgaagggttccacggccgcctcaggctactcgggctccgcgcccattactgatcaggggttcgaaggctggcccccgaagg

SEQ ID NO: 6468 - DNA, 573 bp, Zea mays
  Peptide Sequence Number=SeqID_49843
atgtcttctcactccctcatgcatcgcgtctttccaccttccaagcccccggatggggatacccgccgtcttttcgcctcatcgttggaggaacgcaactccgtgggagttggtacctttcagccatcgttcggcttcaaggattttcatctgccagcccggctgtacccccccaccggcggtcacccaagacgcttcaaggatgttcatcatcctcgctggggtgggggccgggttgagccggcgctctacctcccgcgcgggttcgtgggtcaccctctcccgcggcgttcgagggagagggcgctcactggccctgcgggcggcccggacttcgacaacgcggggctggtcgacggcgggcgtcgtcacctccagcgtgtcgggctcgtcggcttggctcccggtggcccctcctgccggagggcggctgctgcgccgtgtgcacgggaggaccaccccagatgtcgcgcgctgctagggcggcgttcgtgttctggggtggtcctgcctttgcaccggcgtggcatcttcacgcggaggccggtgccccactcgtccgggaggatttga

SEQ ID NO: 6469 - DNA, 1608 bp, Zea mays
  Peptide Sequence Number=SeqID_49844
atggagttggctttgtgctggcttggtggtgtcgtttggctagctgttagagcactcacaaatgagatgcgaacaaactttagagtgttaagagttgaagttggtgctgggtctgtggtcacccgtcggaaggttgaacttcccatccctgaggaattgaccaagggtacaattgaggagctattcaactttgttgccatgactctaaaggaatttgtagaaacagaagatgggaacgatgaacaacgagcgcttggtttcacattttctttcccagttagacaaacatcagtatcttcggggtcattgattaggtggaataaagggtttttgattgaagatgcggttgggaaagatgtggctcaatgcttaaatgaagctcttgctaggaatggactaaatgtgcgagttactgcactggtgaatgacaccgtggggacattagctctaggacattatcacgatgaggatacagtggctgctgtgatcattggtgctggcaccaatgcttgctatattgaacgcactgatgcaattattaaatgtcagggtcttcttacaaactctggtggcatggtagtaaacatggaatggggcagtttctggtcatcacatttgccaagaactccttatgacatctcccttgatgatgagacacaaaaccgcaatgatcaggggtttgagaaaatggtctctgggatttatcttggggaaattgcaaggctggtgctgcatcgaatggctctagaatcagatttttttggtgacgctgctgataatctatgtacccccttcacattgagcacaccactcctcgctgcaattcgcaaggacgattcaccagatctgagcgaagtcaggaagatactgcaagaacatctgaagataccggacactcctctgaaaactcgaaggctggttgtcaaagtgtgcgacatcgtcacccggagagctgcccgcctagccgccgctggtattgtcgggatactgaaaaagctcggccgtgatgggagcggtgttgcttcaagcgggagaacgggagggcagatgaggcggacggtggttgccatcgagggtgggctgtacgagggctacccggtgttcagggagtacctagacgaagccctggtggagatcttgggggaggaggtggcgcggacggtggcgctgagggtgacagtggatgggtctggggccggcgctgccctccttgccgccgtacattcgtcgaatagacagcaagttcacagagagtaccaagctgtcatgggctgggctgacagaggacagggatccttcagtaataagaagcccgatatgagaacagcacataccataacggaagtacgttcgtgggccacgagccacaaaggccgaaagcgtgcgccattcgaaaaacgcgacggtttcttccagaaggctccgaggctccaaccacacgtcggttcctccgactccgcgcgcgtctcccgccgttccgccggcaccgtacacgattttcgcttgtacagttacgacaaggattacacggattgtgcgacgaatgatgcacgggaggaggatagtacgtttggtatggcgtcttggtttatcttggaagaaggataa

SEQ ID NO: 6470 - DNA, 414 bp, Zea mays
  Peptide Sequence Number=SeqID_49845
atgggcaagaacaacaagcgtaagcgtgagccgactcctccatcggaggagtttggtgactcggaatactcggaggaggagttctcctccgagtccgaggggtctccggctcccgtctctcccccggcccaggggatagccgcggaggtctggacgtatatccgggccgtcgagcgcgccgggctcgaaggctcggatgagtcggagtgctcctcggatgaggaggactcggacggcggcgacgagggtgaagacgacgacgacgacgacgacggtggcggcagtggcagtggcaggggtggcggcgacggcagcagggacagcacccagggcgacagcaggggcagcaccaagggcagcagcaggggcagcaccaagggcggcggcggcggcaggggcagggccagtggctag

SEQ ID NO: 6471 - DNA, 1017 bp, Zea mays
  Peptide Sequence Number=SeqID_49846
atggctacgaagcttgtggttctcggtatcccctgggatgttgacactgaagggttacgagagtacatggccaagtttggacccctagacgattgtgtcgtcatgaagaatgttcttgattgcgagcatgttcttgggagccgtacattagaagtgaaggtagctactccaaaggaagaaatgaaatcacaaggatcaaagaaagctacaaggatattcgttgctcgaattccgcaatcggtggatgagtcgatgtttcgtagacattttgaagcttttggggaaattcttgatctttacatgccaaaggaacatggttcaaaagggcatcgtggaattgggtttatcacgtttcagagtgcagagtctgtggacaacatcatgcaagagtcacatgagcttgatggtacaacagtagttgttgatcgtgcgactcctaaggatgaagatgtcagataccccccgagtaggccatctcagggtggctatggtgcatataacgcatacatttcagctgctaccaggtatgcaactctgggtgcaccaacgctgtatgaccatcctggatcagcttatggaagagggtattatggaccctctcaagcagtgggcaagaagatatttgttggtagacttccacaagaagcaaacacagatgatctaaggcagtactttggcagatttggtcgaatcgtagatgcatatattccaaaggaccccaaaagaagcggccaccgaggttttgggtttgtcaccttcgctgatgatggtgtggcagaacgagtagctcgtagaagccatgaaattctaggccatgaggttgcaatagacacagcggcaccacttgagaatgattcagctgctggtgggtacattgatccaatggatctttacggagcttatggttcaatgagatctttcggcaggttctgtggcggtctagattacaattatggctatggccccagcagcggaagcagccgatcaagatcggattggcgataccgaccttactga

SEQ ID NO: 6472 - DNA, 1596 bp, Zea mays
  Peptide Sequence Number=SeqID_49847
gcggccatcttcgcccacctctgcaagatgttcatgggggtggcccccagcacttccctcttccgccatttgttcgtgctggtgaagtctggaaaggctaaggaccacctcggcgcctactacttcaagacgaggtcggattcagtcgtggcctacatcccctcccttggcggcgcaaggtgggagaactggcgcgacgactggcagagggcgcacctatgttgttggttcaccggctcaaatgacatcggcctggtccagcgtgggccagggaccgacctgtcctgggacgagctggaagtcctagtgaaggggattaccggtgagtccttcattcctgagtccctgatcctcccccagggcatttttgcgctttgcgacgatccagagctgaggacggcgatcctggccacgttgccgacccttgacgagagcggcgtggcggttcgtcggactggtggccgggacccccaccgcgggatccagatctccgacgcaccggctgggggcccccagtctgccggcgtggctcccagcgcccccgccagagcttcccgcgcctccgccacggccccctgccccttggacaagggcaaaggggctgcaagcagctcctccgccccaggcggcactagggtgtcggaggaagagaggcgacgccggctgcgccgcgccgacggattgtttgtttcggaaccccccccccccgttggggccgaggaggccggctccaagaagcgtcagaggactgctggtggggccgaagagaccggctcccaggcccagggcgcgcagaggcgccaacaacaacagcagcagcaaaagcagcggtcgccccgcttccagggtcgctggaaggtccagggccccaaggcttcctccccctctgctcccaaggtcgtgcctcccccgcccctggctgctaccaccgagacagcgccaccggtcctccaggctccagctgggggtccagcagcagcggcgccaacgtcaagtggcgccacagcagtggagggggtcccaactgctccgacggctaccacagcctcaacgaaggcgatgccgtcgagtacaccgtcggtggcaaaggaggccccaactgcgcccgccctcgccatcgaggtcgatgtggggggcgcgtctagctccatcttgccgcccactccggaggagacagaggtgatttttgggcggtgtctccggtccggcgtcgagccagaagcggtgacgattcccctcccccaggtgctgtctcgcgcccatcaggctcttcacgagaccaaggcggcgatcctgcgggagtgggaggcgctggaggccgaacaccagcgcctcagcgactggcgtacccagctggaggcgcgcaccaaggcggtgtcccgccagttcgccttcgagcggtccgagcttgagcgggaccgcaaggactacaagaaggacctccagaaggtgtacgcccgggagctagagcgggagctggatgacaaggccaacagtattgccctggccgaggagaacctcaaggagaaggatgcttccctggataagcgggcgacggatctcgcctggcgggagaaggacctcgcctttaggtag

SEQ ID NO: 6473 - DNA, 303 bp, Zea mays
  Peptide Sequence Number=SeqID_49848
atgacagtgcttcatgtggctcgggccacgctcgtcagcggaaaccccaactccggtgaggacgatttcgccgctccgagcctaaagcgtttaggggcagggatgaagagttttcttgtccctaagttaacacctaaggtgttacagcctacccccttaaaagaatcttgtcctcaagattggaacagacttcaatcactgagtcatgtccaaagatctctatttccccggcttgtgaccaactcagaggggatttacatctcctaccatacaaggcttcaaaaggcacaattttcaagctag

SEQ ID NO: 6474 - DNA, 516 bp, Zea mays
  Peptide Sequence Number=SeqID_49849
atggtgcagtgggttacccggtccacgtgttccggtgggttcacgaactccggcgagtgcgattgcactattccggtggggcgggtcctcggctcaagctcgggcaaccttcacggcctcttggggaagctatccgagggctcgaatcgagcggaggtgggcgggaaagggtttggccacggtggttgccctcgggcggctctagtaggtcgcggggaggtcgccggagctacgggcgagctcgggaaaggtaggcacggcgcggaggaggcaacggggaagatggtcgtgcacgagggtgggctttatagccgctcgtgggcacggtacaggcgtgggcacgggggtggccaagggcgcgcgcgggccgaaggcatcgaaggagtctcctctgttgcctcaggtatcttcggctctggactctcagccttcctcttcttcgaagcagcagccttcggctcaggggatcttcggcgacgaagcatacccccaacagtagccccttcgcggtgctag

SEQ ID NO: 6475 - DNA, 699 bp, Zea mays
  Peptide Sequence Number=SeqID_49850
atgtgtcaggtcagtccagtcaactggagagactgcatcgtcgcctgcacgaggagcaggagcgccgatgccaggagcaggagtaggagtagcaggactcttccccctcgcctcagtaggaggtggagtctaagaggtcgccttcccctgcacctcagccagagatgccccctgcaccaccacagggcatcccggctgctggaggagaccccgacggagacgggagaagacgacgatgctagtggcagttcgagccacggcacggagctctcagaggagccagagccagagggatggatcgctagacccatcactcgtgacgctgctcatgggtgtcacttccatgacgctctcgataccctgttgcgtcgggcctttgaccgacacacatgggtagctgatggccttgacctgaagtactaccctcgctgttcgaccggcagtgctagaggtgtgattgtctcgccagtgggtgagggcaatcccaggctgaacagtatgttggaccacgcccttgacgagttgggcaaggttcaagcggaggttgcggaattgtgtgctgagtgcgcagcacgccactatctggatggtggtcctcccgcccctgtcgggatacagcacccttaccgttcacagccccatggtcgcttcgactatggtaccccagactgcagggcctggatagatttggatccctag

SEQ ID NO: 6476 - DNA, 267 bp, Zea mays
  Peptide Sequence Number=SeqID_49851
atgacttcgcttggccatcccgaccgctttcagtctgaggaggcactcaatctggtgcgcgacctgcttgggtggagcgcgccagggctcgccagaagaatccgcaccggcgccatccccctcggcgatctcgccgccggggagttcgtgctgttcacctcctacatctcctgcgggttggcgctgccgatctcgtccttcttcctgctgctgctggaggagttcgggcttcagcttcagcacctcacgccccactccatcctctag

SEQ ID NO: 6477 - DNA, 735 bp, Zea mays
  Peptide Sequence Number=SeqID_49852
atggcagttcgccagaccggcggctggaaccccctccgcgggatccggatcttcgatgcacaggctaaagctgctgccaagacagctccagcggcttcccatgccccagtcgggggtccggcggcagcggcgccagcatcaggcggtgtcacagtgacagaggaggtcccagctgggggatccgtgcccacctctgacatcgcgcccacacccgacactgggggtgacaccggaggcgcatccagctccaaccccccgcctacaccggaggagatggaggtggtgttcgggcgatggctccggtcaggtgccgaggaagaacctgcgccaatccccctcccccgcatgctgtcccgcgcccaccagttcatctccgagcggtcccaactcgagcgagaccgcaaggagtacaagaaggacctccagaaggtgtatgccagggagctggtggcgcaccagagggagaagaaggtcaaggctgtggagaggctgcaaaagtggcagcaggagctcgagggcaaggccagcgacgccgccctcgccgaggagaacctcaagacgaagggacagtccttggacaggcaggagacggaccttgccaggcgggagacggatctcgccttcagggaggaaatgctcacccggcgaggcgagttgctagccgagcacgagctcgaggcggagaagaaagaaaaggagctagaggagcagatccgccagttcaatgcggcatag

SEQ ID NO: 6478 - DNA, 168 bp, Zea mays
  Peptide Sequence Number=SeqID_49853
atggccggaatcgctcggtccacgcgcgcaggcgggtgttctcgtcggcggcgagtgtaccggccaaaccacgacaatctggttcaatccaagggcacggttatgaagcatactacaacttttatatttggcccaagccatgatcataaggtttacatgaccttttga

SEQ ID NO: 6479 - DNA, 660 bp, Zea mays
  Peptide Sequence Number=SeqID_49854
atgactagcccggggccaacccctggcgggagacgcattcacgcctcgcctgaggctgccctcctgtgggagacacaattacggctcgggagacacaatcacgacttgcccgaggctaacgtctacaggagacatagtcacgcctcgcctaaggctacccttaggcgggagacgcagtcacggctcgggaaatggtcacggcttgcccgaggccaccctctggcgggagacacagtcacggcttgggagacggtcatggctcgttcgaggccaaccttgagcgggatacgcagtcacggctcgcctcaggccaccctcgggggggggggggagacgcagtcacggctcgccttaggccaccctcgggcaggagacatagtcatggctcgcatgaggctgcccttttgcgggagacacagtctcatctcgggagatgcagtcacggctcgccgaggccaccatcgagtgggagatgtagtcacgcctcgtgcgaggccgcacttgggccggagacgcagtcacgactcgcccgaggccatccccgagccggagacgcagtcacgactcgcccaaggccaaccacgggcgggagacacagtcatgactcacccgacgacatctcgggctatgctccggaaggtgtccaactccgccgactag

SEQ ID NO: 6480 - DNA, 291 bp, Zea mays
  Peptide Sequence Number=SeqID_49855
atggaagtggttgtccatgcagaggttcagaaagttttttccatcgatcagcgtggagaagtcggtgaggagggagttctggactccaaaatgatggatgatgtttgcgaagaagaccaaagcctgctagcactagaggatggtgaggggttggtcctcgatccagtcggagaatttgtcgacggcgtccagcaggtgagcgaagcccccgtcagattgtgcaagggaccgacgaggtccagaccccacacagcaaatgtccaggtcatgggtattgtctacagggcatga

SEQ ID NO: 6481 - DNA, 417 bp, Zea mays
  Peptide Sequence Number=SeqID_49856
atggacacagtcgttgcgccaaggcgaagcgcccaggttttccccacggcggacggtggcggctggcagatgagggaccacggcaaccgggagggccggccgagacgcccaggccgggagcacccagagtcttcctatggcggcgaacgtgggaagcagggagaggcggaggagaaaaagtcctccagcttcaacggatcgcacgcgggttcttctgcctcccctgcggaccggaatgggtcagcgcccgcggagcgaaggtcacgtggagttcgcaggaggttgataactactggcgagacttacggccaaaatccatggacttcggtcggagctggctatccgtcccgcctcagcacaaggatagaggggcgcggcgagaatcttgcgatctgtttggcgctcgcggaaccatag

SEQ ID NO: 6482 - DNA, 67 bp, Zea mays
  Peptide Sequence Number=SeqID_49857
atggccggcccctacgatgccttctccaccggtgagaaccccatccatctagttacacttgcggcac

SEQ ID NO: 6483 - DNA, 204 bp, Zea mays
  Peptide Sequence Number=SeqID_49858
atgcaggaggcgtgcaaccgcaccacggttatgcaccctttcggcttcatcgcatccggtggggcaagcgacacctttggcaggcgaagcgggcatcgtttcgcctccgccatgatgaccgcatcaaataagggaccagaaaaggggatacttcgaaagggattcttctccgcgaaggaagcgggccccgagccctcctactga

SEQ ID NO: 6484 - DNA, 117 bp, Zea mays
  Peptide Sequence Number=SeqID_49859
atgagggtggaatggggtggcaatgagattgatggttttggttatgactatggtgctggagaagatgaagctgtggaaggagacttccaggagttccaagattacgacgagttctag

SEQ ID NO: 6485 - DNA, 762 bp, Zea mays
  Peptide Sequence Number=SeqID_49860
atgcagcccgtagcccctgaagactccttcggcggtatgacgaaggtcacagctttgccgaaggtggtcgatttttgtcggtcttcacacctaaatttatccactatctttactgtaatatatatagcccttctggttctaaattgtgattggttacctggctctttggatccaagccctgccgatgcgttgaccatgattgggtctgtgattggtttagtgcatggtctgagctcagtctgcatgcggaggaccgggtgtcgatccccctatataagtgaaggggtacgtcaggggcggacccacagggggtctgggtgggctctggcacaccctaagccaggcccaccggggactccaccggttcggccgccgagcacttcgttccaacttccacgatccgatccttcagcttccagttctcatggttgttcacctgtttctggcggctggagagtggagacttggcggctggctactgctggcgtctggcgatgtggcgagtgcgcgcctgcgcggctgcctgctggagtggcgactgacgagtgcgcgctgtgcctgcgcgcggctgtccgagtgtctgccagcatccagcccagcagccagtcgtcagaccgcctgacgcctgtgcctgttcggctgttcctggcgatcgcgagacgcgagttgttgttccctactgctcctgattggtacgagttgctagtttgctgcggtgctgcctgttcatgggagatattgtcattatttttgtcttattga

SEQ ID NO: 6486 - DNA, 99 bp, Zea mays
  Peptide Sequence Number=SeqID_49861
atggcggctatggtgttttacgtacggatgtgggtaccggtggatgagattagggggagggtcccgacggcccgtgatttatacccaagcgacaaatag

SEQ ID NO: 6487 - DNA, 357 bp, Zea mays
  Peptide Sequence Number=SeqID_49862
atgagggatagtctaactcaggctgtggaagaagtgaatattgtaattaaatttaatagtttgcttacaacattaagcaaacaccctgaagctgataattttgctcgtggtcttggccctatttcattagctggagaggatgatcacgataggagagctgatgatctcaagatactctataaggcctatgctacagaagtactttcagatggaattgtggatgataagaagactgctatattgtcaaaactataccttgactgcaggaggtattatatatgttttggaaaggttatcaagttctttaaccagtatttgtgggcaactgttcaaaaaggtgactctaaatctgtataa

SEQ ID NO: 6488 - DNA, 444 bp, Zea mays
  Peptide Sequence Number=SeqID_49863
atgcagattattgaaagaaagtgcgaggctcaaaagggtgctgggataagatctaacctgtatttttatgtggttttgtggactgtaggaaaaaaaacgctcgataaactcaccgatcaacctggaaatctgataccaattgatgaagctgaggtgcccgatctttcggcgagtagagataattccgatttgtcggaagatgacccttgcgatccgactacgacgagcaagcccgaggcgccaatgcaatcgctgaaccaactccctgtggaatggaggttgacgagcaggggagggctcggcggtctcggcgggcagggaatgggcgcgaccgaggtggccggggacggcgagagcgagagggaagatgagagggtgagctggggagagaaacagcggccgaccatcaaaacaccattgaaggccatcaaaggagctccataa

SEQ ID NO: 6489 - DNA, 1572 bp, Zea mays
  Peptide Sequence Number=SeqID_49864
atgtcgtcctcttcttcgtccgctgcgaatgcgccgttgggcgaatcgtcatccgaggataccatgagtgatttggcggcggtggagttacacccgggccacagagtggagtttggcgtttcgaggatcttctcggttcgcatgcaggacatgcaacagttggggtattttgggaatggtgttggacgagttctaggggcggaagagattcctgagccggagggtgagatagttgtgttcgaggcgttttttatcgccggccttcgcctacctgcacatcgttttgtggcggaggcggtgacttcgtatggcggtcagccctccgtagaggtcttcgccaagaattattgtctacactggcagaagagaaaaattgggagcaagattgcacagtttggatcgtgcacctttacaccgaggactgggaagacttcggcaaaagttgtggagctagttccctgcgcctgcaacaagtggggcaactggtatgattattggttttatgtgtcaggggccgaagtcaaagacatcccagggatcccggcggccgtgatgtgctcccactgttatgtggcgttcccgccgtttaaggtggcgggggatgatagggacgaaggggcccttcggtgtgctgcccgcatgagtagcgggcgcgatttggttgaggaattcatcggttatggggtgtggcccttggtgcatggttgggcgctgggcaaagtatgccctcaccagatgccctccctgggcgggcagcaagtgcgaagtccggccttcgcgttggatctgcgcggccgggacccagccgcgtttgtgcgtgaagtggaggatggagcagtgaggattgtggggcggtatgtgccgaggacggaggctctacggagttgggatatttgtggggccaatgttcgcttgaatagggtcttcgagttgaatcgtttgccatacgatggctatcccggggatgacgctgttgtggctgtcgatcaccgtgggaagaaaccggtggctgtggctggggaaggtttgtcgcgcgaggctgcgccggccatgaagaagagaaaattaggtactacagctgaagggttgggggtctccgatcgttttgctgtggggttaatgggtacttgcgtggccctcgggggaaggatgtctttgcccgagcttcgagagtcttcggcgcgaatgcttagggttaccgggggtcaatggcctaggaacgttccgatccctcgcgcggccagcgaagacatgtttacgtctcgtatggctcgtgagttgaagatttttccttatgggtggaatattgctgctgttgtatcagtagtgatggagagggatcgtcaggatgcggcgcggaagggctgggcggtcactagggtcggggaccttttctgcgaagcgaagaaggcgtggggaggcgtgaagtctgccgcccctggcagcagcaaaccaccgccggtcgtgaagccgaccgcccccgggtgcgagggctgctgcttccggcgcgggcaagctgccctcggtcgaggccgcgaaggagcgaaggccagcgtcgccggcgctcactga

SEQ ID NO: 6490 - DNA, 624 bp, Zea mays
  Peptide Sequence Number=SeqID_49865
atggagctccataatggggagaagaaggggaaacagggggagaaggggcggcggtttctggctcctggattccgaacgggcgtggcaaggctcggggtcagcggccagggcgcgggcggcgcgcgggtgctcaactctgccagttatcctacgccccctttgtacacggtgcagttgtcggacgacaccaccgaggaggcagctatgaagactctgacgattttctgcggctaccatcccttggagatggtaatgcacccactgggactcttccccgctgagaagagggatgaccccatgtggtgcaaccgtgtgagccatgtgaaggacgtgtgggctatgtatcccgaccaagttgggaggatcactgttcagtgcatgagcgcactgtaccaccatcaggccctgcaaagcgacgccatggcacaccttgctaacctcgctcagaccactaagctcaccctcgacagccgagaggacttcgtagtcgacctgtcttcagagttggtggagaaggacctacaggtggaacagttgagccagcgcattgccaccctggagcagcaggtggaaatccgggacaacaccattgatgtcctggagaaccagctccataatgtgtag

SEQ ID NO: 6491 - DNA, 627 bp, Zea mays
  Peptide Sequence Number=SeqID_49866
atgaagggagtagtagtggctccaacgaccctattggagaactggaagctaaggtggagcaactacgatcagagctacgccatcgaagcagggcacgggagcaggacaatgccatcacagactcgcgcacacgatggtgcaggaacttcccatggtcgggaagctactcctaacccaccacctgtaccaccaacgttggccaaggctatcgctgccttggtcaatgccactgcagataatacccgcttcctacgtgaaatggcgggtaatcagttccaacaacatgaaggtagggctcctccgcagggaccgcatgaaactacgtatctagagttctcggaaactcatcccccactctttattaaagcagaagaacctctagaagctgatgagtggtatggcatcgatcaagtaaatactgatttaaagaaaaagaactgcttcatgcgaggactcaacgccaggctgcagaggaaaatggccacctgtttggaccttacttacagcagagctgtcagcacagcgctggcagtagaagccaagaatacaggccatgggaaaacaaagggatttggaggtgacaggtctaatcagggacctaagaagcgaactgggttggtgatctga

SEQ ID NO: 6492 - DNA, 168 bp, Zea mays
  Peptide Sequence Number=SeqID_49867
atggggaagcctgtcccatcactcctcatgctcctcctaggccgagtgaccacacttgtacccaccataactggaatgggagaccacgtctcaggtcgcgtgaggagggcaatctgcgggcaggttcactcaggatttaataacattatgctaaagaagaaaaactaa

SEQ ID NO: 6493 - DNA, 141 bp, Zea mays
  Peptide Sequence Number=SeqID_49868
atggccatgatgggttcaacatcgaaaaagatgtacctctgtcaggtgaagaagcaacaaacttctgttgtttttgttctaaggtggtacgaaaggaagaacatcaggagtgaagctgcgggaggaaaggatcctccataa

SEQ ID NO: 6494 - DNA, 729 bp, Zea mays
  Peptide Sequence Number=SeqID_49869
atgccgccgcgcacgaggggaactgcgcgcaagcatactggcccaattggtgtgccacgtcatcaacttgccccaagacacaaggatagcagtagtaggagtaatgatccgatcggagatcttgaagcgaaagttaatcagcttcaaacagaactccaacgcaggattgacatatgggtcgcggatggcgacagaatcaatgaattgagaagcgacgtccgccgcctgcgagatcagctcgcggatcgagatttagcgctcgacagggtggttcaatctcgttcgcttgcctgggctaaggaggcaaaagctcgagcccgagtagaagagcttagcgcagccattgataacctgcaggcttattgcaatactctacatgaagaagttcatatgccttcccgaactcgtgctcaggatggggctagtacctcccgtgggagggaggcaacaccaaacccacctccagtacccccgacacttgccgaggccatcgctgccttggtaaacgctacagcagacaatacccgcttcctgcgggagatggcaggtcaacaactccaacaacaaggcgggcggggctatccggaaggctcccgggaaacatcttatttggacttctccgagacgcgccctccgttgttcatcaaggctgaagaccctttagaggcggatgaatggatccgcgtcattgagcagaaatttggacttcttcggtgttccgaaacttag

SEQ ID NO: 6495 - DNA, 312 bp, Zea mays
  Peptide Sequence Number=SeqID_49870
atggaggcatcggagatgcgaggtatagtccctcgtaccttggtgaagcaggagatgaaagcccggagtctccccgggttcctgcctcactgcatggagatgagcctccacaccatgctgctgataagcactggtgaagtttactgtgaacagcgcacagagctcttcctaggagtagatcgatcccagggtgaggttcatgagccaggtccgggccagcccggtcaaggctacatggaagtagcttgccattacggcagtgtttccaccagctgtcgtaatggcggtgacatagacctgcatgaattctga

SEQ ID NO: 6496 - DNA, 642 bp, Zea mays
  Peptide Sequence Number=SeqID_49871
atggttcagatcgtcgagaaccacgacttggctcccgaggacttcctgatggagcaaggggcagcatcttccgtgccacgaggctcttactgccctgtacctggtgctgctgcaatgcacgctgcgcagcagcacacgcccgcactgacatccagggctccatcgagggctgctcctagtggggcgttatctgcagccagggagttgctacgtaaccctccaagttctacggcctcgccgggggccatgaggcagtggcgcgaagatgttgaccgtctcctcgacatggcccatcctagctcggccaggtctaggcctcgatcattccggcgtcaacatgaggcgtcgacatctgtgcgctcatcctcagtgaggggtgcacttactgacgacctgtgggcagagctcaaccgcaggcatgcgggagaggatgctcgagtctctctagaggacgacctgcgggcagaccgcaggcgcacaggcgaggatgctcgaatctctctggagaggcgcgtgagcgctggcaaaacttcgagggtcgcaaccttgaccaaggcttcgctgcagttgcaccgcaaaccccaaggggcgcccaaatccaagcgggtgtcccattggtcggcgtgggctgtgccgcactag

SEQ ID NO: 6497 - DNA, 177 bp, Zea mays
  Peptide Sequence Number=SeqID_49872
atggcgtggagatatcctcctatggggccaacacaaatgccttgtggatatgctccatggccgacactgccaccaccatcacctgaagtgggtttgggttcacgtcctactccggacgatgctatgaacttcatcgaccagatcttcaacacgactgacgacccacctcaagcttga

SEQ ID NO: 6498 - DNA, 351 bp, Zea mays
  Peptide Sequence Number=SeqID_49873
atgggcctgggagctggcctccttggccccgcctgcagccctctggcgcttctagggggctctgaaacgagtgacccatcagtgcgacgcagcctgcgtcgcctctcctcctctgaccccccggagctacctggggcggaggcactgcttgccccctttgcccttgtccaaggggctaggggccatggcaggattagcgctgggagccacaccgacgagctagggacccctagccggtgcatcagagatccggatctcacgaagggtgtcctggccgctggtctggtgaaccgccacaccgctgtcatcgagggtcggcagcgtggccaagattgccgtcctcaggcatag

SEQ ID NO: 6499 - DNA, 639 bp, Zea mays
  Peptide Sequence Number=SeqID_49874
atgcgcagaggcgcatcagttctcagattccaccgccgccgccaccatccgggggtgatcactcccaggagcaccagcaatagcaacagcaacagcagcagcaatagcaacagcaacagcagcagcaatagcagcaggagcggtgatcacctcgcttccagggacatcgccaacgtcttcccatgccccagtcaggggtccggcggcgttgcagtagcggaggaggtcccagctcggggattcgtgcccactaccgacactgggggtgacacaggagacgcgtccagctccacccccccccccacctgctccgaggagatggaggtgagggaggccctcacgacggagtaccaggccaagctgagtgctctggaccagactctggaagcccaatgggcccagcaggtcaaggccgcggaaagggtgcaaaaatggcagcaagagcttgagggcaaggccagcgacgtcgccctcaccgaggaaaatcttaaggagaaggagctgtccttggacaggtgggagatggatctcaccaggcgagagacagacctcgccttcagggaagaaatgctcacccggcgaggcgagttgctggccgagcatgagctcgaagcagaggaaaaagaaaggaagctatag

SEQ ID NO: 6500 - DNA, 201 bp, Zea mays
  Peptide Sequence Number=SeqID_49875
atgaattcgagcaaaatacatgttactagtggcgaagctagagaaaacttgaacagggtaccttcggacttatgtcaaagagggagaacctcaaaagatacgaaggttggcagtgccgaagctgtgaagcaggaaagcttcggcatgttcgcagaaaagggaaccgacttaaagatgaaaaggccatttagacctcgatag

SEQ ID NO: 6501 - DNA, 714 bp, Zea mays
  Peptide Sequence Number=SeqID_49876
atgtgcggcggtgcaatcatcttcgactacatcccggcgcggcgccgggtgtccgccgctgacttctggcctgactccgaagccgacgccgaggactccgactcgcacgcccctgaccctgagagagctccgctgccgactgtcccgtcccgtgcagtgccgcgcccgcgcgggaaggcgaagcgtgggcgcaagaaccagtaccgcggcatccggcagcggccgtggggcaagtgggcggcagagatccgcgaccccgtgaagggcgtgcgcgtctggctcggcacctaccccaccgccgaggccgccgcgcgcgcgtacgaccgcgctgccaggcgcatcaggggcgccaaagccaaggtcaacttccccaacgacgcctcctcctccagcgtcaccgcgccgacggcggcatctggggtggcggcacaggccccggccgtttttctcccggcgcccaaggtagaggcgcgcgcacaggtgtccgacgaggtcaaggagctgtccgaggagctaatggcctacgagaactacatgaacttcctcggcgtcccgtacatggagggcgggaatgcagctgtaagtgccaccaccgctgccgctgccgctgccgccgtccccgaagaagcgcaggtgccggcgccagcgccagccgggctgtggagcttcgaggactactactacccgccgtcactgtcgctcttcactgaataa

SEQ ID NO: 6502 - DNA, 267 bp, Zea mays
  Peptide Sequence Number=SeqID_49877
atggcggccggagagattttggcgcccggttcgtgtgatgttgtggccgtcggaggagcgctggagcctggcggagggacagctgtcggggccgtcgagtccttgctgacgtcctcttgcttctcctgcgccctaggttggggcgatgtggaggctcctccgaggtcggggtcgagtccgtcttccgtggtcgaggtcgagcccgagcccatacgtcgggcgaggcggaggccgttggctgaggccagggcggaatttgagtcctag

SEQ ID NO: 6503 - DNA, 846 bp, Zea mays
  Peptide Sequence Number=SeqID_49878
atggaggacgacgtgttctgcggcgtgttcgacgggcacgaccgctgcgggcagctggtcagcaagctggcgagggaccacctccccttcatgatcctgagccagcggaacgtgctgctcctgggctccgacgacgacgacgacggcgacggggacgacacggccttcagcgacgcgtcgcccgcggcgtcgtcgtccacggacggcagccgcagcgggcgaccatcgccgtcgctggcgccggcgccggctcagatgctggaggtgtggcgggaggcctacgccaacgcgttcgagaccacggacagggagctcggggtccagtccagggtggactgggacttcagcggcaccatggtcgtggccatgctggcgaccgtgtcggagatgggctacctgaaggccgtgcagctcaccaccgaccagaagcccaacgtgcctcgcagctacgtgcatggcgggaatggaggcgggggtgggagcgaggcatgctggggctggagcgggagtgaggcatgcagggggcacgaggatggatggcagatgaggcatgtgggggcggattcggcgttaagcgcgagcgaggatggcatcgcaatcggatggaagccgctgagtgtgaagcgggagagcttcgggccatcgtcgttgccccacgtcttcaaaaccatcggggccccagagtcgggccaggaggcttcgctaggctacgtagagcgtgtgcaaggcttcatctgcgcgggtctgcgcggctgcatggagaatcgtgcgtcgggtcaccggatgggttggctccggcgagcctgccaccggacggacgctggtgccgtcgcgctgggcgactag

SEQ ID NO: 6504 - DNA, 465 bp, Zea mays
  Peptide Sequence Number=SeqID_49879
atggacgagagttgcactcaactcctctcaagtgatccaatgatcaacttgaatgccacggtgttcttctttctttactatttcccgtttgcgagaaatctccacaacttggagtctctcgcccttacaataaggatcaaaccgaccgttgaagatttggagccattggcgcaccggacactgtccggtgcacaccggacagtccggtgcccccatcagaccgttggctcggccacgcgtcacgcgcggattgcacgaccgaccattggcacagtcgaccgttggctcaccggacagtctggtgtgccaccggacagtccggtgcaccacagcacagtccggtgcaccaccggacagtccggtgcatttttagccgtacgccgccgacgaaatcccgagagcggccagtttgaccaaagccagcctggcgcactggacactgtccggtgcacccagacagagtag

SEQ ID NO: 6505 - DNA, 495 bp, Zea mays
  Peptide Sequence Number=SeqID_49880
atggagcacacgccaccgacgagcccgaccgcctgcgcacgtggcccgaccgattccggccatcaccgacgacgagccgtacctcgacgtgaccgcaaggacttcccggagctaaccccacccttcgtcggacctccctcacgccgggctgaggacactatcgatgccattgctctccatgggttgacgactttttgtggctttcaccccttagagctgtccactcaccccattggtttgttcctcactgaaaaggaggacgacccaatgtggaaggatcgagtggagcatgccaaggatgtgtgggctctctacccagggcagactgctgacctgacggtgcgatgcatgaatgccctgtaccgcctgcaagcggtgcgaggagaggcaatgtctcagctaatgggcttgttggaggataccaagatcaccctggataacagggaggaacttgtggtagacctatccactgagatggtggaaaaggacctctag

SEQ ID NO: 6506 - DNA, 369 bp, Zea mays
  Peptide Sequence Number=SeqID_49881
atggagcccgacgaggatgttgacatcgagggaggagtggagccggagcctgcatccagcctagacactgctggctcagggagacccccttcccccgagtcaagcgttgcctccgtcagccgccacctcagcactatggtggtggtgatcaccatcatcgtcccctaccagcggccacttatcaggaattcctcagcactcaaatgtcgttgttcactcgggcagaggatccacttgatgctgatgtatggctcaggggccaacatctacaatgagttagtcaacatggccatttcccaagaggactgcatcacagctcaccaggcagagaagaagaggaagacccttatggcaggaccttcagcttag

SEQ ID NO: 6507 - DNA, 264 bp, Zea mays
  Peptide Sequence Number=SeqID_49882
atgacttctcacgtatcctcggacgaagggaatgcacagtcccacacggacgagcttgcacgagagggtttcccccgtatcttgtgggaggtacttcagggagctggttacacgacgcctccccaggctgagtatactatcgaggcgattgctcttcacgggctgaccaccttctgtggtttccaccccttggagctgtccactcaccccattggcttgttccccgcggagaaggaggacgacccaatgtggaaggacgagtag

SEQ ID NO: 6508 - DNA, 213 bp, Zea mays
  Peptide Sequence Number=SeqID_49883
atggggcaggcagatcctctgggcaggctctggtgctgtatccggggctacctcctgagcaactccttgctccggcacgaggatgtattctccgtccgcgaggcactcaaggggttttgctgcaaggtgcggttcgacggcggtggtggccggaatcggccggtccacgtgcgcaagcgggtgaactcgtcggtggcgagtgctccggcctaa

SEQ ID NO: 6509 - DNA, 645 bp, Zea mays
  Peptide Sequence Number=SeqID_49884
atggccattgacggccgactgttcctcctcgacgccctctcctctcccctctcgctctataaaagcttcgagctctcccactctccctcctcgagctccctctctctctcacgctctccccactcccgagctcgccgtcgaccgtgccccgcgccgccgtttatcgtcgccggagctccgcccgctccccgccgtccgagctcgccgtccgcgcccgtccccggccactcgaccgagcccccagccgcacccctgcctggccgagcccctaccccgtcgatctccattcccacgcatgacaacccaattaaaggactaacaagtgtgctaagtgttgaacagacgcttaatgcaaagctaacagggttcaacacaaagacaaccgatcaagccaaggatggaggcaagaagagcttcgaggtaccgagtgcacgggagaaggtcaaggagaccaggaacccaaagctaggggtgaagaagaagacttgcaaagtcaaggttgatcgagttaagaagagttatgagtccaacatcgacctcaaacatgccaaattgggtaaaacgatgaaaaaggttaagaacttctattccgttgcaacctactcgaagggtctttcattccactgcgatccagccttcgagtag

SEQ ID NO: 6510 - DNA, 789 bp, Zea mays
  Peptide Sequence Number=SeqID_49885
atggggcaaatggttagagataatctaaagccattcttagtaggcagagatggcaataggtacccacgacccaatatccgatgggtatttactctattaggattagataatctgttaaacaaatacgaagtagtgaagaatttagctaaagacttgccctacacaaaatctactcgaatggataatatgaaccaaccaacgaatttaaagcgcttaacaagaacacacaagaacacgcaatataacccgaggttcggcaaccaccacaaaggtgtcctactcctcgttgaggagcccacaaagggccgggtcttttccaaccctaatcctccacaagccgaccacaaaggagatgcgattgcgggtgtgaaaggtgaaatgaatgcacttgttgggagtttggtcagccaagatttcgtgggagaggcagaagtaaacgagagagagtgtgtgagggggtatataaaggatcccccaaaagctggcagccgttgggagaaaaggggtaaaaaccggttgaaccggttttcagaccggttgaaccggtttctaccagggagatcccggttcacagacctactcagccggagactcgaccggattcaaaaccggttgagtaggagaaaaatccggttgaaccggttttcccaaaagatctgcagcgacttttctgacagctctgactgtcagacaggtcagagcagggatggtagaggagcagtcccaaaaccggttgaaccggtttcaggaccggttgaaccggtttccagggctgaaaccaaattttga

SEQ ID NO: 6511 - DNA, 252 bp, Zea mays
  Peptide Sequence Number=SeqID_49886
atggatggcgcgtcgtcggtccttcgtcgatgcttgggaacagctgagcacgatggcggcgatgcggctaaccccattaacaggagcgttgatatgcacttgatgaagatgctgccgactccgatcttgactgatttggaggagttggaggttgccaaatggacaggtgcaagaggaaagactacagatagaaaaggggaaactattctaaggccctcgaaaggaaggggagtaataagacatgaagagtag

SEQ ID NO: 6512 - DNA, 528 bp, Zea mays
  Peptide Sequence Number=SeqID_49887
atgggacgaggccctgctccggccgtctgtctaaacgcaccacgcacacatggtgcataccagagttctcaaggcaattgttcagagaatgatcccaacaatacaatagtatttgtgggtgggttagattccaatgtagacgaggagtatctaaggcaaatttttactccgtatggagaaatttcctatgtgaagattcctgtaggcaaggattgtggatttgttcaatttaccagcaggtcatgtgctgaggaagccatccaaatgttgaatgggagtcagattggtgggcagaaaactcggctttcatggggccgtagtactcaaaacagacagctgggtaatgaaggttatagctatggtgcacccaatgcacaagacccaagcattcaaaactactatggataccctggttatggtaactatgagcagcagtcaacacaggagcagcagcagcagcctccaccagcacaggagcagcctccaccggcacaacaggtagagcatcgagaatccccatttgcttaa

SEQ ID NO: 6513 - DNA, 1111 bp, Zea mays
  Peptide Sequence Number=SeqID_49888
atggaggccgagaagacggacctccggcgccagctggcggaggagaggagggaggcgaaccaggccatcgctgaagtgcaggctgcgcgagcggaggccaaagtggcgcaggtggagagcagtctcgccagccaacgcgccgaggaactggaggcaaggttcaacgccttgcgcagctgcgtggacaaggccgaggcctcgacgcgctcggaagtcgagcggacgcacgcacagttcgtggacgcgtaccgcgagctgggtgcgtggactgctgacttcgaagtgcccgaccgggaagcaggccttcgcttcctcgaatggttgcaggaggagctgttgatgctcccgaccattgtggagggtttcatgtccttcgcctccctcgtcacctgcgaggggaccatgaatgcattgtcccgcgaggggtgcaggcactacgatatggcgcgtgccgaggatgtcgaggaccttggaggtctagccgacgcgctgcccacggctgtggaggtcaatccggtgccgcccttggatgccggtgaaggctcctcggctgtacctttgcctaccgtggccggtgaagaccctttgtcagcccctgcgccgacgagcgaagatgccttgagggtggcggcagagccggcagccaaagaccctacggccgcggtcgggccttcgcaggggtttgggcctgcgcacgcaaccgctactaacaatgctaattttgtggcggcttcgaccgtggttgctgaagacgattctgatgattctgtgtctaagtgttttgagtctgatgattctgggagttcgattgtgtggacagaggagtcttcggaggaggacttggattattttgcagcgttggatgtggttgcggcggagacttctccgcatgtgatggttgctgaggatcttccgggtgcgagtgctgagcgtaggcggcgaagggcggtggcgaaacgaagagtgggtgagttgtcgcgaagtgataggcgtcatcgtggtgagatggagggtggtcgtcttcatgtggacgggactggcaaaagggaattgttgtcctcgctggctggggcgagtgtgggtgagggggagctgcgaagtctgtttgcgg

SEQ ID NO: 6514 - DNA, 1617 bp, Zea mays
  Peptide Sequence Number=SeqID_49889
atgcaggcggcatgcaactgcaccacagagatgcaccctttcgacttcgacgcatccagcgtggaggcccaggcccacacgtcatgtaactggcgcgtcggttgctacgtgcgaaaaactgcaccgccacttacgccaatgtcgcgcctcctcgactacgggaccggtgccgcgactcgaggcaaccttgcgcatggcctagcagtgccaaccaagcgcatcggtcaaaggggagccctctcccacggcgtgaagacgacgcgcccgtgttccgtccctcgaaaggctcacgcaacggctgccccgcgaaccactcgtcccgtcgcattaactccatggcagggcaggcgacacctttggcaggcgaagcgggcgacgcttcacctccgccgtgatgaccgcgtcaaaaaagggaccgggaaaggggatactccaaaagggatccttctccgcgaaggaagcgggccccgagccctcctactgatcagaggttcgaaggctggcccctcggaagggttcgacagccgcctcagagcactcgggctccacgcccactactggtcagaggttcgaaggctggcccctcggaagggttcgacagccgcctcaggccactcgggctccgcgcccactactaatcaggggttcgaaggctggcccccgaagggttcgatagccgcctcagaacacgcagagcgagggatgactctgggtacgtccgatacatggccgaggcttgggctacgctcccgaggtaccctaggacatttccaagaccagcaggagcgattctgtaacggaatcccatcagagggaggcatcgagcccttggaccctatcaaacgggaccgggaaaacagtgtcgtctgccctgctccgactgctgtgccacccgccagggcgaggctgacagcagccaagtccagcctcaggcgccataggaagctccgcctcgcccgaccccagggctcggcccccgcctcgacctcagacgacggactccgcttcgcccgaccccagggctcggactcaaccttgacctcggacgacagtctccgcctcgcccgaccccagggctcggactccaccttgacctcggaagacggtctccgcctcgcccgaccccagggctcagactccacctcgacctcgaaagacggtcccaactgtcgtatttggaccttaaagccagaaccctggaaaccagcacgcctctctagcctccgccgctgtcaccttagcagcccgcggcggcgaaggcaccctcctgatcgtcgtcggcactgctggaggggcatcaaaacagccgcggtcatcgcaactacaaccttccccttcgaggagccttcgtctgcccgggtcttcaccttcttccctcggtcatccccaacatcggtagaacccccctcagggtatggaccataccgcagaccattcaactcaaaaactcagttcaatctgacattcgagcctcgtatctcccaactccttgttagttccgtcttcactgaatatttactgacaattttcactgcctccgcttccacctccctcacgaacgctgccgcattccgccctcgcagctccatggcaaaggcggggctctgtaccatctga

SEQ ID NO: 6515 - DNA, 219 bp, Zea mays
  Peptide Sequence Number=SeqID_49890
atgacaggtctcatggaggtgaaacatgatttcatggacttcttgcaggggctgagcaaggaagagatggagttgttggatcagctgaacacggaagcgactgaagttgagaaagtcttcagccgctcactaccattgaggaagctaagtccagaggagcttgtacaagcatccagggcgcttagtgacgtgctggaccatgacttgccacagcactag

SEQ ID NO: 6516 - DNA, 375 bp, Zea mays
  Peptide Sequence Number=SeqID_49891
atggagaaagaaaaaattcaactcgaaattcggggcgttacaaacctatcccccttaaaagaatctcgccctcgagattcagggttggctagcaaagagctcagggtatttagccatcagatcatcttcacgctcccaggttgcttcttcctcagagtgatgattccatctgactttgcacattctgatggtcttcctttgagtgactctgtccgcggtctcaaggatttgcgttggcttctcaacgtaggtcaagtcctcctggacatcaagatcttccactggcaactgctcttctggcacacgcaagcactttcttcaactgagacacgtgaaagacatcatgcactgctgatagattctctggcagactga

SEQ ID NO: 6517 - DNA, 711 bp, Zea mays
  Peptide Sequence Number=SeqID_49892
atgaggcaaaaagacgacgggcatccccccatccgggggcttggaaggaggaaggacgcggtgcataagggagcgagaagacatggttgccttacgaaaggggtcgccctccgtttaaaggcaactctccctgcttgcgccccaaccatcacgggctgggtcttctccaacacgctcaaaagccctcccctgcggcgcgggggctgggtcccgcatgtcatgcagaccggctccgagcagaagaagccaaaccgccgcgcgtggtgcacgcaaccacccaacggttacaagcccacgcgtcgcgcaaccggcgcgccggatgctgcgtgcaagcaactgcatcgcctgcgccaccaccgcgcctcctcgattgcggaaccaataccgcgactcgaggcgacccagcgcgcgacccagcagcgccagcctgacgcggcggccaacgcggccaaaggagggccggcagtaatgacggtggcaggcgcgcgggagcagcggtcacgtcgtcagccaagctcacgtcccatccgggggcagcaagagagccccctctcacggcgtgaagacaacgcgcccgtgatccgttcctcgaacggctcgcgcacgcgcaacggctgccccgccaactactcgccccgtcgcattaactccgcggcgggacaggcggcgcctctggcaggagaagcaggcgacgcttcgccttcgccgtaa

SEQ ID NO: 6518 - DNA, 192 bp, Zea mays
  Peptide Sequence Number=SeqID_49893
atgcggcttcatacccttagagatggtgtggttttatactctaagaggtatgaagatgaaataatttcaccctccctattcctttacagtgatgtgggcgagaggctccaagttgtggagattcctcgcaaacgggaaaaagtaaagaaaaaagaacatcgtggtattcaagttgatcattggatcacttga

SEQ ID NO: 6519 - DNA, 162 bp, Zea mays
  Peptide Sequence Number=SeqID_49894
atggggctcggtgtatgcggctcgctctgccaaggtggcaatgagactgatggttttggttatgactatggtgctggttgtcaatattgcaaccactgctcaggagaagatgaagctgtggaaggagacttccaggagttccaagactacgacgagttctag

SEQ ID NO: 6520 - DNA, 444 bp, Zea mays
  Peptide Sequence Number=SeqID_49895
atgagggtacccctaggtgtgcggtcggatacaaaacaccgacaactggctcactcgaaaggagaagtagggaagaagaaggtgaatgaacaagaacaagtggggagagcagccaaggcgaccgggctatttaaagaggctaggagacgactgttcacttcctacccgctcaccgaacggtcacaagaattcaatagcgattcaaaccgcctagaaatgagtctggcatctggcgccgctacgcgtaacacggcaccagatggaatcaaagtcaatcgctcaggcaaagtattacacctctccatcatatcaagttactatttcaggactacacgatggacatcttttactgagcagacatccattgggcacacccattgggtgtaccgcccggattcttcgatattttctgaagcaatgagacccgcaacatatacgcaatga

SEQ ID NO: 6521 - DNA, 549 bp, Zea mays
  Peptide Sequence Number=SeqID_49896
atggatgcttcgactgcgtggaaccccgaccacttgatcaccagctgccccaagaagggcaagcaggaggcgggcccgcacgaccaccactttggtcggtgcaagggaaagcgggagtacacctccgacaagtacaagtctaagggaggattcgacaaggaggcgctcaagaagaacgacctcaaccacgactttgacaacatggactcttcctcgagcgacgaggagattgaaagggcccttggtgatgatgcagtgggcggcgacaaccaggacataagcaatgggtctgggtctgaggtatcagattccgctaatgatctcgctgctaaggtagaagagttgaatgctgctttggcgaatcaggacaagttgcttagacttgctgctcatgagaggaaagagtttaaatccaagtatgagagcacgcttagggaacttgagtctgctagagcttcagttatggtgttcgatgatactgaaatgatgggtgtgcccctcacttgtcgaacatcaccactttgtagaccaagtacactactctgctag

SEQ ID NO: 6522 - DNA, 213 bp, Zea mays
  Peptide Sequence Number=SeqID_49897
atggcccgcgcctataaagcccccagggaccttgaccgtacccctccgcacgcgttcgacctcaccagagcccaaacccaccggtgtttgcccgtgcacggcgtgtccgcggccgcccgatccccctgccaccgtagatcggccaacaggaccctttccaaccccgtccagccctcggagaagactgagcacacctcggtgaagctcccctag

SEQ ID NO: 6523 - DNA, 609 bp, Zea mays
  Peptide Sequence Number=SeqID_49898
atgggtcgagaggaggaggttgaggatggatgctcgcaacgccactgcgccaaccctgtgaaatccgcaaagcccgcccctgcgccaatggaagatcatatcgctaacgacactgtgctgaagggtttccctcagaccgaacggcaggacaccgtcgggggttcgctgcaacgcatcgacgacttccacagcttctcaggccaaggctacaaggttttgatggaaccggtcgtattgaaccgtgaaagagccgcaacggaccaaagaaaacggatgcctatgttgttcgacaactaccgtgatgaagatttttatgggctaccgcagaaatacagtattgtcgctcgggtagaagttaaattctcgattgaaccacgttttcgtgacagacaacatttcgttttatctgacatcaatagtgcctctaatcttcggatcataccgcaatacacttcaatctgttccatcacaacacccatcattttggaccaattcaaaaagctttggtggcgcggaacaaccgtcagtttgctgttacatttcttgaagaacaaaggcgtagatagattctacaaattcgcaaagagcaataattgggactatgtttag

SEQ ID NO: 6524 - DNA, 838 bp, Zea mays
  Peptide Sequence Number=SeqID_49899
atgaccgttgaacaaaaaaacgagaaaagtagaaaatgtcgtgaagtaagccaacgaaataaaggacctcctatacagccagaggcatctaaagttagtctttcagatggctgtagcacaaatgatttcacaaactttgcaacacaagttccaaatgtgaatcaagatgatgatagcgattggttgcataggaatgagacattcaagtcagacgatgttttcacaacgagagaccttctaacaccaggcagtgtgcatgaaactgttggtaacacgcctaaccataatttgggaagggccgcctactttagagagcggtacaaaaacttaactccagccgagagggagcttaggcgtgaatgccttaggttgtataataatacaccaaagcggaaagggtcaaagatagagtacataagaaaacgtagagcactgttggctgacacattgagtcaggagtccatcgccatggagtccccaacatatacccctgaggttgtgcaccctacagcaattgaacctgatggatccacagttaccccctgcgactgggttatccctgatatcgccagtaacccgttcctgccagcttcaacacagactgaggatgccgattcactgcgtatgtctactagaccactaagacgtaaacatgtgccacgtggtgaaagacaagctatcttagcccgtcgaaactggcaatttgaagcatccattttaaggaacatggctactgcgactgaggatactattagtgatgctgaggaaggggatgattggaccgaacaaggaagtggggtggatcatactcagtcgaagccaagggtcatttccaatg

SEQ ID NO: 6525 - DNA, 843 bp, Zea mays
  Peptide Sequence Number=SeqID_49900
atgaagccgctgctagaacagaaggcactggagatgatttttgagaagcttcaaagtgatgagggtgttcactgggcagtgcaaaatggtctccatctatcaagaagcactgtggtgtacttcaagcacaatgatatggcttcacttgcaagcactttggaaaaacttactcgtggaaataaacgatgccgcaaggaagccgcgggcgaactaagacgccagtggcgcttcacgccgcgagcaacgagcgcgctgcgccggggctgcgccacactgcgggcgcgaggaagccacgcccgcgcgctggaccgagccgggctggggcggtgcaccgcgccgaggccgcggctgggctatggccacgcgcctgaggccagggtggggccacacgagcacggggaaaccgagccggggacggggaagaaggggggtgaggctaccatggccgcacgccgagccgcaccgcgccgggcgccaaggccacgccgagcggtccacgcctggggggagggccgaggccacaccgagccgcaggtggatcggccaccgctgcgcgccgcacgccgcgcgtggaggggccacgaccggagcgaggtgagcgtgccgcggctggggcacgccgcaccacacgccacgacggagcgcgcgctggggcgggaagggggccgaacgccacggctggagccgaggccgccgctgcgcgccgggcgggcgccatggccgcgcgccaaggccagggagagggagggggcggctcaccgcgcagagagggggcgaaggcggctgtttttcgagcagcagtcgagttgggcgggggtgacgagtcgtggaggagggaggtag

SEQ ID NO: 6526 - DNA, 2520 bp, Zea mays
  Peptide Sequence Number=SeqID_49901
atgacatggaaccctaactgggatgagataaggagggagcttctccctgggcagacaccgcaagatcgtccggatcttgtagtgcgtgtctttcatgcgaagctacaagagttaaagcataggctgactaaacatgatattcttggtaaggtccgagcctacgtctatgtcgtggagtttcagaagcggggtttgtcgcatgcccattttctactcataatgcagagaaagtacaagctcacatgtcctgagcagtgcgaccttttgatctcagccgagatcccaagcaacaagtaccctgaactacgaaagatggttatcaagcatatgatgcatggcccgtgtgggttgctaaaccctaactgcccatgcactaagggtcgtaaatcatgcaagaatcattaccctcggcctttcagtgacacaaccttgcaagggaaggattcgtaccctgtttacaaacgtcgtgacgatgaccataaagaaaaggcccgagggtgcgaaccggacaatagatgggttgtcccttataacccatacctccttcgtctcttcaactgtcacatcaatgtcaaggcatgtgggagcatcaaggctgttaaatacctattcaagtacatatacaaaggccatgatcgtgcgtctgttgttatgagagatgcgagcaaggcagatgatgatgttgatgagatcaagcagtatagagatgcaaggtgggtgactcctccggaagccttgtggaggatatacggctttgagcttagtcagatatctccacctatgatgcagctgcaactccatcttccaaacatgcacatggtggcatttcacgagcggcaaatggttgagcgagtcgtcaaccgtccaggtgttgataggtcgatgctcacatcatattttgaggcgaataggctacacgatgagggggagcgctactatcttcgtgttctcctaaaccgcgtgactggcgccacctcctatgtggatctaaggacagttgatggtgttaccctaccgacttttcgtgaggcagcagagagaaggggactgcttgagtcggacaacacattagatgagtgtctcactgaacgtgctattttccagatgccatcgtcgctgcgatggctttttgccacaatactggtgtactgtgagccaagcgatgtggctgtactctggcataaacacaaagattctatgttcgaggactatcaacacaagagtcagaacaaaactcatgttgagcagatggtattgattgacattaggaacatgctgcagtcaatgggaaaggacataaagacattccctatacctcctatcatcgacgcgtatgacgatgctattggtactgctagggaggtttacgaggaggaaagtatcgaaccgacaacgggagatgtggctcttaaatactctcttaacaaggaacagagggccgcctatgataagattatgtctgccattgacaccgatcagggcggattcttcacgaagcagactggaacaacagagttgctacgaaaagcatctctcattatctgggacgaggcttctatgactaagagacaagccgtggaggcactggacaatagcatgcgcgatataatgggtcgacccgcactgccatttggtggtaaaaccattgtctttggtggagatttcagacaggtcttgcttgttgtttgtaaagggtcaagggctcaagtggtcgcgtcttcgctacggatgtcttacctatgcgagtccatgtcccacttaaagcttgttagcaacatgagagcaaaaaacgacccttggtttgcggagtttttgctgcgcgtaggcggtggaactgaggacacaaatagtgacggcgacattcgtcttcctgacgatgtgtgtgtgccttacagtgggagtgacagcgatcttgacaacctaatagacttcgctttcccaaatctcaacgaaaatatgtcggattccacctacatcacttcaagggcgatactgtcaacacggaacgactgggtggatatgataaatgttaagatgattgatcgttttcaaggggagcatatgaatatagaccctgcaaatggactttgcaatggcaccaggctggtcgttcgtggcttccaaagaaatagcattgacgcagagattgtactaggtcaacacattggaaaacagattttcctaccgcgtataccgccgtgtccctccgatgaagagatgttccctttccagttcaaaagaaagcagtttcctgtacggcttagctttgtaatgacggttaacaaagcacagggtcagactattcccaatgttggtgtatacttgcctgaaccagtgttctctcatggccaactatatgttgctctatctagagcgacaacccgatcgaacataaatattcttgtcattccagccgtcgatgggaggaaaaagtcatggaagggtgtaaagaaaaaccccaccgtagattgtgggacatataccaagaacatcgtctacaaggaggtcctaacaaactag

SEQ ID NO: 6527 - DNA, 912 bp, Zea mays
  Peptide Sequence Number=SeqID_49902
atggcgacggacttcttctggtcgtacacggacgagctgcacacgtcgcgccgccgggagatcctggccaagtactcgcagatcaaggagctcttccgcccggatccgtggggcttcctcaagggcttgtcaagaacaaccggccatgccaggggttgcaagggaagcccgtccgcggttgtcgcaccattccccacctcgaattcggggtctccaagcccagacgccatcagcgcccgccgtcagcgatttggcaaccgcgcagatctagaccatcaacgccttgggtggaggggattcttgcatgccgcgcagatccaggccattccccgcctagtacatggacaaacccccaatagtgtagcatcgaagtttgtgaagtggagggatgtcgtcgttctctgcacccaccggccgcccaagcctgcacccgacgcgcccgatgctgatcttaccggtggctcaaagcaggcggccaccacgacgcccttctaccttgccttagatcacacagcttctgccacgtcgtctccaccgccggcggaggcgccgcccctgccgtgtgctgccaacagcgagaggggatccgaaataatcaaggcgaagatcatgtcccacccactctatccggctatcttcagagccttcatagactgccggaaggtcagagcgccgctagagattatcggccggctttccgccctcgttgatgacgtcgaaatgaattcagacgacagacaagaacagcgacgagcagcagacccagagctcgaccagttcatggagatctactgtcacatgttggtgaggtacagacaggagctcacaaggccaatcgaggaagccgatgaattcttcaggagcatggaggcacagatcgatgcattctcgttattaggtgattatgtttaa

SEQ ID NO: 6528 - DNA, 885 bp, Zea mays
  Peptide Sequence Number=SeqID_49903
atggcggcggcggctgaagctgctgggcaactgcccagcgcccacgaggcggacgagcgcgtccgcgctttgcccaccggtggctgggccgccgtgggcgtgctgcgcgctgggccacagacgctgccaggtgggccccgtgcagggaagtgtctggccgcgcaaaagcccgtagccggagctgggccgctaacgcagaaacggatcaaggccggcgcgcgggacgcgtcaacgctgggccggcgggggcaggtcgggaagggcatggggggcctggccgccgcgctgggcatgcgcaaggctgtcgcgctgcccgcacccagaacaaggaggtcgcaggcacagggccatggccggaccacggccaaccggcttcgctgcgcagggacgcgctcacgtcgggagagggcacacgaggggagggacggaggtgccgcgcctgctggtggcctggcctatccgcgcaggggattgggtgcggtgccgcgccgccgcacgcaaggaagcagacgatgggacgagggaaccgcggctatggcccctcggcacgcatgccgggaatggagtggcacgacgaatcggctacccccaacgaggaagaaggcaaaatcgaagggacgaacggtttcgagtttatggggagatctagaacgtgcgtcgtggaagggggttagagacggaagcaagcaccatgttggagcactgcgcctgtgggcccaccaatcaggggtggcgtggagacggggtaggtgcgcgagcccgcacatggtagcggcggctgaagccgttgggcaactgcctagcgcccgcgaggaggacgagcgcgtccgcgctttgcgcaccggtggctgggccgccgtgggcgcgctgcgcgctgggccatag

SEQ ID NO: 6529 - DNA, 156 bp, Zea mays
  Peptide Sequence Number=SeqID_49904
atggcgctggatgctgatgaggatggcgagcccatggatcagaaggagtacaggagcatgtttagcttcctcctatacttgactgcgatgaggccagatatacactttgcaatagggtatgaaacggattatgaggtacttgtgtttcgctcctga

SEQ ID NO: 6530 - DNA, 1347 bp, Zea mays
  Peptide Sequence Number=SeqID_49905
atggatgacgacagggaggacgggaagagggaaaccgcacgaggcaagcacggcgcctgggcgcggcctcgtcagcatgacacgaggctgacgcgcaggggtgaggcgtccaacaccgcatggcgcacgttctgccgcgcgcgcatccgcatcccgcagccgccccagccgcgcatcccgcatacgcccgcagccgccatcaacgcccgcggacccctcaccctcctccccaccgccgtgatccgccagaccacccccccgcacccgccgcagatctcgccatggcggcgcgcacgcaccccaggtcgcagccccgtcaccttcctcccccaccccgaactccgtccccgccgtagatctcgccatcggcaacacacctctcgttcgcatctggcgcgagcggttgggttctcccgcgcgagcggccggcgggtgcgacggaggggtcttgtgaaggccatcggcagcaggccggtgtcctccgatgacaaggaggacgacgtcggcggctccggctctggctccgcgaaggcctcaaggcctgcagcagacttctgcctctcgtccgtggcggcctctacggcctgcattgagagcttcacgaacctcatctccacagcgccagcgagcctcttaggttcctccttgatggtggaatccttcccgcccggacggccggacctcagccagtttgccatcacctcgtcctactgcgcaggcgtctccaccgctacggagttcgtggccgccgtcgggaacgactccgccggtccgcccggtgctactgcggccagccgcccactgtctgctctgcggagttcaccatggaggttggcgacgaactcgtggggttggacaaacaacgtcgggtccgacggtggaggatccattgccgacgagttttcaatgattgccgttgttggaatgggattggagatgccaaatgtttcgtctagatatctgtgtaggagcactggatgcatgctgcatgattctttcagcgttactgaggttgaggctctattcgagctgttcaagagcataagtggttcggtgattgatgatggcatgatcgacaaggtatattctattgttcgcctctctactgaaattatgctgttggtcgcaatctccatcgccgtccccaaccctaccgctccatcccgcggtcgcgtgtgccttccgctacgcggggtcctcgctgctccacatcgcgccgtcgcatctatggcagtgtctgcccccaggtccggcgccgccaccttgtttctcgagcgccgtgagtcggagcgcgctctccactttgtcaaataccagggcctcggcaacgacttcataatgccataa

SEQ ID NO: 6531 - DNA, 465 bp, Zea mays
  Peptide Sequence Number=SeqID_49906
atggcaaactggctgaggtccggccgtccgggcgggaaggattccaccatcaaggaggaacctaagaggctcgctggcgctgtggagatgaggttcgtgaagctctcaatgcaggccgtagaggccgccacggacgagaggcagaagtctgctgcaggccttgaggccttcgcggagccagagccggagccgccgacgtcgtcctccttgtcatcggaggacaccggcctgctgccgatggccttcacaagacccctccgtcgcacccgccggccgctcgcgcgggagaacccaaccgctcgcgccagatgcgaacgagagaactataattcgttcttgctattttactgcatctatcagtcactactggatttaggcagaattcaattggattgcagcaatgtttacgaggtcggagacctaacagaggctcgacgtgagggaggtgttatactatcagcttaa

SEQ ID NO: 6532 - DNA, 465 bp, Zea mays
  Peptide Sequence Number=SeqID_49907
atggacggttcaaaagatagttttgacatttctcctagcaacattatcgagccgactatggagactctgtcgaatgaggatcagcaagaattcaagaagcacaagaagcaactgatcaaggaggcccaggcgaagttcctggccaacttcaaggtggaccaaaatcaaaagatcacccggcagtgggcggcggatctagcttcgctccgacctactacaactacccctaaaagtaagactatggaaaatacatgcgatccatcgctacaatttggcatgaccaatcccaaccactttatgggatgtcggcggacacatatcctcaacaatcgtagcctcctgcacagattgggggtaaatccaccgatctgcgcacgaccggaccgtccacgcctgagtgcggaccgtctggaccagcagtggtcgaccccgtttttcgaaccaaattacagaaatctgcactag

SEQ ID NO: 6533 - DNA, 129 bp, Zea mays
  Peptide Sequence Number=SeqID_49908
atggttacagatgatgatgatgatgacggttctattaatgatgattctgactatggattctggtatttcctctatgaggaggattcagcaaaattctttaaagatttaaaatttaaagagtctttataa

SEQ ID NO: 6534 - DNA, 406 bp, Zea mays
  Peptide Sequence Number=SeqID_49909
atgggccgagggggcgcgctgcgtgggctgtggctgggagcgcgggaggaggggctaggtgggccggggaggggcactggagcgggccacaaggccgagagggggaaaatggctgggccgtggctaggccagggaaggaggaggaaatcagagtgtgagcaacaactacgaagtacatcgctctggacaacaaggtcagagaagcaaccaataccagaaccagcacagaagcagcactcagactggtcaaagaagaagactccgcagaaccatagtagaggaagagtcaatcatgtgactgcggaatcagttcctgaggatgccgatgtggtgtatggatactacagaagatttatcgaaggcttctccaagatagtgaaaccccttacttcactgttggagaaag

SEQ ID NO: 6535 - DNA, 747 bp, Zea mays
  Peptide Sequence Number=SeqID_49910
atgggcgggggcctcctggcagcagcatccgccctgaggtcatcgctgctgctgttcggccccccggagcagaagtcgtcgtcgtcgccgctgctggagcgggcgacggcgtgccgttcgtcggtcttctgttgctccgcaggcccccccatcgagtggggttgttcgtacctgcggaggtggaaccagagttccgtttgtaatggcactttgaatgccagtgtttttgttcattgtggctgtcgaggcctgaacataaatgtttgtgcgagcgagagttgcatctcgcggaaggtggtgagtgaagtatccgtatcccggaggcgtaggagtccctcggctcggtcggccttgccgcttacgcgcactcttacccgtccatggggctctgtcaccgacgcagtcgagaaggctcgaaggatcacttcggcagaagagcttccgaacgtgaagacttgttcggtccgcggaatcacttatccgaacgtgagttacttatcgcagaaggtgatgagtgaggtatccgtatcccggaggcgtaggagtccctcggctcggtcagccttgactgcttacgtgtactccgtcgttttcaggatccactttcgaagtagtcaaaaagcacgaaagacattctggcagaaaagatcttttttcgaggaaaatttcgacgcagagggggttcccccccttttagcccccgagggagggtcgggctttgccgaggcgaggccgacccttccttga

SEQ ID NO: 6536 - DNA, 183 bp, Zea mays
  Peptide Sequence Number=SeqID_49911
atgtccggtgcaccagaggactccaacgccaactcgccaccttcgggaatttccagaggcgactccgctataattcaccggactgtccggtgtacaccggacagtgtccgcgcatttaatgcgcgctctgcgcgcgcagatgtcaggcgcgtccactccggcacaccggacaaggaacagtag

SEQ ID NO: 6537 - DNA, 278 bp, Zea mays
  Peptide Sequence Number=SeqID_49912
aacatcttaagggttgggatgttgtgtctacggtatcgccgcatgggaggttacctgttcctaacgctgaagattacaacttagacccggacacatatgacggagagctcttccaagaagatgggctagaagggcgatttgagatagacttaacagaagctatcggaatggacgtagatattgaaatggtggttgttgaggaggatgatgaggtgcttccatcttcttcgtctaatcctgaaggcaagatgagcccttttgcccttcctgtgagatga

SEQ ID NO: 6538 - DNA, 210 bp, Zea mays
  Peptide Sequence Number=SeqID_49913
atgactcaacgatgcgctgacttcgaggagaaagtacatggccgctccggctgttttgaagtacagctaggggtaaaactttctgaggtgttctatgttccaagagttcccgacttctgtaccatccatctgggtactggcaagcttcgcatctctgaactagctcggctgcatcattcttcgccgttggccaatagaatcccgacctga

SEQ ID NO: 6539 - DNA, 321 bp, Zea mays
  Peptide Sequence Number=SeqID_49914
atgacgtcggctgttctcaactctctacgaaagcatagaaacatcagcacgaccccgggccgcaacgccaactgcgtttctacagggctcaagtacttctccgccggccaccgcattgacgcattccacggcggccaccagaacggacagcgccactacgcagcccagcagggcagccgggcaccacctcctcatggccaacctccccgctccaagaaggtgggcgaagaggaaaaccgcagcgtgcactggggcggcgctaatgaaggtgggccagagggcggcgccccagaaggtggcaaaggagaggacgtgagctag

SEQ ID NO: 6540 - DNA, 408 bp, Zea mays
  Peptide Sequence Number=SeqID_49915
atgaagaaaagaggagaggacgctcggatccccgaacgggcagacagacgcacacacaaggacgaaacgatacgagaagacgccctcaaggaccgacgatcaggaggacgcatcaacgaggacccagaggaaaataacactattcaccctgttccgactaccgtgccaaccaccaggataaaactaacgacaataagtcacgacctcccccgagttcagcctcgggcgcaacagggagctctacctcgtccgacctcaggcctcggcctcagcctcggcctcgggagaaggtctccgcctcgcccgaccccaggcctcagcctcggcctcaggagacgtctccgcctcgcccgacctcggcctcggaccgactacgccactggggatacatcattaccctacccctag

SEQ ID NO: 6541 - DNA, 498 bp, Zea mays
  Peptide Sequence Number=SeqID_49916
atgtgcagcagccggcccgccgccgcctgcaccaccgaactgacgatctcgtggctgccgccgtcatcctcccatgcccccaggccccggctggtgcaggcgcgcggtcagagagaccagacaccagagcagacagatgtcagcacgcacacagcctcccctcccggacgccgacgcccactgccaaatgcccaaatgccaaaccggcgcccactcgcccaggggtgcggcgcgacaattattggggacctcgcggcggcgccaaccacgccgttaaaggacccgcagaatcgaaagggacgacgatattggaacagccgtcgagaagagcgtgagcagtctcgtgaatatgcttcccgaaaaatcttattcgtcctctctcgatgtaggatctcgaaggcgacaggttctagagacctactctccagatcgcggatgcacgtcagtgcttgggatgaagaagactacgatggtggcgcagcagcaagcagagactaa

SEQ ID NO: 6542 - DNA, 741 bp, Zea mays
  Peptide Sequence Number=SeqID_49917
atggatgaccgagggctagcaaagaatgcggcggaattgctaggtcacggaggcgagttctcaaaactcaagggcaagtgcgcgggagcgagagcatcagtgcgcgggagcaggaggtgctcgtgggagatggcgagtcacaacagctcgggaaatatggctagcgacggggaggtgatgccgagcacgatggagaagagtttcttcttccatctttggagctcgggtggaccgaattggtggtgggagtttgcttcattcctctgcgaagaatccaccttctggcgctcggttcctgggaaggtgttcgacaggtcttttgttgatgctatcaagaatcatatcctcactcacccatcccgattggtcccaaggcttggcgtcactgtttgcctcgccatatcgttgctattgcttgcaggttggattcttcagttcagtgaactatcacttcaccatgcaagaaagaatgcgacgcttcgcattctctccacccgccgttccattcggaagcgctgcaccgccgtcctcgccgtcggtcgctgcaatggtatagcactgggtcgaccaccagtgcaccctgctccatttcttccccgaggcttcctccatcaatcggtcctattccacaagtcgatgactcaggcaatctctaggaaaatgtcgccaaagtatgaggatttcgcagtcgtctccatccaccccttaccgatggaaccacttgctttcccccaacgttag

SEQ ID NO: 6543 - DNA, 425 bp, Zea mays
  Peptide Sequence Number=SeqID_49918
acctgggcaccggattaggttctttgccgagtgttatgtcgctggcactcggcaaagaggtcgtctttgccgagtgccaattgggacactcggcaaagaacctgacatggggaccctccctggcgggctctttgccgatgctccctgacactcggcaaagatcttcgccgagtgcccgagaaaaaggcttcgccgagtgcttccgacactcggcgaagctattgattccggtagtgcccgcgtgccctgtgacgacggcggctctcagctcccttacggaagcagggggacgtcagcaaggactcgaccgcaccgacagctgtccctccgccaagctccgttgctcctccgacatccatgacatcacaccagcagggtaccaagatctctccggctgccacattagcatgtacttagggcgctag

SEQ ID NO: 6544 - DNA, 960 bp, Zea mays
  Peptide Sequence Number=SeqID_49919
atgaaggaccgccacctctcgctgaaccagacccagcgggtccgcctcgaggccgcgcttcaagagctccagtccgttgcgcccgccgccgtgtccgccgccgccgtcaccgtcgcggacaccattcccgtcaatcaagaggacaacatcctcaaggggcatgggacgtcggaccaggacggggaggtggttgcgacgctctgcggggtggtggagcgggtcaacaagctggtctacgtccgcactcttcgcgcgagatacaagccggaggttggtgatatcatagttggccgtgtgattgagattgctcctaagcgatggaggttggagataaattttagccaagatgctgttctgatgctttcatctatgaacttgcctgatggtattcagagaaggagaactgctgttgatgaacttaatatgcggagtatctttgaagaaaatgatgttatctgtgctgaagttcgaggcttccaacatgatggatctctgcacctacaggcaaggagtgaaaagtatggaaagctggagaggggtcaattgctgatggtagctccatatttggttaaacgaaagaagcagcattttcatcatcttgaaaagtacaatgtcgacttgattcttggttgcaatggattcatctgggctggtgagcatgttgtggtgggtgaaaaaccaaaaacgacaggaggtcagcaggggttcagcactgaagctgagaatttcaccccattagagacaaggaagcatatttgccggcttgccaattctgtacgtgtgctctcagccctaggattcactctgaccgtcgaactgataatcgaaaccatggaagcaagtgcgtcatcaaatgtagagataaatgacatgctcggggctgagttttacgtccagacagcagagagggaggctaagcgccgggctgatctgttgagaaagaagaatgacgcaaggtga

SEQ ID NO: 6545 - DNA, 346 bp, Zea mays
  Peptide Sequence Number=SeqID_49920
atggcacatgaagagaaagggaagcttactgaaatctcaaatctcaaattggggtaccagggcggcggcgcacatggctctcgggcggcgcggcacagggctcccgcgcggcaggcaagaacaagcgcgcgaaacgcggcaaaacggcagatacggaggggcaaggacagaaatggcctctatgaggctatccacgtcgccaaaaattcttcacaccgttggattgtgaatcaatggcttctattcatcgctgtatcggtggcctgcttcaccttctgccgctttgatcgtccacttcacttcagcacagtcacgtcgtttattgtcgccttcatcgtctgctcca

SEQ ID NO: 6546 - DNA, 1875 bp, Zea mays
  Peptide Sequence Number=SeqID_49921
atgtcgaggtttgcccacttggggaagagcagaaaacttgctgaaacccttttggttgcctcaaagcccaatactgctggtggccaaaacattgcttcaagctttgcattcggcttgggttattccagcagggcctttttgcacgggaaggttcataatggtccaaacacctcctacatgctgggaagagcaaatgatagcttacattggagcactggtgtgaggaaattctcaattctttcatcttgtagccagaatgcatttcagagtcagcttgcttggaagcgacttgtagcactgggttctcgtgcaccaaaagcatctccaatttttagtaaggttgcttgtgccattggcttggctgtgagtaggtctaatatagccccttaccttgtcgcttttattgcgggagaggtaatgctagctcagaagacatctgcagatggagaatactacccaatacgtgagagagctcaggatggccgtatttacgttacctctctaatatattcggcagtagaattggttattataatcttcagatcaatatatttggcattgctgttcactccaagtatactgatggccccatttgcagagactcttggcagtaagtataggaaaacatggcttcgacttgtccatcgtactttggagcttgcaggtcctgcgtttatcaaatggggccaatgggctgcaacacgccctgatctgtttccaagtgacctttgtactgaattgtcaaagctgcacacaaaagcaccagctcacagctttacctatactaagaaaactgttgagaaagcttttggtcgaaagctatcagacatttttgaaaattttgaagaggaccctgttgcatctggaagtgttgctcaagtgcatcgggctgttctacgattccggtatcctaatcggcagacaaagcgtgtaactgttgcagtaaaagtaaggcatcctggtgtaggggactcaataagaagagatttcaatatcatcaatgccgtagcaaaaatatctagatatatccccacgctgaattggttgcgcctagatgagagtgtacaacagtttgctgtcttcatgatgtctcaagttgaccttgcaagggaagctgctcatctgagccggtttatctacaacttccgaaggtggaaggatgtatctttcccaagacctctctatccacttgttcatcctgctgttttagttgagacttacgagcatggggagagtgtttcacactatgttgatgaccttgaaggacatgatcgaattaaaagtgctctggcccatattggtactcacgcgctcttgaaaatgctactggttgataatttcgtccatgcagatatgcacccaggaaatattttagttcgtgttgcacaaccaaagaactcaaataacacccttaaaaagtcaaggccacatgtagtcttcctggatgtaggaatgactgctgaactttcaagtaatgaccgtgtgaatttacttgagttcttcaaggctgttgctcgccgagatggtcgtacagctgcagaaagtactctaaagttgtcaaaacaacagaattgtccaaatccaaaagcttttattgaggaagttgaacgatcattctctttttggggcactgctgaaggtgatgctatccacccagctgagtgtatgcaccaactgcttgagcaagttcgatgtcataaagtgaatatcgatggcaatgtttgtactgtcatggtgactacattagttcttgagggctggcaacgtaagttggatccagattataatgttatgaagactctgcaaactttactttttaaggaagattgggcgaagtctcttcaatacactatccaagggctcatggcgccttag

SEQ ID NO: 6547 - DNA, 426 bp, Zea mays
  Peptide Sequence Number=SeqID_49922
atgggcaagaacaacaagcgcaagcgtgagccgactcctccatcggaggagtttggtgattcggaatactcagaggaggagttctcctctgagtccgaggggtctccggctcccatccccctgcgtgagttgtctgatgactcagacgactcccaggggcttgcggcggaggtctggacgtacatccgggccgtcgagcgctccgggctcgaaggctcggatgagtcggagtactcctcggatgaggaggactcggacggcggcgacgagggtgaagacgacgacgacgacgacgacgacggcgacggtgacggcagcggcagtggcaggggcggcggcgacggcagcagggacagcaccaagggcgacagcagcaggggcagcaccaagggcagcagcggcggcaggggcagggccagtggctag

SEQ ID NO: 6548 - DNA, 231 bp, Zea mays
  Peptide Sequence Number=SeqID_49923
atgaatgtctcacacacacaattcttactcgtacacacagccgcaatatgggtgatagacgtgattggatgtatgaaggtttcaagaagggttacgcctgaagcgggtggcagtgggtctgatccagcagcagggactggatttgttgactcactcttcgcgttccctcctcctggtggtgaaggcggcagcggtcatagctctaaccacccaagtggtggttatctctaa

SEQ ID NO: 6549 - DNA, 249 bp, Zea mays
  Peptide Sequence Number=SeqID_49924
atgaggaaatgggcaaggcctagcccactactcctcatgctcctctcctgccggagcaacatcccactcgaccgtccaacccggtggcagggtggtaggccaagtcacaccatcaaccaaatcctgcatggtacctgcaaaaatggtgccacaagcaaggctgagtatactaatactcagctagacttaaccggcctcaccgccttggcatacaatgctccactgaccccggctgccgccgtgcagtga

SEQ ID NO: 6550 - DNA, 321 bp, Zea mays
  Peptide Sequence Number=SeqID_49925
atgacaggtgacggcctcgacctgaagtactaccctcgttgtttgaccggcatcgttggaggtgtgattgtctcgcccgttcgtgagggaaatcccaagctgaacggcatggtcaacctggtcgccatgctcaaaaccgagctggaccatgcccttgacgagttgggcatggttcgggcagaggttgtggaattgcgtgctgagcgcgcagcacgccactatcaggatggtggttcccccgctcctttcgggattctgcacccttaccgctcgccaccctgtggtcgctttgattacgtcacccttgactgcaggacgtag

SEQ ID NO: 6551 - DNA, 138 bp, Zea mays
  Peptide Sequence Number=SeqID_49926
atggaggcgaagaaggggttgaggatttataaacccgttcggccaccggtcccggaggacacggcggaccgagccgtgcggaggcttgccgcggagaaggagaaggagaaggagaagaaggatgcaaaaaaggcctga

SEQ ID NO: 6552 - DNA, 381 bp, Zea mays
  Peptide Sequence Number=SeqID_49927
atgccgagcattgcgcgccgcgctgggacgcgccgtgggcactgcgtgccgcgtcaggctgtgtcgggggcactgcgtgtgcgccgggactccgcacgccgcgccgtgccacgccaggtcgcgcatgcgcaggccatcgcgccgtgctcgctggccgccacgggatgccgggccgtcacgcctggccacgccgcgctgccgggggggttagcgactaacccccttaataggagcgttgatatgtgcttggtgaagatgctgccgactctgatcttgactgatttggaggagttggaggttgccaaaaggacaggtgcaagaggaaagaatagagagaaaaggggaaactactctaaggccatcgaaaggcaaggggaatga

SEQ ID NO: 6553 - DNA, 1469 bp, Zea mays
  Peptide Sequence Number=SeqID_49928
atggaaaaggatcaccaagacgcgtcgcggaaacgtcgagcgttcgtgagggtcagggacccacgctgcgaggtcaagatggcgcgggggatcgcgaagtctgctgcccccggcaccagcaagcctccgccagatgcgaagtccaccgcccccggccccagcaaagccgctccctgtcgatcggaggctgggcaattggctgttgtcccaactccggtggctactagggcgaaggggtcttcgcaggacccatggtccaagttttgcgccagcggtgagatcgcttcggccgccgccgctaaggacatggcaggcttagttgtgcagcagctgaagcatgtggtcgccttcgccgaatggattgcgtcgggggccttgacctcggagttcgctgcagaaaggcgacgactcaaggggagggttgagcgcctccggacaaagctcactgaggctgtgtgggacaagttggccgcggagaacaagagccgcaacctgatggataagttgtcggctgcggaggccgaaaaagaggaactcggccaccggctagcagcggaaaaggaggatgctgacaaggcctgcgtggaggcccaggctgcacgcgccgatgccaagcttgcacgcgccgaggctagcctctttctccaacgtgctgcggaggcggaggcgaaccacaggagcctacgcagctatccggacaaggcggaggcctctacccgcacaggggtcggccgagcgcgtgcgttgctcgtggacgcgtaccggcaacttggtgcgcgtacgacctcctttgatgcgtccggtaaggaggtgggcctccgctttctcggatggttgcaggaggaactggaggtccttccgtcgattgtgacgggtctcatgtcctttgcttcgctcatcacctgtgagggagccgcgaatgccttgtcccgtgagggatgtaggcacttcgaagtctttgaccagttcgacgaagacttcgaccacgaagtcttccaggttgaagacgcggtgctaaagcggtccgctggggcgctttatgataggatgtggggccctcatggccgtgatactgtccgggaaaggtctgatcgggcgatggagcagatggcgaatgatgagaaggttgaagacttgggaggtctggagagcacgatgcctctgggttttatttttgtgatactgaaattggttgctgcgcaggttccgacgtctgggcctacacaagcaacccctaccgatggtactaattttgtggtggccgcgaacgtagtgcctgctaatgatagtttgtctggttctgaatttgggtctttttcatctaatggtgagttcgagagcccgttttcctggactgaagagtcttcagatgaagatttggattattttgccgcgttagatgtgaccgcagcggagtcttcgccgcggctggaggtgggagaagcgtctgatcccccggctggcgtgag

SEQ ID NO: 6554 - DNA, 924 bp, Zea mays
  Peptide Sequence Number=SeqID_49929
atggagggatttatgtcctttgcctccctcgtcacctgcgaaggggcgttgaacgcgctgtcccgcgaggggtgtagtcactatgaggtcttcgaccgatctgatgaagattttgggcgcgagatttataaagtcgaagaccctgtggtgaaggactccgcgggggccctcttcgaccggatgtggggcccctacggtcgggaggtggtcagggagcggtctgaccgggcgagggatcagatggcgcgtgccgaggacgtggaggacttcagacccctgaatagcgcgcagcccgaagcggaggccaacccggttgtggccgaggctgaagtcgacccggcaccacccccggaaaccggtgaaggctccctcgctgcccctgcggctgctttgtccggtggaggctcgtcgccagtcactgcgccgatggtggaaaatcccctgaaggcggcgacggagctggcagcggaggatccctcgaaggcggcgacagagccggcagcggaggatcccatggcggcggctgggtcttcgcaggttcaggattttgggcctgcgcacgcaaccactactgctaattttgtggcggcttcgaccgtggtcgctagaaatgaatcggatgagtctgcgtttaagttttctgattttgatgactctgggagttcggttgagtggacggaagagtcttcggatgaggacttggattactttgtggccttggatgtggctgcggtggaggcttctccgcatgttacggatgctgaagttttgcctggtccgagtgctgggcgaagacggcgaagggcggtggcgaagcgtagagtgagtgaagtggatggcggtcggcttcgtgtgggcagggctggcaagcgggaattgttgtcctcgccggttggggcgagtgtaggtgagggggagttgtga

SEQ ID NO: 6555 - DNA, 264 bp, Zea mays
  Peptide Sequence Number=SeqID_49930
atggacgtgctggaggctcgtcccccaccacaagctccagccccagctgctggtgaagtagtgctctctcctacggaggaggacaaagacaacgacagtgatgttgatgcatcactacgacaacacctcacatgtaatcgacaaggtatgggagggtcgccaatagcggaggaggagcaccttaacaccatgacaaccatcggcactagccaaggcgtcatcctcttcgggcgtacggacgtccacaccttcctccaccagtga

SEQ ID NO: 6556 - DNA, 321 bp, Zea mays
  Peptide Sequence Number=SeqID_49931
atgacgggttatcgcttcgaggaccagaagacgaggtttgtgccaaagaacacagtgtacccaaaggtggatcagaacgtgtcgagaagtcggagagggccaaagaagatcgtagttaagggtatcatggaggcagcaaagaatccgcttggcggcggtgagatggggctcccacaaggtgtgcatgtgaaggcacacctattggaccgtgtaggcgatattgggccatgtaaaagtgagatactggagacctctagaaaggctccggtaggccgtcacgttgccaaccagggtgcctcatcgtcagagacctttgcttga

SEQ ID NO: 6557 - DNA, 678 bp, Zea mays
  Peptide Sequence Number=SeqID_49932
atggacaaaaaccagaccatagcctatgctccatacattatggctctcattaaagccaagaccagatttgaggggcactatgaaatagttcacacaccttttaggctcttcaagaatgagattgggttcctcaccaggcctctcactccgttcccagatgatgaggaagaagttggttatgatgcaggagatgctcctgaagctgatgtagagcagatgcctcctcctccacctcctcctcagcctcagcagtactggcagcctggtccaggctactttgacccatactttcagaacatgcagcaagggcttcagacccacatggatggccgcttccagggaatgatgacccatatggaccagcgcatggatgccatgcactctcgccttgatgatcacttggatgcgataaactgtgagctttctgaatttcgtagtcacatccaagaccatgtcactgatcacatcatgaccagactaaacaacatgcagcagagttttcaggacaacatgggggctctgtctagtcagtttgataatctctccactaatgacagtatgcaagaaataagtcagaggcagcaacagctccagcaggactttgggcagttctcctctctctttgacaccttcagcactcactattatagcatgtatcctccacctggtggtcagtga

SEQ ID NO: 6558 - DNA, 669 bp, Zea mays
  Peptide Sequence Number=SeqID_49933
atgggtcggcgcgagacggagcacgaaggggggaaaaggagacaggcaaaaggggaaacccgcgaccttcgtgttgtcctgcgcccaggtcggggtaatgatggccccccctgtgacgtggtcggtccgagccctgggtcgggcgaggcggaggctcctccgaggtcgaggtcgagtctgtcttccgaggtcgaggtcgagtccgagccccgggtcgggcgaggcggagaccgtcgtccaaggccaagactgagtctgagccctaggcttgggcgaggcagagttcgtcgtcttccggagccgaggctgagtccgagccctgaggtcgggcgaggcagagttcgtcgtcttccggagccgaggctgagtccgagccctggggtcgggcgaggtggagtttcctatggcgcccgaggccggacttggctgctgtcagcatcactctgtcgagtggcacggcagtcagagcgacgcaggcagcgctgtcttcttgcgatccttgcattaaatgctcccgcgatacggtcggtcggcgtggcaatctggccaaggttgcttctcggcaaagactgggcctcgggcgagccgaagctttgtgctgatgggggttaccagctgagattaggagtcttgggggtacccctaattatggtccctgacaactggtga

SEQ ID NO: 6559 - DNA, 276 bp, Zea mays
  Peptide Sequence Number=SeqID_49934
atggcgtccccggggccccgaggcagcggcacttccaaggcccgcgagcaagcggcgcccctcgacgtggtgcggcaaacatttgatacaagggaagaagcctacctcttttaccttgactatgcaaagttagctggttttagtgtcaggacaaaaaggtgtaattgcaactgctggtgtgcatttttgtcgggagcgtgcgggagggacgaagacgaagcgtcggttcggactgagtggggcagttggctcggaccaggtgctcctggcgcgtag

SEQ ID NO: 6560 - DNA, 144 bp, Zea mays
  Peptide Sequence Number=SeqID_49935
atgtttggtttgcaagtggcaatgagattgatggttattggttttgactctggtaatggttgtcagcattgcaaccactgctcaggagaagatgaagccattgaaggagacttccaggagttccaagactacgacgagttctag

SEQ ID NO: 6561 - DNA, 951 bp, Zea mays
  Peptide Sequence Number=SeqID_49936
atgctggaggagacccagacgacggaggtggcgacagcagctcgagccacgacaccgacttttctgctgacctggagccggaaggatgggttgctcgacccatcactcgcgacgctgctcgcgggtgtcacttccacgatgcgctcgacaccctgctacgtcgggcacttgaccgggcgtacttggtctatcgagtatcgttgtgtggtcttccagcatagtcgcggggtctacccggaccgctgggaggcgacctgcttggtgcgccgtccggagaatagtctctgggatgcggagatttgctcagagcactattctatctctgagcgggactcagctgaggcggccatgcaagatgtcacacggcgtgcgctttcgcactactgctcagtgttcggtggggtagccgatggtctcaacctgaagtattacccccgccgtccatctggcagcacaggaggtgtgattgtttcacctgtcggtgaggacaatcctaggttgagcagcatagtcaacctagttgccgtgataaacacggagctggaccatgcactagacgagctgagtagggctcgtgctgagatcgcccagttgctggctgagcgtgtggagcgttgtcacctggacgatggttcccctgctcccgtcgggactcagcacccgtaccgctcacctcgacgtggacaccagtcttatggcaatcccgactatgtcagaaaacaggcgcagaggaggaaggcgtgctcagcaggagcaagccgctcaacaggaggaggtacctcagcaacagcagctgccgcccccgcccccgatgtccatcgagcagatgttcctgatgcagacctaggcagttcaagccattggtcagactctagccgccattcagcagcagcagcaatagccaccacctcagcctcagatgcctcagatgcccagagacaagcgtgctga

SEQ ID NO: 6562 - DNA, 207 bp, Zea mays
  Peptide Sequence Number=SeqID_49937
atgtttgcttccttctttcgagtgatccgtgtccactcctttgtgggcgaggttgacagcggagttcttcaggaaagcttcttctccggtggatctaccacgcggtgcagagtcccctcttcatctgctatggacgagatggttccaaaagcagaacatagtcccgaggcgaagggcgatctggcacttggaggtgatggccattaa

SEQ ID NO: 6563 - DNA, 545 bp, Zea mays
  Peptide Sequence Number=SeqID_49938
cacaactggcgttgtccgcacggctccagacgtcagcggctgtgggcatacaagctgctgctcgtggtttccttgcacgacggagagtgcgggggatgcgccggcagatgctcaaggcagccttggtgacggttgacctcggcacacgggggcgcgacctcgccctatcggacagccatcaacagcggcaccgggctgctatctccaagtgcgagcatggtacgtgtctcgcggacgacaaagttcaactctacgacagcggtggtagggacgacacttccctcgtcatcggtaagggcacactatttagcgccaccacattccgctaccggccgccacgagggcgcctccgctggttattgttgcgacctactccagagatgttaggttccgatgaggatgacaagcaaccaaagaaggtgctgccgctgccaccggatcccattgccaagacatcagctttcgatgaaggcgacaagcaaccaaaggtgctatcgccatcgtcgccggattccattgccaaagcattggacaacctcacctag

SEQ ID NO: 6564 - DNA, 267 bp, Zea mays
  Peptide Sequence Number=SeqID_49939
atggcgttgctgctgtggtgggtggcggtggggctagtggtgggcggaggtggggcttgcagtaagaatggcttgggtgtaggcgacaggagaggtgcgggcataacagacagaggagacacgcgacaatcttggaacagaaacaacaaaactcagcagtgtcatcaactacaacaacatgggttcgaaaaccctgagtacggagtgtacttacgcaagtcttactcgactaaaaggaaagactctcaaggatatgctggcctttag

SEQ ID NO: 6565 - DNA, 606 bp, Zea mays
  Peptide Sequence Number=SeqID_49940
gtgaccgttggcgccgcaggctccgggtgccacctggaactagccgttgggctgcagttcccaggtgcatcggacagtctgaataagattcgactgagaacgtacctagtgccactcttggggtctcctgaactgtgtcgacctccaggtggttcacctttccatactaagcacgttgctgtccacgattgtttgctccttgctagggtgcattctgtcttgctggggcactgggagctgactgttgctgagctgctttctttggacaatgtgacacccagtggccttgttctccgtagtggaaacttcctaggcctcctccttgtgatggggcggtttgactgttttgattggttgctagggcaggaaggcaaggtgcctagttgttctgcctctggtattggtttcctcccggttggttgttctggtggtactgctactgatgccgagggaactgcctacggaattgatgttgatgcagatgctgattctggagctagtatccctgaggcatctgcacttgcggttgaggctgaggctgttgctgcacttgctgcatggctgttagggtctacacaattgcttgaactgcttcagtctgcatga

SEQ ID NO: 6566 - DNA, 408 bp, Zea mays
  Peptide Sequence Number=SeqID_49941
atgaggaaactcgagctcgagccatggggaagggaagggagctcgctggggcatctcctgcgccatgggaggaagcaggacgccatggctgggggcgcgtggagcagggagcctgctgctcgcctgcagcaagggcgccgagttgggctggaagcagccgaggagggagctcgcccgcgccgtgaaggagagctcggcggcatgggtgcctggaggaaggagctcgccgcagggaaggttggcgccatgggagcagctcggcagagagcttctctgcgccatgaacaggagaggagagcgctgtgcgtgtgggagaggaggaagaagagagtggcggctggaaattttttgaggggtgggactggaaaatttccaagtgagcacccctattttatagaagatggctag

SEQ ID NO: 6567 - DNA, 222 bp, Zea mays
  Peptide Sequence Number=SeqID_49942
atggccggcgccccgcgcagcgcctctgcgcgactctccctccccaaacagcgagcccccttccttgctgctcgtcgtggtgcccgccggctgttcggtaaaatgcgcagcaagccgcgcgctgcagcagccctcccgttcgatctccactcccctcgtcgcgtgtcgtcgctctcgtgctcgctgcgcagccccatccgcgacgccgtcagagtaggttga

SEQ ID NO: 6568 - DNA, 345 bp, Zea mays
  Peptide Sequence Number=SeqID_49943
atggcgcatggcgggatgacggcgacgacgagtgcaaatagaggcactcttgtaaggtgtaggaagttggaaaacttggatgcaattgaatgtggggtggttggggtaattatagctccaaccaccaaaagtggccgttgggaggctgtctgtcgcatggcgcaccggacagccggtcgttgggttctgaccgttggagctctgactggtggggcctctgggctgtctggtggtgcaccggacaggtcctgtagactgtccggtgccccttctgcgcgtgctctgactctggcgcgcactgtagcacattcaatgtggttgcagtcgaccgttggtgcgaagtag

SEQ ID NO: 6569 - DNA, 300 bp, Zea mays
  Peptide Sequence Number=SeqID_49944
atgaggctttcacaaaatacacttaatacgaagcaacccgctaaggtttctaaagacgatggtggtggccccctgggtgagagttaccgtgacaacagattatgcgtaacgagagcccccgtttaccggatggaacgaggcccgcgtcctttcggccggaagctcgatagtgaagatggcggggagcgaccgagaggagccggaagcggagcaccacttgcgcgtggagaaggcacgtggctctctacggagttactcgaccgtggtgcttggacctcacgtgggcttccctttgcgtag

SEQ ID NO: 6570 - DNA, 810 bp, Zea mays
  Peptide Sequence Number=SeqID_49945
atgccgtcctcttcttcttcctccgacaccacgccgccggccgccgcctcgtctgaggagacgttgagtagcgtgatggtggaggagttgcgcaccggcgactccgttgattttggtgtgtcacggatgacgtcagcccgcgttgaagatatgcagcggttgggctactttggcggcggagttgctcgtgctccggggacggaggaagtccccgagccggaggtggcagaggaagatgcagacgaaggggcccttcggtgcgccgccggtcagagcagtgggcgtgatttagttgaagagtttgtggcatatggggtgtggcccttggcgcacggttgggtgctgggcgaagtgtgccctcgccagatgccttttcacgggggaagggttgtgcgaagccctgccttcgcactgaatctgcggaaccgcgacccggctgcctttgtgcgcgacgcggaggacggggccgtgcggctcgtggggcgttacgtgccgaggacggaaggccagcgcagctttgatatccgcgggtcaaatgaccgtctgaacagggtcttcgaattaaatcaattgccgtacgatggatatcctagtcaagacgaagccgaccgtcgcgggaagattccggcggtggagacaggagacgaccctgcgccggcggccccccttccctcgaaaaagagaaaattaggtactgcgatgggagggattggggtgtctgatacttttgctagggatataatgaggacgtgtgcggccccgggggagaggatgtcttcgcccgagctccgggagtctcggctcggatga

SEQ ID NO: 6571 - DNA, 1293 bp, Zea mays
  Peptide Sequence Number=SeqID_49946
atgaccgcgtcaaaaaagggaccgggaaaggggatactccgaaagggatccttctccgcgaaggaagcgggcctcgagccccctactgatcagaagaagggttcgacagccgcctcaggccactcgggctccacgcccactactgatcaggggttcgtaggctggccccctgacgggttcgacaatcgccccagagcacgcagagtgagggatgactctgggaacgattctgtaatggaatccccatcagagggaggcctcaagccctcggaccctatcgaacaggaccgggtccggcaaatcacctgcaggggctcgggggctgctctcgcaaacccggctccggccaaaccgttgacagcgtcaacataccagcccgagaacccgaaacctgaccatgcacccgggcgacgaccagttcgcatgagggaacaaccagaccggccgagccatcacgaaaaggcattaagacctcgaaggagtcaaaccactccctccgaggcccttggagggcttccacccggcgggctggtaacccccatcagcacaaagctgcaaaggcctgatggacgcaatcccggcttcacggagaagcaaccttggccagatcgcctcgcccgccgactggatcacaggagcattcaatgcaaggatcgcctgacacctgatcctgacgcgcgctttccagtcgacaaggccgaacaaccaagactagcctcgggcaccataggaatctccgcctcgcccgaccctagggctcggactcgacctcaactcggacgacgatctttgcctcgcccgaccccagggctcggactcgacctcgcctcggacgacgatcttcgcctcgcccgaccccagggctcggactcgacctcgcctcggacgacgatcttcgcctcgcccgaccctagggctcggactcgacctcgcctcggacgacgatctccgcctcgcccgacccccgggctcggactcagcctcaactccggaagacggtcaccgcctcgcccgaccccagggctcggactcaacctcgactccggaagaaggtctccgcctcgcccgaccccagggctcggactcgacctcgacctcggaggagtcaccacctcgctcgggccgaccacgccacaaggggaggccatcattaccctacccctagctagcccaggctacggggaacaagaccggcgtcccatctggctcgccccgggcacagaagtcaccatgccctactattacttcgtcaagcgcctcaacttcgccttcaatatgttcaaaggtgcttga

SEQ ID NO: 6572 - DNA, 561 bp, Zea mays
  Peptide Sequence Number=SeqID_49947
atggctttggctatgactatggtgctgatggctcgacttagacacactgcacgaaagtctgtcatccccttcttaccctcccgccttgctgagcgtccgcttcgccgtcccgtggacggacagtccagccacttggagagactgcaccaccgcctgcatgaggagcaggaacgtcgacgacaggagcagcagggctcttccttctcgctccaccaggagatagagtccgtgaggagctgctcccccgtgcttcctctggaggcgccccctgcaccaccactgggcgccccagcatctggagtagctgctggaggagacccagacgacggaggtggcgacgacagctcgagccacgacaccgacctctctgctaaccatgagccggaaggattgaaagggaaatgtgcccttgggccatttctaagtattttggtgattgagtgccaacacaagtgcttaaatgtgaatctatgcccatggatgaacaaagtgcaaatcaagagtaaaggtatgtttctaagccttagtacattggttttgtgtactaatatacttgtctaa

SEQ ID NO: 6573 - DNA, 1854 bp, Zea mays
  Peptide Sequence Number=SeqID_49948
atgccgcgcacaaagaatgcgtcggcgccagggggaggcgatgatgaggatcctcgtcgccccttcagccaggtcaagggcaagactgtatacttggagcagcaggaaggccgcaagaagcggcttatggacagagcagcccaagcagcagcagcaaccgctgagcaggccgtgctaggagatcagcctcagactccttcagatcagattgtgtaccgagttcgtcgtctcgcctcccggcctcgctcctccactaccaccactgcttcagcttccactccaccacccactttgcatcctcctgtcacccctgttgcgccatccaccacctccactacaccagcttccactgctcctcctcccgcttctgtttccgctcctcctatcccacctgctcgcttccgggagcgcgatgagactgaggtgcgacctctggctgcagatcccaggttgtttgaccttcagcgtgctacagcgtcacgaagggaccctgctgcagttgacctcttcagcaccaggattcagaaatccttcttcagggcacagatgtctgcacagattgctctgcgagtgcaccggcttttggaccttccagcttttctgctagccgccggtgctgactctgaggtgcacctctcatatctgcctggccttctgactcttttgactaccagcggcaggtatgttgaggagtgggtccgagttttctacgcgactgtatggatagacccagatcaccactggatgaggtttcgttttgagcgagaggatgtcactattcatgtcagccagattcaccagctctttggatttcacgagtcatcaactcgacttcacaacttatgctacggcacctctgaccctcctcgtcgccctcacggcggtgtggctccgggtacagctcacgtcacggctctgttccgaccgcccttctcagatgggtcgcgacgctcaccgacagatttcactacatcagcaaagttcctatttcagcttatgagacagacacttctgcagcggatgggatacagggaggctaccacacatatccagctctggctccttggtgccctggtctctcactctgagtttgacgttgtggatttccttatttgtgatatcgaggacaccgttttggatggcatgtgtgctcgtcgacagttgccatatgctcactacctgtgtcacatttttgcgcagctgattcggcctccacagttccagggcacacttgaggcctcacgcctcgtctttgggtcctaccgtccagcgcctgaggatcctgtgccagcttctgctctagtttttgacactcaggccgaggatgctgctcttcatcagttcgaagctcaggatgcagcagttgatgatgatgatgatgatgatgattttgggattccacctccgcctccgcctcctatgcctccacgctcacatgatcatgaggctgggagttctagtgctacccctgctgcccctccggctattgaccccgctattgcttcgattctccagtctctcactcagcagcaggctcacttggcagccgagcagacccggttatccgagaggatgctctcgatgtttcagaccatacaggacatgcaggattctctccagcagcagcttcttcaggaccgggctgagagcagggcattcatggctcttatgctacagcattctggtgtctcgattcccccggttcagtctgcaccacctcctccgcttcaggatcctgttgtgccagcgattcagttaggaccccctcttccttctgttggtccttcttcctctccactccgaccggtcaccatggctttcacgtcaccggttctcagctctgtctacccttag

SEQ ID NO: 6574 - DNA, 960 bp, Zea mays
  Peptide Sequence Number=SeqID_49949
atggctacggcgacgactaagccggcggcggggcgcggcgggaggcgctacgcgctgctgctggcgctctgggactcggagtacgccaaggaggtgtacggcgggtactacaacgtctttgtcgccgcgttcggcgccgacgacgtcgtcggcggcggtggggagggcccggccggcgataggtggcactgcttccgtgtgattgccggcgagttccctgcgccggaggacctggcgtcatacgacggcttcgtggtgagcggcagcccgcaggacgcgcacggcgacgagccatggatccggcgcctctgcgcgctcatccagaccgtccacgccatgaggaagcgggtgctcggcgtctgcttcggccaccaggttctgtgccgagcgctgggcgggagggtcggcagggctaggaacggctgggacgtcggggtgaggaaggtgacgtttgcgcgagaccgcctggagggccttgagttcctcggggacctcgtcgaggagcttccccggagcgcctccctcatcgaggttcaccaggacgaggtgtgggagatcccgcctgcggcgacggtgctggcctactcggagaagacgcgcgtggaggtgttcgcggtcggggagcacgcgctgggcatccagggacacccggagtacaccgtcgacatccttcacaacctcatcgaccgcctcaccaggcagaacgacatcaggaggagcgtcggcgaggaggcgcggcggacggttgcggagaccggcgggccggaccgcgctttctggaccgcgctctgcaaaggttttctcggagggggaggggcgggaggagaccgtccgcagccgtctgctgctctgcctgcggtgcgggagacggcgccgccggaggtgacgactagctgcgccgtcgctggttgcttcgccagcgccgcaggtgcaatggtccagatggcgcgcagcaactag

SEQ ID NO: 6575 - DNA, 1968 bp, Zea mays
  Peptide Sequence Number=SeqID_49950
atggggggttcgcacagccgcgaggacctcgacctatccgactctgactccgaggacgccgagtccccccgggcttccgacaactcctccgactacggcacgcctcccccggcctccgtctcctccaagttagccagcggcgcaggggcggctacccccgcctccatcgacgccatcgaccgccacctccgccagctccacctcaagtacaacgagcccatctccccgaaccctagctccgggcccacccccagcgctaaccccgccgcgctcaacgccgtcaagctctacctccacatcggcggctcctctccctccgccaagtggatcgtctccgaccgcctcgccgccgcctccttcgtgcgcgccggcgccggcgccggcgacggcgacgacgaggatgacgacgcccccgccgccggcgggccgtggtgcctcgtcgtgggctcgaagatccgggccagggtcgggcccgagctgcagctcaaggccttccccgcgcagcgccgggtggatttcgtcgccgacggcgtatgggccctcaagttcctgcactccgacggcttcggcgacttctgcgcgaagcaccacagctgtatgtttgagaacagctacggcgtcgccgccacggacgagggccgcgccaaggtattcgggaaggacttcgcggcgtgggcgcgcccggaggacggcgacgagtcgatatgggaggacgccaccgacggcttctccccgggccccaagggcagcccgatgcccccgcggacaccgctactgaaggccgtgctggaggatctgcgggagtttgaggagcccgtcgaggaaggaagtggaatcaagagccttgcgcttggcgcgctggacaacagtttccttgttggagacaagggcattgaggtcgtgaggaatttcgagcatgggatacatggaaagggcatgtccgtgaagttttctggagggagcacaaacttctcgacaccgaaaaaggctcttcttatgcgggccgagaccaacatgcttctgatgagcccagccactgatggaaagccacacgccaagggggtgcatcagttggacattgagacggggaaggtggtttcagaatggaagtttgagaaggatggagcagatattaacatgagggatatcaccaatgatagcaaaggtgctcagctggattcgtctgagtccaccttcttgggactggatgacaaccagttgtgccggtgggatatgagagatcgcaggggcattgtacagaagttggcaagtgcgactgaatcgccagtgttgcagtggactcaggggcatcagttctcccgggggacaaactttcagtgctttgcttcaactggtgatggttcaattgttgttggatcattagatgggaaaattcgcttgtattctaagagctctatgaggatggcaaagacagcctttcctgggttgggttcgcccattacccatgtcgacgtgacatatgatgggaagtggattcttgggacaacagatgcgtacctgattcttgtatgcaccatcttcatcgacaaagatggaaaggagaagactgggtttagtggtagaatggggaaccgtattgctgctccaaggctgctgaagctcaacccactggactctcatctagcaggagcaaacaacaggttcagggagggaagattctcttgggtgacggagaacgggaagcaggagcggcatctagtggcgacggtggggaagtacagcgtggtgtggaacttcctgcaggtgaagaacagccaccacgagtgctaccagtaccaggaggggctgaagagctgctattgctacaaggtgatccccaaggacgagtccatcgtggccagccgcttcatgcacgacaagtactcggtcagcgactccccggaggctccactggtggtggccacgcccatgaaggtcacctccttcagcatatccagcaggcactaa

SEQ ID NO: 6576 - DNA, 1434 bp, Zea mays
  Peptide Sequence Number=SeqID_49951
atggacagaggcaacgggcacacgtgtttgaccgtggctgacacctctggttcacgcccgttcacgcaccgcgcctcccagccggacttcaccggaggcccgagatcgacctcaccggacttcggtctttcaccgccgcgcgtggatagagctaaccggccagactcctcgtcgccgacgagcatccccgcctgcgcgcgtggaccgaccgactccggccatccccgacggcgacccgcacaccgttgtgatccccgagacctcccctacgtcctcgaccacttcactggagccatctcgccgccgatgaattcacccacccccgctagtggaggagactctcgtttcagttctgacttcctttctcgcgatggctttccttccatcttgtgggaagtgcttaactccgccggttaccctacgccccctttgtacacggtgcagttgtatgaggagcatcgggtacctcgttgtcgggtctggctgactttggaggctcatccccttcagctgggttggcgttctcttgattctgagacgattggactcaggacggacgacaccgttgaagcagcagccatgaagactctgacgactttctgtggctaccatcccctggagatggtgatgcaccccttgggactcttccctgctgagaagaaggatgatcccatgtggtgtaaccgcgtgagccatgtaaaggatgtgtgggcgatgtatcctgacttggttgggagggtcaccgttcagtgcatgagtgtgctgtaccgccttcaggcccttcaaagcgatgctatggcactccttgctaacaccgctcaaactgccaagctcactctcgacagtcgagaagattttgtggtcgatctatccaccgagttggtagagaaggatctgcaggtggagaggctgagccagcgcatcaccaccttggagcagcaggtggagatccgagacaacactattgatgtcttggagaaccagcttcacgatgtgcagagggaactcgaagaagcgaacgaccacttggacatgcaccacctagagatggaggccaatgaagcaggaagcgagggagaagaggctcccgaggagctaggaccagcccctggtgccaatggaactacctccgcgatgcctccttcacccgagctgatggcccagcagaatgagattctgcgacagctctttgcagcgccagccccactctttagcagcatggtggggaggccagcatcagccgacccccgggctatgggcaacataaccagggagttttcggagcacgcaggccacccttggtccaccaaggtcgaaggacccgttgggaccccgacgtatggcttcccctctgtggagcctaaatttcccccctccctcccgggaatactgccctgtaatgagggccagggttccgtctacgcgcacacataa

SEQ ID NO: 6577 - DNA, 366 bp, Zea mays
  Peptide Sequence Number=SeqID_49952
atgggcaagagtaacaaacgcaagcgcgagccgactcctccatcggaggacttcggtgactcaaaatactcggaggaggagttctcctccgagtccgaggggtctctggctcccacttatatctgggccatcgagcgctccgggctcgagggctcggatgagtcggagtactcctcggacgaggaggactcttcggactcgttcgaggagggtggtggcggcgatggcggagatgacgacgacgacggaggcgacgatggcggcaggaggggcggcaacgacggcagcaagggcggcaacggcgggagcagcaggggcagcaacggcggcggcaacagcaagggcagcaacaaggccagtggctag

SEQ ID NO: 6578 - DNA, 399 bp, Zea mays
  Peptide Sequence Number=SeqID_49953
atggcacccaagcgagctagttcgaaggcagccccatccatcgacgaagcagcgaaggcagcgctgctggttgagaaaaaaggcaaggccctcgtggacaacaccccccaagaagcctccgaagatgaagttgtcagcaaaagacagcgccaagagcaccccactcccaaaggcaccctacgcacctgtagctctggaggactacaacaagaaccacctccaggcttcgctcccccagaggccgaagacgcaatagaggacggtgaagtcatcggcatctcagccgaggaacatctacagctgcgggccctgcacctcaagaaccacaacctccaaaagcagaaagacatcctcgaggccaagcgccaacgtgtcaccgtgcaggccaaggtgcgctag

SEQ ID NO: 6579 - DNA, 378 bp, Zea mays
  Peptide Sequence Number=SeqID_49954
atggcggcagcaggcgggcggaagcagcagtcaaatcgtctgcaggctcacgtccccttctggagcagcacgggagccctctcccacggcgtgaagacgacacgtccacattccgttcctcgaacgactcgcgctggtaatttctataagattttggtgattaagtgcccaacacacattaagggaatgagtatatgccaaagggtggacaaagtgcaaatcaatacaaagggcgagagactccaagttgtggagattcctcgcaaacgggatatagtgaaaggaaaagaaataccgtggtattcaagtgaatctttggatcacttgagaggggttgattgcaaccctcgtccgttgggacgccacaacgtggagtag

SEQ ID NO: 6580 - DNA, 660 bp, Zea mays
  Peptide Sequence Number=SeqID_49955
atgggacagaggcagagtcggctcgaaaatgggtttcgtcggcccaggagcaggtggcttcccaggcccgaggaggtgcagcagcggcggccggagcctgaccgggtcatccgagagcgagaccatcttcggagttacgctcccgagaccgtgagccgggctgatgtcctcgggggacagctagctgaggctacggagcggtcagccgagccgtctgctcgggccgggttcctggaggagaccctggcggcaatggtcttgtttgtcggtagcagaatcacttatccgagcgagagttacttatcgcggaaggtgatgagtgaggtatccgtatcccggaggcgtaggagtccctcggctcggtcggcctcgccgcttatgtgtactcttactcgtccgcaggattctgttatcgatatagtcgagaaggcacgaaaaatcgttctagcagaaaagttttcgagcgttaagacttgttcggtcagcagaatcgcttatccgagtgtgagttacttatcgcagaaggtgatgagtgaggtatccgtatcccggaggcgtaggagtccctcggctcggtcggccttgccgcttacgtgtactccgtcgttttcaggatcccgctatcgaagcagtcgaaaagcgcgaaagatgttctggtag

SEQ ID NO: 6581 - DNA, 111 bp, Zea mays
  Peptide Sequence Number=SeqID_49956
atgaagtgggtgggatgcccttacgacaagaggaggaggcagcaattaagaaaaagtatgaaggaatattgcccagaaagactcctgcttatatctaagataccacactag

SEQ ID NO: 6582 - DNA, 183 bp, Zea mays
  Peptide Sequence Number=SeqID_49957
atggggcaacggtggcgggctctggctgcgcgaaagattgctccggttcaccaaagaggaaggacaaaacatatcaagggtgaatcagcaagacgagctatatccgagtcagaccagcgcaatagaaccgtccagaagaaacagtcatatcttttgatttccaaaagctatgaaggcccataa

SEQ ID NO: 6583 - DNA, 138 bp, Zea mays
  Peptide Sequence Number=SeqID_49958
atgacaacggacaggtcactggagttacaccacatggatctattcggcctgatagcttacataagcatcagcgggagaaaaatcacaaacccaagaaaccttaaagggattcttgagctcaaaatgagttcggattaa

SEQ ID NO: 6584 - DNA, 522 bp, Zea mays
  Peptide Sequence Number=SeqID_49959
atggacgcggccaccggagggctctcgttcgcggtcccgctcaagggacgcgaaccagctattaaagccaaagagcgggccgctcccaagcgcaccggcagatcctcgccgtcgtcctcgccgccgtcctcgccggcatggctggaggacgtctccgtcgcagcgcgggaggacgattgccaccaccagaagctggaagaagaggtggtccgccaacccgcgcaggagaacaggcggcgcttctggcaggagaagcgggcgacgcttcgccttcgccgtaataaccgtgccaaaaagggaccgggaaagggggataccccgaaaaggatccttccccgtgaaggaaccgggctccgagccccccctactgatcagaggttcgaagggtggccccccgaggggttcaacagccgcctcagatcgcgtgggccctacacccactactggtcagaggttcgaaggccggcccctcgaaggctccacggccgcctcaggctactcgggctccgcgcccattactga

SEQ ID NO: 6585 - DNA, 378 bp, Zea mays
  Peptide Sequence Number=SeqID_49960
atggctgggaaaaagtgccaaaggttcatctacaaacatactaaatcgactgtccggaataccgtagattatttcggacaggaaaagctttttggaaaaacaggccaagcgcggaccgtccgggcccttgcggcggaccgttcgcaccaccaggatgaccttcggacagaaccaatacaaaaatctgagtttgcactatggaccatccggaggaaaagagcggaccgtctgagacttcgcgcggaccgtccggcctctggcgcggaccgtccgccgttactgctgaccgttgcgttttcagccgttgatctacaggtgcggaccgtccggaccaggcgggcggaccgtccgcggtcggcagaatggagcaacggctag

SEQ ID NO: 6586 - DNA, 1251 bp, Zea mays
  Peptide Sequence Number=SeqID_49961
atgatgaccgcatcagaaaaggccccgagccctcctactgatcaggggttcgaaggctggcccctcggaagggtttcgacagccgccccagagcactcgggcttcaagcccattactgatcaggggttcgaaggctggcccctcggaagggctggcccctcggaagggttcgacagtcgccccagagcacgtagagtgagggatgactctgggtacgtccgatacatggccgaggctcgggctacactcccgagcgccgcccgccccgctccgactgccgtgccaaccacccaggcaaagactgacaacaagtcacgatcaaccaccgagttcggcctcgggcgcaataggaagctcagcctcgcccgacctcaggctccagcctcgggagaaggtctccgcctcgcccgacccccggactcggcctcgacctcggtctcaggaggaatcgtgtcctcgcccgaccccaccctcggcctcaagagaagctacaaggaacaagaccggcgtcccatctggcttaccccgacgacgggtaatgatgggctcaggcgcttctccgacggccacgctatcacgtgtatagggctcaagctctcccccgacagccacgttggcatagtattcacaaaatattttgttcaaaagaaaaaggggcaaaaggggaaatgggatttgaaaagtaaaaagaaaaggggaaaaccctctcctctccctgttggaccgaatctcggcccaacacccgcaacccccccttcccacgcgcccgcactcccccgcattcggcccaacttcggcctgcttctgcgcgcgcgacagctgctccacaccccgccctccccctcgctgacaaggcgtccccacccgtcagccacccgctctctcgcaagctcgctccctctgaccaagcggccccacgggtcagttgcttcgtcgtccgtccgccgtcccctcgccgaagtcacctccggccgtcgcctccgtcctcccctctgccatcctgccgcacagggaagtttggcaccgctccgtcctcctccccttgaccagcgtcctcgccggtaccgccccgccgtagcgtcccctcggcagctctgtgtgccatttatggcggcaccgggaagctcgctggagtcagggagctccaccgccccccttcccctgcgcgccaataaaaagctccccccgagctccttcttcctcgcaccagcttcggccatccccctcctccccttccccgagctcaattaa

SEQ ID NO: 6587 - DNA, 588 bp, Zea mays
  Peptide Sequence Number=SeqID_49962
atgggcggcgttcgtgttcttggattgtcttgtcctcactccggcacaacgcctccacgcggaggtcgaggcctgcctgtccgcgaggacttgagtggggatctaccggtgcaggctagggcatccgccatttgtcggcgcggcgctggcgcgcaggtggccactgtcgtcggtgctgaggtggtgacagccagagaaggtttctccgccgacgagaccgtcggtgccatcttcggccggacccccggctctttggctttgatggcttgtcctcgcccctcgagtggagacatggccggagctggaggcagcggtgttggcgtggatagaggtggagttggctcgaaaagagacttcgtcggcccgggagctggcggcttcctaggccaaggaagatgtggcagcagcagctggagcttggccaagacatccgctggcgcggtgctggcgtcctcccttgggtggaggtcccttcgcccgggtcatcgcccgaggccgggccaggttccgccgagggtggaaacagcgccgatggtgctgctgctccccctgccaatgcctgaacctgcaggaacagtttgtgtgtag

SEQ ID NO: 6588 - DNA, 480 bp, Zea mays
  Peptide Sequence Number=SeqID_49963
atgtccaaaccggacaaaactttccccctccttatcctcccggtgctccccagccttcttaaccctggggttggaccgcatgagttcggattgagtgactgcccacacagtctcgagtggttgtacgataaaggagtacagggggtcgggagggggctgcccacggggagggggcggagttccgcggcggggatcgccgctggtgggctctgggtggggaacaggggctggaaagtggcgctttgggttcgtggctacgcgagggagctgctcggctcactcaattccttgccggaccaacagagaaggagagggaggagaaggaaaagactcaccggagaggaagacgacgccggcgccttgttaattgagctcggggaaggggaggagggggatggccgaagctggtgcgaggaagaaggagctcggggggagctttttattggcgcgcaggggaaggggggcggtggagctccctga

SEQ ID NO: 6589 - DNA, 1110 bp, Zea mays
  Peptide Sequence Number=SeqID_49964
atggccatatctcaggaggactgcatcacagcccgtcaggcagaaaagaagaggaaggcccctatggcaggaccttcagctcagccacagcgcttcaggattcagcagcagcaggcacccaaccattcccggcccccagttcagaggaacaacaatcagccacaacagcagtaccgccaggaaaatgacaacaggtgtttcactggtggcagcacagggcactatgcaaagaattgccctaagaaccagcagaggcaggggcagagttccaatcagaaccaaggcaagaggcagaaggtgcaatgttggaacttgctctctgctgcaagtgggccaacgggggtgaacaatggcgacaacagggcggagcgcggcgagcgggtggacgattttggggcgctgaacagcgcgccgcctgagccggagaccacccctgcggaggccgccactggagtcgccccggtgaccgcggaagatgcaccaggcgcccttgtacctgttgcggtcggcgaaggcctactcccaagggtggccgaaggcgtgtctgatgcccccgcagctgctgtgccgggcgctgaagatccagcggagacaacggcggaggcggcggcggaggctcccgcagcggctgggccttcgcaggttcaagattttgggcctgcgcacgcaaccgctactactggttttttggcggcttcgaccgcggaaggtggaaatgaatgtggtgggtctgtttctgagttttttgattttactgactctgggagctcggctgaatggaccgagtcgtcggaggaggacttggactattttgcggccctggacgaggctgcggcggaggctgcgctacatgctgcggacgcgccaggcgtgcccggtcctagcaccgggcaccgacgacgaagggcggttgcgaagcgtaggattagtgcggaggaaggggctcgtcttcgcgttagtagggttggtcggcgggagctgctgtctttgccggccgtctcgggtgtgggggaaggggagctgcgaagcctttttgctggtgaggagcttaggataatgttatttaactatagagagatggggattattcctaaggttgagccgatgtag

SEQ ID NO: 6590 - DNA, 699 bp, Zea mays
  Peptide Sequence Number=SeqID_49965
atgaccctggagcctcgtcccctacagccaggctggcgttcgttggactccgagtctttcggataccgtgctgaggatactattgaggcgattgctcttcatgggctgaccaccttctatggttttcaccccttagagatgtctactcaccccattggcttgttccccactgacaaggaggacgacccaatgtggaaagaccgagtggaatatgccaaggatatatgggctctttacccagggcaaactgctcacctcacggtgcgatgcatgaatgccatgtatcgtctgcaagtgatgcgaggagaggcaatgtctcatctgatggcattgttggaggcttccaagattaccttggacaacagagaggaacttgtggtagacctgtccactaagatggtggaaaaggatctacaagtggaacaaatgtctaatgagattcaggagcttgaggagctagtaggaaccagggagaacaccattgaggttctcgaggatcagctaatcaacactcaaaagcaacttgcggaggctaaccaacatttggatatgcaccaccaggagatccaggacatggaggccaacgaggatgtcgacatcgagggaggagaggagccggagcccgcatctagtctggacactgctggctcagggagaccaccttcccccgagtcgagcattgcctcatttgctcactag

SEQ ID NO: 6591 - DNA, 192 bp, Zea mays
  Peptide Sequence Number=SeqID_49966
atggcagttggggtcagtgaggcattgtacgccaaggcggtgagccctgatctgttgccagggaatcgatggggacggttgatgtgttctctggaggacatggttgctggagtgacttggccgtccaccttgccaccgggttggaccgtcgagtgggaccctacctcggctgaggaggagcatgaggagtga

SEQ ID NO: 6592 - DNA, 1686 bp, Zea mays
  Peptide Sequence Number=SeqID_49967
atggggccggtgaggggcgaggaggatggggccaagaggagggcagttcggattgccagacttgatgccgcctcccccggtgcacctcgcgcctgctcccccgagcccgcctcccgatgcaccggcgtgtcgtggctgcagagtttaagcaaatcgtcaagcgacaagttctttggtgggaatcaacgaagccacaacatgccaaataaaccccaagagaagttcgatgttggtgttcctgagacctcacactcttattctgctgcagtccctgctggtacaagtagcaagcggcatgctgctaggaagtggaagcgctcgctcagtgaccccttctgttcacggccgcacagtgctccggaattggtgtcaggatgcaagggatcaccgcccgtgactgtggctccagaggacagagatgcctgcataaccatccagcagcgttctctttctatgtttgaggatggcttacaaaactttttgcagctgttgcaggtcttcaagagcaaagtagaggagcaatgttcaaaaattgaatatctgaggaacaacatgtttcaaggtgagatattcgataaatacttcatgtcatttttgccattgtttgtgatgcaaacttacatgaaaggaattgttagccagtcttcagataatcagtactgggatatatggaaccgtcagaaattgagtccagaattcgaagtgaagagacaaaatagtctcagagctaaccaggagaataacatgtcctttgtaatacaggatttgacaaatcagctggttgagctagagaggcacttcaataatctggagatgaacagatccggtaacttggtgaaaattgtaattccacgatctaacccaaacgatgctcatgtcgctggtgttggaaaggaacagatcagtgatggtactccagttattggagctggtgctggcacaagcatatctgcgaagttcaaagaagctggtggggttgatcttatagtgttgtacaactctggacggtttcgaatggctggaaggggctcactagctgggctcttgccctttggtgatgcaaatgacattgtacttcagatggccagcgaagtgttgcctgtggttaaaggagttcctgttcttgctgggttcctcatgtttcctagagagttgcaactctcaggggagtcagtcaagctaatgaagcttggggaaggagttgcaatgttcaaggtgccagattggttccttgacaggaacgactacaaggacaacatgttctcacagacaacacttcgggtatgggatattttattcaatgaaggggacaatgttttgttctgtgttgctctcacaattttcaagatgcgagaagatgatctactacgcacccaacatatcagtgatgtgattgatattttttgcaaacaaccacacatcatctatatgaccctgatgaactgcagacgcacggtgacgggggcatcacaatgtcctactctagcacgtggctcgcagagggcccgtggccacagttcgttagccgtcgaggaacgtgagttcacggttgccttgtccggtctgggcatgcggctcatggaggcgcaggctacgtggatcaccagggagcaggtcgctcagtataacttcctatctatttttaccgtgttaatatattttgtacaaaagatgagaaataagtga

SEQ ID NO: 6593 - DNA, 207 bp, Zea mays
  Peptide Sequence Number=SeqID_49968
atgaagctgtggaaggagacttccaggagttccaagattacgacgagttctaggcgtgggttagcggcaacccccagtcggctgcctgtgaaggccgcggttatctacgtttcttttccgcactttgatttatttaagttggtggcattaccttgtttaggactactggaggaaatagtggctaacttattgtatttcttcttgtag

SEQ ID NO: 6594 - DNA, 444 bp, Zea mays
  Peptide Sequence Number=SeqID_49969
atgccgttgggattcgaccgttggagctctgacttctgggcccgcctagatgtccggtgcacaccgaacatgtactgttcaatgtccgcggagcagccgcggcgttttcccgaggctggcgagttccggaggccgctcttccttggagcaccggacactgtccggtgtacactggacagtccggtgaattatagcggagtgcctctggaaattcccgaaggtggcaagtttgagttggagtcctctggtgcaccggacactgtccggtgccccagaccagagagcaaactggttagtccaattatttgtgttgggcaattcaaccaccaaaattttttaggaactaggtgtaagccgaattccctttcagaaggggcgacgatgatcctcatcatcgcctcccctggcaccgacacattcttcgtgcgcggcatcctgacctga

SEQ ID NO: 6595 - DNA, 1641 bp, Zea mays
  Peptide Sequence Number=SeqID_49970
atggggggggggcctgcggagcaacagaagaccgacgaacggcgcgccgtcgcccgctccggcagcggcgacgacgacgacttctgctccggggggccgaacagcggcagcaatgacctcagggcggatgctgctgccaggtggcccccgcccatgcccaaactcgtgaggcaaggacgggcagaaggccgtagagttggaggtcggtctgtgggcggccctggctatctcgtcggcggaagaacctcttccagctgccgtggcagaagctggcgccgagagcggctccgaagccactcgcgtccgagagctaggcacgcggcagctgccagcgccacggacaacaaccgcccttccccccgatcactgagggaaggagcgggccgccgcccatgcaggggccgaccccaactcggcacactcccctccctagccctgccgtcgtgggctgagtcttctccaacacgctccaaggccctcctcctacggcgcgagggctgggtcccacacgtcatgcaagccggcccagaacagaagaagccaaaccgccacgcgcggtgcgtgcaaccgcccagcagttacaatcggctctccacttttgcccagaccagcgggcgaaagggcgggcagccatgcaggcggcatgcaaccgcgccaagtgggcgcacttctccgactcccaacacgcccggcatggaggcccaggcccacgcgtcatgcaaccggcgtgctgaatgcttcgtgcatgcaactgcaccatcacttgcgccaccaccgcgcctcctcgactgcggaaccaataccgcgactcgaggcgacccagagcacgacccagcagcgtcagcctggacaggcggcgcctctggcaggagaagcgggcgacgcttcgccttcgccataatgaccgcgtcagaaaagggatcgggaaagggggataccccgaaaaggatccttccccgtgaaggaaccaggctccgagcctccctactaatcagaggttcgaaggttggcccctcggaagggttcgacagccgcctcagatcacgtgggccctacacccactactggtcagagaggctcgggggctgctctcgcaaacccggctccggccaaaccgttgacagcgtcaacataccagcccgagaacttgggacccgaccgtacacccgggctacggccagctcgcatgagggaacgaccagaccagccgaagcattgcgcgaggcattaagacctcggaggagtcaaaccactcctccgaggcctcgggggctacacccggcgggtgcactcgcgcgcacccaccggaacaaaacgcaaccgagaaaggctggtccccttgcaaaaaagtgcgacgaaagcctccaagcgagtgctaacactcccttcgaggctcgggggctactgtcggggaccataattaagggtaccctcaaggctcctaattctcagctgggctcgaacttgggctcagccccagaagacgacgaactccgctccgcccgaccccagggctcggactccgccctggcctcagccgacgaccagccacgtcaacaggagacgccatcatcaccctaccccgagctgactcgggccacggggaacaagaccggcgtctcatctggctcgctccgctag

SEQ ID NO: 6596 - DNA, 441 bp, Zea mays
  Peptide Sequence Number=SeqID_49971
atggaggtggacgagcagaagaggcacacggcggagctaacgtcggcgctccaggggcaggagacgtcggagctggagctccgcctgctggtggagacggggctcagcaactacaagcgtctgttcaggatcaaggcggcggcggccaacgcggacgtgttctacgacatgtcgggcttgtggaagacccccgccgagaggttcttcctcttgatcggcgggttccggccgtcggatgtcctcaagttaatcacatcttttagtttagcactatgctatgatagtttacaaagatgtaagcaatctcatgcacctgttattgctcgcaaggttcatccctcacaagtacaagatcaaagactcgaaagcttaggataccagttcaactatgtgtttgactggaccattctgaagtatcctcagataggctccaacctgtga

SEQ ID NO: 6597 - DNA, 84 bp, Zea mays
  Peptide Sequence Number=SeqID_49972
atggagccgtggatggcgatggagcacacagaggtgggcggtcgtcggagctcaagtgctagtggcgataactttgggagctaa

SEQ ID NO: 6598 - DNA, 726 bp, Zea mays
  Peptide Sequence Number=SeqID_49973
atgggagactccgtctcaggtccagtgaggggtaaagtccgcgggcaggttcaatcaggggtaaaacatggtggtgcggcttaccggcggcgggagaagtctggtggagggtctggtgaggtccgggggcttctggtggtcacgccgaggggcggatcaccggcggtgatggccggagtagggctggccgcgtgcgcaggcggtcgggctcatcggcggcgcgtgctccggcctgctcacagcggtagagttcaatcaaacctcacgggaagcttcaccggaggtcaaggatgctgtaggcgcaaggaatcgacgagtggcttactgtgcagcccggtctacgtgcgacgacggccgattgaagtccggcgacgtcaatctggcacctctggagaggtggtgttcggtctgcgggctcggggagcttcacggagttccatggaggctagccgaggggtcagatggggtggaggagggctggagtggccggtccatggtggtcgtggctcgggcggccgctggcacgccgtgcgcagggcgaatgccggtgaacttgtgctcggacggggttgggagcgtgggtgtattgtcaaggccaaggttggctttatagttgcgggcacggtgcggcgcgcgtggggccgagtgtcgaggcgtgctctggcgttgccagggcgcgtcgaacacgtggccgtgttattctgcccaagttcttgcatctgctaa

SEQ ID NO: 6599 - DNA, 756 bp, Zea mays
  Peptide Sequence Number=SeqID_49974
atgtcccaacttatgggtctagtggagtctaccaagatcaccctggataatagggaggaccttgtagtggatctgtccactaagctggtggaaaaggatcttcaagtggaacagatggccaaccacatacaagaactcgaggatcaggtggaagccagggagaatactattgaggttctagaagaccagctccagaacacccagcagcagctcaaggaggccaaccagcacttagacctgcaccatcaagagatcgaggacatggaggcagaaggggccgatgaggatgtagatattgggggaggagaggagccggagcctgcatctagcttagacactgctggctcaggaagaccaccttcctcggagtctagtgttgcctcgtttgcccaagatccactcgatgctaatgtttggctcagggtggtggaatcaaagtttcccttgcttaatggagattgctcagatgcggccaagtacacccaagctttcaatgacctctgtcagtacgcaggctaccatcatgataatgatgagaagaagagagacagattcaggaggggcctcagcactaagctccgtgaccatctcaacacagtcagggcccatagttacaatgagttggtcaacttggccatctcccaggaggactgcataacagctcgtcaggcagagaataagaggaagacccctatggcaggaccatcagctcagcctcagcgcttcagaattgtgtttgatactcagagcagatga

SEQ ID NO: 6600 - DNA, 1326 bp, Zea mays
  Peptide Sequence Number=SeqID_49975
atggagaaagaccgtcaggatgtgcaacggaagaagcgccaggcccccgtcaggttggtggactcgcgccgggaagtgaagctggcgtggcccatggtggggtccggtggagtctccacggagttgtccgtggacgactacttggtgggcggggtcgctatgttcgacgcccagacggggctgccgccttttgagtctggccagctggcagttgtgccgtcagcgtcgtctgccagcccgatggtcgcggcgacggaacatgcagcgaagggtgacacgggggcctcagaggacccatggaccaggttctatgccgggggcgagatcgcctccgctgtcgctgctgtgatcgccttcgctgaacgggtttcttcgggggcgctgacctcggggtttgcctccgaaaggcgggaggaggtgggtctccgcttccttgggtggctgcaggaggagctggagtcacacccatccattgtgacattcctcatgtcctacgcatctcttgttacctgcgagggggcggtgaatgccttgtcccgagaaggatgtaggcacttcgaagtcttcgactgggtgaacgaggacttcgatctcggaattttacaggttgaagatggtgtgctaaagtggtccactggggtgctttatgatagaatgtggggtcctcatggtcgtggcatcgtccgggagagggccgaccgagcgctggcccatatgatgaatgaagaagaagttgatgacctcgtcggtcttgaaagctcgatgacccggatggatggcacagtggaggctggagttgaagggctctcagcacctctgggcggcttcgacaaagaccctgcgacagcgcttgcgcaagcaaaccctgatgatgttgatattaacgatgtttcgatggatgcaaatgcggcgtttcttagtggaaatgtgtctgaggggtctgagtttgggtcatggtcttcagatgaaggggaatttgggagccctttctcgtgggttgtcaaatcttctgaggacgacctagattattttgctacgtcggagtctccactgcgatctgtcccttgcaaggcgctggcaacctcgaccgatgcgagagttgaagactcgcgaaggcaaagaatgggtgtgtcgaaacagagcatcggtgagtcatcactaagtggaagaagacgtcgccgaatgggtatggaaaggtcccgtcttcggggtggttcgcgattggatcagggtactcagcgcgagctgctttcatcgacatctgggacgtgcattggagaaggggacctacgggacgtatttgagggggaaagagttgaggttgat

SEQ ID NO: 6601 - DNA, 597 bp, Zea mays
  Peptide Sequence Number=SeqID_49976
atggccagagtagggctggccgcgtgcgcaggcggtcgggctcgtcggtggcgcgtgctccggcctgctcacggtggtagagttcaatcaaacctcatggggaggttcactggaggtcaaggatgctataggcgcaaggaatctacgagtggcttaccgtgcagcccggtctacgtgcgatggcgaccggttgaagtccggcgacgtcaacctggcgcctctagcgaggtggtgttcggtctgcgggctcgaggagcttcacggagttccggggaggctagccgaggggtcagacgggatggaggagagctggagtggccggtccacggtggtcgtggctcgggtggccgctggcacgccatgcgcagggcgaacgccggtgaacttgtgctcgagtggggttgggagcgagcgggggtgtatggtcaaggtcggggttggctttatagtcgcgggcgcgggcatgggcacggcgcgttcggggccgagcgtcggggcgtgctctggcgttgccagggcacgtcgaacacgtggccatgttattctgcccaagttcttgcacctgctgagcagccaaacgtgcgaatcttgccataa

SEQ ID NO: 6602 - DNA, 969 bp, Zea mays
  Peptide Sequence Number=SeqID_49977
atggcggcagcaggcgagcggaagcagcagtcaaatcgtctgcaggctcatgtcccctcctggagcagcaagagagccctctcccactacgtgaagacgacgcgcccgtgttccgtccctcgaatggctcgcgcaacggctgccccgcgaaccacccgtcccgttgcattaacttcgcggcagggcaagcgacacctttggcaggcgaagcgggcgacgtttcatctccgccataatgaccgcgtcaaaaaagggaccgagaaaggggatactccgaaagggatccttctccgcaaaggaagcgggccccgagccctcctactgatcagggccacctcagagcactcgggctccgcgcccactactgatcatgggttcgaaggctggcccctcgaagggtttgatagccgccccagagcacgcagagcgagggatgactctgggtacgtccgatacatggccgaggctcgggctatgctcccgaggtcaaggcttcgtctactcaaggacgcgatctcgcctcgcccgagcccagtctcgggagggaactgtggtcccaggcacattcaatgcaaggatcgcctggcgccttatcctgacacgcgtgcctcagtcggcaaggtcgaacctcaggcgccaaaggaagctccgcctcgcccgaccccagggctcggcctcaacctcgaccttggaaggcggtctccgcctcgcccaaccccagggctcggcctcgacctcgacctcagaaggtggtctctgcctcgcctgacctcagggctcggcctcaacctcgacctcggaaggtggtctccgcctcacccgactccagggctcagcctcaacctcgacctcgggaggaatcccgtcctcgcccgaccccagcctcggcctcaggaggggtctccgcctcgcccgactttgggctcggaccgaccacgccgcaggggtacatcattgccctacccctag

SEQ ID NO: 6603 - DNA, 390 bp, Zea mays
  Peptide Sequence Number=SeqID_49978
atgggcttcgagacaggcgtccgtgggagggcttcgttgggggagagggctgctacacgccgccagaaggaaaagggagaagagaaggcttacctgcgtcgctggagctcgagaccaattgataacattcttgaggatcccttggacctgtgggttaggacccacgcacgctttcgctgcaccacttcaatcttgttggttgatgttgatcgtattgtcttcatcgggaggttggagggtggcaaccgtacaggtgcaagaggaaaggccatagatagaaaaggacgaggagaagaacaagacgtgtgggatagagacacaagcacaataaaggatggagttaaagcaagcattatgagcgacctagaaaaggtcacgaccaagacataa

SEQ ID NO: 6604 - DNA, 999 bp, Zea mays
  Peptide Sequence Number=SeqID_49979
atggggagcgcccgcgttgccttcgtcttgtcattggaggagcgcaaccttacggaggtgggcacccttcagccatcgctcggcttcaaggattttcatcacgcagcccggctgcattccctcaccaatggggagagggcgctcaccggcctagcggagggggcggactttgacagcacggggccggtcgaccgtaggcgtcgtcagctccagcatgcatggctcgctggctcagctggctctggcgcagcttctggtgccacctcccaccgctggagcggagaggacttgagtggggatctgctagtgggcgggtggctgcctgtcgtcgatgctgaggtggtggcagccggagaaggtttctccgccgacgagaccgtcggcgccacccgcggactgacctccggctctttggctttgatagcttgtcctcgctcctcgagtggggacgcaggcgagggccttgtcgcagcagcgtctgccctgaggtcatcgctgctgctgtttagccgcctgaagcggaggtcgttgtcgctgctgatggagcggtcggcggcgagccacctggaatttgtcgtcccgcaggagtggaaccggagttccatttgtaatggcaccttgagtgctgcggtgccagcgtggacagaggcggagtcggctcgagaagaagcttcgttggcctgggagctcgtggcctccctggccgaggaggtgcagcagcggcggctggaacctagccaggactcttacggataccttggctatgatggcccgagcttggtgttggcctcctccttcgaggtggagatccttccgcccgtgtcaccgtccgaggccgggccagattccgccaaaggtggagacgacaccgagggtgctgctgctccctctgttgatgacttgttcgtcggtaacagaatcgtttatccgagcaagagttacttttcacggaaggtgacgagtgaggattctggtatcgatatagtcgagaaggcatga

SEQ ID NO: 6605 - DNA, 261 bp, Zea mays
  Peptide Sequence Number=SeqID_49980
atgcccgatcgttccaactgctcctaccacctccgccacaggaagagcaagctgcaccagaacaattaccataacaggaagggcatggtggcaaggtcttccctcgcattgacagggaggtcaatgtcatctttgggggccatgggtcccaaaagaaaagaggcaatagaagctaaccgaccgacaggtcctggtggtgacccacagtactccgacgccatactgatggtcggagcactccattacgttcaggcgagctaa

SEQ ID NO: 6606 - DNA, 603 bp, Zea mays
  Peptide Sequence Number=SeqID_49981
atgaacctcaaaggacgcacagccaccgatcctcatcacgctcatcgcggttatcacgccagtgccttatggcaagaggatgtatgcactaaacaaaaggctcaacttaaaactttgaaaaataagttgattagctctcaaaatgattgcgccgccggcgaccttcgccgcccctgcgcacgcgtggaccgtccagccccagggcgtggaccgttcggcacgtcaggcagggaactcaagccctgcgctaggtcgcggaccgttcggcccttggccgcggaccgtctgcccctgggcagagagcaccgccgccggttcttgttagtgtttggcgcccgaaaaaggcgtcaacatacttttggcgactccgctggcactaggtgtctagacctgctaaaaatcggcccatatatggctggttctaaggatcacaccaaggtctctaccaccaacatcatcaagccagccatggaggcgctcccggctgatgaccaaagaccccttgaagacctcgtaatgcgcgatgagaaggaggtgatgcgacaatggaacgaacaatgcgacaaggaagaggcggaactactgcataaactctccgaatga

SEQ ID NO: 6607 - DNA, 678 bp, Zea mays
  Peptide Sequence Number=SeqID_49982
atggataccccggactgcgctgctggcgatcatacaggtggcagcggtgctggttctggtggtggcgctggctcgggctctggcggcgggggacacaggcgcactcgccggagacatagacgacgaagggccagcagtgcggctggtactgatggtcgtggtgacccttcggatgggctaccccagccccctccggaggacgttagcgccaattctgtgcccccttccctgcctcgtcgtttcatcaaacgcactaggtggatcgcccaggctgaagatgatctccggcgtgctcttctcatctccgttgtgggactaaggtgttctggccgcgctgcggaagtctctgatgcgctcactctgagatttgatcttgaggatgatgcgctcgaccttcgtatggttgcgccgaataccttcatcgcccttctacccaacgtggagctggctgatcggatgctcagtgagggtcagtccttctatgcacctcctcttcggatgcacttcagaaggtggtcacgtcagttcatggcctccggtggaagggagatgcctattctgttggatattgagcttcgcgacctccctgttcacctccgggatatacattctgctggacagcttcttgttggacactgcctggttcaagagctgattctggttgcgtgtttggtgtga

SEQ ID NO: 6608 - DNA, 456 bp, Zea mays
  Peptide Sequence Number=SeqID_49983
atgcaggtggcgtgcaaccgcaccacggaggcgcaccccttcggcttcgtcgcatctagcatggaggcccaggcccacacatcatgtaaccggcgcgccggttactacgtgcaagaaactgcaccgccactcgcgccaatgtcgcgccttctcgactgcggaaccactgccgcaactcgaggcaaccctgtgcatggcccaacagtgccaatcgagcacatcgatcacggggaccaggaaaagggatatttcgaaagggatccttctccgcgaaggaagcgggccctgagccctcctactgatcaggggttcgaaggccggccccttggaagggttcgacggtcgccccagagcacacgggcttcaagctcattactgatcaggggttcaaaggctggcccctcgaaagggttcgacagccgccccagagcactcgggctctgcgcccactactga

SEQ ID NO: 6609 - DNA, 531 bp, Zea mays
  Peptide Sequence Number=SeqID_49984
atgggcaagaacaacaagcgcaagcgtgagccgactcctccatcggaggagtttggtgactcggagtactcggaggaggagttctcctccgatcccgaggggtctccggctcccgtctctcccccggcgtcgtccgatgactcggacgacttccaggggatagccgcggaggtctggacatacatccgggccgtcgagcgcgccgggctcgaaggctcggatgagtcggagtactcctcggatgaggaggactcggacggcggcgacgagggtgaagacgacgacgacgacgacgacggcgacggcagtggcaggggcggcggcgacggcagcagggacagcaccaagggcggcagcagcaggggcagcaccaagggcggcggcgacggcagcagggacagcaccaagggcggcagcagcaggggcagcaccaagggcggcggcgacggcagcagggacagcaccaagggcggcagcagcaggggcagcaccaagggcggcggcggcggcaggggcagggccagtggctag

SEQ ID NO: 6610 - DNA, 438 bp, Zea mays
  Peptide Sequence Number=SeqID_49985
atgggcaagagtaacaaacgcaagcgcgagccgactcctccgtcggaggacttcggcgactcggaatactcggaggaggagttctcctccgagtccgaggggtctccagctcccgtctctcccccggcgtcgtctgatgattcagacgactcccaggggattgccgcggaagtctggacgtacatccgggccgtcgagcgctccgggctcgagggctcggatgagtcggagtactcctcggatgaggaggactcggacggcggtgaggacgaggatgacgacgacgacgacggtgacgacgacgacggtggcgacggtgacggtgacggcagcggcagcggcggcggcgacgggagcaagggcagcaccagaggcggcagcagcaagggcagcactaggggcggcggcggtggcagcagcagcaaggccagtggctaa

SEQ ID NO: 6611 - DNA, 252 bp, Zea mays
  Peptide Sequence Number=SeqID_49986
atggatggcagcaaccacccccgcgacggtaagccctccttctcacagctcctgcaaggcctccagaaggggccggagattcttctgactgtcgcgcggggctccatagcgctagttgatgccggaggcggtcaccacgcgttgggaaaacgatgggagcctcccatcgtcgttccggagggatcgagaaaggggatacttcgaaagggatccttctctgcgaaggaagcgggcctcgagcccccctactga

SEQ ID NO: 6612 - DNA, 651 bp, Zea mays
  Peptide Sequence Number=SeqID_49987
atggctatgctggacgaggacgacagaccctgtaaatttttggttgatccgtccatccatcaatcaatctctgccattttcttcataaagaaactagcatattgttttctaagagtactaccggaatccggacctttaccgagtgtcaggcgctttgccgagtgctttttgtcggcattcggcaaagacgcttttgctgagcgccgcactcggcaaagtcctgctctcggtaacgagctcgtttaccgagcgcaggacactcggcatagaaacacactcggcaaagacatattaaataagctcaagtacaagatcatattaaatggtgcgtgccttttagacatattgaatgatggcgtgaagcatcaaggaagactgcggcgacggatctcgaaggcggcaggttacggagacctgctctctcaatcgcatatgcacatcggcacctgggatgaagaggactacatcgacgacgtactaggtaggtgctctgttcaactgtacaggatgtccccgctgttgggcccatgcttcgttgcgccgaaggtcttgcgtgaagaagcagcttcggctgaaatcgtccccaggaaatggccgaaggttcctttttatagagcttcggcgttgcaaaccgacataaagatagaatga

SEQ ID NO: 6613 - DNA, 468 bp, Zea mays
  Peptide Sequence Number=SeqID_49988
atggcaatacggcttcaagatggagcttcgttcaaatctgacaaacaagcttcggtgatggttaaaaattttggcagcaaaacagtgcaaatagcagtaaatgctgtggtaacttcacacctactcgtctgtttatatagtgctgcagtggaccgcaaagaccaaacagtgactctgcaaggtgggaccgacacgatctcgggaaatgaatcgtttctcggcaacgagctcagggaaggtgttttttggaccttcggcttcccgaagcttgagaggattttttcacggttcaagctcgttacgaaaaacgatctagcgccgcgaaaggggctactgttgggcccatgcttcgttgcgccgaaggtcttgcgtgaagaagcagcttcggctgaaatcgtccccaggaaatggccgaaggttcctttttatagagcttcggcgttgcaaaccgacataaagatagaatga

SEQ ID NO: 6614 - DNA, 657 bp, Zea mays
  Peptide Sequence Number=SeqID_49989
atggccggaggcggccccgccgcgtcggcgctttcaagcccctggagggctctgctccagcgagcgctggacgccaacgcccacctcaggcactccacctacttccaactcgtacgcttcgatcgcctgtttgccttcctccggattgggggaaacgagattggtgagatcaagagctgcccctttggtgagatttgttggtacttcacagatagctgggagcaattccgtatcagtggcagcatagatgtgattgatgcttctactacagaccctgccaagctccagcacaaggagaaagcatggttttcaagttcagtgaagtcgagatcgcagtacttaggaccacagccaggcattccggttctagatgatgagcatgttaaggacgttcatctcgatcctttagctggcccagtagatgccttttgccttctggttcttgatccggaaaagaaaaggtggaaaacgcagttccacttggaaatagttatttcgcggtattcagctaggaataagtacttggttatcaccaactaccagtggtctattagctttatgaattccagaatttgtgcttttattactacttccattgttactgcatccaaaatgcacaaacaattggaaatcaagagtctacctgctgttatctga

SEQ ID NO: 6615 - DNA, 2163 bp, Zea mays
  Peptide Sequence Number=SeqID_49990
atggcggccggagaggagcaagaagagttctttgactccagggaggtgctgtcgccggcgtccgtctcgtcgtcgccgtcgagttccggtcgccacgacgacggcgggtggctcttcgcccagcagctgctcgaggtctgggtccgggacccgggcagcgtccacgagcgccgccagaggttcgtcaagtccctgggcctcatggatccgagcccccacggcgcgcggcccggcgaggagacgtgctcgaggcctgaggccagagaagaaatcctaccggcaagccccagcaccgagctgttctcggccgtccctacctttgcgagcatgggaggggagccgacagcctccggcggcgacggcgctggcacggaagaggagccggagtgcgtgttcaagaacctggacgatggcacagtgttcgtggtcgacgagatgggaaaggacgggagcttccggagcctcagggagaggctctccaaccggacagtaacagctgcagaattcgagcaggcctttggctcatcacctttcatccgtgagctgatgaggagggtggacgattccgacgaaccctccaccccggagaagactgtgctgaggagaaggaggcggcggcggattgggtggctacgaaggctgggcatcggtgtctgtgttgtcgacgccgacgcagaggaggaagacgatgaggtcaattcgacatcatccacttcttcccggggttgctctaggaaggttgatagggtcaaggtgagaccttacaagaagcggtcaaaggaattatctgcagtgtacaagggccaagtcatcaaggcacatgaaggtgctattgtgaccatgaagttcagctccgatggccagttgctggctactggaggtgaggatggggttgtccgcgtttggcgggtggtggaaggcaagaggcctgatgaccgtcattttgttgacgatgatccttcatgtgtgttcttcactgtcaatgaaaattctgaattggctcccatcaattcctgcgaagggggtaagggcaagcacaataacagctcaaaggtggctactgatccagcttgtgttgtgattcctcaccagacctttgcgctatccgaggaccctgtgcatgaattccgtgggcaccatgatgccatcttggatctttcatggtcaaaaaatagggaattgctttctgcgtccaaggacaaaactgttcgattatggaaagttgggtgcgatagctgcctgaaggttttctcccataataactatgtgacatgtgtacagtttaaacctaccaatgacaattatttcatcagtggttgtattgacgggatgggtgcagtggttgggacaataacaggaaactgccattgctatgaagcatcagaaaaccatctagcactggagtcacaagtccccctgtatggcagaaagaaatctccacttaaaagaatagttggattccagtattgcccatctgatccaaagaaactgatggtgacatctggtgactcacaagttcgcattctcgatggggctcatgtcgtttccagctacaaaggattacgaagtccaagtcaagtccctgcagcatttacaccagatggagatcacattattgctgctagcgatgactctagtatctatatgtggaattatgcaaaccaacttgccccagtcacgagccgtgtgaaaaccgtatggtcatatgagcacttcttctgcaatgacgtgtccgttgcaataccatggaacgccttgcctgcaaggagttctatttctcttgcttgcaacatccccctttcacggcaagaggtctctgaggagctccacaactcgcaagagtctgtgtcatgctgcagtgctgaaggctcacctaaagctgatagctcgtgccggctgccatccggcaatttcactcttagcaatgcattctccgcggagttggcaccaagggggaaagcaacatggccagaagagcagctgccatcatctgattcagtgacaccgtcgtcgtcgtctgctttgcgtaaatctcagtataagttcctgaagacttcttgccagagtgccgccacgcatgcctggggccaggtcatagtcactgcaggttgggatggaaacatcaggtcgttccagaactatggtttacctatgcaagtgtga

SEQ ID NO: 6616 - DNA, 1509 bp, Zea mays
  Peptide Sequence Number=SeqID_49991
atggcgccttggccgcggcggcccgtgctgacgctggtgctgctcctgctgctcgcgctcctgtgctcccatgtcgcgctctgctcctccgccgaaccggggaaacccaagcccaagcccaaggtctccggcagccgcaaggcgctgcttgcggacaacgacggcgacgaggtgcccgccgccaagccgggcaagtcggccgcggcggggaagaccaaaaagaagctgctcgccggcgacgccacttccaagaaccagaccaaggttgccaaggctaagaagccagagtcagctgccgcggcgaaaggggccgccaagaagcccgctggcaaagcggctgcggctgcgggtggtgacgccgccattgccaaggtctccaaggcccccaagacccccaaggcggacaaggccaaggtgccgaagccggacaaggcggcgactgcggcggcggctggtgccaagaccaagggcgccgattcggccaagcctgccaaggtttccaagacgggcgccaaggcggtgaagccgcccaagacggccaaatctgaggctgccaccgcggttgggaaggcaaagaaaccgccgccggcaaattcgaccgtggatgccggtgccaagacggccaaatccggcaagaaggctccggtggtcgtcgacgccgaggtgaaggcgaatgcgaccgtcgtgagcaaggagaagtcagcggcgacggagacggtggagatggaggatgaggaggaggtggtgttggccaaggaggcgggggagggcacggacgatctcatctccgaattccgggacctacccagtcggctgcaggagacgctgatgccggacctggcgcgcctctcgcaccactccaaggcgtacctgtccgcggcgaacgccgggatcgccgacggcgtgcgcccgatcctgggcggccggtgggcggcggtggccgcctccgcggcgtcggtggcggtgctgctgctgccgctcttcatgctcaccgcgctggtgcgccggatgggcccgtacctgccgctcctccaccgcgcgctgctgctggcgcaggcgtacctcgccatctactttgccacgctcgcgctcgccgcggccgccacggggctggagccgctgcgcttcttccacgcggcctcccccgccgcctacgcctggacgcaggccgcgcagtccctcggcttcatgggctacctcgtgctccagatggtggacctcgttgctgtcttctcggacgccgcctcccccgaggacgaaggcaacggggacgctgccaaggcgctcggccttgcgcagatggtggtgggcctcgccgtcggtctgcactactacgccgccgtcttccaccgcgcggcggcgggagaggcgccccgcgccaactggcgcgtctacgccgtgtacgccgcctgcttcgccatcgtgtgcgcctgcgcgcgtgccgagaggaggaagaaggcctacctcgcgggcaccgacggcgccgcggaggagtggaagaagagctga

SEQ ID NO: 6617 - DNA, 631 bp, Zea mays
  Peptide Sequence Number=SeqID_49992
atgaagtcagctccgatggcccagttgctggctactggaggtgaggatggggttgtccgcgtttggcgggtggtggaaggcaagaggcctgatgaccgtcattttgttgacgatgatccttcatgtgtgttcttcactgtcaatgacaattctgaattggctcccatcaattcctgcgaagggggcgcatttaattcgctccagaagcgcgcagaagtcaagcacgcgcgggacggtgcaccggacaatctacagtacttgtccggtgtacaccggacagctaggcgggcccagaagtcagaagctccaacggtcgaatcccaacggcctggtgacgtggctggcgcaccggacatgtctggcgaccgttggcgcgaagtagccgttgctctgctggttcaccggacagtccggtgtacaccggacagtccggtgaattatagcggagcaatttcccgaggctggcgagttccagagccgctcttccctggggcaccggacactgtccggtgtacaccggacagtccggtgaattatagtggagcgcctctggattttcccgaaggtgaagagttcagcgtgaagtcccctggtgcaccggacattgtccggtggcacaccggacagtccg

SEQ ID NO: 6618 - DNA, 1110 bp, Zea mays
  Peptide Sequence Number=SeqID_49993
atggagttgggaggtcgccggacctgggcgctcccaggccaagggctgggaagagcagggggaaggccgatgttgagggaggagctcgcaggggagccgccggcgggaggggagaggcgggcgctgcgcgcaggggcggcggcgcgcaggaaggccgcggacgccgagcgcgaacggccgccagtaggggaggcagcggggcacggggtgggcagttgccgcccttggagggaggagcctcccgggggcggcggcggctcaggtggtggcggctgctgggttctaacagtttctgctgataaatctgcaaaagtatgggatatcatggaagatgcaagtgggaaattgaatcgaactttgtcttgccctggtataggaggtgtggatgatatgcttgttggttgtctctggcagaatgaccacctcgtgacagtctctcttggtgggacatttaatgtgttctctgcaagcaacccagaccaagaaccagttacatttgcaggacatttgaagactgttagttctttggtcttctttcctcaaagtagcccaagaactatactatctactagctatgatggtgtcatcatgaggtggatacagggtgttggatttggtggcagattggtgcgcagaaacaacactcaaataaaatgttttgctgcagtagaagaagagcttgttacctcaggttatgataataaggtcttcagaattcctcttaatggaaaccagtgtggagatgctgagtcagttgatataggcggtcagccaaatgctttgaaccttgcaattcagaaacctgaatttgcactgatcactactgattccgggattgtgttgctgcacaattcaaaagtcatttctacaacaaaagttaactatgccatcacgtcatcttcagtgtctcctgatggcacttatgctgtcgtgggtgctcaagatgggaaactgcgaatctattccatcagtggagatacactcacagaagaagctctgcttgagaagcaccggggtgctatcacttccttacattattcgccagatgtttctatgtttgcttctgctgataccaacagggaagctgttgtgtgggatccgagcaagtag

SEQ ID NO: 6619 - DNA, 528 bp, Zea mays
  Peptide Sequence Number=SeqID_49994
atggccgtgatcgggattcgggagagagcacaggaaatgctacgattcggcggttcaaactggggacaaccccctgctccagggcccagacatgcatctcggacccaggcatgcatctcagccctggcgctggaaatccaacgcataggagagctgcctggtccaggcaggtgggactctggcagcactgttggtgaatttgatgggcactcaaagagggttctgagctgtgacttcaaaccaacacgtccatttcgcattgtgacatgtggtgaagattttctggctaacttctatgaaggaccaccattcaaatttaagcattccataagggatcactcaaattttgttaactgtatccggtatgctcctgatggtagtaagtttatcactgtgagttctgataagaagggtttgatatatgatggcaaaactggagaaaaaataggagaactttccactgaaggcaatcatacagggagcatatatgctgttagctggagtcctgacagtaaacagttttcgtga

SEQ ID NO: 6620 - DNA, 117 bp, Zea mays
  Peptide Sequence Number=SeqID_49995
atggtggtgggagctgaggccaagaagcttgtgactggcttatcgaagcaacataagctgcagaatagtgatctggcacgttcttgtagtgtggcccttgtcctcaccacagaataa

SEQ ID NO: 6621 - DNA, 1298 bp, Zea mays
  Peptide Sequence Number=SeqID_49996
atgcagtcggcatgcaaccatgccaagtgggcgcaccccttcgactccaacgcgcccagcatggaggcccaggcccacacgtcatgcaaccggcacgccggttgctacgtgcgagcaactgcaccgcccctcgcgccactaccgcgcctcctcgactgcggaaccagtaccgcgactcgaggcaaccctgcgtatgacccaacagtgcagccaggcgcagcggtcacgggccagtcagccgcgggaaaaggcgcgacggtcgatgcggccaaaaatgggcccggcagtaatggcggtggcaggcgggcggaagcagcggtcacgtcgtcagccaagctcacgacaggcggcacctttggcaggagaagcgggcgacgcttcgccttcgccataatgaccgcgtcaaaaaaagaggggttcaacagccgcctcagagcgctcgggctccgcgcccactactggttagaggttcgaaggccggcccctcggaagggttcaacggccgcctcaggccactcgggctccgcgcccactactgatcaggggttcataggctggccctcgaaggccgaccccggaggatttacgtctcgcgcgaggaccccctccagcggcggacacaccttcggctcgcccgaggcccagtcttcgccaagaagcaaccttggccatgtcgccacgccaaccgaccgtatcgcaggagcatttaatgcaaagccaagtccggcctcgggcgccataggaaactccgcctcgccagacccagggctcggactcgagctcggccccggaagacgacgaactccgcctcacccgacccagggctcggactcgggctcggccccgaaagacgacgaactccgcttcgcccgaccccagggcttggactcgggctcagtcccggaagacgacgaactctgcatcgcccgaccccagggctcggactcgggctcagccctggaagacgacgaactctgcttcacccgaccccaaggctcggactcagccctggcctcagccgacggtctccgcctcgcccgacccaggggctcggactcgacctcggcctcggaagacagactcgacctcgacctcggaggagcctccacctcgcccaacccagggctcggaccgaccacgtcacaggaggcaccatcattaccctaccccaagctaactcaggctacagggaacaagaccgacgtcccatctggctcgccccggcttcagcgctcctccgacggccacgacaccacacgaaccgggtgccaaaacctctccggctgccacgatggcat

SEQ ID NO: 6622 - DNA, 516 bp, Zea mays
  Peptide Sequence Number=SeqID_49997
atggctctcgcctccactcctctagccgtcagccgtgtggtgtacagccgccagccgccactcgcccactccgcttgcgtctccggttctcgcgtcgtctccgtccgcaaatccgccctgggtgtagagccgccagccgccactcgcccgcttcgctcggcgctcgccgtctccggttctcgcgccgtctccgtctcaaggaacgctaagtcgctaacccttttttcatttccgcttccgccgctcgcccgcagccgctccgttcgaccgtccgtgcgaccgtgtctccctccccttcgtggaccgcgttcccctgcaggctgcagccctgctccgccatccgccggtccgtcccctgctcggctgctccgctgcggcgctgcttgctccctgctcggaccgtcggctgctcctgctcggatagtcggattcctccagcggccgtcggcacctgctgcagcggtgcagcctgcagatttggtcggcaactcggcatcgactacgaatcaagcttga

SEQ ID NO: 6623 - DNA, 228 bp, Zea mays
  Peptide Sequence Number=SeqID_49998
atgagtgtgccccacggccgccaccaggacctcaagctcgccatcgatgacttcgacgaggagttgattgagcctgagctacgctactcgttccagcgcaacagcaagttatattatagtggtattgtgtggtgccacttcagtttacctgctattttagtgaacgtcttcctgaaactaagcaaggttgagatcacatacaaatgggaagcaatcatagttgtttag

SEQ ID NO: 6624 - DNA, 540 bp, Zea mays
  Peptide Sequence Number=SeqID_49999
atgacacctttcgtactaccttcaacacagactgaggatgtcggtacattcgatatgtctactgaagcagtaagacgtaaacatcatgtgacgcgtggggaaagacaagctatcttagcccgtcgaaaccagcaatttgaagcatccattgcaaagaacgtggctactttgattggggatactatcagtcatgctggtatcaacaacaatggtgatgatgatgacgaggctgtcatatttggagaagatgatgatgacgatgagggatacatattcgatggccaatatgaggagattgacgaggacaatgagatcaatggtactcaagatgaatctattgccactgatgtgcctgacccgtacgacaaggtgtacagtaacctccctgaagaaacacatatgctaaagcatgttcctgactgcggttattgcactgcgaagaagtttgagtatgagccacctgggttttgttgtcgtggtgggaaggttgagctagcaccactggagacccctcccccagctcatgaggttgtgggatag

SEQ ID NO: 6625 - DNA, 438 bp, Zea mays
  Peptide Sequence Number=SeqID_50000
atggctctgaaaattgaggttcccaaactagcgtttatagagcaaaacctccatggatattcaggcaagcatagatttattggtcaattacagcgggaggtaacagtaaaaaatcatgaaaatacggtttggagagttatagaaaacaatgaatctcataatgtgcacatcacagtaaacgagccagttaaaagtaagcaactacaatcaaaggatatggttattgatattgcaattgaaagagtgcaggagctgatttcttttttcactaagtacagagaaattggcttctcacaagcattggaagctgcaagagaagttgcagctgagatggatattgatccaaaattccgcactaaacgtaaagtcaaaagaaaaagacacttcgatgagacccctgaagatacttctattgcttcacaatctgcacaagaatga

SEQ ID NO: 6626 - DNA, 441 bp, Zea mays
  Peptide Sequence Number=SeqID_50001
atgggaaagaacaacaagcgcaagcgcgagccgactccgccatcagaggatttcggtgactcggaatactcggaggaggagttctcctccgagtccgaggggtctccggctcccgtctctcccccggcgtcgtccgatgactcggacgactcccaggggatagccgcagaggtctggacgtacatccgggccgtcgagcgcgccgggctcgaaggctcggatgagtcggagtactcctcggatgaggaggactcggacggcggcgacgagggcgaagacgacgacgacgatgacgacgacgacgacgacgacgacggcggcggtgacggcagcggcagtggcaggggcggcggcgacggcagcagggacagcaccaagggcagcagcaggggcagcaccaagggcggcgacggcggcagcaggggcagggccagtggctag

SEQ ID NO: 6627 - DNA, 348 bp, Zea mays
  Peptide Sequence Number=SeqID_50002
atggcgagcacttctttgaggaccagatttgaagaactctccatgtttaaaggggatgtcggtcataacatctctacccacctgctgaaacagctcgtcctcgagctgaaagtcggggtatgtcgatcgaaaatcctccaagagttcccacgttgcatcttcgtccccaagtccgtgccacttgataaggacctgctagacatcgcgtcgtttgcatgcgcaaagagctcgttcgggcatcgacagtatatgcccgtcttggaccagtggcaaagcacccaccgcctccgggggatcaccacggtggggcttcagcaagcccacatggaagacgtcgtgaaggcgtga

SEQ ID NO: 6628 - DNA, 351 bp, Zea mays
  Peptide Sequence Number=SeqID_50003
atggaggtagcgcaggatccgcttgagagtggtgagatggggctcccgctggatgtgcatatgcatgcacacctattggacggtgtaggcgatgttgggcctagagaaggatgtcacgtcagcgaccgggagcccgtcgtcctcagagagcttcgcctgagtgtcgacaggcgtggagcagggcttgcagtcgtacatgccagccctctccaggatgtcgatggtgtactggcgctggtggagaaagagaccctgaggctagcgctcggcggtgatgccaagaaagtggtgaagggaccctgggtccttcatcatgaactcctgctgaaggacgacgatcgtgcgctatag

SEQ ID NO: 6629 - DNA, 1065 bp, Zea mays
  Peptide Sequence Number=SeqID_50004
atgacgccttctgtcgacgtggtcggtccgcgccctaggttgggcgatgtggaggctcctccgaggtcgaggtcgagtctgtcttccgtggccgtggtcgagtccgagcctctgggtcgggcgaggcggagaccgtcggctgaggccagggctgagtccgagccctggggtcgggtgaagcagagttcgtcgtcttctggggttgagcccaagtccgagccctgggtcgggcagagtggagttcgccgtcttcgggggcctagcccgagtccaagccctgggtcgggcagagcggagttcgccgtcttcctgggcttagcccgagtccgagccctgggtcggttggagcggcggagcggagttcgccgtcttccggggcttagcccgagtccgagccctgggtcgggcggagcggtgcttcctatggccacctttgcattaaatgctcctgcgatttggtcggtcggcgcggcgatttggtcagggttgcttcttggcgaagacagggcctcgggcaagccggaagaaaacagcgccgcctgtgctgctccgactgctgtgccactcgacagagtgaggctgacagcagctaagtccagcctcgggcgccataggaagctccgcctcgcccgaccccagagctcgggctcaacctcgacgccggatgacggactccgcctcgcccgaccccagggctcgggctcaacctcgacgccggacgacgatctccgcctcgcccgaccccagggctcgaactcagcctcgactccggaaggcggtctccgcctcgcccaaccccaaggctcggactcagcctcgacgccggacgacagtctctgcctcgcccgaccccagggatcggactcagcctcgactctggaaggcggtctccgcctcgcccgaccccagggctcggactcaacctcgacctcggacgacggtctccgcctcgcccgacccccggggctcggactcagcctcgacctcggaggagcctccgccttgcccgacctcgagctcggaccgaccatgccacaaggggggccatcattaccctactcctag

SEQ ID NO: 6630 - DNA, 360 bp, Zea mays
  Peptide Sequence Number=SeqID_50005
atgcagggcgtgtttgccgccgtggcccagcagcctggctgcgctcccgggatgcagtttctgtgttcgcgtcgcctggtcggctcgggagccaggctgtgcacgtgcaaattgagtctctcagcctggctccacagaaacgagctcaaggaaaaggagacgccggtgatacttcaaccaccagagagcgtcggatggggaccaccatcgtacgggtccgctgggaccgctgctagcctactagggcagcaacgaattgacagagaaataggaacaatatcgaattataaatgtaccttcggcttggaaggaaatgacagtacgagtgtgacgcaaaaagtgaatgcccagtcagcgtga

SEQ ID NO: 6631 - DNA, 1566 bp, Zea mays
  Peptide Sequence Number=SeqID_50006
atgcaggcggcatgcaaccgcgccaggtggacgcgcttctccgactcccaacacgccagcatggaggcccaggcccacgcgtcacgcaaccggcgcgccagatgctgcatgcaagcaactgcaccgccacttgcgccaccaccgcgcctcttcggttgcggaaccaataccgcgactcgaggcggcccagcgcacgacccagcagcgccagcctggcgcgacggtcaatgcagccgaaagtggggcggcagtaatgacggtggcaggcgggcgggagcggcggacaggcggcgcttctggcaggagaagcgggcgacgcttcgccttcgccgtaataaccgcgccaaaaaaggctggcccttcgaggggttcaacagtcgcctcagatcgcatgggccctacacccactactggtcagaggttcgaaggtcggccccccgaaggactccacagccgcctcaggctactcgggctccgcgcccattactgatcaggggttcgaaggctggctcccgaagggttcatagtcgcctcagacgccgagcgagggatgaccaggggtacgttcgatacataaccaaggctcgggctgcgctcccgagctcaccggagacaccatgttcggtgcccatcgagggtaacatggcgctctcccccctcctccttgcggaaaggcgacgtaggggcatatgtaaaaaagccgagtctgtccctgattgccctctcgccctgtgcggaggctcgggggctgctctcgcaaacccagctccggccgaaccgttgacagcgtcaacataccagcccgagagcttggggccccgaccgtgcacccgggctacggccagttcgcatgtgggaacaaccagaccagccaaagcattacgcaaggcattaagacctcgggggagtgaaaccactcctccgaggcctcgggggctacacccggcgggtgcgctcgcgcgcacccaccggaacaaaatgcaaccgagaaaggctggtccccttgcaaaaaagtgcgacgaaagcctccaagtgagtgctaacactcccttcgaggctcgggggctactgtcggggaccataattaggggtaccctcaagacgcctaattctcagctggtaacccccatcagcataaagttgcagaggcctgatggggctcggactcgggctaggccccggaagacggcgaactccgctccgcccgacccagggcttggactcgggctaggtctcggaagacggcgaactccgctccgcccgacccagggctcggactcgggctcagccccagaagacgacgaactccgcttcgcccgaccccagggctcggactccgccctggcctctgccgaacaacctccgcctcgcccgacccaggggctcgggctcggcctcggccatggaagacagactcgacctcggcatcggaggggcctccacgtcgcccgacctagggcacaggcccgccacgtcagcaggaagcgccatcatcaccctgccccgagccgacttgggccgcagagaacaagaccggtgtcccatctggctagctccgccagatag

SEQ ID NO: 6632 - DNA, 480 bp, Zea mays
  Peptide Sequence Number=SeqID_50007
atgagcaaacaccggcactcaaggtgccattacaaacggaactccggttccacctccgcaggtacgaacaacccccccgttggagggcctgcggagcaacagaacgccgacggatggctcgctgacgcccgctccggcagcagcgacaacgacttccgctccgggcagccaaacaacagcagcgatgacctcagggcagacactgctgcaacaaggccctcgcccacgtccccactcgaggggcgaggacaagctatcaaagccaaagagccggaggcccggagcgcggatggtggcggtgatcccgtcggcgacgaggacttcttcagccgccaccacctcagcgccgacgacggaagccatctgcccaccggcagatccccactcggatcctcccggacgggcgaacaccgacctccgcgcagaggcgccgtaccggggcaaaggcaggacaccccaagaacacgaacgctaccctag

SEQ ID NO: 6633 - DNA, 192 bp, Zea mays
  Peptide Sequence Number=SeqID_50008
atgtctttcctaggttgggttactagagcaacatgctttactgtcgggcgaggaagatcattcgtcaaccaacttcatagagggagggggcctgaaaaggtccagttcaccatcaagtgcttctcccgctacatgagaaggtccggcttccatcccgacaagatccgcagggacgttcgggtgcagttgtga

SEQ ID NO: 6634 - DNA, 201 bp, Zea mays
  Peptide Sequence Number=SeqID_50009
atggagcctggcggagggacagctgttggggcggttgagtccttgctgacgtcctcttgcttccgtaagggggctgagagccgccgtcgtcacagagttgggcgatgtggaagctcctccaaggccgaggtcgagtctgtcttccgtggccgaggtcgagtccgagcccctgggtcgggcgaggcggaggccgtcggctga

SEQ ID NO: 6635 - DNA, 297 bp, Zea mays
  Peptide Sequence Number=SeqID_50010
atggagcagcaagatggaactatcacaagagcacagctgaggcgggccggattcatgggggcagaccccaccgagttgtcgtacatgtatgcgtcatttagttacaaaaaggtgaaacaggctcgaccccttagtcttgctctatggatagaacttacagagatgtttggcaccggggtaagcccggacccgtggggggtccggaagagcctccggaggaaggcgtgcctcagcttcgtagaccggggaacacggggtccctccgaggtccgtctagttgtcttcaccggagtatga

SEQ ID NO: 6636 - DNA, 372 bp, Zea mays
  Peptide Sequence Number=SeqID_50011
atggtcacgggccagtcagccgtgggaataggcgcagcagttggcatggccataggcgggccgacagtaattgcagcaacaggcgtgcaggagcagcggtccaaccgccaatcagactctggtcccacctgcaggctcgcatcctcccctaaggcgggaccaggggccactgttggtaccctaaatcaggggcggcgtcaaggtcattcagcaggcagcgcgcctgatgggtctactggcaaaacagtgcgcccgtgccgagcggcgcactatactcatccacccttctacaagaagcttcctctgcacgccaaggatacgcagatctcgggcgccagggcacaagaagattgtctcgacaacagacattag

SEQ ID NO: 6637 - DNA, 177 bp, Zea mays
  Peptide Sequence Number=SeqID_50012
atggggaagcctgtcccatcactcctcatgctcctcctcagccgagtgaccgcacttgtacccaccataaccggaatgggagaccacgtctcaggtcgcgtgaggagggcaatctgcttccaggttcactcaagtaccaggcttaccgatttaccatatttctcggcatatgtttag

SEQ ID NO: 6638 - DNA, 2346 bp, Zea mays
  Peptide Sequence Number=SeqID_50013
atggatggtgtcacgctaccgacttttcgtgaggctgcagagagaaggggactgcttgagtcggacaacacactggatgactgtctcactgaacgtgctcttttccagatgccatcggcgttgcgacgactttttgccacaatattggtgtactgtgagccaagtgacgtggcggtactctggcagaaacacctagatgctatgtcagaggactatcaacacaggagtcagagtaaaactcatgttgagcagatggtattgattgacattaggaacatgctgcaatcaatgggaaaggacataaagacattccttcttcctcctatcatcgacacatatgacgatgctattggtactgctagggaggtttacgaggaggaaagtatcgtagcggtagtgggagatgtggctctcaaagactctcttaacgaggaacagagggccgcctatgataagattctatctgccgttgacactgatcaacacggattgttctttgtggatggacctggtggcaccgggaagacttatctatatagagtgttgctcacgacgctacgcagccagggcaaaattgcagtggcaacaactacatctagcgttgcggcttccataatgcctggaggaagaaccgcccattcacgcttcaagatacctctcactattgacgatggcggtgtatgtagcttcacgaagcagagtggaaccgcagagttgctacggaaagcatctctcattatctgggacgaggcttctatgaccaagagacaagccgtggaggcactggacaatagcatgcgcgatataatgggtcggcccgaactaccattcggtggtaaaaccattgtcttcggtggggatttcagacaagtcttgcctgttgttcgtaaagggtcaagggctcaagtggtcgcttcttcgctacggatgtcttacctatgggagtctatgtcccacttaaagcttgttagcaatatgagggcaaaaaacgacccttggtttgcggagtatttgctgcgcgtaggtggtggaactgaggtcacaaatagtgatggcgacatccgtcttcctgacgaggtatgcgtgccttatagtgggagtgacaatgatcttgacaatctaatagacttcgttttcccaaatctcaacgaaaatatgtcagattccacctacattacttcaagggcgatactgtcaacacggaacgactgggtggatatgataaatgctaagatgatcgatcgttttcaaggggagcatatggtgtaccatagtttcgatagcgccatggatgatccccataactactacccacctgagttcctaaacacactgacacctaatgggctgcccccgcatgttttgaagctcaagattgggtgccctgttatattgcttcggaatatagaccctgcgaatggactttgcaatggcaccaggctggtggttcgtggtttccaaagaaatagcattgacgcagaaattgtactaggtcagtacgctggaaaacggattttcctgccccgtatacctctgtgtccctccgatgacgagatgttccctttccagttcaaaagaaagcagtttcctatacggcttagttttgcaatgatagttaacaaagcacagggtcagactattcccaatgttggcgtgtacttgcccgaaccagtgttctctcatggccaactatatgttgctctatctagagcgacagcccgctcgaacataaagatccttgccatcccagccgtcgatgggaagaagaggtcaaggaagggtgtaagaaagaatcccacagtagattgtgggacatataccaagaacatcgtctacaaggagcacgagcttcatatgggagcatttaaagttggtaacataaccaatgagaatttatttgaaatcatcaatggtctacggtcagcaaacactgtaggttgcagttcatcaaccgatgcacctaacatcccacatgatggcacatctgtaattgaattgttgtctgatagcatgaaccaactgtccattaaaaatgagaatcagttgggcgtccacatttgcttcaccgcccccgcctgcccccgcgaggccgcaatgcccgtccatgccaccatcgcgtcgcaaactgccttcccgcaatccctcgctcgtgctctctctcttcccgtctccatcctcaccctcatcgccaacaccaccacccacggtcgctacacggccatcctcgatgccggcaaggaggaggtcatcaccggctatgacaagaccgacctctacaagacctggcagaaacagccatggccgatagtcctgaagcagaaaggagaaaacatgcccaaatcctag

SEQ ID NO: 6639 - DNA, 555 bp, Zea mays
  Peptide Sequence Number=SeqID_50014
atgacatctttcctgccaacttcaacacagactaaggatgttggttcactcgatatgtctattgagccactaagacgtagacatcatgtgctatctgagacaagaccagctaccttaggccgtcgaaaccaacaatttgaagccggcattgcaaggaacgtggctacagtgactgaggatactatttgtgacgctatggaagaagacgattggacacatccccatctgaatgcagagctccacaacaatggtgatgatgatgagggtgtcatattcgaagaggatgatgatgagaacgatggatacctattcgctgggcaatatgatgagatcgacgaggacatcgagatcgatggtactcaagatgaatctactgccactgatttgcctgacccatatgacaaagtgtacagtaacgtgcctgaagaaacacatatgctgaagtcagttcccaactgcggttattgcactgcgaagaagtttgagtatgagccacctgggttttgttgtcgtggtgggaaggttgagctagccccactggagacccctccctag

SEQ ID NO: 6640 - DNA, 450 bp, Zea mays
  Peptide Sequence Number=SeqID_50015
atggcgtcgtacgttgctgaagcggtggccgtgttcttggatgtcctcactcccttagcaaagatgggagtgaggacctacaagtgtgctgaggcaaccgtcgcccaccggtgcaggggaagacgggggcgaggtcctacccgcaacggcgttcatgctgagatgatcgccgctgctggcgagtcgtcggtgcagaggcggccgtcaccgtcggtgctgatgcggttgtctccgctggcgagctgctcggggcttgttatcccacggcccttactggtgtggaggctcacggtacgggaccaggctgagcggctacatggtttccggaccctccaggagacaagtgcccgttcttcagagccggacctccagggcggtggagcgtgcaggcccacggtacgggaccaggctgagcagctgcacgggctccagaccaccctaggagactaa

SEQ ID NO: 6641 - DNA, 330 bp, Zea mays
  Peptide Sequence Number=SeqID_50016
atggaccgggcgatttcggccatcctcgccgtcaagccgcacctcgctgtgaccgccagagcctccccgagccaaccctgcccttcgccggacctatctcgccgccgtttttaccccttattctataatatgcttaaggttaagaaaaatagaaaatactgtaaccttgctgacggagagtacgtcctcgtgccggagcaaggagctgctcaggaggtagccccggatccagcacccgagtctgcaccagaggacctgcctgccactgctttggaaggcaagccccggtttatgcataacctgttatttatgctattttacttcacttaa

SEQ ID NO: 6642 - DNA, 123 bp, Zea mays
  Peptide Sequence Number=SeqID_50017
atgaacgacggtcagggaacgatcgcgaggtctagccggggtgtagcatgggtggcgagtatgaactccgatgagttccacgggcggtccgatcacggcggggcgggggaagggtccatcggg

SEQ ID NO: 6643 - DNA, 1965 bp, Zea mays
  Peptide Sequence Number=SeqID_50018
atggacaaggatcgccagggagttgcacagaagcgccaggcggtcgtcaggcttcatgaagccaggccgaagaggcagcgaggggctgcgaaggctgctgcccccggcagaggcaagccgccgctggcggcgaagtcggccgtccctgcatctagcaaggcgccggaggctgcggctggcgccggtggtaccaaatctgtgaaggctgtgccggcgtctagcagggtgtcggaggtcgcgaaggcggcccgagggttgccgtcgccgggcaagcgcgtcgccgacttcgccaccgatattagtgtggacgattatcttggtgggtcggacgaaggccaacttgttattgttgcgcctgccgtggtgaccacggtggctgccgtagtgccaaaggcgaagggcggtgctcttagtgccggcggcgagatgccggcactcgctgttgtcagggacgaggcgggcgctgtgtcccgccggctgaaggagatgaaggaggcactaagtcaggcggctgacttcgcagaccgcgcggcgtcgggggccctcacggctgttgtgtctgccgaagtcgagagacttcggatgcaacatgctgacaccgtccaggaaaaatcggtcgccgacagtaagtgctgcaagctggcgggcaaggtggccgcgctggagggggagaagactgacctccggcgccaactggcggaggagaggagggaggccaatgaggccctcgccaaggcgcaggctgcgctagcggaggccaatttggcgcgggtggagggcagtcttgccagggagcgcgccgagcagttggaggagcggctcagcgccctgcagagccgtgtggagagggccgaggccgcgacgcgcaaggaggctgagcggacgcgcaaacagcttatggattcataccatgagctgggcgcgcggaccgctgacttcgaagtgccggaccgagagcccggacttcgctgcctggagtgggtacaggaggagttgcaggcactccccactatcgtggaggggtttatgtcttatgcctccctggtcacctgcgagggggcaatgaacgcgctctctcgcgaagggtgtcggcactatgaggtcttcgaccaagctaatgaggatttcgagcgagatatctacaaggttgaagaccctatagtgaaggaatccgccggagccatctacgaccggatgtggggcccgcacggtcgagaggtggtcagggagcgggccgagacggcgagggctcaggcggcgcgtggcgagagggtggatgatttcggggcgttgaacatcgcgctgcctgacccagagtcgaacccggcggaggctgtgtccgaggccgccctggagccgcccccggaaactgccgaaggcgctcctgatgcccccgcagccgctgcgaccggcgggggcccgcccccagagaccgccgaaggcgctcctgatgcccccgcagccgctgcgccgagggctgaggatcctgcgacggttcaagattttgggcctgcgcacgcaaccgccactactaattttttggcggcttcgaccgtggatgatggtaataaatcggatgggtctgtatctgagttttctgattttgctgactctgggagctcgattgagtggactgaggagtcgttggaggaggatttggactactttgcggccttggatgtggcagcggcggaggcttcaccgcacgctgcggatacagaagatgtgcctggtccgagtactgggcgcatgcggcgaagggcggttgcgaagcgtagagtgagtggggcagagggcggtcggcttcgtgtgagtagagctggccggcaggaactgttgtccttgccggccgctgtgagcacatgtgagggggaattgcgaagtctttttgcgggcgaggagcttaggataatgttatttaactatagggagatgggaattattccgaaggttgagccgatgtag

SEQ ID NO: 6644 - DNA, 921 bp, Zea mays
  Peptide Sequence Number=SeqID_50019
ggtaatgatgtgtcccctgtggtgcggtcggtccgagcccaaggttgggcgaggcggagactcttcctgaggccgaggccggggtcgggcgaggacgcgattcctcccgaggtcgaggttgaggccgagccctggggtcgggcgaggcggagtcctccttccgaggccgaggttgaggccgagccctggggtcgggcgaggcggagtcctccttccgaggacgaggttgaggccgagccctggggtcgggcgaggcggagacctcctcctgaggccgaggcccaaggtcgggcgaggtggagcttcctgttgcgcctgaggctgatcttagctgttgtcagcctaaccctggcgggtggcacagcagtcggagaggggcgagtggcgctgtcttcctgtcaggcgatcctcgcattgaatgcgcctgcgatacggtcggttggtgaggcgatttggccaaggttgcttcactacgaagcctgcccgagctgggctttgggcgagtcgaggcccccgaggcctcggaggagtggctggttctcgtcccccgtgaggggacatgaacgagggccctccagtggtagcgtttggcctggggccatcgctgctgttgtcttgccgtccaagacggaggtcgttgccgcgctgttggtgcagcggtcgctggcgagccacccggagtttgtcgtcccgcaggccctccgatgtggaggttgttcatacccgcgggagtggaaccagagttccgtttgtaatggcaccctgagtgccggtgtttgttcattgtggctgtcgaggcctgaacatctgggcattcggaaccttcggccgctctgcgatgagctggagccggaggcagcggtgtcggcgtggacagaggcggagtcggctcgagaagaggcttcgtcgacccaggagcag

SEQ ID NO: 6645 - DNA, 2535 bp, Zea mays
  Peptide Sequence Number=SeqID_50020
atgcctttccatggcggaagggtggtgcggagtcccgccttcgcgctgagtctgcaaaaccgcgatccggccgcctttgtgcgtgaggcggaggatggggcggtgcggctcgtgggacgttacgtgccgaggacagagggccagcgcagctgggatatccgcgggtcgaatgaccgtttgaacagggtttttgaattaaatcaattgccatatgacggctaccctggtcaagatgatgtggaccgccgtgggaagaagccggcgatggagactggagacgaccctgcgccggcggccgccccatcctctaaaaagagaaaattaggtactgctatgggagggcttggggtttctgatggttttgctagagagttgatgaggacatgcgcggccccggggggaaggatgtcttcgcccgagctccaggagtcttcggctcggatgctgagggttaccgggggttgttggcctaggaatgtttctatcccccgcgcggctggccaggacttttttacatctcgcatggttcgtgaatggagggtttttccttacgggcagaatattggtgttgttgtatcagcagtgatggacaaggatcgccagggagctgcacaaaagcgccaggcggctgtcaggctcgttgaagccaggccgaagaggcagcggggggctgcgaaggctgcggcccccggcggaagcaggccgccgttggcggcaaagtcgggcgtccctgcatctagcaaggcgccggaggcaacggcaggcgccggaggctcgaaatcggcgaaggcggtgccgccgtccagcggagtggcggaggtcgcgaaggcggcccgagcgttgccgttgtcgggcaaacgtgtcgccgacttcgccaccgatattagtgtggacgactatctcggtgggtcgggcgaaggccaacttgctatagttgcgcctgctgcggcgaccacgacggctgccgcagtgccgaagacgaagggcggggctcttagcgccggaggcgaggtgtcggccctcgcggttgtcagggatgaggtgggcgctgcgtcccgccggctgaaggaggtgacggaggcgctaagtcaggtggctgacttcgccagccgcactgcgtcgggggccctcacggcagctgtggctgccgaagtcgagagacttcggacccaacatgccgacgccgtccgtgagaaatcggccgccgacagcaagtgtcgcaagctggcggacaaggctgcgctggcggaggctaatctggcacgggcggagggcaatcttgccagggagcgcgccgagcagttgcaggagcggctcaccgccctggagagccgcgtggagagggccgaggccgcgtcacgcgcggaggcagagcggacgcgacaactgctcatagatacataccgtgggctaggcgcggggaccggtgatttcgaagtgccggaccgagagcccggacttcgctgcctggagtgggtgcaggaggagttgcaggcactccccactgtcgtggaggggtttatggcgtatgcctccctggtcacctgcgagggggcgatgaacgctctctcccgcgaagggtgctggcacttcgaggtctttgaccaagtcgatgaagattttgagcaagatatctttaaggttgaggaccccgtagtgaaggaatccgccggagccatcttcgaccggatgtggggtccgcacggttgcgaggtggtcagggagcgggccgagacggcgagggctcaggcggcgcgtggcgagagggtggacgacttcgggtcgttgaacagcatgctgtctgacccggggccgaccccggcggaggccgtgtctggggtcgccctggagccgaccccggagactgcagaagacgcgccgggggcccccgcatccgctgcggccggcgaagacctgcccccagaggtcgccgaaggcgcgcctgatgcccccgcagctgctgcgccgagtgctgaagatcccgcggcggtggcgttggaaacaacagcggaagcaacggtggagccaacggcggaggctccatcaacgtcagggccttcgcaggttcaagattttgggcctgcgcacgcaaccgccactactatgtttttggcggcttcgaccgcggaaggtgatgatgaatgtggtggatctgcatctgagttttttggttttgctgactctaggagctcggttgagtggactgaggagtcgtcgtcggaggacttggactactttgcggctttggatgtggctgcggcggaggcttcgccgcacgccgcggatgcagaagaggtgccaggtcctagcaccgggcgctggcgacgaagggctgttgcgaagcgtagagttagtggggcggagggggctcggcttcgtgtgagtagggctggccggcaggaactgttgtctttgccggccgccgcgagtacaggtgaaggggaactgcgaagtctttttgcgggtgaggagcttaggataatgttatttaattatagggagatgggaattattcctaaggttgagccgaagtag

SEQ ID NO: 6646 - DNA, 738 bp, Zea mays
  Peptide Sequence Number=SeqID_50021
atgaaggctttgctcaaagtccttgttgactgtgccgaggatgccaccaaatcacttggtggtttagtagatcatgatatagaccacatacatgatgaagagatcatagctagaaccttgtttgccatcaaagaaagactagacttgctacagcaagatgccttagaggccaaagttcaagcttttccagaaattgctaagtaccagggcgatgacataagtgtagaacctacaactccctcgacgcctccaacagttactgagcgctcttttgatgaagacgacttgtactgccccgaagtcagtgatgagtggtacttcagcgattctgatagatgggacaagattcgagcagatgtgagtaagttctcagggtactacgcaagagttctcagagagaaacaaagtggcttgactgacgacgataaggcggctacactgtttgcacatgaagagaacaaaccattccattttatgcattgttggcataaactgaagggggaacccaaatgggagagcatctgtcaagtaagttcattccgaggaatacatggaaaatcaattggatcttctggtactccatcagctggtggacatgattctgatagtggttctgctggtttgacaggaaaacgccctcttggtcgtgattctactgctgcagcgaaggcttcgagcgaagggtggcgcctttgccttcgccccaacatttgccctccgagggaccagttcgactaa

SEQ ID NO: 6647 - DNA, 190 bp, Zea mays
  Peptide Sequence Number=SeqID_50022
atggggccatgccaaggccgaccgcgcggggccgcgcgccataggcacaccgggccggcacgtcgcggtcgcgccgggcaggggcggggcacgccaaggcgggcgggctactggggccgcgccatggccgggctaggagaccacgctagggaaggcgccgcgccgggcggggcgaggtcgagccgccacg

SEQ ID NO: 6648 - DNA, 1143 bp, Zea mays
  Peptide Sequence Number=SeqID_50023
atggatgctttagccccggacaacaacgaagccgaggtagacaacaaggtaagatgtgacggcaacaaggactatgagaatgtacaagataaatctttgtttgattgggattctgtggttcttggtggtctttgggaggagagaaaattggaattctttcattatcaaactaagaattcgctcgaatgccattatgagaacacgcttcgttattacgccattctcaaacactggcttacagctactctcctctactctctagacatcctgacggctcaacttcgttttcttttctgtctctcactcgttttcttttctgtctcctcctctctgctcctcctctctgcctcgctctctggacggccgacggcgcacagcgcccgcctccctacggcgagctccaccggcgttggtcggctccccacgacgaggtccaccggcgttggtcggctccctacggtcgcggaggtgcttgccatcctcgactcccagggcttcggccgcctctccgacgccgcggacgattcaggctcagagtacgaggccgacacgggcgatcccaatgccggcgagagggacggaggcggcgggaatgcagcggaggacgcgctgtcgaggtcagagctgggagccccggcggcggcggctgctgctgcctctgctgctcaggccgggggcttgtcatggaggggccgcgccgcgagcccggaatgcgagaggcggcggccgcagcaccaacagcacaagggtaggcagctaaggcagaggcacggccacgaccacaggaggggttacttttactgtcgcgtcgcggattcgtcgcccaagtaccacccagggcagtcttgccggaagatcaagaggaaggagctgagatctcagacagaagaagaggagggcaacgacaatgcagtggagagcacggaggacgggcatgagagatcagattgtactgtttgcactgatcagacggctaatgttgatggcgaggtgaaccaagatgggcatggctcttctagtaatggaagagtggagggtcgtgatgatcttgccatggtatatcagaaggatggggagatggagagggtactcgagaagcaggctgagctaattggacagttcgaggctcaagaaaatgcttag

SEQ ID NO: 6649 - DNA, 912 bp, Zea mays
  Peptide Sequence Number=SeqID_50024
atggctctaaccatggtcacgttcgtcctcaggttcacacacccgtgcgcgtgtgcgggcccgcgttgcagttgcagatgtgtgcgacgcgacacgaccccgcaaaccccacttgtcagcgacctgccctcccactaccagggactgctcacccctttcctcaccgccatccgccatcccatcctatccttcgaaacccgggtagccgccgcaaggaggcactcccccgaccacgccgcgcaatcgccgtcgcgtttctacgccggcgtcagcgttttctctcgctccgcagatccccagagcctcacgttacagcgacgaaccctccgacgagccggcttcccccgccgcgcgcagagcagcggaaccggaggcggattgcacgagacatgtgagcctgctgtcgcggcgacggcgctggtggtgatgctcctgacctccgtcctccggggtcgcgtccgccttctccaccggcaccgctccctgaccatgccctcccctctcttcctctccagaaaccctaatactagcctcggcaccactaacccccacctctcatcgccccccgtgtcggctgcaatgagcaccaccggagtctacgtgccgccgatgcggcggctccgctccgttatcgcgtccaccaacgggagccttgcgccaccaccgtccgccgcggcgcaggcacagcagacgcggacgccagagtggctggtggacgggcgttcgctcagcccccagtcgccgcctcagctgcggcggcgcgatatacctcccttgccgaggccacccctgccagagcattaccggcagcagagcgctgggtttgcccgctatgcatacgatgatttctctgaggatgactcagataaggacattgaccgcacgtcagtttcgagcaaggtgaaagtttga

SEQ ID NO: 6650 - DNA, 561 bp, Zea mays
  Peptide Sequence Number=SeqID_50025
atgttcggcgcccaccgagggcaacatggcgctctccccctcctccttgcggaaaggcgacgcaggggcatatgtaaaaaagtcgagtctgaccctgatcgccctctcgccctgtgcagaggctcgggggctgctctcgcaaacccggctccggccacaccgttgaaagcgtcaacataccagcccgagaacttgggacccgaccaagacggcgaactccgctccgcccgacccagggctcggactcgggctaagtcccggaagacgacgaactccgctccgcccgacccccggggctcggactccgccccggccttagccgtcggtcacctcctcgcccgacccaggggctcggactcgacctcggtcacggaagacagactcgacctcggcttcggaggagcttacacatcacccaacctagggcgcagaccagccacgtcaacaggaggcgccatcatcaccctaccccgagctgactcgggccacgggaacaagaccgacgtcccatctggctcgctccgccagatagacaatgatggcgccctgcatactctgtga

SEQ ID NO: 6651 - DNA, 585 bp, Zea mays
  Peptide Sequence Number=SeqID_50026
atgccgccgcgcacgaggagaactgcgcgcaagcatactggcccaattggtgtgccttgtcatcaactggccccaagacacgaggatagcagtagtgggagtaatgatccgatcggggatcttgaagcgcaagtgaatcggcttcaaacagaactccgacgcaggactgacatatgggtcacagatggcgaaagaatcaatgaattgagaagtgatgtccaccgcctgcgagatcagctcgcggaccgagatttagcgctcgactgggtggttcaatctcgttcgcttgcctgggctaaggaggcaaaggctcaaactcgagtagaagagctcatctcggccattgatgacctgcaggcttattgcaatactctacatgaagaagttcatgtattgtattcgcaattgcaccccagtgaacctgcggatcctgtcgggacagaagtcggaccttctcatgtagcgagagtagcttttggtggcgaattggaccttttcaggccccctccctctatgaggttggtcgatgagtggtctcccacgcccaacgacgaggctgccaggagcaacaggaagcaggagtag

SEQ ID NO: 6652 - DNA, 813 bp, Zea mays
  Peptide Sequence Number=SeqID_50027
atggtcgcctttcaagggggtcaccctccttttaaaggcgactctccctacttgcgtcgccagctgtcgtgggctgagtcttctccaacacgctccaaggcgggcaggagcagcggtcacgtcatcagccaagctcacgtcacctcgtgggacagcgagagaaccctctctcacggcgtgaagacggcgcacccatgtttcgttcctcgaacggctcgcgcacgcgcaacggccgcctcgcgaaccactcgccccgtcgcattaactccgcggcgggacaggcggcgcctcaggcaggagaagcaagcgacgcttcgccttcgccataatgaccgcgtcaaaaaaggttcaaaggctggcccctcggaggggtttaacagccgcctcagagcgcttgggttccgcgcccactactggtcagaggttcgaaggccggcccgtcggaagggttcaacggccgcctcaggccactcgggcttcgcgcccactactgatcagggcgggaacgatcttgtaacggaatcccatcagagggaggcatcgagccctcggaccccgtcgaaaggggaccaggtccggcagatcacccgcagcgtcgcctgcgccgcttcgactgctgtgtcactcgacagagtgaggctgacagcagccaagtctggcctcaggcgccataggaaactccgcttcgcccgaccccagggctcggactcgggctcagccccggaagacgacgaactccgcttcgcccgaccccagggctcggacttgggctcagccccggaagacgacgaactccgcttcgcccgaccctag

SEQ ID NO: 6653 - DNA, 888 bp, Zea mays
  Peptide Sequence Number=SeqID_50028
atgggggacacccacaatccttccgccttgtcgttggaggaacgcaacttcgtggaagttgatacctttcagccatcgttcggcttcaaggattttcatcaggcagcctggctgcaccccctcgtcggcgtgctggggaggggagtgtgccgagttggggtcggtctctgcgcgggcggcgacctgctccttccctcagtgatcgaggggaagggcgttcgccgttcgtggcactggcagctgccgcgtgcctggctctctgacccgagtggcttcggagtcgctcccggcgccgccttccgccacgacagctggaacagcatccgccctgaggtcatcgctgctgctgttcggacccccggagcagaagtcgtcgtcgtcgtcgctgctggagcgggcgacggcgagccgttcatcggtcttctgttgctccgcaggccccccaatcactcgcctgttggttatctgaaccgcttcaccaagcgtgagtcgcctcgtgcgaaggtgacgagtgagctcgaacagaggcagagttggcttcgaaaagaagacttggtcggccggagcctggccgggtcgtccgttggcgggaccgacaccggagttgagttgccgaggccacaggtcgggcttatgtcttcgggggacagccggccgaggcctcggggtggccggccgagccgtgtgctcgagccggattcctggagaagaccctggcggcgatggcctgggcgtggtgctgatgtcgtccttcagagtggagatcctccgaccgtgtcgccgtccgaggctaggtcggagctcgccgaaggtgcagttgacgccgagggtgctgctgctcccttcaactgtcaagatcagagcctgcaagatcggattatcttgtag

SEQ ID NO: 6654 - DNA, 240 bp, Zea mays
  Peptide Sequence Number=SeqID_50029
atggagcaccgtcccgggtcggagaggttgctggagactgcccatctggagcttgacgggaagcggttcgtcaacacgcagcaggcccctacctggcgcgccaactgtcggcgtttcgagaccggggggtcctttgggccgacgatagggggttacaagcgtccacgcgggagagggaagcgagcggccccaagagagcgcctgtcccgtcctcgtccccgcgcggccaaccctctctaa

SEQ ID NO: 6655 - DNA, 456 bp, Zea mays
  Peptide Sequence Number=SeqID_50030
atgacccaggattccagccaaaagcaacacataagaaggacgttagatgcattcacaagatgtttattttttgtgagtaacagtgatctgatgggtgatctatactcacgtgagtatagggtgccaaaggttcatctacaactatatgaaatcgactgtccggaataccgtagattattccggacaggagaagctttttggaaaaacaggccaagcgcggaccgtccgggtccctgcggcggaccgtccgcgacaccaggatacccttcggacagaaccaatgcaaaaatacaagtctccactacggactgtccggaggaaaagccaagaccgtccgagccctcgcgcggaccgtccggcctcaggcgcggaccgtccgccgttgatctacaggggcggaccgtccggacctggcacgcggaccgtccgcgctcagcagaatggagcaacggctag

SEQ ID NO: 6656 - DNA, 612 bp, Zea mays
  Peptide Sequence Number=SeqID_50031
atggtccacattgtcgagcgccaagatttcgtgcccgaggacttcatgctggaggaggaggctgcctcttccactccgtgggccaccaacctccctgcgcctggtgcagcggctgctgtgcactttgcacggcagcacactctcacacaaacatccagggcatctagggctacgcctggggcgctgtcagtagccagggaattgccatgccaccctcctagctccatagcctctctaggagccatgaagcagtggcgggacgacgtcgaccgtctactcggcatggcgcactctggctcaaccagacccaggcctcggtcatcccggcgtcaacatgaggtgtctgcatctgtgcgctcaccctcggtgagggcagcgccgactgaggacctacgggcggagctcaaccgttggcgcgcggcggaggacgctccagtctctctggagaagtctaatgacctgcgagcagaactcaaccgcaggcgtgcaggtgaggatgctcacgtctctctggagagggcgcgggagcaccgacagaacgtcgagggtcgcaacctcgactatgacttcgctacggttgcaccgcagactccaacgggcgctcggatctag

SEQ ID NO: 6657 - DNA, 267 bp, Zea mays
  Peptide Sequence Number=SeqID_50032
atggccttgcaagttcatcccgagcgtgtccagattgagtggatgctcgacatggttttagtctgggaggccaagttgtgtgtccgaaccccctggaccgcggttccaaatactaggacacccatcacagagtggtggaacgtgcaggcttacggccaacaggccgagcttatgagggcggacctcaccgtgctggcgtacacgtatgcacaacctagttacaaaagggagaagaactcaacccctcagacttgctcctatggttag

SEQ ID NO: 6658 - DNA, 300 bp, Zea mays
  Peptide Sequence Number=SeqID_50033
atgaacaagaacacaagagacacaagatttatcccgaggttcggtcacaccacaaaagggcggttgaacctccccccagggcggttgaacctcccctggcaggcctggcagcctgtctgccagtctgactggcagactgacgcgcagactgaccgcagactggagagaaaaccccagctcaactgcccggaggcaagttcagctggtctgaagaagctcaactcagctgaagtcaagttcagctggaaagctcagctgcagttgaagaagttcagctgcttttcagcaagaacactctag

SEQ ID NO: 6659 - DNA, 1368 bp, Zea mays
  Peptide Sequence Number=SeqID_50034
atggcgcggtggcggccggagaggaaaaaggctactggtgcaagtgaactcgtggcaaccgtcgtggcgacaactccggtgatcggcgggaagctaaaacgaagcgcggcgatgcggtggaggtactcagatacgtggcgcaaggccgtgcgacggtggttccccggcgagcttatctgctcagccgcaaaacagaaaggagatggtgacgggttttccagggttccaattagggtttctggtatcccaggggggccggcgcccaaggaggatgactcgtgggcccgggcccccgtgtcagagactggactgttggtttcggcggggatgaagaggcgtggcggttcgctcctcgcgtggtggttcgctcctcgcgtggcggttcgccctcttcgcacacggaggctgacgcccaaggagaatgactcgtgggcccggacccccgtgtcagaggttggtccgctgctttcggcggggatgaagaggcgtggcgccgccatggccttgctagaccctcccgagcgcctccagcccaaggtggcactcttcttggtgcgcaacctgcccggatggggtgtgccagcgttcgccagaaggatccgtgtcggcgcctttcctcacggcgatctcgccgccggagagtacgtgctcttcctccccagcgggttggcgctgtcgatctcgtctttcttcgtgttgctgctggaggagctcggactccaacctcggcacttcacaccctgcttcatccttcaggcagccaccatcgcctatctctgcaagatatccgtgggggcgacgcttcttcctccagcattcggcttcaagggtgttcatcagccttgcggaggtggagagcgagttgagctgcggctccatctttcgcacgccacccaggaggtcgtacaagatgtcgcggagatggcagccgcgcgcttccagcgcgaccctactgatgtcgagcttacggtacgggaccaggctaagcggctacacggcttcgtaccaccccaggagacaagcatccattctccaaaaccggaccctagaggggtcataaactgcaagctcggccattcaattcagatgccatcatgtcagcaggggtgggagaccgaatactcaatattctggggattgggaagaggcaccccttcagttgtggcgaggcgggcactcccgggtcggcatacttccgtcaccttgaagggtccttcccaactgggggagagtcaccgcctgccatccgcatttgttgatgaagtccacgtcctcacgccacaactattcttgcatggactcgtaaaatactggacccgtgaggagcccataaaggtttttgggggaaagcaggcttcagctccgtag

SEQ ID NO: 6660 - DNA, 399 bp, Zea mays
  Peptide Sequence Number=SeqID_50035
atggacaagcacgccgcctgcaggatggcctggtcgctgcccgtcagcggagtggacaaggctcatttaatgctgaggcggcacatcgcctgccagtggagtgggcaggcgtgtcttatctgcattaaatgcagaggccgcgcggcccagaggccttacgtctggctccgcccgctggcttacgtcacgggcagtaggccatgtggcagcatcggctctccgcctgagcggggagtgggagcgcacgcggtatggtccggacacgtgtcagcaccggacccccgcctggccttgattaaggcctggatattctttgccttggaatcccgggaccctactgtgagtggcccggaccgggactcgtcccaggggtttggtttgttcctgtggaggtcctga

SEQ ID NO: 6661 - DNA, 897 bp, Zea mays
  Peptide Sequence Number=SeqID_50036
atggcgcgttctcgtccgtgccgcgtgctgctgctgcggctcatcgcaggcctaatccaagttcgcttccacgtgacaatcttgcttcctctgccattttctgagcgaataagatcaatgcagcaacagacggcgatgccgacgccgacgccgacgccgatggggtggtcagagcagtcgctggcggccgagacggcggcgatcgtgtccgctctcacgcacgtcgtcgccagcggccgcgggccgccgcgccaggcgccggcgctagtcatgccgtggcaccgcgcggacggcaacgccgtccagcacaggcaggtggctggggtggcggcgcagggcacgacgccggcgccggcgcccgcagcggcggggcccgcgcggaagtaccgcggcgtcaggcggcgcccgtgggggaagtgggcggcggagatccgggacccgcagaaggcggcgcgggtgtggctgggcaccttccccaccgcagaggacgccgcgcgcgcctacgacgccgccgcgctccgcttccgcggcggccgcgccaagctcaacttccccgaggacgccgccgcgcgccgcgccagggacgccgaggcggcctccgccgcggccagggcggggccgcccgccgcgctgctcgactcgcaggccgtcggcgacgacatggccgattacctcgactattcgaggattctcgaagccaccgagcccagcggcatcgtggacgggctctttagtggccacgggaacggacgcttcctcggctcctggagcattgggacgtcgccgccgtcctcgggctccggcgcttcgcctgcctgtgccgcctccactcctctgtttcaacagactgatggcgggaagcagagcagcagtaatagtgccgcctttggggactag

SEQ ID NO: 6662 - DNA, 651 bp, Zea mays
  Peptide Sequence Number=SeqID_50037
atgtacaaccggctcaagaccttggtgaaccaagtgcgcaacctcgggagcaccaaatgggatgaccatgaaatggtcaagcctcgggcaagggcagccgaccccggaggattcacgtctcgcccgagggccccctcaagcgacggacacaccttcggctcgcccgaggcccagtcttcaccaagaagcaaccttgaccagatcgccacgccaaccgaccgtatcgcaggagcatttaatgcaaagggctcggactcgggctcggccccggaagacgacgaactccgcctcgcccgacccagggctcggactcgggctcggccccagaagacgacgaactctgcctcgcccgacctagggctcggactcgggctcggccccggaagacgacgaactccgcctcgcccgacccagggctcggactcgggctcggccctggaagacgacgaactccgcctcgcccaaccccagggctcggactcggccctggcctcagccgacggtctccgcctcgcccgacccaagggctcagactcgacctcgaccttggaagacagactcgacctcgacctcggaggagcctccgcctcgccctacccagggctcagaccgaccacatcacaggaagggccatcattaccctacccctag

SEQ ID NO: 6663 - DNA, 825 bp, Zea mays
  Peptide Sequence Number=SeqID_50038
atgccagcacgcgagcgccccctcccgtccctgctcctctccatcgacacccaggccgatgccgagctcccagcccctcccgatggcatggtcaatcatctagaattgaaatccccatgtttgagcaaggaagtaattaaagaagtgaggtcatgtgatgctcgccaggttactgaagaaaacctcgcagcactatttataaattgcagacaggttgtggactgtcgcatgtgtggggacccaaattcagtccttaggtttgctttcatagagttcactgatgaggagggtgcaagggctgctctgaatctgtcaagaaccgtgcttggatattatcctgtcaatgttctgccgtcaaaaactgccattgcaccagtcaacaaaacattcctacccagggtatgcaaacctttcggaaccaacatgcttgtcttaagttcatggctcaatgttcatgctctatatgatatggtctctaagaaagttggtcgattttctgtgctctacagtctaacgatgaacatgaaatgtgtgcaaggactatctactgcacaaattaacattgacaagaaggtcactcaagcagatctaaagttattctttgagtccatatgtggtgagctaaaagtttgcagaaatggcaccatcaagatcgatctggagaccaacaagatcatggacttcatcaagtttgacgtcggcaacgtggtcatgatgaccggcgggaggaacaccgggcatgtaggagtgatcaagaacagggagaagcacaagggcagcttcgagaccatccacgtgctacttggagctttttgctatgtctag

SEQ ID NO: 6664 - DNA, 468 bp, Zea mays
  Peptide Sequence Number=SeqID_50039
atggctgaaaggtaccaactcccacggagttgcgttcctccaacgatgaggcgaaaagacggcgggttccccccatccgagggcttggaaggcggcgcttctggcaggagcagcgggcgacgcttcgccttcgccgaaacaaccgcgccaaaaaagggaccgagaaagggggataccccgaaaaggatccttccccgtgaaggaaccaggctccgggcctccttactgatcagaggttcgaaggctggccccccaaagggttcaacagccgcctcagatcgcgtgggccctacacccactactggtcagagaggctcgggggctgctctcgcaaacccggctccgaccaaaccgttgacagcatcaacataccagcccgagaacttgggccccgaccgtacacccgggctacggccagctcgcatgagggaacaaccagaccagccgaagcattacgcaaggcattaa

SEQ ID NO: 6665 - DNA, 2925 bp, Zea mays
  Peptide Sequence Number=SeqID_50040
atgccagtagtggagttggtcccgtgcgcccgcaacaagtggggcaattggaatgaattttggttttatgttgctgaggctactgtcgaaggccataaagggctccccgtgtccgaaatgtgctctcactattactctgcgtatccgccttatgaagtagcagaagatgatgcagacgaaggggcccttcggtgcgccgccggccagagcagcggtcgagatttagttgaagagttcgtggcgtacggggtctggcccttggcgcacggctgggcgctgggcgaagtatgccctcgccagatgccctttcacggaggaagggtggtgcgaagtcctgccttcgcactgaatttgcgaaaccgtgacccggccgcctttgtgcgtgatgcggaggacttggcggtgcggctcgtgggtcgttacgtgccgaggacggaaggccagcgcagctttgacatccgcgggtcaaatgaacgtttgaacagggtcttcgaattaaatcaactgtcgtacgacggctaccctggtcaagacgaagcggaccgccgtgggaagaaaccggcggtggagactggaggcgaccctgcgctggtggccgccgcctcctcgaaaaagagaaaattaggtactgcgatgggaagacttggggtgtctgatagtttggctagagagttaatgaggacgtgtgcggccccgggggagaggatgtcttcgcccgagctccgggagtcttcggctcggatgctgagggttaccgggggttgttggcctaaagacattccgatcccctgcgcggctgaggaggactgttttacatctcgtatggttcatcggtggagagtttttccttatgggcgaaatatcggtcatgttgtgtgggcagtgatggacaaggatcgccaaggggcggcgcgaaaatgccaggcgactgtgagggttcacgaagcccggccgaaaaggcagcggggagcggcgaaggctgaggcctccggcggaggcaagccgccgctgccggcgaaggtgggcgcctctgcgcccggcaaggcgccggaggtgacggtgggcgccggaggccccaagctgacgaaggtggtgccgtctgtcagcggagtggcggaggttgcgaaggcggcccgaacgttaccgccgcccggcgaacgcgttgccgacttcggcaccgagattaatgtggaggattatcttggggggtcggacgagggcccgcttgctctagttatgcctggcgcggcgatcgcgacggctgcgccagcgccgaaggcggggggagaggcccttggcgccggagtcgaggtgtctgccctcgcactggtcagggacgaggcgggcgtggcgacccgccggctgaagggagcgacggaggcgttgagtcgagcgatggaggcgctgagtcaggtggctgacttcaccagccgcaccgcgttgggggcccttacggcagctttgtctgccgaggtcgagagacttcggacgcaacatgctgacgctgtccgtgagaagtcggcctccgacagcaagtgccgcaaactggcggagaaggtggccgccctggagaaggagaaggctgacttccggcgccagctggcgggggagaggagggaggccaacgaagccatcgccaaagagcaggctgctcaggcggaggccaggctggcgcgggcggaaggcaatatcgccaaggagctcaccggagagctgcagcggcggcttactgccctggagagccgcgcggagggggccgaggccgcgatgcgagcggaggccgagcggacgcgcacgcagctcatgactgcatatcgcgagctgggtgtgcggacgggtgacttcgaggaggaactgcaggagctccccactgtcttggcggggttgatgtcgttcacctccctggtcacctgcgaggcagcgatgaacgcgctctctcgcgaaggctgccggcactttgaggccctcgaccaggcagatgaggattttgggcaagatatctttgagatcgaagaccccgtggtgaaggaatccggcggggccctttatgaccggatgtggggttcatacggttgtgaggtggtccgggcgcgggccgaggctgcgagggctcaggtaacgttgtcgtttgctcggcgtttttctgggtgcggcggagcgcggcgagtgggtggacgacttcgggcgctgaacagcgcgctacctgacccggagacgacccctgcggaggccgcgactggagccgccccgggaccgaccccggagaccgcggaagatgcaccgggcgcccctgcacctgctgcggccggcgaagaccttcccccaaaggtggccgaaggcgcgcccgatgcccccgcagctgctgtgccgagcgctgaagatccagcggaggtgggggcggaggcagcggcggaggcctcggcggaggctcccgcagcggcagggccttcgcaggttcaagattttgggcctgcgcacgcaaccgctactactgagtttttggcggcttcgaccgcggaagatggaaatgaatatggtgggtctgtttctgagttttttgattttactgactctgggagctcggttgagtggactgaggagtcttcggagggggacttggattattttgcggccttggacgtggctgcggcggaggctgcgtcacacgctgcggacgcgccagacgtgcccggtcctagcaccgggcaccgacgacgaagggcggttgcaaagcgtaggattagtgcggaggaaggggcccggcttcgcgttagcagggctggtcggcaggagctgctgtctttgccggccgccgctggtgcaggggaagggaagctgcgaagcctttttgcgggtgaggagcttaggataatgttgtttaattatagagagatggggattattcctaaggttgagccgatgtag

SEQ ID NO: 6666 - DNA, 270 bp, Zea mays
  Peptide Sequence Number=SeqID_50041
atggcgcggccgtggcgcgcggcccggcctcggcccccgcccagcgcagcgcgccctcccctgcgcagcgcggcctcgcccgcccgcgcagccccggtccccggcgtggccactgtcggtgttttgggtccgaccgcacacccggggttgcccctcaaggtgttttctaggagtaggacggtgtcaacgactgtagcaaaatggttcgtgtcgatcgcacgagagacagtagacaagatttacaggttcgggccgcttagagatgcgtaa

SEQ ID NO: 6667 - DNA, 426 bp, Zea mays
  Peptide Sequence Number=SeqID_50042
atgggcaagggcaccaagcgtaagcgcgagccgactcctccgtcggatgagttcggtgactcggaatactcagaggaggagttctcctctgagtccgagggatctccggcccccgtctctcccccggcgtcgtccgatgactcggacgactcccaggggatagccgcggaggtctggacgtacatccgggctgtcgagcgctccgggctcgaaggctcggatgagtcggagtactcctcggatgaggaggactcggacggcggcgacgagggtgaaggcgacgacgacgacgacgacgacggcgacggtgacggcagcggcagtggcaggggcggcggcgacggcagcagggacagcaccaagggtggcagcagcaagggcagcaccaagggcggcggcggcggcaggggcagggccagtggctag

SEQ ID NO: 6668 - DNA, 1620 bp, Zea mays
  Peptide Sequence Number=SeqID_50043
atggatggcggtgaccacccccgcggcggtaagccctccgtctcgcaactcctgcaaggcctccagaagaggctagagattcttctatctgtcgcgcggggccccatagcgctagttgctgccggcggtggttaccactcgttgagaaaacgacgggagcctcccatcgtcgttccgaaggtaaaaccaccggcgctgccaccccttgttcgaagacacaaggatggcagggatgtactattgcgcacgcgcctgcctcaactggaggatgcagccgccggcccgcactgccatgcgaactctcctttcccccgtcgtcaaggtaaagggctccgcggagaagagatgggtccacagatcccagtgggggtcaatccccaaaaacccttcgcaaaccgccgcgaagatggctacttgcgcgatggagttggggctgagattgtgcagctccaccccgtagaaatgcagaatcgcccgcatgaagcgacttgctggcactccgaacccccgctcatggaaagagacgaaactcagcacataccccgacggcggggacggggcggctccgctcggaggggccatccaatctggctgcgggtcaccggagaggggacgaagcaaaccatcggcaataagggcctccagatcgaccgccgtgatggtggagaaaggccacgggtcgcgcggcggaacgacggttacccggtcggccatcaccaagcgaaggaggtgacggcggagcggacaagggcaggcggcgcctttggcaggcgaagcaggcgacgcttcacctccgccatgatgaccgcgtcaaaaacaaaggggaccaggaaaggggatactccgaaagggatccttctccgcgaaggaagcgggcccggagcccccctactgatcagaggttcgaaggctggcccctcagaagggttcgacagccgcctcagagcactcgggctccacgcccactactggctggcccccgaagggttcgacagccgcctcaaagcacgtagagcgagggatgactctgggtacgtccgatacatggccgaggctcgggctacggtcccgaggagcattcaatgcaaggatcgtctgacaccttattctgacacgcgctcctcagtcggcagggccaaacagccaagtccagcctcgggcgccataggaagctccgcctcgcccgaccccagggctcggactcaacctcgactctggaagacggtctccgcctcgcccgaccccagggctcggactcaacctcgactccggaagacggtctccgcctcgcccgacctagggctcagactcaacctcgactctagaagatggtctccgcctcgcccgaccccagggctcggactccacctcaacctcggaagacggtctccgcctcgcccgaccccagggctcagactcaaccttgactccggaagacggcctccgcctcgcccgaccctagggctcggactcaacctcgacttcggaagacggtctccgcctcgcccgaccccagggctcggactcagcctcgacctcagagaagtcaccgcctcgcccgacctcgggctcggaccgaccacgtcacaggggggccatcattaccctacccctagctag

SEQ ID NO: 6669 - DNA, 93 bp, Zea mays
  Peptide Sequence Number=SeqID_50044
atgggggagtgcaaaagacttcgaaaagattttctaaaaagatttgcaaaaacaaaaacaagtggtgcaaatgtggtccaaaatgttaaataa

SEQ ID NO: 6670 - DNA, 570 bp, Zea mays
  Peptide Sequence Number=SeqID_50045
atgacttctcatgaatcctcggatgaagggaatgcacagtaccacacagacgaacctgcacgagagggtttcccccgtatcttgtgggaggtacttcagggagctggttacacgacgcctccccagtatgctgtgcggctgttcgagaagcaccgagtgccccgctgtaggttgtccactcaccccattggtttgttcctcgcggagaaggaggacgacccaatgtggaaggaccaagtggagcatgccaaggatatatgggctatttacctaggtcagactgctcacttgacggtgcggtgcatgaatgccctgtatcgtctgcaagtgatgcgaggagaggcaatgtctcatctgatggcattgttggaggctaccaagatcaccttggataacagagaggaagttgtcgtagacttgtccactgagatggtggaaaaagacctacaagtggaacagatgtcaaatgagatccaagagcttgaggagctagtgggaaccagggagaacaccatcgaggttctcgaggatcagctaatcaacactcagcagcagcttgcgggaggctaa

SEQ ID NO: 6671 - DNA, 495 bp, Zea mays
  Peptide Sequence Number=SeqID_50046
gcgggcgagctcgtcggcggcgagtgctccggcctatccacggcgataccggtcaatccaagggcacggggagcttcacgggttgtcaaggaatcgactcgtgcaaggaatcggagaacaactcaccgtggagctcgatccacgcttgccggcggtcgggtgaagtccggcgaccgtgatctggcttctccggcaaggcagagttcgattcctcgctcggggagcttcaccgaggcacacaaggtctactccgagggtcgaacggggttggcaaaggcactgctggccggtctatggtggtggggaatcgggcggccgctggcacgccgtgcgcagggcaatgccggcaatggcacgggctcggcttggcgcgacgtggggcacgcgggggcgggcgtcgggcgtgctctggcgagctcagtgcgcgtcgaacacgtggagggtgttctagaggtctttaggcgccactttgtcaattgggccaagtggttttga

SEQ ID NO: 6672 - DNA, 71 bp, Zea mays
  Peptide Sequence Number=SeqID_50047
cccaagacaccaaggatcttcccaagaactggcaagtccccgatgtacgaattcaagctgattcatcagaa

SEQ ID NO: 6673 - DNA, 381 bp, Zea mays
  Peptide Sequence Number=SeqID_50048
atggcttcccttggtcaccccgaccgctttcaatctgaggaagcgcttaacctggtgcgcgacctgcttgggtggagcgcgccggggctcgccggaagaatccgtgccggcactgcccccctcggtgatctcgccgccggggagtttgttctgtttacttcttacatctcctgcgggttggcgctgcgatctcgccttctttctgctgctgctggaggagttcgggcttcagctttagcacctcacgccccactccgttttccaggcggccatcttcgtccacctctgcgagatgttcataggtttggccccctgtacttccctcttccactacttcttcgtgctggtcaagtccgctcttgtaaggtgtttgaaggctga

SEQ ID NO: 6674 - DNA, 1004 bp, Zea mays
  Peptide Sequence Number=SeqID_50049
aatctactctgtcgagcattaccatgagggacgaagcgcgacgcgtacggagactgagaggactcgcaaacagcttatggattcataccatgagctgggcgcgcggaccgctgacttcgaagtgccggaccgagagcccggacttcgctgcctggagtgggtacaggaggagttgcaggcgctccacactatcgaggaggggtttatgtcttatgcttccctggtcacctgcgagggggcgatgaacgcgctctctcgcgaagggtgccgacactatgaggtcttcgaccaagctgatgaggatttcgagcgtgatatctacaaggttgaggaccctatagtgaaggaatccaccggagccctctacgaccgggatgcggcgcgtggcgagagggtggatgacttcggggctttgaacagcgtgctgcctgacccggagccgaacccgatggaggctgtgcccgaggctgccctgcagccgcctccggaaaccgccgaaggcgctcctgatgcccccgcagccactgcagccggcggaggcccgtcgccaactgccgcgctgagggttgaggatcctgtgaaggtggcggcggagtcgacagcggaggagcccgcgacggctgggtcttcgcaggttcaagattttgggcctgcgcacgcaaccgctactactaattttttggcggcttcgaccgtggatgatggtaataaatcggatgggtctgcatctaagttgtctgattttggtgactctgggagcttggttgagtggactgaggagtcgtcggatgaggacttggactactttgcagccttggatgtggcagcggcggaggcttcgccgcacgctgcggatgctgaagttgtgcctggtccgagtactgggcgtaggcggcgaagggcggttgcgaagcgtagagtgagtggggcggacagcgatcggcttcgtgtgagtagggctggccggcaggaactattgtccttgccggccgccgtgagtgcag

SEQ ID NO: 6675 - DNA, 72 bp, Zea mays
  Peptide Sequence Number=SeqID_50050
atggagccaccaatcaccgtgaccaactcgccccatcatcctccattgacgtctttgaacttgaagtcataa

SEQ ID NO: 6676 - DNA, 1347 bp, Zea mays
  Peptide Sequence Number=SeqID_50051
atggctcctataaccaccagggccagctcatccttggacaaggctagaaaggtagccctcaagtacaagaaaggcaaagcagccctcacagacaacacctatcctctcgtagctgagaacaatggagtagaaacaatcaacaacaagcaccctcacactgaagactcgcctacaccagagggcagatcggattcgccgtctctggccatggttctcgccggcctccgccggcacgtcggccagttcttgaccagcagtaatgagcttatggcggcgtcgctctcggccgtgagctgcgcggacgaggtgcagaaggcggagggggcggggtgccgtgacgacgccgcggcgctgcggctcaagaaggtggccatggcggcgatactggtggccggggtgctcggggtggtcctgccgctcgcggggcggaagcggcgcgcgctgcgcacggacagcgccgcgttcctggcggccaaggcgttcgccgccggggtcatcctggccacggggttcgtccacatgcttcacgacgccgagcacgcgctgtccagcccgtgcctccccgccgcgccgtggcgacggttcccagtgcccgggttcgtcgccatggccgctgcgctagccacgctggtgctcgacttccttgccaccaggttctacgaggccaagcatcgcgacgaggccgcgcgcgtcaaggcggcggcggccgccgcactggttgcgacctcctctgggagcgacgaggacatcacggtggtcaccgtcgatgaggacgagcgcaaggccccgctgttgcaaacgcactgccatggacacggtcacagccacagccacagccatgtgcatgagccggtgcaggtagagggtagcgaggcggaggtgtcggcacatatactggagatggggattgtgtcacactctgtgatcatcggattgtcactgggagtgtcgcggagcccatgcacaatcaggccacttgtcgcagcacttgcattccaccagttcttcgaggggtttgcactaggtgggtgcattgctcaggcacaattcaagaacctttcagcagttctaatggcatctttcttcgccatcacaacaccggcaggaatagctgctggggcaggcatgaccacattctacaatcccaatagcccaagggcccttgtggtcgagggcattcttgactcggtatctgctggcattctcatatacatgtcactagtggatctcattgctgtagatttcttgggtggaaagatgacagggaccctgcgacagcaagtgatggcatacatcgcattgttcctcggtgcgctctctatgtcatcacttgcaatatgggcttga

SEQ ID NO: 6677 - DNA, 723 bp, Zea mays
  Peptide Sequence Number=SeqID_50052
atggctcgtcttagacacactgcacgaaagtctgtcatccccttcttaccctctcgtctcgcggagcgtccgcttagccgtcccgtgaccggtcagtccagccacttggagaggctacaccaccgattgcatgaggaacaggagcgtcgacgacaggagcagcagggctcttctttctcgctccagcgggagatagagtctcacagtcgcgggctctacccggaccgctgggaggcgacctgcttggtgcaccgtctggagaacagtctccggggtgcggagatctgctcagagcactattccatctctgagcgggactcggctgaggcggccatgcaaggtgccgcacgacgtgcgcttttgcactacttctcagtgttcggtggggtagccgatggtctcaacctgaattattacccccgccgtccatctggcagcacaggaggcgtgattgtttcacctgtcggtgaggacaatcctaggttgagcagcacagtcaacctagctgccgtgctaaacacggagctggaccatgcattagacgagctgagtagtgctcgtgctgagattgccctgctgcgggctgagcgcgcggaacgtcgtcacctggacgatggttcccccgctcccgtcgggactcagcatccgtaccgctcacctcggcgtggacaacagtcttatggcaatcccgactgtaagaccaagatagacttagaaccatag

SEQ ID NO: 6678 - DNA, 276 bp, Zea mays
  Peptide Sequence Number=SeqID_50053
atgcaggggatacccacactctgtcgaggttgccataagactggtgtccacgctgaggtgagcggtacgggtgctgagtcccgacggaagcgggagagccatcctccaggttttggaggcggtgatagacagagttggatccccgaggtggcaatgagattgatggttcttggttttgactctggtaatggttgtcagcattgcaaccactgctcaggagaagatgaagccatagaaggagacttccaggagttccaagactacgacgagttttag

SEQ ID NO: 6679 - DNA, 351 bp, Zea mays
  Peptide Sequence Number=SeqID_50054
atggcgtgcgacctggagctcggtcggcgcgcacgcggtgcctcggcccccggcgtggccccgctgcctgctcgcggcgcgcagcgcggcgcgtgcgcagctcagccccggcgtgcgcgcggctcgttcgtggcgcgtcagcgtggccctacgcgagcgcgtgctcgcgtggtgcacgtggtgctttggcacggctcgtcgtgccctctgcgctcatctacccctagacgtgcccgtctacccctagccacccgtctacccctcaccgtgtattttatgcgcattaatcacgtcgttttaatgaaatgggaacgcaattcaaaaatggattacgttagttatttcatgtag

SEQ ID NO: 6680 - DNA, 444 bp, Zea mays
  Peptide Sequence Number=SeqID_50055
atgtccaaaccggacaaaactttccccctccttatcctcccggtgctccccagccttcttaaccctggggttggaccacacgagttcggattgagtgactgcccacacagtctcgagtggttgtacgataaaggagtacaggagattagggaggggcttgctcgtggggaggcggcgaagtttcgcggcggtgttgccgtcgcgagcttggggcgagaaatcggggtggggaaatggtgtactgcgttcgcggcggtgtggcgaagtaggaggcttaggcaatcgcttgatggatcaacagaggcgcagggagaagagagggacggctcaccggggaggaagacgaaggcggcggctcttccacgaattgagctcagacgagggaggggagggatggccgtggctggtgcggggaaggaggagctcggggcggcccttttatag

SEQ ID NO: 6681 - DNA, 267 bp, Zea mays
  Peptide Sequence Number=SeqID_50056
atgaacaagaacacaagagacacaagatttatcccgaggttcggtcacaccaccaaggtgccctacttcctcgttgaggcgcccacaaagagccgggtctctttcaaccctaatcctccctttgccgaccacaaagaccggttgaacctctctggacctcggttgaacttgccctggaccccggttgaacctctctggaccccggttgaacttgaagttcagctggagttgagaaagctcaactcagctgaagttcagctcagctga

SEQ ID NO: 6682 - DNA, 561 bp, Zea mays
  Peptide Sequence Number=SeqID_50057
atgaccatcagccttgtggtggggagaagcaagtcgggctgcggcctctgccccgccctcatcttcaaggatcttcatcatccgggctggggaggagggcggggcgagttggggcctacctccgcgtgggtcggcgacccgctccttccctcagtgatcgggggagaagggcgttcgccgttcgtggcgctggcagctgccgcgtgtctggctccctggcctgagcggctctggcgctgcttccggtgccacctcccaccggtggggtggagcgtggccgcccgtcctccgcacaggtgtcggtcgcgccgtgcgcgggccggccacgtccagaaccttcggccgctctgcgatgagctgaagccggaggcagtggtgtcggcacgaacggaggcggtgtcggctcgaaaagaggctttgtcggtccgggagcaggtggcttcccaggccgaggaggtgcagcaacggcggctggagcttggccaggtcatccgcgagcgagaccaatcccggagtcacgccgacgaggccgtgagccgggctgaggtcctcgaggaatag

SEQ ID NO: 6683 - DNA, 204 bp, Zea mays
  Peptide Sequence Number=SeqID_50058
atggatcacgtgctcgtaggaccgatgggcgaccatctcgcattgatcgtgggccggctgctgacggagtcgatgctggacgcggcgatcggcggtgggaagcagatggtcgatctgcgtcaggagacggtggacgtcgagtactgccatcgtgggctaggcggcggctcggcgacgaaggtggtggagtgcaggatttgctag

SEQ ID NO: 6684 - DNA, 2838 bp, Zea mays
  Peptide Sequence Number=SeqID_50059
atgaaaggccgcgtggtcaagctccgtgaggcgcacaaggctggctcgccagccctctgttccgcctcctggggccccagcggacaacacgtcgtcaccgcttccgccgcggacactgccgtcctgatccacgacgccgccacggtgctcgccggcggtcggggctcgggttcgtcggcgctggctactatccgtctccacaaagacggcgtcacggcacttgcagtcgcgccgggccccagcggctcgctggcatcgggatccatcgaccactccgtcaagttttacaccttcccagaggggcagttccagagcaatgtcgcccgattcaccctgcctatccgatcactcgcttttaacaagaaaggcaccctactggcggccgcaggtgaagatgatggcatcaagctgatttcaaccattgacaacacgatatcgaaggtgctcaaaggacacaagggctccgtcactgggctggatttcgacccgagaaacgattacctagcatctgtggacagcttcggtaccgtcatctattgggatctttgcattggtgctgaggcccgtaccttgacacgtattgctcccacgtttcggtcggataactctgtcaggaatgttctgtgctggagccctgatgggcagacccttgctgtgcccgggttgaggaacaatgtggtgctgtatgatagggacacgggtgaggaggtgtgcacgctatatggagatcatgaacaaccagtgagcagcctttgctggtctcccaatgggaggtatctggccagtgctggcttggataggcaggtgctcatctgggatgtgaagtcaaggcaggacattgagaggcagaagtttgatgagcggatatgcagcttggcttggaaaccaaatggaaatgctttacttctgattgatgtcatgggcagggttggcatttgggaatcagtcgtaccttcgactatgaagtcgcctaatgagggcatacctgatctcaactccaatatggttcctctatttgatgacaatgacgatgagccagacacctcagttggcttggaggatgatgttgatgatactttcagcgattcaataactttcaaccacaagagaccaaggaggaagtctacgtttgatggagatagtgagaatgaagatttaatacatcaattggaatataccaaaagaatgaaagataagcaaaataaaaatgaggatgctgggaaggcaagaggtgattctgccacaccagtgacgttggttacatcaacaatgcaagctgctttccagcctggatcaacgccaccacagcctggcatgcgaaatttcctcgcatacaacatgcttggaagtatcactactattcaaaatgaggggtattcacatgtggaggttgacttccatgacacaggaagaggacctagagttccttccatgacagactattttggtttcacaatggctgcaatgaatggatcaggaagtgtgtttgcaaatccgtgtaagggtgacaagaatatgagcactctaatgtaccgcccttttggtagctgggctggtaacagcgagtggtcaatgagatttgaaggtgaagaagtgaaggctctggctcttggtgctggatgggttgctgcagtcacaagcttaaattttttgcgcattttcaccgaaggaggcttgcagatgcatatcctctcagttagtggcccggttgttacagcagcaggttatgaagaccagctagctattgtgtcacatgcttctgattgtttgccctctggagatcaggtgctggatgttaaagtattcaacatatctgaggggacacaatcaatgtccggtcgccttgttttgacaccattgtctcgattatcttggtttggattcagtgagaatggccaacttagttcatatgattccaagcatagaaaatcactctttaatttcagttcggtcaaggcaagaaaatctgaagatgaaagccattgggtggtcggtttggatgcaaataatatattctgcattttatgcaaaacccctcaatcttatccacaggtgatgcccaagcctgtgctaagcatacttgagctgtcatttccacttgcgtcatcagatcttggggctaatagtttggaaaatgagttcttgatgaggaagttacagctatcccagattcaaaataaaatggaagaaatggctgcattgggccttgacaccacttcatatgatgatgaatcgttcaacatggaggcaggacttgaccggtgcattttgaggcttatctctagttgctgcagtggtgataagctcgttcgagcttctgagcttgcaagattattgaaactagagaagtcaatgaagggagctctatcactagtgacacgcctgaaacttcccatgctgcaagagaagttcagctccataattgaggagagggtgttaaatgataaaataatagctggagcaggaggattttgctctaatgctacaatcatgacgaacacaccagtgctgaccactcaggcaactctaccttctatgtttatgcaagatgggaaccgttcgcttgaatcttcattacccaaactcaatattgtcaatcaacaatgcaattcaactgaaccaaagaagccagcaggagaacgagggattgaaattaaggatagaactcaaaaagattcatctgcctctgttccatttgccaagtttagtgtagacttagacgaatgcaacatggtgatcgagaagatcaacatctcaaagtatgacattacaagactcattgaagatctaacaagatcatgcattatgttcgtgccctgcattcatagacaaagttag

SEQ ID NO: 6685 - DNA, 648 bp, Zea mays
  Peptide Sequence Number=SeqID_50060
atggaatccacgcgcgacgtgtggtcgagccaacggttagaagggggcaccggactgtctgatgtgcaccggacagtgtccggtgcgccaatggctctgaaccgccaacggtcggcttcgccaaagaaggaaagaaatccgcaccggacagtgtccggtggtgcaccggactgtccggttcaggattttgggcctgcgcacgcaaccgctactgctaattttgtggcggcttcgaccgtggttgctggaaatgaatcagatgagtctgtgtctaagttttctgagtttgatgattctaggagttcggttgtgtggacggaagagtcttcagatgaggacttggattactttgcggccttggatgtggctgcggcggaggcttctccgcgtgtgacggatgctgaagttgttcctggcccgagtgctgggcgtaggcggcgaagggcggtggcgaagcgtacagtgagtgaggtggatggtggtcggcttcgtgtggacaggactggcaagcgggaaatgttgtcctcgcaggttggggcgagtgtaggtgagggggagttgcgaagtctttttgagggtgaggagctgaggataatgctgtttaattatagggagatgggtatcatcccgaaggttgaaccaatgtaa

SEQ ID NO: 6686 - DNA, 237 bp, Zea mays
  Peptide Sequence Number=SeqID_50061
atggggaagcctgtcccatcactcctcatgctcctcctcggccgagtgaccgcacttgtacccaccataaccggaatgggagaccacgtctcaggtcgcgtgaggggtaaagtccactgccagtggcaggcagatcctctggtgcaggctctggtgctggatccggggctacctcctgagcagctccttgctccggatttaaataacattatgctaagagaagaaaaactaagttaa

SEQ ID NO: 6687 - DNA, 312 bp, Zea mays
  Peptide Sequence Number=SeqID_50062
atgtgccctcaggcgcccagggcctgttataatgggccggatcacacgtgggcctccgtgttggacgagaccgtgggatgggacgacctcgtcataggccttcgtcctgcgacgcatggggcgaagggtggagtctgccagtcgtcttgtctccgttggtgcagcgagactggcgaaggcatcgagcgaagggtggcgtcttcgccttcgccccaacacaaggtaattgctgatgaaggttattttgcacagagtatgctattaagtaaagccttaaggatgcaacaagacctcgaggataagaaaaatgag

SEQ ID NO: 6688 - DNA, 792 bp, Zea mays
  Peptide Sequence Number=SeqID_50063
atgacaaccgtccccatcgattccccgttcgcgtccaggcctcaccgccttggcatacaatgctccactgaccccggctgccgccgtgcagtgaccgcacttgtacccaccatagctagcatgggagaccctgtctcaggtcgcatgagggataaagtccgcgcccggcttcactcagtagccacggcgaagaaaagggcggaggggcttaccggcggcgagactgttccggtgaagtggtcgagggcgaaggggaggtcgcggggatcacaacggtgtgcggaacgtcaacggagatggccggagttggtcggtccacgcgcgcaggcggggatgctcgtcggcggcgaggagaccggcctgggtcacggcgagatagtccatcaaatggttcaggaaggtcccggatgccagagaagacaagagcgaaaggaattgggcgagactcactggatagctcggtccacgcgcggcggcggaagaccgaagtccggtgaggttgatctcgggcttccggtgaagtccggtcgggtccgagggcttggcgagcttcacgggctactggcggagctagccgaagcacaggttgggctggagggcggctggagtgggctggccacggcggccgtagctctggcggcaatggcgggcggaaatacgctcgctggagctaaggaacggtggctggccgatgagggtgagtgcggggcgaagagagagatatggagccaggaaatctggtctgtctccctgcccaaacccgaggcaaatcccaagttttgtcgtgtctag

SEQ ID NO: 6689 - DNA, 348 bp, Zea mays
  Peptide Sequence Number=SeqID_50064
atgaagaagcttcaaagcaagaaatctgaaggtcttgccttagaaacttgggttgaccagcagggacttggtcataagggggtggtcctaggacgaaggaggcagctgggtgaacaatatgatgatgtactgaacacatcttttggctatgaaggttgcatgactgacgaagcaagctctttcttcttattgatgcaacttttcaagggagtgaggaggattccttggaaaataatgagcagttggtcctggcttgagccctttgatgatggcttcgatgacgatgtcatcctggactgccgaagcttgagcccgaagcctgaggaaccttcagacaaaatactgaag

SEQ ID NO: 6690 - DNA, 584 bp, Zea mays
  Peptide Sequence Number=SeqID_50065
agggcgtaggagaaggcgcctactccccgtattcgtccgacaccagccccgacaccgactcgcgtagtggctattgcacgtccacgaggacatttcacgtcatgcacacaccatcgtttttgccgtcgtcggacgtcccgttcgtcttcccggcctttgccctgttcttcctccccaacctgctgcccccgcccacggtcgcagccgtgagccgaccgacactcgtcgacgcgggtacgagcgatatactacctatgtcgcctctagatgcccaggtcttcgttgtgtccttctccggcaatgaacagggtctgatcctaagcaagtccttagggaacaagaggaatgttaagggcgaagctgcacggaaagaaatagtgaaactcagatccgaaataatgcgcgaggataaaaataagcttgaagtttcgaatgccgaaaaggacaaacgaattgcgtcgctcgaagctaagctggaacgggggctctatctaaagagaaattttttagatggtgacttggaaggtctgatgaggttggtgcttagcgagacccgtgctttcaaagatgttctctcagcttga

SEQ ID NO: 6691 - DNA, 399 bp, Zea mays
  Peptide Sequence Number=SeqID_50066
atgccccctgcaccacctcagggcatccctactgctggaggagaccctgacggagacggagacgacgacgacgccggtggcagttcgagccacagcacagacggggtagctgatggccttgatctgaagtactaccctcaccgttcgaccggcagtgctggaggtgtgattgcttcaccagttggtgagggcaatcccaggcagaacaacatggtcaacttggccgatgtgctcaacacagagttggaccacgcccttgacgagttgggcaaggttcgggcggaggttgcggaattgcatgctgaatgcgcggcacgccactatctggatggtagttctcccgcctctatcgggattcaacacccttaccgttcaccacccatggtcgcttcgactatg

SEQ ID NO: 6692 - DNA, 102 bp, Zea mays
  Peptide Sequence Number=SeqID_50067
atggcgcctgatttgaagaaatcgtgcgggcggccgaaaaggggggtaatgagctatgacggtcactgggcagtcactacggctcacgatgacacgttttga

SEQ ID NO: 6693 - DNA, 441 bp, Zea mays
  Peptide Sequence Number=SeqID_50068
atggaggcagaagtcattattgcatctgtagccatgtgcattcatgggagaggcagagaggggagaacggcggtgagaaagactcggacgggccggaggaactccggtgagccattccaggcacagggaggggacttaaggcgcgccaaggccttggctaacttcaacagaggcaggggcgacacagggacctactccggtgaactagaccgggctaaatcggccagccaccgcgcaagcacagtggaccgccacggccaagccccagcgaagatgaaattggcagaacacagggcacaatcgaggaaattgggcacagggatgggtgtctcacctcggggtggagctcgggaaggctttggggtggtctccggcgagctggttggccaggaacgcgggtgcggatcttcggtggcgtctggcggtgaggacagagcgtga

SEQ ID NO: 6694 - DNA, 174 bp, Zea mays
  Peptide Sequence Number=SeqID_50069
atggccagcgctcgggtggctcgggcgggcggcgtagagctcgccggagctaaggacggggtcggggcagcgggggtaagcgtggagtggagtgttgcacgttcgggggtggtctttaagggcgtggagggggttaatttagaacactttgtcaacagaggcttaaggatttga

SEQ ID NO: 6695 - DNA, 243 bp, Zea mays
  Peptide Sequence Number=SeqID_50070
atggatcccccgttcgcggccagggctcaccgccttggcatacaatgctccactgaccctggctgccaccgtgtagtgaccgcacttgtacccaccataactagcatgggagacccagtctcaggacaagtgaggaggaaattccacgcccggcttcactcaggtatgcggggagatcctctatggcaggctcaggagctggctcctgatcttcctcgtggagagctccttgctcgggaatga

SEQ ID NO: 6696 - DNA, 522 bp, Zea mays
  Peptide Sequence Number=SeqID_50071
atggagcatgtcatcaacttgtgcgggaagggctaccatgggccgggcagtgagagacatctgaatggcaccccgaaagcattccacgatgccttggaagtcagcacgcacaatgatgatcccttgaggtcctggcattttgagtatcatatacagtgggtactccccttcagtcggcatgatgctgaagaaaggagtatcctactcagtgaggtcgttgatggagacctcgaggacctgaaccattcggggaaagtgtcgaggcaggtgccggagccattgcagtgcgtcttgccccagaacgatgggcaagtacgctgtcatgacatcctccgttgccccagcagcctgggcgatggttgtatagacgaccaaccagccccccaggtcctgcttaggctcatatttgtcgacgttggagaccttgaaattaggaggccgttggatggctcggaggcgaagggcgtctcgccggctgttgatggcgtgatgctggttgtttggtggatgggcaagaggtag

SEQ ID NO: 6697 - DNA, 315 bp, Zea mays
  Peptide Sequence Number=SeqID_50072
atgggccacaaccgcatggacttaacacagcaggactctaaagttgggtggggagactggagtcatcacccatctctgatgatgaacccaccatgctgggggaggaacctccccagcgcgatgctcgtcgacggagaaacagacgcagaaacgtgcgatgacatcacaaagccagagaacgagacccatcacatcccgtctctctggatgaagcctcagagatgggggaaacccccaacaaaagaacacatcgagaatggcacaactcccaccactgcgatcgccgtcaggctcaagaacgagagcgggaactag

SEQ ID NO: 6698 - DNA, 573 bp, Zea mays
  Peptide Sequence Number=SeqID_50073
atgtctcaccgggggtcgacgacgtcgcggatggagctgcgcaaaaacaggaaacacccagcgagcgtcgacggtgctgcaacaacacatctccctcgtaggcattacgtcgaacaccctgcgcacagcggaaaggagcaagggaaggggctgttcggggaaggcgacaggggtgctgttcttgggagaggggctcggcctccatggggaagaaggttcccggcgctggttgtgtggggagaacgagaggaggcccggctggttttccatgggggtgtcggggcgcgctggagaggggctggagcaaaggcgttgcgcagggctgctgctggccgtggagcagggggaggacgagccagaggaggggtgtgtgcgtccaggttcccagggagaaaagtagagggcaccgagcagctggaggagggagctcgcggccatgagaggagcttcagcgtgccgaggaagaaggggcagagagcacgcagggaggtggaggcgccatgggaaggggacgagcagagctgctggcttactgtgcgtcggccgtggagaaaggtccctgcgccatggtga

SEQ ID NO: 6699 - DNA, 444 bp, Zea mays
  Peptide Sequence Number=SeqID_50074
atggtcagagtgaggttagctgatggtaagaagaacttggtaagggaagactccatccaaggtggtctcctattcctaaaggttactttaggcacgagatttcaaagtgtgaaatccacatttgtctttagagagaaaaggtttcgtcctacagtcaacattcctctgataccacttctgtcacacccggatttcgcggcaccaagacccgggcgcgaacataatcaccagtttataggaagctccaatgcaggaatcccttgcaggaccgccatcgcagcaaaatcctcccgagggcctccgtacactgaccactcccctactgcccttgcccctttcggtttaaataagctctggactgggcgcactatttccagagaactcaaggggctcggggtaagaatccagaggcatagagaacaggccctgtggatggcgggttga

SEQ ID NO: 6700 - DNA, 714 bp, Zea mays
  Peptide Sequence Number=SeqID_50075
atgactctggagcctcatcccctgcagccggggtggcgttcactagactttgaatcctttggtttccgggctgatgacactacagaggccacagccatgcacgtgctgacgactttctgtgggtttcaccccctggaaatgtcgacccaccccatcggcttgttccccgccgaggaggatgacccgatgtggaaggatcgggttgatcacgccaaggacatgtggtcactctaccctggacataccgctcgcttgacggtttggtgcatgagtgccctatatcatctgcaggcctttcggggcgaggcgatgtcccagctaatgggcctggtggagtctacaaagatcaccctcgataatagggaggtccttgtcgtagacttgtcttctaagctagtggagaaagatctccaatttgagcaaatggctaaccacatccgtgagctcgaggagcaagtggaagcccaggataacaccatcgaggttctggaggaccagctccagaccacccagcagcagctcgaggaggcgaaccagcacttggacatgcaccatcaggagatagaggccatggaggtagatggggccgacgaggacgtagacatcgagggagaggaagaggcagagccttcttctagcctggacactacaggctcaactcactctggaggaccaccttccctcgagtctagcgttgcctcttttgctcattag

SEQ ID NO: 6701 - DNA, 657 bp, Zea mays
  Peptide Sequence Number=SeqID_50076
atggtagaggtccggcgaagggtcggccaaggtccgggggtctctggcggtcacgtcgaggtgtgggtcgtcggcggtggtgaccggaggtgggctggccatgtcctccgtcctgctcatggcggtagagttaaatcaaagtgctcgaagagcttcacgggaagtcagtggtgcggtatggcgcgtaccaagaccacccaacgaaaggcaaccgaacctcgaggtttgccccggcaccagttggctcctagacatgaagggagcagtagcagaagcaatgatccaataggggatctagaggccagggaaattgtcgaacgagatacggctatcgactgggccgtaaattcacgctctttcgcctgggactgcgaggcaaatgctctagcccgggtagcagaactaagcgctgctttggagaatctgcaagcatactgtaacactatgcatgaggaggtgcacgtgttatacgaccgactgcatccgaatgtgccaccagaggttgcagcaatgggagccggaacatctagagcagctagtggaggacctgatggggagctagatctttttggagcccctccttctatgaacctcgcagatgaacgtgctcctgaagctggcaggggagcgggagcggctaaggacaaagataattag

SEQ ID NO: 6702 - DNA, 414 bp, Zea mays
  Peptide Sequence Number=SeqID_50077
atgtgggcagtgagacaagccagatttggcgcccgtctatctcttgatctagggcgtatcctccattggaactcacacatgagagatagccctaggtgccaggaagagcgtgtccgcggccgctcgatcctctgccaccgtagaccggccaatagagccattcccaaccccgtccagccctcggagaagactgtgcacacctccgtgaagctccccgagcgaggaatcggagtttgcttcgccggagaggccagtccacgctcgccggagctctcaaccccgccggagtacgtggaccgggtaatccactcaatcatccttcgattcctggtgcacacggtcactacgttaccccgtgaagctcaccgtgcctttggattgaaccagttcgccgtggtttggccgaaactttaa

SEQ ID NO: 6703 - DNA, 318 bp, Zea mays
  Peptide Sequence Number=SeqID_50078
atgacggaaatgcactgtcccacactgacggacttgcacgagagggctttccccgcattttgtgggagggtgaggatgactttggagcctcatcccctgcagccaggctggcgctctttggactccgagtcttttggataccgagctgaggacaccatcgaggcgattgccttgcatgggttgaccactttctgcggattccatccgttggagctgtctacccaccccattggcttgttccccgccgagaaggaggacgacccaatgtggaaggatcgggtggagcatgccaaggacatctgggccatctacccctga

SEQ ID NO: 6704 - DNA, 177 bp, Zea mays
  Peptide Sequence Number=SeqID_50079
atggacaacaatccatggggattggttgtccacgggataaaaattggaataaggattaaggtgtggtaccgttctctggaggacatggttgctggagtgacttggccgtccatcttgccaccgggttggactgtcgagtgggaccctacctcagctgaggaggagcatgaggagtga

SEQ ID NO: 6705 - DNA, 346 bp, Zea mays
  Peptide Sequence Number=SeqID_50080
atgtccggtgcaccagggggactcagactcaaactcgccaccttcgggaattcccagaggcgcgactcggctataattcaccggactgtccggtgtacaccggacagtgtccggtgcgccaagggaagtcggcctcaggaactcgcctgcttcgggaaactccaacggctagtccactataattcaccggactgtccggagtcagaatcgcccatgctggcacaccggacagcaaacagtacatgtccggtgtgcaccggacacccaggcgggcccacaagtcagaagctccaacggtcagaatccaacggcagtgatgacgtggcagggggcaccggactgtccg

SEQ ID NO: 6706 - DNA, 759 bp, Zea mays
  Peptide Sequence Number=SeqID_50081
atggatccaaacatgcaggctcgatcagtgcaggtggagtgggttggagctagagagtccctgatttttagtgcattttgtcgtagtgcaccggtttctaatttgatgctgaaccgcaagatgaacaaggtagacgaggagtccaagcaggtctcgtatcctgtcatcagggatgacaatggcaacgacaagctcgatttcccggcgcttggcaagcagttcgcagctgaggagatttccgcacagctgaacctgtatcttgtcctgcttccacttgatggtcaaagtgtgcctaaactggaaaagccctaccacagttgcctgccaacactatctattcgacatctctgtcaggcccatgctattctattggacccttgtgctctggttctggaatatctacagagagacattatttgcttccttcacattttagagtatgttcggtatgtgcactctcatttctgctcatatggccctgcagatgaagtgattccctcgcagttgtgtccttcacaaagaaaggatagctgtgacacaactataacagaggaatcatcgcccattagcacactaaaattggcacatacagagaacgcgcctgcggagtgggattatctgaacatagaggccaacacacttgagtcactcgagctccgcgcaaagctcctggagcaggagaggctcgatgagctcaccagcgctcttcggccatttggtgagggagccgtgtcatctagagagatggacagacggtga

SEQ ID NO: 6707 - DNA, 114 bp, Zea mays
  Peptide Sequence Number=SeqID_50082
atggacgcaagccctgcccttttgctgctcgccgtggacaggctcgacgccctgtcggcacttgacgccagcggcaaaatcttggtagtggtcgagcagcacgttgtcgactca

SEQ ID NO: 6708 - DNA, 510 bp, Zea mays
  Peptide Sequence Number=SeqID_50083
atgcaggaggcatgcaactgcaccacagggacgcaccctttcgacttcgacgcatccagcatggaggcccaggcccacacgtcatgtaaccggcacgccggttactacgtgcgaaaaactctaccgccactcacgccaatgtcgtgccttctcgactgtgaaaccagtgccgcgactcgaggcaaccctacgcatggcccaatagtgccaaccaagcacatcggtcacagggcaggcgacacctttggcaggcgaagcaggcgacgcttcacctccgccatgatgaccgcgtcaaaaaaggtgtgccacatcgttcaatttcgtatccttttcctcttcccctttctctctcttgctacagggaccgggaaaggggatactccaaaagggatccttctctgcgaaggaagcgggccccgagccctcctactgaatcaggggttcgaaggctggccctcggaagggttcgacagccaccccagagcactcaggctccgcgcccactactga

SEQ ID NO: 6709 - DNA, 798 bp, Zea mays
  Peptide Sequence Number=SeqID_50084
atgggatacagggaggctaccacacatatccagctctggctccttggtgccctggtctctcactccgagtttgacattgtggatttccttatttgtgagatcgaggacaccattttggatgtttttgacactcaggccaaggatactgctcttcatcagttcgaagctcaggatgcagcagttgatgatgatgatgatgatgatgatgattttgggattccacctccgcctccgcctccgcctcctatgcctccacgctcacatgatcatgaggttgagagttctagtgctacccctgctgcccctcctactattgacccttctcttgcttcgattctccagacacttactcagcagcaggcttacttggccgccgagcagacccgccagcattctggtgtatcgattcccccggttcagtctgcacctcctccacctattcaggctactgttgtgccagcgattcagccaggatcccctcttcctactgttggtccgtcttcctctttgctccggccggtcaccctggctttcacgtcaccggttctcaactccgtctgccctcagccgccagtgccaccagcttctgttgttcccactactgctgtggcggtgtctgtgaccacttcagttccgtcagcctctatagcgcagcctcagtccgagtcagtaccagctccagcttctacagcagatcctggatccgagactgactctgacccccagctggcgttcgctctactgcctcgaccgcgtccggatgcgcccccgtcgcctcctcccgcttcagatgtgtag

SEQ ID NO: 6710 - DNA, 456 bp, Zea mays
  Peptide Sequence Number=SeqID_50085
atgaacaaacaccggcactcaaggtgccattacaaacggaactccggttccacccccgcaggtacgaacaacccccacagtggagggcctgcgggacaacaaaacgccgacaggtggctcaccgccgcccgctccggcagcagcgacaacgacctccgctccgggcggccaaacagcagcagcgatgacctcagggtagacgctgctgcgacaaggccctcgcccacgaccccactcgaggggcgaagacaagctaccaaggtcgtggagtcggagccggcgcggactgagtcttctccaacacgctccaaggtcctccccctacgacacgggggctgggtcccacgcgtcatgcaagctggcccaggacagaaggagccaaaccgccacgcgtggagcgcacaacagcccagcggttacaagctttcctccactatcgcccggaccagcgggtga

SEQ ID NO: 6711 - DNA, 162 bp, Zea mays
  Peptide Sequence Number=SeqID_50086
atgggctggtgcgtggggtttggggaatgggccgaaatgggagccgccagcccaacaggtgtatatgtagatgcaattgtggacattactccacaactcatcacactcaatcaaagatccaaatcagacaagtatcataagaacaaacattcaagttcatag

SEQ ID NO: 6712 - DNA, 210 bp, Zea mays
  Peptide Sequence Number=SeqID_50087
atggctggatcgaggagggaagtggagtggagtggtgcggtgctccttgctttctttcttcttttttcccctctcttttggtttatggggaaggaagaacagcagagagagatcttctcggagacagtaaaaaaagtttttatagttgtggtttttgtacatcacgataacggcggtgcatctgtgcaagctttaaatgagaagtcttag

SEQ ID NO: 6713 - DNA, 2646 bp, Zea mays
  Peptide Sequence Number=SeqID_50088
atgtcggagccatcgcttgaaagtgacggggaacaaaggtgtctgaactcggagctatggcatgcatgcgcagggccccttgtgtcccttcctgtggttgggagccgggtcgtctactttccccagggccatagtgagcaggttgctgcatcaactaataaagaagttgacgctcagatcccaaactacccaaacctacctccacaattaatctgccagcttcataatgtcacaatgcatgctgatgcagagactggagaggtttatgcccagatgacactgcaaccattgagcccggaagagcaaaaggaaccttttcttccaattgaattgggtgctggtagcaaccagccaactaattacttctgcaagacgttgactgcaagtgatacgagtacccatggcgggttctctgttccacgccgagcagctgagaaagtcttccccccattggatttttcacaacaccctccagtgcaagagctggttgcaagagatctgcatgataatgagtggaaattccgccacatttttcgtggtcagccaaaaaggcatctactgacgactggttggagtgtttttgtaagcgcaaaaagactagtagcaggggattctatcatatttatctggaatgataataaccagcttctattgggaattcgtcgagcaaatcgtccacagactgttatgccctcttccgtgctatcaagcgatagcatgcacattggtctccttgctgcagcagctcatgctgcagccacaaacagtcgtttcactattttctacaacccccgggccagcccttctgagtttgtgattccactggctaagtatgtgaaagctgtctaccacacacgtgtgtctgttggaatgcggtttcggatgctttttgagacagaggaatcaagcgtcagacgatacatgggtacgatcacatgcataagtgatctggactcagagcgttggccaaattcacactggcgttctgtgaaggttggttgggatgagtctacagctggtgataaacagccaagagtttcactctgggagattgaaccactgatggcctttccgatgtacccaactgcctttccattaaggctaaagcgtccgtgggcttcagggctacctatgttcaatggtgggaggagtgatgagttcgctcgttattcttctctcatgtggctccgagatggaaacagaggggctcaatcactgaacttccagggacttggagcatcaccatggcttcaaccaagaatagattatccattattaggtctgaagctagatacttaccagcagatggctgctgctgcactggaagaaattagagctggggatcatttgaagcagatatcttctctcctgccagtgcaacagccacaaaatttgagtggtggattagatcctttatatggaaatcctgttctgcagcagatgcagttccaatctcagcagtcatccttgcaagttgtgcagcaaggttatggtccaaatgcaagcgactctgggttccttcaaaatcagctgcagctgcaaaagcagcaggagccactaccacagcagcagcagcaagctctgcaacaacaatcgcatcaggaaatgcaacatcacctctcagctagctgtcatgatattgctaatgtagcttctggtgtgtctgagtctggatctgcttctcaaacagaatcttctttgctttctgggtcatcgtaccaacagatctatgatggaaacagtggtccaggtctgcatctgcacaacggtttccacaactgttcaagccaagagtcctccaaccttcttaatctctcaagaagtggacaattcatggcatcagagggatggcctttgaagaggttggctgtggaatctctttctggtcatgagctccaacctgtgcagcacaagtttgagaaagtgaatcaccaaagtaatgtgtctcacatttctagcaccttgcccccactgtcagcaagagacagttatagtgcccaggctagtggtacaaatgatcagagtcacctgctttcatcatcatttgcaatccatgatggcttgacagccgtcaggagtggtggtgttggcagtggaactgatgcgataaccatagcttcgttgagatataatgatatgaatttgctacctgaaaaccccatcgcaacttccagttgtttgggcgaatcaggaaccttcaattctctcgacgatgtgtgtggtgtaaacccatcacaaggtggaacctttgtgaaggtttacaaatcagggtcccctgggagatcgctcgacatcaccaggttcagcagctactacgagttacgtagcgagctcgagcggttatttggtcttgaaggccaactggaggaccctgtaagatcaggctggcagcttgtattcgttgaccgggaaaacgatattcttctcgtcggcgatgacccgtggcaggagtttgtgaatagtgtatggtgcataaagatcctctcgccgcaagacgtgcagcagatggtccgcggcggaggcgaccttctgtctacaactggagtgaggacactgcagggcagtgtctgcgatgattattctgcaggccacgacatgcagaatctcaccggcagcatcgcacctgtggtgcctctggactactga

SEQ ID NO: 6714 - DNA, 267 bp, Zea mays
  Peptide Sequence Number=SeqID_50089
atggaggcgctcccggctgatgaccaaagaccctttgaggacctcataatgcgcgatgagaaggaggtgatgcgacaatggaacaaacaatgtgacaaggaggaggcagaattgctgcataaactctccgaacgacgcaaggaggtggcagaaaagtatttgtcacacttcatggtggatcgccaccagaagatcatccgtcaaggagagatcgatatgaaagctctcctacctccacttcagggtcctgctttttccatcgcgtga

SEQ ID NO: 6715 - DNA, 834 bp, Zea mays
  Peptide Sequence Number=SeqID_50090
atgaccacgttaaaaaaggctccgagcctccctactgatcagaggttcgaaggctggcccctcggaggggttcaacagccgcctcagagcgcgtgggctccacacccactactggttggccctcgaagggttcacagccgcctcagacacagagcgagggatgaccctgggtacgttccatacataaccgaggctcgggctacgctcccgagaaccccactcgccctctccccctccctcatttgcgcacctaccgacccctctctctcctcccccgcgccgtgcacacgccagagcgcctccgccattaaaccgccgccgcccgagcccgtttccccatcgccgttggagctccgccgtgtcctctgccacgccgcggaggtccgccaccgccgaccaaggccgtcgtcgcgccattgccgccaccgaggagtccccggagcccgccttgaggtcgccccagggacccgccgagcgcccgcgccccttgtctccggcgagtcctccgccacggggacaagcgccgccgtctctgctagccgtaggaaaggccaaggccggccacccgaccccccgccgttcatcccagatcgggcggccctgattcaattagcccgggcccaatcctggccgtccgccggagatccaacggccaagggccgcttccctcacaccccgcgctcgctctgctcgctggcccgcctgtcagcccgtccgcgcccgcgctgttcccctggctcccgcctgtcagcccgccgccccgcgctgcccgcctggccccgcctgtcagccgctcaggccgccgcgcgctcgcgcgcctgcccgcggatctaa

SEQ ID NO: 6716 - DNA, 456 bp, Zea mays
  Peptide Sequence Number=SeqID_50091
atggcagccggcgccggcaggtcgaaccccgcgcggtgcatgacgcacccgaagcaccggcacgcggccggggtgtgccctttctgcctacgagaccgcctatcgcgcctctccgccggcgccgcccacgagtcggcgtcggcgtcctcctccttctccccgtcctcgccctcggaggagaccgcagcgcactcgtcgtcggcccaggcgccgcgccccccgccgcggaagcctcgcgctgctgctgctgcaccaggaggggacggggagcgaggcggcaccggcgctggcccgcgggccgcccaggcggagcagcaggagaggaaggcgaggaggggcaacttctgggcgcggctgcagcagcagctctaccacggtggctggcacaggaaagacgacgggtgctcggtggccgcagagagacagaacgccgcggccgcggccgccgtagtgtga

SEQ ID NO: 6717 - DNA, 801 bp, Zea mays
  Peptide Sequence Number=SeqID_50092
atggcccccttcctcctgatgcgccctcttggtgccaggccccttttgacccccatcttacaacgtggtggacgaggaggacgagccgccggcggtggcgaaagtcggtctcgggccacgatggtgtcgagcaccggcggcgcgttgtcgtcgttggggaagaatgagtcctacctgtgtgctaacaaggtcagcatggacgacgcgccctacctcaagatggtggacatcaagatgtactccaactacgaggacctctccatggcgcttgagaagatgttcaactgcttcatcattggtgagtactgttcggttctatgcttctgtctaatgcatttccctcttgtaagtactgcgtcgtccaatgccatttctgccaaagaattgtcaagttacaggtgctttcagatcatgtttccttcaacactacaaggaactggtgaaaattggacaatgatgaagaccatttgtgtcactgaatatctaaattacaaaggaggtgaagcagggcagaacaagaagaggcagagaattggagacactttagactttgaaattaagaggtggtctactggaaaacagggcaacttgcgtgctttgttatcaactttacaatatattcgtccgagtgacaagaaggtagattaccaaatccagaagctcaccaatgcagctaacaatgccactgctcgagagaaatcaggaaatgcagaggcgaatgggaaggatgggcattcggatgaggaagacctcctgaagtataggccaaacccagatatgatggacacagactggtcctga

SEQ ID NO: 6718 - DNA, 279 bp, Zea mays
  Peptide Sequence Number=SeqID_50093
atgtgccagagcttattgaacgtgcagaagttgccccttctaccacagaaccagactaaggatgcaaggaaaactgttgtcgcgagcgtagccaacgctcctgctgaagctggaccttcggaagctcctgccgaagctggaccttcggaaactgcactgatagcaccggagaaagagagtgttcctgagaaatctaaatctcctgctcctgaagcaccccctaaagagctagaattcattgttcgtcatgcttcgagaaagcaactatcagaagagtag

SEQ ID NO: 6719 - DNA, 360 bp, Zea mays
  Peptide Sequence Number=SeqID_50094
atgggtcttgagatcaagctcttcgagttctacgaggctgaagaccctaagcatctgtttggtgaaggcaaggatctgggtacgggcatcgtcctacgactttttcctgagggcagaggtataggttttgggacgtcagatggtcatttccaacattcgcatagtgagaacccttgggaaaagccacatagtgagaccctaccagttcaccttgggagtgatcaatggggagtcgcgatcctcgggcagaaagggaatcacatctcatgggtaaagtgtgcaacctctgcagagtgttatgaaactgatatatcagctgtgctcacggttatgagcggccttgggatcctctttgattag

SEQ ID NO: 6720 - DNA, 213 bp, Zea mays
  Peptide Sequence Number=SeqID_50095
atggagaggggcttcgaccaggcccgggacgccgcacagtggctgtctgaggctggccgccacgctggctggccatcgggccgccgcacgcataggggcgagcctccaggagctcgtgcgcaggggcacgctgagggagagaacgtcgaagggagggaggggagacttgcgtgcgcgatgaccaataaccgtcgctgcgtgatttggatctga

SEQ ID NO: 6721 - DNA, 90 bp, Zea mays
  Peptide Sequence Number=SeqID_50096
atggccatgatgggttcaacatcgggaaagaagtacctctgccaggtggtgcccaaggatgtggtgcccaaggacgaacctcaacggtag

SEQ ID NO: 6722 - DNA, 276 bp, Zea mays
  Peptide Sequence Number=SeqID_50097
atggatgatgaagctatagccgaagagcttcaccttgatgtgatgacgaagaccaaagtggccccgcttgtcagctgcttcgtcgtccttccgccgtcccttcaccgcagtcaccttcggccatcgcctccgtcctcccctccgtcttctcgccgcacagggaagtttggcaccgctccgtcctcccctccccttgaccagcgtcctcgccggtaccgccccgccgtggtgtcccctcggcggcgctgtgcggcatttatgggcggcactgtgtag

SEQ ID NO: 6723 - DNA, 747 bp, Zea mays
  Peptide Sequence Number=SeqID_50098
atgccccctgcaccaccacagggcatcccgactgctggaggagaccatgatggagacggagacgacgatgacaccggtggaagttcgagccacggcatggagctctcggaggaaccggagccagagggatggatcgctagacccatcacttgtgacgccgctcgcgggtgtcacttccacggcgctctcgacaccctgctacgtcgggccttcgaccgacacacttggtccatcgagtaccgttgtgtagtctaccagcatcgtcgcgggctatacccggaccagtgggaggctacttgcttggtgcaccgtccggacgatgatctccggggtgcagaggccttcttagagcactattctattactgagagggatactgccgaggcagccatgcaagatgtagcacgacgggcactttcgcagtattgctcgttgtttagcggggtagctgatggcctcgacctgaagtactaccctcgccattcgaccggtagtgctggaggtgtgattgcctcaccaatttatgagggcaatcccaggctgaacagcatggtcaacttggctgccatgctcaacacggagttggaccacgcccttgacgagctaagcaaggttcgggcggaggttgcggaattgcatgctgagtgcgcagcacgccactatctggatggtggttctcccgcccctgtcgggattcagcacccttaccgttcaccgccccgtggtcgcttcgactatggtacctag

SEQ ID NO: 6724 - DNA, 1629 bp, Zea mays
  Peptide Sequence Number=SeqID_50099
atgggagaaatggcgcatgcttgctctgcccctcgcccgtctcccgctcaccatttgtgtgtgcgcatcctactagcgtacctgcttgcggcgcggtggctcgtgccatcctgctcggcggcttctttcttccgcttcccttggcccgccgagcggcacgactaccgtgacgcgctggccaagtccatcctcttcttcgagggccagaggtcggggcggctgccgcctggccagcgcgcgtcgtggcgcggggactccggcgtgtcggacggcgccgcggccggggtcgacctggagggcgggtactacgacgccggcgacaacgtcaagttcggcttccccatggcgttcaccaccaccatgctggcctggagcgtcatcgagttcggcgactccatgccgcgcgacgagcgccgccacgccgccgccgccgtccgctgggccaccgactacctcctcaagacgctcgcccaccccggcgtcatcttcctgcaggcaagcgcgcggcattgctgcgcacgcactgccacgttcgttcatgtgggcgatccgtggaaggatcacgactgctgggagaggccggaggacatggacacggaccgcacggtgtacaacgtcagcgcggggcgcccgggctcggacatcgcgggggagacggcggcggcactggcggccgcgtccatggtgttccgagatgacgacccggagtacgccgagacgctgctcacgagcgcaaggaaggcgttcgagttcgcggacacgtacaagggcgcgtacagcgacgacccggacctcagggcagggggctgccccttctactgcgacttcaatggctaccaggacgagctgctgtggggggcagcatggctgaggagagcctccaaggatgacacgttcctccagtacattcagaacaacggcaagaccctgggtgcagaggacagcagcaacgagttcgggtgggacaacaagcatgccggcctcaacgtcctcgtctccaaggagttcatagaaggcgccgcgctgcctttgcagtcgtacaaggagttcgcggacagcttcgtatgcacgctcatcccggagtcgtcttcttccccgcacatcacgtacacccccgggggcatgatctacaagcctggaggcagcaacatgcagcacgtcacctccatctctttcctgctcctgacctacgccaagtacctctccaagtcctctcataccgtcgactgcggagacgtttcagttggccctgaaactcttcagctgcaagccaaaagacaggtcgattacctgctaggagacaacccgatgaagatgtcgtacatgatcgggtacggcgaccggtacccgcagcggatccaccaccgggcctcgtcgttgccctcgatcagggaccatcctcagccgatggcgtgcaaggaaggcacgccgtacttcaactcatccggtgcgaatcctaacccgctggtcggcgcggtggtcggcgggccgggggaggacgacgcttacgaggatgaccgtgcggatttcagaaaatctgagcccaccacctacatcaacgctcccttggtaggggtccttgcgtacttcgttggcaacccgaatcctggtcataacaccagacattga

SEQ ID NO: 6725 - DNA, 198 bp, Zea mays
  Peptide Sequence Number=SeqID_50100
atggccgaggcgtgggacaggttgctgtccgagatggtggccgcgcacaaggaggggaccgggcggccggccacgcaggggaggaggatgaggacttcttggacgtgctgctgcggcttagggaagatggcgcggatgggctcgagctcacagacgaccgcatcaaaggcatcctcgagatgcggctacaagagctag

SEQ ID NO: 6726 - DNA, 432 bp, Zea mays
  Peptide Sequence Number=SeqID_50101
atggcgcaccggacactgtccaatgcacatcggacagtctggtgcccctgccgaccgttggcgcgggccacgcgtcgcccgcggattgcgcggccgaccgttgcgctggcgaccgttggctcaccggacagtccggtgcaccaccggacagtccggtggattatagctgtacgccgcctatttttcccgagagtggcctgttcaccaaaagccagcctggcgcaacggatagtccgtggtcttaaaaaatctctgacaaagatggctgcacacatgaaagttgctgcttcaacgcgccgcagggctgatgatgcatattatgatccagctgtagattctaagtcccaatcattagttggagggaatgtgtcacttgatacagaagttgctccttacaaacacccaaattttgttgttgatatcacaggatag

SEQ ID NO: 6727 - DNA, 609 bp, Zea mays
  Peptide Sequence Number=SeqID_50102
atggtgaccaccagttcgatggtggggagaagcaagccgggctgcggcctctgccccgccctcagcttcaaggatcttcatcatccttgctgtggcggggggcgaactgagccggagttctacctcccgcatgggccggcgggccacctcttccttcagcattcaggggagagggcgctcaccggcctagcggagggggaggacttcaacaacgcggggccggttggcctcaagcgtcgtcagctccggcatgcctggctcgctggctcagctggctctagcgctgcttccggtgccacctcccaccgctggggcggagcgtggctgccggggtggccgccagaggaggttttttccgccgacgagaccgtcggcgccgcccgcggacagacctccggctctttggctttgacggcttgtcctcgcccctcgtgtggggacgtgggcgagggccttcctacagcagcatttgccctgaggagttcctcggctcggtcggccttgccactcaaggtttctcttgctcagttccagaaccttcggccgctctgcgatgagctggagccggaggcagcggtgtcggcgtggacagaggcggagtcggcttga

SEQ ID NO: 6728 - DNA, 501 bp, Zea mays
  Peptide Sequence Number=SeqID_50103
atggaggcccaggcccacacgtcatgtaaccggcgtgccggttactacgtgcaagaaactgcaccgccacttgtgccagtgccgcgccttctcgactgcagaaccagtgccgcgactcgaggcaaccctgcgcgtggcccaatagtgccaatcgagcacatcgatcacgggaagcgggccccgagccctcctactgatcaggggttcgaaggctggctcctcggaagggttcgacagccgccccagagcactcgggcttcaggctcattactgatcagaggttcgaaggctggcccctcggaagggttcgacagccgcctcagagcactcgggctccgcatcaggggttcgaaggctggcccctcggaagggttcgacagccgccccagagcacgtagagcgagggatgactctgggtacgtccgatacatggccgaggctcgggctacgctcccgaggtaccctaggacattttcgagaccagcaggagcgattttgtaa

SEQ ID NO: 6729 - DNA, 153 bp, Zea mays
  Peptide Sequence Number=SeqID_50104
atggggattggttgtctacgggataaaaatttgaataaggattatggttctctggaggacatggttgctggaatgacttggccgtccatcttgccaccgggttggactgtcgagtgggaccctgccttggctgaggaggagcatgaggagtga

SEQ ID NO: 6730 - DNA, 954 bp, Zea mays
  Peptide Sequence Number=SeqID_50105
atgagtttgcggtatgaccgtatttatacgccaagtgcgttgaaaattgaaagaccccgcctgtcagtgaatgttgctattctagcaaagggaaggtatctttggactcaagttggcaccacagtagaccagaataatacgaaggttgatacagcgccgaagttctactctcactcttgtgcttacgatgtcttttgtaaatggctcatattagatgcacgacacggcaacccggctgctggaggagacctagacgaagacgatgacgacgctgatggcagttcgagagacggcacggagctcttggaggagccagaggggtggatcgctagacccatcactcgtgatgccgctcgcgggtgccacttccacgacgctctcgacaccttgctgcgtcggtctttcgaccgacacacttggtccatcgagtaccgttgtgtagtctaccagcatcgccgcgggttatacccggaccagtgggaggctacttgcttggtgcgtcgtccggacgatgatctcctgggtgcagaggccttctcagagcactattctatcactgagagggatactgctcaggcggccatgcaagatgcagcacgacatgcactttctcagtattgctcgttgttcatcagggtagctgatggccttgacctgaagtactacccttgtcgttcgaccggcagcgctgggtgtgtgattgtctcacccgttggtgagggcaatcccaggctaaacagcatggtcaacctggtcgtcgtgctcaacaccgagctggaccacgcccttgacgagttgggcaaggttcgggcggaggttgcggaattccgtggtgagtgcgcatcacgccactatctggatggtggttctcccgcccatgtcgggattcagcacccttaccgttcaccgccccgtggtcgcttcgagtatggtaccccagagtgcaggacctag

SEQ ID NO: 6731 - DNA, 117 bp, Zea mays
  Peptide Sequence Number=SeqID_50106
atggtttgtttacagatcatgaggaggaggatggttatgattatgcttatggtaatggttgcctttggtgcaacctatgctcaggagttccaggacttcgatgagttcgaggattag

SEQ ID NO: 6732 - DNA, 195 bp, Zea mays
  Peptide Sequence Number=SeqID_50107
atggggctcggtgtatgcggctcgctctgccaagccaagggagctccattgattagagatacctgcatcagagatggtttgtttacagatgatgaggaggaggatggttatgattatgcttatggtaatggtaaagaagaaggcatcgaggaggatctccaggagttccaggacttcgacgagttcgaggattag

SEQ ID NO: 6733 - DNA, 540 bp, Zea mays
  Peptide Sequence Number=SeqID_50108
atgacttcccacggatcctcagaggacggaaatgcactatcccacactgacgggcttgcacgagagggttttccccgcattttgtgggaggtacttcagggggccggatacacgacaccccctcagtacgtggtgcagcagttcgagaagcaccgagtgccccgctgtagggtgaggatgaccttggagcctcatcccctgcagctagggtggcgctctttggactccgagtcttttggataccgagcggaggacacgatcgaggcgattgctctgcatggattgaccactttctgcggattccatcctttggagttggctacacaccccattggcttgttcccagccgagagggaggacgacccaatggaggagcttgtggttgacttgtccactgaaatggtggaaaaggacttgcaggtggagcagctatccactgatatccaagagttggaggagctagtgggcaccagggagaacaccatcgaggttctcgaggatcagctcattaacacccagcagcagcttgccgaggcctaa

SEQ ID NO: 6734 - DNA, 1641 bp, Zea mays
  Peptide Sequence Number=SeqID_50109
atgggaggacttggggtttccgatggctttgctagagagttgatgaggacgtgcgcggccccgggggaaaggatgtcttcgcccgagcttcgggagtcttcggctcggatgctgaaggttaccgggggtcgctggcctaggaatgttcctatcccccgcgcggccagcgggggcgtttttacatctcgcatggttcgcaaatggagagtttttccttacgggcggaatattgctgttgttgtgtcggcagtgatggacaaggatcgccagggggctgcacaaaagcggcaggcggctatcaggattgttgaagccaggccaaagaggcaaaagcgggggtcggcgaaggatgcggcccccggcggaggcaagccgccgctggcggcgaagtcaggcgtccctgcatctagcaaggcgccagaggcagcggcgggcgccggaggctccagaccggcgaaggctgtgccgccgctcaagcagggtggcgggagggccgcgaaaggcggcccgagcgttgccgtcggcagggcaagcgtgtcgccgacttcgccaccgacattttttttaattcgttgggacgaggcggacgcagcgacccgccggctgaaggaggtgacggaggcgctgagtcaggtggctgacttcgccagccgtactgcgtcgggggccctcacggcagctgtgtctgccgaagtcgagagacttcggacgcaacatgctgacgctgtctgtgagaagtcagcctccgacagcaagtgtcgtaaactgacggacaaggtggccgcattggagagggagaaggctgacctccggcgccaactggcggcggagaggagggaggccaacgaggccatcgccaaggagcaggctgcgcaggcggaggccaagctggcgcgggcggagggcaatcttgccaaggagctcgccgaacatctgcaagagcggctcaccgccctggagagccgcgcgaagggggccgaggccgcgatgcgtgcggaggccgaacggacgcgcacgcagcttatggatacatatcgtgagctgggaggagctgctggaactccccgctgtcgtggggggggggggtttatgtcgtacgcctccctggttacctgcgagggggcgatgaacgcgctctcccgcgaagggtgccggcacttcgaggtcttcgaccaggcggatgaagattttgatcgagatgtctataaggttgaagacctcgtggtgaaggattctgccggggccctctacgaccggatgtggggtccgcacggtcgcgaggtggtcagggagcgggcggagacggcgatggctcaggcgttgcgtggcgagcgggtggacgacctcggggcgttgaatagcgcgctgcctgacccggagccggcccctgcggaggccgtgtccggggtcgccctggagccaaccccggagaccgcggcgatcgcgacggctgcccccacatctgctgcggccggcgaagacctgcccccaaaggtggccgaaggcgaaccggatgcccccgcggccgctgcgccgagtgctgaagatcccgcggcggtggcggcagaaacaacagcggaagcagcggcggagccaatggcggaagctttcgcagtgccagggccttcgcaggtggcgtag

SEQ ID NO: 6735 - DNA, 618 bp, Zea mays
  Peptide Sequence Number=SeqID_50110
atgacgcatttcttcaacagcctcatcgatcttcttctaaagatcggcgagacgaagcatcttctcccttttcctctggacatgttgaggaatagcttcgaggtccctgatctcttggtccaactcttcctcctgtggggtaccccttactacagcattaaatacatggtgcccgcgccgctacctctagtcgcgcggggctccaaagcccagacccccttgggagaggtccggacccctctgagcggggtccaggccacccacggcgaggcgatgtgccgccttagcatttattgtgacctatccactcagctggcaggcggcgtccaggccatcctgcaggcagcgtgcctgtccagtccattgccaaacagacgcaagaagattgctccagcagcgaacattagtagctccaagtactacatctgttatgttcctgggcccacatgtcggggctcggtacccttcatgatggtgcaaatcgttgagcaccgcgtcgagacttcaacggacttcctggtgaaagaagaagttgtttcttccacgccacaggttcccaatcgcccagttccaggcactgtcgctatgcacgctgcacggcagcatactactgcgtag

SEQ ID NO: 6736 - DNA, 402 bp, Zea mays
  Peptide Sequence Number=SeqID_50111
atggcacccaagaaagctagttcgaaggcagccccgtccgtcgacaaagcagcgaaggcagcgctgctagccgataaaaaaggcaaggccctcgcagacaacacccccaagaagcatgcgaagacaaagctctcagcaagagacaacgccaccaacaccccactcccaaaggcaccctatgcacctgcagctccggagaactaccacaagcacaacccctgggcttcactccaccagagggcgaagacgcaacagaggacggcgaagtcatcggtgtctcaaccgaagaatagctatagctacgggccctgcgcatcaagaaccgcaacctccaaaaacagaaaggcatcctcgaggccaagcgccaacgtgtcaccgcgcaagccaaggtgtgacagatga

SEQ ID NO: 6737 - DNA, 183 bp, Zea mays
  Peptide Sequence Number=SeqID_50112
atggctcccctgctcccgtcgggacttagcacccgtaccgctcacctcagcatggacaccatgcttatgatgtcagacaacaggcgcagaggaggaaggcgtgctcagcaggagcagacagcaccgcaggatgaggcaccccggcagcagctgccaccaccacccccgatgacgatagagtag

SEQ ID NO: 6738 - DNA, 1173 bp, Zea mays
  Peptide Sequence Number=SeqID_50113
atggacaaggatcgtcaagatgcggcgcgaaagcgccgggcgttcactagggtcggggaccctactcgcgaggtgaagagggcgcgaggaggagcgaagtccactgcccctggcagtagcaaaccaccgccggctccgaagccggccgtccccgggcccagcaagtcttcggcgggtgcgagggctgctgcttccggcacgggcaagccgccctcggctgaacccacgaaggagcgaaggtcgccgtcgccggtgcacgccgatgatgcagcggcaggtggtgccgacttcgacacggacatctgcgtggaggattaccgcgtaggtggtgtcatgatgtttgatgcccacacgggtcggggactcgttggtgagttttttttgcaacggagaccgggtcttgaacaagattatggtgcagggtcggatgcggggcaactggctgttgtcccgggtccggtggcggccacttcgcctacggcggcggttggagcgaagggcacttcgcaagacccatggtccaaattctgcgccagcggcgagttttcgtcgcctgccgccgccaaagacgtggcgggctctgtttcccagcagctgaggcatgtgtcgcagcagctgaagcatgcggccgccttcgccgaccatattgcgtcggatgatgttcgggacaagtcagctgcggaaaacaagagccacaggctaacggagaggttggcggctgtggaggccgagagggaggatctcaggcgtcagttggcgttggagaggaaggacgcaaacagagcctgtgctgaggcgcaggctgcacaagtcgaggccaaacttgcgtgggcggaggccagtctcgcctgccaacacaccaaggagatggagacaaggctctgcggcctgcgcgaccgcctggacaaaatagaggcctcgacgcgcgcggaggtcgagcggacgcatgcgcatctcgtggacgcgtaccgggagctaggtgcgtggaccgctcccttcgaagcgcccggtcaagaggtgggcctctgcttccttgggtggctacaggaggagctggaggtgctcccgacaattgtgatgggcctcatgtacttcgcctccctcatcacttgcgagggggccgtgaatgccatgtcccgcgagggatgcgggcacttcgaggtcttcgactag

SEQ ID NO: 6739 - DNA, 490 bp, Zea mays
  Peptide Sequence Number=SeqID_50114
atggcgcatgacaaagaggtcgaggaactcggtgatctaggtagcacactgcccgaggcatcgaaggtgaagctaaaaccgccattcgatgcaggcgagggccccttggcgacccccgcgccgactggagctggcgaagaccccgtgccggccaatgtgccgacaggtgaggacgtttcgaaggtggtgggcgaaccagctgccgaagacccagcggcgtcggcccaggccttcgcaggtggtggaataggggctagggctttcggtgagtcctcggatgaaggcttggattattttgctgcgttaggtgtggccgcagcggagtctttgtcgcgggtggaggttggcgaagcggccgatcttcctagtgcgagtactgagtatagacgacgaagggtggtgtcgaaacacagtgtgggtgagggttcgcgaagtggtaggcgccgtcgtatggggatggagtgtggccgtcttcgagtagatcggactg

SEQ ID NO: 6740 - DNA, 153 bp, Zea mays
  Peptide Sequence Number=SeqID_50115
atgacccagctcttcgagttctacgaagctgaagaccctgagcatctgtttgatgatgatgaggatggttatgatcatgcttatggtaatggtaaagaaggcgtcgaggcggatctccaggagttccaggacgtcgacgagttcgaggattag

SEQ ID NO: 6741 - DNA, 591 bp, Zea mays
  Peptide Sequence Number=SeqID_50116
atggctaggggattgaagaagcacttgaagaggctcaatgcacccaagcattggttgctcgacaagcttggcggagcttttccatcttctggacctcacaagtccagggagtgcctgcctctgatcctcatcatcaggaataggctcaagtatgcactgacgtatcttgaggtcatttctatcctgatgcaacactatgtacttgttgatggcaagatgtcatttccatccctaagacaaatgagaactacaggcttcttccgtcttcacccaatcagggatgaggatgccaagttcaagctctgcaaggtgaggtctattcagtttggccagaaaggcatcccctacctgaacacctacaacgactgcaccatccgctaccccgacctgctcatcaaggccaacgacaccatcaagatcgaactggagaccaacaagatcatggacttcatcaagtttgacgtcggcaacgtggtcatggtgaccggcgggaggaacaccgggcgtgtaggagtgatcaagaacaaggagaagcacaagggcagcttcgagaccatccacgtgctgcttggagctttttgctatgtctag

SEQ ID NO: 6742 - DNA, 105 bp, Zea mays
  Peptide Sequence Number=SeqID_50117
atggttggtttacagatgatgatgaggatggttatgatcatgcttatggtaatggttgcctttggtgcaatctatgctcagatgccccctgaccatagcctttag

SEQ ID NO: 6743 - DNA, 168 bp, Zea mays
  Peptide Sequence Number=SeqID_50118
atgaccgtgatgggttcaacatcggaaaagatgtacctctgccagactaataccagaaaggccaacacgcaatgggattggagaggttgcgagagtagagtgtaccctccatggcaagaggctgacggtggtgtatctgtgctctcggttggcgtgaacccggtctag

SEQ ID NO: 6744 - DNA, 369 bp, Zea mays
  Peptide Sequence Number=SeqID_50119
atgggcgcgcccgcctcggccgcccgggcctcggcaccggactccggccgcccccgcggatcggccgcccgcccggcctttcggcgaagctcgcgccgaccccgccccgaccccggcctcggccgccccgccccagtcgcgcccgggccccggcgcgtctcgctccggcgagcccgcccctcgccgcgccccggctgccccggctcggccgcccccgcgcgagccccgctcggccgccccatgccccggctcggccgtccccgccgcgcccgcctcggccccgtgccgtcccggccccgaccgtgcccctcgccccgcccgtgcaccgtgctcgcccgctcgccccgctgtgccttgctcgcgtcgtga

SEQ ID NO: 6745 - DNA, 855 bp, Zea mays
  Peptide Sequence Number=SeqID_50120
atgtggcatgatcacacctcgacgcacgactatgacaccaatcagcgcaagaaggacctaaagacgtctcggaagatggtgctgaacggtagcggcttccagagcagcaacacacagacatcgacgagcaagcatggggagaacccatcgatgtcgaggagcgacgacaaacacgcgcgcgacaatgaacctgtcttcgatgcatggcctattttttatgaggatcccaacagcctcatcaacgatagtggccacggaaatttctcagtctttctttgggatgatagtgttcatgcgaagaacaacttggggacaagctgcatttcaaggagtggggaatgtcagttttccccttatggagatatgccgccgcgtacgaggaaaaccgcacgtaagtccactggacctattggcgtacctcggcatcagttggctccaagacatgaagggagcagcagcggcagtaacgaccccattggagacctagaagcccaagtggagcagcttcggatggagttacgtcaccgaaacagggtgtgggtagaagatggtcaacgtatgaatgagttgagagctgatgtcagacatctgcaagacgagcttgctgaacgggatttggaaatcgatcgggctgtcaattcacgttcgattgcttgggaccgggaagccaaagctcgtgcttgtgtggcagagcttagtgcggccattgacaacttgcggatgtattgcaatactttacatgaggaagtatgttggggacttgttctcaaatgctctgaatcaagaacaaggcaacataaaatgttaaatgttaatgcccttcgtccaacgaagcattattcccttaaggattaa

SEQ ID NO: 6746 - DNA, 1410 bp, Zea mays
  Peptide Sequence Number=SeqID_50121
gcctggtggtggaattccggcgctcatcctagacgaggcgagtctgtgtctcccgctgaggaggcggcctgacttcgttgaccgcgtggcgtcgggggcccttacggcagttgtgtctgccgaagtcgagagacttcgggcgcagcatgctgacgccgtacgggaaaagtcggccgccgatagcaagtgccgcaaactggcggagaaggtggccgcgctggagggcgagaggactgaactccggcgccagctggcggaggagaggagggaggcgaatcaggccctcgccaaggcgcagtctgcgcaggcggaggccaatttggcgcgggtggagggtagcctcgccaggcagcgcaccgaggaatgggaggagcggttcaacgctctgcaggcccgtatggagagggccgaggcgtctacgcgctcggaagttgagcggacgcgcaaacagcttatggactcataccatgagctgggcgcgcggaccgctgacttcgaagtgcccgaccgagagtcgggccttcgctgcctcgagtggctgcaagaggagttgcaagagctcccgaccattgtggagggttttatgtcttttgcctccctcgtcacctgcgaaggggcgatgaacgcgctgtcccgcgaagggtgccgccactatgaggtcttcaaccgatctgatgaagattttgagcgcgagatctaccaggtcgaggacccgtgctttgaacaagcgcgcgacccaaagccgagacgaacccggtggtgggccgaggctgaggtcgtcccggcgccgcccccggaaaccggcgaaggctccctcgccgctcctgtggctactgcgtccggcggtggctcgtcgccaaccgctgtgccgagggctgaggatcccccgaagacgtcgacggagctggcggcggaggatcccacggcggctgggccttcgcaggttcaagattttgggcctgcgcacgcagccactactgctagttttgtggcggcttcgaccgtggatggtgggaatgaattggatgagtctactactgagttttctgattttggtgactctgggagttcggttcagtggacggaagagtcgtcggatgaggacttggattactttgcggctttggatgtggcagcggcggaggcttcgccgcgtgctgcggatgctgaagttgtgcttggtccgagtgctgggcgtaggcggcgaagggcagttgcgaagcgtagagtgagtgaggcggacggtggtcggcttcgtgtgggcagggctggcaagcaggaattgttgtcctcgccggccattgcgagtgtaggtgagggggagctgcgaagtctttttgagggcgaggagctgaggataatgctatttaactatagggagatgggaatcattccgaaggttgaaccgat

SEQ ID NO: 6747 - DNA, 633 bp, Zea mays
  Peptide Sequence Number=SeqID_50122
atgaccgttggtggaggctgtctgtcgtatggtgcaccggacagtccgctcaagtataataaaactggcagagagaatgactgcttgcctagagttgggcattggaatatgatgaacaagggaccgacgaggagggacgcgacagcgctggacccggagcaggtgcagctggtggagcttgccctgggcgcgcttcgtgagaactctatcgctgatgtgttgtatttgcagtggctcgtgctacccgagacgaccaagctgttgggatccattgcaattgggttgaagacaaaggatggtgttgttctcgccattgagaaacgtgtgacctcaccactgctggaaatgtgtggttttgacgaagaagcgaagtcatataaggatcctagcgcgatagagttggttcttatgccatggagatactctacaggctatgtacttttcgttattaatcatgcaaacaaatttgtgtctgtgtttaatttcacacctactccagaatggtgcaaagatataccactaaaaagattttgggaagttattcttcttatttcgaagaaatataaagttgcatacggtgtcaaacgtattggatggtcacatgacatttatatgtggcgacattcaatttga

SEQ ID NO: 6748 - DNA, 168 bp, Zea mays
  Peptide Sequence Number=SeqID_50123
atgccgtacgcgttcaacgactactatatcaaggactatggcgtcatcttagcaccagagcaacctatcgatgacttcatcgacgatggaattagcgacactcattacatccagcgcctccttcatgacgggatcggcctgggggtcgtatggctcgggcagcggtga

SEQ ID NO: 6749 - DNA, 198 bp, Zea mays
  Peptide Sequence Number=SeqID_50124
atgagtgcaaatgtctacaaatgcaaggatgacttctgccttcatacctctaaggatatgaagccgcattgtacccctcctcgggcaacgtacgatgctaaaaatgtaccgcgtgattcaaaacgatacttcaacttcatccaagatgggaatcaaccacatatatcattaccaaattatgatcatccacaatattag

SEQ ID NO: 6750 - DNA, 192 bp, Zea mays
  Peptide Sequence Number=SeqID_50125
atgtccggtggtgcaccggacactatccggtggcacaccggacagtccgactgtaaccttgctgacagagagtacttcctcgtgccggagcaaggagctgctcaggaggtagccccggatccagcaccagagtctgcaccagaggacctgcctgccactgctttggaaggcaagccccggttttatgcataa

SEQ ID NO: 6751 - DNA, 111 bp, Zea mays
  Peptide Sequence Number=SeqID_50126
atggtcctcgaggcggtggcggcgctgcagctcgtcaagggccccgtcggggtcatctccgtctgcggccgcgcgcgccagggcaagagcctgatcctcaaccaggtctaa

SEQ ID NO: 6752 - DNA, 423 bp, Zea mays
  Peptide Sequence Number=SeqID_50127
atggggctcaattcgccgttgaaccatggcagaagcgagcttccacgtgttcgacgcgggctgacatccgggagcgcgctcagagcacgcccgagccgccgacgacccccgccgcctgtgttcgtggccagggtagctctgaccacctccgacgccgacccgcacaccgacgtgaccgtcatgacctcccggacgtcactgaccaccccgccggagctctactgccgccgacaatacaaatccactatgtttatcctcaataaaaacctaagcctgaaagactgtaaccttgctgacggagagtacgtcctcgtgccggagctaggagctgctcaggaggtagccccggatccagcaccagagtctgcaccagaggacctgcctgccactgctttggaagacaagccccggttttatgcataa

SEQ ID NO: 6753 - DNA, 471 bp, Zea mays
  Peptide Sequence Number=SeqID_50128
atgggcaagagtaacaaacgcaagcgcgagccgactcctccgtcggaggacttcggcgactcggaatactcggaggaggagttctcctccgagtccgaggggtctccagctcccgtctctcccccggcgtcgtctgatgattcagacgactcccaggggattgccgcggaagtctggacgtacatccgggccatcgagcgctccgggctcgagggctcggatgggtcggagtactcctcggatgaggaggactcggacggcggcgaggacgaggatgacgacgacgacgacggtgacgacgacgacggtggcgacggcgacggcagcggcagcggcgggggcagcggcggcggcgacgggagcaagggcagcaccagaggcggcagcagcacgggcagcaccagaggcagcagcagcaagggcagcaccaagggcggtggcggtggcagcagcagcaaggccagtggctaa

SEQ ID NO: 6754 - DNA, 366 bp, Zea mays
  Peptide Sequence Number=SeqID_50129
atgactcggctcgaggacgagttccgccacatgctgttggcgcgcgtgctcgacctcgagatcgaggcgctcgccggtctcagctcgctttcgatggccaacgaccggagtaactctgacgccacagaagcggccgctggggaggaagacgacggctccgtgtcgtcctccgtcgacgggcgcagcagctaccgctccctgcagagcatccgcgagattgacctcttccccgtggacgcaatctccgacctccatacaaaagtccggtctgctcatgcatgtcacccatcaccgataatgagatctgacattattttgtttctgaaggaaggatcacggttgaaagtagactatgacgtgacctag

SEQ ID NO: 6755 - DNA, 2799 bp, Zea mays
  Peptide Sequence Number=SeqID_50130
atgggcttcccacgggagctgatggttcagcgtatacagagcttagtggaggaggggttctgggacgcgctccgccgccacaagctcgacgtcctcggcaccgacgactcccccatcccaatcaccggtccgctcgcccacaaccccctctcctcgctgtttgttggtagaattcgcgatttatggcagggaatgaaagctgatcccatacatttccgcgccccgcttacgaacaattgcccagttccagggaccctcataaacactaataacatgaggggatttgaaaacctagatagagaacaacttctgaaagcagaagcaaagaagatcttgcatgacattgtgtctggtaaagtagaagaggatccttctgttctacttagattccttgtgacatcatttgctgatttgaagaattggaaggtctattacaatgttgcattcccctcattggttttcaactcaagaatcaccttgctcagcctgcaacctgcctcaaaagtgctcaccaaagaagaggcagcatccatgtatacatcattgcaaaagtggcgtacttctagtgaaacaacagattcctctgcctctataagacaacttaaggaatggaaagcttgccaggggaactatcaaaagctgctatttggattttatgaccatggatgccgctcagattgccctggctgggttcttagaaactatgttgcctttctgagcatccgatggaagattgagaaagcccagattttctgctaccgtgaatataaagggaaccctgatctagaacagtccctcattggtgaagcatcatttccatcaccttatgacaggttatcacatgttcgagttcttctcttgggtgctggaactcttggatgcgaagttgctcgccttcttatgacctggggtgtacggaaactaacggttgttgatagtggtagtgttgttatgtctgaccttgccaagcaatcactctacatagataaggattgtggagttccaagaccaatttcttatgaaacactacctggacttacctcagttgcatctggcaaagcagtggagctctttgctaggatgttacatcatcctgacgagatacgggccccaggcgatactgctggtacagaaacagaacatcaacttggtctattgccacatcagctacgaggatcactccccaagtgtgatttatttgtggagctcaacaattcctcagtcaactgtactgcatgttctgttgctgctatcaactatccagcatatctgaaagattttacaggcatttctgattcgaaaagaccagatacttgtcctaaaataccgcccaacatctctgtaaattcagacaagatttctgatgtccgatgtctactattgggtgctggaactcttggatgtgatgtcgctcgcattcttatggactgtggtgtacggaagataacagtagttgatagtggtcatgtagttgtgtcaaatttagcgagacaatcactctatacttctgatgaccgtggtgctccaaaagcaactgcaatacttaggcatctagtggagagatgtccttcagtggatgcacaaggcattaaaatggaaatacctatgcctgggcatcctgtgtctcctggtgaagcagcggcattagggtatgatagttaccttgtcatgcgacatggggctggccctggcataagctgtgaagcttccagtgtggtcactgccatagacaagatgtccacggaggatgcccttgggcgtcaaaggctggggtatcgtagctctcagcaatctagtcacttcattgaagataacataaatatcaagcggggtatccaactgcaggatgaagacttcctgcaccgaaacagccaactaatctccctcggtgcaccggtacacctgccagctccatatgccatcgtgccactgctcactgcaatcgcaaccatcccaagctgccgtcctcgcttgaagccaccctacccaacttgggcagctaaagccatgctcacccacccgcgtttggaccttccgagccgtcgttgcctcctacatgcacaggtagctgaagccaccatcgaatcgcttgtgcaagggcagccggagccacccatgtgtgcgagcctcgcgtacccgcgcacgagcagccagagtagagcgtcccacgcgcttgggatgagtcaacagcagactaggggagcatcagctcgcgcggtggtcgttgggaatgccaaatccggttatggactccacaaatctggcgataagcttgctaaatcgagttccggtgatctcaatgctgaggcgatgacctgtcccaaaaacacgagcgcagggaggaagggatacaagggagaagagaagagggagcctcaccgccgaggtccttgcaggctcgtctacttccacggccgcggggtctgcctcggcacaatccacgcgtgctgcctgtgcgtcgccaccgagctccccgcggtcgtgctctctgccgactaccgtcttgcccccaagcaccgcctaccagaagccatcgacgacaaatcggcgccgccggactgtgcccgcgtgttcgtgtccggcgccaacgtggcgcaccacgtcgcgatgcggtgcggctccgaccgctaccagccagccctcgcgcccacgcttcatgtcgccgggcgcgtcctgctgacgccgttcttcggtggagctgagcgcacgacgaccgagtccgagccaccggccggcgtgctcccgaccagttctggcgtccgtcgctgccggtgggcgcgtgctacgacccggcggtga

SEQ ID NO: 6756 - DNA, 1029 bp, Zea mays
  Peptide Sequence Number=SeqID_50131
atggccacgtctgtccgaggcgcgagaggttgcggggaccacgacctagcggtggtgacgaccttccgaggcgcgagcggtgatggttccggtaccgtctgtggtggcatccgaaaagaacaatctcctccgatgcggcgcatcagagggcgtcctccttcgatgaccacgttcgactcgttggcctctgaggcgtcctttgatctggcggccttgggattgtcctccgcgtgggcgtccaccacggcttcaccacgcctccgcctcgacaagcgccctctcccaccatggcaatctccctcggcaaaaaccccgcccgccaataccttgttcccccgggtggtggacgacctccgccgcctagcaccggcatcgtcgccctctgtcgggagcctgcgccgcaccttgtccgcgggcggcgtctgcaccgctgtggaggtctccatgactcggctcgaggacgagttccgccacgtgctgtcggcgctcgccggtctcagctcgctttcgatggccagcgaccggagtaactctaacgccacagaagcgaccgctgtggaggaagacgacggctctgtgtcgtcctccgtcgacgggcgcagcagctaccgctccctgcagagcatccgcgagattgacctcttccccgcggacgcaatctccgacctccatacaaaagtctacaaacggcgacgaagacaatcctctaccaagaagaggactgatcgattgagacagatggacggcggcaaggggagcgggattggtggcaatgatggcaagagcggcgatggcaagaccggcggcagcgctgtcaagggaggaggctcctactccgggggaggcgcgggctcgggcaactcaggtgtcggagttgcggggcatggtgatggtgctgagaagtcgggctccggccgcgacggcatgatgaaggctcccggcggcggcggctacatcctccgctccgacttcgaggccaacccgaaagagttcttccagggcctccaccagggaggaggcaaaaagtag

SEQ ID NO: 6757 - DNA, 756 bp, Zea mays
  Peptide Sequence Number=SeqID_50132
atgtgggatctaggcgtcggggtagctgcaaactccaagagcttcaccaccaccgtcggcctcgtgggagctcttgcctgtcttggctctaccgtagatgctggtgccgcgcgggaggttgtaggggaaggcgaggacgacgaggtcagtggtggtgagaagcacgcaggggaggaggaggtaggtgacgtgccagggtatcttaccggtcttagtagtgcatgcgaaggatgggagggcggagcaacatttggagtgcggatggcgagcgcggctcctgttgatgttgggcgagccgggattagggcgaggttaggcgcgtccgagtggtggcgaggaaggcaagagcgcgcagtcggcgccggaaatttggatggtctggtggcgaggaggctcaagggaggcacatacaaggatactgagacccgacatgtgggcccaggggaaaaatggaaggaagcacgccgcctgcggaatggactggtcgccgcctgccagcggaatggacagggctcaataaatgtcgaggcggcacatcgcgtgccagtggaatggacatggctcattaaatgcggaggcggcacatcgcctgccaatggaatggacaggcggcgcgccttatccgcaataaatgcagaggccgcacagtcccgaggccctacgtcaggctccgcccgttggcttacgtcacgtgtagtaggccacgcggtagcatcgggtctccgcctgagcggggagcagaagctcatatggtaa

SEQ ID NO: 6758 - DNA, 258 bp, Zea mays
  Peptide Sequence Number=SeqID_50133
atgggtgaagagttcgacaagacataccttttcgagcagatgaacaacagtgggattactgaattaggggaaagcgagaagacatcttctattcaaaaaatacttaagctaccagaaaaactcatggaggagctgaggaaggagtgcctgcagaaggggacggaactagggcaggcggtggctgatgccctcttcgctctacaacccaccgaggatcgcgatggccctatcgtatacctcccaccgcccactgtctga

SEQ ID NO: 6759 - DNA, 357 bp, Zea mays
  Peptide Sequence Number=SeqID_50134
atgggtcggcgcgagacggagcgcgaaggggggaaggagccggagggagacgggcgtgagaggtggaatcccgcggccttcgtgtttgtcccgcgccctggtcggcctgagtcagcttggggtagggtaatgatggcgcctcctgttgacgtggtcggtccgtgccctgggttgggcgatgtggaggctcctccgaggttgaggtcgagtctgtcttccaaggtcaaggtcgagtccgagcccctgggtcgggcgaggcagagaccgtcggccgaggccagggctgagtctgagccctggggtcgggcgaagcggagttcgtcgtcttccggggttgagctcgagtccgagccctag

SEQ ID NO: 6760 - DNA, 270 bp, Zea mays
  Peptide Sequence Number=SeqID_50135
atgacccaattggagacctggaagccagggtggaacaactccgctcagaactacgccacaggaatagggcacatgccatcacggactcgcgcacatgatggtgcggggacttcccgcaatggggaggatactcccaacccaccacaagtaccaccgactttggccaaggctatcgctgccctggtcaatgccaccatggataatatgcacttcttgcgcgaaatgacaggcaaccaattccagccgcacggaggcagagttcccccataa

SEQ ID NO: 6761 - DNA, 369 bp, Zea mays
  Peptide Sequence Number=SeqID_50136
atgttggacgagaccgcgggatgggacgacctcgtcataggccttagtcctgcgacgtgtgggacgaagggtaaagtctgccagtcgtcttgtctccgttggtgcagcgagtttggcgaaggcatcgagcgaagggtggcgtcttcgccttcgccccaacaaatacctctaccaaaagcctcaaccatgcctccatacaagataacatccaaggtaccacctttgaacagaaacagcaaaactctgttgtttcctcacctacaacaacatgggttcgaaaaccttgagtacggagtgtactttcgcaaggcttacccgacaaaggaaaaagactctcaaggatatgctggcttgagggagtcaaggtaa

SEQ ID NO: 6762 - DNA, 657 bp, Zea mays
  Peptide Sequence Number=SeqID_50137
atggctcggagaaaatcccaaaagaacaagaagacaccaccgaaggagaacaatgaggtaactcttgagatattacttttcgattgctctaattatgcttcatggtgtactagtgtgataaatgcttttaggaccatggacccacaattagaacaaattttagacaagagtattataccttctagttatgataagaaaaatgcttctaaggaagatcgaagatgtttacgcttaaattatcttgcttatgacatcttaggtaattctcctaacaaagaagattattatgccttcataattagatatgatgaacatattcatgatgcacatgatatttggactagaattaaaaatagatttgatgagtccaaacatgttagttcatatgatgcttctacttcctttagtccttgtgaaactaaccctttaaaggaacaagaaaatgaacgttggagaccaaacgatgaatccacctctccaaaagataatcgtgatgacatggtgaagaagcttgagatgggaataaccgtggcatgcacaagatccctcgaggaaaaagtcaaggacttgaggaatgtcaagaggagggaacaaaaaaggaaaatcaatactgttggaacttgctctcctgggcaagttgatccaacgtgggagtga

SEQ ID NO: 6763 - DNA, 84 bp, Zea mays
  Peptide Sequence Number=SeqID_50138
atggaattcaattccaacgaaacaaacgggcccttagcgtttttcagtaccatcagtgatagaggttttgtgggttcctactag

SEQ ID NO: 6764 - DNA, 300 bp, Zea mays
  Peptide Sequence Number=SeqID_50139
atggcgtcgatgtggggtgcgctgcgcagatcgacgtttcgggagtcgaaggtcaatggcacatgggaccactttgtctgcacgactggaccggtgacagcgacgtggttgatgctgcgtcttcttgctttggggcttgggggtgatggatgttttgctattgctggtgtggaggtgggtgtgggggaggtacgatttgtacctcctggtggtgttggtatgcgtggtgcggtggatgcggagcggggccgtggttgtatggctgagggggttgctgatatgtgtgcgcgacaactctag

SEQ ID NO: 6765 - DNA, 2436 bp, Zea mays
  Peptide Sequence Number=SeqID_50140
atgccctccctgggtgggcggaaagtgcgaagtccgctttttgctttggatgtgcgagggcgggatcctgccacggttgtgcgtgaggcggaggatggggcggtgcgaattgttgggcgctacgtgccgaagacggaggctcagcggagctgggatatacgtggatccaacgacctcctgaatagggtcttcgagttgaattgtttgctgtatggcggttatcctggggaagacgttgtcgaccgccgcgggaaaaaaccagcggctatgactgaagacaaccccgcgccggaggctgccccagccactaagaagaggaagctaggtactgcggtgggaggaccgggggtctctgatagttttgctatggagttgatggggacatgtgcggcccccgggggaaggatgtcttcgcccgagctccgggagtcttcggggcggatgctggaggttactgggggtcaatggcccaagaacgttcctatcccccgcgcggctggtttagacttctttacgtctcgcatggctcgggacttgagagtgtttccttacggacggaatattgctgctgttgtgtcggcagtgatgaacaaggattgccaggatgctgcgcagaagcgccgggcggtcatcaggctccccgacgctaggcgtgaagcgaagagagcgcgggggagtgcgaaggctgccgtccccggtggtagccaaccgatgctggctgtgaagccggccgcgcctagatccagcaaggtgccggagagcacgaaggcggtcggcgccggcggaaccaagtctgccctggacggagccgcgaaggtccgggagctgccctcgccggggaaacgtgttaccgacttcggcacgaatattagcgtggacgactatctcgttgggtcgggcgaggggcaactggttgttgtcctgcctacggtggcaaccacggcgtcaaccgcggtgcttggggtgaagggtggcgctttcagcgctggcggcgagatttcggtggccactgccatcaaggatgaagcgggcactatgtcccgccggctgagggaggcgtcgcagcagctgtcgcaacagctaagtcaagcggccgacttcgccgatcgcgtggcgtcggttgcccttactacagatgtgtctgccgaagtcgagagactttgggcgcagcacgcggacgccggccgggagaagtcggctacggatagcaagagctgcaggctgggggagaaggtggccaccctagagggcgagaggacggacctccggcgccagctggtggaggaaaggagggaggccaaccaggccatcgccaaggcgcaggcggaggccaaattggcgcgggcggagggagtctcgccagccaacgcaccgaggaatgggaggtgcggttcaaccctctgcacgcccgcatggagagggtcgaggcctctacgtgctcggaagttgagcggacgcgcaaacagctcgtggactcataccgcgagctggggattcatgtcctttgcctccctcgtcaactgcgaaggggccatgaatgcgctgtcccgcgaggggtgcaatcactatgagggcttcgaccggtccgatgaagactttgggcgtgaaatttttaaggtcgaagaccctgtggtgaagaattccacgggggccctcttcgatcggatgtggggtcctcatggccgggaggcggtcagggagcggtctgatcgggcgagagagcagatggcgcatgccgaggatgtcgaagaccttggaggtctaaacagtgcgccgcccgaggctgcggagggcagaccggtgctgccctcggatgctggtgaaggcccatcggacgtgcccgtgcctgctgctgccggcgaagaccctgtgtcggcccctgtgccgacagtcgaaggcgctcaggaggtggtggcggagccggcggtcgaaggccctacggccgcggacgcgcccacgcaggttcagggttttgggcctgcgcacgcaaccgctactgaaagtgctaattttgtggtggcttcgaccgtggttgcggaaaatgattcgggtgattctgtgtctaagttttttgagtctgatgattctgggagttcggtggtgtggactgaagagtcttcggatgaggacttggattattttgcgacattggatgtggctgcggtggaggcttcgccgtgtgtgatgggtgctgaggttcctggtccgagcgctgggcgtaggcggcgaagggcggtggcgaaacgcagggtgagtgaggtggagggtggtcgtcttcgtgtggacagggctggtaggcgggaattgttgtcctcgccagctggggcgagtgtaggtgagggggagttgcgaagtctttttgagggtgaggagctgaggataatgttgtttaactatagggagatgggtatcatcccgaaggttgaaccattgtaa

SEQ ID NO: 6766 - DNA, 606 bp, Zea mays
  Peptide Sequence Number=SeqID_50141
atggctagtataggccaagtgcttgaacgaatccgcccaagccccttcgggagtagctccaattcgacgaatccgccgccgggagtgagggaggaagccgcctggaaggacctgatgctgccctgtgccgccggccacaggctgcttcgtgggggcgccccgccgggagggaagaagctagccgccaccgagagggaggaatccgcgagcagttggtccgcgctcttcttcgcatgccaaggcgacacgctggggatcgagggcctcctacgcagcggcgtcgacgtcaacagcatcaacctcgacggtgacaccgcgctgcacatcgccgcgtgcgagggccaccgcgacgtcgtcagggtgctgctcagctggaaggccaacatcgacacgcgcgaccgctggggaagcacggtcgcctcgagtgcctctaggaatctgcgagccgctgctccgtgccgggagggaggaaaccagccgcggggagggaggaatccgcgagcagtggaggcgaccggatccagaggccctgctcacgctctagagcccctgctcacgctcaaattcttgacagcagcaacagtctcctccaggcaaggagcataa

SEQ ID NO: 6767 - DNA, 195 bp, Zea mays
  Peptide Sequence Number=SeqID_50142
atgaaggaggaatccgctgccgccgggagggagaaatccgccgccgatctgcgagcagttggtccgcgcctcgtgcctctaggaatctgcgagcagctaccccatgcctccaggaatccacgagcagctggcccgtgcctcgagtccgcggatccgatcgcctccactgctctgtgcctccagatgattgcttaa

SEQ ID NO: 6768 - DNA, 813 bp, Zea mays
  Peptide Sequence Number=SeqID_50143
atggcgcctcctgttgacgtggtcggtccgtgccctgggttgggcgatgtggaggctcctccgaggtcgatgtcgagtctgtcttctgaggccgaggtcgagtccgagcccctgggtcgggcgaggcggagaccgtcggctgaggccagggctgagtccgagccctgggatcgggcgaagcggagttcgtcgtcttccggggctgagcctgagtccgagccctgggttcggacgaagcggagttcgtcgtcttccggggctgagcccgagtccgagccctggggttggacgaagcggagttcgtcgtcttctggggctgagcccgattccgagccctgggttcgggcgaagcggagttcgtcgtcttccggggctgagcccaagtccgagccctggggtcgggtgaagcggagttcgtcgtcttccggggctgagcccgagtccgagccctggggtcgggcgaagcggagttcgtcgtcttccggggctgagcccgagtccgagccctggggtcgggcgaagcggagtccgtcgtcttccggggctgagcccgagtccgagccctggggtcgggcgaagcggagtccgtcgtcttccggggctgagcccgagttcgagccctggggtcgggcgaagcggagtttcctatggcgcctgaggccgggcctggctgctgtcagcctcactctgtcgagtggctcagtagtcggtgcggcacaggcggcgctgtcctcttgtcagaccggtcagtggagcggcgaagtgactgcggtcactttggctctgtctactggagggcgcacgtcaggataa

SEQ ID NO: 6769 - DNA, 174 bp, Zea mays
  Peptide Sequence Number=SeqID_50144
atgaggatccagctcaagatggtgaaaatgaagatcaaaaggccttacagggtggaggatgcactaagagatctggattgggtgctggctatgcaagaggagctcaacaacttcacgaggaatgaggtaccaaatggttattccgcaacaagcaagacgagcatggtgtggtga

SEQ ID NO: 6770 - DNA, 174 bp, Zea mays
  Peptide Sequence Number=SeqID_50145
atggggagtagctctctccgggcagaatgggaatcacggcttgtgggtggttatgagatcgatgattctggttatgactatggtgctggttgtcagcattgcaaccactgctcaggcgaagatgaagctgtggaaggagacttccaggagttccaagactacgacgagttctag

SEQ ID NO: 6771 - DNA, 483 bp, Zea mays
  Peptide Sequence Number=SeqID_50146
atgtggcaggacgccaagaaaagcttcgcacatatgaacataaatggaaatttgcagaatggaattgggattcagatgggtcaaattaagacgatagaaatcaaggaggccgcggaaaaagggagaaatgggaagaccgagaccgcggagatgaaaaggaacataaattacggattcgtgggtatcctctgtcaggacagtgaccccatggcaaatccgccaagaacaaagctccctcgggggaaggaccccgacggatacgaggtggagaagtggatgaactcgaggcctttcgcttgggcgccatctcaactctactggcgaacagagcgggagccgaattgcagagaggatctggaggcaggaaagcaagaactagggcacggaaagcagaggcggctgaaagcgcagtacatatgggatattcccgagtcagataccgtttccaaaagcgcccagtcagcacccggcagttacttctaa

SEQ ID NO: 6772 - DNA, 285 bp, Zea mays
  Peptide Sequence Number=SeqID_50147
atggaaattaagggaagagaaataaaagatatggataaagacggagagtacatcctcgtgccggagcaaggagctgctcaggaggtagccccagatccagcaccagagccagcaccagaggacctgcctgccactgctttggaaggcaagccccggaatcctattgagctgaatactagttctctggaggagatggttgctgggataacttggccgaccaccctgccaccgggttggactgtcgagtgggaccctgcctcagccgaggaggagcatgaggagtga

SEQ ID NO: 6773 - DNA, 657 bp, Zea mays
  Peptide Sequence Number=SeqID_50148
atggcgccaaaaccacttgggttctataccaaaaatgtgcaataccacttagggcacccactggaaaaagttgagctcgagactcggacgaagacttttgcgggggactttgcaaagattcgcacgtatgcgaccgctgggcgacattttgaacactgggaagaaaacaaaccgccacgtgttcgacgcccgtctgccgcgccagagcacgcccgcgcgcgcgccccgcgccgcgcccaagctaagccagtgccctgggtccgcgtccgcggctataaaacgcccaggagcccttggccgtacccctccgcacgcgctcaagcctcaccggagctcagttcaccgccgtctgcccgtacacgacgtgcccgcggccacccgagcccctgccaccgtcgaccggccaacccagccactcccaaccctgtccagccctcggagaagactgtgcacgtctccgtgaagctccccgagcgaggaaccgggctctgcttcaccggagaggccggcccaaggtcaccggacttcaaccgaccgccgggcaaccgtggaccgaggtacacagtgaacctctcttcaattccttgcacggttagactccttggacctccacgaagctccctatgcccttggattgaactatgccaccgtggatag

SEQ ID NO: 6774 - DNA, 420 bp, Zea mays
  Peptide Sequence Number=SeqID_50149
atgggcaagaacaacaaacgcaagcccgagccgactcctccattagaggactttggcgactcggaatactcagaggaggagttctcctctgagtccgaggggtctccagctcccgtctctcccccagcgtcgtccgatgactcggacgactctcaggggattgtcgtggaggtctggacttacatccgggccgtcgagcgctccgggcttgagggctcggatgagtcggagtactccttggacgaggaggactcgcccgaggagggcggcgaaggtgacgacgacgacgacggaggcgacggcagcgacaacggtgacggcggcagcaggggcagcaacggtggtagcaggggcggcgacggcggcggcagcaggggcagcggcggcagcagcaagggcaacaacaaggccagtggctaa

SEQ ID NO: 6775 - DNA, 2439 bp, Zea mays
  Peptide Sequence Number=SeqID_50150
atggcgccgccgtcccagcccccgtctaactcaggggatccgctgtacccggagctctggcgcgcctgcgccggcccgctcgtcaccgtcccccgcgtcggcgacctcgtcttctacttcccccaggggcacatcgagcaggtggaggcgtccatgaaccaggtcgccgggaaccagatgcgcctctacgatctgccccccaagctgctctgccgcgtgctcaacgtcgagctcaaggcggagacggacaccgacgaggtctacgcgcagatcatgctcatgccggagcccgaggtagcctccctcccagctcggactatctatgctcggcaccaaaccgatgtgccggctgagaagccgagttctgcacctgctgcgtcgccgaggccagcagtcaggtccttctgcaagacgctcaccgcctcggacaccagcacacacggtggcttctctgtgctgcgccgacacgctgacgagtgcctccctcccctggatatgacccagtcgcctcccacacaggagctggtggcgaaggatctgcatggcatggagtggcgcttccgccacatctttagagggcagccaaggaggcatctccttcagagtggttggagtgtttttgttagttctaaaaggcttgttgctggtgatgccttcattttcctcagaggagaaaatggtgaacttcgagttggtgttaggcgggcaatgaggcaattgtctaatgtaccttcttcagtcatatctagccaaagcatgcacctcggagtccttgcgactgcatggcacgccattaacacgaagtccatgttcactgtctactacaagcctaggacgagcccttcagagttcatcataccgtacgatcaatatatggagtcggtaaaaaataattattctattggcatgagattcaggatgaggtttgaaggagaagaggcgccagagcagaggtttactggtacaatagttggttgtgaaaatcttgacccactatggcctgattccagttggagatacttgaaggtgcgttgggatgagccttctactatcccgcggccagatagggtctctccttggaagatagagcctgcttcatcgcctcctgttaatccactcgtgcattcttctagagcaaaaagacctagacaaaacgttcctccaccttcacttgaatcatctgttctcacaaaagaaggtgcaaccaaggtcgaaatcgattcagctcaaacacaacaccaaaattcggtcttgcaaggtcaggagcagatgaccttgaggaacaacctgactgaaagcgctgattctgattccactgttcagaagccgatgatgtggtccccatcactcaatgggaaagcccacactcattttcagcagagacctgctatggataattggatgccattgggaaggcgtgaaaatgacttcaaggacacccgttctgccttcaaggatgcccgcaccgcctctcaatcatttggagatacacagggtttttttgtgcaagcttatgatgacaatcatcaccgtctctctttcaaaaatcagggttcaactcatcgcttcgcagatccgtacttctatatgcctcaacaatcgtcagtgacggttgaatcaagcacaaggacacaaacagcaaacaatgacttgtgtttctggggtgaccagaatgctatgtacggcaatccaagtgaccaacaacagggtttcaactttggacaaaacccatcaagttggttgaaccagccatttccccaggttgaacagccacgagtggtcaggcctcatgcaacggttgctccatttgatctggagaagactagagaaggaagtggcttcaagatttttgggttccaagttgatacaaccagtccatctcctgtccaattgagctctccattgcccgctatccaggagcatgtgttacaaactcgaccatcggcaccggtgaatgaattgcaacctgtgcaaattgagtgcttgcctgagggatctgtaagcacagctggaactgcaacggagaacattcagcaagccccgcagagttcaaaagatatccaaagcaagtcccagggtgcttcaacaaggagctgtacaaaggttcataagcaaggagtcgcacttggcaggtcggtggacctctctaaattcaccgactacggcgaactccaagcagagctggacaagatgtttgacttcgagggtgaattggtatctggcagccaaaactggcagatcgtctataccgacgacgagggcgatatgatgcttgtgggagacgacccgtgggaagagttctgcagcatagtgcgcaagatctacatctacacgaaggaggaggtccagaagatgaactcgaaatcagctgcgccaaggaaggaggaatctccggcagcgggcggcggaggaggttgcgccgccgccacaaacgagtag

SEQ ID NO: 6776 - DNA, 696 bp, Zea mays
  Peptide Sequence Number=SeqID_50151
atgagagcgtccaccgaagcgaagtcgcttggtgggtcgaggccgaatccaaaaggcacgagatgggaatcggtcggtacctcttggtcgacgggcggtgacgaagttacgtcaggggcagactacaccgtcgtctcaggtgcgagggtgacgcccaacaagtcctttgcgagcgtgctggcgtcgtccgtttgcttggggttggcgttttgcggggagacggcgctcgtctttgtctcagacgcgagccctgggttgggtgaggtggaggctcctccgaggtcgaggtcgagtctgtcttccaaggccgaggtcgagtccgagcccctgggtcaggcgaggcggagaccgtcggctgaggccagggctgagtccgagccctggggtcgggcgaagcggagttcgtcgtcttccggggctgagcccgagtccgagccctggggtcgggcgaagcggagttcgtcgtcttccggggctgagcccgagtccgagctctggggtcgggcgatgcggagttcgtcgtcttccggggctgagcccgagtctgagccctgggtcgggcgaggcggagcttcctatggcgctcgaggccggactttgctgctgtcagcctcactctgtcgagtggcacaacagttggagcggcgcaggcgacgctgtcctcttgtcaggccggtcagtggagcggcgaaatga

SEQ ID NO: 6777 - DNA, 987 bp, Zea mays
  Peptide Sequence Number=SeqID_50152
atgaagctgtggaaggagacttccaggagttccaagactacgacgagttctaggtgtgggttagcggcaacccccagtcggctgcctgtgaaggccgcgatggctcgacttagacacactgcacgaaagtcagtcaaccccttcttaccctcccgccttgctgagcgtccgcttcgccatcccgtggccggacagtccagccacttggagagactacaccaccgcctgcgtgaggagcaggagcgtcgacgacaggagcagcagagctcttccttctcgcttcaccaggagatagagtctgtgaggagctgctcccctgtgcttcctctggagccgccccctgcaccaccactgggcgccccagcttctggagtagctgctggaggagacccagacgacggagatggcgacgacagctcgagccacgacaccgacttctctgctaaccctgagccggaaggatggcatagtcgcggggtctacccggaccgctgggaggcaacctgcttggtgcgctgcccggagaacagtctccagggtgcggaggcctgttcagagcactattctatctctgagcgggactcagccaaggcagccatgcaagatgctgcacggcgtgcgctttcgcactactgctcggttttcggtggggcagctgacgatcttgacctgaagtattacccccgccgtccatctggcagcacaagaggcgtgattgtctcacctgtcggtgaggacaatcctaggttgagcagcacagtcaacctagccgccgtgctaaacacggagctggaccatgcgctagacgagctgagtagggctcgtgatgagatcgccctgctgcgggctgagcgcgcggaacgtcgtcacctggatgatggttcccccgctcccgtcgggactcagcacccgtaccgctcacctcggcgtggacaccagccttatggcaatcccgactgcaagaccaagataaatctagaaccatag

SEQ ID NO: 6778 - DNA, 366 bp, Zea mays
  Peptide Sequence Number=SeqID_50153
atggacgtcgtgtcgcgccgcgagctcgatccccactgtcgtcgctgctgcgtgcctcgctgcgtgctcgccgggagcaagtcagttgtcactgcggcgcactcgctcttcgtccatcaggcttcttgcgtgctcgtgtttgccgtcgagctgttgaacccgtcctcccttgctcgtgacttcatcatcgccagagccctcactggattcgtgtcctcgccagctcgctccagaatcgatctcgtcgttgttccgtgcgtcatcaagaaatcccaagaatcgggtgaagacgaagctagcagcgtgatattccccaagtgctcgacacaagggctgaaccaaaatccttgccgtgttcgcggatag

SEQ ID NO: 6779 - DNA, 543 bp, Zea mays
  Peptide Sequence Number=SeqID_50154
atggagcttccctgccgccctagcttgggtctccctcgccggcgcgcgcccctccctctgttcgctcgcgcgcagccgcgcccctcaggctcggccgcccatctccccgagcttgcccccgcgctcggattttctccctctcggtctctagtccagccgcatgctcctccctgcgcccagctcgaaccgcgcgtcctttcttgtgctgcgcccagggcatcgattctctgcgtcacaacaaccatccagtcacgcccgtggattatttttgggataagccttcgtggcaaggaaccattcgctcggagctatggtgtagtgattgcgaggaaccgttcgctcggagccttggatcatcaacgtcgagatctccactcaatcaagttatcgtatctcacggaagatcgggccacgtctactatcatcagttccagtgctcgacccaagtgctcagcttggctgtgtggccaagttcccttcctggtcgtcgtcggtgaaaaggcccagccatcactctcgcacttcgacctcgcttggatttaa

SEQ ID NO: 6780 - DNA, 396 bp, Zea mays
  Peptide Sequence Number=SeqID_50155
atggacacggtggggactcgatggcggccgtggaacaagcccgagaccgcggcggacgacgacagagctccttggatgtcagataatgcagccgcgaacggtcagaccgtgcaccccggacggtccgcgaggatgctaaaaatgcattttaccgaactcgtcacctttggggttttcttgtttttcaacggccggacgcctgaggccagacggtccgcgcttggtctgatatggtgcccgcttctccttcgcacagtccgcagtgtaaatgctgtttttgcagtgttctggttcgaagctcaccctggtgtcgtggacgatccgcgcaaaggtgattttccaaaaagcttctcctgtccaaaatattctacggtattccggacagtcgacttataa

SEQ ID NO: 6781 - DNA, 372 bp, Zea mays
  Peptide Sequence Number=SeqID_50156
atgggagcaagacttagactgtgttggtttttggcccactggacagtgtccggtgcactaggccaagcgccctgcgaacaagccactcttgggaattcagaggcgcgctcagtgcggaacagtgtcgcgacagaagtcagaggtcaccggactgtccggttcatgcttcggaggtcagcattttgcactgttggacttcgggtttcattgggtgggtgtagccccgagcttcgagtggatttttgcaaacaatccactcgaaggtcttcacttcagaggtcagcatttttcttcttcggggatgatgattcattgggtgcaccaaaggtgcacccaatgggtgtagcccccgagcttcgagtggatttttga

SEQ ID NO: 6782 - DNA, 162 bp, Zea mays
  Peptide Sequence Number=SeqID_50157
atgcccgagtttgcaggcggcgaccccttagcagaacgcgatggtactcgaggtggtcgttgccatccagcagccaagcaagccataatgaagaagggttacgcgttcctcaacgtaaccccaggggaacccgtgggtaggttccccggggtctacacatag

SEQ ID NO: 6783 - DNA, 777 bp, Zea mays
  Peptide Sequence Number=SeqID_50158
atggcactcggcaaagaggcacgctttgccgagtcccatataaagcactcggcaaagaacctgacatggggacccgctgacggattctttgccgagtgctggacgcttttatttgccgagtactgcctggcactcggcaaagaaggctttgccgatgtactgtgtgtcgagccctctttgccgagtgcgacactcggcaaagcctttgccgactactgggatatgacgatcatgagctcgaatagccatccaaaaaagatggcattgaactactgcctcctcggctcccctcggccagctaaagggacctcctcggcgcgctcctgtgccgccacaggcgccgccgcgcgcctccatgcctctgccccagcgcctgtcgcggctggagcaggaggcgccgtgccgttctcgatccaggcgcccaacgagaagatcgagatgtactcgccggccttctatgccgcctgcaccgccggaggaatcgccagctgcggcctcacccacatggctgtcacgccgctcgacctcgacaaatgcaacatgcaggtgagcgggcagcgacctagatctgtgtcccccggtggtattaatagagaaagatcagaaatagctgaaattgaagcagcatcaacaagtgaagctgctcggcttagagctgctctccggcgtgctccacccggcgctgttcgggaacctcaccagtcttttgaacggcttacacagacctgttttgataagagccgagcagcgattcttcaatttcggaccacgacctag

SEQ ID NO: 6784 - DNA, 375 bp, Zea mays
  Peptide Sequence Number=SeqID_50159
atggccgaagtacaaggcctcgacgacgccggtcagtggtctcctgaggccgtgccctgcctgccacgtgtcccggcgttgagcttggcacgagcggcagggaagcgcattcaatggagggagagcgaagtctgcgtggcaaatggcacgcgcggcgttgccgtttgtgctgtgagtgagagcgttaagctggcgaaggttcagcatttcggctatatcaccattgcgatgtttctcgccagggcagcagcgtgtccagatccagaccactctcaactaaaggacaagtgcagccatgaggcagatagatgcaacgagatcctctgccgtaagctcctccgggcagcacaaagcacgggcatcgtcatcctgtag

SEQ ID NO: 6785 - DNA, 531 bp, Zea mays
  Peptide Sequence Number=SeqID_50160
gaaaacagcgtcgctcgctccgctccgactgccgtgtcagccaccccggcaacgactgacaacaagtcacgatcaaccaccgagttcagcctcgagcgcaacaggaagctccacctcgcccgacctcatgctccggcctcgggaggaggtttccgcctcgcccgacctcagtctccagccttggaaagaagtctccgcctcgcccgaccctcggactcggcctcgaccccggtctcgggaagaatcgtgtcctcgcccgaccctggcctcggcctcaagagaagtctccgcctcgaccgaccctgggctcggactgaccgcgctaacaggggatacatcatttccctattcctagcctactcaggctacaaggaacaagaccggcgtcccatctggcttaccccggcgacgggtgatgatgaggatgatattggttttgattatggttatggtttctggtattctttctgtttggaaagggttgcctttggtgcaatctatgctcagatgccccttaccatgaccttctag

SEQ ID NO: 6786 - DNA, 366 bp, Zea mays
  Peptide Sequence Number=SeqID_50161
atgtcatgtaaccggcgcgccggttacgacgtgcgagaagttacactgccactcgcgccaatgctgcgcctcctcgactgcggaaccagtaccgggactcgaggtagccctgcgcaggacccaacagtgccaattaaagggactgggaaagtggatgttgtggaaaggatccttctcggcggaggaagcgggccccgagccctcctactgatcaggggttcgaaggctggcccctcggaagggtttcgacagccgccccagagcactcggacttcaagcccattactgatcaggggttcgaaggctggccccttggaagggttcgacagccgccccagagcgcctgggctccgtgcccactactga

SEQ ID NO: 6787 - DNA, 1422 bp, Zea mays
  Peptide Sequence Number=SeqID_50162
atgcatcgcgcccttccgccttttgagcccctagatggggtgctccagcgccgccttgctcttgctgtcgttagaggagcgtggccttgtggagatcggcaccttttagccatcgctcggcttcaaggattttcgttgtgcagcccggctgcattccctcaccaatgggcagtttggtggggagaagcaagccgggctgcggcctccgccctgccctcagcttcaaggatcttcgtcatccttgctgaggcggagagagagctgagtcggggttctacctcccgcatgggccgacgggtcgtctcctccttcagcattcaggggagaaggcgctcaccgaccttgtggaggggcaaacttcggcaacgcaggactggtcggccgcaagcgtcgtcagctccagcgtgcctggctcgctggctcagctggttctatcgtggcctccgacgctgcctcctgccgcttgatccgggctcgggcgtctgttgcgccgtgcacaccggtggaccgtccaagacgtcgtacgccgcatgggcgacgctagggcgtccgccattcgtcggcgtggcaccggcgcacaggcggctgttgtcgtcggtgctgaggtggtggcagccggggaaggtttctccgccgacgagaccatcggtgccagctgcggccggaccccggctctttggctttgatggcttgtcctcacccctcgagaaaagacgtgggcgagggcctcgtcacagcagcgtcggccttgaggtcatcgctgctgctgttcagccgcccggagcaggggtcgttgttgctgttggtgtagtggctaccggcgagccactcggagtttgttatttcacaggccctctggtatggaggcttcccttgcttagtttttggaaccctcggctgctctgcgatgagccggagccggaggcagcggtgttagcgtggacagacgcgaagtcggctcggaaagagacttcgtcggcccgggatatggcggcttcccaggccgaggaagatgtggtagcagccgctggagcttggccaagacatctgctggcgcggtgctggcgtcctcccttaggtggaggtccttttgcctgggtcaccgtccgaggccgggcctggttccgccgagggtggaaacaacgccgagggtgctgctgctccccctgccgatgcccaaacttgcaggacttgtctatcaatagcagaatcgtttatccgaacaagagttacttttcacggaagctgatgagtgaggacttgttcggtagcaggatcgcttatccgagcatgagttacttctcgcggaaggtgatgagtgaggatcccgctatcgatacggaagtcgaaagcacgaaggttgttttggtagaaaatttttccgaggagaattttgacgcagagggggttccccccttctag

SEQ ID NO: 6788 - DNA, 1038 bp, Zea mays
  Peptide Sequence Number=SeqID_50163
atgagcgcaaggaattgggcggagactcactggatagctcggtccacgcgcggcggcggaagaccgaagtccggtgaagtcaatctcgggcctccggtgaagtccggccgggtccgagggcttggcaagcttcacgggctactggcggagctagccgaagcactggctttcccagaggatggctggagtgggctggccacggtggccgaagctctggcggcaatggcgggcggaattgagctcgccggagctaagggaaagtggctggccggtgaggctggcagcgcggtgaggatcctgctgacgtctccttgctgtcgtaaggggctgagagccaccggtgtcatggtgcacgcggggcaccatcattacccgtcactgggtccaagcccagggtcggtcgaggcggagacttctcttgaggccgaggccggggtcgggcgaggacgcgattcttcccaagaccggggtcgaggccgagtccgggggtcgggtgaggcggagacttcctcccgaggctggagcctgaggtcgggcgaggcggaaacctcctcccgaggccggagcatgaggtcaggcgaggcggagcttcctgttgcgctcgaggctaaactcggtggcatcgggcgaggcggtctggccaaggttgcttcacaacgaagcctcccgagccgggcctcgggagtgccgagggggcgcccgctgcgtgaggaggccctcgggcgaggcgtgaacttgtctgggactactgttcctacccgaggctgggctcgggaaaacagcgtcgctcgcttcgctccgactgccgtgtcagccaccccggcaacgactgacaacaagtcacgatcaaccaccgagttcagccatgggcgcaacaggaagctccgcctcgcccgacctcaggctccggcctcgggaggaggtctccgcctcgcccgacccccggactcggcctcgaccccggtctcgggaggaatcacgtcctcgcccgaccccggcctcggcctcaagagaagtctctgcctcgaccgaccctag

SEQ ID NO: 6789 - DNA, 462 bp, Zea mays
  Peptide Sequence Number=SeqID_50164
atgggaaaaaacaacaagcgcaagcgcgagccgactcctccatcggaggatttcggtgactcggaatactcggaggaggagttctcctccgagtccgaggggtctccggctcccgtctctcccccggcgtcgtccgatgattcggacgactcccaggggttagccgcggaggtctggacgtacatccgggccatcgagcgctccgggctcgagggctcggatgagtcggagtactcctcggatgaggaggactcggacgacggcggcaaggacgaggacgacgacgacgacgacgacgacgacgatggcgacggcgacggcagtggcagtggcaggggcggcagcaacggcagcagcaagggcagcaccaggggcggcagcagcaggggcagcaccaagggcggcagcagcaggggcagcaccaaaggcggcggcggcggcaggggcagggccagtggctag

SEQ ID NO: 6790 - DNA, 786 bp, Zea mays
  Peptide Sequence Number=SeqID_50165
atgcatcgcgcccttccgccttttgagcccctggatggggtgctccagcatcgccttgctcttgctgtcattggaggagcgcggcctcgtggagatcgacacctttcagccatcgctcggcttcaaggattttcgtcgtgcagcccggctgcattccctcaccaatgggaagtttggtggggtgaaacaagccgggctacggcctctgcccctccctcagcttcaaggatcttcgtcatccttgctgaggcggagggagagctgagccgggtgatctgggggaagggcgttcgccgcctgtggtgctttgcgcaccggtggaccgtccaagacgccatacgccgcaaggtcggcgttcgtgttcttggattgtcttgtcctcactctggcacgacgcctccgcgcgagggtcaaggcctgcccatccgcgaggacctgagtgggtatctgccagtgcaggttggggcgtccgccattcgttggcgtggcgctggcacgcaggtggccgctgtcgtcggtgctgaggtgctggcagccggagaaggtttctccgccgatgagaccatcggcgccagctacggctggacccccggctctttggctttgatggcttgtcctcgcccctcgagcagagatgtgggcgagggcctcgtcacagcagcatcggccctaaggccctctggtgtggaggttgttcgtacccacgggagcagaaccggagtcccgtttgtaaggagatatactgggtttctgccggagcaaactgtaaccgcttcaagtacttag

SEQ ID NO: 6791 - DNA, 575 bp, Zea mays
  Peptide Sequence Number=SeqID_50166
atggtgccccgcgtgcaccatgacgccggtggctctcagccccttacggcagcaaggagacgtcagcaggatccttgccgcactgccagctgtgctcctacaggactcaggcgctcctccgacggccacgctatcacgtgtacagggctcaagctctcccccgacagccacgttggcatatgccgggtggaagatgcacccgacagcctggcttggggagtagaaaccgaggacaatgagatttgtgttcggcagaggatgctagcgcggactcactccgaatgcgcccttgctgtctcggcacccgcggcatgcacatcgtcgcctggccaaagccgcactgcaccggagcctcgccacgccgcaaacgtcgacgccggcgagcccttctccagcgagcccgtcgtctccgtacctcatcgtgcgctgcgccgtgcaaccgtctcgtgcccgcgcaacctctacgtcgtgcctcgcaacaactgtcgccacgcgccggagtcctgctgcgtctcgtcgcggttgttgggcctcgtagtgccgcactcgccgagctgcgagctcgccttgtcgtc

SEQ ID NO: 6792 - DNA, 1098 bp, Zea mays
  Peptide Sequence Number=SeqID_50167
atgaatcggatagttcgtcgccggaggacgatcccgaggccgctagataaaaggacgccgctgaagccaccggatcggaggagttggtggtcgaaggacgcgagagccacccacgcctcgcgcgaccgtcggagcgatccgcatccctcgtggccaccgccgccgctgccggcgcctaccgcgcctcgcgcaaccgtcgttgccaccgggtctaggtcgtcgccttcgagccccactccccgatccagacaaccaccccgcccagatctagatccacctagtgcagcacggccgtggctaccggatctcacagcctccgcggatgctgcgccgccgccatccccactgaagtccgaccagcgcctcgtcgaggcgctggcgggtgagagggagctgccgagcaacgggtcgctgccggtggaccgcctcgggttcgacaaggctaacaagaccgtgaactggctcctcgcccagtccaagccggccatcgaccgcctcaatagagtgagactgggttctgaaaggcagttcatggcgttctgcaagcggcacggcctctctgccaggggctccaacgccgatctcattgcccatcttgacaccgcactcggggttggagcttcgtctagagttacaagaagatcaagcttggcggtggctgctgctgtgttgcctcctcttgttggaccgaagagagggagggaagaagcagctggagttgagaagaccgcttctcaacaagaaataaagaaggtgtatcacaaattggctctgcgcctccacccagataagaatcctggggatgagaaggttatatccattcttggagatgcagagaaaagagctttatatgatgagactggcatcactgatgatgatgcactggtgggagaagctgcaaacaatcttcaggagtacttcagaacaatgtacaagaaagtcatggaggctaacattgaagaatttgaagttaaatatagagggtcagattctgagaaaatggacttgaaggaactctacacaaaatataagggcaacatgaacaggaatagttatctcttatatcatattgtaaaatctgaaacagttctcctgtag

SEQ ID NO: 6793 - DNA, 633 bp, Zea mays
  Peptide Sequence Number=SeqID_50168
atgacgccacgagtcgacgagctgatgggtgatgagaaggcaagcccccaggccaggcacctaacgcccagcgacgttcaacagctgtggctcggtgcagtgcggtgcgggaggcggcacctgttgctgttggtggcccggatagcgccggaaacggacggattacggccgattaaagcaccaacaatcgaatcaaaatcaatatatctctcgttcctttacttttgccctaagatgattgatacccagatcggtgccaacacacttttggcaactccgctggggacatcgcgtggagatctattagatcggcctccaatggcaggttcaaaggacaattccgatgtctctccagcaacatcatcgagccgactatggagactttgtcggctgaagatttatcaatatcagtttgaggaacacaaggagcagttgatcaaggacccacaagaaaaattcttggccaactttaaggtggacaggaatcataaagtcgttcggcagcaggtgactgatctagcttcactccgacctgctgcaactacccccaaaatcgtagcagattttattataggacatcagattggtgatactcaggaactagacatatcatacatcactattactccctag

SEQ ID NO: 6794 - DNA, 1734 bp, Zea mays
  Peptide Sequence Number=SeqID_50169
atgcaggcggcatgcaaccgcgccaagtggacgcacttctccgactcccgacacgcccgcatggaagcccaggcccgcgcgtcgcgcaaccggcgcgccggatgctgcatgcgagcaactgcatcgcctgcgccaccaccgtgcctccttgcggaaccaataccgcgactcgaggcaacccagcgcgcgacccagcggcgccagcttgacacggcggccaacgcggccaaaggagggccagtagtaatgacggtggctgacgcgcgggagcagcgggcacgtcgacagccaagctcgcgtcccatccgggggcagcgagagagccccctctcacggtgtgaagacaacgcgcccgtgatccgttcctcgaatggctcgcgcacgcccaacggctgccctgccaactactcgcctcgtcgcattaactccgcggctggacaggtgacgctcctggcaggagcaacgggcgacgcttcgccttcgccggaacaaccgcaccaaaaaagggaccgggaaaggaggataccccgaaaagggatccttccccttgaaggaaccaggctccgagcctccttactgatcaggggttcgaaggctggccgcccgaagggttcaacagccgcctcagatcgcgtgggccctacacccactactggtcagaggctggcccccgaagggttcacagtcgcctcagacgccgagcgagggatgaccaggggggaccgggtccggcagatcacccgcaggtacttttgggcgtgcctctgggcccctagccgacccctaacgaacggggcacggacgtccactcggattacccgcttgcagttcaccggagacaccatgttcggtgcccatcgaggaggctcgggggctgctctcgcaaacccggctccggccgaaccgttgacagcgtcaacataccagcccgagaacttgagccccgaccggctcggactcgggctaaggccccggaagacgacgaactccgcttcgcccgacccagggctcggactcgggctaaggccccggaagacgacgaactccgccctcgcccgacccaggggctcggactcggcctctgcggacgacctccgcctcgcccgacccaagggctcggactcggcctctgctgacgacctccgcctcgcccgacccaggggctcggactcggcctctgctgacgacctccgcctcgcccgacccgggggctcggactcggcctctgctgacgacctccgcctcgcccgacccaggggctcggactcggcctctgctgacgacctccgcctcgcccgacccaggggctcggactcggcctcggccatggaagacagactcgaccccggcttcggaggagcctccacgtcgcccaacctagggcacaggccagccacgtcgacaggaagcgccatcatcaccctaccccgagccgactcgggccgcagagaacaagaccggtctcctggtccctctagaggaacttgcgcgtccccttctacacgcctgcggttgagctccgttcgcagatctcaagtcggggcagtcctcaccgagggcgtgcgctccgaggcagatgcttcgtgccggcgccagggcgaccgaggcctgggcctgatcgagccagtgtgcaccatgccaaggaggcggtccacgtcgtcgcgccactgcctcatagcccctagcgaggccgtggggcttggcaagtggcgcaacaactctctggccgcatag

SEQ ID NO: 6795 - DNA, 1104 bp, Zea mays
  Peptide Sequence Number=SeqID_50170
atgacttcctcatccggtgatggcggccagttaggcaaccctaaaacctccccgcccgttcttaagaaggagattgaccctgctcgtcgcttcttctgccagatatgtggtggtgatggtcaccacgccagggattgctttaagtccatgtgctctcaagcaaaacctaaatcaaaacttcatactatatggattgttgccgaaaatgttcctggagaattacaaaattatcaaaccatatgtgaacttggttccacaattggtgttgttgaggaggtggacatgctatccttagacaataaggatattgtaaggttcaaggtccatgtaaaaaatgtggccatgatcccccctattgttgatgttgggtgtttgaaaatctgggaaaaagctagaaatgatgaggagacctatggagttgatgataatccttctggaatccttggaggatcctcttctcaggggaacaattccttaaggttgtatgaattgcttgaaaaagacatgcttgacatgaaattagatagaagtaatgaggataagatcaatgatggctttgatgatagtgaagatgatacactgagctcccaagatctgggggaatatgcaaaagatgatgatacacttacccaagagtgccaaaacaaaggaaataatgtggtggatgaacatatgagcgttgatgtccctcaaggtgtgggaaaaagtcgttgtcacatgttcagaaattgtggatggggtgtgcaaaccgaagtggatagtaatatccatgaggagtctgacactacttctgttcatgagctagaaaatgtgatgtgcaaacaccctatgctagtgggtgatgacttcaacattctcagaaaagaagctaagaaaaacaagcctgggttcacgaaatggagttctcttttcaactctatcattgatttacataatctcattcagttggaattggtgtcacacgcgattttggaagacaaaccgaatgcgaaccatcataatgcttcgaataataataaagagtatgcaagaatattacaaactagagccatttacattgataattctattgggttatggttaatgatcataaagacaaagtga

SEQ ID NO: 6796 - DNA, 630 bp, Zea mays
  Peptide Sequence Number=SeqID_50171
atgcaggatggctcaacactgtatccttggctgctcttcctgagcgcttctgcgtcagggtttgaggacctaatcaatgttggactgacagcacaacgaagtgagaggtcgaagtccgagagcatgatgtgcccgtcctcccggacaaggacattttcaggcttgagatcgcgaatcttcacccaggttctgcccgacacgctggaaatcaggaatctggaagtctttcgatgccttgcttggtgctgtgatcctgaacatatcccatctaagaaggacctctggatcactgaaccagaccaggcttctgctgctgaagggaagaaggctctggtgtatccggtgcaaattcgttggggccctactgctttgaatctcatacctggcgctccacagtcgccagttggtgctggcgatcaggacaaacctgatacccccccttcacggagaagatgtggtgacaaccctccacctactcaacatgctgcaatctttgaagatcccgtcataaagacccacaatcagcggcggccgatgcatgaccgattgggacctttgaggcgctcggattcccccagggaattgagccagccttgggttctggttgatacagaggcctggagcagctag

SEQ ID NO: 6797 - DNA, 453 bp, Zea mays
  Peptide Sequence Number=SeqID_50172
atgggcaagaacaacaagcgtaagcgtgagccgactcctccatcagaggagtttggcgactcggagtactcggaggaggagttctcctccgagcccgaggggtctccggctcccgtctctcccccggcgtcgtccgatgactcggacgactcccaggggatagccgcggaggtctggacatacatccgggccgtcgagcgcgccgggctcgaaggctcggatgagtcggagtactcctcggatgaggaggactcggacggcggcgaggagggtgaagacgacgacgacgacgacgacgacgatgacgacgacggcggcagcagtggcgggggcgacggcgacggcagaggcggcaccaagggcagcagcggcggcagcggagacagcaccaggggcagcagcaggggcagcacccggggcggcggcggtggcaggggcagggccagtggctag

SEQ ID NO: 6798 - DNA, 1847 bp, Zea mays
  Peptide Sequence Number=SeqID_50173
ctccgtcacctcccgccaccgtcctcgtgctcgccccgccgccgccacaagcagccaacacgcgagacgacccctcccccgctgcagccgagcaagaagccgtcccctacaggggccaccgccgccgcccacggcctggccaaccccacgccagcccggccgccgcgcccacgatgcccccgcccccgccaccgcactccggctccgacaagggctgcgtcgtagtcgtctccgccgctctcgagctcgtcttcttcgtcatggctggcatcgtcttcgtcctcgatcttagaagacagctggtggggctaaagagcccaaaccttgggtccaggacgggcagaggggcgcgagccctccgccgccaccatcttcagatcagatactgccaccaccgccgctcgtgtcagcccgaccgccatcaccgtgggggcagtggcagcaacagcagcaggggcggcagcagcagcaacgtgtgccccgcttccaaggccactggaagggcctcctcttcttcggcgtccgtggacgttccttccccaccggtcgccatgcccgccggggggtctggttcccatcggcatgcgcctactggggacgtcgcccggcgatccgtcagcggctaccatggatgctccttcctcgtcggtgccaagcccaccatcggcggtggcccagggggttcctgttgcgtttgcccccactgtgcagatgacgccggcgctgagttggcgccatcagacccccaggatccgcctgtcaccgtcgaggcaacaccttcgggttcccaagttccagctgggggtccagaagtggcggcgttgccaacagctgctgcaggcccaacaggtatcggatgctccgtcggtggtaggcgtggggggcgcgtccagctgtcccgccgcaaactccggagggtccggaggaaaccgaggcgacgactatccggtgagagtgggaggcgctcgaaaccgagcaccaacgccttggcgactggagctaaggacttcaaggaggagatccggaaggtgtctgaccgagaggaggaggtgacccggaaggagagaagcttggtcaagaagaaagaacacctagaccgaaaggaagaggccgtcacagctctccatgataagctgaaagcttataatgcagtgctggagaaacagcgagacaagcaggctgcggctgaggcgaagttgcagcaggagcttgccgacaaggctagtgacattgctcgcgctgagggaaacctcaaggcgagggaagcttccctggtgaaacgaacaactgacctcacttggcaggaggaggacctcgctttcagggaggagatgtgggcaaggcggaacaagctgctggatgagcttgagctcgaggcagaggagaaagggaagcgtctggaggggaaagtgtggacactggaggagcaggtccgtcagttccaggcggcgcatgcgacgcagacggccccgggctcccaggcggtggaggtgatgaggaagacacttgatgacctccgggcagagcaacacgccggagctcagcgcatcgctgcctgggctggcgaggcaagcacgacgctagtgccattggggatgagtcccatcccggcattggtgcggtcggcgtccatctccgacgcgctcccgatactggattccgctgctgaccgcctccgacgtctggatcagattcttggcgcccgcttggaggccgagggcagcagactctgccgtcggccattgagcccggtggccgacactgaagatgctgcctggaagagcgtacaggatgctgtggatgcggtggtcgggcgcttccagcgggatcctgctgacaatgagtag

SEQ ID NO: 6799 - DNA, 184 bp, Zea mays
  Peptide Sequence Number=SeqID_50174
atgaccgccccgccaaccactcgccccgtcgcattaactccgcggcgggacaggcggcgcttctggcaggagaagcgggcgacgctttgccttcgccgtgataaccgcgccaaaaaaggggttagaagactggcccccgaagggttcacaaccgcctcagacgccgagcgagggatgaccaggg

SEQ ID NO: 6800 - DNA, 243 bp, Zea mays
  Peptide Sequence Number=SeqID_50175
atggccgtggccgtggccgcggcgggcgtggtggtggccaacagccccctggaagggcacaataattgccaagtggctagagaggagccaaaacacaataaccacaagaaatcaatcacagagatgacacggtggttatcccgtggttcggccaagtacaaaacttgcctactccacgttgtggcgtcccaacggacgagagttgcacttaactcctctcaagtgatccaacgatcaacttga

SEQ ID NO: 6801 - DNA, 531 bp, Zea mays
  Peptide Sequence Number=SeqID_50176
atgggtcgcgcggcgaaacaacggtcacccggtcggccatcaccaagcagaagaggtggcggcggagaggacaaggacaggcgacacctttggcaggcaaagcaggcgacgcttcacctccgccatgatgaccgcgtcaaaaaagggaccgggaaaggggatactccgaaagggatccttctccgcgaaggaagcgggccccgagcccccctactgatcagaggttcgaaggctggcccctcggaagggttcaacagccgcctcagagcactcgggctccgtgcccactactggtcagaggttcgaaggctggcccctcggaagggttcaacggccgcctcaggccactcgagctccgcgcccgctattgatcaggggttcgtaggctggcccccgaagggttctgacagccgcctcagagcacgcagagcgagggatgaccctgggtacgttcgatacataaccaaggctcgggctacgctccctaggtaccctaggacatttccgagaccgacgggaacaattttgtaa

SEQ ID NO: 6802 - DNA, 132 bp, Zea mays
  Peptide Sequence Number=SeqID_50177
atgggctctctggctctctgttgggctgcctgggccggtcagccaggctgggccggcgtgctggccatcaggccgctgccaggcccgcctggcaggccgcctgggctgttcaaagttatcttaggcgtctaa

SEQ ID NO: 6803 - DNA, 231 bp, Zea mays
  Peptide Sequence Number=SeqID_50178
atggcgtccctccagcgcgccttcctcaacgacaacgacttcgacgccatcccgcccgacttcttcgacggcctcgccgacctgctcgagatcttgctcgccaacaacccgcgcctcaacgacctgcccgtggggggagagcgttggggatcgcaagcgggactgggtagcgccgggcggaggctgcaccgtgaggatccttgggaggtggtgtcgagggcgcggcggtga

SEQ ID NO: 6804 - DNA, 336 bp, Zea mays
  Peptide Sequence Number=SeqID_50179
atgccagaggttgccgctgccatggatatggcaaaagcaaagatcacttcgggttttgaaggtagagaggcaacgaagaggaagttgcttgtcattattaatcggaggtggcaagatcaaatggaggatagggatcgcaagctgaggatattttctggaaacgaacatccattccatgaccgccctctggaaccttttgtgatgccgccacggcaagtacgcgagatgcgcccccgtgcaaggcgtgcaatgataagggctcagaaaaaacagcaggcaaacagagccaaagaggaggaagatgctaagaatgccgcagcggaggtcactgcatag

SEQ ID NO: 6805 - DNA, 321 bp, Zea mays
  Peptide Sequence Number=SeqID_50180
atggaagatgaatttagagaactgaaagcagaattcccagaagaagaagatgaaattcaagaagtggtttctgaagaggagtctgcttcagtgcctgctcatcaagcttgggatgatggaggcatcctccgcggggatgaattcatcattcaagcaaggtacctctgccagacaatcgcgcactgggagtggagagatggcgggagtggcgtgtacccacctggcatgtggctggatggtggagtaccgtactctcgggtggcgcggaccggttcacgtagtggaggacccgtgggaatggtagacatatgcaagggttaa

SEQ ID NO: 6806 - DNA, 930 bp, Zea mays
  Peptide Sequence Number=SeqID_50181
atggagagtcatgatctccgggcagaatgggaatcacggcttgtgggtggttatgagatcgatggttttggttatgactatggtgctggagatagagtctgtgaggagctgctcccctgtgcttcccctggagccgccccctgcaccaccactgggcgtcccagcttcaggagtagctcctctgctaaccttgagccggaaggagatccagacgacggaggaggcgacgacagctcgagccacgacaccgacttctctgctaaccctgagccggaaggatgggttgctcgacccatcactcgcgacgctgctcgcgggtgtcacttccacgatgcgctcgacaccctgctacgtcgggcatttgaccggcatacttggtccgtcgagtatcgctgtgtggtctaccagcacagtcgcggggtctacccggaccgctgggaggcaacctgcttggtgcgctgcccggagaacagtctccagggtgctgaggtctgctcagagcactattctatctctgagcgggactcagctgaggcagccatgcaagatgctgcacggcgtgcgctttcgcactactgctcggttttcggtggggcagctgacggtctcgacctgaagtattacccccgccgtccatccggcagcacaggaggcgtgattgtctcacctgtcggtgagggcaatcctaggttgagcagcacagtcaacctagccgccgtgctaaacacggagctggaccatgcattagacgagctgagtagggctcgtgctgagatcgccctgctgcgggctgagcgcgcggaacgtcgtcacttggatggtggttcccccgctcccgtcgggactcagcacccgtaccgctcacctcagcgtggacaccagtcttatggcaaccccgactgcaagaccaagataaatctagaaccatag

SEQ ID NO: 6807 - DNA, 345 bp, Zea mays
  Peptide Sequence Number=SeqID_50182
atgctcctccccgaggcggcgaactcgaccgcccctgctagcccgctgcagcgcccgatcgcccctgcccgcccggcggcgctctccgcccctccccccgcgcgcggcggcgatcccgccacccagctcgcccgccatggccggctcggccgcccccgcaccctgccccgtgcccgcccggctcggccgcccccgtgcccgcccggcctcggccgcccctggccggttcaaccgcccccctggccggttcaaccgccctggccccagctcgcccgcccgttcccccgtcccggcctcgcccgaccgtatcttcgctcgcccgcgctcgcggtgattattcgttaa

SEQ ID NO: 6808 - DNA, 651 bp, Zea mays
  Peptide Sequence Number=SeqID_50183
atggatgtgttggatgagcttgatggcgttctatgccgattagagccagacattggatgtaatgagtcatgtgatgttagtgatgatgaggaaaatcaggaaggagaaataaataataataatgctggggacagaatggaagaagatgacaattcaattatatgccacaaaatagtggacaacatgaaaattccaaatgtggtttgtgatacaagttctccgttacacgtagcacatgaccaaatggaacagattggtgcatcctcagaagctaagaagaggttgaattttaatgtggatgttataaatctgagtatgccggatcgtgcaagaccaaaaggatggacaataaaaaatatggaagaaaggattatgaaactaggtgccaaaggagaaaaaaagaagaataggagatgccaattgtgtggaattgcagatggacataacattaggacgtgtctgtcagtggaagagaacagggcaagactagcaagactggctaatcgaaagagaggacgaccgaccagatcaagactaaacactaaaacaactgctccacaatggaatgaaacctcgactgctaaaaaacatcgtattgataaagaagtagaaaatgaatcagccgctgagcatattggattgggtgaataa

SEQ ID NO: 6809 - DNA, 627 bp, Zea mays
  Peptide Sequence Number=SeqID_50184
atggatgtcaaggacgccgagccccctaagatcaagtggcctgaccactatcggccagttaaccttgcacttgccactagtgaagttctcattccctgcccagaggaatcgcttcctaaatttgtcgatttcttcgagtatcgcctttggtacattaatggtcgcttgacaaagatgatggcatcattcgcatacatagatatccggagacgtgttctagctttagcaactctggatagaatgcctgcctcggtggctaggtgtaggagtcttacatttggagatgatatccctcatggtgggcgcaagcctcatagaaagcggcttcatgaagagcttcgcgacactgtggatgaggctaattgtcacacccgggtttcggggcaccaagacccaggcgcgaacataatcaccaggagacggccaatcccatacacctctaccgaggaggcgaggcagggtaacattacgaggcctttacaaagttccactagcttcagaaaacccgctacagtttataggaagctccagtgcaggagtcccttgactgaccgccatcgcagcaaaattaaccaaggacctccctacactgaccactcccctactgcccttgcccctttcgggtaa

SEQ ID NO: 6810 - DNA, 426 bp, Zea mays
  Peptide Sequence Number=SeqID_50185
atggcgcccgcaaccaccctcgcgaagtttgtgcagcggccagctcggttccgagttcagcgccgatttggggaaatcgatgggaggaacgcgagatccgcggggaagggacgtcccgacacccagccccacatggcggtctcccgagccacgcgcgcacgagctgcaggaggagaaacgtcttatgtgccatcggttgctggcatgaactacccaaaaatagagctctctatgaaatcggtctggtgtgctgctggtgtctatgcggattggttcgacacgccaatccttaaaaacccagatagagacgagttgcgagaagcgagatgcgtggttgagagggagacaagtcaaagagatgaggctcttaaatccttttccatctcacaggatctatctcagggacaatcaaaaagggcatcctag

SEQ ID NO: 6811 - DNA, 231 bp, Zea mays
  Peptide Sequence Number=SeqID_50186
atgggtggaaaaggaaggcttaaagagaagcttcatctcaacaacctttggaatgtgctttgcgtcatcaaccttcggcaccgctatcctacagacaaacaatggaatgaggtaaaagtaattataagaatcaaggccagcaacagacgaaggggtaatatcttcagaactggccccaaccgagctgaagagccctttcaactgttgcacgcagcggctgccaaaatttaa

SEQ ID NO: 6812 - DNA, 363 bp, Zea mays
  Peptide Sequence Number=SeqID_50187
atgcccggggcacagcgatttcggtcccaagcacctaacagcgaaatccgatcggtgcactgcgaagaggagctgaaagcggacagagggaaagggttctttatcgaggttagaggcgaagacgcgcgcgttcgcagtggaggacgggcccgcggcggagcaacaggtctggcgcgaaatcgcgaattgcgctcgtacagatggcccaccgatcctgctctatcgcaagaagcggcaaccggagatcccgacgatgaagatgtatatgcagatgcaattgtagacattactccacaattcatcacactcaatcaaagatccaaatcatacaaatatcataagaacaaacattcaagttcatag

SEQ ID NO: 6813 - DNA, 495 bp, Zea mays
  Peptide Sequence Number=SeqID_50188
atgggggtgagggcgacgccgaggagcacgagccaggcaggcagacagacaccggaggcgaaatgcggtgttcaacctttcccgaaaccttcgcgagcaggaattgcgcctggactgcgtgatgcggggcaagtgtgcagttgtgctgacgatgacgtcactgttaagcaacttgctgctgccgtgctgatgatgtcgcctcctcctggaagatccgccaacacggagatccgccaggtatggcacaccctaatcaattatactggtttactttgcgtggagccgaaatttggcagatcacgttatattgattgctcgagatgtctatttacctcagtggtacctctacacggcttcattgctcaacagagggcgcaaccttggaacccggtggaacctgaattcccaaaatatgctagttcctatcatgcccatcaggtggcatattgtcttcctgtggaacctgaattcccaatgtcttccaatccaatatga

SEQ ID NO: 6814 - DNA, 495 bp, Zea mays
  Peptide Sequence Number=SeqID_50189
atgcgtgcattggaagggcaacagctgcttgaggacgaccccacagtcgtgtacctcactgcataccttctcaccctggatgcacaatatgatttcttggctcggcaccaccgtcagatgattgcccgagcagaagatgtggagaagcgcaaccgtaagctccatgtggatctcaccacagctcaagcccgtgtagctgtcttggaaagtcgtgaagtcattgttgttgaagccctgaagcaagccatggatgagtacgtccagaagttgatggaggcctacctccccctcaccatgaagaagattccagcaccctcccttgaggtcaaggaagaagctgcaagcaccccgccagcaccaccgccctctaaggatctacaagagccaatcccgcttgaagaagagtttgaccccgtcctgccatctcagtcgccgctagaagaagtcatcaacatcaactccctcttaacccatccaggagatgtatcagattaa

SEQ ID NO: 6815 - DNA, 876 bp, Zea mays
  Peptide Sequence Number=SeqID_50190
atgcccgtccagcggtacagcctcgccgagtgtcgttttcctgcgttgcgctgccgttcaaccccgtcgggtagcgccgccatcttcgtccgtcttcctccatctttctctggcctccgcccagctccgtcgtgtagcaccactcagcgccaccgtccagcactccagcgcctccaccgtccaccgagcccgacgccgccgttccattctccagcggcaaacagcagagacaaaattccttcgtggtggatttcaaagataaggtggatggacgggcagataacagatattcgtctggcagctgctatcttgcgggcagggcgacgtggggtttcctccgaagccgaggttgagtttgccttctgttgccgtggccgagcccgagccaaggggtcgggcgaggcggaagtcgttcggccgaggcccagggcggagtccgagccctggggtcgggcgaggcggagtttcgtcgtcttccaggccttagcccgagtccgagccctggggtcgggcggagcggagttcgccgtcttccgggtcctagcccgagtccgagccctggggtcgggcggagcggagttcgccgtcttccgggtcttagcccgagtccgagccctggggtcgggcggagcggagttcgccgtcttccgagtcttagcccgagtccgagccctggggtcgagcggagcggagttcgccgtcttccgggtcttagcccgagtccgagccctggggtcgggcggagcggagttcgccgtggcgcctttggcaaggcctgattgcctgtcagactcactctgtcgagtggcactgcagtcggagtggcgcaggcggcgctgtccttctgtcagactggccagtggagcggtggagtga

SEQ ID NO: 6816 - DNA, 423 bp, Zea mays
  Peptide Sequence Number=SeqID_50191
atggacagtaccaccgcgtcaaggaagcgagcttcgccgccgtcgccttcggacgagatccattttcgaacctttggcggcaacgaaacgatgatgatggagaagacggggagcacgccagagctcggtcgaacatggacagtaccaccgcgtcaaggaaagagacgtattgctagcggaaagtcgcagcagtcggcagttggttcgaggtgtttattgacatggggaaggttgatgtcctctatgatggcgcggaagaattcggagacggggatcccccgtccgggatttatcctcacgagtaatggggatgaggaagaaatgtcccccgcgagcgttcttggggatcccggtggggaaaatttttcttcgcggggatggggaggtattccccaatggggatttccctgttgccatctctag

SEQ ID NO: 6817 - DNA, 3186 bp, Zea mays
  Peptide Sequence Number=SeqID_50192
atggggattctcgcgaaggagcaggagtggtcggtggcctgcggcgcagaccgcagagcatgtgagagctgcggcggctggggggtggagcctgggatgggcgtgggaggaggcggagggcaggccgcggtgtcggcgccggcgccggtgccggcggaggaggcggggaaggatgcggaggagggcggcgggtggaccgtgaaggcgaagctgatcgccgcggcggtgctggtgtgggtgctgggctccgcggcgctctgggtgttcctgcactcctacttccgccacgcggcgctgcgcaaggcggaggaggcgctcgtcagcatgtgcgaggagcgcgcgcgcatgctgcaggaccagttcgccgtctccgtcaaccacgtccacgccctcgccatcctcgtcgccaccttccactacgagaagcacccgcccgcgctcgaccagaacacgttcgcggactacaccgccaggacgtcgttcgagcggccgctgctgagcggggtggcgtacgcgcagcgggtggtgcacgccgacagggagggcttcgagcgccaccaggggtggatcatcaagaccatgaagcacgagccgtccccggcgcaggacgagtacgcgcccgttgtatactcgcaggagaccgtctcctacatcgaggggctcgacatgatgtccggcgaggtctgcggcgacgtttcccgttcgtttcttgccgatgggctgcagttattctctgcaggtgttggttctgaacctggttgcgtttctgtggtgctgcaggaggaccgtgagaacattctgaggtcaagagcatcggggaaggcagttctcactcgaccattccggctcatgtcgaatcacctgggtgtcgtattgacttttcctgtctatcatgcggatcttccttctgatgccaaggaggaggatcgtgttgctgccaccgcaggataccttgggggagcatttgatgtagaatcattagtggaaaatttgttgaggcagctagctggcaatcaggaattggtggtaaatgtttatgatgtcacaaacatttcgaaccctcttgtcatgtatggatcagaagttcctcttggcaacccctcaccatcgcacatctgcatgctagattttggtgatccattcagaaagcatcatatggtttgcagatacagaaacaagcctcatgtcccatggtctgcaatttctaccccatctggtgtctttgtcatatgtatgcttgtggggtacatcgcgggtgccgcttggagtcgttatgataatgttaaggaagattgccggaaaatggaggagctgaaaaaacaggcggaagcagccgatgttgctaaatctcagttccttgcaactgtttctcatgagatcagaacgcccatgaatggagttctaggaatgcttgatatgctgttagacactgacctaacctcaactcagagggattttgcacaaaccgctcaagtctgtggaaaggctttaatatcgctaatcaatgaagtgcttgacagagcgaaaattgaagccagaaagttggatcttgaatctgtaccatttgatctgagatccatccttgatgatgtcatctcattattttcttcaaagtcaagagagaagggaattgagcttgatgtatatgtctctgaaagagttcccgaaatcttgttgggtgatcctggaaggtttcgacagataattacaaatttagtgggcaactcaattaagttcacagaacggggacatatttttgtacaagttcatctggcagatcattcaaatcttgcaacagaatccaaagttgagccggtggctaatgggatgaatggacatacagatgagaaaactgctgtagcaaccagtgtttctctcaacacactaagtggttttgaagctgctgatagccgaaatagttgggaaaacttcaagcttttgctttcttatgagaaaaatgagatgccctatgaaagtgtatctgataaagttactcttgtagtaagtgtggaagatacaggaataggtataccattggatgcacaagccaaggtgttcacacctttcatgcaggctgatagttcgacttccaggacatatggtggtactggaattggattgagcatcagcaaatgtcttgttgaactaatgggtggtcagataaactttgtcagccgaccacatgttgggagtacgttcacatttactgcggttctcaaaagatgtgacagaagcgctattggtgacagtaagcctgttatgttgcatcctcttccatccagtttcaaaggtttatctgcactattggttgatagaagaccagtaagagctactgtaactaagtatcacttgcaaaggctgggaattgcctgtgatgttgttgcaaccattgaactggctcttggtgtgctgtccgggagaaatggcagttccctaaccagtatgaagcaaccatgcatgttattgatcgagagtgattcatggggcttcaatattgatgtttctttacgatctagactcctggagatgaagcagaatggtcacacacatgtattacccaaaatcatccttcttgcagctgcagaatcgggcaaactcaaagaacactatgcagttgattctgtgatcacgaaacccctgaaagcaagcgcacttgccgcttgtctgttccaaacacttggcatcaaacagtcaagcaacgagagaagtgacaactcaggttctctttacgggttgcttcttggcaagaacatattggtggttgatgacaacaaggtaaatcttagagtggctgctggcacgttaaagaaatttggagcaaaggtggagtgcgtggagagtggaaaagatgccctcgccctcctacaggtcccatataagtttcatctttgtctcatggacattcagatgcccgaaatggatgggtttgaggctaccaagcaaataagggcaatggaagcgaaggcaaatgagcaggcagtcgcctgtgacaattcagaaatagatggtgcgacaagggcagcaagatggcgcctgcctgttcttgcaatgaccgccgatgtcatccaggccacccatgaagagtgcacgaagtgcggtatggatgggtacgtcacaaagcccttcgaggagaagcagctcttccaggcgttgcagaagttcttggaccccggcatgtcctgctaa

SEQ ID NO: 6818 - DNA, 477 bp, Zea mays
  Peptide Sequence Number=SeqID_50193
atggatggcgacgctacggcggagaagtttctcgcagccgcttccttcccagacaagagcgcgcgctcggaatactccgaggaagacgcccgaggcgatccgcgggcgaccgaaccgccgtcggagaaggtatgcgtcgatccgtcgtcgcccgcgaagcgtttgtcttcctccggccgacgagcagcagtggggctcgtccaagcgactccgcccctaaccttcgcggaccggcgacccggccgatccgtgcgaagacgccggcgccgttcgtcgctgtccgccggaacgtttgggttggggtcgaggtcgaagggaggtcatccattcgcggacagatccacgctcagccgatctgcgtctttcgaggtacaaggtccaagatgtttcctaagtgccatgaacaatttaatttcaccaattaggaacaagactgcccctaattttttcatgtatgcaccttggctagccaagtag

SEQ ID NO: 6819 - DNA, 360 bp, Zea mays
  Peptide Sequence Number=SeqID_50194
catggtgccgtcgacaccggtgctgtggaagatggcagtaacccaaggaacgccaagaagctgaggcctgatgccagcagcgtggcctccttcctagacaagtaccgaagagaattttccgtcgtcgtcccgtttgctattaaccatgatcgcaagcagcaggactattgttcaactactaacgaagcagacgcaaacaaatcggttgaattctacgattttctccaagtgaatgcgaactcgagcgacaccaagtgtggttcgagcatcgaggagcaggaggagaaccgggatgatcaagccgaagggcaggtgcagttcatagacttcctggaggttggggtctctcatccccagtga

SEQ ID NO: 6820 - DNA, 723 bp, Zea mays
  Peptide Sequence Number=SeqID_50195
atggatcaacagcagcaccaggagcggccgtgggaggtgtaccgggagtgcatgcgcaaccacgcggcgaagctcgggacatacgcctccgacggatgctgcgagtacacccccgacgacggccagcccgcagcgatgctctgcgccgcctgcggctgccaccgcaacttccaccggaaggcgttcctcgccgacgctgcggcgggagcgcacggcggcgcgcacggggcaatgctgccctctcccggcgcgtccccgggctacggcatgcaccacatggcgattgctgcggccggcatgggcggtgacgccggcgcgcacggctccgggtccgggggcaggcgccggacgcggaccaagttcacggacgagcagaaggagcgcatggcgcggttggcggagcggctcggctggcggatgcccaagcgggagcccggccgcgcgctgggggacgacgaggtgggccgcttctgccgggagatcggggtcaccaggcaggtcttcaaggtatggatgcacaaccacaagtccggtggtggcggcagccagggcgagggcgccagcgctggcgctgccggagccgctcagacgacgtcgtcgtccacgacgcgtggcggcggcggcggcggcgttgttggaggaggcgggagcatgtccacggcgatgatgggcgccgacgtcgaggacgacgaggaggtgaggggcagcgagatgtgcatgtag

SEQ ID NO: 6821 - DNA, 891 bp, Zea mays
  Peptide Sequence Number=SeqID_50196
atgcagcccggccgcacccctccaccggcggtcacccaagatggtgacctccggcttgatggtgggggaaagcgagacgggctgcggcccctgcccctccctcagcctcaaggattttcatcaccaaggctggggaggggagtgtgccgagttggagtcggcccctgcgtgggcggtggcccgctccttcactcagtgatggggggaggagcggttgttgtccgtggcgctggcagctgcagcgtgtccggctttcggacgcgagtggcttcggagccgctcgcggcgccggcgtccgccacggcagctggaagaggttcttccgccggcgtgatagccagggccggccacgggctgacctccaactctacggccttctgcccgtccttgccttacgagtttcggcatgggcgggggcctcctggcagcagcacccgccctgaggtcagtgctgccgctgttcgaccccccggagcagaagtcgtcgtcgtcgccgctgctggagcaggtgacggcgtgccgttcgtcggccttccgttgctccgcaggccttcccctcggagtggggttgttcgtacctgcggagggggaaccggagttccatttgtaacggcacttcgaatgccaccgggttgcccgtcagcggggccgacgccggagtcgatcagccgaggcctcgggccgggctggcgcccttggaagatggtcggccgaggccccaggggtaaccggccgagccgcctgctcgggccggattcccggagaagtccctggaccgcgtcgccgtccgaggctgggtcggatctcactgaaggcgtcgtcgatgccgagggtgctataccccccttccagcgtgaagacccgatcctacaggatcaggtttccttgtag

SEQ ID NO: 6822 - DNA, 372 bp, Zea mays
  Peptide Sequence Number=SeqID_50197
atggcgcaccggacagggtccggtgcaccaggtcgtacagcagatgaaccagccactctcaggaattctagggcgcgcttcgctataattcatcggactgtccggtgtaccagcggagcaacggctctatgcgccagcggtcgactctgtcgcgatgaacagtggatgtcagaagtcagagggcaccggactgtccggtgcaacaagacgacaaagactccaacggttgaccagctccgaaccctaacggttgcgctgatgtggcgcgcaccggacagtacacagtggctctccggtgatgcaccggactgtccggtgcgcccatcgctagcagccttcaccaacggctatggaagtggttgggggctataa

SEQ ID NO: 6823 - DNA, 1086 bp, Zea mays
  Peptide Sequence Number=SeqID_50198
atggggcggaagtggaacgagctgctgtcgtcggctccatggaggacgggggaggcggcagaggacgaggacgcggcaaggatgagccgagaggggaaggtcagcgtcaccagcaaccccgaggagatgcccaccatgagcgtgccctggagcagacgcccggacctcgacctcaccatcgacgacttcgaggaggacgagatcgaccccgagctgcgctactccttccagcggaacagcagggggccctgttatgcatcagacacctttggtgtgcgacgagccgatgacaccgtgcttcctttactacaggaattttatctagatttggcagaagacaacagaaaaattactccacgagattacctagagctagcattgaggcctgttcaaggtggaggaagggacatatctgcaaagaatgcgctgctatttgtggtcttgtacttaaaattctcagcaaatatcatatgttgcagattgctcttgaaacatatttacactttaaacagtttgatggcatgtacaaattatgtatgtccctttatgactgctttaaatgtttttgctgttggtgctgggtcagctcgttcaaaatttgaaaagctccttcacagttctctcaaaaaggcctttgaggactacaaaaggaatgcttttctggaggctgacttgcaatgttctaataaagttcagaacatggaatcaaaggtgcgagcagcatgtaacagttcgaatgaaaaattagatgacatagtcaggctccttgatgacctactcaaagagtatgagtcaacggcctatggtcctggaaaatggaaaaggctagccacattcttacagcagtgtttggctggccctgttctggaccttttcagaagacagttagagcatatagatgctgaaaggaacgccctgagattgaaatgcaattcaagagatgtggaactatctgagaaggataagaacgtgggtacccacgttcttaatgttaagaacgtgggtaccgtcgaacttaatgtgcagcccacgcagacccacgcaggccacataagttcgacggccacgtgtccccgtcgaacttaa

SEQ ID NO: 6824 - DNA, 4836 bp, Zea mays
  Peptide Sequence Number=SeqID_50199
atggtcgcgcaccaccagaagacggtgatcggcggcggcgcgctggagtcgccaccggacctcgtgaacttccttggcggcatcgacccgtgtgacggaagacagagcgggtcgagggaactgtggaacgacatccactgtcgcttggtggagcccgcggcatgggacgtgctggagaacttcgagcagaggtggaagaagcaggacaagggcgacaacctcctagtggcgctgaacagggcgtgggcggagctgccggagaacaatggttgggcgaatccacggtctggagaaggagggcgttggtggggacttgatggacagggcgacagaggtatggcttttccagtgctcgatgaaatgcctcacgatggcagtgaggcggtgattgttccattctctgaaggttttgattatccaatgttcgatgaaatgtctgctgaggaggtggtctgggatgcagaagtgctacttggttgtgattcacgtggcctatgtcagcggcttgctcatgaggtgggtgaccagatgcacagcgcttgcgagaaggatgttgtgcctgatgccccatggatgtttgttggaatgtcacagcaagcaagtacacacccagtgttcagggaaatgggtcctaaagttgcatgggatgaggagatgcaaactgaaagtcacatgcatgaaggtttactgaagcagcttgctcaaggtggagaagccttaaaagaatcagctaacaaggatgatgttggtgatgatgtgggggctctgagaggtgaagaagccctagtagaatcgaccaagaaggattctgatgttgaagatgaggccagcaggcctcacccaccgagggaggttatgccagatgattcacttctggtggatgagccggatgaaggtccagccaggtcatggatgcgcagtgggaggggagctatgccatggttgataggttgtttggatatgcatggaccagcagcatggggcctgagtgttggagcatctggttggggtcatcagggtggtatttctacttcactcatgcctaggatgcaaactactggaccaagttctaagggaggagctgacattcagcctatgcaggttgacgagaacgtgagctatataagtggactatcagagtacattgatgctttacaggaaatggtttttttcccattgctatatccaattttttttgcaaactatcacatcacttctccaagaggcgttctgctttgtggtccactaggcacaggaaagacgttggttgcccgtgcattagcttgtgttgcctccaaagctagccagaaggtcaattttgatatgcgcaaaggagctgttgttcttagcaaatgggtgggtgaggctgaaagacagctaaagctattttttgaggcatctcaaaaaaatcaactgtccattataatttttgatgaaatatatggcctggcaccggtgaggtctagcaagcaagagcagattcacaattcaattgtttcaacattgcttgttttaatggatggccttgcttctcgtgggcaagttgttttgattggagcaactaatagaattgaggtcatggatggggcattgcgtaaacctagctgttttgatcatgagttttattttcctttacctgactctgaggctcgagcagaaaaactggatattcatacaaaaaaatggaaggatcctccaccgaggaaactaaagatggaacttgctgctagctgtgtgggctattgcggagctgatttgaaggcattatgtacagaagcagctattagagtatttagaaagacgcattctcaggtttatgctagtgatgccaagttctcctatgaaaatttcaatggatcaactccaatactatacattgtgaaggatatgaatgagccatccatcttcaatggctctgaggtcctcatgccaaaggatgcaatgcactatggagatgttgaacatcgagaaatgcatactatacatggagcaagactgaagttaaggaagcagcagaaccatggcatcccgtttctggggacaggtacttgctttctcttgcgtaatggtaccagcgtgccaggggacagtgagtctgaggaggaggaggtggaagaagttgagtcagaacagggcagtgatagtgatgatgatggaggtcgaggtggtgcgggacgcggtgcccaaaaccgatatttgaagaatcaagaagatgacagcgatgagtctgatacaggtcaccgtgtgatccgctccctgagggacaagcgcaacgaggagatgagatctattgttgatcagatgcgtaatgcaatgaagatcaatgactgggtgagcttgcaggagagttttgagaagcttaacaaacatcttgagaaggttgttcgtgtcaatgaatctactgaggtaccaaaaatgtatatcaaagctcttgtgttgctggaggacttccttgccgaagcccttgcaaacaaggaggccaggaagaagatgagcagcagcaattcgaaggcactcaatgcgatgaggcaaaaactcaagaagaacaacaagcagtatgaagagcagatccagaagtgcagggagcatccagagagttttgaagatgaagctgcagatgataaagatgtggatgatgacgatgctgatgaaagtgatgcagagattgaagatcctgataaaatagctatgtcagaatcagaagaggaacaagatgaagaggatgatgataaggatggttgggaacagaaaaggagtaagaaggataagctgatggataagcagttcttgaaagatccaagtgaaatcacatgggatattgtcgataagaaactcaaagagattatagcatctaggggaaagaaaggtactggaaggatcgagcgtgttgagcagttaacatttttgacccgtgtggccaaaacaccagctcagaagcttgaaatcctcttccatgtgatttctgcgcagtttgatgttaaccctagtctacttgggcatatgccagtcaatgtgtggaagaagtgtgtcaataatatgcttcttgtgcttgatatactccagcagtatcctaacattgtagtagacacctcatttgagcctgatgagaatgaaactcaaaagggtgcagactacaatggaacaatacatgttgtcggtgacctggttgcattccttgagagactggactctgaatttttgaagaccttacagtgcacagatccatacacaaaagattatgttcagaggctcagagaggaacccctgtttctggttgtcgcacagaacgtccaagattatcttgaaagggttggaaacttcaaagctgctgccaaggttgcactgcgccgtgttgaactagtttactacaagccccaagaagtgtacgatgcaatgagaaaactcgcagagcagcctgaggactgtgtggatgatgatgatgcagaggctggtgatgaacataaagcagtagatgacaatagaggaccatcaccatttgttgtgattccagaggctgtgcacaggaagcctacttttccagaaagcggtagaactttgatggatggattgatgttcttaatttacaagtatggggatgaaaggaccaaagcccgtgcaatgctgtgtgacatatatcaccatgcgatctctgatgagttttcagtggctcgcgacttgcttttaatgagtcatttgcaagatggtattcagctcatggacatatcatcgcagattttattcaacagagtcatggcccagttagggctgtgtgctttcagggctggtttgataaatgaagcccatggttgcttgactgagctctattctactgggagggtgaaagaattgcttgcacaagtgctaatgcagtccctatcactgcaggaaagacttgagaggagaaggcaaatgccttaccatatgcatataaacctggagcttttggaagccacacacttgatctgtgcgatgctgattgaagtccccaatatggctgccagcacctatgacaagcggagacctatgagcaaaacattccgaaggcttcttgaagtgagtgaaaggcagacatttgttgggccgcccgagaatgtgagggaccatgtaatggctgccacaagagccctcaacaagggtgatcaccaaaaggctttcagtgtcataaattcgttggagatttggaagcttttgaggaacagagagcatgttcttgagatgttggagcttaagatcaaggaggaagctcttagaacctatctcttttcatactcgtcttcgtacgagtccttaagccttaaccagctcactaccatgtttgatctcagcgagcagcatgcccacagcattgttagcaagatgatgatgcatgaagagcttcatgctagctgggaccagccaacaaagtgcatcgtattccatagtgtggaccaaactaggcttcaggggctactcttccagatggcagataagctctcggtcctggtggagatcaatgagagggcatacgaggcaagaactggtggtactctcgagggggtacctcccaggcgcaggggcgagggtcaggataatatgggaaagtggcaggataactttgtctcgtcacaggggcggcagggtggtggcaacaggtttggatactccggcagaggtgcaatatctggtcaaagtggtggtggacaccagagggacaggggcaatcagggttaccgcgggggctatggtggcgtttcaaggtttcaggatgcaaggggtcgcaaccagtctattccatcaggcagaggtggtgatggtggtgcacgcatggtgaacctgaacaggatgggtagagtttag

SEQ ID NO: 6825 - DNA, 945 bp, Zea mays
  Peptide Sequence Number=SeqID_50200
atggcgtggatcagaaaaatgaacttcctgcagcgcattcatgtgggcaagtggatgctgatggggatcaatggtatgaaattaaagcagcattcaagcttgaaaagcagccatccaaagttactgcatatgttcaaggccctcctgcaggtgttgatcttagagtcatggacttttatatatatgctgtcgaagaaaatagacaagttcttccaattcatgacgcttgtaattgtcagtcttgttgtggataaaaaccaatgggtcaattgtgggcaagtggatgctgatggggatcaatggtatgaaatcaaagcagcattcaagcttgaaaagcagccatccaaagttactgcatatgttcaaggccctcctgcaggtgttgatcttagagtcatggacttttatatatatgctgtcagagaaaacagacaagggtggtctgatatgggcatagggctactctgtgggatcgaaaagtttgatgcctcaagaggatttaggatgtccacctatgtgtattggtgcattcatcagcttccatacgaagacatgacaccttttcaagcagcggttgccattgttcaaaagattgactggatctatatgggattgactctgctcgtgctgaaggagaaagagcgtgcttggcttgcgggcccagtccatggcccaagtcgagatgctgatacaaaaggacattcagaacacgagaggggcatcaaagagaatatccagaacagttttccagtcgtcttcctcgtggagaagcggccaggcgagtttgtcggagtctcacgtcccgttcctcgtcgacggtggccacgggacgtgacaagtggtatcagaggcttcgggtcctcggcggtgcggtgtggtcacgctctctcgacagcggtcctgttcggcggccacgattttgcgatgctagagttccttatctga

SEQ ID NO: 6826 - DNA, 306 bp, Zea mays
  Peptide Sequence Number=SeqID_50201
atgggatccatcaggcgggacaaggtgcaggacaaggacaagcagtactggtccttcttccgccgccccaaggagacgaccaccaaggcggcttcggcggagaaggtgccggccgtcgtcgacaccttttacaacctcgtggccgaaggcaggaggtcggggctcaccttggaagaactggaggaagatgcagacgacgacaatcaccagagggtgataatttgtcgagactctgagagcgacagcttagcttcgggtggtcgtgttgtggttgggaaaagaaagcaagagggcggcgacgagtag

SEQ ID NO: 6827 - DNA, 840 bp, Zea mays
  Peptide Sequence Number=SeqID_50202
atgacgcgcctcctcgactgcagaaccagtgtcgcgactcgaggtagccctgcgcatgacccaacagtgccaatcgagcacaacgatcacggggaccaggaaaggggatatttcgaaagggatccttctccacgaaggaagcaggcctcgagccctcctactgatcaggggttcgaaggctggcccctcggaagggctggcccctcggaagggttcgacagccgccccaaagcacgcagagcgagggatgactctgggtacgtccgttacatggccgaggctcgggctacgctcccgaggtcaaggcctcgtctaccaagggacgcgatctcgcctcgcccgagcccgacctcgggcgggaacagtagtcctggactaattcacgcctcgcccgagggcctcctcaagcgacgggtgcaccctcgactcgcccgaagcccagctcgggcaggcttcgttatgaagcaaccttggccaaatcgcctcaccaaccgaccgtatcacaggcgcattcaatgcggggatcgcctgacaccttatcctgacacacgtgcctcagtcggcaaggtcgaagatgaggctgacaacagccaagttcagcctcgggtgcaacaggaagctccgcctcgcccgaccccagggctcggcctcaaccttggcctcggaaggtcgtttacgcctcgcccgaccccagggctcggcctcaacctcggcctcgggagggaattgcgtcctcacccgacctcggcctcggcctcaggaggagtctccgccttgcccgaccttgggctcggaccgaccgctccacgggggatacatcattaccctacccctagctag

SEQ ID NO: 6828 - DNA, 756 bp, Zea mays
  Peptide Sequence Number=SeqID_50203
atggagtcaccaaccaacagatttctcaatcttcccgccatgattttccccgtgctcttgctttttctcagaggctcggccgctggcatcgcatctgacacgctcagcagcgatggcaacatcaccgacggcgagattttggtctcatccggcagctcattcaccctgggcttcttctccccgaccggcgtgtcagcaaagaggtaccttggcatctggttcaccgcgtccccggatgccgtctgttgggtcgccaaccgtgacgcccccattagcaacacctcaggagtaggagtactggcagtcggcagcaccgggagccttcgccttctcgacggctccggccagaccgtgtggtcttccaacacgacgagttccgctcctgccgtggcgcagctacttgagtccggcaacctagtcgtgcgacagctgagcagcggcaacgtgctctggcagtcgttcgaccacccgtcgaacaccttgctcgccggcatgagactcggcaaggacccgaagactggcgcggagtggtcgctcacgtcgtggcgcgcgccgaacgacccgacgaccggggactgccggcgtgtgatggacacgaggggcctcccggactgcgtctcctggcaaggcaacaccaagaagtaccggacggggccctggaacgggctgtggttcagcggcgtcccggagatggcgtcctactcgactctgttctccaaccaggtcgtcgttgtgatgacccgtggccgcggctag

SEQ ID NO: 6829 - DNA, 3045 bp, Zea mays
  Peptide Sequence Number=SeqID_50204
atggcatcccgtttctggggacagggggacagtgagtctgaggaggaggaggtggaagaagttgagtcagaacagggcagtgatagtgatgatgatggaggtcgaggtggtgcgggacgcggtgcccaaaaccgatacttgaagaatcaagaagatgacagcgatgagtctgatacaggtcaccgtgtgatccgctccctgagggacaagcgcaacgaggagatgagatctattgttgatcagatgcgtaatgcaatgaagatcaatgactgggtgagcttgcaggagagttttgagaagcttaacaaacatcttgagaaggttgttcgtgtcaatgaatctactgaggtaccaaaaatgtatatcaaagctcttgtgttgctggaggacttccttgctgaagcccttgcaaacaaggaggccaagaagaagatgagcagcagcaattcgaaggcattcaatgcgatgaggcaaaaactcaagaagaacaacaagcagtatgaagagcagatccagaagtgcagggagcatccagagagttttgaagatgaagctgcagatgataaagatacggatgatgacgatgttgatgaaagtgatgcagagattgaagatcctgataaaatagctatgtcagaatcagaagaggaacaagatgaagaggatgatgacaaggatggttgggaacagaaaaggagtaagaaggataagctgatggataagcagttcttgaaagatccaagtgaaatcacatgggatattgtcgataagaaactcaaagagattgtagcatctagggaaagaaagtttgatgttaaccctagtctacttgggcatatgccagtcaatgtgtggaagaagtgtgtcaataatatgcttcttgtgcttgatatactccagcagtatcctaacattgtagtagacacctcgtttgagcctgatgagaatgaaactcaaaagggtgcagactacaatggaacaatacatgttgtgggtgacctggttgcattccttgagagactggactctgaatttttgaagaccttacagtgcacagatccgtacacaaaagattatgttcagaggctcagagaggaacccctgtttctggttgtcgcacagaacgtccaagattatcttgaaagggttggaaacttcaaagctgctgccaaggttgcactgcgccgtgttgaactagtttactacaagccccaagaagtgtacgatgcaatgagaaaactcgcagagcagcctgaggactgtgtggacgatgatgatgcagaggctggtgatgaacataaagcagtagatgacaatagaggaccatcaccatttgttgtgattccagaggctgtgcacaggaagcctacttttccagaaagcggtagaactttgatggatggattgatgttcttaatctacaagtatggggatgaaaggaccaaagcccgtgcaatgctgtgtgacatatatcaccatgcgatctctgatgagttttcagtggctcgcgacttgcttttaatgagtcatttgcaagatggtattcagctcatggacatatcatcgcagattttattcaatagagtcatggcccagttagggctgtgtgctttcagggctggtttgataaatgaagcccatggttgcttgactgagctctattctactgggagggtgaaagaattgcttgcacaagcggcatgccgttcgcttgagcttaagctagaaagtagcagccagccgtgtgctaatgcagccctatcactgcaggaaagacttgagaggagaagacaaatgccttaccatatgcatataaacctggagcttttggaagccacacacttgatctgtgcgatgctgattgaagtccccaatatggctgccagcacctatgacaagcggagacctatgagcaaaacattccgaaggcttcttgaagtgagtgaaaggcagacatttgttgggccgcccgagaatgtgagggaccatgtaatggctgccacaagagccctcaacaagggtgatcaccaaaaggctttcagtgtcataaattcgttggagatttggaagcttttgaggaacagagagcatgtccttgagatgttgaagcttaagatcaaggaggaagctcttagaacctatctcttttcatactcgtcttcgtacgagtccttaagccttaaccagctcactaccatgtttgatctcagcgagcagcatgcccacagcattgttagcaagatgatgatgcatgaagagcttcatgctagctgggaccagccaacaaagtgcatcgtattccatagtgtggaccaaactaggcttcaggggctactcttccagatggcagataagctctcggtcctggtggagatcaatgagagggcatacgaggcaagaactggtggtgctctcgagggggtaccgcccaggcgcaggggcgagggtcaggataatatgggaaagtggcaggataactttgtctcgtcacaggggcggcagggtggtggcaacaggtttggatactccagcagaggtgcagtatctggtcaaagtggtggtggacaccagagggacaggggcaatcagggttaccgcgggggctatggtggcgtttcaaggtttcaggatgcaaggggtcgcaaccagtctaatccatcaggcagaggtggtgatggtggtgcacgcatgcgtttgataaaatacactaacacgaacctcaaatacggtgctgaatcctccacggccaatgacattgtctctacagagaaatcatttgtagccctcatcaaagtagacagttcaacagaagcaactgatggagcttcacgttccgcttgcatccgcctgaggcaggtgcagaaggacgtcgacgccgcgccggcgtcgcagacgtccctggggccctggaagaagaaggaggcgcgtgagctgctgcgtacggatgggaggacgagctgtgggagcgggctagggacggagcggctccgtcctattgattttttggagtgggatggttccggatctgaggagaatatttcctaa

SEQ ID NO: 6830 - DNA, 444 bp, Zea mays
  Peptide Sequence Number=SeqID_50205
atgggcaagaacaacaagcgcaagcgtgaaccgactcctccatcggaggagtttggtgactcggaatactcggaggaggagttctcctccgagcccgaggggtctccggctcccgtctctcccccggcgtcgtctgatgactcggacgactcccaggggatagccgcggaggtctggacgtacatccgagctgtcgagcgcgtcgggctcgaaggctcggatgagtcggagtactcctcggatgaggaggactcggacggcggcgacgagggtgaagacgacgacgacgacgacgacgacgatgacgacggcgacgacagtggcaggggcggcggcgacggtggcagggacagcaccaagggcgacagcaggggcagcaccaaaggcagcagcaggggcagcaccaagggcggcggcggcggcaggggcagggccagtggctag

SEQ ID NO: 6831 - DNA, 1035 bp, Zea mays
  Peptide Sequence Number=SeqID_50206
atggctgccccgcgaaccactcgtcccgtcacattaactctgcggcaggacaggcgacacctttggcaggcgaagcaggtgacgcttcacctccgccataatgaccgcgtcaaaaaagggaccgggaaaggggatactccgaaagggatccttctccacgaaggaagcgggctccgagcccccctactgatcagaggttcgaaggctggaccctcgaaagggttcgacagccgcctcagagcactcgggctccacgcccactactggtcagaggttcgaaggttgccccctcggaagggttcgacagccgcctcaggccactcgggctccgcgcccactactgatcaggggttcgtgggctggccccccgatgggttcgacagtcgccccagagcacgcagagtgagggatgactctgggtacgttcgatacataaccaatgatcgagctacgctcccgagaggctcgggggctgctctcgcaaacccagctccggccaaaccgttgacagcgtcaacataccagcccgagaactcggaacctgactatgcacccgggcaacgaccagaaaacagcgccgcctgcgctgctccgactgctgtgccacccgccagggtgaggcttacagcagccaagtccagcctcgggcgccataggaatctccttgcccgaccccagggctcggactcaacctcgactccagaagacggtctccgcctcgcccgaccccagggctcggactccacctcgacctcggacgatggtctctgcctcgcccgacccccgggctcggactcaacctcgacccccggacgacggtctccgcctcgcccgacccccgggctcggactcaacctcaacctccgtacgacggtctccacctcgcccgacccccgggctcggactcaacctcgacctcggaggagtcaccacctcgctccggccgaccacaccacaaggggggccatcattaccctacccctagctagcccaggctacggggaacaagaccggcgtcccatctggctcaccccg

SEQ ID NO: 6832 - DNA, 747 bp, Zea mays
  Peptide Sequence Number=SeqID_50207
atgccttcgcactttcctcatgcgtcgcttccttccgccttccgagcccccggatggggagccccggctgcattcccccaccaatgggcagtttggtggagaagcgagccgggctgcagcctccgccccaccctcagcttcaaggatcttcgtcatccgtgctggggcggagggcgagatgagccggagctctacctcccgtacgggccgacgggccacctcctccttcagcattcatgggagagggcgctcaccggcttagcggaaggggcggacttcgacaacacgtggccgagcggccgcaagcatcgtcggctccagtgtgcctggtttgctggctcagctggctctggcacggcttccggtgccatctcccaccgctgggcggagtgcggctatctgcctgccgtacgggtggctgttgcgtcgcgcgcaccgggggaccgcccaagacgtcgcgcgctgctagggcggcgttcgtgttcttgggctgtcctacccttgctccgacacgacgccttcgcgcgggggtcggtgctcgcccgtctgggaggacttgattggggatctgccggtggacaggtggccggagaagtcctcgtcgccgacgagatcgccgctgccatctacgctccaggcctctggctctttggctttgatagcttgtccttgcccctcgagtggagacgtgggcgagggccttgtcacagcagcgtctaccctgaggtcgtcgctgctgctgtttga

SEQ ID NO: 6833 - DNA, 1596 bp, Zea mays
  Peptide Sequence Number=SeqID_50208
atggatggcggcaacaacccccgcagcgcgccagttgctgccggcggcgatcaccactcgttgagaaaacgacggaagcctcccgtcgtcattccggagataaaaccatcggtgctgccaccccttgttcgaagacacaaggatggcagggatgtactgctgcgcgtgcccctgcctcagctggagggtgcagccaccggcccgcactaccatacagaccttcttcgcatccgtcgtcaaggcaaagagctccgcagagaagaggtgggtccacagatcctagtgaacttcgatccccagaaagccctcacaaaccgccgcgaagatggctgcttgcgcaatggagttggggttgaggttgtgcagctccaccccgtagtggtgcaggagcgcgcgcgtaaagcggctcgctggcactccaaacccccgctcatggaaggggatgaagctaaccacgtaccccggcggcagggaagggacggcctcgctcggggccatccactctggctgcgccccaccagagaggggacggagcagaccatcggcgacgagggcctccagatccttcacgacgacggtggaggagggccacgggtcgcgcggcgggacaatggtcaccctgtcagccatcaccgaacggaggtggtggaggcagaggggatgaggctggcccctcggaagggtttcgacagccgcctagagcactcgggcttcaagcccattactgatcaggggttcgaaggctggcccctcggaagggttcgacagccgccccagagcactcgggctccgcgcccactactgatcaggggttcgaaggctggcccctcggaagggttcgacagtcgccccaaagcatgcagagtgagggatgactctgggtacgtccgatacatggccaaggctcgggctacgctcccgaggtaccctaggacatttctgagaccggcgggaatgatttgtaatggaatcccatcggagggaggcatcgacccctcggaccctatcgaaggggtccgggtccggcgaatcacccgcaggggacgcctgacgccgtatcctgacacacgcgcctcagtcggccaggccgaagcgaagactgacaacaagtcacgatcaaccaccgagttcggcctcgggcgcaacaggaagctccgcctcgcccgacctcaggctccggcctcgggaggaggtctccgcctcgcccgacccccggactcggcctcgacctctgtctcgggaggaatcgcgtcctcgcccgaccccggcctcggcctcaagagaagtctccgcctcgcccgaccttgggctcggaccgaccgcgccaacaggggatacatcattactctatccctagccagctcaggctacaaggaacaagaccggcgtcccatctggcttaccccggcagcggggctcaggcgcttctccgacggccacgctatcacgtgtacagggctcaagctctcccccgacagccacgttggcatgtacacaaggcttaggcatttctctgccggacacgataatacaaggcttgtcccacctcttgtgttccatcccgcgccaacccatctgggcaggggcacgcagtga

SEQ ID NO: 6834 - DNA, 300 bp, Zea mays
  Peptide Sequence Number=SeqID_50209
atgactgcaggcttgtgtgtgacggtggtcgacgacgaggtgaaggtcatgtgggttcgtgccgatggggtatcttctgttataaggaaaagacattgtgccaagtccctggttggcgcagtaaacggcctaccgtcgcgcaacatcaaccgccttaggggtcgtggtgctccggatgtacgcagcaggcctggacctgctgcatggaaggcaccggaccctgtgcctagcgagcggacctccgggatagatcccggacccttccaaatgtggttcggacggttcaccaccgagtcctag

SEQ ID NO: 6835 - DNA, 2901 bp, Zea mays
  Peptide Sequence Number=SeqID_50210
atgccgtcctcgtcttctttcgctgccgctacaccgccggccgttccctcgccgccggccgccgcctcgtctgagacgctgagtagtttattggcggaggagttgcgcgccggggattctgttgactttggcgtatcgcggatgtcgtcgaagagaatgattggagacgaagtcgctcagtttgggtcctgcacattcacgccgaagaccggcaaaaccacgatgcaagtagtggagttggttccctgcgcccgcaacaagtggggcaactggaatgaattttggttttacgttgctgagggcaccgtcgaaggccatgagggactccccgtgtccgagatgtgctctcatttttactcagcgtacccgccctttgaagtggcggaggagaatgtggacgaaggggcccttcggtgcgccgctggtctgagcagtgggcgcgacttggttgaagaattcgtggcatacggggtgtggcccttagcgcatggctgggtgttgggcgaagtgtgccctcgccagatgcctttctatggcggtagggtggtgcggagtcccgccttcgccctgaatctgcaaaaccgcgatccggccgcctttgtgcgtgaggcggaggatggggcggtgcggcttgttggacgttacgtgccgaagacggagggccagcgcagctgggatatccgcgggtcgaatgaccgtttgaacagggtttttgaattaaatcaattgccatatgacggctaccctggtcaagacgatgcggaccgccgtgggaagaaaccggcggtggagactggagacgaccctgcgccggcggccgccccatcctctaaaaagagaaaattaggtactgctatgggaggacttggggtttctgatggttttgctagagagttgatgaggacgtgcgcggccccgggggaaaggatgtcttcgcccgagctccgggagtcttcggctcggatgctgagggttaccgggggttgttggcctaggaatgttcctatcccccgcgcggctggcagggacttttttacatctcgcatggttcgtcaatggagggtttttccttacgggcggaatattgctgctgttgtgtcagcagtgatggacaaggatcgccagggagctgcacaaaagcgccaggcggctgtcaggctcgttgaagccaggccgaagaggcagcgggggtctgcgaaggctgcggcccccggcggaggccggccgccgccggcgggccaacttgctatggttgcgcctgccgcggcgaccacgacggctgtcgcagtgccaaaggcgaagggcggggctcttagcgccgggggcgaggtgtcagccctcgcgattgtcatggatgaggcgggcgctgcgacccgccggctgaaggaggcgacagaggcgctgagtcaggtggctgacttcgccagccgcactgcgtcgggggccctcatggcagctatggctgccgaagtcgagagacttcggacacaacatgctgacgccgttcgtgagaagtcggccgccgacagcaagtgtcgcaagctggcggacaaggtggccacgctggagggagagaagcctgacctccggcgccagttggcgggggagaggagggagaccaacgaggctcttgttaaggcgcaggctgcgcaggcggaggctaacctggcacgggcggagggcaatcttgccagggagcgcgccgagcagctgcaggagcggctcaccgccctggagagctgcgtggagagggccgaggccatgtcgcgcgcagaggcggagcggacgcgccagctgctcgtggatacataccgtgggctgggcgcggggaccggtgatttcgaagtgccggaccgggagcccggacttcgctgtctggagtgggtgcaggaggagttgcaagcactccccaccgtcgtggagggctttatggcgtatgcctccctggtcacctgcgagggggcgatgaacgcgctctcccgcgaagggtaccggcacttcgaggtcttcgaccaagccgataaagatttcgagcgagatatctttaaggttgaggaccccgtagtgaaggagtccgccggagccctctacgaccggatgtggggtctgcatggacgcgaggtggtcagggagcgggccgagacgacgagggcgcaggcgttgcgtggcgagagggtggacgacttcggggcgttgaacagcatgctgtctgacccggagccgaccccggggaccgcggaagacgcgccgggtgcccccgcatccgctgcggccggcgaaggcctgcccccggaggtcgccgaaggcgcgcctgatgccctcgcagccgctgcgccgagtgctgaagatcccgcagcggtggcggcggaagcagcagcggaaacaacggcggagccaacggcggaggctcccgcaacgtcagagccgtcgcaggttcaagattttgggcctgcgcacacaaccgctactactaaatttttggcggctttgaccgcggaagatggtaatgaatgtggtggatctgcatctgtgtgttttgattgtgctgactctgggagctcggttgagtggactgaggagtcgtcggaggacttggactattttgcggccttggatgtggctgcggcggaggcttcgccgcgcgtcgcggacgcaggagatgcgccaggtcctagtaccgggcgacgacgacgaagggcgattgcgaaacgtagagttagtggggcggagggggctcggcttcgtgtgagtggggctggccggcaggaactgttgtctttgccggccgccgtgaatacaggtgaaggggaactgcgaagtctttttgcgggtgaggagcttaggataatgttatttaattatagggagatgggaattattcctaaggttgagccgatgtag

SEQ ID NO: 6836 - DNA, 390 bp, Zea mays
  Peptide Sequence Number=SeqID_50211
atggcctgccatctctgtcccctcttcaatctccgactcttgctgctgctcggcgccgttctcgggaacgccgacctcggccgaggcggcggagcggaggcttcagatcgggcggagcctgtcggggtaaaactaacaacagtaagtcacggcctctcccgagttcagcctcgggcgcaacagggagctccgcctcgcccgaccccaggcctcggcctcagcctcggcctcgggagaaggtccccgcctcgcctgacctcagcctcggcctcgggaggagtcacaacctcgcccgacctcaacctcggcctcaggagaagtcatcgcctcgcccgacctcagcctcggaccgactacgctacaggggatacatcattaccctacctctag

SEQ ID NO: 6837 - DNA, 189 bp, Zea mays
  Peptide Sequence Number=SeqID_50212
atggcgcaccggacagtccggtgcgccaccggtcacttccaacggctagttctgacagctagcgttggactcatggcgcaccggacagtgaacagttcactgtccggtgcacaccggacagtccggtgcggtgtccggtgtgccactaaaattcaacttcaaactctgcgctctcgggtttctgggaag

SEQ ID NO: 6838 - DNA, 300 bp, Zea mays
  Peptide Sequence Number=SeqID_50213
atgtcgggagcatccgccaagagggagatcgggacaagcgagatgcctgctacaagccatgggaaggctccatccggggagtccgccaacaaggtgaagggatccccttcacacaacaagtcgggtcggagcggtgacaagaagaagatgatgaggaagagtgaggctgacaggcagtcaggcccggccgcaggcaccataggaagctccacttcgcccgacccagggctcggactcgggctaagccccggaagacggcgaactccgctccgcccgacccagggctcggactcgggctaa

SEQ ID NO: 6839 - DNA, 378 bp, Zea mays
  Peptide Sequence Number=SeqID_50214
atggcgcctcctgtcgacgtggctggtctgcgccctaggttgggcgatgtggaagctcctccgaagccgaggtcgagtctgtcttccgtggccgaggtcgagtccaagcccctggtcgggcggagcggagttcgtcgtcttccggggcttatcccgagtccgagcactgggtcgggtggagcggagttcgtcgtcttccgggactttagcccgagtccgagccctgggtcgggcagagcggagttcatcgtcttccgggactttagcccgagtccgagccctgggtcgggcggagcggagttcgccgtcttccggggcttagcccgagtccgagccctgggtcgggcggagcggagttcgccgtcttccggggcttag

SEQ ID NO: 6840 - DNA, 663 bp, Zea mays
  Peptide Sequence Number=SeqID_50215
atggctgaaaggtaccaactcccgcggagttgcgttcctccaacgatgaggcggaaagacggtgggtatcccccatccgggggcttggaaggtggaaagacacgatacataagggagcgcgaagacatggtcgccttccaagggggtcaccctccttttaaaggcgactctccctacttgcgtctccagccgtcgtgggctgagtcttctccaacacactccaaggtcctcccctacgacgcgggggctgggccccacacgtcatgcaagccggctcggagcggaagaagccaaaccgccgcgcgcggcggcgcctctggcaggagaagcgggcgacgcttcgccttcaccataatcaccgcgtcaaaaaagggaccgggaaagggggataccccgaaaagtatccttccccatgaaggaaccaggctccgagcctccctactgatcagaggttcgaaggctggcccctcagaagggttcgacagccgcctcagatcgcgtgggctctacacccactactggtcagaggttcaaaggccggcccctcgaaagggttcaacggccgcctcaggctactcgggctccgcgcccactactgatcaggggttcgaaggctggcccccgaagggttcacagccgcctcagacacagagcgagggatga

SEQ ID NO: 6841 - DNA, 471 bp, Zea mays
  Peptide Sequence Number=SeqID_50216
atggggtgcccctcgagcacgagagacgggtggtccggcggcgtgaacctcgtcgcgaggcctcttctcccaacgcttatcgggttgttggttcgcgttgtgtcgtggtgccggtggcgcaggcttcgttccttcgatgagatcctaagcccgttcgtcggcggtgatgtagaggtccgcctccctgaacagctgcccggaggtagtcggcgacttttgaagtatggttcggacgaaggccgaatcattggatccccgatagaagtcctcaatcaccgctgcttccgcaacctcgaggatacgatttctcatggtctgaaaccttttgaggtacgatcggagaatctcatcccctcggcgcctgatggatttgaggtccaatggctgcatcggtttgtcggagagagattggaagttggcaatgaagcaccgactgaagtcgctccagtcgtcgatgcagtgtcgaggtag

SEQ ID NO: 6842 - DNA, 687 bp, Zea mays
  Peptide Sequence Number=SeqID_50217
atgaggaggtgggctccatcagctgttgcagatggaaacccagggtcgggacgtaaccctaaggcaagtactgaaccaaggagggctccgctaactcttccccagctgggaaggtcccttcaaggtccaggtcccaatcgaggctacctcctgggggccatcgccaactcttccttaagtatgctggtctgcagcctcgacacatcgagcctacatcccaagggggggggccagtcctgtgcgtccgacaacccgaggttcggctctagggaatggacgcttgtctcctggggtggtccggagccgagcagccgctcagcctggtcccgtaccgtgagccagcacgctccaccactctgcgacagggccatgctggaagctagctccgggcagcctcaccagcggcagcgaccacctctgcaccgacggctcgccagcggaggcgaccacctctacgccaagcggctcactagtgacggcgaccacctctgcaccagcaacggtgatcacctccgctctgagcggcttgccagcggtagcgaccacctcagggtgtgcgccatggtgaagaggccctcgctcccgtccccctactggagtgaggacaaggccatccaagccatggagctggaagcacggcggcaggtggcgctggcggtctggccggtgccgcgtgagagcacctag

SEQ ID NO: 6843 - DNA, 231 bp, Zea mays
  Peptide Sequence Number=SeqID_50218
atggctggggggcagcatcagcttgtgggcggtgcaagtctagagatgcgccgtgggaggaagatggagtaccttgatatcctgctcaaggacaccttggagataacagaggccaaggttctgcttgctgaaattcatttgctgaaggagagagtggtgtcaccgactcaactcggggttaccaacaagaggattcctgctgtggattttggtgagccgactgggaaataa

SEQ ID NO: 6844 - DNA, 348 bp, Zea mays
  Peptide Sequence Number=SeqID_50219
atggctgaggtgaaggtcatgcgggctcgtgctgatagaccgggagcggtgaagggcgagtgctgggtcttgactgacggatcagagcagccaggacgtggtggagtggaccgtgttgccggcgtggtcgaggactggcgggacacgcgtctgatcgtagaggacgtgcacgaggtgcgctgctcacggcaggtttggtggtttgggcctcaaaaccacccagcgctacagatgcctggttttggtgagtttgggtctcaaaactcggtggtggcggttccggatagaaccgatggcggcacgcggcgtgatcgcggagggtgcgtcaaggcgaagcactccgtgtga

SEQ ID NO: 6845 - DNA, 295 bp, Zea mays
  Peptide Sequence Number=SeqID_50220
gattggtcgtgccggaaatgatggggtgtttgcaaaagtttgtttgggtttaaagaagacatacggaagctcagaaatggactttgttgagaaatacacctccttggcgtggactttcttcctgaacgccacacgaaacaaagcgatagccccttctagattgtcgccgctgtgggaatgtgccactgacgcatacttgatctggatgcaccgttgttcgcagaaatcaaagaattcagagctagtgaaattgtaccccaggtcggaattggcaagcttcacatctctgaactaa

SEQ ID NO: 6846 - DNA, 648 bp, Zea mays
  Peptide Sequence Number=SeqID_50221
atgcctgccttcccccggaaacccttctggactccccacgggtctagccttttgatgggtccatgcagaaacggttacaacatgaggaggtgggctccatcagctgttgcagatggaaacccagggtcgggacctaaccctaaggcaagtactgaaccaaggagggctccgctaactctcccccagctgggaaggtccaggtcccaatcgaggctacctcctgggggccatcgccaactcttccttaagtatgctggtctgcagcctcgacacatcgagcctacatcccaagggggggccaggaatggactacactacaatagcagggccacgctggaagctagctccgggcagcctcaccagcggcagcgaccacctctgcaccgacggctcgccagcagaggcgaccacctctacgccaagcggctcactagtgacggcgaccacctctgcaccagcaacgacgatcacctccgctctgagcggcttgccagcggtagcgaccacctcagggtgtgcgccatggtgaagaggccctcgctcccgtccccctactggagtgaggacaagaccatccaagccatggagctggaagcacggcgacaggtggcgctggcggtctggccggtgccgcgtgagagcacctag

SEQ ID NO: 6847 - DNA, 471 bp, Zea mays
  Peptide Sequence Number=SeqID_50222
atggggtgcccctcgggcacgagagacgggtggtccggcggcgtgaacctcgtcgcgaggcctcttctcccaacgcttatcgggttgttggttcgtgttgtgtcgtggtgccggtggcgcaggcttcgttccttcgatgagatcctaagcccgttcgtcggcggtgatgtagaggtctgcctccctgaacagctgcccggaggtagtcggcaacttttgaagtatggttcggacgaaggccgaatcattggatccccgatagaagtcctcaatcaccgctgcttccgcaacctcggggatacgatttctcatggtctgaaaccttttgaggtacgaccggagaatctcatcccctcggcgcctgatggatttgaggtccaatggctgcatcggtttgtcggagagagattggaagttggcaatgaagcaccgactgaagtcgctccagtcgtcgatgcagtgtcggggtag

SEQ ID NO: 6848 - DNA, 894 bp, Zea mays
  Peptide Sequence Number=SeqID_50223
atgcagcccggccgcacccctccaccggcggtcacccaagatggtgacctccaacttgatggtgggggaaagcgagccgggctgcggcctctgcccctccctcagcctcaaggattttcatcaccagggctggggaggggagtgtgccgagttgaggtcggcccccgcgtgggcggcggcccgctccttcactcagtgatcggagggaagggcggtcgtcgtccgtggcgctggcagctgcaccgtgcctggctcttggacgtgagtggcttcggagccgctcgcggcgccggcgtccgccacggcagcttgaagagcatccgccctgaggtcagtgctgccgctgctcggccccccggagcagaagtcgtcgtcgccgccgccgctggagcaggtggcggcgcgccgttcgtcggccttccgttgctccgcaggccttcccccatggagtggggttgttcgtacctgcggagggggaaccggagttctgttcgtaatggcactttgaatgccagtgtttttgttcattgtggctgtcgaggcctgaacatgtaccactatgtctcgcctgttgattatctaaatcgcttcaccaagcatgagtcgccccgtgtcaaggtgacgagtgagccgggttgtccgtcagcggggccgacgccggagtcgatcagccgaggcctcgggtcgggctggcgccctcggaagatggttggccgaggcccgaggggtaaccggccgagccgcctgctcgggccggattcccggaggagtccctggaccgcgtcgccgtccgaggccgggtcggacctcactgaaggtgtcatcgatgccgagggtgctacagcccccttccagcgtgaagacccgagcctgcaggatcagattgtcttgtag

SEQ ID NO: 6849 - DNA, 237 bp, Zea mays
  Peptide Sequence Number=SeqID_50224
atgttggtcgacttgtggtttggtggtttgggcctcaaaaccacccagcgctacagatgcctggttttgctgagtttgggtctcaaaactcggtggtggcggttccggatagaaccgatggcggcacgcggcgtgatcgcggagggtgcgtcaaggcgaagcattccatgtgaaggacgtggtcgttggatcgaaaacctaggagttggtccatttcgcccccggtggagtggatag

SEQ ID NO: 6850 - DNA, 73 bp, Zea mays
  Peptide Sequence Number=SeqID_50225
acgaacaagctactgtggattctaaggttcagcaagtagaagtagctgagcaggagctcattgaaagcaagtt

SEQ ID NO: 6851 - DNA, 393 bp, Zea mays
  Peptide Sequence Number=SeqID_50226
atgggatgcgccggagttcagcgggaggatttgcgccggcgccatcctccccagcgaactcaccgccggagagattgtgctctttgtcttcaccctccccagcaggttggtagcgctgagcttgcctttcctcccactgccggaggtgcacagtcttgtaggggcggcgctcttccaccggtgcttggcttcaaggatgttcatcagcctcgcactggtggagagcgagctgggttgcggctccgcctcctacctgagctggtgacccgcttcttcctccagcattcgaagaaagggatgatcaccagccttgtgaaggcaggaggcgaacttcgggtacacggtgaaagggaaatgtgcccttgggccatttctaagtattttggtgattaa

SEQ ID NO: 6852 - DNA, 387 bp, Zea mays
  Peptide Sequence Number=SeqID_50227
atgggcaaactacggcgacgcaaggcagaaaccttgaaggcaaaggggcgcagagagctcgaaggcgaaagggcaccacgggtgggagagaagcaaggcatggctgctactcgagggatgaacccccttttaaaggcagattctcctgctcgagccccaaagcgtcacgggcgagtctcccccgatgcacatcagggtacccatcctatggcatggggcccgaccccgcatgtcatacagctggcccgctggtgcgaagaaggcaaatcgttgcgcgaggagcgtgctactgccccgcgccgcacagagaacagtcccgagtacggttcgggacccctgggtaagcattctggaccccttggatggggttcggacccctctgagtga

SEQ ID NO: 6853 - DNA, 678 bp, Zea mays
  Peptide Sequence Number=SeqID_50228
atggcgtccgaggccggacttggctgctgtcagcctcactctgtcgagtggcacagcagtcggagcagcgcaggcggcgctgtcatcttgtcaggccgggcgcgcgtcaggataaggtgtcaggccatccttgcattaaatgctcctgcgatacggtcggtcggcgtggcgatttggccaaggttgcttcttggcgaagactgggcctcgggcgagccgaagctttgtgctgatgggggttaccagctgagattaggagtcttgggggtacccctaattatggtccccgacacaaacgaaagtgaaactacaaaacagaagaaccagattttgttttctggcataaaaagtcaatggtctccccaagaacaactaatagcaaatgcactgtcagacgatgaattaccaggttttccaaaaaggaaacatcacaaggatgccgagctccaaaaagaagcacatgagtgttacattgatggatggactatcacctgcacacagtttccgccccgtcgtcgcatcaggtccaagaaacaaagatggaaacatggaaaaagtcaagaaataacttcaagaaaatcttgttatctatgtggacgtgaagatcattaccttcgtaattgtcctgagaagagttcactaccgaacacccttgggataaagctatctcagtcttga

SEQ ID NO: 6854 - DNA, 927 bp, Zea mays
  Peptide Sequence Number=SeqID_50229
atgaacaagacaccggcactcaaggtgccattacaaacggaactccggttctgcctccgcgggtacgaacaaccccccacgattggagggcctacggaaccagtaccgcgactcgaggcaaccctgcgcatgacccaacagtgccaaccaggcacatcggtcacgggtcagtcagccgcgggagaaggcgtgacggtcgatacggccagaaatgggccggcagtaatggcggtggcaggcgggcggaagcagcggccaagtcgtcagccaagctcacgtcccctcctgggcagcgagagaaccctctcccacggcgtgaagacggcgcgcccgtgttccgttcctcgaatggctcgcgcacgcgcaacggctaccccgcgaaccactcgtcccgtcgcattaactctgcggcaggacaggcggcacctttggcaggcgaagcaggcgacgcttcacctccgccataatgaccgcgtcaaaaaaggtgtgccacgccattcgattccgtatccttttcctcttcctctttctctctcttacaacagggaccgggaaaggggataccccgaaagggatccttctccgcgaaggaaacgggccccgagccccctactgatcaaaggttcgaaggctggcccctcggaggggttcaacagccgcctcagagcgctcgggcttcgcgcccactactggtcagaggttcgaaggccggcccctcgaaagggttcaacggccgcctcaggccactcgggctccgcgcccactactgatcaggggttcgtaggctggccctcgaaagggttcgacagccgcctcagacgcagagcgagggatgaccctaggtacgttcgatacataaccaaggctcgggctacgctcctgaggtaccctaggacatttctgagaccaatgggaacgattttgtaa

SEQ ID NO: 6855 - DNA, 1062 bp, Zea mays
  Peptide Sequence Number=SeqID_50230
atggcgtgcgggtgtctaggtggcgcgacagcgagcgtgcgagttagcgcacgactgttcaggtggcacggtggcatgtgggtgcgaaggcattgcggcggcgtgcggtattgggctctgataaagctggattctgatggctcaaccacacaagattctgatactgatgtcaagaccgagtcaagtgtttctagtatagagagaagcaagaaggaggatacagagcccacgtccctcaaccgcgtcggggcagacgagtcgcggggtaggggcggctccaggcgcgtcgggtcgcacgggggcgagcggcgtcctggcggggctctgctcggcggcctgggcgtcggggtctgggcgtcgtgggccaagtccggcctcggacgccataggaggctccgcctcgcccgaccccagggctcgaactcggcctcggccccggaagacgacgaactccacctcgcccgaccccagggctcggactcggccttggccctggaagacgatgaactccacctcgcccgacccagggctcggactcggcctcggccccggaagacgacgaactccgcctcgcccgaccccagggctcggactcagccctggcctcagccgacggtctccgcctcgcccgacccagggctcggactcgacctcgacctcggaagacagactcgatcccaacctcggaggagcctccgcctcgcccaacccagggctcggaccgaccacgtcacaagaggggccatcattaccctacccctagctagctctggctacggggaacaagaccggcgtcccatctggctcgccccggtaaaacaaataatgatggcgccccgcgtgctccatgacgacggcggctctcagcctcattacagaagcaaggagacatcagcaaggactcgacagccccgacagctgtccttccgcaaggctccagcgctcctccgacggccacgacatcacacgaacagggtgccaaaacctctccggctgccacgacggcatggccctcttacagagggttggctgcgcggagaggacgggacagcgcgcgcataa

SEQ ID NO: 6856 - DNA, 1146 bp, Zea mays
  Peptide Sequence Number=SeqID_50231
atggagagggtcgagacctctacgtgctcggaagttgagcggacgcgcaaacagctcgtggactcataccgcgagctgggcgcgcggactgctgacatcgaagtgcccgaccgggaggcgggccttcgcttcctcgagtggctgcaagaggaactgttggcgctcccgaccattgtggagggatttatgtcctttgcctccctcgtcacctgcgaaggggcgatgaacgcgctgtcccgcgaggggtgcagtcactatgaggtcttcgaccgatctgatgaagattttgggcgcgagattttcaaggtcgaagaccctgtggtgaaggactccacgggtgccctctttgaccggatgtggggcccccacagtcgggaggtggtgagggagcagtccgaccgggcgagggatcaggcggcgcgtgccgaggtcgtagaggacttcggacccctgaacagcgtgcggcccgaagcggaggccaacccggtggtggccgaggctgaggtcgacccagcaccgcccccggaaaccggtgaaggctccctcgctgcccctgcggctactgtgtccggtgggggctcatcgccaaccgctgtgccgagggcggaggatccctcgaagacggcgacggagccggcagcggaggatgccatggcggcggctgggtcttcgcaggttcaagattttgggcctgcgcacgcaaccgctactgctaattttgtggcggcttcgaccgtggatgctgggaatgaatcggatgagtctgcgtctgagttttctgattttggtgactctgggagttcgattgagtggacggaagagtcttcggatgaggacttggattactttgcggccttgaatgtggctgcggcggaggcttctccgcttgttgcgaatgctgaagctgtgtctggtccgagtgctgggcgtaggcggcgaagggcggtggcgaagcatagagtgagtgaggtggatggcggtcggcttcgtgtgggcagggctggcaagcaggaattgttgtcctcgccggctggggcgagtgtaggtgagggggagttgcgaagtctttttgagggtgaggagcttaggataatgctatttaactatagggagatgggaatcattccgaaggttgaaccgatgtaa

SEQ ID NO: 6857 - DNA, 1716 bp, Zea mays
  Peptide Sequence Number=SeqID_50232
atgacttcgtacggcgggcagccttcggtcgaagtcttcgcgaagtattattgtctgcattggcagaaaaggagaatcgaaaataagattactcaatttggatgttgcacatttacgccgaagaccggcaagacttcgatggaagtcgttgagttggttccctgcgcccgcaataaatggggcaactggtgggaattttggttctacgttgccgaaggcacagtcgaagaccatcctaggatccctgtggctgtcatgtgttcgcattattactcagcgtacccgcggtttgaggtagcggaggaggatggagatgaaggggcctttcggtgcgcggcccgcgtgagtagcgaacgcgatctggttgaggagtgtgttgggtatggggtatggcccttggcgcgtggctgggcgttgggcgaagtatgccctcgccaaatgccttcccgtggtgggatgctggtgcggagccccgccttcacactggatttgcatggccgagatcccgccgcattcgtgcgtgaggcggaggatggggcggtgcaaattgttggtcgctacgtgccaaggacagaggcccagcggagttgggatatacgtggatccaacgaccgtctgaatagggtcttcgagttgaattgtttgccgtatggcggttatcccgggcaagacgttgtcgaccgccgcgggaaaaaatcggcgggtgagactgaagacgaccccgcgccggaggccgccccatccactaagaagaggaagctaggtactgcgatgggagaactgggggtctccgatagtttttctatggaattgatggggacatgcgcggcccccgggggaaggatgtcttcgcccgagctccgggagtcttcggcgcggatgctggaggttaccggcggtcgatggcctaagaacgttcctatcccccgcgcggccggcgaagacttctttacgtctcgcatggttcgtaacttgagagtgtttccttacaagcggaatattgctgctgttgtgtcggcagtgatgaacaaggatcgccaggaagctgcgcagaagcgccgggcggtcatcaggctccccaaagctaggccgaagagggcgcggggaactgtgaaggctaccatccccggtagtagcgagcctacgctggcggcgaagtcggctgcccctgggtccggcaaggtgccggagagcgtgaaggcggccgacgccggcggaaccaagtctgccccggacggagctgcgaaggtccgggagttgccttcgccggggaaacgcgttgccgacttcggcacaaacattagcgtggatgactatcttgttggcgaggggcaacttgctgttgttccgcctgtggtggcgaccacggtgtctgtcgcggtgcctggggtgaggggtagcgctctcagcgctggcggtgagatttcggcggtcgctgccgtcaaggacgaagcaggcactgtgtcccgccggctgagggaggcgtcgcagcggctgagccaagcggccgacttcgccgaccgcgtggcgtcgggggcccttactgcagacgtgtctgccgaagtcgagagacttcgggcgcaacatgctgacgtcgtccgggaaaagtcggccgtggacagcaagtgccgcaagctgcacggagaaggtggctgccttggagggcgagaggacggacctccggcgccagctgttggaggagaggagggaggctaa

SEQ ID NO: 6858 - DNA, 549 bp, Zea mays
  Peptide Sequence Number=SeqID_50233
atgtcttcggcaccagatgacttagtcgaacaggtccctcggagggcaaatgttggggcgaaggcgaagacgccacccttcgctcgatgcctttgccaaactcgctgcaccaacggagacaagacgactggcacacttacccttcgtcccacgcgtcgccgggcgaagacctgtgacgaggtcgtcttatctcgtggcctcgtccaacatggaggcccacatgtgatccggcccattgcgatcggccctgcgtggccgctgcacattacgggcctaatttgtaaaggtctccattcagtcctatttatgatattaatgttccaaatggaacgggggcatctggcaagcgcttatagtttcggctcaggcagattggatacgggcatagttcccaaagctttaccctgtagtctggactataagttggttacggtaggtgtaccttatgcagttgaccatttccaacatttgcgtaatgaggactctagggagaagcctcgtagtgagaccctggccattcacctcggaagtgaatacgggtctagctaa

SEQ ID NO: 6859 - DNA, 270 bp, Zea mays
  Peptide Sequence Number=SeqID_50234
atggccggttcggccgcctccctgcacggccggctcggccgccccctgcgccgccccctgccccgccgccgtgctcgcggttatgagcggccaagggagctccagagattagtgatacttgatcagagatattttggtacaggtggttatgagattgatggttccggttatgactatggtgctggttgtcagcattgcaaccactgctcaggcgaagatgaagctgtggaaggagacttccaggagttccaagattacgacgagttctag

SEQ ID NO: 6860 - DNA, 798 bp, Zea mays
  Peptide Sequence Number=SeqID_50235
atgcaggcagcatgcaaccgcaccaagggggcgcaccctttcgactccgacgcgcccagcatgggggcccaggcccacacgtcatgtaaccggtgcgccagttactacgtgcgggaaactgcaccgccacttgcgccagtaccgcgccttctcgactgcggaaccggtgttgcgactcgaggcaaccctgcgcatggcccaacagtgccaaccgagcacatcggtcacgggtcagtcagccacgggagaaggtgcgacggtcgatacggccagaaatgggccggcagtgatggtggcggcaggcgggcggaagcagcggtcaagtcatctgcaggctcacgtcccctcctaggacaacgagagagccctctcccacggcgtaaagacgacgctcccgtgttccgttcctcgaacggctcgcgcacgcacaacggctgccccacgaaccactcgtcccgtcgcattaactctgcggcaggacaggctgaccactcggaagggttcgacagccgcctcagaccacttgggctccgcgcccaccactggctggcccccgaagggttcgacagccgcctcagagcgcgcagagcgagggatgactctgggtacgtccgatacatggccgaggctcgggctacgttccggaggccactagccgacccttatcgaatggggcacgggcgtccactcggatcacccgttagcaactcactggagacaccatgttcggcgccctccgagggcaacatggctctttcccccctcctccttgcggaaaggcgacacaggggcatatga

SEQ ID NO: 6861 - DNA, 972 bp, Zea mays
  Peptide Sequence Number=SeqID_50236
atggggagcgcccgtggttcttccgtcttgtcgtcgttggaggaacgcaacttcgcggaagttgcttcaaggatcttcatcatccttgctggggcgaagagcgaggcgagccggagctctacctcccgcacgggtcggcgggccacctcttcttccagcttctggggtggaaaccatcctccagctctgtggaggaggcgccctccagccatgccggggaaggcaaactgttgctgcctagccaaggtgcaacattccgtcctctgtcctcgctttcgtggtgaggacgagagtgaggacctgccggtgcgctttggggcggtcggcgctcgctggtgcggtgttggcggacaggtggacgccgccgtcggtgctgacgtggtggcagctggagaaagcttctccaccgacgagcccgtcagtgctacccacggaccgacctccggctctttggctttaatgtctggttctcgtcccttgagtggggatgcgaacaagagccttccggcggcagcgttcgtcctgggaccatcgctactgatgcagaggtcgctggcgaatcaccaggagtttgtcgtcccgcaggctctccgatgtggagaaaccctcggccgctctgcgatgagccggagccggaggcaacggcgccagcacggacagaggcagagttggcttgaaaagaagcttcgtcggccggagcctggccgggctgtccaccggccggaccagcgccggagttgggttgccgaggccatgagccgggctgacgtcctcgggggacagctggctgaggctacggagcagccggtcgagccgtctgctcgggccgggttcccggaggagaccctagcggcgatggcccaggcgtggtgccgacaggccgggtcggatttcgccgatggtggagtcgacgccgagggtgctgttgctcccccactgatgtctgatcctgcaggaacagtttatctgtag

SEQ ID NO: 6862 - DNA, 273 bp, Zea mays
  Peptide Sequence Number=SeqID_50237
atggtcatcggtggacggcgaggtacaagctccagcgaggctccacggactccgggatggacgacgaacggtttggtcgacgacgatctcaggaatggggagagcgcgagagaggaagagctcaagaagaagggaagggagttcggccgtatttacagggagagggcgccgagggagggaagagaaatggcgggtggcttcatggctgccattgatggagctcaccaacggagggaggtggcgcgtcggttcgggtccatggcgcggtcctag

SEQ ID NO: 6863 - DNA, 69 bp, Zea mays
  Peptide Sequence Number=SeqID_50238
atggtgactgtgaacgcgctcggcgagcagagcccaccggtctatgctcgtgcgttgccacgagagtaa

SEQ ID NO: 6864 - DNA, 552 bp, Zea mays
  Peptide Sequence Number=SeqID_50239
atggacgctgaatgcaaggcgggaaagcggatgcgggagagggctgcgtgggcgcagcaagcagccaagtcagcggtgagccacggtagaacctcggccatggcttttctcaagcttgtggaagagctacaggagacctatgatgatggagtcatccccctcggtcatctccccctagaacacgggcagcgtggcatgcggtggggacgacttcttgatgccggtgagcgtgggcccgacgaggaggtcgagctgatcctggtggacgagaacgagggggaggagtccatcttccgcaggttccgacgggaggtgatgcgcgccggtgtgctacaggagatcaagcgccaccggaggtacgagagcaagacagacgagaagaagcgcaaggcgcgcgaggccagatgctgcaatcgtcgctggtcagcaaaatcagatagaagctcctttgtaacacctggtgatgcgccccttcttcatcttgcaactcctaacactaacacctccacccaacgagttgacttcctgatgtcggcgcctgttaagctctag

SEQ ID NO: 6865 - DNA, 705 bp, Zea mays
  Peptide Sequence Number=SeqID_50240
atggaggttcagtgccaaaccagcttctgccataatgaagatggtttccccaagttactgagagcatgcacaattcgcctcgtaatcaggagccaggcagagtatgatggtcgtgaattcgtcgagcatggcacagagaagtgtgtcgtgattatatacattggatccagtccgtaccatgtggaatggagtgtcactgctgctgggcacagattcaaagacacctgccaagtcgtcgctcgcaaggcattgagggccctgtgtcagatctatgaagaagaagtggccaacacaccgctcagattctttccgccctttcagagagaccgtcccgcttggatggccaggatgcgtgcattggaagagcagcaactgcttgaggacgaccccacagtcgtgtacctcactgcatacatgctcacccttgatgcacagtatgatttcttggctcggcaccaccgtcagatgattgcccgagaagaagatgcagagaagctcaaccccctgaagcaagccaaggatgagcacgtccagaagttgatggaggcctacgtggtaacccataaccaacgtagagccctgcggatccaagagcccgcctcatacaacccagttcaacccaggagagctgaagatccccagattcttgaaggtcacccggtctctatcagaggagagaagaaggcttgggaactcccggaatga

SEQ ID NO: 6866 - DNA, 960 bp, Zea mays
  Peptide Sequence Number=SeqID_50241
aggatcaggacgcttcaggtggtatcagagctgttaggttggccgcaggacatggaggttcagtgccaaaccagcttctgccagaatgaagatggtttccccaagttgctgagagcatgcacagttcgtctcggaatcaggagtcagccagagtatgatggtcgtgaattcgtcgagcatggcacagagaaagagaccggtccagtttggatggccaggatgcgtgcattggaagagcagcagctgcttgaggatgaccccgcagtcgtgtacctcactgcatacctgctcaccctggatgcccagtatgatttcttggcccggcaccaccgtcagatgattgcccgagcagaagatgcagagaagctcaaccgtcagctccatgtggatctcaccacagctcaagcccgtgtagctgccttggaaagtcgtgaagtcattgctgttgaagccctgaagcaagccaaggatgagcatgtccaaaagttgatggaggcctacttggtaacccataaccaacgtagagccctgcggatcgaagagcccgctccatccaacccagttcaacccatgagagctgaagatccccagattcttgaaggtcacccggtctctgtcagaggagagaagaaggcttgggaactcccagaaggagccatagtcttggaaggaattccagtcttccctcaggctatggataagcaagagcaccctgagtcctcccaagatccccagccggagttgtttgagcccctcaccatgaagaagattccagcaccatcccttgaagtcaaggaagaagctgcaagcacccggccagcaccaccgccctctgaagagctacaagagtcagtcccgcttgaaaaagagttcgaccccgtcttgcaatctcaatcaatgctggaagaagtcatcaacatcagctccctcttaacccatccaggtgatgtctcagattga

SEQ ID NO: 6867 - DNA, 1122 bp, Zea mays
  Peptide Sequence Number=SeqID_50242
atgcatatatcttacgcattgcattcattagattgtaatcttgccgacggagagtacgtgctcatccccgagcaaggacctgtccaagaggaggaccaggagcaggcttcagaggctgctattgaggatctccccgcagccccagcaattgaaggcaagccccgttcgccttccccggcatggctggaggacgcctcctccgcagagctggaggatggtttccaccaccagaagctagaagaggaggtggccagccgacccgcgcaggaggtagagccccggctcgcctcgctctccgccccagcaaggatgatgaacatccttgaagctgagtgcgggaccaagatcgcagcccgccgtcatgggctgagtcttctccaacacgctccaaggtcctccccctacggcgcgggggctgggtcccacgcgtcatgcaagctggcccagggcagaagaagccaaaccgccgcgcgcggcgggcaggagcagcggtcacgtcgtcagccaagcttacgtcccatccgggggcagcgagagaaccctctctcacggcgtgaagacggcacgcccatgttccgttcttcgaacggctcgcgcacgcgcaacggccgccccgcgaaccactcgccccgtcgcattgactccgcggcgggacaggcggcgcctctgggaccgggaaagggggataccccgaaaaggatccttctccgtgaaggaaacaggctccgagcctccctactgatcagaggtttgaaggctggcccctcggaggggttcaacagccgcctcagagcgggttcgaaggctggccctcgaagggttcacagccgcctcagacatagagcgagggatgaccatgggtacgttcgatacataaccaaggctcgggctacgctcccgagtcatttcgccgctccactgaccggcctgatagaaggacagcgccgcctgcgccgctccgactgctgcgccactcgacagagtgaggctgacaggcaatcaggcccgacctcaggcaccatagggaactccactccgcccgacccagggctcggactcgggctaagccccggaagatggcgaactccgctccgcccgacccagggctcggactcgggctaa

SEQ ID NO: 6868 - DNA, 438 bp, Zea mays
  Peptide Sequence Number=SeqID_50243
atgggaaacacgaacgtccctgatggcaacgcgttcacggacgaaatggagatcaatctcaacatgttctgtgggctggtactagagcgggttgacagagaggtaaatagtgttgatgttatcgcaatatacgaggagggtactcctggtgaccgggttgtggagttcctgaagaagctgatggagccaactcgcctcggccacgcaattggcgatgacgaggtactccactttggcactggagtgggagaccaaagactaacgcttgaaggatcaggagatgagcttgtcctagaggaacacaacatagccggaggagaccagaagaagaatgacgagggtggcggccaccaggcagaggatgaggctcaagaaaggcttgataccatattgggagaagaatatgccattctcaatccgtacagttcagggttataa

SEQ ID NO: 6869 - DNA, 1248 bp, Zea mays
  Peptide Sequence Number=SeqID_50244
atggtgtcttcatcaccgattgatgcccaccttaccagggcgctgcagcaacagactcgtgagatcctctctgagctcgacaagcgcttcgccacgattgactccaagtgggcgcgccgagtcggcgctccggagtcccaagcggtggaatccgctcaacactgcgatgagttctcctccgccctctacgccggcgtcgaggcacatctctcggcggctaccctacagtctacgggtactcgtgtcgctgccctgcaatctgccctgcatgtgttcgatgcaaggcgtccacgggcgcagtggaggtcatccgtggaggtccggcatgtgttcgcagaccgcgacatcagtgaacaacctgccggagtccatggccgcctcgacaattccaccaccatcaccatggggtccaacatcaacccggatggcgtagctgcaggtggcgccgcagatcgaccagttcgtgcagcagcggcaggctggagctgcgtgccaaatgccggacctgttccacacaagaccgacgatgcagcacctgctcgcggctacacgggagtagcaacaccagcccctggacggcatggtcgttgcttaccacagcaagcagcacgccacgaccaggaggggaagtactgctctggtaatccatacttctggcagagagcgtccacggacccattggtttcaaagaccggtgctcgcaagttgttcgatgaaatgcccacaagcgaccggagatcaccagaccgcgtcctcgacgtcactatacgccaggtctgttaccccatgtctgagagtgtgcttcatgcagtttttgctccttatggaaggatcgagcgcatccatgtcattgggggtttagatcctgtgttggctaaggtagtattccaattaaagcatgaagctgcagaagcctatggggatttacatggccggaatatttatgatgggtgttgtcagatggagatcaattggggattctcccaggagcaggatgtttctcgctccagcgttgagtccaaccttcgaagctctaatgcttctcatgcacggcgatctattgctggcgttacaaacaatggtgttcacaaggttctattccctgttggtcaacaaagtgacaacgaacctccaagtgcaggcctccggtatgctacaggaggtgtctacaacgagaatgggagtgtagtagggagattggggaacgatgactttggttccaacaatcacacctttgatgaagggagt

SEQ ID NO: 6870 - DNA, 288 bp, Zea mays
  Peptide Sequence Number=SeqID_50245
atggcggcggcggcgcgggtgaggggggagggggaggctgggggcgtcggggtcgcgggtattcagacaagagcacctcaggtgatgaaaatggcgatgatgagaaggggggaatgcagcaataggtgtccagaacttgaaacatgcctcaggaagccccccaggtcccgtggttcctacgaaaacgctcagaaggacgccactgtcactccagtccaaggagagtgtggagatcagctcaacttccaagccaccagacccttgagagcagaactcgttcctgactga

SEQ ID NO: 6871 - DNA, 90 bp, Zea mays
  Peptide Sequence Number=SeqID_50246
atgccactggagttacttcacatggatctattcggcccgatagcttatataagcatcaacgagagaaaatcacaacctaagagactttaa

SEQ ID NO: 6872 - DNA, 1158 bp, Zea mays
  Peptide Sequence Number=SeqID_50247
atggaggtgagcctccacgccatgttgttgataagcgctagcgaagttcgctgtgaactgcacgcagagctcttcccaggagtagaccgatcatggggtgaggtgtggctggaacttggatggccaagtcaccgcacggagatgatccgccagtgcagcgcagcccacgccggccaatgggacacccgcctagatccgggcgcctgttggagtttgcggtcatcaggcctctccagagagactggagcgtcctctcccgcatgcctgtggttgagctccgcccgccggtcctcagtcggtgcagccctcaccgaggtcgacatcgtcacgccactgcttcatggccctggcaaggccgtggagctaggagggtggcgcagcaactccctggctgcaaacaaggccccaggcgcaacccttgacgctctggatgtctgcgcaggagtgcgctgctgcgcagagcgcacaacagcagcaccaggcgcagggccgatggaggtacgtggcgtggaggacacagcttcttcccatcgggaattcctcgagaatgaagtcgtggtgctcgacgatctgaaccatgcagtatgggcgtattgcctgctagttgaatggacaggcatgtcgcctgcggaatggactggtcgccgcctgcccacggaatggacatgtctcattaaatgcggaggtggcacatcgcctgccagtggaatggacagggctcaattaatgtcgaggcggcacatcgcctgccagtggactggacaggcggccgccttatccgcaataaacgcagaggccgcgcagcccagaggccttacgtcaggccccgtccattggcttacgtcacgtgcaccatgccacgtggcagcatcggggctccgcctgagcggggagcagaagcaatctcgggaccctgctgtgagtggcccggaccccacacagaggggtccggaacccatcctaggggtccgatttgcgctcgtggaggtcctggaccttacccggaggcccggtctgtatatacaggggtccgacactttcccatgggggtccggactcactgttgataccttggaatatatcatcttctttggccacgtggtggtcccggagtcgtccacgtggtggggtcgggtgctgtttgctggcacagagtag

SEQ ID NO: 6873 - DNA, 248 bp, Zea mays
  Peptide Sequence Number=SeqID_50248
actgtaaccttgctgacggagagtacgtcctcgtgccggagcaaggagctgctcaggaggtagccccagatccagcaccagaggacctgtctgccactgctttggaaggcaagccccggaaccccattgagatgaatactagttctctggaggacatggttgctggagtgacttggccgtccatcttgccaccgggttggactatcgagtgggaccctacctcggctgaggaggagcatgaggagtga

SEQ ID NO: 6874 - DNA, 843 bp, Zea mays
  Peptide Sequence Number=SeqID_50249
atgttgggtccgccgctgccaccaccacctaggggtaacctcccccaggggaaccagcagcagcaacgacagcagcaacaacagcggtcgccccgcttccagggtcgctggaaggtccagggccccaaggcttcctccccctctgctcccaaggccgcgcctcctccgccagataccatgcccggcgggtctggcatccagcagcaggcgtctgctgggagtggcgccggcggtccgcccccggctgctgcaactgcgccgacggctaccgcagccccaacaacggcgatgtcgtcgagtacaccgtcgacaacggtggaggagggcccaactgcgcctacccccgccatcgagggcgacgcggagggcacgtctagctccatcccaccgcccactctagaggagacggaggtggtctttgggcggcggcttcggttcggcgccgagccagaagcagcgccagttcccctccctcgggtgctgtctcgtgcccatcaagctcttcatgagactgaggcgtcgatcctgcgggagtgggaggcgcttgaggccgagcaccagcgcctcagcgactggcgcacccagctagaggagcacaccaaggcggcgtccagccagttcgcctccgagtggtccgagctcgagcgggaccgcaaggactacaagaaggacctccataaggtgtacgcccgggagctggaggcgagccggaaggagaagaggctggccaagagggaggaggtcgtcacagagctcagtgccaagctgagtgccatgaacgaaatcctggaagagcagcggatccagcagaccgcggctatggagaggctgcaaaagctgtag

SEQ ID NO: 6875 - DNA, 396 bp, Zea mays
  Peptide Sequence Number=SeqID_50250
atggacctcgccaggcgggagacagacctcaccaggcgggagaaggatctcgccttcaaggaggaaatgcttgaaaggcgggagaagttgctggccgagcatgagctcgaggcgaaggggaaggaggggacgctggaggagcgggtccgtcggttcgaagcggcgcaggcggcgccgggtccccaggtggcggaggctgccaagaaggccctggaagatctccaggcagaacaccgcgccggggtccagtggatagctgagtgggccggcgaggcgagcacgacgctggtgccactggggataagtcccatcccggtgtcggggccgccagcgtcgatcttcgatgccctcccggtgctggactccgccgccgaacgccttcgtcacctagactag

SEQ ID NO: 6876 - DNA, 147 bp, Zea mays
  Peptide Sequence Number=SeqID_50251
atggcgcaccggacagtccggtgcgccaccggtgcgccaacggtgcgccaccggggcctagatgctttcagacgcgacctgtcgtggctgacgtggatcaatagtacctacctagttttcataccgggcgagtacaagcgtatgtga

SEQ ID NO: 6877 - DNA, 2316 bp, Zea mays
  Peptide Sequence Number=SeqID_50252
atggccggcggcgacggcgatcggcatcgcgcgccgaagcggcacaagtcctcgacgccgtcgaaagcggccctggtggacgagagcgccgagttcgactacgctgatgactttgatgacgacgcccacgatgctgatacggaggttaagaagagggattttacgaagctcgagttgaaggtggaccacgcgagccgtccgctctgggcgtgcgccgacggccgcatcttcctcgagaccttctcgccgctctacaagcaggcttacgattttctcatcgccatcgccgagcctgtgtgcaggccagaatctatgcatgaatacaatctaactccccactcattgtatgctgcggtctcagtgggacttgagacaagcactatcatcagtgtcttgagtaaactatctaaaaccaagttgccccgtgaaataattgatttcatccatggatcaactgctaactacggcaaagtcaagcttgtcttgaagaagaaccgatattttgtcgagtctccatttcctgaggtattgagtacccttctgagggatgaagttatatctagagctaggatatctcctgaggattcccttggggcaccttcatttactgttagcaagacatctggccaaatagctagtggacatgaagacctgttaaatggaatggaaattgctgctgcaactgaagacaaggaaacacattcttttgagattgatccttctcaggttgagaatgtcaagcaacggtgcttaccaaatgcattgaactatcccatgctggaggagtatgatttcagaaatgacactgtaaacccagatttggatatggagctaaagccgcaagcacggcctaggccatatcaagaaaagagtctcagtaaaatgtttgggaacggacgagcaaggtctggaattattgtgctaccttgtggtgctggcaagtccttggttggtgtatctgcagcctgtcgtattaagaagagctgtttatgtttggccacaaatgctgtctccgtagatcaatgggcatttcagttcaagctttggtcgaccataaaagatgagaacattagtcgttttacatctgataacaaggagaagtttacagggatggctggtgtggttgttactacatataacatggttgcattcggtggtaaaaggtctgaagattcggagaagatcattgaagaaatccgaaacagagagtggggcttgcttctaatggatgaggtccatgttgtccctgcacatatgttcagaaaagtcatcagcattactaaatctcactgcaagctgggtcttactgctacccttgtgagagaggacgaacgtattactgacctgaattttctaattggaccaaaactgtatgaagcgaattggttggatttagtcaaaggtggatttattgcaaatgtgcagtgtgcagaagtatggtgtcctatgaccaaagagttctttgctgagtatttgaaaaaggaaaattcaaagaagaagcagttcagggcttgtgaattcctgattcgattccatgagcaacaacgtggagacaagataattgtgtttgctgataatctgtttgcactaactacttatgcgatgaaactgcgcaagccaatgatttttggtgccacaagccatgctgagaggacaagaattctctaccaattcaagaacagtccagaagtcaatacaatttttctttcaaaggtcggtgataactcgattgatatcccagaagctaatgttatcatacaaatatcatctcacgctggttcgagacgtcaagaagctcagcgtctgggccgtattctcagagcaaagggtaaacaccaagataggatggctggaggaaaagaagaatacaatgcttttttctattcccttgtatcaactgacacacaggaaatgtactactcaacaaaaaggcagcagtttcttattgaccagggatatagcttcaaggttatcactagtttgccgccggctgaagaaggacctaatctgagctattacacacttgatgaacaacttgagctcttgagcatggtggggcatttctatggccccattcacctctaccaacaggcgctgaatgcaggggatgacatgattggtgttgagcgcttagaagaagattctgatggcaaggctcttattagagcacgacgctctgccggatcaatgagtgccttctctggagctggtggaatggtctacatggagtacagcactgggaagggaaagggtgttcagaagaaacacaaggacccgtcaaagaggcatcatctgttcaagaaacgctatgcgtag

SEQ ID NO: 6878 - DNA, 1128 bp, Zea mays
  Peptide Sequence Number=SeqID_50253
atggatgtggatctgtggatctccaaggtcaaggagggccagcacctcgccgagcacgagcttcagtcgctctgcgaatacgtgaaggagatcctcatcgaagagtcgaacgttcaaccggtgaatagccctgtgacggtttgcggtgacatccatgggcagttccatgacctgatgaagctcttcgcgacggggggccacgtcccagagacgaactatattttcatgggtgattttgtggaccgtggcttcaacagtctggaggttttcaccatcctgttgctactaaaagcgaggtatcctgcacacataacccttctgcgtggaaatcatgaaagtaggcagttgacacaggtgtatggtttctatgatgagtgtcagaggaagtatggcaacgccaatgcatggcggtattgcactgatgtttttgattaccttacgctatcagcaatcattaatggtcaagtcctctgtgttcatggcggtctttctcctgatgtacgtactattgatcagatacgaacaattgatcgcaattgtgaaattccccatgaaggtcctttctgcgaccttatgtggagtgaccctgaggagatagagacatgggctgttagtccccgtggagcaggttggctgtttggatcgcgcgtcacagcagagttcaactttgttaacggtatcgagctagtttgccgggctcaccagctggtccaggaaggcttaaagtacatgttccaggagaagggccttgtcactaatgttggcctacaaaaagatgacatgttcagcatgacaagtgttgcggaagtgtgtacgttgcgttggatttgtggccatactagaagggatcgactctggaatgttgatatacgtgataggctaggtgtagcgtcaattgaagaaaaacttgtcttgaaatggtttgaacatgcccaagaggcaccagtgtggtctgcacctaattattgctacagatgtggcaatgtcgcttctatcttaagcttcgatgagaagatgaggttggacctgaaacgagcaatgaaggaaagggatgtcaagttcttcacagagacagaggagaacaaccagatgcgaggcccaaggaccgcagtcccatatttcctatga

SEQ ID NO: 6879 - DNA, 87 bp, Zea mays
  Peptide Sequence Number=SeqID_50254
atggcggcgctcgtcgaggcacaggggtcatcgagacgtggtggcctcgacgcggaaactttttatttgcatctatcttggaggtag

SEQ ID NO: 6880 - DNA, 759 bp, Zea mays
  Peptide Sequence Number=SeqID_50255
atgacatgcagcctgttgagccgctacatcaggtcgaacggcgccaccgccatggatattgacctcaccatcagagatgaaatctcttccattgtgagccaatctgcaccgtccatcaatatgcgtcaaatcatcaccgtccgacaccgccgccgcgcctggctccccctcctcctcgccccactcgccctgacgcacgccacggtgtccctgccccgctcgcgatgcatcccccgaaaccctaggccttccgcgatgaggagtcgcctcctccttcctccgtcgtggcgttctcgggcgccgcctccgcgagcaagacgcctctcccgcccctgccatcctcgccccgctccccgcgagatgagcgactcctactgccccgactgcaagaagcagacggaggtggcattcgaccactcggcgggggacacggtgtgcaccgagtccggcctcgtcctcgaggcgcactccgtcgacgagacctccgagtggcgtaccttcgccaacgagtccaacgacaacgaccctgtccgcgtcggcggcccctccaacccgctcctcaccgacggcggcctctccaccgtcatcgccaagcccaacggcgcccagggcgacttcctctcctcctccctcggaaggtggcagaaccgcggctccaaccccgaccgatccctcattctcgccttccgcaccatcgccaacatggctgacagggttggttatcaccgcggggggtctagatttggaacatctgattga

SEQ ID NO: 6881 - DNA, 525 bp, Zea mays
  Peptide Sequence Number=SeqID_50256
atggggataaagcaatgcattccaccagcaggattcacaaaatttcacaaagatttgaagaaattgctcgaattgaaaaggtgggaggcactgctcaccaaaacagaggggaaccgaggaaggagagaggaagagccgctcaccgaggaggaggacgaggtcgccggagatggttgccgccggtggctgggagttcgccggcggcggaggggtgagtcgccagagacagagagagctgagtgctggcgggcgctggctggaaaacgaaggcctctggcccggctcgggctgggggccgtttttttaaaacgcgagatgggcacaccggacagtctacagtggctgtccggtgcacaccggacagcgcacagtagatgtccggtgaaccaccggacaacgtacaggaaaagaggaattgtgcgcgcggctgccggtgcaccggacattgcacagtgcggtgtccggtgcacaccggactgtccggtattggcaccctcatatacttttcaaaatattttgccatag

SEQ ID NO: 6882 - DNA, 1015 bp, Zea mays
  Peptide Sequence Number=SeqID_50257
atgcgcgcaactgcccagcggttacgagcattcctccactttcgcccagaccagcgggtgaaagggcggaccgccatgcaggcggcatgcaaccgcaccaagagggcgcaccctttcgactttgacgcgtccagcatggaggcccaggcccacacgtcatgtaaccggcgcgccggttactacgtgcaagaaactgcatcgccacttgcgccagtaccgcgccttcttgactgcggaaccggtaccgcgactcgaggtgaccctgcgcatgacccgacagtgccaaccgagcacatcggtcacaggtcagtcagccgcaggagaaggcgctacggtcgatacggccagaaatgggccgacagtaatggcggtggcaggcgggcggaagcagcggtcaagtcgtcagctaagctcacgtcccctcctgggacagtgagagaaccctctcccacgacggaccgggaaaggggatactccgaaaaggatccttctccgcgaaggaaatgggccccgagccccctactgatcaaaggttcgaaggctggcccctcagaagggttcaacagccgcctcagagcactcgggctccgcgcccactactggtcagaggttcgaaggccggcccctaggaagggttcaacggccgtctcaggccactcgggctccgcgcccactactgatcaggggttcgtaggctggcccccgaagggttcgacagccgcctcagacgcagagcgagggatgacccagggaacaaatgatgatacatatcaaaagctcaaggaagaaaatgagaggctaaaaataagcttgacacaactaaaagggaagtgcattgctcaaccttctcaagataaccgtgatcacatggtgaagaagcttgagacgggaacaaccgtggcatgcactacatcccttgaagaaaatgtcaaggatttgaggattgccaagaggaagaaacaaaagaagaaattcaacacctcctccaaaagcctcaaccacgcctccacaaaag

SEQ ID NO: 6883 - DNA, 123 bp, Zea mays
  Peptide Sequence Number=SeqID_50258
atgccgaagctcccttgcgcacgacttcggctctgcgcaaaccttcgtgttccttgtgcttcgtcctaccgtggctctgatccaagtccgaagatacctattaatgtacgcctaatagaataa

SEQ ID NO: 6884 - DNA, 270 bp, Zea mays
  Peptide Sequence Number=SeqID_50259
atggccggaatcgctcggtccacgcgcgcaggcgggtgttctcatcggcggcgagtgtaccggccaaaccacggcgatctggttcaatccaagggcacggcttcgattccttgctcggagagcttcactgagttgtgcacactcgtctctgagggttggatggggctggggcaagctggactggccggtctacggcggcagtggctcgggtggccgcggtcacgctgcgcacgggcaaacggcggtgaactgggctccggtgaggcttga

SEQ ID NO: 6885 - DNA, 309 bp, Zea mays
  Peptide Sequence Number=SeqID_50260
atggcgcttcctgttgacgtggctagcctgcgccctaggtcgggcgacgtggaggctcctccgaagccgaggtcgaaggccagggcggagtccgagccctggggtcgggcgaagcggagttcgtcgtcttccggggttgagcccgagtccgagccctgcgtcaggcggagcggagttcgccgtcttctggggcctagcccgagtccgagccctgggtcgggcggagcggagttcgccgtcttccggggcttagcccgagtccgagccctgggtcgggcggagcggagttcgccgtcttccggggcctag

SEQ ID NO: 6886 - DNA, 453 bp, Zea mays
  Peptide Sequence Number=SeqID_50261
atgggcaagagtaacaaacgcaagtgcgagccgactcctccatcggaggacttcggcgactcggaatactcagaggaggagttatcctccgagcccgaggggtctccggctcccgtctctcccccggcgtcgtctgatgattcagacgactcccaggggattgtcgcggaggtctggacttatatccgggccgtcgagcgctccgggctcgagggctcggatgagtcggagtactccttggacgaggaggactcttcggactcgtacgaggagggcggcggcggtgatggcggagactacgacgacgacggaggcgacgatgacgacggtgacgacggcggcggtggcggtgacggtggcagcaaaggcggcagcaagggcggcaacggcggcagcagcaggggcagcaacggcggcggcagcagcaagggcagcaacaaggctagtggctag

SEQ ID NO: 6887 - DNA, 1590 bp, Zea mays
  Peptide Sequence Number=SeqID_50262
atgccttttcacggtggaagggtggtgcgaagtcctgccttcgcactgaatctgcgaaaccgcgaccaggccgcctttgtgcgtgatgcggaggatggggcggtgcggctcgtgggacgttacgtgccgaggacggaaggccagcgcagctttgatatccgcgggtcaaatgaccgtttgaacagggttttcgagttaaatcaattgccgtacgacggctatcctggtcaagacgacgcggaccgccgtggaaagaagccggtggtggagactggagacgaccctgcgccggcggccgccccttcctccaaaaagagaaaattaggtactgctatgggaggacttggggtgtctgatagttttgctagagagttgatgaggacgtgcgcggccccggggggaaggatgtcttcgcccgagctccgggagtcttcggctcggatgctgagggttaccgggggttgctggcctaggaatgttcctatcccctgcgcggctggcgaggactgttttacatctcgcatgggtcgggaatggagagtttttccttacgggcggaatattgctgctgttgtgtcggcagtgatggacaaggatcgccaaggggcagcgcaaaaacgccaggcggctgtgaggcttcatgaagctaggccgaaaaggcagcgggggactgcgaaggctgcggcctccggcggaggcaagccgccgctggcggcgaagtcgggcgcctctgcattagcaaggcgccggaggcaacggcaggcgccggaggctccaaatcgacgaaggtggtgccgccgggacgaggcgggcgcagcgacccgccggctgaaggaggtgacggaggcgctgagtcaggtggctgacttcgccagccgtactgcgtcgggggccctcacggcagctgtgtctaccgaagtcgagagacttcggacgcaacatgctgacgctgtccgtgaaaaatcggcctccgacagcaagtgccgtaaactgacggacaaggtggccgcactggagagggagaaggctgacctccggcgccaactggcggaggagaggagggaggccaacgagcaggctgcgcaggcggaggccagactggcgcgggcggaaggcaatcttgccagggagcgcgccgaacatctgcaggagcggctcaccgccctggagagccgcgtgaagggggccgaggccgcgatgcgtgcggaggccgaacggacgcgcacacagcttatggatacatatcgtgagctgggtgcgcggaccggtgacttcgaggtgccggaccgagagcccgagcttcgctgtctggaatgggtgcaggaggagctgcaggaactccccactgtcgtgggggggtttatgtcgtacgcctccctggtcacctgcgagggggcgatgaacgcactctcccgcgaagggtgccggcacttcgaggtcttcgaccaggcagatgaagattttgagcgagatgtctataaggtcgaagaccccgtagtgaaggaatccgccggggccctctatgaccggatgtggggtccgcacggtcgtgaggtggtcagggagcgggccgagactgcgagggctcag

SEQ ID NO: 6888 - DNA, 111 bp, Zea mays
  Peptide Sequence Number=SeqID_50263
atggggagtcatgatccccgggcaaaacgggaatcacggctcatgggtaaagaagaaggtgtcgaggcggatctccaggagttccaggacttcaacgagttcgagaattag

SEQ ID NO: 6889 - DNA, 819 bp, Zea mays
  Peptide Sequence Number=SeqID_50264
atgaacgcactctcccgcgaagggtgccggcacttcgaggtcttcgaccaggcagatgaagattttgagcgagatgtctataaggtcgaagaccccgtagtgaaggaatccgccggggccctctatgaccggatgtggggtccgcacggtcgtgaggtggtcagggagcgggccgagactgcgagggctcaggcggcgcgtggcgagcgggtggacgacttcggggcgttgaacagcgcgctgcctgacccggagccgacccctgcggaggccgtgtctggggtcgccctggagccaaccccggagaccgcggaaggcgcaccggatgcccccacatctgctgcggccggcgaagacctgcccccgaaggtggccgaaggcgcacctgatgcccccgcagctgctgtgccgagtgctgaagatcccgcggcggtggcggcggaaaccacggcggaagcagcggcggagccaacggcggaggctcccgcagcgtcagggccttcgcaggttcaagattttgggcctgcgcacgcaaccgctactactgaatttttggcggcttcgaccgcggaaggtggtaatgaatatggtggatctgcatctgagttttttgattttactgactctgggagctcggttgagtggactgaggagtcgtcggaggaggacttggactattttgcggccttggatgtggctgcggcggaggcttcgccacacgccgcggacgcgcaagatggctggtcggcaggaactgttgtctttgtcggctgccgcgagtacaggggaaggggaactgcgaagtctttttgcgggtga

SEQ ID NO: 6890 - DNA, 831 bp, Zea mays
  Peptide Sequence Number=SeqID_50265
atgccgtcctcttcttcttccgctgccgctacgccgccggccgccgcctcgtctgaggagacgctgagtagtttgatggcggaagagttgcgcgccggcgattctgttgattttggcgtgtcgcggatgacgtcagcccgcgttgaagatatgcagcggttgggttactttggcggcggagttgctcgtgctccggggacggaggaagtccccgagccggagggtgagttggtcgttttcgaggcgttcttcgccgccggtctccgcttgcctgcgcaccgggacgaggcgggcgcagcgacccgccggctgaaggaggtgacggaggcgctgagtcaggtggctgacttcgccagccgtactgcgtcgggggccctcacggcagctgtgtctgccgaagtcgagagacttcggacgcaacatgctgacgctgtccgtgaaaaatcggcctccgacagcaagtgccgtaaactgacggacaaggtggccgcactggagagggagaaggctgacctccggcgccaactggcggaggagaggagggaggccaacgaggccgtcgccaaggagcaggctgcgcaggcggaggccagactggcgcgggcggaaggcaatcttgccagggagcgcgccgaacatctgcagcagcggctcaccgctctggagagccgcgtgaagggggccgaggccgcgatgcgtgcggaggccgaacggacgcgcacacagcttatggatacatatcgtgagctgggtgggcggaccggtgacttcgaggtgccggaccgagagcccgggcttcgctgtctggaatgggtgcaggaggagctgtag

SEQ ID NO: 6891 - DNA, 387 bp, Zea mays
  Peptide Sequence Number=SeqID_50266
atgacggtgaacggctcgagcgcgtgtctaatcgaagagttggacggggttcgggcacgtctccggcgagcaggagaacggggcgtggtcgtcggtggacggcgaggtacgacggcgagcggcgtggacgaactccggcgagtctccacagacggtggggcggactgcgatggcgtggttgaactccggcgacggcgtgggcgagtaagaaatgtgagaaagagagagggagctcggggaggagaaaactcgtgtaggggggagcaagggctcatcggattttatagagagagggcaggagaggaagggtcggcgtcttcaagcaccatgaatggcgtccatcaatggggagagggagtaatggggaagaagaaacggtcgcagtaa

SEQ ID NO: 6892 - DNA, 654 bp, Zea mays
  Peptide Sequence Number=SeqID_50267
atgacggtgaacggctcgagcgcgtgtctaatcgaagagttggacggggttcgggcacgtctccggcgagcaggagaacggggcgtggtcgtcggtggacggcgaggtacgacggcgagcggcgtggatgaactccggcgagtctccacagacggcggggcagactgcgatggcgtggttgaactccggcgacggcgtgggcgatgtcacagggagagatttgcagtggttttccacaatgaaccactaaagacgccatcctttaatactgtccttgaaaggaatatcgagattcaactcatagaaatcaaggaggccgcggaaaaagggggagatgggaagagcaagcccgcggatgagaaatggaacgtaaacaacagatttatgagtgtcctctatcagaacagtgacaccacggcagatccgccaagaacagagctccttcggaagcaaaaccccaatctcaacgagatgaagaaggtcggatttggagatgacagacatgtggttaccagcgaatggaagctggctgttggggtcgatgggcgggatgactgcagcggtggtgctctacctcttccgcttgggggccatcgcgatctttccggtgggatgagcaggctcagaatttcagggaagcagaggaacagttga

SEQ ID NO: 6893 - DNA, 312 bp, Zea mays
  Peptide Sequence Number=SeqID_50268
atgagccgactgtgcagggggaagagcctccctagcgtgaagcatagcgacgaaggaacatgcgccggaatattcggcgacatcatgaggctagggagcgggacccagcgtagcccgtatctcgggatgaagtttcagaagtgggagaaacctccgatgagcgagtataccgggaaaggcagaattcttgccgacgtgatcgccgacaagctcaggaccgagatcgagaacaagccgagcagggcgcaaggttacgccgagggaatcgcctctttgctcgaaaccagaaccctgacttcgcccgcgcaatga

SEQ ID NO: 6894 - DNA, 261 bp, Zea mays
  Peptide Sequence Number=SeqID_50269
atggcgccccgcgtgcaccatgacgctggtggctctcagccccttacggcagcaaggagacgtcagcaggatccttgccgcactgccagctgtgctcctacaggactcaggcgctcctccgacagccacgctatcacgtgtacagggctcaagctctcccccgacagccacgttggcatacctgtcagcctgtttgccagtctgattggcagactgtacaacagtctggccaagttgaccaaaccggttgaaccgccctag

SEQ ID NO: 6895 - DNA, 516 bp, Zea mays
  Peptide Sequence Number=SeqID_50270
atgactctgggtacgtctgatacatggccgaggctcgggctacgctcccgaggtaccctaggacatttccgagactggcgggaacgatttgtaacggaattccaccggagggaggcatcgagccctcggaccctgtcgaaggggtctgggtccagcgaatcacccgcagaggctcgggggctgctctcgcacccggctacggccaaactgttgacattgtcaacaaaccagcttgataacttggaacctgaccatgcacccgggctacggccaggccgcatgagggaacgatcagaccggccgaggcaccacaaaaagcattcagacctcagaggagtcaaacaattcttccgaggcctcgggggctacacccggcgggtgcgctcgcgcgcacccaccagaaccaagaaaaaccgagaaaggccggtccccgcaccgaaaatgcggcaaaagcctccaagcgagtaccaacactcccttcgaggctcgggggctactgtcgggtaccataattag

SEQ ID NO: 6896 - DNA, 507 bp, Zea mays
  Peptide Sequence Number=SeqID_50271
atggccaaaagtgggccggcagtaactgcagcggcagacgagcggaagcagcggtcaagtcacctgcaggctcgcgtcccctcccgaagcgacgggagagccctctcccatggcgtgaagacgacgcacccgtgccccgttcctcgaacggctcgcacgcgcaacgggcgccacgcgaatcacccgtcccgtcgcattaactcccggcggagcaggcgacacctctggcaggcgtggcgggcgtcgctttgcctccgccatgatgaccgcgtcaaaaaagggaccgggaaaggggatgttgtggaaaggatccttctcggcgaaggaagcgggccccgagccctcctactgatcaggggttcgaaggctggcccctcggaagggtttcgacagccgccccagagcactcgggcttcaagcccattactgatcaggggttcgaaggctggcccctcgaaagggttcgacagccgcccaagagcgctcgggctccgtgcccattactga

SEQ ID NO: 6897 - DNA, 651 bp, Zea mays
  Peptide Sequence Number=SeqID_50272
atgggtcgacaagaggagccaacttcttcaataccatatgcttttgcatgtgatgaaataaaaggcaaaaggaaggctcccactctaagttcctcaagtgaagaagaggaagaagaagaaagtgatgatgatgaagataatcaaccatcaacatcatcctccaaggatgaagaaacaatccgacgcgtcggaaaggaaaaaagcaaagaaagagaggatgctttgcatgcggggagaaggaccactttagggacaactgtccaaatatggccgaacccacaaaagggaagagcaaaggcaaggcgcttacaagtgtcaaaacttgggatgactcttcaaacgaagatgaacctccaaggacgcgcagccaccgatcctcataacactcatcacgatcatcacgcaagtgccttattgcaagaggatgtttacactaagcaaaaggctcaacttaaaactttgaaaaataagttgattagctctcaaaatgattataagtgtttgctagaaaaatttgaaacatttgctaatttgaattgtgagctatcaactaaaattgagcaattagagtctagtgttccatcctcaactaccgatgatggccttactaaaaaaaatgaaaaacttaaggctaagttagctagctcttaa

SEQ ID NO: 6898 - DNA, 633 bp, Zea mays
  Peptide Sequence Number=SeqID_50273
atgcccccgtcgtatccgattgagccatgcgtggcggtgctgacaataggcgtgacacttccagcagccaccgtcactaccatcctctctcgctcacccttgccccatccaatcctctccttgccttatcttgtctcgttggcagcttgggcacgcacactaggtgttcaacaggagtcctcgccggcgcggaagatgtacgtggtcaagcgggacgaacgccgggagacggtgcaattcgacgagatcacggtgcgccttaagaagctcagctacggcctcagtcaggaccacttcaacctaatgctcgtcatgcaaaagataaaggaaatctacatgtacttcaatgagacttttacgatatctaagatgatggcccctctagttgctgaagatgtttgtgaactcatcatgagggggtactacctcgctgatgagcccggggtacacttcgtttggcagcccaaccaagagtcatcggtactcatcatgtcgcgcgctttcgacgactactatatcgaggattgttgcgtcatcttagcgtcggaggtgacgcagaggaggatcgacaacagtgaccagttcgtcatcctcgccaccgtcagggtagcttttgtgccgacctgcctttaa

SEQ ID NO: 6899 - DNA, 153 bp, Zea mays
  Peptide Sequence Number=SeqID_50274
atggtgctctcctcccccacaaccccctaccgctgctccctcaagtccggccagtcttcctgctatgcgtgcacattccagaggaagaagaagactccccctgtccatgacgtgtgggcccaaggccaaggctctatgctccaaataggttga

SEQ ID NO: 6900 - DNA, 822 bp, Zea mays
  Peptide Sequence Number=SeqID_50275
atggagtttcacctcctgcttcacagcgtgctgatgcacgtcacagccgcgctgctgatcctggtctacatcccgctctccgtcccggtgaagctgctggtgcgggcgttcgtcaggccgctcgggaaggaggacctgagagggaaggtcgtgctcatcaccggcgcctcctccggcatcggcgaggtcagtacaactttaataaatatatattatatgactgtgcccgcgggtgtacctgcgggtgccataaacccgcgggtagcgggtttgggtaacatacgctacccgtcgcgggtagcgggtgcaggaaaacaacactattcaccctgttccgactattgtgccaaccacaagggtaagactaacaacagtaagtcacggcctctcccgagttcagcctcgggcgcaacagggagctccgcctcgcccgacccctggcctcggcctcagcctcagcctcgggagaaggtctccgcctcgcccgaccccagacctcggcctcgggagaaggtccccgcctcgcccgacctcagcctcggcctcgggaggagtcacaacctcacccgacctcagcctcggcctcaggagaagtcaccgcctcgcccgacctcggcctcggaccgactacgctacaggggatacatcattaccctacccctagctagccgcctcaggctacgaaggaacaagaccggtgtcacatctagattactccggcaacaggtaatgatggttccctgcatgcgtcagcaggacccagggccgcaccgccagctacgcttctacagggctcaagcacttctccgccggccacgttag

SEQ ID NO: 6901 - DNA, 807 bp, Zea mays
  Peptide Sequence Number=SeqID_50276
atggcagataccccacgagtcgcccgtcccgtcgcattaactccctggcaggacacacgtctcctctggcaggcgggcgggcgtcgtttcgcctccgtcatgatgactgcctcaaaaaagggatcgggaaaggggacatttcgaaggagcccttcgcagcaaaagaaacgggccctgagccctcctactgatcaggggttcgaaggttgcgccctgcggggttcggcaaccgccctagagcactcaggctccgagccctttactgatcaggggttcgaaggctggcccctcgaagggattcgacagccgccccagaacatgcagagtcaggctcgggctatgctcccgaggtaccctaagacatttccgagaccagcgggaacggtttgtaatggaatcccaccgaagggaggcaccgagccctcggaccctatcgaatgggtccgagtccagcaaatcacctgcagggtaagactaacaacagtaagtcacgacctctcccgagttcagcctcgggcgcaacagggagctccgcctcgcctgacccctggcctcggcctcagcctcagcctcgggagaaggtctcctcctcgcctgaccccagacctcggcctcagcctcggccttggggagaaggtccctgcctcgcccgacctcagcctcggcctcgggaggagtcacaacctcgcccgacctcagcctcggcctcaagagaagtcaccgcctcgcccgacctcggcctcggaccgactacgctacaggggatacatcattaccctacccctagctagccacctcaggctatga

SEQ ID NO: 6902 - DNA, 1062 bp, Zea mays
  Peptide Sequence Number=SeqID_50277
atgtcgagcggtgcagagagcttgaggccgagctatgggtgcgaccgaacaaggccgacgaagcgcgtccgttgtggcagtcagcgtgggccatcatggcttgccgcgactaagcagcagcacgtagtcgtcacgttttgccgcggcttcgcagcacgcttgtgggcgcctcggccgacatcctggaggaggatgaaaggacaggagcttgcctaccagtacgcgaaggaaggggcgtgccttgcgctggtggcgcggagggtgcaggcgctcaaggccgtggcggccgccgccctggagcgcggcgctccggacgtcctcgtcttcccggccgatgtctccgaccccgagcagtcgaggcgcgccgtcgaggagaccgtcgctcacttcggcaaactgaaccatctggttgccaatgccggcgtctggtctagctgcgccttcgatcaaatcaccaacataaccgccttcaccaagctgatggacgtgaatttctggggctctgtctatccaacctactatgccctgccacacctcaaggcaagcaaagggaagctcatcgtctgctgctcagcggcgggcacggtggccacgtccaggatggccttctacaacgccagcaaagcagcgcagctgaggttctacgagacactgagaaccgaggtgggctccgaggtcggcatcaccatactcacgcctggctacgtcgagtccgagataaccaagggaaaggggatgcagaaaagcggcgaggtcgccgtcgacgaggaggccagagatgcgcagatcggcgtgttcccggtgggccgagtggaggcgctctgcgaggtggctctggacggcatccggaacggtgactggtacgtgacatggccgtccatgtaccggccgctgcagctgatcgcttgcctcgcccccgaggtcctggactggatgtccgacgccatgtacaaggagaccacccaagggaggcggccgctcgggcagaggatcatggaggccaccggagccaaaaggctgtacccgccgtcgcttctgcaaccgcggatcaaggcggactag

SEQ ID NO: 6903 - DNA, 543 bp, Zea mays
  Peptide Sequence Number=SeqID_50278
atgggcgggggcctcctggcagcagcatccgccctgaggtcatcgctgccgctgtttggcccctcggagcagaagtcgtcgtcgtcgccgctgctggagcgggtgatggcgtgccttaaaggaacccctcggccgctcttcgatgagccgaggccaggggtagcggtgtcagcatggacagaggcggagttggctcgaaaagaagacttggtcggccggagcctggctgggtcgtctgttagcgggactgacgccggagttgtcctgccgaggcctcgggccgggctgatgtcttcgggggacagctggccgaggcctcggggtgaccagccgagccacctgctcgggctggattctcggagaaaaccctggcggcgatggcccgggcgagatgatgatgtcgtccttcagagtggagatcctcagaccgcgtcaccgtccgaggctaggtcggacctcgccgaaggtgtagccgacgccgaggatgctgctgctcccttcaaccgtcaagatccgagcctgcaggatcagattatcttgtag

SEQ ID NO: 6904 - DNA, 468 bp, Zea mays
  Peptide Sequence Number=SeqID_50279
atgcaggcggcatgcaaccgcgccaagtgggcgcacctctccgacttccagcgcgcccatcatggaagcccaggcccacgcgtcatgcaaccggtgcgccggatgctatgtacgagcaactgcaccgccactcgtgccactgccacgcctcctcgactgcggaaccagtaccgcgactcgaggcaaccctacgcacgacccagcagtgccagcctggcgcgatggaaccaggctccgagcctccctactgatcagaggttcgaaggctggcccctcgaagggttcaacagccgcctcagagcgcgtgggctccacacccactactggtcagaggttcgaaggccggcccctcggaagggttcaacgaccgcctcaggctactcgggctccgtgcccacttttgatcaggggttcgaaggctggcccccgaagggttcacagccgcctcagacacagagcgagggatga

SEQ ID NO: 6905 - DNA, 733 bp, Zea mays
  Peptide Sequence Number=SeqID_50280
gctggcccctcggaagggttcgaaagccaccccagagcactcgggcttcaagctcattactgatcaggggtttgaaggctggcccctcggaagggttcgacagccgccccagagcaatcgggctccacgcccactgctgatcaggggttcgaaggctggcccctcggaagggttcgacagccgcccagagcacgcagagcgagggatgactctaggaatgtccgttacacggccgaggctcgggctacgctcccgaggtaccctaggacattttcgagaccaacaggagcgaatttgtaacggaatcccaccagagggaggcatcgagccctcggaccctatgaaacgggtccgagtccggcaaatcacctgcagtcgtcaaggtcgaagtgaccgcagtcacttcgccctttcactgaccgacctgacaggaaaacagtgtcgctcgctccgctccgactgttgtgccacccaccagggtgaggctgacaacagccaagttcagcctcaggcgcaacaggaagctccgcctcgcccgaccttaggccttggcctcggaaggaggtctccgcctcgcccgaccccagggctcggcctcaacctcggcctcggaaggtggtctaaacctcgcccgacaccaggactcggcctcaacctcggcctcgggaggaatcgcgtcctcgtccgacctcggcctcggcctcaggaggagtccccgcctcgcccgacctag

SEQ ID NO: 6906 - DNA, 975 bp, Zea mays
  Peptide Sequence Number=SeqID_50281
atggccgggagatcgcggtacgacaaccccttcgaggagggcggcgccgacgaggtcaaccctttcgcggaccaagctaagagaggaggatcgactgctcagtccggctactctggtggcgcgttctacacgacgcaatcgcaacgccctgctcctcctagcacacgcctttcgcctcttcctcctgaacctgccgacttctacaacgacttcgctaccccagtggatatccccatggacacaaacaaggacatgaagacaagggagaaggagcttctggccaaggaggccgagctgaacaggcgtgagaaggaaataaaaaggcgagaggatgctgcggcacgagctggtatcgtgttggaagagaagaactggcccccgtttttccccatcattcataacgatatcggcaacgagatacctgtccatctgcaaagaacgctgtacgtcgcgttcgcgtcgctcttaggtattgatgtgtaccctgatatacgtctggtagggttggtcttgtgcctgttttggaacataatctgcattactgctgcctgggcaaaagggtcaggtcctaagatatggtttctcgcaatcatatacttcatcctcggatgccccggtgcatactacctttggtaccggccactataccgcgcaatgaggaacgagagcgctctcaagttcggatggtttttcctcttctacttgattcatatcgccttctgcgcgtacgcagctgtttctccttcaattctcttcgtgggaaaatcgttaaccgggattttgccagcaatcagcttgataggcgacagcgtcattgttgggatcttctacttcattggctttgcattgttctgcctggaggctttgctaagcgtgtgggtcattcagcgcgtctacctgtacttccgagggagcgggaaagaagcggagatgaggcgtgaagcagcacgcggtgcagcgagggcagcgttttga

SEQ ID NO: 6907 - DNA, 594 bp, Zea mays
  Peptide Sequence Number=SeqID_50282
atggaaggagggggtagcaacacgcccttctaccgcggcaacagcaccgcactcgccaccaacccttctgctgctgctgctgctgctgctgcggtattcctcttccttgctttctctagccccaatctccacgccggtaatctctgctatgctgtatggctctgcgccattgcttattccacccctctagctctaggggattcaagaaacagtggatcaagacatgagccgtttatgttaataataactgcaaaaggggtcactacggtttatctaagtgaaatctcgattctggtttcttttgtaaacttatgtgaaagagactctagaggcgagcagaatggggcacagaaaggggacagggaggctgccatcgatgccgagatagtgagggttaacgacctaccagctcatagttcctacgccatacaccgcatgaaggtgctaaacaaacttcgtcatctgctgtccatcaagccagattttgatgaggagtgtgatacaataagcagatttgagccctcgagcaaggaaatttgcaaggagccaaatgtacaagatgggacctttaatatagaaaaaacatcaatctaa

SEQ ID NO: 6908 - DNA, 522 bp, Zea mays
  Peptide Sequence Number=SeqID_50283
atgacgacggcggttctcaaccccctacggaagcaaggagacgtcatcaaggtcccagcagccccgacagctgtgcttctacagggctccagcgctcctccgacagccacgacaccgcgtacacagggctctagcacctctccgacagccacgttggcatgtacacagggctctggcacctctctgccggacacgttagcgcatagctacacccccattgtacacctggaccctctccttgcatctataaaaggaaggaccagggccctcatgcaggagggtggtcgcgtgggaggacgggctgacgaacaggctctctctctctccctcgcgaacgcttgtaacccctactgcaagcgcatccccccttggcgcaggataacacgagccgcgttcttccccccttgtgttccgtctcgcgccaacccatctgggctggggcacgcagcgacaattttactcgtcggtcaagggacccccggggtcgaaacgccgacatcagccgagcgcgaccagaagtag

SEQ ID NO: 6909 - DNA, 2733 bp, Zea mays
  Peptide Sequence Number=SeqID_50284
atgcagaggaagtacaagctcacatgtcctgagcagtacgaccttttgatctcagccgagatcccaagcaacaagtaccctgaactacgaaagatggttatcaagcatatgatgcatggctcgtgtgggtcgctaaacccaaactgcccatgcactaagggtcgtaaatcgtgcaagaatcattaccctcggcctttcagtgacacaaccttgcaagggaaggattcgtaccctatttatagacgtcgtgacgatgatcgtaaagaaaaggtccgagggtgcgaactggacaatagatgggttgtcccttataacccatacctccttcgtctcttcaactgccacatcaatgttgaggcatgtgggagcatcaaggctgttaaatatctgttcaaatacatatacaaaggccatgatcgtgcgtctgttgttatgagagatgcgagcaaggcagatgatgatgttgatgagatcaagcagtatagagatgcaaggtgggtgactcctccggaagccttgtggaggatatacggctttgagcttagtcagatatctccacctgttatgcagcttcaactccatcttccaaacatgcacatggtggcgtttcacgagcggcaaatggtcgagcgagtcgtcaaccgtccaggtgttgataggtcgatgctcacatcatattttgaggcgaataggtttaataaggaggctcgtggcatcctatatcgtgacttccctgagtggtacacttggcagagtggtaagggaaaagtatggcaacggaggaaacgagatacaggtggacaagtcggtaggatagtctctgctcatccggctgagggggagcgctactatcttcgtgttctcctaaaccacgtgactggcgccgcctcctatgtggatctaaggacagttgatggtgtcaccctaccgacttttcgtgaggcagcagagagaaggggactacttgagtcggacaacacactagatgagtgtctcactgaacgtgctcttttccagatgccatcgtcgctgcgacggctttttgccacaatactggtttactgtgagccaagcgatgtggctgtactctggcagaaacacaaagattctatgtcagaggactatcaacacaagagtcagaacaaaactcatgttgagcagatggtattgattgacattaggaacatgctgcagtcaatgggaaaggacataaagacattccctctacctcctatgatcgacgcgtttacgaggaggaaagtatccaaccgacagtggaagatgtggctcttaaagactcttaacgaggaacagagggccgcctatgataatattatgtctgccgttgacaccgatcagggcggattattctttgtggatggacctggtggcaccgggaagacttatctatacagagtgctgctcgcgacgctacgcaaccagggcaagattgcagtggcaacaactacatctggcgttgcggcttccataatgcctggaggaagaaccgcccattcacgcttcaagataccactcactattgacgatggcgctgtatgtagcttcacgaagcagagtggaacagcagagttgctacgaaaagcatctctcattatctgggatgaggcttctatgactaagagacaagccgtggaggcactggacaatagcatgcgcgatataatgggtcgccccgcactaccatttggtggtaaaaccattgtcttcggtggagatttcagacaggtcttgcctgttgttcgtaaagggtcaagggctcaagtggtcgcgtcttcgctacgaatgtcttacctatgggagtccatgtcccacttaaagcttgttagcaacatgagagcaaaaaacgacccttggtttgcggagtttttgctgcgcgtaggcggtggaactgaggaaacaaatagtgacggcgacattcgtcttcctgatgatgtgtgtgtgccttacagtgggagtgacaacgatcttgacaacctaatagactttgctttcccaaatctcaacgaaaatatgtctgattccacctacatcacttcaagggcgatactgtcaacacggaacgactgggttgatatgataaatgttaagatgattgatcgttttcaaggggagcatatggtgtatcatagtttcgatagcgccgtggatgatccccacaactactacccacccgagttcctaaacacattgacgcctaatgggctaccacctcatgttttgaagctcaagattggatgtcctgttatattgctccggaatatagaccctgcaaatggactttgcaatggcaccaggctggtcgttcgtggcttccaaagaaatagcattgacgcagagattgtactgggtcaacacgttggaaaacggattttcctaccgcgtataccgttgtgtccctccgatgaagagatgttccctttccagttcaaaagaaagcagtttcctgtacggcttagctttgcaatgacggttaacaaagcacagggtcagactattcccaatgttggtgtatacttgcctgaaccagtgttctctcatggccaactatatgttgctctatctagagcgacggcccgatcgaacataaagattcttgtcatcccagctgtcgatgggaggaaaaagtcaaggaagggtgtaaagacaacccccaccgtatattgtgggacatataccaagaacatcgtctacaaagaggtcctaacaaattag

SEQ ID NO: 6910 - DNA, 1815 bp, Zea mays
  Peptide Sequence Number=SeqID_50285
atggaatctctatttgtaggcttgtctcataacaagccaaaaaaatcggtggcaaccgcaatagttcgagaagttttatctcatgactggttgctcctagactatatttgcacgcaaggtgatcttgctctcatcgattttatcaaggaaatcccttgtgaaccaagggtagaagtcgttcttattgatgatgcctttgttgaaaggaagtggatggagtgtttatttcagccgagcgcatatttaggtgacgaggttatagactgttacataaatttgataaaagctcaaaagcatctaaagtgccgatctggaggtcgcgttcacatagaaaatgctttccagttcaatttcctgaagcgagatggtgatcttgaaattaaaacagaggagctatatccaattaaagacatgacacacatatgtagcgctgaacgaagggtgttactttacctagaccatgacatggtgtttattccgataaacatccgagagacgcattggtatcttgctgtgatccatgcaagaaatatggagatacaagtgctcgattcacttggtacttcacaagaccgcaaagacctcactgactctattaaaggactgcaaagacaaatagatatgatatctcaacgtaaggagttaaaagaccacaggtggccagacctccaagttgcttcttggccgctcagagaaatagacatgggatatgcaaagcagacagatagctcttcatgtggcctctttcttttgaactatatcgaatattggacaggggatgaactgtctgacagttttacccaggatgacatgtcacactttaggaaaaaaatggctgctatattactatcttcagacctgaataagagaagggggtgtctgttatacaaaaatgaaaaagaagttgactctggaagcccatctgatgttgagatattagaaaacccaacagattctaataagaggaaactactccacgtgcttgatgatagcgaagtagtgtttgaagatgaggaaggccctattactcaagcagacttgcaaaggagaacatgggtgcgaagtttcaatccttttaagatagaaatatctgtcaaagacctgcaaaacatattaacgacaactcaagatatgattctaagatgttttgatatggctgttcggctgcttgccaataaagagtcacgtaaaccgaaagaagaaatcataaataatagaaagcattatatggacatgcgtttttggagaatggttggttttggtaaacttccaaagtaccatcaggatcctacaacagaagagttggccaaaacattagattgttggccatcaatgaattattatatcacgggttgtagatatgttctcatgccatggaaattcaatggatgtcacgcccttttcgtaatagatcatgttaaaaagcatgtgacttttatcgattttacaccgactcaaaattggtgtaaacacatgccatacaagaggttcgcggaagcgattatcatggcctcaaaaaaatataagattgcttacaacaagaaacgttctggatgggcggaggatatctttaagtgggaacatacaattcagactggtgttccaattgacttaagagggtttaataccagctacctcgttctacaagctatggccatgtgggggaatgacaaacgactaaaatttgttggggatgcaaagactcttcgaaggaactttgtgattgatcttttaagttatgaggacaattcgtgccgatatgccatccctgcaaacatacaacaaagacttgccgatatcgctaaaaaggattag

SEQ ID NO: 6911 - DNA, 570 bp, Zea mays
  Peptide Sequence Number=SeqID_50286
atgaggcggaaagacggcgggtatcccccatccgggggcttggaaggtggaaagacacgatgcataagggagcgcgaagacatggtctacttccaagggggtaaccctccttttaaaggcgactatccctactcgcgtccccagccgtcacgagccgagtcttctccaacacgctccaaggccctcccctgcggcgggggctgggtcccacacgtcatgcaaaccggctcagagcagaagaagccaaaccgccgcgcgcggtgcgcacgaccgcccagcggcgggtgggagcagtggtcacatcgtcagccaagctcacgtcccatccgggggcagcgagagaaccccctctcacggcatgaagacaacgcgcatgtgatccgttcctcgaacggctcgcgcacacgcaacggccgccccgccaacactcgccccgccgcattaactccgcggcgggacaggcggcgcctctggcaggagaagcgggcgacgcttcgccttcgccataatgaccgcgtcagtaaagggaccgaggaagggggataccccggaaaggatccttccccgtga

SEQ ID NO: 6912 - DNA, 579 bp, Zea mays
  Peptide Sequence Number=SeqID_50287
atgtcttcttcctccctcatgcgtcgtgtctttccatcttccaagcctccggatggggggagcaatccgggctgcgatcttggtcccaccctcagcttcaaggatgttcatcatcctcgctggggtgggtgccgggctgagccggcgctctacctcccgcgcggggctggtcgacggcggacgtcgtcacctccagcgtgtcggagtcgtcggctgggttcccggcggcccctccggccggagggcggctgccgcgccgtgtgcacgggaggaccacccacgacgccgcgcgctgctagggcggcgttcgtgttctggggtggccctgcttttgcacggggatggcgcccgcgcgcagaggccgatgccccactcgtctgggaggatttgagtggggatctgctgggggggctggtggcccccgccatcagcgccgaggcggaggcggctcgagaagtccccgtcaccgacgggatcaccgccaccatccgcgccccaggcctccggttcttcgtacttgtcctcgcccctcgagcgtcggtgtgggcgagggcaagatcgcagcagcgcccaccctga

SEQ ID NO: 6913 - DNA, 498 bp, Zea mays
  Peptide Sequence Number=SeqID_50288
atgagcggctgcggcctgcggggggagaccagagacggctgcggcgggactgcgatggctggaggcaggagtggcctgtggccgcgccgcgctcgccgtgcctaccggaggtccctcggcccgacgagtgagtgtcgccgcgtgccccagcccagatgggtcgagcgcgagggcgagcgcgaagggggagaagcgaggcagccggagaccggcatgagagaggtgggaatcccgcggccttcgtgtttgtcccgcgcccaggtcggggtgatgatggcgcttcctgtcgacgtggctggcgtgcgtcctaggttgggcgatgtggaggctcctccgaagccgaggtcgagtctgtcttccatggccgaggccgagtccgagcccctgggtcgggcgaggcggaggtcgtcggcagatgccagggcggagtccgagccctggggtcgggcgaagcggagttcgtcgtcttctggggctgagcccgagtccgagccctag

SEQ ID NO: 6914 - DNA, 429 bp, Zea mays
  Peptide Sequence Number=SeqID_50289
atggacggcggcggctacagctccatctcgcgccgggggttcgtccgcgcgggcttcgacctggacggcgacgacggctactattacgacgacgtcgtcgtcttccacccatcgtcattctcctcctcctcctcctccaaggccgacggccccggcgcgccctaccacaccgccggggccccgcggccgtcggcgcgcgccaggctgagggcgctgtggcgccgcgtcatgcgggagaagaagcgcatcctgctctgctccaccggctgcgtgccggcgccgccgccgccccgggagccctacgacgcgtacagctacgcgcagaacttcgacgacggcgaggcgtgggtggagcccgacgaccactcgcggtccttctccgcgcgcttcgccgtcccctccagggcgttccagagggtcgccgcgtag

SEQ ID NO: 6915 - DNA, 69 bp, Zea mays
  Peptide Sequence Number=SeqID_50290
atggctgaaagagatggaaagaaggacgatggagctaggaagcaagttcatgagaaagacgataagtga

SEQ ID NO: 6916 - DNA, 3738 bp, Zea mays
  Peptide Sequence Number=SeqID_50291
atggcgctccctgttgacgtggcgggcccgcgcccgaggccgggcgacgtgggggctcctccgaagctggggtcgaatctgtcttccgttgccgaggccgagtccgagcccctgggtcgggcgaggcggaagtcgttcggcagaggccagggcggagtccgagccctggggtcgggcgaggcggagttcgtcgtcttccgaggccgagcccgagtccgagccctggggtcgggcggagcggagttcgccgtcttccgggtcttagcccgagtccgagccctggggtcgggcggagcggagttcgccgtcttccgggtcttagcccgagtccgagccctggggtcgggcggagcggagttcgccgtcttccgggtcttagcccgagtccgagccctggggtcgggcggagcggagttcgccgtcttccgggtcttagcccgagtccgagccctggggtcgggcggagcggagttctctatggcgcccctggcgaggcctgactgcctgtcagactcactctatcgagtggtactgcagtcggagtggcgcaggcgacgctgtccttctgtcagaccggctcttgagctaccaagcatgtcagattcaaatgtgaagtggattgatgggctccagttcacatcattgtactggcctccacccctcgatgcggagcagaagcaggcacaaattttggcatatgtcgagtactttggccagtttacagctgacaccgatcaattccctgaagacatagctcagctcattcaaagttcctatccatcaaaagaaaatcgcttggtagatgaagtattggcaacttttgttcttcatcatccggagcatggtcatgcagttgcacatccaattctttcacgcatcatagatgggacgctgtgctatgatagacatggtcccccattcagttccttcatctctttattcagccataattctgagcaagagtactcagagcagtgggccttggcctgtggagaaattcttagggtcttaactcactacaataggccaatattcaaagttgagcgccaacatactgaagctgaatgtagcagcacatctgatcaggcaacatctagtgattccacagataagagatctaataattctccaggaaatgaatctgactggaagccattgaggccactaaccccgtggatcactgacatattgctagccgcacctttgggcattcgaagtgactattttcgatgccgaggatctgggaagcacccacagcttatgccttccacccccagatgggctgttgccaatggagctggagttatattaagtgtctgtgatgaggaggtagctcgttatgagacagcaaatttaacagcagcagctgttcctgcgcttctgctacctccaccaacaacacccttggacgagcatttggtggctggcctgccccctcttgaaccatatgctcggttgttccatagatactatgcaattgctacaccaagtgctacacagaggttgctttttggtcttctggaagcaccaccatcatgggctccagatgcacttgatgcagcagtacaactagttgagctacttagagcagccgaagattatgcttctggcatgcggcttccaaaaaattggatgcatctgcatttcttgcgtgcgattggaactgcaatgtcaatgagagctggcattgctgctgatacagctgctgctttgcttttccgaatactttcccaaccaacgctgctttttccaccactgagacatgccgaaggagttgaagtacatcatgaaccactaggtggctatgtatcatcatataagaagcagccacctacactgtcatggagcctgtacttaccattattaaaagtatttgagtatctacctcgtggcagtccatctgaagcatgccttatgaggatatttgtggcaacggttgaagctatacttaggagaacttttccttctgaaacatcagagcaatccagaaagccaagaagtcaatctaagaaccttgctgttgctgaacttcacacaatgatacattcactctttgttgaatcctgtgcctcaatggaccttgcctcccggttgctatttgtggtgttaactgtttgtgtcagtcatcaagctttgccagggggtagcaaaagaccaactggtagtgataaccattcccacgaggaagccactgagcattcaagattaacaaatggaagaagcagatgtaagaagagacaaggccctgttgctacgtttgattcatatgttctagctgcagtttgtgccttatcttgtgagctccagctgttccctttcattactaagaatggatcacattcaaatttaaaggattccatgaagattatcatatctggaaaaaacaatgggatgaataatgagctacacaacagcatcagctcagcaattcttcatactcgcagaattcttggcatcttggaagccgttttctccctgaagccatcatcagttggtacctcatggagctatagctcaaatgaaatagttgcagcagctatggttgctgctcatgtttctgagttatttcgtcggtccaggccatgccttaatgcactctctgcactaatgagatgcaagtgggatgctgagatttcgaccagggcatcatctctctaccatttgattgacttgcatggtaaaacagtttcctccattgtgaacaaagctgagcctcttgaagctcacctgacccttacaccagtaaagagggataatcaacatcaccgtgaggaaagcaataccagctcattggatagtgtcaagttggaaaacaagaatggttcaacatcacacaagaaaaacggtttctcaagaccactcttgaaatgtgcagaagaggtcctactgaatggcgatgttgcaagtacatctgggaaatccattgcaagcttacaggtggaagcatctgatttggcaaacttccttaccatggatcggaatgggggttaccgaggttcacaaactcttctaagatctgtattatcagagaaacaagagctgtgcttctctgttgtctcattgctctggcagaagctcatagcttctcctgaaatgcagatgtctgcagaaagtacatcagctcaccaaggatggaggaaggttgttgatgcactttgtgatgtcgtttcagcctcaccaaccaaggcatcagctgctatcgttctccaggccgagaaggacttgcagccttggattgctagagatgacgaacaaggtcagaagatgtggagagtcaaccagcgtatagtgaagcttatagctgagcttatgaggaaccatgacagccctgaagcgttggtgatactcgctagtgcctccgaccttctacttcgtgctaccgatggaatgctcgtcgatggtgaagcttgtactttgccacagcttgagtgccgtctatcaaccaccatccgctgcctttctcacccaagtgcacacgtgcgcgcactcagcatgtctgtcctccgcgacatcctgagcaacggatccgtgaaccccaacaagacaatccaaggggaacagcagcggaacggcatccagagcccgtcctaccggtgcctggccgcaggcatcatcaactggcaagcggacgtcgagaggtgcatagagtgggaagcccacagccgccgcgccactgggctgacgctcgccttcctcagtgccgcagcgaaggagctcggctgccctctcccgtcatga

SEQ ID NO: 6917 - DNA, 444 bp, Zea mays
  Peptide Sequence Number=SeqID_50292
atgggtaagaacaacaagcgcaagcgtgagccaactcctccatcggaggagtttggtgactcggagtactcagaggaggagttctcctctgagtctgaggggtctccggctcccgtctccctgcgtgagtcgtctgacgactcagacgactcccaggggcttgcggcggaggtctggacgtacatccgggccgtcgagcgctccaggctcgagggctcggatgagtcggagtactcctcggatgaggaggactcggacggcggcggcgaggacgaggacgacgacgacgacgacggcgacgacgatggcgacggtgacggtgacggcagcggcggcgacagcaaggacggtgacggcggcggcagcaggggcagcaaccggggcggcagcagcaggggcagcaccaggggcggcggcggcggcagcaacagggccagtggctag

SEQ ID NO: 6918 - DNA, 162 bp, Zea mays
  Peptide Sequence Number=SeqID_50293
atggcgcccaagaggaaaactgcgagctcgtctgctgcggtgatccctccaatcgaccccaacagccagttgcctttcgcagaacatccagccactgaaagacatggcctatccagcatatctgtatcgagggctagtcgactcaactcgggttaccaatag

SEQ ID NO: 6919 - DNA, 1407 bp, Zea mays
  Peptide Sequence Number=SeqID_50294
atgtcttcacgctcccctcatgcattgcgtctttccaccttccgagcccccggatggggggcgcccgcggttcttccgccttgtcgtcgttggaggaacacaacttcacagaagttggtacctttcagccatcgttcggcttcaaggattttcatcaggcagcccggccgcatcccctcgtcggtggtcacccaagacggtgaccaccagttccagggtggggagaagcaagccgggctgcggcctctgcccctccctcagcttcaaggatgttcatcatcagtgctggggaggggagtgcgccgagttagggcctgtctccgtgcgggcagcggcccgctccttccctcagtgatggggggaagggcgtttgccgttcgtggcgctggcagctgccgcgtgtctggctctccggcccgagcggcttcggcaccccttccagtgccacttcccgccgaggcagccgaaagaggtttctccgccgacgagatagtcggtgccgcccgcgaactgacctccaactctacgaccttctgcttgtcctcgcccctcgagtggggacgtgggcgagggccttatggcagcagcatccaccctgaggtcatcgctgctgctgttcggccgctcggagcagaggtcgttgtcgctgctgctcttcgggcgtcggtgagccgcctggggtttcgtcgccccccgctcttcgatgagccgaagctggaggcagcggtgttatcatggacagaggcagagttggctcgaaaagaagacttcgtcggcaggagcctggccgggccgtccactggcggcaccgacggcggagtcgagttgccgaggctacgagccgggctggtgtcctcggaggacagctggctgaggcttcggggcggccggccgagccgtctgctcgggccggattcctggaggagaccccggcggcgatggcccgggcgtggtgctgacgtcgtccttcggagtggagaccctccgaccgtgttgccgtccgaggctcggtcggacttcgccgaaggtggagttgacgccgagggtgctgctgctccccctccgtcgacgtctgagcctgcaggatcggttcatcttgtagtaattgtttgtccgagcgagagttacttttcacggaaggtgatgagtgaggattctgttatcgatatagtcgagaaggcccgaaaaattgcttcggcagaaaggtttccgagcattaagacttgttcggtcagcggaattgcttatccgagcgtgagttacttatcgcagaaggtgatgagtgaggatcccacttttccgaggaaaattttgagtagtcgaaaagcacgaaagacgaaagacgttctgacagaaaagatcttttccgaggaaaattttgacacggagggggttccccccttctag

SEQ ID NO: 6920 - DNA, 63 bp, Zea mays
  Peptide Sequence Number=SeqID_50295
atgggattggtcttctgcagccagcaaacagttcaagtttttgagctgagcaacagcagctga

SEQ ID NO: 6921 - DNA, 501 bp, Zea mays
  Peptide Sequence Number=SeqID_50296
atggaggagatccacgctgccaagctcaccaaggatgacgtcgacgttcgcctcaagtggctcggcctcttccattgctgcaagcaccagtgtacgctcactaaatctacaccccctgcaatggggaagcttcttgtagaagggataacacagtgcgctgcttggcacgggcgcactattcgccagcagacccagcaggcgcgtcgcctgctggatgaccttgacaccgcctaccagcagatgggacgggacgcattaaatgctgagagggcacgtcgcccgtcagcgcagtggcaggcggcgcgtcctctccttaataaatgcaggggttgcatggctttacgtcaggctcggcccgatggcttatgtcatgggcaacaagcagcgggtctccgcctgagcgggaagacggtgtcgacgactgtagcaaaatggttcgtgccgatcacacgagggacagtggacaagatttacaggttcgggccgcttagagatgcgtaa

SEQ ID NO: 6922 - DNA, 2625 bp, Zea mays
  Peptide Sequence Number=SeqID_50297
atggctcgcgcctcctcgggtcctgcgcgcgacccttcgtctcccgcgcgcgacccctccactgcccacagcaccgcgcctcccaacagtccggttgcctaccacccaactccggccgccgtacactccataaacggcggcgccgcagcccccctccgcccgaaatcgtcaacctccgccgcccaggcacgttcggttggccgccatcccgctccggccaccatccacaccatatacgacgccgccactgcttctctccgccaggtcgcctcaccatctgccccttcctcccctttcccggaatcgtcaacctctgccacccaggggcggtccaagttccagagatggaatgagagtgcggcaggttccccagacgacggtctacaaccacgttcttgggctggccggcctctgttccgtgatactctgcttcacccgcgggttcctcttgttccagcactgactgcttcgtctccaagggagccctccccacttgagaccgggacgttgaaccctcatcacgagcatcaacatcgctggtttcgtgggttggagagtgcgccggagacaacacttggtggttggaccagagttgaatcaaggaaggcgaagaagcgtcgccttcgtgcactgcgggcacgtcgcccggtgccaaatgacttgaaaggtcgctgtttcaattgcttcgcggataatcacctcgctgctttctgccaccttgagccaaggtgttttcgttgcaagacagttggtcatcgctcctactactgccccgggcctgtgaaagctgacaggaaggttcctgtacatcgacgactgttgagaggaacggtttggaacagactttcgacagttgagccaacgatcgctgatcgtgttccgcagtatcagttgcctcgggtcccggtctggaagagactccagccttttgtgcccctttcatgcaagaaggtatgtatctggcgtagaatctcccctccaggcattgagaagggtccagcacatcacatgatgatagcagggggagtggatgcacatgtttctgattctccacccagggaggttggagctgcggctaggtcggcttcgctgggcaccctcccgcctcgcccgcgacgcaggcgccaacggaagcgcaagtcatcttctaggggtggttctgatccgggttggatgcaatctgatcaacccggaaatgacgaggcccctctgactgaaactgggtcaacgcatcatcagcaaccttgtgtgattggttggaacagtttgatggaaaaagcagaggaggacttgaagttcgcagtatctatctttgtggtcagtgatgtgcctgtgtcagatgttgatattgcagatgcggttgctcaaaagcttgaagtcagttctgattcgctaattctgaggaaactggcccatggacatttcctgctcatgcttccctccctgcagtttgctgaccagttgacagtgagatggaacactattcgtgcaggcgctttttccctgcattgtaaaaagtggtccaagttctttgggtcttcgagtgcaagtttgcctatccctgtggaattcgagctacgtggcattccaatacatgcctgggaactgaccactgtccaacaacttttaaatccttttgcttgggtccaggaggtgcatgatgatactttacaactcaagaatttggatgtctttcgttgttacggttggtgttatgacttggctttaatccctcagactagagacctctggattaccgaccctctgggaattggaccaggtgttggtaggctagctcttgtctatcatgttcagattaaagtgttggtgggacaacgtgctgtaccagatcccacccaggtcccatctgatttggatgattctgcatggcggaggaggcgcttctgttcacgttcgccacctggggaccgtgatggtaggaggggctctgcagatgacggggaccctgttgatgagccagggaccgtggagcagctggcgcccagtactgaggattctatagctgtcacctttattccttccgcgaatttacctctgcttacttgggaagaggatagacttggtgctgctgtggttccagacattgtgtctaaccagggtattcctcaccctgttgagaggcataggtctgttgagccgcaggatgctgccattaatcgcagaggtggcctcccttccaaccttcaggtatattttaggcgaaagcgtcactctaagaaatgttctgcgccggatgcgcctgctgtttctttcaatgacctggagaaaatcatcaagccagtggtacagctgctgcccatgccggttgccaagattagaagcagtaagactgttgttgctgtgcctcgtcggagtaggagggtggctggtgtcaagccttgttctccaggtccgatcatcactgaagcccaaaagaaagtcatcaggagtttgggtctcgcagccacggaagaagccattgatcaaaaagctcaagacaactattttaagctgttcgaggggcgcctgacggactctcatcttgctgcacttgctgctatttttggctggcaggctgagcgatttgatgattccagcagcccagttctcctggcaggctgttaa

SEQ ID NO: 6923 - DNA, 147 bp, Zea mays
  Peptide Sequence Number=SeqID_50298
atggcgaagaagaagacagggcttatcgggaagagggggtatgtcatagtctacactgagaacagtgaatttcatctcaggaacgagatctatagtggcaaggcggtaaccgcacagcataaagaactccctaagagcatggagtga

SEQ ID NO: 6924 - DNA, 99 bp, Zea mays
  Peptide Sequence Number=SeqID_50299
atggccatgatggattcaacattggaaaagatgtacctctgccaggagtttcttgatagcttcgtcaacggcttcttcgacaatccttatcgtttctaa

SEQ ID NO: 6925 - DNA, 1182 bp, Zea mays
  Peptide Sequence Number=SeqID_50300
atggggaacactcgcagttcttccgccttgtcgttggaggaacgcaacttcgcggaagttggtacctttcagccatcgttcggcttcaaggattttcatcagccatcccggccgcatcccctcgccggtggtcacccaagacgcttcaaggatgttcatcatcagtgttggcgaggggagtgcgccgagttagggtcggtccccgcgcgggcagtggcccgctccttccctcagcgatcggggggaagggcgttcgccgttcgtggcgctggcagctgccgcgtgtccggctctccggtccgaacggctttggcgctgcttccggtgccaccttttaccgcggcagccggaagaggtttctccgccgacgagatagtcagtgccgcccgcggactgacctccaactctacggccttctgctcgtcctcgcccctcgagtggggacgtgggcgagggccttatggcagcagcatccgccctgaggtcatcgctgctgctgttcggccgctcggagcagaagtcgtcgtcgctgctgctggagcgggcggcgacgagccatccatcgaccttctgttgctctgcaggccctccaatcgtggggggaaccctctaccgctcttcgatgagccgaagccggaggcagcggtgttagcatggacagaggcagagttggctcgaaaagaagacttcgtcggccggagcctggccgggccgtccactggcgggaccgacgctggagtcgagttgccgaggccacgagccgggctgatgtcctcgggggacagctggctgaggcttcggggtggccggccgagctgtctgctcgggccggattcctggagaagaccctggcggcgatggcccgggcgtggtgctgatgtcgtcctttggagtggagatcctccgaccgcgttgccgtccgaggcttggtcggactttgccgaaggtgtagttgacgccgagggtgctgttgctccccctctgtcaaggtccgagcctgcaggattggtttatcttgtagtaattgtttgtccgagcgagagttacttttcatggaaggtgatgagtgagaaggtgatgagtgaggtatccgtatcccggaggcgtaggagtccctcggctcggtcagccttggctgcttacgtgtactccgtcgttttcaggatcccactttcgaagtag

SEQ ID NO: 6926 - DNA, 1149 bp, Zea mays
  Peptide Sequence Number=SeqID_50301
atgcaggcggcatgcgaccgcaccaagggggcgcaccctttcgacttcgacgcgtccagcatggaggccccaggcccacacgtcatgcaaccagcgggtggaagcagcggtcaagtcgtcagccaagctcgcgtccccttctgggacagcgagagaaccctctcccacggcgtgaagacggcgcgcccgtgttctgttcctcgaacggctcgcgcacgcgcaacggctgccccgcgaaccactcgtcccgtcgcattaactctgcggcaggacaggtgtcacctttggcaggagaagcaggcgacgcttcgctcccgccataatgaccatgtcaaaaaggtgtgccacgtcattcgatttcatatccttttcctcttcctctttctctctcttacaacagggaccgggaaaggggataccccgaaagggatccttctccgcgaaggaaacgggccccgagcccccctactgatcagaggttcgaaggctggcccctcgaaggggttcaacagccgcctcagagcgcccaggctctgcgcccactactggtcagaggttcgaaggccagcccctcggaagggttcaacggccgcctcaggccactcgggctccgcgcccactactgatcaggggttcgtaggctggccctcgaagggttcgacaacctcctcagacgcagagcgagggatgaccctgggctcgggggctgctctcgcaaacccggctccggccaaaccgttgaaagcgtcaacataccagcccgagaacttgggacccgactccaagtctggcctcgggcgccataggaagctctgcctcacccgaccccagggctcggactcggcctcggccccggaagacgacgaactccgcctcgcccgaccccagggctcggactcggccctggccttagccgacggtctccgcctcgcccgacccaggggctcggactcgacctcgacctcggaagacagactcaacctcgacctcggaggagcctccgccttgcccgacccaggggctcggactcgacctcgacctcggaagacagactcgacctcgacctcggaggagcctccgcctcgcccgacccagggctcggaccgaccacgtcacaggaggggccatcattaccctacccctagctag

SEQ ID NO: 6927 - DNA, 753 bp, Zea mays
  Peptide Sequence Number=SeqID_50302
atggtgggtataagtgcggtcactgcacgcgcggcagccggggtcagtggagcattgtatgccaaggcggtgaggcctggacgcgaacggggaatcgatggggacggttgtcatgtgtggggtcagagtaccctgacatgccgtaccattcaggaaatggttgatgaggtcgggtccgagcccctgggtcgggcgaggcggagaccgtcggctgaggccagggctgagtccgagccctggggtcgggcgaggcggagttcgtcgtcttccggggccgagcccgagtccgagccctggggtcgggcaaggcggagttcgtcgtcttccggggtcgagcccgagtccgagccctgggatcgggcgaggcggagttcgtcgtcttccggggctgagcccgagtccgagccctggggtcgggcgaggcagagttcgtcgtcttccgggaccgagcccgagtccgagccctgggatcgggcgaggcggagttcgtcgtcttccggggctgagcccgagtccgagccctggggtcgggcgatgcagagttcgtcgtcttccggggctgagcccgagtccgagccctggggtcgggcgatgcggagtttcctatggcgcctgaggccagacttggctgctgtcagcctcactctgtcgagtggcacagcagtcggaggcggcgcaggcggtgctgtcctcttgtcaggtcggtcagtggagcggcgaagtgactgtggtcacttcggctctgtcgactga

SEQ ID NO: 6928 - DNA, 459 bp, Zea mays
  Peptide Sequence Number=SeqID_50303
atggcgctccggctccctgctcggctccttcctccctggctcacccctccgcacgcccctggacctccctgtcgcgagctcgccctggctcggatctggcgctcggcgcctgcttctctgctccctccagtcctccctgctcactgctctccagccgcgccgagcttggcctctgcttctcttgcgtcgcgcgtcgagctccatccatggccggagctccttcctgctctgctcgtcggccgcgcgagctcgctggcgtgctcctgctccagccttgacgcgcgcccctgttcttctctcttctccaccgtgcctgcttctctctccctaagctccctgcgcacgcccagccgagcggctcccagcgtcgcgcgctcctccccaacgtccctcgccgtggcttccagcttcctcgtcagcgtgcctctctccctggtctcctgtgccgcgctcctctag

SEQ ID NO: 6929 - DNA, 207 bp, Zea mays
  Peptide Sequence Number=SeqID_50304
atgtcgaacgctgcgagggcggtactcgtgttctgggacgcccccggcgaggacgagagtgaggacctgtcgaaccttcggctgctctacaatgagccgaagctgaaggtagcggtggcgtggacagaggcgatgtcggctcggacagaggccttctcggtgcgagagcaggcggctttccgggccgagaaggtgcagcagcggtag

SEQ ID NO: 6930 - DNA, 324 bp, Zea mays
  Peptide Sequence Number=SeqID_50305
atgaccctgggtacatccgttacatggctgaggctcgggctacgctcccgaggtaccctaggacatttccgagaccagcgggaacaatttgtaatggaatcccaccggagggaggcaccgagccctcggaccctatcaaatgggtccgggtccagcaaatcctctgcagaggctcgggggctgctcccgcaccaggctacggccaaatcgtcgaccacgtcgacaaaacagcttaaaaactcggagcctgatcatgcacccgggctgcggccaggccgcttgagggaacaacaaggccgaccgaggcatcacaaaaagaattaa

SEQ ID NO: 6931 - DNA, 342 bp, Zea mays
  Peptide Sequence Number=SeqID_50306
atgggtggcaaagaagagagcgccaccccacagcgcctacacgagccccaaaccgtcgctgttgccgacgcaatccccacctgccgccagcgccacgcgtccatgtcccctcgcccgctgccgccaggatgccgtcgaggccctggccagccctgccgccaggatgccgacgaggccctggtcagccctgccgcgctggcgaagggacgtcgtctctcacacgtcgccgccacctcctggaatcccgctaagaaccggacggacgcgaccaaaccaaagcaaaatcgccccgccgccaccttccttggggtggcgcggacatccggcggcgccctccggtga

SEQ ID NO: 6932 - DNA, 804 bp, Zea mays
  Peptide Sequence Number=SeqID_50307
atgaagtcatgcatggcactgggatcacagagtctggaaaaatcccaactgacgtcggggtcatcctcttcctcggaacccacgggtccggaggttgagacaaccgtcagtcggtcccaagttgaccacatatggtaccccagaaggtcaggatatgccctcacgaaagcgctcaccgaagcggggtcgcttagtgggtcaaagctgaatctaaagggaacagggtggaaaacggatggtacctgttggttggtagacggcagtgaagttgcatcggaggtggaatgtgccgttatctcaggtgtgagactaatgcccgacaagggtgccagcgtcgtcgactcgctctggtccgacagccgtcgaggtgctgccccccgcctagccatggttgccccgtctccgtctcctccggcgaggagggtggcggggttgacccaggtgttcttcttccgccacgtggagatgtcatcatcgtcgagttcgtctccgccgggcaagctgacaaccgtcgttgttgtcgtactgcgaggggagcagtaccatgtcgtagccgccgtcgagggacatgaactcaagacttccgaagtggagcaccatcctgggctgaagaggctgctgaagattgtccatctggaactcaacgggaaagtattgtcaacacgcagcgtgcccctacctggcgcgccaactgtcggtgtttcggacccgggggaccctcaactagaccgactagtgaattttagtgtcgcgtgcccctatccagatgggttgatgcaagatggaacacaagcgaagggatga

SEQ ID NO: 6933 - DNA, 2658 bp, Zea mays
  Peptide Sequence Number=SeqID_50308
atggaagttgttgagttggttctccgcgcccgcaataaatggggcaactggtgggaattttggttctacgttgccgaagccacagtcgaagaccatccggggctccccgtggccgagatgtgttcgcattattactcagtgtaccagcagtttgaggtagtagaggaggatgaaaatgaagaggcccttcggtgcgcggcccgcatgagtagcggacgcgatctagtggaggagtttgtcaggtatggagtatggcccttggcgcgtggctgggcggtgggcgaagtatgccctcgccagatgccttcccgcggtgggatgctagtgcggagtcctgccttcgcactggatttgcatggccgggatcccgccgcattcgtgcgtgaggcagaggatggggcggtgcggattgttggtcgttacgtgccaaagacggaggcccagcggagttgggatatacgcggacccaacgaccgcttgaatagggtcttcgagttgaaccgtttgccgtatggaggttatcccgggcaagacgttgtcgaccgccgcgggaaaaaaatggcggctgagaccgaagacgactccgcgccggcggtcgccccatccactaagaagaggaagctaggtactgcgatgggaggactgggggtctccgatagttttgctatggagttgatggggacatgcgcggcccccaggggaaggatgtcttcgcccgagcttcgggagtcttcagcgcggatgctggaggttaccgggggtcggtggcctaagaacgttcctatcccccgcgcggccggcgaagactcttttacatctcgcatggctcgtgacctgagagtatttccttacggacggaatattgctgctgttgtgtcggcagtgatgaacaaggatcgccaggaagctgcgcagaagcgtcgggcgatcatcaggcttcccgaggctaggccgaagagggctcgggggactgcgaaggctaccgcccccggcagatcgggcgaagggcaacttgctgttgttccgcctgtggtggcgaccacagtgtctgccgcggtgcctggggcgaagggtggtgcgctcaacgctggtggtgagatttcggcggtcgctgccgtcaaggacgaagcgggcactatgtcccgccggctgagggaagcgtcccaacggctgagtcaagcggccgacttcgccgaccgtgtggtgtcgggggcccttacggcagatgtgtctgccgaagtcgagagacttcgggcgcagcatgctgacgccgtccgggaaaagtcggtcgcggacagcaagtgccgcaagctggcagagaaggtggacgccctggagggcgagaggacggacctccggcgccagttgttggaggagaggagggaggctaaccaggccatcgccaaggtgcaggcggcgcaggcggaggccaatttggcacgggtggagggtagtctcgccaaccagcgcgccgaggaatgggaggagcggtacaacgctctacaagcccgcatgaagagggccgaggcctctacgtgctcggaagttgagtggacgcgcaaacagctcgtggactcataccgcgagctgggcgcgcggactgctgacttcgaagtgcccgaccgggaggcgggccttcgcttcctcgagtggctgcaggaggaacttttggcgctcccggccattgtggagggatttatgtcctttgcctccctcgtcacctgcgaaggggcgatgaacgcgttgtcccgcgaggggtgcagtcactatgaggtcttcgaccgatgtgatgatgattttgggcgcgagattttcaaggtcaaagaccctgtggtgaaggactccgcgggtgccctctttgaccggatgtggggcccccacggtcgggaggtggtgagggagcggtccgaccgggcgagggaccaggcggcgcgtgccgaggtcgtggaggacttcggacccctgaacagagtgcggcccgaagcggaggccaacccggtggtggccgaggctgaggtcgacctggcaccgcccccggaaactggtgaaggctcccacgctgctcctacggctgccgcgtccggcggaggctcgtcgccaactgctgtgccaagggtggaggatcccccgaagacgacggcggagccggcggcggaggatcccatggcggcggctgggtcttcgcaggttcaagattttgggcctgcgcacgcaaccgctactgctaattttgtggcggtttcgaccgtggatgatgggaatgaatcggatgagtctgcttctaagttttttgattttgttgactctgggagttcggttgagtggacggaagagtattcggatgattacttggattactttgcggccttggatgtggcagtggcggagacttctccgcgtggtgcggatgctgaagttgtgcctggtccgagtgctgggcgtaggcggcgaagggcggtggcgaagcgtagagtgagtgaggtggatggcggtcggcttcgtgtgggcagggctggcaagcaggaattgttgtcctcgccggctggggtgagtgtaggtgagggggagttgcgaagtctttttgagggtgaggagcttaggataatgctatttaactatagggagatgggaatcattccgaaggttgaaccgatgtaa

SEQ ID NO: 6934 - DNA, 303 bp, Zea mays
  Peptide Sequence Number=SeqID_50309
atggagcacagaggtatatggaagttgctagggcctccagaggaagattccatcaaaggcacatctaaagcattcacaaccaaaatcaaaatgaagacaatcctagccagactcaagggcaacatcgccaatcccaagaatcagggacacaacaacaatcttcatagagcaatttccacccaccaacctcaagaggaggaagatgtggtcgaatctttggaggaagatttaacgcacaaccaagaaagctctattgtttttgtggataaaataaaggccacattacgaagacttgcctcataa

SEQ ID NO: 6935 - DNA, 483 bp, Zea mays
  Peptide Sequence Number=SeqID_50310
atgacagaggaagtcaatagcagaggccgcagtattcttcgcaagcttcgggacagcaacaaagctctttccggccgccagctccaagaggtagaggcgccaggggcttcggaggaagatatggggaccagcccaggaaaatctactgcctattttgtggtgaagataagggccacaatacaagaacgtgtcaaatcaccatccaaaagtaaaaagaaatcccagaagccgaagcctagaaaaatcagccgaagcaggtcctgcacactacttcgtgtcattcaccctacataccagaatatgtgggtaatcatcccgcagcttctgttgcttcggctagtcagccgcaagtttcttggccacatctcccaccttcgccgccactacagcctgcctactcacgagacttacgagaatgccgaagctacaaagagatattccttccagaatgcagaactaaaaatcgcattaaaatttgactga

SEQ ID NO: 6936 - DNA, 501 bp, Zea mays
  Peptide Sequence Number=SeqID_50311
atgggcaagagtaacaagcgcaagcgcgagccgactcctccgtcggaggacttcggcgactcggaatactcggaggaggagttctcctccgagtccgagggatctccggctcccgtctctcccccggcgtcgtctgatgattcagacgactcccaggggattgccgcggaggtctggacgtacatccgggccgtcgagcgctccgggctcgagggctcggatgagtctgagttctcctcggacgaggaggactcggacggcggcgaggacgaagatgacgacgatgacgacggcgacgacgacgatggtggcgacggcgacggtgacggcagcaacagcggcggggcagcggcggcaagggcagcaccagaggcggcagcagcacgggcagcaccagaggcggcagcagcaagggcagcaccaggggcggcggcggcaagggcagcagcagcaaggccagtggctaaacgccactggtctttagatattagtatagtgtag

SEQ ID NO: 6937 - DNA, 516 bp, Zea mays
  Peptide Sequence Number=SeqID_50312
atgaagactctaacgactttctgtggctaccatcccctggagatgctgatgcacccccccttgggactcttcccaacggagaagaaggatgaccccatgtggtgtaaccatgccctgcagagtgacgctatggcacatcttgctaacatcgctcaaaccaccaagctcaccctcgacagccgagaagattttgtggtcaacttgtcctccgagttggtggagaaggatttgcaggtggaaaggctgagccagcgcattaccaccttggagcagcaggtggatatccgagacaacactattgatgtcttggagaaccagctccatgatgtgcagcgagaactcgaagaagctaatgaccacttggacatgcaccacctagagatggaggccaatgaagtcgaaagcgagggagaagaggctcccgaggagttaggaccagcccctggtgccaatgggactacctccgcgatgcccccttcacccgcatccagtgtcgcttccaccactcagggttga

SEQ ID NO: 6938 - DNA, 639 bp, Zea mays
  Peptide Sequence Number=SeqID_50313
atggcaccggaactctatgacgaggaatataatgagcttgtagacatctatgcttttgggatgtgtttactggagcttgttacatttgagtacccatattgtgaatgttcaaatgcagcacagatatatagaaaaggtgaaaagccaggttcactggctaagattggtgatcctgaagtaaaattatttatagagaaatgcattgctaaagtcactgaaagactttcggcaaatgaactcttaatggatccttttctcctagatgttagtgatgaaaaaatattctatccagtgcatccaaatattaatacaacaggtcatgcccaaaacatccacttcccctttgatattgaagcggacactttaatcagtgttgcaatggcgatggttgtgcagctcgatctcacagatcaagatgtaacgacgattgcagaaatgatagatgctgaaatacgttcgcatattcctgattgggcagcagaggagtcaattgacaaccaaggggatgaagctgcttactctgagacccatagttcagaaggtgatgagggaacttctgaactgcgtgatgagatcggttgccgctacacccacatcggcgacatgcactggatcttcgcccgccatcagcgctcgtga

SEQ ID NO: 6939 - DNA, 825 bp, Zea mays
  Peptide Sequence Number=SeqID_50314
atggcaaccaaattgaaactgctgcaaggccatatgcttttatcaagtttggtatggttcctgagttcacttgacagcattgcttcgtttatcatttcaaattctaccactttaaaacttatgcctctttctgttctagatacattcatccataagactaagaaactatatttggatacaagaactcagagaaacctcgcaaaattgaacgatgaactctatgaggtgcatcaaattatggctcgcaatgttcaagaggtgctgaaatgtggggaaggtatgattcgtcagctgatactgaaagggatcaaccaagcctctaaagaaacgatattgtctcttggcatctatgttgacatcctcaggagcatagcgggacaactgcagaaacttgtctctgtactcactaacagacataggcccttgcttgagcgtcaggaactccttcttcactgtcatcagacccgcgggaacatggtacttgcggaaattgtctctgaattcctcccaggtgatagtgtcggggttggcatgggtggcaagataggactcccaccaagactgggttgctcctctcaacagacggggaccataaagaactttctccctgtcgtcgcactaagcggtgtgcaactcccgctccacggtgcgcaaccaatcttcagcatccatggggtcagaagagtgggcgaacactgggggatgacctctcatgaattcagcacgcttgtctctgggcatctgaggcatctgaggtggtggctgctgctgctgaatggcggccagagtctgactaatggcttgaactgcctgagtctgcattaa

SEQ ID NO: 6940 - DNA, 1467 bp, Zea mays
  Peptide Sequence Number=SeqID_50315
atggcgccgtgttgcctgctccagatcggttggtgtctcgagcgcccccgtggctttcgcctcgccgcggcgctgtgcgcggctgtggtcgcgctggcgctggcgcccgccttggatgccacgtcggcgtcgcttctgggcatcaactacggccgcgtggggaacaacctcccgccgcctcagtccgtcatgccgctgctcgagggcctcggtattggccgcgtgcggatgtacgacgccgaccccaccgtgctgcgcgcgttcgcccggaccggggtcgagctcatcgtcggcgtgcccgacgagtgcctggccgccgtggccgacccgagcggcgcggcacagtggctcaaggagaacgtcgcgcctttcctgccggacacgaagatctccgtgctcgccgtcggcaacgaggtgctcaccggcgccaacagctccacgctgtcgcgcaccctcctcccggcgatgcagtccctgcacggcgcggtggccgcgctcggcctcgacaagcagatcaccgtcacctcggcgcacaacctcggcgtgctcgggacgtcgtacccgccctcggcgggggccttccgcaaggacctgctcccgtacctctgccccatcctggactaccatgccaggaccggctcgccgttcctcgtgaacgcgtatccctacttcgcctactccagcgaccccaggggggtgcagcttgactacgcgctgctcgacccgggcttcgccggcgtgcaggaccccaactccaggctgcactaccccaacctcctcgtggcgcaggtggacgcggtgtaccacgccatcgcggcggccaataccgcggcgtcgcgggtggtggaggtgcgggtctcggagaccggctggccctccgcgggggccgccaacgagacggccgcgacgccgcagaacgcggcgcgctacaacagcaacgcgatgcgcctggtggcggagggcaagggcacgccgctcaagcccggggcgccgctccgcgcctacgtgttcgcgctcttcaacgagaacctcaagcccgggttggcgtctgagcgctactacggcctcttcaagcccgacggcacgccggcgtacgagctctccttcaagctaccgcgcgacaactccacgtttggtcacggagataccggcaagggcggtggcggaatcggcggtaacggcaatggcaatggcagcagctggaacaatagcggcggcggaaacagcggctactatgacatctcggcttcagcacgtgacactacggatcaggaatggagcggagttgccgtcctggggcagcggcctgatttggtgctcctccgctggatcaggtttgcctgcctgcttgaaatgaaaccctttccaaatactggtagcaccctgatggatccgaagaatcgcaaccctaactgggaccggtgggggccgaaggatgcttccgcagggttcccagtcgtggggtaa

SEQ ID NO: 6941 - DNA, 153 bp, Zea mays
  Peptide Sequence Number=SeqID_50316
atgacgctcggcgatgttgggactgacagttcgatcaaatctaaagggatcacatccattgagtcaaccatcgagaccaaggccactgcgtaccatcctaatggaggaattccactgcaagatcttcggttatggagcaaaaagatagaatga

SEQ ID NO: 6942 - DNA, 1707 bp, Zea mays
  Peptide Sequence Number=SeqID_50317
atggagtctgctcccgccgcggtcatggagcgggagcgcctcacagccgagatggccttccgcggcgcggacgaagcgcggcgggacggcggcgagccggcgcccagcatcgtcatcaagatccgccgccggctcccggacttcgcccgcagcatcaagctcaagtacgtcaggctcgggatccgacacggaggcagccccacgtcggtgctgccgatgctctgcgtgccggcggtcgccgccgccgcctactcgttcgtccgcctcgacgtcatctactactccatcgacctgctcacctgcgtcgcctggctcggcaccgcgctgctgctgctcaccgtctactacttcaagcggccccgcccggtgtacctcgtggacttcgcgtgctacaagccggaggagcagctcaagatctccaagtccgccttcctcgagatgaccgagagcacggggtccttcaatgaggcggctctggatttccagaccaagatcaccaaccgctccgcgctcggcgacgagacatacctgccacccggcgtgcaggcgcggccgccgaggctcaacatggcggaggcgcggatggaggccgaggcggtcatgttcgggtgcctggacgcgctgttcgagtccacggggatcgacccgcgccgcgacgtgcgcatcctcatcgtcaactgcagcctcttcaacccgacgccgtcgctggcgtccatgatcatcaaccactacaggatgagggaggacgtcaagtcgttcaacctcggcggcatggggtgcagcgccggtctcatcgccatcgacctcgccaaggacatgctccaggcgaaccccggctcgtacgccgtggtgctcagcaccgagaacatcaccctcaactggtacttcggcaacgaccgctccatgctcctctccaactgcatcttccgcatgggcggcgccgccgcgctgctgtcgaacaggcgcgcggacgccgggcgcgccaagtaccggctgctacacacggtgcgcacccacaagggcgccaccgacgagtgcttcaactgcgtgtaccagcgcgaggacgaggtgggcaaggtgggcgtgtcgctggcgcgggagctcatggccgtggccggcgacgcgctcaagaccaacatcacgacgctgggccccctggtgctgcccctgagcgagcagctcaagttcctcaagtccctgatgatgcgccgcgtgttccgcgtcaagggcgtgcgcccctacatcccggacttccggcgcgcgttcgagcacttctgcgtgcacgccggcggccgcgcggtgctggaggaggtgcagcgcagcctgagcctgcaggacacggacatggagcccagcaagtgctccctccaccggttcggcaacaccagcagcagctcgctgtggtacgagctggcgtacgccgaggccaagggtcgggtgcggcgcggccaccgcgtgtggcagatcggcttcggctcggggttcaagtgcaacagcgccgtgtggcgcgctctccgcgacgtgccgccgctgtcgtcgtcgaccggcgccgcagcggggccgccgggcaggaagggcgcgcagagctgctgcaacccctgggtggacgacgtggacagtctccaaaaggagaaccatcgcggcgtccctgatcagtaccagggtaaggtcatccatgtggtggcaagtatgccgacccactggtga

SEQ ID NO: 6943 - DNA, 471 bp, Zea mays
  Peptide Sequence Number=SeqID_50318
atgcccgccccgcctcctcctccgtcggcggggaaggtgacgggacagacccggatgttgctcttccgcaacgcggggaagacgtcgtcgattccgccaccggcgggcgggctgacggtcgccattgtcgttgtcgcgcggcggaggaaggagtatcatgtcgtagctgccgtcgagggacatgaactcaagactcccgaaacggagcatcgtcccgggctggagaggttgctggagactacccatctggagcttgacaggaagctattcgtcaacacgcagcaggcccctaccctggcgcgccaactgtcggcgtttcgaccccggggggtccctggaccgacgagtaaattgtcgctgcgtgtcccagcccagatgggtcggcgcgagacggaacacaagggggaaaacagtaaggggaaaccgcagcctcgtgttgtcctgcgcccagggcggatgcgcttgcagtag

SEQ ID NO: 6944 - DNA, 309 bp, Zea mays
  Peptide Sequence Number=SeqID_50319
atggcgcttgaactcgaggaaatcattgtcgcctctagatccggcggcggcctcagatctgaggattcgcgaggggaagacccacctgaggaggcacttgaggacgccaacggtggcgcatggcatggcgagggctacgcgtggtcccgaatgggcgatgctagcgccgggtggaacaacaagtccggccggcacggtggcaagggggcgggcggcaggagcgagtcgcccccgctgacaccgacgtcgtggggaggcgggatgggtggaggtggtgtcggatggaggagattccgggctggaggataa

SEQ ID NO: 6945 - DNA, 665 bp, Zea mays
  Peptide Sequence Number=SeqID_50320
atgtccggtgcaccaggggtctccgacttcaaactcttcactctcgggaatttccagaggccactccgctataattcaccggactgtccggtgtgcaccggacatgtccggtgctccaaggaagggcggcctcaggaactcgccagcctcgggttttcacttcaaccgcttcgctataattcaccggacatgtccggtgtgcaccggactgtccggtgcatcctcggggcaacggctacttcgcgccaacggtcacctgcaggcgcattcaatgcgcgccagaagcgcgcagtcgtcaggcacgcgggagcaggcgcaccggacattgaacagttcatgtccggtgtgcaccggacatcaaggcgggcccagaagactgaaccccaacggtcgatccaacggctatttggtgacgtggctgtcgcaccggacatgtccggtgtgcaccggactgtccggtgcgccatcgaacagacagctccaccaacggtcaagtttggtggagctgtctgttcgatggcgcaccggacagtccggtgcacaccggacatgtccggtgcgacagccacgtcaccaaatagccgttggatcgaccgttggggttcagtcttctgggcccgccttgttgtcccggtgcacaccggacatgaactgttcaatgtccg

SEQ ID NO: 6946 - DNA, 3507 bp, Zea mays
  Peptide Sequence Number=SeqID_50321
atggccacctcgctctacaccccgtcccagctccgcccctcccactcccaggcccgccgcctcggctcgcacccgcgcgtctgctccgcgcgctgccccgcccgccgccgccgcgccgccgccatctccgtgcgcgcttccaccgatggcgacgccgccgtcacggtgcgccgcttcccggccgcgccgaccaaggccgggggcctctcgggcgtaaagaagatcatgatcctcggcgcggggcccatcgtcatcgggcaggcgtgcgagttcgactactccggcacgcaggcgtgcaaggcgctggtggaggagggctacgaggtggtgctcgtcaactccaacccggccaccatcatgaccgacccggggctcgcccaccgcacctacatagggcccatgacgccgacgctcgtcgagcgcatcatcgacgccgagcgccccgacgcgctgctccccaccatgggcggccagaccgcgctcaacctagcggtctcgcttgccgactcgggcgcgctcgaccgcctcggggtgcgccttatcggggcctccctccccgccatccgcgccgccgaggacaggcagctcttcaagcaggccatggaccgcatcggcctccagacgccgccctccggcatcggcaccacgctggaggagtgcctcaccatcgctgaggacatcggggagttcccgctcattgttcgtccggccttcactctcggtggcacgggcggaggcatcgcctacaacagggccgagtttgaggacatatgcagggccggccttaccgcgtcgcacactcagcaggtgctcgtcgagaagtcgctgctcggctggaaggagtacgagctggaagtcatgcgcgacatggctgacaatgtcgtcatcatctgctccatcgagaacattgatcccatgggcgtgcacacgggggactccatcaccgtcgcgcctgcgcagacactcacggacaaggagtaccagaggcttagggactactcggtggccatcatccgtgagattggtgtggagtgtggtggttccaatgtgcaattcgcggtcaatcctgcagatggggaggtgatggtcatcgagatgaatcccagggtgtccaggtcgtccgcacttgcctcaaaggcgacagggtttcccatagccaagatggctgcaaagctgtcagtaggctacactctggaccagattcccaatgatattaccaagaagactcctgctagcttcgagccttccattgattatgtggtcacaaagataccacgctttgcttttgagaaattccctggctctgagccaatattaaccacacagatgaagtctgttggtgaggcgatggcactggggcgtaccttccaggagtccttccagaaagctgtccgctcactggagactggttttgcgggatggggttgtggccctatcaaggaacttgactgggactgggaacagataaaatatagcttgcgggtacctaatccagatcgtatccatgctatctatgcagctttcaagaaaggcatgagggtcgaagatatccacgaaattagcttcattgacaaatggtttcttacagagctcagggaactagtggatgttgagcagttccttttatcaagaagcctagatcaattgtcaaaggatgacttttatcaagtgaagaggaggggattcagtgacaagcagattgcatttgcaacttcctcatcagaaagtgatgtgagatcaagacgtttggcattaggcgtcactccgtcatataaacgtgttgatacttgcgctgctgagtttgaagccaacacgccctacatgtattcttcctatgagtacgaatgtgaatcagctccaaccaataagaagaaggtgctgatattgggtggtgggccaaatcgcataggccagggcattgagtttgattactgctgttgccatgcatcatttgcacttcgagaggctggatacgagactattatgatgaactccaatcctgagacagtctctactgactatgataccagtgatcgtttgtactttgagccactgacagttgaggatgtattaaatgtccttgatttagagcgcccagatggtataattgtgcaatttggagggcagactccattaaagcttgcgctgcctatccaacagtacatagaggagaacaaaatggtttctgcttcaggcactggtaatgtgaagatatggggaacatcaccagattccattgatgctgctgaggacagaaaaagatttaatgcaattcttgaggagcttggaattgaacagccaaagggagggattgcaagaagtgagtctgatgcattggcaattgcctcagaaataggctaccctgttgtggtccgtccgtcatatgttcttggtggacgggcaatggagattgtgtacaacgatgaaaagctgatcaagtaccttgcgactgcagtgcaagtagatccagaaaggcctgttttagtggacaaatatctgattgatgcagttgaaattgatgttgatgcattggctgacacagctgggaatgttgtgattggtggaattatggagcatatcgagcaagctggcatacattcaggcgattcagcatgttctcttcccactagaacagtctcagccaagtgcctagaagtcatccgttcatggaccaccaagctagcaaagtgtctgaatgtgtgcggactaatgaactgtcagtatgctatatccacttctggtgatgtgttcttacttgaggcaaaccctcgtgcatcacgcacagtcccttttgtatccaaggcgatcggccatccgctagccaagtatgcatcactggtgatgtctggtgtgaccctgccagagcttgggttcactgaagaagtgattcctaagcacgtgtctgttaaggaggctgttcttccgttcgagaaatttcaagggtgtgacattctcctcggaccagagatgcgcagcaccggggaggtgatgggcatcgactacgagttctccggtgcctttgcaaaggcgcagattgctgcgggacagaagctccccctaagcggcaccgtgttccttagcctgaatgatctgacgaaacggcaccttgctgagatcgggcgtgggttccgggagcttggcttcagcatcgtcgccacgtctggaacagccaaagtgctccagctcgagggcgtcccggtggagccggtactaaaaatccatgaggggcggccaaatgccagagatatgctgaagaatggccagatacagatcatggtgataacaagctcgggcgacgctctcgactccaaagacggcctccagcttcgtcggcttgccctcgcttacaaggtgccgatcaccacgaccgtggacggtgcacgggcctccatcgatgccatcaagagcttgaagaacaagtcgatcgagatcctcgccttgcaagattacttccagactgctgatgcttcggaggatttacaggcggtggcacgaaccgccccttag

SEQ ID NO: 6947 - DNA, 636 bp, Zea mays
  Peptide Sequence Number=SeqID_50322
atggttttggtgctcataatagaggaggccaacggcggttgtcaagggcctgggcgtctagagcagggggccctcggctacgaaggtcgtagccgcgccactactttccatatgctcctgcggatctcccagatcgcgctcctggcgatctgcgcgccctcccagatcgcgctcctggcgatctgcgcgctcctgtgcgcggcgcctatcatgggcgcgacgctgcctggcagggcgtgggagcaggcgcctcctccccgttattcgtccgagaccagccccgacaccgacccgcgcagtggttattgcacgcccatgaggacgtttcacagcatgcgcacatcatcgttttcgccgtcgtcagatgtcccattcgtcttcccaaccttcgtgttgttcttcctccccaacctgctgcccccgcccacagtcgcagtcgcggggcgaccggcgcttgtcgacgcgagtacggggcgagtcgatcttactcctggcctttctccgtgcgtggtgttgaggaggacacggtggcgcctaccacgcttaggttatcttagcgatgaggagtccagggctgggaaggcactcgtattatctcgtccttctcggactgatgcctggtgcgggtgcctctag

SEQ ID NO: 6948 - DNA, 657 bp, Zea mays
  Peptide Sequence Number=SeqID_50323
atgaagctccccgagcgaggaatcgaactttgcctcgccggagaagccagtccacggtcgccggacttcacccgaccgctggtgaacgtagaccgagctccacgcatacatgtttcttactcattgcattcgatagattgcaacctcgctgacggagaatacatcctcgtgccggagcaaggagttgctcaggaggaaaataacgtcactcgccccgctccgactgctgtgccacccgccagggtgaggctgacaatagctaagttcagcctcaggcgcaacaggaagctttgcctcgcccgaccttgggcctcggcctcaggaggaggtctccgcctcgcccgaccccagggctcggcccccacctcggccttggaaggtggtctccgcctcgcccgaccccagggctcggcctcaacctcggcctcggaaggtggtgtccgcctcgcccgaccccagggctcggcgtcaacctcggcctcggaaggtggtcttcgcctcgcccgaccccagggctcggcctcaacctcgacctcgggaggaatcgcgtccttgtccgaccccggcctcggcctcaggagaagtctctgcctcgcccgaccttgggctcggaccgatcgcgccacgaggatacatcattaccctacccctagctag

SEQ ID NO: 6949 - DNA, 997 bp, Zea mays
  Peptide Sequence Number=SeqID_50324
atggccgaccccgctggaggccgggggcagccttgccctggcattgtcaacgatacgtcgctggacgtcccaggcctgatgacgcgcttctcccgcgagtgctcggcctgcccactcctgctcgatgttttgccggagctgcacaagttgccatgcttcctcgtcgagcttggtctacatctcgtcgatttgctcgagctgcccagggggatcgtcatcctccggcatactaagatagttgccttcgtcgcgaccccccagatcgacgtggaaacattcgtgacttgggtcacaaacttcgtcgtcaaggctgtggccatcatcggagcaatcggagaggcagtagtcatatgcggtcatgaagtcccgcacagcactgggattaccgagcccggagaaatcccaactagagtcaggctcgtctttttcctcggaaaccaggggctcgtaggtcgagacgaccgtcagtcggtcccagggtggaaaacggaaggtacctctcgatcgatggacggtgacgaggtcacgtcggggacagactgcaccgttatctcaggtacaaggcgcgaggacaacgcccgacatgtcccccactggggtgctggcgtcgtcgactcgctcgacagtcgacgaggtgccgactcctgcctggccatggttgccccgcctcctcctcctgcggcgaggaaggcggcaggacaaacccggatgctgctcttccgccatggggggaagacgtcgtcgagttcaccgccgtcgggcaaagttacggccatcgtcgctgtctcgctgcggggggaggagtaccatgtcgtagctgccgtcgagggacatgaactcgagactcccgaagcagagcaacgtcctgggctgaagaggttgctggagactacccatctggaactcaacgggaagttgttcgttaacacgcagcaggcccctacctggcgcgccaactgtcagcgtttcgaccccgggggggtccctggaccgacga

SEQ ID NO: 6950 - DNA, 627 bp, Zea mays
  Peptide Sequence Number=SeqID_50325
atgtatcttgtcatcctgctcctgcatttgcctgaaagcttttgcaaagatgatatatgctgcactgactgtgtctacaaggacattgtgaaccagaaaccccttgatgacacaagatataaccattgcatcattgtgaggataatccttgagctgaaggtcttcctaggagaagaacttgagccacctgtgattgggagcatcagcttcgtagccgaaggtgccacagcttggttgccttgcgaagccattgtcgcagtcgtggaaattactagggtctatctagtcttttccttctctgcccggtctgagccgaagctgatggtagcttcggcgttttgtattgttgcttctatgcaaggtcttcgtcttgaaaaccttcggcaaaagaagggaggacctctgtatcattttgccgaaggtgtttttgtcttgaggaccttcggcggagaagacccccaacaattgccatatatgagctccaacaccctacaatggtcacatataacaaagccaaacacaggaacaacccaaactaaaggtcaaggtaaacttagctcttttgggttccttccaagttctcactttgaaactatcctccttctagtgacctcattcacttcttga

SEQ ID NO: 6951 - DNA, 417 bp, Zea mays
  Peptide Sequence Number=SeqID_50326
atggatacccataggccaccacacttcgacggcactaacttcccatattatagtgctagaatgacttgttacatagaagccattgatctaggtgtttggagagtcactcatgacgggatgaaaccacccaaaaatcccgagaaactcaccacgaataacgagcttgttagatatatgtattctcacttgaatctaatcatcaatgagctcaattctattggcataaataagctaggtgatgcggacattgtgaggaagattatctccctgctaccacaacaaagatatgggagcatcatcactattcttcacaacatggaggaattgagtacaatgaccccgaccattgtgattggaaaaatcgcggcttttgagatgtcacgaaaaatgtgtcggggagaggagccaaatttctaa

SEQ ID NO: 6952 - DNA, 1185 bp, Zea mays
  Peptide Sequence Number=SeqID_50327
atgcagatggcagcggcagttgcccccaccgacgccccggcctcggcgtctgcggcggcggcgccctcccgcccccacgcgcacgccgcggcagcggtggcggccgcgtcgcctcacccgcacgcactgcatccgcatcaccatatgccgcaaccgcggtgggtggtcatcccataccctcctccacaccatcccatggtggccgcgccgccgccaccttctctgcagtttgtgaagcattttacgccgccgtcctcggtaacaccgccgccgccgactggatccggcgggaacgggggcgaggataaccggaccatctgggtgggcgacctgcagtactggatggacgaaaactatcttcacagctgcttcggctctagcggcgaggtggtgaatattaaagtcattcgcaatagacactcgggagtttctgagggttatggttttatagagttttatactcacgtttcagcagagaaggcactgcagaatttttctggtcacgtaatgcctaatactgaccgggcttttaagttaaactgggcatcatatagtatgggagaaaaacgctcggaaatttcgtctgatcactcgatatttgttggcgatttggctgttgatgttactgatgcgatgttgctggaacttttttctaacaaataccgatcggtgaaaggagctaaagttattattgatgcaaacacaggccgttctagaggctacggctttgttaggtttggagatgataatgacaaaattcatgcaatgactgaaatgaatggtgtttactgttccacaagaccaattcgtgtaggaccagcgactcctagaagatctcaaggtgattctggcacttctccaccaaggcaatctcatgttgactctactaacaggacggtatatgttggtgggcttgaccccaatgttagcgaagatgaactgaggaaagcatttgcaaaatatggtgatcttgcctctgtcaaaattccttttgggaaacaatgtgggtttgttcaatttgtaaacagagttgatgctgaagaagcactgcatgggttgaatggatcaactattgggaagcaggcagttcgactttcctggggccgcagccctgcaagtaaacagtggtgtgacaatgtggctaagtatggcatgggaatgacgatcaccaatgagaagagatag

SEQ ID NO: 6953 - DNA, 120 bp, Zea mays
  Peptide Sequence Number=SeqID_50328
atggccgagagtggtctagccacggtggccgagtgctcgggctgcttggcgggcagcgcagagctcgccggagctaagtgttgtgcttggggagtcagagggcattacttcatgggctga

SEQ ID NO: 6954 - DNA, 1194 bp, Zea mays
  Peptide Sequence Number=SeqID_50329
atggcggcggcaggtgggcggaagcagcagtcaaatcatctgcaggctcacgtccgctcctggaacagcgagagagccctctcctacggcgtaaagacgacgcgcccgtgtttcgttcctcgaatggctcgcgcatgcacaacggctgctgcgcgaaccactcgtcccgtcacattaactctgcggcagggcaggcgacacctttggcaggcgaagcgggcgacgcttcacctccgtcgtaatgaccacgtcaaaaaagggactgggaaaggggatacttcgaaagggatccttctccgcgaaggaagcgggccccaagcccccctactgatcagaggttcgaaggctggccccccggaagggttcgacagccgcctcaaagcactcgagctccgcgcccactactggttagaggttcgaaggctggcccctcggaagggttcgacagccgcctcaggccacttgggctccgcgcccactactgatcagaggttcgtaggctggccccccaacgggttcgacagtcaccctagagcacgcagagtgagggatgactttgtgtacgttcgatacataaccaaggctcgggctacgctcccgagaggctcgggggctactctcgcaaacccggcttcagccaacccgttgacagcgtcaacataccagcccgagaactcggaacctgactatgcacccgggcaacaaccagttcgcatgagggaacaaccaggccggccaaggcatcacgaaaggcatcaagacctcgaaggagtcaaaccactcctccgaggcctcgagggctacacccggcaggaaaacagcgccgcctgcgctgctccgactgctgtgccacctgccaggttgaggctgacagcagccaagtccagcctcgggcgccataggaatctccgcctcgcccgaccccagggctcggacttgacctcgctccagaagaaagtctccgcctcgcccgaccccagggctcagactcgacctcgcctcggacgacggtctccgccttgcccgacccagggctcagactctacctcgacctcggaagacagtctccgcctcgcccgaccccagggctcggactctacctcgacctcggaagacggtctccgcctcgcccgaccccagggctcggactccacctcgacctcggacgatggtctccgcctcgcccgaccctag

SEQ ID NO: 6955 - DNA, 1230 bp, Zea mays
  Peptide Sequence Number=SeqID_50330
atggagggatccctggaggcgcggcccggtgtcctactcgtcggcgccccgggcgtcggcaagcggaccatcctctcccagtttcttggagcagaaatacctgacgtgcatgacttatcatccggtgtgctttgtcaggggtggacaattgaaacaaagtattattcagctgatctttccatctggacagcaaatcttggtgaagaattttctcttgattccctccctcatttagaccgggtggctgccctcgttatggaatccaccttgcttactctgcaaagctgggctgccagtgttgatatccagaggtttgagatcttgttatgcgttggaaataaagcagatcttgtacctggtcatagcgtgcatgtagaatataggaggcgtatgcaaaatcttggggagtcaagttctgatccacaccctgattatttcaattttgggataaatgaaagtgagggttgtagcttgttatctgaggaagaaccatgcataaagatcagaaactcgactgcacagtggtgcattgagcagaacatagaatatattgaggcctgtgcttccaatgctgactttgataagtgtctatcagtggatggtgatagccaaggcttagagcgactccttggagctctttctgcacatatgtggcctggaatgattctgaaatctggaaacagaataactgtcccatccttggttgaaaaacaagaatccacagatgatgaatccaactatgattttgagtacgaggtcttgtctcatggatccgatgaccagtgggaatttattggagagacaagtacatccagaagatttgagagaccaaatgagcctgatggtgcacaggatcacacacatcaagttgtgaatgccggtactgactcttcagcatccaactctcccccgactaacacacccacagaaactgctgaagagaatactgtaactcagagcaacaaaaccgacaatagtgatcatgtggacaaaaccacagcatatagcactgaggatcatcaaagtgatcttcgagaggctaaccatctttttgaggacgagcattatggtctggatgacctggagaaaataatgtcggagattggcaacatgcgatcaaacttaagactcatgcctgacttccaaaggagggagatggctgcaaagctagccatgaaaatggcagccatgtttggtgatgatgatgaagaggcatttgatgatatctaa

SEQ ID NO: 6956 - DNA, 2598 bp, Zea mays
  Peptide Sequence Number=SeqID_50331
atggcggtgacgcaggcgtttgccgacgcgctgcgttcgtgcggtgcgcgcggcgcgctcgccggcgcccgcgcgttgcacggtcgcctcgtcgccgtgggcctcgcgtccgccgtcttcctacagaacacgctcctccatgcctacctctcctgcggagccctctccgacgcccgacgcttgcttctgatggacatcgcccatcctaatgtcatcacccacaacgtcatgctgaatgggtacgccaagctcggccgactgagcgatgccgtggagctgttcggtagaatgcccgcgcgagacgtggcttcgtggaacacgctcatgtccggatactttcagagccgacagtacttggtttctttggaaacctttctgtccatgcaccgaagtggtgattcgtggccaaatgcattcacattagcttgtgccatgaagtcttgtggcgcccttggatggcacagtttggcgctgcagctgcttgcgatggttcagaagttcgattctcaggatgatagtgaggtagcagctgcccttgtcgacatgtttgtgagatgtggagctgtggatttagcttcaaggttgtttgttcgcattaaagaacccactatgttctgtcggaacagtatgctagcgggatatgtcaagacatatggtgtcgatcatgctcttgagctttttgatagcatgcctgaacgtgatgttgtttcgtggaacatgatggtatcagcattgtctcagagtggccgagtcagagaagcccttgatatggttgtagacatgcaaagcaaaggggtgcgtcttgattcaacaacatacactagttcgcttactgcatgtgctagattatcttctttaagatggggtaagcaacttcatgctcaggtgattcggaacctaccgcacattgatccatatgttgcaagtgctcttgttgaactgtatgcaaaatctggctgtttcaaggaagctaagggggtcttcaactctttacatgaccgtaacaatgtggcttggacagttctcatctcaggattcttgcagtatgggtgtttcactgaatctgttgaattgttcaaccagatgagagctgagttgatgacacttgatcagttcgctttggctactcttataagtggctgctgcagcaggatggatttgtgccttgggaggcaactacattcactttgtctgaaaagtgggcagattcaagctgtagtcgtctccaattctctcatctccatgtatgcaaagtgcgacaatctccagagtgctgaagctatattcagatttatgaatgaaaaggacattgtatcatggacaagcatgataactgcatattctcaagtaggaaacgttgcaaaagctcgtgagttctttgatggcatgtcagaaaagaatgtcattacatggaatgctatgttgggagcatatatacagcatggagctgaggaagatggcctcaggatgtataaggtcatgctaagtgaggagtatgttagacctgactgggttacctatgtcacattgttcaaaggctgtgcagacttaggtgcaaacaaacttggagatcagattattggtcgcactgtaaaggttggtctcattatagacacctctgttgcgaatgcagtcataacaatgtattccaagtgcggaaggattttagaagctcgaaaggtatttgacttcctgaacgtgaaggatattgtatcttggaatgccatgatcactggttattcacagcacggaatgggaaaacaagccatagagatctttgatgacatacttaaaagaggtgcaaagccagactacataagctatgttgcagttctgtcaggctgcagccactctggactcgtgcaggaggggaaattttattttgatatgatgaagagggcccataacatatctccaggtttggagcatttctcatgcatggtagaccttcttggccgtgccgggcatctgacggaagccaaggatctcattgacgatatgcccatgaaaccaaccgctgaggtttggggagctcttcttagcgcctgcaagatacatggcaacaatgagctcgcggaacttgcagcgaaacatgtgtttgagctggactcacctgattctgggagctacatgcttatggcgaagatttatgccgatgccgggaaatcagatgactctgcgcagataaggaagctgatgagggacaagggaataaaaaagaacccgggctatagctggatggaggttgacaacaaggtccacgtcttcaaagcggatgacgtgagccatccccaagttctcgcgattcggaagaagctagatgagctcatggagaagatcgcgcgcctagggtacgtgaggacagactccacgcgctccgagattcaccacagcgagaagctagctgtagcattcgggctcatgaccttgcccacctggatgccgatccacatcatgaagaatctgcgcatttgcggcgactgtcacactgtgatcaagctgatatccacagtgactggccgagaattcgtgattcgagatgccgtgcgattccaccacttcaatggtggttcctgctcttgcggggattactggtga

SEQ ID NO: 6957 - DNA, 4176 bp, Zea mays
  Peptide Sequence Number=SeqID_50332
atggcgccgccgccgccgtccttactccgagagctcctcacagctgacggcttcaagaaccgtcgcaagccgctcgacagctccgccccgccgacctccagagccgcgagcatgccactacagcaccggcgcccgggcaagccgccctcgcggtcacagtcggacgtgctcacccgcagccgcctgaggcaggcgaacgccgacgcggacgatggcagcagggacgccgccggtgccgagcggcggcgggccgcgaccgcgacgcgagggttgtcggcgtcgctaacgagcgtgaggaaggtccacagcaacaagggagaaggcgacagcggctcgggcgccggtgccaggaggggtgcctcggcgtctgacccttccgcggtgccggcgctcgatgagtcggcgctcaccgcgctcatctccctcgccgcggggcctctgaagcggttcgccttggacgaggcgttccgcgcctcgctgcgcgccggctgcgcgtcttgcctcggcgactccagccaccgcgccgtgctggacctccgcgtgcaatcgcaaaccgtcgagcgggccgcgagagagggcctggacccgcgcgaactgaagcgcgcgtccctcaggctccacgaggtggcgtctctccaaggcaaggacgcggacgcggtgaccgcggcgggcgttccccacacgcgcctcgccgcgtgcgcgcacctatacatgtccgccgtctccaagctgcagaagcgggaccactccgccgcggtgcacgcgctggaggccttctgcctggcgccgcgcgaggcgcggacggtcctgctgcccgcgctctgggacaggctcttccgaccgggcctctcgcacctcaggacgtggcgcgaccgcgagtcggcgtcggcgagcgcggacgaaagggtggaggaggtggagaaggtgttcctgggcgtactggacgacgggacgcgcgcgctcgcgtgctactacagggactggctgctggggcggacagatgccatggctctcccggacgttcccgctcctccgagcacggtccatcccagcacgccgaggtgctcggcgtcgacgtcgtatgacatcagctcggaagtcatgttcggctccgggagttcgagtctggcgaagttcgcgtacgacgacataatgcgggcatccgaggaaatcgaggaggaggaagaagcggtgtaccccgaggccgccgcagaagcggtgaccgtgctccaccaggaccaggagcgcgatggagctggaggtgaggaaaggagctacactcccactccgttggcagaagaaaacgagcccgtgcctaacaatgtagacagagagacgttcgatccacactctcccagtgcatacaatttcgtactgatgggtgtgatctcgtgtaagctcatcagtgaagcgccactccagagtgacacaaatggcaacgagctctccattttctccacggttcccagcgacttcctgtgtccactgacgcgccagatattcagcaatcccgtgacgatcgagacaggccagacgttcgagcggcacgccatagttcagtggctagacagaggcttcaggacgtgcccggtcacaggccaagatctctcgagctcgacggtgccggacacgaaccgtgtgctcaaacgcttggtcgatagctggaggtctgaacacttcaagcatctgacatccggaggcgctgggctcgatgtgaagctaaccgtatcagcaatagacaaggctcttggttcagctcgggacgtgtctgaaaaatttgacagggcaagacacctgatggcgatcggggggatagacttccttctgtgcaagtttcaggagggagggggagacgagcagccgcgggtggctgagcacttgctgtcttgcatcagggctgaaggcagctgcagggattacgtggctataaagatggatggctcgagtattctgcggctccttcagagtaaagtgctttcgacaaggagaactgcagtggatttgctcatggaactggtggagccgaacagaaacaacacgtacagagaagaggcgatcaaggccatcacacgttctctgagatgctgcctgtcagaggacactgtcgtgcccagcactcggagagctctgctgctgctgggagggcagttcaccttctcaggcgaccttcacgcagaggactggatgctggaacatgctggcttcgtcgacccctcacgggccaccactgccacttctgatgctgttgacaagaaagcggccgaaaacgatgcgtggctgagacacgtagcagcggcgctcctcggcagccgcagcgggatcaggagaccgttcctggaggcgctgtccaggtgcctgggctcccccaacgccggcctggtgggtgcgtgcctgacgacggcagcgtggctgagccgctcgctggcgtcgctggacgaggacggcgccacggacacgtccctcgccgcgttctcggcgctcgtcccgcggctgaagcagtgcctggcacccggcaggccggtccggcacagggttcttgcggccgtgtcgctgcacaactttagcagaatcccagactgcagggagctgctgatgctgctggctgacggcatgcgcgaccacctcgcggagctagcgcagctgacctggacggccgccgtgtacgccagcctggttcgttttatacctaatccatttggattgagcggcgcccttagatccaagtacctgcacagcttcaagcacgccgcgtcgcagcgccacgactccgagtacagcgccagcgccgacgactcgcccaggaagcccacaccgcccgccaccacggacgcccacgcgccggcgccgcccgccgccgccatgaggcgcggcgcggctggcgcgacgccggacctcgggtccgtgctcggccacccaacccccaacctccgcgacctctacgcgctcggcaggaagctcgggcaggggcagttcggcaccacctacctctgcaccgagctcgccacggggatcgactacgcctgcaagtccatctccaagcgcaagctcatcaccaaggaggacgtcgacgacgtgcgccgcgagatccagatcatgcaccacctatccggccacaagaacgtcgtcgctatcaagggcgcgtacgaggaccaggtctacgtccacatcgtcatggagctctgtgccgggggcgagctcttcgaccggatcatacagcgcggacactacagcgagcgcaaggccgccgcgctcacaaggatcatcgtcggggtcgtcgaggcctgccactcgctcggggtcatgcaccgggacctcaagcccgagaacttcctgctcgccaacagggacgatgacctctcgctcaaggccatcgatttcggtctctctgtcttcttcaagcctggtcaagttttcaccgatgtagttggtagcccatattatgtagctccagaagttctgttgaaaagttatggacccgcagctgatgtatggacagccggtgtcattctttacattctactgagtggtgtgcctccattttgggcaggccatccatggattcgtgatcatggagtagctcctgaccgtccactggatccagctgtcttatctcgcattaagcaattctctgcaatgaataagttgaagaaaatggctttacgagtaatagctgagagcctatcagaagaggaaattgcggggttgaaggaaatgttccagatcatggacactgacaacagtggcgcaatcacttatgatgagctaaaagaaggattgagaaaatatggctccacactaaaggacactgagattcgtgatcttatggaagcagctgatattgacaacagtggaacaattgactacatagaattcattgctgcaactttgcatctcaataagctggagcgtgaggaacatctcgtggcagccttttcatatttcgacaaagatggtagtggctatatcacagtggacgaactacagcaagcttgcaaagagcataacatgccggatgcttttcttgatgatgtcatcaacgaagctgatcaggacaatacacattttattgatcaacatagttcatttgatgctcaattaatcaatgttgccaatgctttcaagtgtaacgagttaccctcggaatcattctacctcatcaaagcttatacaaattag

SEQ ID NO: 6958 - DNA, 175 bp, Zea mays
  Peptide Sequence Number=SeqID_50333
atgcgcctaggggtcccttttatagccccaaggcagctaggagccgttgagcacaaatctggaaggccattcttgccttctgtcgtcgggggcaccggacagtccgccacgtgtctcgcgcagattgcgcggccgaccgttggccctgccgaccgttggctcaccggacagtctg

SEQ ID NO: 6959 - DNA, 456 bp, Zea mays
  Peptide Sequence Number=SeqID_50334
atgtcttcgcgctcccctcatgcatcgcgtctttccatcttccgagcccccggatggggggcgcccgcagttcttccgccttgtcgtcgttggaggaacgcaacttcgcggaagttggtacctttcagccatcgttcggcttcaaggattttcatcaggcagcccggccgcatccccttgccggtggtcacccaagacggtgaccaccagttcgatggtggggagaagcgagccgggctgcaatcttggtcccgccctcagcttcaaggatcttcatcatcctggctgggcggaggccgggctgagccggagctctacctcccgcgcgggttcgtgggtcaccttctccctcagcattcaagggagagggcgctcaccggcctagcgggagggtcggacttcgacaacgcggggctggttggcggcgagcgtcgtcagcttcaccgcgttgggtga

SEQ ID NO: 6960 - DNA, 1287 bp, Zea mays
  Peptide Sequence Number=SeqID_50335
atgtccggtgcgccagccacgtcaccaggccgttgggattcgaccgttggagcttctgacttctgggcctgcctggctgtccggtgcacaccggacaagtactgtagattgtccggtgcaccatctcgcgcgtgcctggcttctgcgcgcttctggcgcgcattaaatgcgcctgcagagacgctcttccttggggcaccggacactccggtgaattatagcggagcgcctctggattttcccgaaggtgacgagtttgacttagagtcccctggtgcaccggacactgtccggtggcacaccggacagtctgctggctctggctcggctcccggtgccccctcctgtcgcgagagcggttgtcgcgccgcgcgcaccggaggaccgcccaagacgtcgcgcgctgctagggtggcgttcgtgttctggggctgtcctgcctttgccccggtggtggcggctgaagaagtcctcgttgccgacgggatcaccgccaccatccgtgctccgggcctccggctctttggctttgatagcttgtcctcgcccctcaagcggggacgtgggcgagggccttgttgcagcagcgtccgtcctgaggccatcgctgctgctgtttggccacctggagcggaggttgttgtcgctgctgccggagcgggcgtcggcgagccatccgttggccttctgttgccccgcaggccctccaacgtggggggttgttcgtacctgcggaggcggaaccggagttcaatttgtaatggcaccttgagtgccggtgtctgttcattatggctgtcggggcctgaacacgagtccctcggctcggtcggccttgccgcccgaggcttctcttgcttagttaagggaaaccctcggccgctcttcgatgagccgaagccggaggcagcggtgttagcatggacagaggcagagttggctcaaaaagaagacttcgtcggccggagcctggccgggccgtccacaggcgggaccgacgccggagtcgagttgccgaagccacgagccgggctggtgtcctcagaggacagctggctgaggctttggggcggccggccgagccgtctgctcgggtcggattcctggaggagaccacagcggcgatggccctggcgtggtgctgacgtcgtccttcggagtggagaccctccgaccgtgttccattcgaggctcggtcggacttcgccgaaggtggagttgacgctgagggtgctgctgctcgccctccgtcgacgtccgagcctgcaggatcggttcatcttgtag

SEQ ID NO: 6961 - DNA, 447 bp, Zea mays
  Peptide Sequence Number=SeqID_50336
atggagctcctcgtgcactttaatcgaactctaccgtcatggtttggccggagcaggagccgccgacgacccccgccgcctgtgctcgtggccaggatagcttcgaccacctccgacgccgaccagcataccgacgtgaccgtcgtgacctccccgacgtcactgaccaccccgccggagctctactgccgtcgttatggtgggtataagtgcggtcactgcacgacggcagtcggggtcagtgaggcattgtacgccaaggcggtgagccttgatctgctgacggggaatcgatggggacggttgatgtgtgtggggacggagtgcctcgccatgtcatgttccttggaggatatggttgctggagtgacttggccgtccgccttgccaccgggttggactgtcgagtgggaccccgcctcggccgaggaggagcatgaggagtga

SEQ ID NO: 6962 - DNA, 792 bp, Zea mays
  Peptide Sequence Number=SeqID_50337
atgacttcccatggatcctcaaacgacgggaatgcactgtcccacactgacgggcttgcacgagagggctttccccgcattttgtgggaggtacttcagggggccggatacacgacacctcctcagtacgcggtgcagcagttcgagaagcaccgagtgccccgctgtagggtgaggatgaccttggagcctcatcccctgcagccaggctggcgttcgctggactctgagtcctttggataccgggctgaggacacgattgaggcgattgctctgcacgggttgaccactttctgcggattccatcccttggagttgtccacccaccccattggcttgttccccgcggagagggaggatgacccaatgtggaaggatcgggtggagcatgccaaggacatctgggctctctacccaggccagactgctcacttgacggcaactaagatcaccctggacaacaaagaggagcttgtggttgacttgtcccaggagatagtggaaaaggatttacaagtggagcagttgtcagatgagatccaagagctggaggaattagtggggacaagggagaacaccatcgaggttctcgaggatcagctcatcaacacccagcagcagcttgccgaggctaatgagcacctagatatgcatcaccaggagatccaggatgtggaggctaatgaggacgtcgacattgagggaggggaggagcctgcttctagtgtggacactgctggctcagggaggccaccttcccccgagtcgagtgttgcctcgttcgctcactag

SEQ ID NO: 6963 - DNA, 288 bp, Zea mays
  Peptide Sequence Number=SeqID_50338
atggagcaccgtcccgggttggagaggttgctggagactgcccatctggagcttgacgggaagctgttcgtcaacacgcagcaggcccctacctggcgcgccaactgtcggtgttccgagactggggggtccctgagccgacgagtgaatgtcgccgcgtgccccagctccagatgggttgagtgcaagagcgagcgcgaagggggagagcgaggcggccggagacccgtgcgcaaggagaggatccaggtgtacaatggggggtgtagcagagtgctacgtgtctag

SEQ ID NO: 6964 - DNA, 759 bp, Zea mays
  Peptide Sequence Number=SeqID_50339
atggcgcctcctattgacgtggctggtctacgccctaggttgggcgatgtggaagctcctccgaagccgaggtcgagtccgtcttccatggccgaggtcgggtccaagccccaggttcgggcgaggcggagatcgccggctggtgccggggcagagtccgagccctggggtcgggcgaagcggagttcgtcgtcttctggggccgagcccaagtccgagccctgggtcgggcgaggcggagatcgtcgtcttctggggccgagcccaagtccgagccctgggtcgggcgaggcggagatcgtcgtcttctgggacttggcccgagtccgagccctgggtcgggcggagttcgccgtcttccgggacttagcccgagtccgagccctgggtcgggcagagttcgccgtcttccgggacatagcccgagtccgagccctaggtcgggcggagtttgccgtcttccgggacttagcccgagtccgagccctgggtcgggcggagttcgccgtcttccgggacttagcccgagtccgagccctgggtcgagtggagttcgccgtcttccgggacttagcggagcttcctatggtgcctttggccgggcctgactgcctgtcagtctcactctgtcaagtggcaccgcagtcggggtggcgcaggcggcgctgtccttctgtcaggccgctttgtgctgatgggggttaccagctgagaattaggagccttgagggtacccctaattatggtccccgacaataa

SEQ ID NO: 6965 - DNA, 501 bp, Zea mays
  Peptide Sequence Number=SeqID_50340
atggactgtcaagggaagcatggtgtgaagcccccgacgcctatgctcgcggggtcggatgccgcctacgtctgcaaggcgttggtcgtgtcgaacaagggcagtagatcgatctggagcagcaacgaggccgcgggcgggggacaagggcaggggcgccgttgcaaggctggagcagcagcggggccacgggcggggacaagggtagggggcgccgttgcaaggctggagcagcggcagggccacgggcggggacaaggcggctctcctccccacaggcagtcgtgcggcggcctcatccccgccggcgagcctccactcccctccgccggtacgcctctatcgccggtggcctccccctcggcagacagcctcgcctcgcttgcttctattgctgtgctccaccacggagccctaggtggagctacgaaccccgtgatccccgacagtgtggcaccggagctcggcggcgacagcgggcacatccccctcatgccctag

SEQ ID NO: 6966 - DNA, 144 bp, Zea mays
  Peptide Sequence Number=SeqID_50341
atgacggaggcggagaggagaacccatcgatttggtggcgtaagtgggagctcatcgaggccgggtgtgcatctgtatacccatgttctttacaaggacctgagatctagaaggacacaacaggcaaggtggatgtattcgtag

SEQ ID NO: 6967 - DNA, 300 bp, Zea mays
  Peptide Sequence Number=SeqID_50342
atggaacatagtggtcaaccagagggggattccccttcggtgctcagctgctcgtcgatggtggccatctcgaatgccactgtgagcgattggaggtcgaccgcgctagttaaggcgctgcttgagatcaacagtgagccgcttaaggcatcgcttctccaccttacaccaaacgtcagcaagcccatcctagccgagattgccggaaggaaggcccttcttggcagagccacttgtggttggctgctggaggcacttttggaggcgttcgactttgctaggggtggtggcgacctatag

SEQ ID NO: 6968 - DNA, 1191 bp, Zea mays
  Peptide Sequence Number=SeqID_50343
atggccatttgttctacaaagacaccaataccctataaaggtacaacaatagcaatgctattcacacctatcacagagctaaatcctcagaagataaatgttgtgataagagtccgtgtcattagaaaattggagttccgtggtgcaacaaatgacggtcctctacgccatatcaatttgattttagctgatgagcagttgactctattacgtatttcagatgtatacactttacagcatacaacatactatacccactttgcaaatacatattatattacacatgctggttataacaattcaagcatcgtcaaggatatcttcatcaaagatataagtgatgcctctctaaaaattacgctttggggagatcaagcatcaggtttctctattgacaatgtctgcaatcaaagcaataataaatctattgtcataatgtttgttggatgcttagctaagcaattcaaaggccaatcatatctaagtggcactacaacaactacatggtacttcaatccaaacattcctgaggcacaggaatactacatcaaccacaagggtttaaatgcaccaccactatatcacgactcatacaagataacaaatggtggtttccagcttgcaccaaatgcagaaaatctttgcctcaaacctccactggataccgctgcacatcatgtggttgtacagacctataaactcagcttcgttgccactgatggaacatgtgaggctgagttcttctgtttcgataccatagccaagcgaatagtagggaaaccatgtgatactcttattacaacaactatgacttctcagggtttcccactagatctagccgccattgtatctttgaaatttacctttgtagtcacccttaatatgtcggcattctcattgacaaacagagtcttttctatcctatatgtgctaacaaatcatggaagacaaacctcggtaccatctacaatgctcaactaccctcaagaacagctacttacacaagatgatgtatttgaatctacggccacgcaggattctccagcaacatcatttgctaaactatccacttcagttagacaggaaaacacggtccaacgcgtcttacagtattacgatgcatccaagaattcagagtttgagaaatgcaaacaatgtgattactctgcagaagtattcactgaaacttaa

SEQ ID NO: 6969 - DNA, 399 bp, Zea mays
  Peptide Sequence Number=SeqID_50344
atgcccttggggaagtactactgcgactactgcgacaagcagttccaggacacccccgccgcccggaagcgccacctccagggcgtgcagcaccaacgcgcccgcgccctctggtacgactccattcgccaccaagaccagcatggcggcgcttcctccctcctcctgcctgacggcaccctcgccaagggcatctgtcaccacttcgtccgcacgggggcttgcaagtatggggattcatgcagatacttccatccgaagccaaatggtgtcaatccagcattagctgcaccagggaagatactggggggacacgcctcttggggcaacctgccgccatcactgcaacctcctcctgaaggcggctaccctcccctcccgttcatcgactggggctga

SEQ ID NO: 6970 - DNA, 552 bp, Zea mays
  Peptide Sequence Number=SeqID_50345
atgaagggggcgagagtagcaagcggtgtgcagacgccagcgccgacgcagcggcacaacccttcaccgcggccgccgccgcctaagctcggtcgtcgcactgccgctggcgcgtcaatcgccatcgcggtcgcgtcggctctcctggccgtctcgccggcgccgtccaaggcgagggaagccgaagccgaggccgctgtcgtggtggtgtcgtgcctcgccaagctgcccgtcaccgcgaaggccttcctggacgtgtcgatcggtggcgagccggcggggcgcatcacggcggggctgttcgggggggggggggggggggcggccccggcgggcgtagcccggttcctgtccctggtgatgggcatggggtaccggcgcaaggagttcatgaaggtggtgccgggctacgtgcagcacggcggcgtggtgtcgtacctggccgagcccgcggtgacggagcggctggcggccgaggcggaggcggtgcgcgcgcggtgcggggccagggccgtgcacgcggcggccggcgcggtgtcgatcccagtttag

SEQ ID NO: 6971 - DNA, 195 bp, Zea mays
  Peptide Sequence Number=SeqID_50346
atgagtccgacccgagaaggatatcggataggatcacggggaaagaggagaggtttgttatccgaggatgctgctgccctattttcgcaccgaaaggagttgagacacacagttagggtaagaagagagatggtcagagtgaggttagctgatggtaagaagaacttggtaagggaagactccatccaagtgtaa

SEQ ID NO: 6972 - DNA, 318 bp, Zea mays
  Peptide Sequence Number=SeqID_50347
atggccggactgagcaaacggacgccaccgagagcatcacaagcatgcagaggcacgaaaacagtatacgaattggatggcgactcaccagaacgagctggccacaggagggctagttttcacggtgcggcggatggaattgggggaaacttggaattagagctcgtcggtgaaccactgggagcaatactggacgtcgagctatacaggctttacaatttacatgaggctaaaaagcctgggaaattcttatccaagaagtcttgggtttcccatgtagcctcagcttccgaatgctggttccactgtatcttgtag

SEQ ID NO: 6973 - DNA, 627 bp, Zea mays
  Peptide Sequence Number=SeqID_50348
atgggagaacccgtctcaggtccagtgaggggtaaagtctacaggcaggttcaatcaggtccacgtgcgcatgcgggggagttcgtcggcggcggggactccggcctaaccagggcggcagggtccaatcaaaccggtttaggcgtggccacgcgcgccggcggggagaacaactccgacgagggtggaacggcttctccagtgaggcaccgcttggtttcttgcttcggggagctctacgggactctggggaaactagccgaggcacgagatctagcagagatggatggaagtggcctggccacggtggtcgagtgctcgggtggcttggcgggcggcgcagagctcgctggagctaaggactgggccgggacagtgagggcgctgtgtacgggcgggcatggaccagagtgggcgctcgggcgctcacagctcgacgcggggagacctttacaaattaggcctgtaatgcgcagcggccacgcagggcctgttacaatgggccggatcacacgtgggcctccatgctggacgaggtcgcaagcgaggtcggcgaaggcatcgagcgaagggtggcgtcttcaccttcgccccaacatttgccctccgagggaccagttcgactaa

SEQ ID NO: 6974 - DNA, 807 bp, Zea mays
  Peptide Sequence Number=SeqID_50349
atggattgtaatctcgctgacggagagtacgtgctcatccccgagcaaggaactgtccaagaggaagaccaggagcaagctcccgaggctgctatcgaggatctccctgcagccccagctattgaaggcaagccccgctatggtgggtacaagtgcggtcactgcacgacggcagctggggtcagtggaacattgtatgccaaggcggtacgctgcaagatatggttgatgatgaattcacccaccctcgccagtggaggagacactcgtttcagctctgactttctttctcacgatggctttccttccatcttgtgggaagtgcttaactccgcctgttaccctacgccccctttgtacacggtgcagttgtatgaggagcatcgggtacctcgttgccgagtctggctgactttggaggctcatccccttcagccgggttggcgttctcttgactccgagacggttggattcaggatggatgacaccactgaagcagcagccatgaagactctgacaactttctgtggctaccatcccctggagatggtgatgcaccccttgggactcttcactgctgagaagaaggatgaccccatgtggtgtaaccgtgtgagccatgtgaaagatgtgtgggcaatgtatcctgacttggttgggagggtcactgttcagtgcatgagtgcgttgtaccgccttcaggccctgcagagcgacgctatggcacaccttgctaacatcgctcaaaccacgaagctcacttttggaacttgctctcctaggcaagttgatccaatgggggagtga

SEQ ID NO: 6975 - DNA, 2028 bp, Zea mays
  Peptide Sequence Number=SeqID_50350
atgccgtcttcttcttcgtctgctgcgaccacgccgacggccgaggcatcatccaaagatacctcgagcaatgtggcggcgacagagttacgaccgggtgatacagtggagttcggcgtttcgcggatttcgttggtccgcgtgcaggatatgcaacagttgggatattttggcagcggggttgggcgtgtcccgggggcagaggaggtccaccagctgacacctaatgtcgtggtggctctagcgaagtacatttgggcaacgacttcgtatggcgaggccgaagtcaaagaccacccagggctccccgcggccattatgtgctcccattattatgtggcgtacccgccatttgatgtagcggaggatgatgagaatgaaagggccgtacggatcgctgcccgtacgagtagtgggcgcgatctagatgaggaattcatcggggggggactgggggtctccgatagttttgctgtggagttgatgggaacgttcgcagccctcgggggaaggatgtcttcgcccgagctccgggagtcttcggcgcggatgctggaggttaccgggggtcgatgggccaagaacgttccgatccctcacgccgctggggaagacttctttacgtctcgcatggctcgtgacttgagggtgtttccttacggacggaatattgttgctgttgtgtcgacagtgatgaacaaggaccgtcaagacgctgcgcagaagcctcgggtggtcgttaggatggcagatcccatgcgcgaggcgaagagggcgcgagggagcacgaaggctgctgcctccggcagtagcaagccgttgccggctgcgaaaccggctgcacccggacccagcaaggcgtcgacgggcgcgaagactgcagccgctggcggaaccaagcctcccccgggcggaccctcgaaaggacgggagccgccatcacccgcgaagctgccttcaccggggagacgtgttgctgactttggcacgaatatcagtgtcgaggattatcttgttggtaagtttttttttgattggagatatgttgcaggatcgggtgagggacaattggttgttgtcccgccttcggttgcaaccacttcgccatcggcggtggtaagggcgaagggagccgcgcaggacccgtgggccgccttctacgcgagcggcgagattctgacagccactgccgctaaggacgtcacgggcaccatgtcccagcggttgagggaggtgtcgcagcagctgaagcaacatgcggatgctgtccgggagaagtcggctgaggaaagcaaaaaccgcaggctggcggagaaggctgcgcaagtggaggctaaagtggcacgggcggagaacagtctcgccagccaacacgccgaggagtgggaggcgaggttcaacgccctgcgcagtcgcgtggacaaggccgaggcgtcagcgcgctcgaaagtcgagcggacgcacgcgcagctcgtggaagcgtaccacgatctgggtgcgcggaccgcagacttcgaagaggagctggtggtgctcccgacttttgtgcaaggcttcatgtccttcgcctccctcgtcaccggcgaggggaccatgaatgcgttgtcccgcgaggggtgcaaacactacgaggtcttcgaccaatcggacgagaactttgaacgtgaaattttcaaggtcgaagacccctgtggtaaagcaatggcgcgtgccgaggatgtcgaggaccttggagatctggtcggcgcgctgcccgaggctgaggtcaacccggtgctgccctcggatgctggtgaaggctcctctactgcacccgtgcctactgcggccgaggagtcttcggatgaggatttggattactttgcagcattggatgtggctgcggcggaggcttctccacgtgtaatgggtggtgaggatctgccgggtgagggagagctgcgaagtctgtttgagggcgatgaattgaggataatgctgttcaactatagggagatgggtatcatcccgaaggttgagccgatgtaa

SEQ ID NO: 6976 - DNA, 288 bp, Zea mays
  Peptide Sequence Number=SeqID_50351
atggcagggatggaggccaagtcacaccatcaaccaaatcaaggaggtacctgcaaaaattatgccacaagcaaggctgagtatactaatactcagctagacttacccgtggccgcacttgtacccaccatatctagaatgggagacctagtctcaggtcacgtgagggataaagtccgcgcccggcttcactcagattggacacagggatttttagccgagttggataaaaatttattagaggacaacacattggagattccgcttgagagtacggactcggattaa

SEQ ID NO: 6977 - DNA, 153 bp, Zea mays
  Peptide Sequence Number=SeqID_50352
atgggcgaagctaacgatttgaatagcgagttttccctgcaaggcctcaccgccttggcatacaatgctccactgaccccggccgccgccgtgcagtggccgcacttgtacccaccatatctagaatgggagacccagtctcaggtcgcgtga

SEQ ID NO: 6978 - DNA, 261 bp, Zea mays
  Peptide Sequence Number=SeqID_50353
atgaacttaccacttagtttaaattgtaatctcgctgacagagagtacgtgctcatccccgagcaaggaactgtccaagaggaagaccatgagcaagctctcgaggctactatcgaggatctccctgtagccccaactattgaagcaagccccggtacgctgcaggatatggttgatggtgtgacttggcctaccaccctgccaccgggttcgacggtcgagtgggatgctgctccagcaggagaggagcacgaggagtag

SEQ ID NO: 6979 - DNA, 930 bp, Zea mays
  Peptide Sequence Number=SeqID_50354
atggcccgcgcccgcgcctataaagccctcccaggcttcgactgcactcttccgcgcaccctcaaacctcaccggagtttagctcgccgccgtttgcccgtgcgcagcgtgtccgtggccgcccaatccctctgccaccgtagaccggccaatagagccattcccaaccccgtccagccctcggagaagactgtgcacacctccgtgaagctccccgagcgaggaatcggagtttgcttcgccggagaggccagtccacgctcgccggagctctcaaccccgccggagtacgtggaccgggtaatccactcaaccatccttcgattccttgtgcacacgatcactacgttaccccgtgaagctcaccgtgcccttggattgaaccagatcgtcgtggtttggccggtacactcgccgccgacgagaacacccgcctgcgcgcgtggaccgagcgattccggccatccccgacgtcaagccgtacctcgacgtgaccgccagagtctccccgagccaaccccacccttcgccggaccttcctcgccgccggatacaagagcaatacaaattccctatgtttatcctcaacaaaaacctaagcctaaagactgtaaccttgctgacggagagtacatcctcgtgccggagcaaggagctgctcaggaggtagccccggatccagcacccgagcctgcaccagaggacctgcctgccactgctttgaaaggcaagccccgtagactttgcccctcacgcgacctgagacgtggtctcccattccggttatggtgggtacaagtgcggtcactgcacgacggcagtcggggttctctggaggaaatggttgctggagtgacttggccgtccatcttgccaccgggttggactgtcgagtgggaccctgcctcggctgaggagcatgaggagtga

SEQ ID NO: 6980 - DNA, 413 bp, Zea mays
  Peptide Sequence Number=SeqID_50355
tactcgcggcagaagaaagggcggaggggcttaccggcggcgagactgctccggtgaagtggccgagggcgggggagctcgtcggcggcgaggagtccggcctatccagggcacaattgaccaatcaaatgggtcagagaacttcaccagggatcaaagaaggcgggcggccaaagtccggcgagggcaatcttggttctctagtgaagttctgtcgggtccgagggcttgggaagcttcacaagctattggcgaagctaaccgagcggctggcgcggcttggaagcaactggggtgggctggccacggtgtccgaggatcgagtggcaatggcgggcggaaaagagctcgccagagctaaggaggggcctctggccggtgaagggatcaaggtgaacacgctcggtctttag

SEQ ID NO: 6981 - DNA, 603 bp, Zea mays
  Peptide Sequence Number=SeqID_50356
atgactttggagcctcatcccttgcagccaggctggcgttcattggactctgagtctttcggtttcagggccgaggatactgttgagtccactgctttggatgtgctgacaaccttctgcagatttcaccccttaatgttatcaacccaccccattggcttgttccccgctgaaaaggaggacgacccaatgtggaaggattgggttgagcgcgccaaggatgtgtgggcactctaccctggacatacggctcacctgacggttcggtgcatgaatgccctgtatcgtctgctggccttgctaggagaggtgacgtcccagctcatggtcctagtggactctaccaagatcactctagataacatagaggaccttgttgtagacatgtccactaagctggtggaaaaggatcgcctggtagagcaaatgactactcaaatccaagagcttgaagatcaggtggaggccagggagaacaccatcgaggttctagaagatcagctccagaccaccagcaacagcttgaggaagccaaccagcacttggatctgcaccgtcatgagattcaggatatggaggcaaaaggggccgatgaggatgtag

SEQ ID NO: 6982 - DNA, 621 bp, Zea mays
  Peptide Sequence Number=SeqID_50357
atggctaaaaattttggcagcgaaacagtgcaaatagcaatgaatgctgtgcatttgagaacaagtctccaacaccggtacctgagggtggagcggtcgcggaacgagtcaaccatcgaggagaacgaggctaggggattgaagaagcacttgaagagcctcagtgctcccaagcattggatgctcgacaagcttggcggagcttttgctcccaagccatcttctggacctcacaagtccagggagtgcctgcctctgatcctcatcatcaggaacatgctcaagtatgcactgacgtattgtgaggtcatttctatcctgatgcaacgccatgtacttgttgatggcaagatgtcatttccatccctaagacaaacgagaattataggctgcttccgtcttcacccaatcagggatgaggatgccaaggccaacgacaccatcaagatcgatctggagaccaacaagatcatggacttcatcaagtttgacatcggcaacgtggttatggtgaccggcgggaggaacaccaggcatgtaggagtgatcaagaacagggagaagcacaagggcagcttcgagaccatccacgtgctgcttggagctttttgctatgtctag

SEQ ID NO: 6983 - DNA, 78 bp, Zea mays
  Peptide Sequence Number=SeqID_50358
atggccccattcattaaggtgattgttcttgatacggagcgcatgcagcttaaactagtcctcgaccgagatgcctag

SEQ ID NO: 6984 - DNA, 348 bp, Zea mays
  Peptide Sequence Number=SeqID_50359
atggctgttccagagatcgtggcgagccacgggatcatcgtggtcgagttctacgcgccatggttcgctgcctccatggctgttccagagggaaccacttgcttcctccacacaatctgccaccgaggacaggaacggccctcctcggtcggattattggtcgccgacgatgggggaaccggcccctttgcctcctccggcgcggggacggggagcctgaaggcccaccagcccgacggatggccacggtggcggatatggctgcgccccttgcgccggacggtggcgtccaggcaggagacgacgacgggcaggggcagcgccgccgccgggagcgagagcacgtag

SEQ ID NO: 6985 - DNA, 2220 bp, Zea mays
  Peptide Sequence Number=SeqID_50360
atggggagggacgagaggttcccagtgtgggaggccgcgctcggcgctggggtcgccgccgccttcgccgctgggctcgtcggggtttacctttccatgccggactccgactacagcttcctcaagctgccacgtaatctccaggaactccaaatcctcactggccatcttgagaactatactagcgactacaccctacaggtgttggtaggctactgcgccgtgtacatcttcatgcagaccttcatgatcccaggaacgatattcatgtcactgcttgctggtgctctgtttgggcagctccggggcgtggccctggtagtcttcgccgccactgctggcgcttcttcgtgctatttcctgtcgaagatgattgggaagccactggtgttcacgctgtggccagataaactcagcttcttccagagacaggttgctaaaagaagagagaagctcttgaattacatgcttttcctcagggtgaccccaacattgccaaataccttcatcaacttggcttcaccgatagtagatgtcccctaccacatattcttactgggaactctcattggccttatcccagcttcttatgtgactgtcagggctggaatcgctcttggagaattaacttcgctaagcgacctttacgacacccagtcgatagcgctgctattcctgatcggtgttgtttcagtcacaccagcattgttgggcaaggacgaggcacaagaaaaaccatcagaaatggcttccagcaaatcgtcatgggccgatgaccctacatgggctaccccgcagccgcactgttgggctacccgagttgaattaggaatgggatcgtcccctccgccgttgcggcgagcaggcagcgagcgccgcagcccgcagcccgcagccaaacgccgccaggccggggaaggggaacggtggaagagaagtggagcaccagcgaaccgcatatgctcggggttcttcgtcgcgcagccctcgccgcagcgtcatcgccggcggcggacctccgacaggtgtggtttgccgtcctgcattctgaggatccagaagcaccttatgctgaactttcagtgtgcttaccatagaagcagtgagagattatcacctatccgagaagaccaagaagtttcatatggtcttaattgggctattgctggaaaaggtgtcattgtgaaagataaggtcctccataacttggaaacatctgagcttcagaaaggtggcgctacttaccctgactttttgtctggtataccacttcatgttagaggagatgttattggtggtgtccctggtgtttctaaagctcaatttgcaaagcttctaaaactggtgacgttccatctttcatccatctcgtgtctatatgttcaagatggcgccattggttcctcagcagaatgtgatgcaaaggttcgggtcattagtgataatccctctgctgttatgttactgtcgaatgtcctttggaaaataccagatcgtgcgatttcccatgacacatcccctttgactatatatgctaccagttcaataagtaacaacgttaagactgttcttggttctggaacacaatatgctaatggatttgctgtggcggatattgaacgatcatctctaatcctatgcggtaaagcatttgctgattcagctatcgtgaaagatgcacttactgctatgacagccccaatattgtctgcaagaggaggcctccctgttccaggatggattctgaactttggtggttctactgtattattgtttgccccagtggaaatcatgatgtcctgcgtagaaatccacaatgctctattgtccattgactgtggtgcagtcatatcttccaagggctctggcgccataccatctgtatgtaagctctctcctggccaggctgcctaccatttcttggctggatatcacgatggaaaatttgtcccagcatacaacagagccccctctcctgctgacccacttgcacttgcaagttctttattctcacatttgaaagaagatgatacaccatcgtatctgatcaacgctaagcactctggaaagtacattgacggcaatgggtttatgaaattattaaagctggcactatctcacgatcttcctgacatcaaaactgaaggctctagagcaagtttggccaatgtttacccgaggaattctctttttaggagatacaccctgaggttgcaatga

SEQ ID NO: 6986 - DNA, 1875 bp, Zea mays
  Peptide Sequence Number=SeqID_50361
atggccggatggcggcatggcgccagcgtcgccatcgtgcttttgcggtggtggtgctttaactgcctctctcatgatcactttgccttccagtgtacgcagaagacgaggtgttttcggtgccggaagcaggggcatcgctcctttgactgcaatctacttaaaaggccgatgaggcttgaggctgtgaaggtggcggtgaacaacagtgctgcttctcgacctgagactaagatctcggtttggaggaggatcaatcttccagagccaagtacgaccagtggagacagactaagggagcaacctcgacctgagacacggctctcggtctggaggaggctctcttcgtcttcagcaacctctgtgatcaaggtgaagaagaagagactggtgtggagaaggaaagacaaccagcatcctcctagtgattcaggtatcgctgttcgacaccaggaaacatcaacaatggagggcgacggaggaggcttgatttcacttgatgctgtcggtgtccaatcaaaaagacagcggactcgcaagagacggcgtagagccaaaccgatttctgatttggataagcgccccgctggaccggtgtcgcctactgaagatgataagccttgcatcttgagatggagtcagcagatgaccagagctgaggatgatcttcagaaggcagtggtgattactgttatcagcgatcgtgagaaagtaccggttgaagagattgctgagttaattgctcctaggctggagctggaagaggggacactgataattcggcaatattccgagtcaagtttcattctctttctacctggctgtgacatggtggagatgctagtgggcaattggccttttctcagggcagccacgttcacaatcacctgcaggaaatggtcccggtttctgaactccaggggtgctgtgttacctgtcttgttggacttcgagcttcagggtatccccattcatgcatgggaaaccataactgtggaacaattgcttaatccctttgctagtgttcatcaggttcatcctgacaccctggagcttaaggatgtggctgtttaccgatgttctgcttggtgtttagacccgtccttggtgcctgcttcaagggagctttggatcgtcgaacctccctttgtcgttgatgggatatcttctggcaggagaacgctgatgtatccaatccgcatcacattctcgtctgcaccacggagggatggatccgatcctaagcttcatgctattacttcgggcggggatggttctggtcacgtgcagcagggatcccctcctttttcaagacctccccattcgagtgggagaaggggggatcatggtcattcgggacgtctctcagttcatgagcgtttgggcccaagagatgagagcatgcagcagcggagcattagtttcggggtggcagtttcagatttgaagagaactttggactctgatggggggaacttgcctcctaggctggcagagatgactgatgacatggttattgtttcaccggtgaaggcgaagcagctgaaagtttattttcgtcaaagactcaagaatgtcctgaaccaggaggaagctggaactcccaattctgtcactgtgcttcctccatcaccctcagacgtggcagctgctgacacagatccatctgagtatcctgtttcagatgttgacgctgtgttggcaactccgtctagaacattaacttcctccctgtctgatgtggcagcagcacacgcggctccgtcggaggctaatgccttagacgttgatgctgagttggctgctccatctgaggaggacatttctgaaagggaaatgtgcctttgggccatttctaagtattttggtgattaa

SEQ ID NO: 6987 - DNA, 1404 bp, Zea mays
  Peptide Sequence Number=SeqID_50362
atgccgacctcctcttcttctgctgccgctacgccagcggccgacgcctcgccgccggccgacgcctcgtccgaggagacgctgagtactttggtggcggaggagttgcgcgccggcgatacggtggattttggtgtgtcgaggatgtcgtcgatccgcgtgcaagatatgcagcggttgggttactttggcggcggagttgctcgtgtcccggggacggaggaagtccccgagccggagggcgagttggttgtgttcgaggcgttcttcgccgccgggtcggacgaggggcaacttgtcgttgttccgtctgccgcggcgaccacggcggctgccgtaatgccaaaggcgaagggtggtgctcctagtgctggcggcgagatgccggcacttgctgctgtgagggacaaggcgggcgctgtgtcccgccggctggaggagatgaaggaggcgctaagtcagcaagtgccgcaagctggcggacaaggtggccgtgctggagggggaaaatccggcctccggcgccaattggtggaggagaggagggaggccaatgaggccctcgccaaggcgcaggctgcgctggcggaggccaatttggcgcgggcggagggtaatcttgccagggagcgtgccgtgcagctggaggagcggctcaacgccctgcagagccgcgtggagaggaccgaggccgcgacgcgcgcggaggctgagcggacgcgcaaacagcttgtggattcataccatgagctgggcgcgcggaccggtgacttcgaagtgccggaccgagagcccggacttcgctgcctggagtgggtacaggaggagttgcaggcactccccactatcgtggaggggtttatgtcgtatgcctccctggtcacctgcgagggggcgatgaacgcactctctcgcgaagggtgccggcacttcgaggtcttcgaccaagccgatgaggattttgaacgagatatctacaaggttgagaaccctatagtgaaggagtccgccggagccatctacaaccggatgtggggcccgcacggtcgagaggtggtcagggagcgggccgagacggcgagggctcaggcggcgcgcggcgagagggtggatgatttcggggcgttgaacagcgcgctgcttgacccggagtcgaacccggcggaggccgtgcccgaggccgccttggagccgcccccggagactgccgaaggcgctcctgatgccctcgcagccgctgtggccggcggaggcccacccctggagaccgccgaaagcgttcctgatgcccccgcagccgctgcagccggcgaaggcccaccgccaactgctgatcctacgacggtggcgttggaggcgacggcggaggctcccgcaatggctgggtcctcgcaggtggcgtaa

SEQ ID NO: 6988 - DNA, 1970 bp, Zea mays
  Peptide Sequence Number=SeqID_50363
aaagtgatccaaaacacctggagttgtacttctacgatgatgatcctcttttatcgcatcgaatgcgtcttgcgcgtgacgaagtcttcaaagctaaagatcagaatgtgatgaccaaattagcaaacttgctaagggaaaatccttacgcagagacattcagaagtattggccaatatggaaatattgatgaataccgtattgaccttaacacagactacaagcttgaccaaagaacgtttaatacacctacctcatcggaagtggcagctgtttgggtcgaggggactgagttacaccgtcaattcgaacgcggagttaccctgtacggaaatgacaatgcattttattcgataaagcctcaccatggttgctatgatccattggcttatcctcttttcttcccaagaggggagctcggttggcattcaggcatacccaaggtcggtgtcaacactgctagaattgatggacgacaatccacagattccgacaacccaggcagtaagctaactgttccagaccagtatgacgctgttatatcggcagaacttccagataagaacagattcccggaactttttgatatgggcaaagactcgtaccccatttacagaagaagagatgacagacaaaaagtacgagtaagggggcatgacttggacaaccgttgggttgttccttataatcctactttattgaggatgtatgactgccacattaatgtggaggtttgctcaagcattaaggctgtgaagtatatatacaagtacattcataagggtcatgatagggcatctgtcactgtgatcgacgttgatggtggtcaaagtattaacgagattgagaacttcagagatgccagatgggtatcaccacaagaggctttatggagaatatatagtttcgatctgcatggtatatctcccccagttctgcaactacagctccacttgcctggcatgcatcttgttagttacaatataaatgatgatatgcgtcaggtcttaaacaaggataacattgacaaatcgatgttaactgagtactttagagcaaatcagttgtttgattgggcatcaaactacttatatagggagttccccgaggtggcaaggtggtggccaggtgcaaagaaatggacagcgcgtcaacaacgtatgcaagttggaagaatagtctcggcacacccagcagagggagaacgttattatctaagggtgctacttaatcacgtgaggggtgctacctcatttgaaagtctaaggacatacgacggtaatgtatatccaacttttcgtgaagctgccgaaaaaaggggtcttattgaggcagacaacaacatcgatgagtgcttaactgaggcgtcaggatttcatatgccaccttctcttagaaggctatttgcgacgatcctggttttctgtgagcctactgatgtggttggtctgtggaacaaacatttggaggcaatgtctgatgacttctgtcgaacccatagtaactcaaatgtggtcgagcagttagtgttgttggatattagagatatgcttcaaacaatgggtaaggacatcaggttattccctctacctgcaataaaggacgagcacgacaatatggcagatgttgttagagagatatttgaagagatgaatattccagaagaccctgaggctgaatttgtggtttcatctctcaaccatgagcagagacacgcttacgacgtgatattatcatcggtggagaatattagtggaggtgtcttctttgtggatggtccaggaggaacaggcaagacatttctgtacaaagctttgctggcaactgttcggcgctctggaaagatagctattgctactgcgacgtcaggagtagcggcatctattatgcctggtggtaggaccgcacattcaagattcaaaatcccattgaacataaaagaaggtgacgtgtgtagcttcactaaatag

SEQ ID NO: 6989 - DNA, 1848 bp, Zea mays
  Peptide Sequence Number=SeqID_50364
atggatgaagaaaaggttgatgtcggcactattgttaatccatcatttgaggttatggcgggtagtggttgttcagcacaaattctaatcaaatgcagtgacacacacgaattggataataatgatggggagaatattaaggacattgttggtaatgttgtagaacaatcgcttgatgttgtggcagtaggcaatgacccagttcatgtgtcagctaaagccgatgttggagaacaaccgaatgtgactcccttgtcatccttggatgttcaaaatgaatcaactcaaataagttctgatgtggatacgttggagcagatcgaacaagataacttggacactttgattaggatatgcgagcataacaaaccaaagaagttgaatgtggctcgagttttacccaaagattatacgtgcactacagaagatcttcaacttattgaatacattaaatcactaccgagaaaacaagttgtggtccttagtgcatatatacattctattagagatgaagagcatatacttcatagagaaggtggaaaggtcttcttagagagcacgttcatttccagcttgcttaagcgtgatggtgatcctaagatactcttgaattgtaaggaagacacacttgaaaacagggtggacaactatttacaagctgacatggtgttcattccaataaacatagaaaattttcactggtacctggcgattgtcaatgctaaaaaaaatgaggtacatatactcgattctatgggaccacaaataacggatcgtcgagacctttatactacaaacgatataacaaagtttagatttaagctacctgcaatattgtggaactcaagattaaacacaaagaaaggacatcaagagactaaccatcatgcagatgaagatggaggaagttcatgtgatgttgagataatcaagactccttgtgagttacctatatcgttaaatgcatcatcccaggttcaaccatttatatcgtcatgtgctctgcccgctacattaacatcaacaaacacacaagaactgatgagtgcattatgcacatacatcatggagatagacgacgccgaatatttggagaaacattggattcagagcaccaaaccttatccaatttctttaagtcttcaacagcttaaaaatatattggatgtaaataaaccgatggataaggattgcttcaacatagctgttcggatgatcgcatgcagtgatgccttgttcttgttggaaaacaaataccactacatggatctacagttctgttccataactaattatggtcaagaccctcgccttcgtgcaaagctagataccaatgtattggcgaatttatttgaatgttggcctgacatggagtatactatttcagattgcagccaaattctattgcccttttgtttcttgggtcacttcagtttatatgtatttaacatgaacaccagaagcatctatataatggactccatgcctctaccatcatggtttaagggtaacgatccaaacatgcattatattcacaaaatacataatattgccaataatatgaatgttgccataaaattggctaatcctacatggaaagacgatatttatatgtggcgtcgtatagtaccatcatgggttccaaaaacattaaactgggatttatcaggctttcttgttatcaactttatgcactcgtggaatggtaaaaggttaccctgcatttccacgacttcaagtgtactgaggaccaaattcttggtagagttgatgaagtaccaggacaatgaatgtaatgacaatattccagaagaaatacaaaagattattaagcgcatcagtgtttag

SEQ ID NO: 6990 - DNA, 486 bp, Zea mays
  Peptide Sequence Number=SeqID_50365
atggcggtggcaggcgggcaggagcagcggtcacgtcgtcagccaagcttacgtcccatccgggggcagcgagagaaccctctcccacggtgtgaagacaaagcgctcgtgttccgttcctcggacggctcgcacacgcacaacggctgccccgcgaaccactcgccccgtcgcattaactccgcggcgggacagggaccgggaaagggggataccccgaaaaggatccttccccgtgaaggaaccaggctccgagccttcctactgatcagaggttcgaaggctggcccctcggaagggttcaacagccgcctcagagcacgtgggctccacacccactactggtcagaggttcgaaggccggcccctcggaagggttcaacgaccgcctcaagctactcgggctccgcgcccactactgatcaggggttcgaaggctggcccccgaagggttcacagccgcctcagacacggagcgagggatga

SEQ ID NO: 6991 - DNA, 1533 bp, Zea mays
  Peptide Sequence Number=SeqID_50366
atgaacgtatgtgagctcactcttgctgtctcacacccccccacaggtcaagaacaggcgactgacttcgctgactgcgtggcgtctggggccctcatggcagttgtgtctgccgaagtcgagagacttcgggcgcaacatgctgagtccgtccgggaaaagtcggccgccgatagcaagtgccgcaaactggcggagaaggtggccgtgctggagggcgagaggactgagctccggcgccagctggcggaggagaggagggaagctaatcaggccctcgccaaggcgcagtctgcgcaggcggaggccaatgtggcgcgggtggagggtagcctcgccaggcaacgcgccgaggaattggaggagcggttcaacgctctgcaggcccgcgtggagatggccgaggcgtcgatgcgctcggaggctgagcggacgcgcaagcagcttatggactcataccacgagctgggcgcgcgaaccgctgacttcgaagtgcctgaccgagagtcaggccttcgttgcctcgagtggctgcaagaggagttgttggcgctcccgatcattgtggatggatttatgtcctatgcctccctggtcacctacgaaggggcgatgaacgcgctgtcccgcgaagggtgccgtcactatgaggtcttcgaccgatctgatgaggatttcgaacgcgagatttacaaggttgaggaccctgtggtgaaggaatccgcgggagccctctttgaccggatgtggggcccccacggtcgggaggtggtcagggagtggtccgacacggcaaggggtcaggcggcgtgtgacgagaaagtggatgacttcggggctttgaacagcgcgcggcctgaggcggagtcgaacccggtggcggctgggcccgaggccgctccggcgccgcccccagaaactgtcgaaggctcccttggtgcccccgcagccactgcggccggcggtggctcgtcgccaactgctgcaccgacggctgaggatcccccgaagacgacggtggagccggcagcggaggatcccgcggcggctgggtcttcgcaggttcaagattttgggcctgtgcacgcaaccgctactgctaattttttggcggcttcgaccgtggatgatgggaatgaatcggatgagtctgcgtctaagttttctgattttgatgactctgggagtttggttgagtggacggaagagtcgtcgaatgaggacttggattactttgcggccttggatgtggcggcggcggaggcttcgccgcgtgctgcggatgctgaagttgtgcctggtccaagtactgggcgtaggcggcgaagggcggttgcgaagcgtagagtgagtgaggcggacggcggtcagcttcatgtgggcagggctggcagacaggaactgttgtccttgccggccgttgcaagtgtaggtgagggggagctgcaaagtctttttgagggtgaggagctgaggataatgctatttaactatagggagatgggaatcattccaaaggttgaaccgatgtaa

SEQ ID NO: 6992 - DNA, 324 bp, Zea mays
  Peptide Sequence Number=SeqID_50367
atggtcttgttcatacttgtgctcgtggccagggtagcttcgaccacctccgaagccgacccgcacaccgacgtgaccgtcgtgacctccccaacgtcactgaccaccccgccggagctctactaccgccgacatatcccctcacgcgacctgagacgtggtctcccattccggttatggtgggtacaagtgcggtcactacacgacggcagtcggggttctttggaggacatggttgctggagtgacttggccgtccatcttgccaccgggttggagtgtcgagtgggaccccgcctcagctgaggaggagcatgaggagtga

SEQ ID NO: 6993 - DNA, 258 bp, Zea mays
  Peptide Sequence Number=SeqID_50368
atgaccgtcgttgttgtcgtgctacaaggggatgagtaccatgtcgtagctgccatcgcgggacatgaactcgagactcccgaagcggagcaccgtccccggctgaagaggctgctgaaggctacccatctggaactcaacgggaaacgtagtcggtctgaggccgtggtcggggcaaggcggagacttctccccgagaccgaggttgaggtcgggcgaggatgtgactccttgagagcacctagagggggtgaatag

SEQ ID NO: 6994 - DNA, 243 bp, Zea mays
  Peptide Sequence Number=SeqID_50369
atgtgcgcgcccatcttcccacatcgccccaaaacaggaactggtgctcccgttgccccgttcctcgccccagtcatcgccagatgcgcgcagcctcgtcgccccgtcgcgctcgtcaacgccgtcgtgcgcgcccgcttggtgaaccttgtcgtccgcgcagagccgctcaccatcgccgtcgtccacgccccgtcgagtcacgccctcgccatctccgtcgagctccaagatagaatttag

SEQ ID NO: 6995 - DNA, 204 bp, Zea mays
  Peptide Sequence Number=SeqID_50370
atggggctcggtgtatgcggctcgctctgccaaggtggtgatgaggaggatggttatgatcatgactatggtaatggtaagtggtattctttccgtttggaaagggttgcctttggtgcaatctatgctcaggtaaagaagaaagagaacagtgtcgaggcggatctccgggagttccaggacttctacgagttcgaggattag

SEQ ID NO: 6996 - DNA, 129 bp, Zea mays
  Peptide Sequence Number=SeqID_50371
atgggaaccaatgggcatctcgacctcgacacgagaggtaaatccgtagatcaaaagatattatgctttccatatgcatgtgtgcaaggttccaagccgatcctaaggaagttcaccttagggccgtga

SEQ ID NO: 6997 - DNA, 216 bp, Zea mays
  Peptide Sequence Number=SeqID_50372
atggcgcgtttttctggcaccaagacctccaggtgcagtgctttgctttgctctgaaccaatggcagcaggttcagaacacaggcagaacgcaacgatgggacgcaaaagtactcgtcttcgtcctggtgttgaattggagttcaagctaggtttaaactttgtaccagtacccaagttccaaaggaaagctcaggcctgcatttttgacatctag

SEQ ID NO: 6998 - DNA, 108 bp, Zea mays
  Peptide Sequence Number=SeqID_50373
atggccagaataactaccaacagtgcagctctaagctctgattctacatggttcaatttgataaggaagaataacaaggcatggaaacatctgtgcacaacggaatga

SEQ ID NO: 6999 - DNA, 255 bp, Zea mays
  Peptide Sequence Number=SeqID_50374
atgccgcgctggctgcacgccgcgttggccacgcgccatggcctcctggccgcgccgcaggtgctggggtcggccacgatttgggcagcggcggggcgagggctcgtcaggactaggcagggctcgattgcacgccaccaatgggctagacatggggagggtgttaccatggctagggcacacctatgcactaatgactatgatcacatgtggaagaaacttaaggagcaaaagtgtaagggccttggaagctag

SEQ ID NO: 7000 - DNA, 483 bp, Zea mays
  Peptide Sequence Number=SeqID_50375
atggttgccccgcctcctcctctgtcgacggggaaggtgacaggacagacccggatgctgttcttccgtcacgcggggaagacgtcgtcgattccgccgtcgtcaggcgggctgacagccgccattgtcgttgtcgcgcggcggaggaaggagtatcatgtcgtagctaccgtcgagggacatgaactcgagactcccgaaacagagcatcgtcccgggttggagaggttgctggagactacccatctggagcttgacggaaagctgttcgtcaacacgcagcaggcccctacctggcgcgccaactgtcggcgtttcgaccccggggggtccctggaccgacgagtaaattgtcgttgtgtgtcccagcccagatgggtcggtgcgagacggaacacaagggggaaaacattatacctctgccttggcaaagattggttcccgaaagatacgattacaattaccaggatgcgtgaacagtaa

SEQ ID NO: 7001 - DNA, 675 bp, Zea mays
  Peptide Sequence Number=SeqID_50376
atggggagcacccgcgtcgcttccgtcttgctgtcgttggaggagcgcaacttcgcggaagttggtacctttcagccatcgctcggcttcaacgattttcatcaggcagcccgggctgcatcccctcgccgatggtcacccaagacggtgaccaccagtttgatggtggggagaagcaagccgggctgcgacctctgccccgccctcagcttcaaggatcttcatcatccttgctggggaggagggcgaggcgagccggggcttgccttcgcgtgggctggcgtcccgcttcttcctccggtttctaggggtggaaaccatcctccagctctgcggaggaggcgccctccagccgtgccggggaaggacgggagtgaggacctgccggtgcgctttggggcagccgtcgcccgctggtgcggtgttggtgggcaggtggatgccaccgccggtgctgaggtggtggcagctggagaaagcttctccaccgacaagaccgtcagcgccacccgcggaccgacctccggctctttggctttaatgtctagttctcgtccctcgagtggggacgcgaacgagagccttccagcggtagcgtccgtcctgggaccatcgctgctgctgcagaggtcgctggcgagtcacccggagtttgtcgtcccgcaggctctctga

SEQ ID NO: 7002 - DNA, 627 bp, Zea mays
  Peptide Sequence Number=SeqID_50377
atgaggatggaggccagcggcgaggagtcgtgcaacgcctccttcgaatgctacaagaacgaagacggtgtaatcgactgtagctcaatggttcgtgctagttgcactgtcggcatctcggacccgggggggtcccttggaccgaccagggtgccgctcgcagtaggggttacaagcgcgttgcgtgagagagggagagacacagagctcgcccgccgcttccctcgcgcgaacccccctcagggtggccctggacctcccttttatagaggcaaggagagggtccagacgagcacagctggcagcgcggcaaggatcctgctgacgtctccttgctgtcgtaaggggctgagagccaccggcgtcatggtgcacgcggggcaccatcattacccgtcgccgggtccgagcccagggtcggtcgaggcggagacttctcttgaggccaaggttggggtcgggcgaggacgtgattcctcccgagaccggggctcatgcgaggctgagacctcctcccgaggctggagcctaaagtcgggcgaggcggagaacttctcccgagactggagcatgaggtcgggcgaggcggagcttcctattgcgcccgaggctgaactcggtggttga

SEQ ID NO: 7003 - DNA, 1122 bp, Zea mays
  Peptide Sequence Number=SeqID_50378
atgggcgtatcgcctgccatcagaatggataggcatgccgcctgccagcgatatggacaggtctcattaaatgctgaggcggcacactgcctgtcagtagagtggacaggggtcacgcaacccggaggccttacgtcaggccccgcccgttggcttacgtcacgcgcggtaggccacatggcagcatcgggtctccgcctgggcggggagcagaagcgttatgcggacagatccacaccaggctgggcctggacacgtgtcggcatcggacccctgcctgagcaaggacctgtcccgggggttcgggtcatgcccgcggggtcctggaccttgtctggaggttcggtctacatgtataagggtctagcactttcccatggggaactggcacccaagaaggataactcttgggcccgggcccccgtgccagagactgggcagttggtttcggcggagatgaagaggcgcaccgccgcgggcggcggcatgctcctcacgcggcggagcgcggcctcgtgggaggtggcgctcttctatcagtgctccgtttcaaggatgttcatcagccttgcggaggtggaaagcgagctgagctgcggctccatcttccgcatgaacttcattgcctcctgcagcggcctcatggcacgcctccatgaactggtcgagctccagctccatttcagcggccaggccactgggcgccgcgtgtcgccgcgtttccaactctttggctttaatggccctgacatcgcctccaacgatgagggcccctttgtctcggcgcacacgtcgaggaggccaccgccgccggcaagccgttcggaaggtcgtacagacctgcaggacttagtctgggaagctaagttgtgtgtccggaccccctggaccacggtgccagatactaggacacccgtcgcagagtggtggagcgtgcatgcttacgaccaacaggccgggtttatgagggcggacctcaccgggctgacgaagaggttctccttctgttgcggcaagacagatacacccgggtcggcatacttccgtcaccttgaagggtccttctcggctgggagagagtttgcggaccccttcttggttcggtactcaccatgggactag

SEQ ID NO: 7004 - DNA, 768 bp, Zea mays
  Peptide Sequence Number=SeqID_50379
atggagcggcgcggcgtgcagctgccggcggtgcggccgcggcccaagtgggcggcggtgtcggcctactgccggcgccacggagtggagcgcgggcccatgcagtgccggaagcggtggggcaacctgtcgtgggacctgaagaagatcgtcgcgtgggaggggaaggccatcgccggcgccggcgccggcgccgcgcagcacgagtcgttctgggacatgcgcggcgaccagcggcgcgccaggcagctgccgtcgtccttcgaccgcgaggtgtacgacgcgctcgtctgcggcgcgtccgccggcgaggacgccgccgccgcggccgtgctgccgccggacttcggcgacggggagccggaaggggtgtaccggcagccgcccatcatggtcatgcctatatcagtgaggaagtacgagccccctcctgccacttctgaacacgaatgctctggtccagtgacagagagtgatcagaagaaggcgggcgcggcggcgtcggacaagaactcgacgtcgtcgcaacacgacggcggcttcaaggacagcgacgcgacgttcgtggcggatcaggcggagggcacggccacggccagcatcgggaagcaggtggtcgaggccctggagaggggcaaccgggcgctggcgcagcagctggaggcgcacaggagctggtgggacgccgacagggagcagcgggcggcgctcctccgcgccatggacagggtcgccgacgccgtgtgcaggatcgccgataagctctga

SEQ ID NO: 7005 - DNA, 1488 bp, Zea mays
  Peptide Sequence Number=SeqID_50380
atggccgcgacgagcgcggaaggtgctggcggagaagccgacggagacgcgacaacgtcggtccacatggggtcgtgggtggagaagggcggcgacggctgggggagcagtcccgtgtccagccttgcgcccacggtggcagcacccatggtaggggtggcggcggctatgggaagtagccccgtgcccacgacggcgacgactgcggggaggagggccgcgccggagaggtccgccatggtcctagaggttgtgccagaggttgtgccagggaggtctgtcatggtgccggcgactggacaagtgaggagagtcagcgggcatgtggagaggagagatagggcaacagagggggtgtcggtggtcgggatgaggagggggtgggcccgcggcgaagggggagggaagtcctacggttggggtggggttgtagatgactgggtgcagaagggagtgcaaggccatgttgttttcaaatttaagttgaagcggcttgagggtcagccatcattgacaacctctgaggtgcgatttactcgtgcagaagctccgacaactatttccgaattacccgggctggtttgtgatgacatctctggagggcaagaaaatattcctattcctgctactaacttggttgatgatccacctgttcctccatctggtttcaagtacttgaaatctctacaaattccaaaggacatcaagattccgtctagtattattggctgtgattgtgaaggaggttgtgctagcaacaaaaaatgtttgtgtgctcagcgcaatggttctgatctgccttatgtatcatataagaacattggcaggttggtggagccgaaagcagttgtatttgaatgtggggctaactgcagctgcaaccatgattgtgtaaacagaacatctcaacaaggtttgcagtaccgcttagaggttggtattcctctttccaagagtgttgaggtatttaagacagcttcaaaaggatggggagtcaggacttgggacactatcctccctggggctcccatctgtgagtacacaggggtgttgaggaggaccgaagatttggatggttcacagaacaactattgttttgacattgactgtcttcaaaccatgaagggtttggatggaagggagaaaagggctggatccgaaatgcacctgcctaatcttcatcctgagaatgattcagatgcacaacctgcacctgagtactgcatagacgctcactctattggcaactttgcaagatttataaatcacagctgccaacctaaccttttcgtccagtgcgtcttgagctcacacaatgatgttaaactggcgaaagtgatgcttttcgctgctgacaccatacttcctcttcaggagctatcctatgactacggttatcgattggacagtgttgttgggcctgatggaaaaattgtgaagctggcctgccactgtggtgctcctgattgccggaagcgcctctactaa

SEQ ID NO: 7006 - DNA, 1224 bp, Zea mays
  Peptide Sequence Number=SeqID_50381
atggaggacttgagtacaatgatcccgaccattgtgattgggaaaatcgcggcctttgagatgtcgcgaaaaatgtgtcagggagaggagccaacttcctcaaggccatatgcttttgcatgtgatgaaaggaagggtaaaaagaaggctcccactccaagttcctcaagtgaagaagaggaagaagaagaaagtgatgacgaaggagataatcaaccatcaacatcatcctccgaaaacgaagaaacaatccgacgtgtcgaaaaggtaatggggatgatccacaagattaatctaatgggtgtgcccctgcaggtagaggatcttctctttaacattgacagaaaaaagcaaagaaagagaggatgcttcgcatgcggggaaaagggtcacttcagggacaactgtccaactatggccgaacccaaaaaggagaggagcaaaggcaaagcgctaacaagtgtcaaaacttgggacgattcttcaagcgaagatgaacctccaaggacgcgcagccatggatcctcatcaagctcatcacggtcatcatgcaagtgccttatggcaagaggtaaaatgagtattccatcctctagtgatgaaagcagtagtgatgatgaagaaacatgtttgaatgaggttgcaaaggagaataagcaattaaatcaaggagtggctcaccttggcaaggctttgtacaacaagaaaggcaaagccaaacaaatccaacctccacaggataacaccactgcgggagtgaacgagcctgtggagggtgaaactgtgatttgtaggttgtgccacaaggaaggccataagtctttccaatgcaaggcgatgaccggggataagaaaaagcaaaagctcaaacaaaatccatcaagcaaaatctccaacacctacatcaacaaggtggacaaaaaggctgctacaccatatttgatcaagaagaaaaagaatggaaaggtgatagcaatcaaggccaacaagcaagccaacaaaggaaaggaggccaaacacatctgggtgccaaaggaaataatttcaaccatgaaaatcaccaagaggtttggatcccgaaagggaagtgaagtagtccaaacgataacaggaaatttggagacttggcaaattaggtggcactgtggagagaagaccaccggactgtccggtgtgaaaagcctgcgcgccaatgatcacctgcggtgtcagcccaacgactag

SEQ ID NO: 7007 - DNA, 447 bp, Zea mays
  Peptide Sequence Number=SeqID_50382
atgggcaagagcaacaaacgcaagcgcgagccgactcctccatcggaggacttcggcgactcggaatactcggaggagttctcctctgagtccgaggggtctctggctcccgtctctcccccggcgtcgtctaacgattcagacgactcccaggggcttgccgtggaggtctggacttatatccgggccgtcgagcgctccgggctcgggggctcggatgagtcggagtactcctcggacgaggaggactcgtccgaggagggcggtggcggcgatggcggagacgacgacgacgacgacggcggaggcgacggtgacaacagcgatgatgacggtgatggaggcagcaagggcggcaacggcggcagcaagggcggcaatggcggcagcagcaggggcagcaacggcggcggcagcagcaagggcagcaacaaggccagtggctag

SEQ ID NO: 7008 - DNA, 435 bp, Zea mays
  Peptide Sequence Number=SeqID_50383
atgggcaagagcaacaaacgcaagcgcgagccgactcctccatcggaggacttcggcgactcggaatactcggaggaggagttctcctccgagtccgaggggtctccggctcctgtctctcccccggcgtcgtctgacgattcagacgactcccaggggcttgccgcagaggtctggacttatatccgggtcgtcgagcgctccgggctcgcgggctcggatgagtcagagtactcctcggacgaggaggactcgtccgaggagggcggtgcccgcgatggcggagacgacgacgacgacggcggaggcgacggtgacgacggcgatgatgacggtgatggcggcagcaggggcggcaacggcggcaacggcggcagcagcaggggcagcaacgacggcggcagcagcaagggcagcaacaaggccagtggctag

SEQ ID NO: 7009 - DNA, 246 bp, Zea mays
  Peptide Sequence Number=SeqID_50384
atggaaaaagcacaatcatacaacatagtaccagaagcgagagggcaggtgcctccggagcccttgccgttcgagaccttgcacgagggatcggcaattaggtttttggggagcgtctacgcgactgcccaaagtcttcctcctgctgacatgacaagtgaagttggacaaggatctagatcctcggagcgcatgggaggtcatgctgtttatgttgctatctgtttattttcagttgttccataa

SEQ ID NO: 7010 - DNA, 243 bp, Zea mays
  Peptide Sequence Number=SeqID_50385
atgaagattgtggaggagcgcggtgttgattgtgaggggtttgtgcccacctcgccaggagcgacaaaggcgacgctagtaggatggaggtatggagtgagttcttgtccacttggcttaaggatcaagccgtgtcttgatagaggagcaactatgaaagtattctatgatgctctagacataaaggggagcagccgcatcaaaaatctcacaaccgctcatgagccttggacaaaggactaa

SEQ ID NO: 7011 - DNA, 1032 bp, Zea mays
  Peptide Sequence Number=SeqID_50386
atgtcttcttcctcccttatgcgtcgtgtctttccatcttccaagcccccggatggggggtacccgccgtctttccgcctcatcgttggaggaacgcaactccgtgggagttggtacctttcagccatcgttcggcttcaaggattttcatcacacagcccggttgctcccctccgctggtggtcacccaagacggtgacctccagctcctggatggggagaggcaagccaggctgtgatcccgccctcagcatcgggggtgttcgtcatcctcgctggggcggggagcgaggcgagccggggctctacctcctgcgcgggtcagcggaccacctcctcttccagcttctggtggtggcaatcgtcctcccgcgctgcgacggagacgtcctccagtcatgccggggaaggcgaactgttgctgcccagctaggatgcaacattccgtcctttccctcgcattcgcggcgaggacggcagcgaggatctgccggtgcgcttgggagcggcccgctctttggctttgatggctggttcgcgtcccttgagcgggaccgcgaacaagagccctccggtggccgcgtccacccgggaccgtggctgctgctgcagaggtcgctggcgagcctcccgatgttcgccgccccgcaggctcgaggtcgcttatccccgcggggacggaaccggagttccatttgtaagggcactttgaatgccagtgtctttgttcatcgtggttgtcgaggcctgaacatccgaggcctcggaccgggctggcgcccttggaagatggttggccgaggcccctggggtaaccggccgagccgcctgctcgggccggattcccggagaagtccctggaccgcgtcgctgtccgaggctgggtcggacctcgctgaaggtgtcgtcgaagccgagggtgctacagcccccttccagcgcgaagacctgagcctgcaggatcagattgtcttaaagcgtgtgccttctgcggccgctgaggccagaaaacacaccctcgctgcgttgtaa

SEQ ID NO: 7012 - DNA, 117 bp, Zea mays
  Peptide Sequence Number=SeqID_50387
atggcgggcgttctcctgtccgctaaagcgagtctgctcctcactacagctctcgttcgtagagtacaggctctcctcgttcgagaggttaagactggctccaacaaggtctggtaa

SEQ ID NO: 7013 - DNA, 645 bp, Zea mays
  Peptide Sequence Number=SeqID_50388
atggtggagggcggggtggggcggttctcgcgggcgccggcgctggccgcggcgctgctggcggagacgtgggcgccgctggccgtggcgctcgcggcgctggccacgctgcccagcctgctgcgccggctgcaggtcatcgtgctgcgcctccgctcctgcgggaaggaggccatccagtcgcacatcgggacctactactactcgtcctgcgacgaggatgacggcgacagcgacgaggacgagagctccgacgacgaggcggaggccggctcctccggcgacgacgaggaggatctggagcgggtcgggttctacgagggccccgcagacggcgtcctcccatggggcggcgccgtggtccggacctggcagggccgcttctccggctgcgcctcgggcgggggagctgtcggcgccaccgccagcggagcggcgtcccccgccgctgtcaggctgtggggtgccggcacggccagcggcgagccttggtgggctgcctgcagcgccgacgaaagcggctggcgcgacggtgcggccgcggaggcggaccaggtcgtggtcgggtggccgcgcgagcacgcgtcgcagcagcggcggcggcgcgagcggcgtgccgttcctctcgctctcacgggcaggtga

SEQ ID NO: 7014 - DNA, 297 bp, Zea mays
  Peptide Sequence Number=SeqID_50389
atggcgctccctgttgacgtggcgggcccgcgcccgaggccgggcgacgtgggggctcctccgaagctggggtcgagtctgtcttccgttgccgaggccgagcccgagcccctaggtcgggcgaggcggaggtcgttcggcagaggccagggcggagtccgagccctggggtcgggcgaagcggacccgagtccgagccctgggtcgggcggagcggagttcgccgtcttccggggcttagcccgagtccgagccctgggtcgggcggagcggagttcgccgtcttctggggcttag

SEQ ID NO: 7015 - DNA, 540 bp, Zea mays
  Peptide Sequence Number=SeqID_50390
atggcgcttcctgttgacgtggctggccagcgccctaggttgggcgacgtggaggctcctccgaagccgaggtcgaaggccagggcggagtccgagccctgggtcgggcgaatcggagttcgtcgtcttccggggctgagcccgatttcgagccctggggtcgggcggagcggagttcgtcgtcttctggggctgagcccgagtccgagccctagggtcgggcggagcggagttcgccgtcttccgggacttagcccgagtccgagccctgggtcgggcggagcggagttcgccgtcttccgggacctagcccgagtccgagccctgggtcgggcggagcggagttcgccgtcttctgggatcggagtggcgcaggcggcgctgtccttttgtcaggccggtcagtggagcggcgaagtgacgacggccactttggctctgctgggggcgtgcgtcaggataaagctttatgctgatgggggttaccagctgagaattaggagtcttgagggtacccctaattatggtccccgacagtag

SEQ ID NO: 7016 - DNA, 507 bp, Zea mays
  Peptide Sequence Number=SeqID_50391
atggtcgcgcccacgtccgcgcaaatcccggccaccacccacgcgcccaacccctactcaagcccccctctcgtccgctctgccatcccccactcacagacaccccagctcgccttcgctcgtgcgtcgtctcttctcagagctctcagaagaccgccaccgctcgccgcgccccacgcgcccgttccgtcgccaccattgggccttcgtcgtgcctttcgcctcggtgagtcctgcctcggtgcccgtaacttgagacgtgcctcaatttactctctccctctctggttccctctgcccgtgctcactggagcttccctcgcgcagccggagagccaccgtcgtcgacccaagccctcgtcgtgtccctaccgccgttcaagggtcccgaagtcttctctcgagattcgcaccctcacccgcgctccgcccctgggccccaccggtcagtgcctacgccccctggctagggatggcaacaggtcgagtttggatcgggtagagtaa

SEQ ID NO: 7017 - DNA, 279 bp, Zea mays
  Peptide Sequence Number=SeqID_50392
atgcaggtcccccgggctccagattcgccggccccgctcctgctcccgctcaggcctccgctcccggtggcgggcgccttccggatcgacgacgcgcctgtgaggacgaggagaagcagcgaactggtgaagaagtgtttacagtttgagaggaggagggaggaggcgaagcgaaggccaccaagcacgcgcaagaaagatgacggcacgagcgacgatcccggtgacaaggacgcggcaacaatcgtgaactctcgtggaactattctagtattgtaa

SEQ ID NO: 7018 - DNA, 933 bp, Zea mays
  Peptide Sequence Number=SeqID_50393
atggaggagcaccgcccgcgctgcaatgccacggcacccacgaggagggttgccggcggtggcaagaggaaagcggcggcggcgggcgcaccaacggagccgaggtacatgggcgtgctgagacggcgtcgagggaggtacgtggcgaggacccgcgaccggaagggcaagcggatgtggctaggcacgttcgacaccgccgagaaggcggccaggaggtatgacagcgagacgcatcggctccgcgggccgtcggcgatcaccaacttccccgcgacgtctgatgatcgtgtcccgcttccggcgccgtcgctgcacgctgtggaagagcactctttcgctgccgacgagtcccagccggtggtggggtcgccggtctccaccacgccgccgacgaaacccttggacgccgtcgcagaaaccctctccacgttctcatccagcgacgaggctgacgccggtggcggtgctgaagcggcggcggggccgcgtaagttcgtcatggaaatacacatggaggagcaccgctcgcgctgtaatgccacggcgcccacgaggagggttgccggcggtggcaagaggaaagcggcggcggcaggcgcgccggcgaagccgaggtataggggtgtgctgagacagcgtcgagggaggtacgtggcgaggacccacgaccggaagggcaagcggatgtggctaggcaccttcgacaccgccgaggaggcggccaggaggtacgacagcgagacgcgtcggctccgcgggccgtcggcgatcaccaacttccccacgacatctgatgatcgtgtcccgcttccggcaccgtcgctgcacgccatggacggacactccttcgctgctgacgagtcccagccggtggtggggtcgccggtctccaccaagccgccgctgaaacccgtggacgccgccgcataa

SEQ ID NO: 7019 - DNA, 1503 bp, Zea mays
  Peptide Sequence Number=SeqID_50394
atggttgttgccgccatgagagacgagggagaggagggacgacgacgggcggtggtggcgatacgggactacgatcccaagacggaccgcgacggcacggaggccgtcgagcgggagtgcgaggtcggcccggccgccgccgccggcgggatgtcgctgcacgccgacctgctcggcgaccccgtcgcgcgcatccgccactcgccgcactacctcatgctgtttgattttgatctcgacaatgaacaggtagctgagacgtccgggccggacggccggatcgtcgccctcgtccggggaaccgtcaagtctgtcgcctccggcaagagccgccctggcgcgcccgccttcgccagagtcggctacattcttggcctccgcgtcgcgccttcccacaggcggatgggcatcgcgcggcagctggtgcatcggctggagcagtggttcgagctgatgggcgccgagtacgcgtacatggccaccgacaggtccaacgaggcgtcgctgcggctcttcaccggccgctgcggctactccaagttccggacgccgtcgctgctggtgcacccggtgcactcgcaccgcctcaggccgcccccgcgcgccacggtggtccgcctgggcgcccgcgacgccgagcggctgtaccgcagccggctcgcgcacgtcgagttcttccccgccgacatcggcgccgtcctgggcaacgcgctctcccgcggcacgttcctggccaccgtgggcggctacgagtggggcggcgtcgaccgcttcctggcgtgcccgccggcgtcgtgggccgtggccagcgcgtgggactgcggcggcgtgttccggctccaggtgcgcggcgcgtcgcgcctgcgccgcgccgccgcggccgccacccgcgcgctggaccgcgccgccaagtggctgcgcgtgccgtccgtgcccgacttcttccgccccttcgcgggctggttcgtctacggcctcgccgggagcggcggccgcgacgccgcgatggccgccgaggcggtcttcgcgtccatcgtcaacatggcgcgcggcagggcggccgccgtggcggtggaggttgcggccatggaccccctccgcgggcgcatcccgcactggcgccgactgtcgtgcaccgaggacctgtggtgcatgaagcggctcggcgctggtggtggcggccacgcggacggatgggactgggccaggtcggcccctggtcgatccatcttcgtggaccctagggaggccggccaaaggtgcgctgtttttttctgccctgtgcctgtggttgtccagtgggcggctgaggcggcaccggcggcggcggcggcggcgctgcatatctgcatggtgcgcgtgctgaacttcacactgatcggacctgtcgccgcagtgaacggaacagagcgtgactgtgagagcgggatgggaatagagcggctccgttcggttgattttttggagcggaatggttccggatctgaggagaatattccctaa

SEQ ID NO: 7020 - DNA, 333 bp, Zea mays
  Peptide Sequence Number=SeqID_50395
atgtctgatgatcgtgtctcgcttccggtgccgtccctgcaagccatggacgagcactccttcgctaccgacgagtcccagccggtggtctggacgtacatccgggccgtcgagcgctccgggctcgagggctcggatgagtcggagtactcctcggatgaggaggactcggacgacggcggcgaggacgaggatgacgacgacgacgacgatgacgaaggcggtggcgggggcggcagcggcggcagcggcagcggcggcagcaaggacggtgacggcggcggcagcaggggcggcagcggcggtggcggcagcaacagggccagtggctag

SEQ ID NO: 7021 - DNA, 489 bp, Zea mays
  Peptide Sequence Number=SeqID_50396
atgggcaagagtaacaaacgcaagcgtgagccgactcctccgtcggaagacttcggcgactcggaatactcggaggaggagttctcctccgagtccgaggggtctccggctcccgtctctcccccgacgtcgtctgttgattcagacgactcccaggggattgccgcggaagtttggacgtacatccgggccgtcgagcgctccgggctcgagggctcggatgagtcggagttctcttcggatgaggaggactcggacagcggcgaggacgaggatgacgacgacgacgacggtggcgacggcgacggtgacggcagcgacgggggcagcggcggcggcgacgggagcaagggcggcaccagaggcggcagcagcacgggcagcaccagaggcggcagcagcaagggcagcaccaggggggcggcggtggcagcagcagcaaggccagtggctaaacgccactggtctttagatattagtatagtgtag

SEQ ID NO: 7022 - DNA, 1146 bp, Zea mays
  Peptide Sequence Number=SeqID_50397
atggaggagcaccacctgcgctgcaatgccacgacgcccacgaggagggttgccggcggtggcaagaggaaagcggcggcggtgggcgcgccggcggagccgaggtacaggggcgtgctgagacggtgtcgagggtggcacgtggcgaggacccgcgaccggaagggcaagcggatgtggctaggcacgttcgacaccgccgaggaggcggccaggaggtacgacagcaagacgtgtcggctccgcgggccatcggcgatcaccaacttccccgcgacgtctgatgatcgtgtcccgcttccggcgccgtcgctgcacgccgtggatgagcactccttcgctgccgacgagtcccagccggtggtgggtcgccgcgataaggctgacgctggtggcggtgctgaagcagcggcggagccgcgtaagttcgtcatggaaatacacatggaggagcacagcccgcgctacaatgccacgccgcccacagggagggttgccggcggtggcaagaggaaagcggcggcggcgggcgtgccggcagagccgaggtacaggggcgtgctgagacgacgtcgagggaggtacgtggcgaggacccgcgaccgaaagggcaagcagatgtggctaggcacgttcgacaccgccgaggaggcggccaggaggtacgacagcgagacgcgtcggcttcgtgggccgtcggcgatcaccaacttcctcgcgacgtctgatgatcgtgtcccgctaccggcgccgtcactgcacgccgtggacgagcactccttcactgccgacgagtcccagccggtggtggggtcgccggtctccaccatgccgccgcagaaaccctctccacgttctcctccagcgacgaggccgacgccggtggtggtgttgaagcggcggcgaggccgcgagcaccgcccgtgctataatgccacgtcgcccacggggagggttgccggcggtagcaagaggaaagcggcgacggcgggcgtgccggcggagccgaggtacatgggtgtgctgagacgacgtcgagggaggtacgtggcgaggacttgcgaccggaagggcaagcggatgtggctaggcacgttcgacaccgccgaggaggcggccaggaggtatgacagcgagacgcgttga

SEQ ID NO: 7023 - DNA, 1221 bp, Zea mays
  Peptide Sequence Number=SeqID_50398
atggatgccgtcgcagaaaccctctccacgttctcctccagcgacgaggctgatgtcggtggcggtgctgaagcgtcggcggggccgtgtaagttcgtcatggaaatacacatggaggagcaccgcccgcgctgcaatgccacggcgcccagggggagggttgccggtggtggcaagaggaaagcggtggcggtgggggcgccggcagagccgaggtacaggggcgtgctgagacggcgtcgagggaggcatttcgacaccgccgaggaggcgaccaggaggtacgacagcgagacgcatcggctctgcgggccgtcggcgatcaccaacttccccgcgacgtctgatgatcgtgtcccgcttcccacgccggcgctacacaccatggacgagcactccttcgctgtcgacgagtcccagccggtggtggggtcgccagtctccaccacgctgccgccgaaacccgtggacgccgccgcagaaaccttctccatgttctcctccagcgacgaggctgacgtcggtggcggtgttgaagccgcgtcggggccgcgtaagttcgtcatggaaatacacatagaggagcaccgcccgcgctgcactgccacggcgcccacggggagggttgccggcggtggcaagaggaaagcgacggcagcgggcgcgccggcggagccgtggtatacgggcgtgttgatacgatgtcgagggaggtacgtggcgaggactcgcgaccggaagggcaagaggatgtggctaggcacgttcgacaccgccaaagaggcggtcaggaggtacgacagcgagacgcgtcggctacgcaggccgtcggggatcaccaacttccccatgatatctgatgatcgtgtctcgcttctggcgccgctgctgcacgccgtggacgagcactccttcgctgccgacgagtcccagcctgtggtggggtcgccggtctccaccacgccgccgccgaaacccgtggacgttgccgcagaaaccctctccacgttctcctccagcgacgaggctgatgccggtggcggtgctgaagcagcggcggggccgtgtaagttcatcatggaaatacacatggaggagcaccgtccgtgctgcaaagccacggcgcccatggggagggttgccggcggtggcaagaggaaagcggcggcggcgagcgcaccggcggagccgaggtacaggagcgtgctgagacggcgttga

SEQ ID NO: 7024 - DNA, 3939 bp, Zea mays
  Peptide Sequence Number=SeqID_50399
atggaggagcaccgcccgcgctgcaatgccacagcgcccacgaggagggttgcctgcggtggcaagaggaaagtggcggcggtggcgggcgcgccggcggagccgaggtacaggggcgtgttgagacggcgtcgagggaggtacgtggcgaggacctgcgatcggaagggcaatcagatgtggctatgcacgttcgacaccgccgagaaggcggctaggaggtacgacagcgagacgcgtcggcttcacgggccgtcggcgatcaccaacttccccgcgacgtctgatgattgtgtcccgcttctggcgccgtcgctgcatgccgtggacgagcactccttcgctgccgatgagtcccagtccgtggtggggtcgtcggtctccaccacgccgccgctgaaacctgtggacgccaccgcagaaaccctctccacgttctcctccagcgacgaggctgacgccggcggcggtgctgaagcggcgggggggcgcgagcaccacccacgctgtaatgccacggcgcccacagggagggttgccggcggtggcaagaggaaagcggcggcgacgggtgcgtcggcggagccgaggtacaggggcgtgctgagacgacgtcgagggaggtacgtggtgaggacctgcgaccggaagggcaagcggatgtggctaggcacgttcgacaccgccgaggaggcggcaaggaggtacgacagcgagacgcgtcagctccgcgggtcgtcggcgatcgccaacttccccgcgacgtctgatgatcgtgtctcgcttctggcgccgtcgctgcacgccgtggacaagcactccttcgctgccgatgagtcccagccggtggtggggtcaccggtctccaccacgccactgccgaaacacgtggacgccgccgcagaaaccccctccatgttctcctctagcgacgaggctcacgccggtggtggtgctgaaacggcggcggggccgcgtaagttcgtcatggaaatacacatggaggagcaccgcccatgctgcaatgccacggtgcccacggggagagttgccggcggtggcaagaggaaagcgacggcagcgagcgcaccggcggagccgaggtacaggggcatgctgagatggcgtcgagggaggtacctagcgaggacccacgaccgaaagggcaagcggatgtggctaggcgcgttcgacaccgccgaggaggcggccaggaggtacgacagcgagacacgtcggctccgcgggccgtcggcgatcaccaacttccccgcgacgtctgatgatcgtgtcccgcttccgacgtcgttgcagcacgccgtggacgagcactccttcgctgccgacgagtcccagccggtggtgggttcaccggtttccaccacgccgccgccgaaactcgtggacgccgccgctgaaaccctctccacgttctcctccagcgatgaggctgacgccggtggcggtgctgaagcggcagccgggtcgcgtaagttcgtcatggaaatacacatggaggagcaccgcccgcgctgcaatgccacgacgcccacagggagggttgccagcggtggcaagaggaaagcggcggcggcgagcgcgccggcggagccgaggtacaggggcgtgctaagacggcgtcgagggaggtacgtggcgaggacccgcgaccggaagggcaagcggatgtgcctaggcatgttcgacaccgccgaggaggcggccaggaggtacgacagcgagacgcgtcggctccgcgggccgtcggcgatcaccaacttccccacgacgtctgatgatcgtgtcccgcttccggcgccatcgctgcacgccgtggacgagcactccttcgctgccgacgagtcccagccggtgatggggtcgtcggtctccaccacgccgccgccgaaacccgtggacgccaccgcagaaaccctctccacgttctcctccagcgacgaggctgacgccggtggtggtgctgaagcggcgacggggccgtgtaagttcgtcatggaaatacacatggaggagcaccacccacgctgcaatgccacggcgcccactgggagggttgccggcggtggcaagaggaaagcatcgacggcgggcgcgccggcggagccgaggtacaggggcttgctgagatggcgtcgagggaggtacgtagcgaggacccgcgaccagaagggcaagaggatgtgggtaggcatgttcgacaccgccgaggaggcggccaggaggtacgacagcgagacgcgtcggctccgcgggccgtcggcgatcaccaacttcctcgcgacgtctgatgatcgtgtcccgcttccggcgccgttgctgcacgccgtggacgagcactccttcgctgtcgacgagtcccagccggtggtgggttcaccggtctccaccgcgccgccgccgaaacccgtggacgccgccgccgaaaccctctccacgttctcctccagcgacgaggctgacgccggtggcggtgctgaagcggcagccgggtcgcgtaagttcgtcatggaaatacacatggaggagcaccgcccgcgctgcaatgccacggcgcccacggggagggttgcaagcggtggcaagaggaaagcggcggcggcgagcgcgccggcggcggcgagcgcgccggcggagccgaggtacaggggcgtgctaagacggcatcgagggaggtacatggcgaggacccgcgaccgaaagggcaagcggatgtgcctaggcacgttcgacaccgccgaggaggcgaccaggaggtacgacagcgagacgcgtcggctccgcggaccgtcggcgatcaccaacttccccacgacgtctgatgatcgtgtcctgcttccggcgccatcgctgcacgccgtggacgagcactccttcgctgccgacgagtcccagccggtggtggggtcgtcggtctccaccacgccgccgccgaaacccgtggacgccaccgcagaaaccctctccatgttctcctccagcgacgaggctgacgccggtggtggtgctgaagcggcggcggggccgtgtaagttcgtcatggaaatacacatggaggagcaccacccacgccgcaatgccacggcgcccactgggagggttgccggcggtggcaagaggaaagcggcgacggcgggcgcgctggcggagccgaggtacaggggcgtgcttagatggcgtcgagggaggtacgtagcaaggacccgcgaccggaagggcaagaggatgtggctaggcatgttcaacaccgccgaggagtcggccaggaggtacgacagcgagacgcgtcggctccgcgggccgtcggcgatcaccaacttcctcgcgacgtctgatgatcgtgtcccgcttccggcgccgttgctgcacgccgtggacgagcactccttcgctgtcgacgagtcccagccggtggtgggttcaccggtctccaccacgccgccaccgaaacccgtggacgccgccgccgaaaccctctccacgttctcctccagcgacgaggctgacgccggtggcggtgctgaagcggcagccgggtcgcgtaagttcatcatggaaatacacatggaggagcaccgcccgtgctgcaatgccacggcgcccacggggagggttgccagcggtggcaagaggaaagcggcggcggcgagcgcgccggcggagccgaggtacaggggcgtgctaagacggcgtcgagggaggtacgtggcgaggacccgcgaccggaagggcaagcagatgtgcctaggcacgttcgacaccgccgaggaggcggccaggaggtacgacagcgagacgcgtcggctctgcgggccgtcggcgatcaccaacttccccacgacgtctgatgatcgtgtcccgcttccggcgccatcgctacacgccgtggacgagcactccttcgctgccgacgagtcctag

SEQ ID NO: 7025 - DNA, 792 bp, Zea mays
  Peptide Sequence Number=SeqID_50400
atggtggggtcgccggtctccaccacgctgccgccgaaactcgtggaagccgccgcagaaaccctctccacgttctcctttagcgacgaggctgacgccggtggcggtgctaaagcggcggcggggccgcttaagttcgtcatgcaaatacacatggaggagcaccgcccgcgctgcaatgccacggcgtcgacggggagggttgccggtggtggcaagaggaaagcggcggcggcgggcgcgccggcggagccgaggtacgggggcgtgctgagacaacgtcgagggaggtacgtggcgaggacccgcgaccggaagggcaagcggatgtggctaggcatgttcaacaccgccgaggaggcggtcaggaggtacgacagcgagacgcgtcggcttcgcgggccgtcggtgatcaccaacttccccgcgacgtctgatgatcgtgtcccgcttccggcgccatcgctgcacgtcgtggacgagcactccttcgctgccgacgagtcccagccggtggtggggtcgccggtctccaccacgccaccgctgaaacccgtggacgccgccgcagaaaccctctccacgttctcagtcgtcgacgcgctcctgccccagctcgtcgaggacgctttctccttcgccggtgtcccgttcaacgacgacttgcccacgctgcagctcggtggcctcgactacctcgccaccgaccccgcgctcgagcttggcagcctcccgatgtggcccggagtcgacggttgccgcttcagcgacatcggcgacgatgacttctga

SEQ ID NO: 7026 - DNA, 1353 bp, Zea mays
  Peptide Sequence Number=SeqID_50401
atggaggagcaccgcccgcgctgcaatgccacagcgccctcggggaggattgccggcggtggcaagaggaaagtggcggcggtggcgggcgcgccggcggagccgaggtacaggggtgtgttgagacggcgtcgagggaggtacgtggcgaggacctacgatcggaagggcaatcagatgtggctatgcacgttcgacaccgctgaggaggcgtctaggaggtacgacagcgagacgcgtcggcttcacgggtcgtcagcgatcaccaacttccccgcgacgtctgataatcgtgtcccgcttctggcgccgtcgctgcatgctgtggacgagcactccttcgctgccgatgagtcccagcccgtggtggagtcgtcggtctcaaccacgccgccgccgaaacctgtggacgccaccgcagaaaccctctccacgttctcctccagcgacgaggctgacgctggtggcggtgctgaagcggcggcggggccgcgtaagtttgttatggaaatacacatggaggagcaccacccacgctgtaatgccacggtgcccacagggagggttgccggcggtagcaagaggaaagcggcggcggcgggcgcgtcggcggagccgaggtacaaaggcgtgctgagacggcgtcgggggaggtacgcggtgaggacctgcgaccggaagggcaagcggatgtggctaagcacgttcgacaccgccgaggaggcggcaaggaggtacgacagcgagacgcgtcggctccgcgggtcgtcggcgatcaccaacttccccgcgacgtctgatgatcgtgtctcacttccggcgccgtcgctgcacgctgtggacaagcactccttccctgccgatgagtcccagccggtgaaacccgtggacgacgccgccgaaaccctctccatgttctcctccagcgacgaggttgacgacggtggcggtgctgaagcggcagccgggtcgcgtaagttcgtcatggaaatacacatggaggagcaccgcccgcgctgcaatgccacgacacccacggggagggttgccagcggtggcaagaggaaagcggcagcggcgagcgcgccggcggagccgaggtacaggggcgtgctaagacggcgtcgagggaggtacgtggcgaggacccgcgaccggaagggcaagcggatgtgcctgggcacgttcgacacagccggggaggcggccaggaggtacgacagcgagacgcgtcggctccgcggaccgtcggcgatcaccaacttccccgtgacgtctgatgatcgtgtcccgcttccggtgccgtcgctgcacgccgtggacgagcactccttcgctgccgacgagtcctag

SEQ ID NO: 7027 - DNA, 1509 bp, Zea mays
  Peptide Sequence Number=SeqID_50402
atggcggaggcggggaggcggacgcttgcgctggtgaacctggcggccatcatggagcgcgccgacgaggcgctgctgcccgcggtgtaccgggaggtgggcgcagcgctgggcgccacgcccgtggcactcggcgcgctcacgctctaccgctcagccgtgcaggccgcctgctacccgctggccgcctacgccgccgtgcgctacaaccgcgcccacgtagtcgccgttggggccgttctctgggccgccgccaccttcctcgtcgccgtctcagacacctttgcccaggtagcgatagctagatgtttgaatggtattggcctagcacttgtcaccccggcgatccaatctctggtggcagattgctctgatgacaacactcgaggcgccgcatttggatggcttcaacttacgggaaacattggttcaattattggtggtttgttttccctgatgcttgcacccaccacagtcatgggtattgccggctggcgtgttgcatttcacattgttgctgttataagcgttgtagtcggtgtgttggttggcctatttgcagtggaccctcatttcctccatgttgaaagtggcgagcagctgttacgcaagtctgcatgggcagagatgaaggatttggtgagagaagccaaggctgttgtgaagatctcatcgtttcagatcattgtggctcagggtgtcacaggctcgtttccatggtctgccctggcctttgccccaatgtggctggagttgatggggtttacgcacaacagaactgggctcctgatggtaacatttgcattggcaagctcacttggagggctgttaggtggaaagatgggggatcactttgctactcgcttcccgaattccggccgaatagtcctgtcgcagataagctcagcttctgctattccgttggctgctctgttgcttttggggctccctgataactcttctggttccttgcatggacttgtcatcccgatatttgctgagattgtacctgagaggtcaaggacaagcatctatgcattggaccgttctttagagtcagttctagcttcattcgctccaccagttgttgggtttctagccgagcatgtctatgggtacaatcccgtcccctacggagctgcagataacaatgttggcagggataaatcaaatgctggcgccctagccaaagctctgtacacgtcgatcgccatccctatgctgctgtgctgcttcatctactccctgttgtaccggacgtacccacgagacagggagagggcaaggatggactctctgatcactccagagctccagcagattgaactggaaagatgtcatgggcaagcggattattattctggaaggaaggacaaggacggctctactgtcttcgatatggattacagaggaatcgacgcctatgatgacgagaagggattaatcgatcagcaggctaagcagagcggcaatgtcaagtggcacaggagtcattcacagaatttgtga

SEQ ID NO: 7028 - DNA, 1062 bp, Zea mays
  Peptide Sequence Number=SeqID_50403
atgtgggacccagcccccgcgccgcaggggaggaccttggagcgtgttggagaagactcagcccgtgacggttggaggcgcaagcagggagagtggcctttaaaaggagggcgatccctttcggaaggcgaccatgtcttctccctttcttatgcatcgcgtctttccaccttccaagcccccggatgggggatgcccgccgtcttttcgccttatcgttggaggaacgcaactccgtgggagttggtaccttttagccatcgttcggcttcaaggattttcatcatgcagcccggctgcacccctccgccggcggtcacccaagatggtgacctccagcttgatggtgggggaaagcgagccgggctgcggcctctgcccctccctcagcctcaaggattttcatcaccaaggctggggaggggagtgtgccgagttggggtcggcccctgcgtgggcggcggcccgctccttcactcagtgatcggagggaagggcgatcgtcgtccgtggcgccggcagctgcaccgtgcctggctctcggacgcgagtggcttcagagccgctcgcagcgccggcgtctgccacgacagcttgaagaggttcttccgccgcatccgccctgaggtcagtgctgccgctgttcggccccccggggcagaagtcgtcgtcgtcgccgctgctagagcagactcgcctgttgattatctgaaccgcttcaccaagcatgagtcgccccgtgtcaaggtgacgagtgaggccaggggtagcggtatcagcatgaacagaggcggagttggctcgaaaatgaaacctggttggccggagcctagctgggttgtccgtcagcgggaccgacgccggagtcgatcagccgaggcctcgggtcgggctggcgcccttggaagatggttggccgaggccccagggagcggagatcctcagaccgcgtcgccgtccgaggctaggtcggatctcgccgaagttgtcgtcgatgccgagggtgctgctgcccccttccagcgccaagacccgagcctgcaggatcagagtgtcttgtag

SEQ ID NO: 7029 - DNA, 864 bp, Zea mays
  Peptide Sequence Number=SeqID_50404
atggagaagtgcaaaccaatcaagacacctatgccaactaatggacatctcgaccaagatgagggagttgtcaggtcaggatgcccgcgcacgaagaatgtgtcggcgccagggggaggcaataatgaggatcctcatcgccccttcaggcaggtcaagggaaagaccgtgtacttggagcagcaggaaggccgcaagaagctgtgtatggacagagcagcccgagcagcggcagcatcagctacagcagccgctgagcaggccgagctaggagatcagccacagactccttcagatcagattgcataccgagttcatcgcctcgcctcccggcctcgctcctccactcccaccactgcttccactccaccacccactttgcctgctcccgtcacccctgctgcgctatccaccacctccactacaccagcttccactgctcctcctctcgcttccgctcctcctatcccacctgctcgcttctgggagcgcgatgagactgagcttatgctatggcactctgacctcctcgtcgccctcacggcggtgttgctcctgttgattcagcctccacagttccagggcacacttgaggcctcacgcctcctctttgggtcctaccgtccagcgcctgaggatcctgtgccagcacctgctccagtatttgacactcaggccgaggatactgctcttcatcagttcgaagctcaggacgcagcagttgatgattatgatgatgatgattttgggattccacctccgcctccgcctcctatgcctccacgctctcatgatcatgagaatgggagttccagtggtgctgcccctcttgccattgaccctgctcttgcggcaattctctag

SEQ ID NO: 7030 - DNA, 357 bp, Zea mays
  Peptide Sequence Number=SeqID_50405
atgtggtgcaagcgtggtccaaaatgttatacaagaaagaaacaatccatgcatatcttgtgtaaaaaggttcacactcagccaataaaaagatcaagagttggattcaacaaaagagcaaagggtcaaccaaaggcacctctggtctggcacaccggactgtccggtgcaccaccggacatgtccggtgcaccagaggactccaacgcgaacttgctaccttcgggaatttccagaggcgactccactataattcaccggactgtccggtgtacaccggacagtgtccggtgcgccaaggaggagccgcctcaggaactcgccagcttcgggaatctccaacggcttgtccgctaa

SEQ ID NO: 7031 - DNA, 174 bp, Zea mays
  Peptide Sequence Number=SeqID_50406
aggatccggggtgtagttcgcttcgccgttgtgccgtcaatggggctcggtgtatgcggctcgctctgccaaggtggcaatgagattgatggttctggttatgttgatggtgctggcgaagatgaagctgtggaaggagacttccaggagttccaagattacgacgagttctag

SEQ ID NO: 7032 - DNA, 543 bp, Zea mays
  Peptide Sequence Number=SeqID_50407
atggcgcgctcgccccggcctcgactcgccggccacggcgtccccggcgccccgccctggcccgtccgccccgaccctcccctcggctcgaccaaccgtggcggcccgatgccctcgcgcggcgaatcccgcccgcccgcgcgcgctcgtccgccgacctcgctcacccgtgctcggcacggtggcgttcggcccggcctcaccggcgcggcgcccagcgtccccggcgccccctgcgtccccgccctgtcctcggcggctcgcctgcgggtccggcgtggcgcgctcgcgcgtccgttcggcccggcctcgccggcgcggcgcccggcgccccctgcgtcccaagccctgccccctgcgcgcccgtcgcggcctgcgcccggcctcggcgcggcggcgtggcgtgcccgttgccgcccggcgcggcccgctcgcgcagctcgtccgcggcgtgcccgctgctcgcgttcgcagcgcgctcgcgacctccggcgtggcgcgttcacggcccccgctcgacgtagagtgcctcttgcgtcttag

SEQ ID NO: 7033 - DNA, 281 bp, Zea mays
  Peptide Sequence Number=SeqID_50408
ggcggttgaacctcccctggcaggcctggcagcctgtctgccagtctgactggcagactgacgcgcagactgacctgcagactgactgttggtcagaggtcagaggggtcagagaccagctgaactgcccctcaggaccagttcaactggtcttgaccagagagtttaggagagaaaaccccagctcaactgcccggaggcaagttcagctgctgtatggtcaaagaggttcacagctgaagttgagttcagctgaagttgagaaagctcaactcagctga

SEQ ID NO: 7034 - DNA, 774 bp, Zea mays
  Peptide Sequence Number=SeqID_50409
atggtgtggcgcccggcgcggctgctcgcggcggcccccggcgtggctgctcgctcgcggcgcgaccccctcgcgttcggcgcggcccgacctccggcgtggcgcgcccgcggcctgcccgctcatggccatggcgcgcagtcggcccccggcgcgcgtctcgccgcgagattcgtcgtgccgctattgtcgtcgctgcacagcagcgtctacgtcgctctagtcgtcgccaagcgtaaacgttataacttcccgaacgtagcttcgatcgtcgcgtcccttatcctcgcgaatcaacagtcaagcttcagcgaccaagtgatcgaattcttcgagttccatgaagttgaagaccccgagcatctgtttggtgaaggcaaagtccgccatcgttggtttggggaagaagcttctggcgggtgggatctagtcatcagtgaaacaagaggagagaagcaggctgaccaggggaaaagatataagctagacaggtttgaaagctctcttgtgggtttttgtggtttggatgacaacccaattaaaggactaacaagtgtgctaagtgttgaacaggtgcttaatgcaaagctaacagggttcaacacaaagacaactgatcaaaccaaggatggaggcaagaagagcttcgaggtaccgagtgtacgggagaaggtcaaggagaccagaaacccaaagccaggggtgaagaagaagacttgcaaagtcaaggttgatcgagttaagagttatggtgcatcaaggatcactacataa

SEQ ID NO: 7035 - DNA, 165 bp, Zea mays
  Peptide Sequence Number=SeqID_50410
atggcgaggtgtatggggtctgatcaactccgtggcaaatgggtaacacgacttgtgggtaaagatgtgcaacctctgctgagtgtaaaactggtatacagcaagggagaagaacaggtggtcgaagaggagctgtctaacattgaggctttcaacttgatctag

SEQ ID NO: 7036 - DNA, 1640 bp, Zea mays
  Peptide Sequence Number=SeqID_50411
atgaacaaggatcgccaggatgctgcgcagaagcgccgggcggtcatcaggctccccgatcctaggcatgaagcgaagagagcgcgggggagcgtgaaggctgccgcccccggcggtagccaaccgacgctggccgcgaaaccggccgcacccggatccagcaaggtgccggagagcacgaaggtcgtcgtctccggcgggaccaagtccaccccgggcgaagctgcgaaggttcgggagctgccttcgctagggaaacgcgttgccgacttcgccacgaatattagcgtggatgactatttcgtcgggtggcgctttctgcgctggcggcgagatttcgttggccactgccgtcaaggacgaggcgggcaccatgtcccgccggctcagggaggcgtcacagcagctgtcgcagcagctaagtcaagcaagttgagctgggcttcggtgtttgccgctttcatggggattgtgcacgcggacgccgtccgggagaagtcggctgcagagagcaagagccgcaggctggcggagaaggtggccgccctggaggccgagaggacggacctccggcgccagctggtggaggaaaggagggaggccaaccgggccatcgccgaggcgcaggctgcacaggcggaggccaaattggcgcgagtggagggaagtctcgccagccaacgcgccgaggaatgggaggtgcggttcaacgctttgcgcggccgcgtggagaggaccgaggcctcaacgcgctcggaagttgagcggacgcgcgcacaactcgtggactcgtaccacgagctgggtgcacggactgctgacttcgaggtgcccgaccgagaggcgggccttcgcttcctcgagtggctgcaagaggaattgctggcactcccgaccatcgtggaaggtttcatgtcctttgcctcccctccgtcactgcgaagggggcccatgaacggcgctgtctcgcgaggggctgcagacactacgaggtctttgaccaaacggatgagagatttgaacgcgagatctttaaggccgaagacccctgtttgtgaagcaatggagcgcttcgaggacgtcgaggacttcggaggtctaatcggcgcgccgcccgaagctgcggagggcaaaccggtgctgccctcggatgctggtgaaggcccatcggacgtgcccgtgcctgctgctaccggcgcagaccctgtgtcggccctgtgccgacggtcaaaggcgctcaggaggtggtggcggagccggcagtcgaaggccctacggccgcggacgcgccctcgcaggagttcggtggtttggacggaagagtcttcggatgaggatttggattattttgtggcattggatgtggctttggcggaggcttcttcgcgtgtgatgggtgctgaggttcccggtccgagtgttgggcgtaggcggcgaagggcggtggcgaagcgtagagtgagtgaggtggagggtggtcgtcttcgtgtggacagggctggcaagtgggaattgttgtcctcgccagctggggcgagtgtaggtgagggggagttgcgaagtctttttgtgggtgaggagctgaggataatgttgtttcactatagggagatgggtatcatcccgaaggttgaaccaat

SEQ ID NO: 7037 - DNA, 861 bp, Zea mays
  Peptide Sequence Number=SeqID_50412
atggcttcacgccaaaaatacataaatgttcaggccccgaaagccgcaatgaacaaacgccgacacttaaggtgccattacaaacggaattccggttccgcccccgcgggtacgaacaacctccacatcggagagcctgcggggcgacaaactcctttcgactccaacgcatccagcgtggaggcccaggcccacacatcatgtaaccggcgcgccggttactacgtgcgggaaactgcaccgccacttgcgccagtaccgcgccatctcgactgcggaactggtgccgcgactcgaggcaaccctgcgcatggcccaacagtgccaaccgagcacatcggtcacgggtcagtcagccgcggagaaggcgcgacggtcgatatggccaaaagtgggcccgcagtaatggcgacggcaggcgggcgaaagcagcggtcacatcgtctgcaggcttacgtcccctcctgggacagcgatagagccctctcccacggagtgaagacgacgtgcccgtgttccgttcctcgaacggctcgcgcacgcacaacggctgctccgcgaaccactcgtctcgtcgcattaactctgcggcaggacaggcagcacctttggcaggcgaagcaggcgacgcttcacctctgccataatgaccgcatcaaaaaaggaccgagaaaggggatactccgaaagggatccttctccgcaaaggaagcgggccccgagccccctactgatcagaggttcgaaggctggcccctcggaagggttcgacagccgcctcagagcactcgggctccgagccctcctactgatcagaggttcgaaggctggcccctcggaagggttctgaaagtcgcctag

SEQ ID NO: 7038 - DNA, 402 bp, Zea mays
  Peptide Sequence Number=SeqID_50413
atggctgccgtcgtcggtgctgaggtggtggcggctgaagaagtcctcgtcgccgacgagatcgccaccaccatctgcgctctgggcctccggctctttggctttgatagcttgtcctcgcccctcgagtggggacatgggcgagggccttatcgcagcagcgtctgccctgaggtcatcgctgctgttgtttggccgcccggagcggaggtcgttgtcgctgctgccggagtgggcggcggcgagccacctgggattttgtcgtcccgcaggccctccaatgtggggggttgttcgtacctgcgggggtggaactggagttccgtttgtaatggcaccttgtgtgccggtgtctgttcattgcggctgtcggggcctgaacatctgtgtatttgggcgtaa

SEQ ID NO: 7039 - DNA, 288 bp, Zea mays
  Peptide Sequence Number=SeqID_50414
atggtcttagggcaaatgctactgctgaaaggccctcgttcacgtcccctcacgggggacgagaaccaaccattaaagcccctcacctatggcgaccaccacctcaacaccgacgacagcggccacctgcccaccaacaccgcaccggcgaacggtggccgccccaaagcgcagtggcaggtcctcactcccatcctcgccataggaacgagaatgggaccgtcccagaacacgagtaccgccctcacggcgtacgacatgttgtgcgacccccggtgcgaccgatag

SEQ ID NO: 7040 - DNA, 660 bp, Zea mays
  Peptide Sequence Number=SeqID_50415
atggaggtggtggaggcagaagggatgaggtgggtggtttccttttctctggctgctctcttaggttgcggaaaccaaagcagaatggcaagcgacacctccggcaggagaagcgggcgtcgtttcgcctccgtcatgatgaccgcatcaaaaaagggaccgggaaaggggttatttcgaaaaaggatccttcccagcgaaggaaacgggccccgagcccttctactgatcaggggttcgaaggttgcgcccttcggggttcggcaaccgccccagagcactcgggctccgagccctttactgatcaggggttcgaaggctggcccctcggaagggttcgacaaccgccccagagcacgcagagtcagggatgaccctgggtacgtccgttacatgaccgaggctcgggctacgctcccgaggtaccctaagacatttccgagaccagcgggaacgatttgtaacggaatcccaccggagggaggcatcgagccctcggaccctatcgaatgggcccgggcctcggccttagcctcggcctcgagaggagttacgtcctcgcctaacctcggcctcggcctcaggagaagtctccgcctcgcccgacctcagcctcggaccaactacgctacaggggatgcatcattaccctactcctag

SEQ ID NO: 7041 - DNA, 723 bp, Zea mays
  Peptide Sequence Number=SeqID_50416
atggctgaatactcctctaagaggactgttgatcaattttctcttccaaatgacacaaacattcagtattttcatactcagttgcagtttgatgtcttctggggaactctaatggatatcaaatttcataggcatcaattaattgtctggatgactgggtttaagcactatgtggctacctttgctgaatttgtcactcctaacagtctgaattatgacatgatctctcagggagtagatctttacactgaggaccaatttgaagattatgcccaatattatgaaactgccaggctgggtatacctaagcgtttcggcgagactccaggcctgcgacatcatcctgcagtcatcaacaaaattgctagagtcaccattcttctaaagagtggggacaaaagtagaatcagaaataaattctggaatatcattgatcgtgtcatgaagggggagcacggactccagatacatatggatggtcaatttcagggcatgatgtcacatgttgatgactgctttgatcacatgcaatctaactttgatggccaattctctgatatgcatgatcgattttccgttgttgactctcagctggatgaagttcattcacagtttattgatcttcgctctcatattcaaactactgtacatgatccaattatgagtcgaatgaacaacatgcagcaaagttttcaagatattatgggtgctctgtccagttaa

SEQ ID NO: 7042 - DNA, 441 bp, Zea mays
  Peptide Sequence Number=SeqID_50417
atgaccggatacctccacaccctcgacaaccactacgatgacctctcctcccactgcacccacctaaactcccgggtggaaagcctagagcggcaagtcagagaacttaagcaagagaaggcatccctccaagagtgtctcgacatagcagaaggcgaggaggccaacacctgtgaggcttatcgaaccttaaagatggactatgacaagaagctaaagaagctcgcccccaaaaagaaaatccagaagaagaccaccaaccgaggatgccaaacggagaagaagaagaagaagacccctccagccccacctccccccaaggtagatgattggtccgacgccgaggatctatccctagcaagccttgatgatcttctcaaggagtttggggacaccttagagaaggagttcagtagtacctcggggaacgctctcgtgtag

SEQ ID NO: 7043 - DNA, 984 bp, Zea mays
  Peptide Sequence Number=SeqID_50418
atggctcatcttagacacatcgcacaaaagtctgtcatccccttcttgccttctcgtctcgctgagcgtccgcttcgccgtccagtgactggtcagtctagccatttggagaggctgcaccaccacctgcacgaggagcaggagcgtcggcgacaggagctggagcagcagggctcttcttccccgcctcagcagggagtggagtctgtgaggagctgctcccctatgctcccgctggagacgccccctgcaccaccactgagtgccccagccgctagagtagctattggaggagaccctgacgacggaggtgacaatagcggctcgagcttcagcaccgacctttcagccgagcaggagccggaaggattggtcgctcgacccatcactcgcgacgctgctcgcgggtgccacttccatgacgcgcttgacacccttctgcgccaggcacttgaccggcgcacttgtcgtggggtttacccggaccgctgggaggcgacttgcttggtgcgccgttcagagaacagtctccggggtgcggaggtctactcagagcactactctatctctgagcgggactcagctgaggcggccatgcaagatgttgcacggcgtgcgctttcgcactactgctcagtgttcagtggggtggctgatggtctcaacctgtggtattaccaccgccgtccatctggcagcacaggaggcatggttgtctcacccgttggtgaggacaatcctaggttgagtagcacagtcaacctagctgccgtgctaaacacagagctggaccatgccctagacgagctgagtagggctcgtgctgagatcgcccagctacgggctgagcgcgcggagcgtcgtcacctggaggatggctccctcgctcccatcgggactcagcacccgtaccgctcacctcggcgtgtacaccatgcttatggcaaccccgactgcaggaccaggataaatttagaaccatag

SEQ ID NO: 7044 - DNA, 510 bp, Zea mays
  Peptide Sequence Number=SeqID_50419
tcgctgcgtgaccccgtgaagctcaccatgccctcggatttaaccagttcgccgtggtttggccggtatactcgccgccgacgaggacacccgcctgcacgcgtggaccgggcgattccggccatctccgacgtcgagtcgtacctcgacgtgaccgccagagtctccccgagccgaccccacccttcgccggacctccctcgctgccgggctcggactcgggctaagccccggaagacggcgaactccgctccgcccgacccagggctcggactcgggctaagccccggaagacggcgaactccgctccgcccgacccagggctcggactcgggctcagccccagaagacgacgaactccgcttcgcccgaccccagggctcggactctgccctggcctctgccgaacgacctccgcctcgcccgacccagggggctcgggctcggcctcggccacggaagacagactcgacctcggcttcggaggagcctccacgtcgcccgacctag

SEQ ID NO: 7045 - DNA, 828 bp, Zea mays
  Peptide Sequence Number=SeqID_50420
agcacgctcgcgcgcgtccccgcatgccccgcgccacgcccgagccaaaccagcaccgtggcccgcgcccgagcttataaagccctcccaggcttcgactacacccttccgcgcaccctccacacctcaccggagttagctcgtcgccgtttgcccgtgcgcagcgagtccgcggccgcccaatccctctgtcaccatagaccggccagtagcgccattcccgaccccgtccagccctcggagaagcctgtgcacacctccgtgaggctccccgagcaaggaatcggagtttacttcgccggagaagccagtccacgctcgccggagctctcgaccccgccggagtacgtggaccggggggctggatacacgacaccccctcagtacgcggtgcagcagttcgagaagcaccgagtgcctcgctgtcgggtgaggatgaccttggagcctcatcccttgcagccaggatggcgctctttggactccgagtctttcggataccgagcagaggacacggtcgaggcaatcgctctgcatggattgactactttctgcggattccatcccttggagctggctacccaccccattggcttgttccccgctgagaaggaggacgacccaatgtggaaggatcgggtggagcatgccaaggacatctgggccatctacccaggtcagactgcgcacttgacagtacggtgcatgaatgctctgtaccgtctgcaggtgatgcgcggtgaggcaatgtcccatctgatggcactgctggaggcaacaaagatcacgttggataacagagaggagctcgtggtgacgaatctctag

SEQ ID NO: 7046 - DNA, 177 bp, Zea mays
  Peptide Sequence Number=SeqID_50421
atggcggttgtaatcaagtgcttcaagaccgctttgaaaggacgcaaggagtatccctacaagaacaaatcaaagggaaagcgcttttgcttcaaatgtgccttcgacaagtcctccctcttccccaacgagcatcacacatgcctcatggctaaggagaagaagatacgtacttga

SEQ ID NO: 7047 - DNA, 1152 bp, Zea mays
  Peptide Sequence Number=SeqID_50422
atgtcgccaacggcggtggtccgggcgaagggtgccgcgcaagacccgtgggccgctttctgcgtgagcggcgagattctgtcagccgctgctgccaaggatatggcgggctccatttccaagcggctgagggaggcgtcgcagcagctgaagcaagcggctgactttgccaaccgcgtggcgtcgggtgtcctgactgcggacgtggctgccaaagtcgagaggcttcgggcgcagcatgcggatgctgtccgggagaagtcggctgcggaaagtaaaaaccgcaggctggcggagaaagttgccgccatggaggccgagaagacggacctccggcgccagctggcggaggagaagagggaggcgaatcaggccatcgctgaagcgcaggctgcgcgagcggaggccaaagtggcgcgagcgaagagcagtctcgccagtcaacgcgccgaggagctggaggcaaggttcaacgccttgcgcagccgcgtggataaagccgaggcctcgacgcgctcggaagttgagcggacgcacacacagttcgtggacgcgtaccgcgagctgggtgcgtggactgctgacttcgaagtacctgaccgagaagcaggccttcgcttcctcgaatggttgcaggaggagctgctggtgctcccgaccattgtggagggtttcatgtcattcgcctccctcgtcacctgcgagggggccatgaatgcattgtcccatgagggctgcaggcactacgaggtcttcgaccaatcagatgagaactttgaacgtgaaatttacaaggtcgaagaccctgtggtgaagcagtcagcgggggcactctttgataggatgtggggtccgcacggtcgggaggcggtcagggagcggtccgaccgggcgatagagcagatggcgcatgccgaggacgttgaggaccttggagctctggtcggcgcgccgcttgaggctgtggaggtcaacctggggccgcccctggatgccggtgaaggctcctcggctgcacccgtgcccacggtggctggtgaagaccctgtgttggcccctgcgctgacggacgaagatgctttgaaggtggtggctgagccggcagccgaagaccccacggccgcggccgggccttcgcaggtggctaaatag

SEQ ID NO: 7048 - DNA, 75 bp, Zea mays
  Peptide Sequence Number=SeqID_50423
atggccggggccgagctcgcgggcttgcgcgagggggctcgtctggggtggtgggcggcggggacgggtgggccg

SEQ ID NO: 7049 - DNA, 111 bp, Zea mays
  Peptide Sequence Number=SeqID_50424
atggagagtcatgatctccgagcaaaacgggaatcacgacttgtgggtaaagaagaaggcgtcgaggcggatctccaggagttccaggacttcgacgagttcgatgattag

SEQ ID NO: 7050 - DNA, 216 bp, Zea mays
  Peptide Sequence Number=SeqID_50425
atggccggttcggccgcctccctgcccgccggttcggccgccccgccccccggctcggccgccccctacccgcccccctgccccgccggtggttatgagattgatggttctggttatggttatggtgctggttgtcagcattgcaaccactgctcaggcgaagatgaagctgtggaaggagacttccaggagttccaagattacgacgagttctag

SEQ ID NO: 7051 - DNA, 147 bp, Zea mays
  Peptide Sequence Number=SeqID_50426
atggaaggagcaaagattgcaccaatcatgattctccagctaggtgaagacattaatgttaaccagaatatcaggcaatatgaaaagatagttcctatgaagaacataaactgtggcatagttccaagttatatagctatgtcataa

SEQ ID NO: 7052 - DNA, 1407 bp, Zea mays
  Peptide Sequence Number=SeqID_50427
atgacatcacatagacctgcaggagagatagctgctattgtggaaggtgtggacatcatatcggactccactgttggcgctgctcgtgctcagagtttctctggaaccagtgctagccacacttggccccgtagtactttttattggcagctttcagacccactagttgatcttctcggaagcgttcatgagaatatgtcagaaggaggaagtagacggaatagtttcttcccagtcttcaacagtttttcttttccagagcatgaacatatgaatgaacacagggatggtaacagtgatcaacagactagggagacttattatgctggagaagctaataatggagatggtttaagggcttctctgctttctcaggcagcaagtgttgaagtaaatgatacaaatacctcttttacttctgaagggagctcttcatatttaagaaggcatggaacatcagtgcttgcacaagagtttatggcgtctatacatgattatgacattgaagaagaagaagaagaaatccatgggtttgcattgcctcaccagtctgcacctcgtgatatggaaagcaccgggagacatccattcagacatcaaatagtccggttatctgaaacagctgatatgaagtttaaatggcgggtgcttcttcaaccaggaatcaggcatgccttatgttatggcatgttaattcaagcccttcagcaagtacgattatgtgttattgtagattatgtattcaattcagcatggagttcagtttacttgcgcactggctaccattctacaggaatcagtggtcttctccgctgcgctcctgaaatatttgagcagtctggagtggctagtttgttttcagacattggactttctcctcattcaacatcaattctcatgagtacccttaatgctttgctgatactcccttgtataactgccgcaatgctgctgatggatgtctgcgggagaagggttattgtgctggccactactcctgtcctgatactatcattgagtgttatgtctatgtccaccctggtgaatatgggaccgttcgaaagtgccgtcctcttccacttcgcattaaccatttgcttctggtcctatgtcattggtttgggaccgataccaaacattctctgctccgagatattcccaaccaaggcccgtgcgacatgtgcaagtttctgttcgctttccttctggtttgggggcctgctttcagcgtactgcttcccggtgatgttgagcaccatcgggcttggcggagcgtgtgggatctatgcacttgtgtgctgcgctccgctttttctcgtctactatcgaataccagagacgaagatgcttaacctggagctcattgcggagctgttcaagctttcaaggcaggagcatgtacagtag

SEQ ID NO: 7053 - DNA, 819 bp, Zea mays
  Peptide Sequence Number=SeqID_50428
atggactggacagtcttctgcgacggccctgaggagacgcggtattggtgcgagtggcggtgcgacttctctgcacccagaaaccagcacgccgggtgcgtgacatgtgggcctgggcccccatgccagaggttggaccgcaggttgcagcaaagacgagggggcgcactaccgcggggcggtagcatgctccttgtgctgtggttcgccttcctgaccgttggtcgtagtgaagatgaaggaggcgtactaccgcggggcggtagcacgcttcctgtgcggcggttcgccttcttcgcactcgaaggccagcgcgccagctatatgacttgtgggactgggcccccgtgtcatgggatggatacctcggtgtgcattgggggaggcttctcacggcgcttcgaggcgggagcaggggagcctgcctttaaagaggggtctctgcttcgcgttgccgtagtcaccatggccttgctagacccttgcgagcgcttccagcccgaggtggcactcaacttggcgcgcaacccgctcggatggggtgtgctggcatttgccgggaggacttgtgctggtgtctctcctctcggcgaccttgctgtcaaagagtttgtgttctttgtttccaaactccccagcgggttggctctgccgatcccatctttcttcgtgcagctgctggaggggcttagcccccagcctctacctgtggtgtcctgcttcatccttcaggcagccatcgtcgcctacctccgcgggatgtccgtggaggcgacgctccttcccgcttcttcctctagcattcggagggaaggatga

SEQ ID NO: 7054 - DNA, 369 bp, Zea mays
  Peptide Sequence Number=SeqID_50429
atggcgctccctgttgacgtggcggacccgcgcccgaggccgggcgacgtgggggttcctccgaagctgaggtcgagtctgtcttctgttgccgaggccgagcccgagcccctgggtcgggcgaggcggaggtcgttcggcagaggccagagcggagtccgagccctggggtcgggcaaggcggagttcgtcgtcttccggcccgagtccgagccctgggtcgggcggagcggagttcgccgtcttccggggcttagcccgagtccgagccctgggtcgggcggagcggagttcgccgtcttccggggcttagcccgagtccgagccctgggtcgggcggagcggagttcgccgtcttccggggcttag

SEQ ID NO: 7055 - DNA, 1119 bp, Zea mays
  Peptide Sequence Number=SeqID_50430
atgaacaaaaacactggcattcgaagtgccattacaaacggaactccggttccccctccacagcggcgacgacgacgacttctgctccgggggccgaacagcggcaacgctgacctcagggtggatgccgctgccaggaggcccccgcccatgccaaaactcgtgaggcaaggacgggcagaaggccgtagagttggaggtcagcccgtggtcggccccggctatcgcgccggtggaagaacctcttccagctgccgtggcagacgccggcgccgcgagcggctccgaagccactcgcgtctgaagaccgggcacgctgcagctgccagcgccacggacaacaaccgctccttccccccatcactgagtgaaggagcgggccaccacccgcgcaggggtcgaccccaactcggcacactcccctccccagccctggtgatgaaaatccttgaggctgagggaggggcagaggtcgcagcccggctcgctttcccccaccatcaagctgggaggtcaccatcttgggtgaccgccggtggaggggtgcagccgggctgcacgatgaaaatccttgaagccgaacgatggctgaaaggtaccaactcccacggagttgcgttcctccagcaaggaggtggaaagacggcggataccccccatccgggggcttggaagatggaaagacacgcggccgccccgccaaccactcgccccgtcgcattaactccgcggcgggacaggcggcgctcctggcaggagaagcgggcgacgcttcgccttcgccgtaataaccgcgtcaaaaaaggaatcgggctccgagccccccctactgatcaggggttcgaagactggcccaccgaagggttcaacagtcgcctcagatcgcgtgggcccgacacccactactggctggcccccgaagggttcacagtcgcctcagacgccgagcgagggatgaccaggggctcgggggctgctctcgcaaacccggctccggccaaaccgttgacagcgtcaacataccagcccgtgagcttgggccccgaccgtgcacccgggctacggccagttcgcatgagggaacaaccagaccagccgaagcattacgcaaggcattaa

SEQ ID NO: 7056 - DNA, 1359 bp, Zea mays
  Peptide Sequence Number=SeqID_50431
atggcgaccaccacctcagcaccgacgacagcggccacctgccttccaacaccgtgccggcgaacagcgaccgccccaaagcacaccggcagccgatggtgcaaggaggacctaggcgtggccggcccgcgcgtggcacgaccatcgcccgagaagaggacaaaaagctgcaccctggccagggagcagcagttcgccttcccccgcatggctggaggacgcctccgcagggctggaggatgcccttctcccccgaacgctgggggaagaaaagggtcatcggcccacgcggaggcgcccccccactcgatgcactcctccgcctcagcccgggtgatgaagatccttgaagctgagggtggggcggaggtcgcagcccggcttgcttctccccaccaccaggctgatctcctcacttgcgcccccaagcgtcacgggcaaagtttccaccgacgtgctccagggttcccaccccacgacacgagggccgggtcccacacgtcatcagaactgacccaagacgcgaaggaggcaaaccgccgcatgcaaggcatgaaaccgccctgcggttataagcgttccctcatcctcgccagaaccagcggacgaaagatcgagccgccacgcagggagcatgcaaccgcaccgcagttatgcaccctttcggcttcgtcacttccggtggaccagcaagaaggcccggtcccacataccgtgcagccggcgcgatggtcactacgtgcaaggaaaccacaccgccacctgcgccaatgctgcgtattctcgactgcggaaccagtgccgcaactcaaggcagccccgcgcgtgacccaacagtgccaattgagtgcagcggtcacgggtcagtcagtcgcgggggtaggcacggcagttgatgtggccaaaagcggaccgacaatagctgctgcaacagacgggcggaagcagcgagccagcgacaccgttggcaggcgaagcaagcgacgtttcaccactgtcgtgatgaccgcgtcaaaaaaggctggtccctcggaagggttcgacagccgcccagagcacctaggctccgcgcccattactgatcaggggttcgaaggctggcccctcggaagggttcgacagtcgccccagagcattcgggctccacgcccattactgatcaggggttcgaaggctggcccctcgaaagggttcgacagccgccccagaacacgcagagtgagggatgaccctgggtacgtccgatacatggccgaggctcgggctacgctcccgagaggctcgggggctactctcgcacccggctacggccaaactgttgacagcgtcaacaaaccagcttcaaaactcggaacctga

SEQ ID NO: 7057 - DNA, 687 bp, Zea mays
  Peptide Sequence Number=SeqID_50432
atggcgaagctaaccgaagcactagcgcggcttaggggcgactggggtgggctggccacggtggccgaagctctagcggcaatggcgggcggaaaagagctcgctggagctaaggaggggtggctggccggtgatggtgagcgcagggtgaagctcaaacatcagcagggggaggagcggcaccctcggcgtcgtttccaccctcggcggaatctggcccagcctcagacggcgatgcgagcaggcgcctcggccagccactccgaagccccagccagctgtcccccgaggatctcagcccggctcacggcttcggtggcttggctccgggattggtcctgctcgcgggtgatctggccaaaccccagctgccgttgctgcacctcctcggcctgggaagccacctgctcccgcgccgagaaagcctctgttcgagccgacgtcgcctctgtccacgccatcgctgccttcagcttcggctcatcgcagagcagccgaaggtatgaacaacctccacaccagggggcccgtgggataacaaactccaagcggctcaccgccgacctctgcagcagcagcgacaacgacctctgtctcgagcggctagacagcagcagcgatggcctcagggcaaacgctactactgaagggccttcgttcacgtccctcacggaggacgagaactag

SEQ ID NO: 7058 - DNA, 1392 bp, Zea mays
  Peptide Sequence Number=SeqID_50433
atgaaggaggagatggtggtcggcctgtcggcgccggggccggtggggaggtggggcgccgcgccgccgcaggcgatgctggagaggatgaaggactacggccaggagggcgccttcgcgctctgggacgatctctcgcccgaggaccgagagctcctcgtccgggacatcgagagtctagacctttcaaggatcgatcggatcatccggcgctcccttggatcgcaaggcatcccgttgcctgccgtcgagcccgtgccggaatctagtgtatccaaggtggaggacaggtctcctgaggacaaggaaagatggtggaagaaggggctcaaagccatctctgaggggaagctggctgttgtccttttggctggtggtcagggtactcgtctgggaagctcagatcctaagggatgtttcagcccgagtaacactgtgctgatccactggtatataatgacaagccccttcacagatgcttccactcgcaaattcttcgaaacccgtagatactttggcctagaccctgaccaagtgacatttttccaacaaggcacacttccatgcgtctctgccgatggtagatttattatggagacaccatatagggtagcgaaggctcctgacggcaacggtggagtttatgctgcgctgaagtccaagaagctgatggaagacatggctgcgcggggagtgaaatacgtagactgctacggagtcgacaacgcgctggttcgagttgcggatcctacgttcttagggtacttcatcgacaagggtgtgtcttctgccgccaaggtggtgaggaaggcttacccgcaagagaatgtcggggtgtttgttcaacgaggccgcggtggacctctctccgtggttgagtacagcgaaatggacgcagctatgactactgagatcaatcagtcgacagggcgactccgttactgctggagcaacatctgcctgcacatgttcactctggacttcttgaaccaagtggcgaacagcctcgagaaggacagtgtataccatctagctgagaagaagatcccttccatccatgggttcacaacgggcctgaagctggaacagtttatattcgacgccttcacttactccccatccacagagcttttcgaggtcatgcgggaggaggaattcgcgccggtaaagaacgccaacggcgcgacatacgacacccccgatagcgcgaagctcatgctgctccgcctccacagcagatgggtggtcgccgccggtggcttcttgacgcactccgtgcccttgtatatgacaggcgtcgaagtttccccgctttcctcctacgccggagagaacctggaagcgatctgccgcgggcgaacgttccatgcacccagcgagatatcgttttag

SEQ ID NO: 7059 - DNA, 168 bp, Zea mays
  Peptide Sequence Number=SeqID_50434
atggcggaacagactgagaaggctttcctcaagcagcctaaggtgttcctcagctcaaagaaatctggcaagggtaagaagccaggcaagggtggcaatcgattttggaagagcattggccttggtttcaagactcccagggaagcaattgaagttggagggcaatag

SEQ ID NO: 7060 - DNA, 732 bp, Zea mays
  Peptide Sequence Number=SeqID_50435
atggctgaaaggtgccaactcccacggagttgcgttcctccaacgacgaggcggaaagacggcgggtatcccccatccgagggcttggaaggtggaaagacacgatgcataagggagcgcgaagacatggtcgccttccaagggggtcaccctccttttaaaggcgactctccctacttgcgtccccagccgtcgtgggctgagtcttctccaacacgctccaaggtcctcccctacggcgcgggggctgggtcccacacgtcatgcaagccggctcagagcagaagaagccaaaccgctgtgcgcggtgcgtacaaccgcccagcggttacaagcggctctccacgtttgcccagaccagtgggcgaaagggcgggcagccatgcaggcggcatgcaaccgcgccaagtgggcgcacttctccgactcccaacacgcccgggaccgggaaagggggataccccgaaaaggatccttccccgtgaaggaaccaggctccgagcctccctactgatcagaggttcgaaggctggcccctcggaagggttcaacagacgcctcagagcgcgtgggctccacacccactactggtcagaggttcgaaggccggcccctcgaaagggttcaacggccgcctcaggctactcgggctccgcgcccactactgatcaggggttcgaaggctggcccccgaagggttcacagccgcctcagacacagagcgagggatga

SEQ ID NO: 7061 - DNA, 924 bp, Zea mays
  Peptide Sequence Number=SeqID_50436
atggggagaggcaagtcgggctgtgatcttggtcccgccctcagcctcaaggatgttcgtcatccttgctggggtggggagcgaggcgagccggggctctacctcccgcgcgggccggttggccacctcttcttccagcttctggtggtggcaaccatcctccagctctgcggaggagacgtcctccagccatgccggggaaggcgaactgttgctgcccagctaggacgcaacattctgccctcttcctcgctttcgtggcaaggacgggagcgaagacctgccggtgcgctttggagcggcccgctctttggctttaatagctggttcgcgtcccttgagtgggaacgcgaacgagagccctccggtggccgcgtccgtcctgggaccatggctgctgctgcagaggtcgctggcgggtcccccgactcgcctgttggttgtctgaaccgcttcaccaagcgtgagtcgccccgtgtaaaggtgacgagcgagttaaaggaacccctcgcccgctcttcgatgagccgaggccagggggtagcggtgtcagtgcgaacagaggcagagttggcccgaaaagaagacctggtcggccggagcctgaccgggttgtccgttagcgggaccgacgccggaattgacctgccgaggcctcgggtcgggctgatgtccgcgggggacaaccggccgaggcctcggggtgaccagccgagccgcctgcccgagccggattctcgaagaagaccctggcggcgatggcccgggcggggcgatgacgtcgtccttcagagtggagatcttcggaccgcgtcgccgtccgaggctaggtcggacctcgccgaaggtgttgtcgacgccgagggtgctgctgctcccttcaagcgtcaagatccgagcctgcaggatcggattgtcttgtag

SEQ ID NO: 7062 - DNA, 204 bp, Zea mays
  Peptide Sequence Number=SeqID_50437
atgggaaggagctccagtggtcttgatgttgtcatcacattcttgcttgatgagtgcttcccacctattttcctgcctgacatgctgcacaaggaggtgaacatcttcttctccctagttatgtggttcatgcaatcgctgtcgataatccagcttgagcctcggatgcataaacctgcaaggcaatttaggcttgggttttag

SEQ ID NO: 7063 - DNA, 303 bp, Zea mays
  Peptide Sequence Number=SeqID_50438
atgggccagatcgcacgtggggcctctgagccggacgaggacgcgctgagggatgacttcgtcgctggtcttcgtctggtgccgatcaagcgaagtgtgtccctgcctgttttgtctctgtcagagcagcggctgtcagcgaaggcttcgagcgaagggtggcgtctttgccttcgccccaacagattaaaacctgtgtactgcttttgccaacccgatccggaccatggatctattgatgtgtggctcgggttgtcctcacaatccgatttgtccagatctaatccaacgactgagacttaa

SEQ ID NO: 7064 - DNA, 561 bp, Zea mays
  Peptide Sequence Number=SeqID_50439
atgtcgtcgtcttcatcatcgtcttcatcgtcatcgtcgtcatcaggcgtctccggcgacgggtccctcgggagcccatccctctcctgccgacggcgaagcctttccaaggcgtcccgagcccgcatccgctcacgggctcgagccttcttcgtgtccttcttctccttcctcttctccacggtgaccctccgcgcagctcggtccaccgcgcagctcggtccaccgcgtcctccgggaccggtggcagggaaggcttgtgaaacccccacctcctggagacagacgaaaagtctcggttgtgagaaccgagggcaatccgacgcaagaaggaagaaggagcggatactcaccagatacgcacacccgcgatcggggcgcatcgagggctgggaaaaggtgccggcgtctaacttccctaccgtgccggctacccacctgtggaggtcgtcggcgggaagggggtccgaggacatctgcaaaccctccaagtcgacccccggtgtcatctcccaaagcggcagccgccgctccgtcaaggggagcaccctccggcgatga

SEQ ID NO: 7065 - DNA, 261 bp, Zea mays
  Peptide Sequence Number=SeqID_50440
atgaaagaggggccgcagagcttgaggattcactacttcattacgggcacaagtcgtcgattcaattcagcgctagcagatttatcgctgatggacgccggggctcatgaagagggacaagcaaaggtgccgaagcttggaccacaagtggagagggttctcggggggacatacggtgcagggtgcagctgcggtcatagtggcaccttcaaaagtcaaaacatcttatgcactcaaactggatatcagttgcacaagtaa

SEQ ID NO: 7066 - DNA, 648 bp, Zea mays
  Peptide Sequence Number=SeqID_50441
atggccgcgacccctagaacccaaaccatatcgccatgggtgctctccgtggtacgaaggaagagcagccgtgggcgaaaccaaagcaccaccaccggccgtttttcattcgcacagtcggtcggggatgaactggtgactgtgaaaactcgtagtgatccgagagggagtatggtgactcgctgggcacgtattgtgcgcggggcaactggcgattcctcgccagagttggagatccgcaccacgccgtggccgggggtccctgcttcgccgctgtcggaggccaacaagggtgaacagtggtggcaacagggttacgtgctagaaggctatagctctgttaatctggcctcccacgggcactgtgcaggggcccgtaacgcgcggcggccacgcagggcccgttacaatgggccagatcgcacgtgggcctctgagccggacgaggacgcgctgagggatgacttcgtcgctggtcttcgtctggtgccgatcaagcgaagtgtgtccctgcctgttttgtctctgtcagagcagcggctgtcagcgaaggcttcgagcgaagggtggcgtctttgcctttgccccaacatttgccctccgagggaccagttcgacaaagtcacctggtgccgaagacgtcgctag

SEQ ID NO: 7067 - DNA, 348 bp, Zea mays
  Peptide Sequence Number=SeqID_50442
atgatcaaggagtgcaccgagggctcggagatgggcacggcggcgcactcggcgctcgggctcggcgacgctcgggctcggggacggggacggcggcgcttggcctcggggacggggatagaggcgctcgggctcggagatggagacggcgacgctcgggctcggagatggggacggggacggcggagttgggctcggggacgacgcggcgtggcgggcgcccagctcggagacggtggcgcttgggctcgggctcggcgacggcgtggcgggcgctcacggctcggagatggcgtggcggcgcagtatcagcctggcggcgtagtatcagctccgggcgaaacctaa

SEQ ID NO: 7068 - DNA, 363 bp, Zea mays
  Peptide Sequence Number=SeqID_50443
atgggacaaagccctgggttgcaggtcagtgaccaagtcgccactctccggggatataacggtgatccgaatcgatttactcagctcaggatctctaaccacatgacatatgtagcacttaaccgttgcatatggcaaccgttcccacagatcctccacaacgtgaactggcagaagccatccttcctcaggataacccctgagctaggcattaacgcaaaggacaatctctatccacaagatctaagcaggaataagcatttttgtaaatcatattttgatacttcatcagaagtatctataaaggttggtccgactgacgacatcgttgtacaaagaagaccactccttgcaccatcttga

SEQ ID NO: 7069 - DNA, 576 bp, Zea mays
  Peptide Sequence Number=SeqID_50444
atggcgtccaagcccctgtgccctctctcccatggcgtgaggcccctactcccatctctctaccagcgcccagccatggtggtcgccgacctccctactccctgctgttgctcgccttgcttggatgagaagcagccgagcgccctccctgtccatggcgtggagcagcagctcccattccccggcgacatcctcctcgccgtcgtccatggcgcccctgcgaacctccctgtccatggccacaaatccttgcgcccttctctgcgcagcgcccctgctgtgtttcttccagcgagctctctgctctcggctgctggcagccagggcgcgacgcctctgctcctctctaccccacaaaacagccagcacgcaggagcttcttctccatggacgcccagaattctagcagcgagcccccttcctcgctccccttcgcgccgtgcccgtgatgtcgtcgttcttgctgttttgtcgcgccaatcgacagccgcagcagcccctccgtggcgtgtgctccaccttgacacgccctcggtgcccgtcgtgctccttcgacttcgcttcggtctcccgtga

SEQ ID NO: 7070 - DNA, 648 bp, Zea mays
  Peptide Sequence Number=SeqID_50445
atgaacgagaaaaatgagtcacagagatattttggaatgaagaacaacaaaaggaatagaaaaatgtttggatacatgattagtccacctcaaccacaagcaaaagccacgaaacacatggatacccaaacagaagaatcaagtcaggctcagctatatgagatacagacacccaatcaaccctcaccccctattgaacaagcaaagttgactcccaaagaactcaaagcaagaggtgcttgctactactgcaaaaatgaaggacatattatttgcgaatgccccaagaagcgtctagaccgactaaagaagaaagctgccaaacatgacctaagcaataattcagaagaccaaccattttataagttcgacgatgaaggtcgcttgattagcatacattgcgaagcaaagaagtaccttcgaactcgggttaaaattgtgcatgatctggaaagcatggtcgagacgaaggttgatgcagttccgaagctacacgcaagggagcttcggctcagcggcagaaaaaggaaccgacttaaaggggaaaggctatctagtcctcgctgtattgtccttaagacaatagtaaacatgaagggcatgactgtaattttacacaggctgcgccctatgcctataaatagatga

SEQ ID NO: 7071 - DNA, 162 bp, Zea mays
  Peptide Sequence Number=SeqID_50446
atggggctcggtgtatgcggctcgctctgccaaggtggtgatgaggatgatggttttggttatgactatggtaatggttgtccgcgttgcaaccactgctcaggtgaagaagaggtcgtggaggagaactttcatgagttccaagagtacgatgagttctag

SEQ ID NO: 7072 - DNA, 612 bp, Zea mays
  Peptide Sequence Number=SeqID_50447
atggcgcggactgctttgcggccaggacggctgccgcgacgcgcacgacgtcgccacgccacagcaccaccacggccaggaacagatgcacgcacagggagccttacggcgctggaaactgactcgcgcaacagagagaagcgctggcgagcgaggcctcgacacaggacgagcgcgcatcagggagaatccacggcgagggagcccggctggattgttgatggagcagacagatgggcgctgagctggggaatggacagagaagcgcggccatggaaagcggactgtggccgggcgagactggcgtccaggaaggagcagaagatgactggcaaacagacggcgctggggaagaaactcgtcagcaggattcggagccggccatggacgacgctgccgcgaccagggcgagcacggccggacttgaggaagaggagggaggccggggagcaaggcgagctcactgcagaggagagacttgaccggccaggaacaacacgcccaggaacaactcgcgagcagggagacaatggcgagctctgcggcagagcacgccgacgagctccaattgtggccgcagttaggaagggagaggcaccagacgctggctga

SEQ ID NO: 7073 - DNA, 201 bp, Zea mays
  Peptide Sequence Number=SeqID_50448
aggatccggggtgtagttcgcttcgcctcgtgccgtcaatggggctcggtgtatgcggctcgctctgccaaggttgatttgtcccttggggaggagtgcggtggctatgaaatcgatggttttggttatgaacatggtgccggcgaagatgaagctgtggaaggagacttccaggagttccaagactacgacgagttctag

SEQ ID NO: 7074 - DNA, 84 bp, Zea mays
  Peptide Sequence Number=SeqID_50449
atggcgcttttggtgagtggatctggagcgttggctcgtggacagacggataggattagagatcagtatagatcaacttcttaa

SEQ ID NO: 7075 - DNA, 510 bp, Zea mays
  Peptide Sequence Number=SeqID_50450
atgaacgtcgacgagcagggagggttcgacggtcaagggaacgagcgcgatcgtcgtgctgcgcggacggaactccggctgggggacgcagacgggtgttacaatactcctgcacagagacgtccccctaggagaactggtggaactgggcgtcgaggtgaagagccccaagagtcccggttccccaagaaattgttcctcgagagcgagccactcctggcggcccatgtccacctagtcgcggatgatgtcctggagctcgatggtgatggtgccgtggagctaggagagcaccacggtgtccatcatggaccaggccggggacggtggggctacgatatcgtcgaggacgtgatcgacgatagcatagcattgcagggtgaggaggacctgccccctccagcgagggtagtgggaggacaccgggtccaacacgatggacacgagggacaagatgttgtggagaccggtagcctatgcgtggagggcagcggtcggtgtcgagtctag

SEQ ID NO: 7076 - DNA, 636 bp, Zea mays
  Peptide Sequence Number=SeqID_50451
atgaccgcgtcaaaaaagggaccgggaaagggggataccccgaaaaggacccttctccgtgaaggaaccaggctccaagcctccctactgattagaggttcgaaggctggcccctcggaggggttcaacagccgcctcagagcacgtgggctccacacccactactggtcagaggttcgaaggccggcccctcggaagggttcaacggctgcctcaggccactcgggctccgcgcccactactgatcagggcgagaacgatcttgtaacggaatcccatcagagggaggcattgagccctcggaccccgtcgacaggggaccgggtctggcagatcacccgcagctcaccggagacaccatgttcggcgcccaccgagggcaacatggcgcttttccccgtcctccttgcggaaaggcgacgcaggggcgtatgtaaaaaagtcgagtctgtccctgatcgtcctctcgccctgtgcagaggctcgggagctgctctcgcaaacccggctccggccaaaccgttgacagcgtcaacataccagcccgagaacttggaacccgaccgtgcacccgtgctacggccagctcgcatgagggaacgaccagaccagccgaagcattacgcgaggcattaa

SEQ ID NO: 7077 - DNA, 240 bp, Zea mays
  Peptide Sequence Number=SeqID_50452
atggggaagcctgtcccatcactcctcatgctcctcctcagccgaggcaggtataatggatcaagcagtctcattagctgcaagaagcagacgattcgaatcgagtttttatccttgcaagtgaccgcacttgtacccaccataaccggaatgggagaccacgtctcaggtcgcatgaggggatatgtccactgccaggttcactcaggacttaataacattatgctaaaaagaaactaa

SEQ ID NO: 7078 - DNA, 262 bp, Zea mays
  Peptide Sequence Number=SeqID_50453
tctgagtgaatctatcttgctccgcattgagcagctgggtggcctcttcatatggacgcacacatacagcctgatgcagaagtccggcaagctgtaccacaagatgcagtccaaaagcatccagtgcccagtcgatagcgatgaggagcatgagcaagcgaaagaagatgggccagctggctgcgctgacgaggaggcacctcttccgacgtcagtcaagcctcgcgagcacgagcatggggaagaggaagaacaccaaatg

SEQ ID NO: 7079 - DNA, 195 bp, Zea mays
  Peptide Sequence Number=SeqID_50454
atggcgtcggcggcgggcagagcacacacgagaggcgaggagctcgacctcttcatggacaagtggagaaacctgctgaaaggttaccaggaaaactcacagaaaagtacgctgctgtatcttgagccatcattggttgaaaagatcaggaacctggcagcaaaacagccatacccatatagaaggcacagatag

SEQ ID NO: 7080 - DNA, 81 bp, Zea mays
  Peptide Sequence Number=SeqID_50455
atgaagctccatggaggcatggatattttcaagctgaggtcaaaagccctccaagacttagtcgctaggatcggctcctag

SEQ ID NO: 7081 - DNA, 858 bp, Zea mays
  Peptide Sequence Number=SeqID_50456
atgctggcgctgctgggtcgtgcgctaggtcgcctcgagtcgcggcattggttccgcaaccgaagaggcgcggtggtggcgcaagtggcggtgcagttgcttgcatgcagcatccggcgcgccgggttgcgtgacgcgtgggcctgggcctccatgctggcgtgttgggagtcggagaagcacgtccacctggcgcggttgcatgccgcctgcatggctgcccgccccttccgcccgttgcccggctgcacccctccacctgcggtcacccaagatggtgacctccggcttgatggtgggggaaagcgagccgggctgcggcctctgcccctccctcagcctcaaggattttcatcaccagggctggggaggagagagtgccgagttggggtcggcccctgcgtgagcggcggcccgctccttcactcagtgatcggagggaagggcggttgtcgtccgtggcgctggcagctgcaccgtgcctggctctcggacgcgagtggcttcggagccgctcgcggcgccggcgtctgccacggcagcttgaagaggttcttccgccagcgagatagccaaggccggccatggaccgacctccaactctacggccttctgcccgtccttgccttacgagtttgggcatggggcgggggcctcctggcagcagcacccgccctgaggtcagtgctgccgctgttcggccccccggagcagaagtcgtcgtcgtcgctgctgctggagcaggtgacggcgcgccattcgtcggtcttctgttgctccgcaggcccacccctatcgagtggggttgttcgtacctgcggagggggaaccggagttccgtttgtaatggcactttga

SEQ ID NO: 7082 - DNA, 198 bp, Zea mays
  Peptide Sequence Number=SeqID_50457
atggcgcttcctgttgacgtggctggcctgtgccctaggtcgggcgacgtggaggctcctccgaagccagtcggagtggcgcaggcggcgctgtccttctgtcagaccggtcagtggagcggcgaagtgacggcggtcacttcggctctgccggggggcgagcgtcaggataaaggtgtcaggccacctttgcgttaa

SEQ ID NO: 7083 - DNA, 525 bp, Zea mays
  Peptide Sequence Number=SeqID_50458
atggtcaacagctccctcttgtgttttttggtttgggtcaacctgtgccggctgtgggctgggatcttaatttcccgccagaagacaatgtccaggcccagccagcagacaacattcaaggagattgggaccaatggattgttaatgatccacctgtacagcagccccatctggacctgccacctgacgagcagcagacccggcctcctccccccaaaacatgctgttgtggaatctgacctgaggagaagcaagcggctccgtgacgcccaggctgggttcagacagggttcctgccagaagaagaactgtttgatgtgtcaacacaagtttgagggtcccccctccctatctgctaagactatcagacgcttaggggagagcttttgcaatctgtcagaagtggagctggctgacaaagctctgaagaaaaagaagaacccccctggctgtgttggccctaataagtcagggaaaaaagacaagggggataagaaacaagactcttcagatgatgacaactga

SEQ ID NO: 7084 - DNA, 99 bp, Zea mays
  Peptide Sequence Number=SeqID_50459
atggggctcggtgtatgcggctcgctctgccaaggtaaagaagaaggtgtcgaggcggatctccaggagttccaggacttcgacgagttcgaggattag

SEQ ID NO: 7085 - DNA, 222 bp, Zea mays
  Peptide Sequence Number=SeqID_50460
atggctggtctgcgcttggcggagtttagttccgtggtctgcgacgcggattccctggcggcgccccggctatgtgcgcacgcgctgagcgcaggatgcagagagaagaggaagaaccaggcaggtgggatccttatggcagagacacgcgctggaccagggaaagaggatgactctatcgatggggcccacgtgacagtggccagggtcaagttaatctag

SEQ ID NO: 7086 - DNA, 666 bp, Zea mays
  Peptide Sequence Number=SeqID_50461
atgaagctctccaagccgcggattggacaccacctcaccggagacaccggatcgacgtcgccagacttcaaccggccgctgtcacacttagaccgagccacacggccgaagcacacgccgctgacgagtccgaccgtctgcgcacacggccagccctatttcggccatcaccgccggcgatccacccctcgacgtgactgcgaggacctcccggacctcacccggccatccaccggacctctctcgccgccggtggtagtcctagagccagcaccagagcctgctactgaggacctgcctgtcccagcttttgaaggcaagccccgttgtggtgggtacaagtgcggtcactgcacgacgacagtcggggtcagtgaggcattgtacgccaaggcggtgagccctgttctgttgacggggaatcgatggggatggttgatggccgaggatactattgagtccatggctctgcatgtgctgacaaccttctgcggatttcaccccttggagctatcaacccaccccattggcttgttccccgctgagaaggaggacgacccaatgtggaaggatcaggttgagcacgccaaggatgtgtgggctctctaccctgggcataccgctcacctgacggttcggtgcatgagtgccctgtatcgtctgtag

SEQ ID NO: 7087 - DNA, 510 bp, Zea mays
  Peptide Sequence Number=SeqID_50462
atgaaggagctgatggctcagcggaatgagaatctgcgacagctcgctcagagtcagccaccgcctcagcactatggtggtggtgatcatcaccagtgtgccccggcagcggccacctatcaagagtttctcagtactcagccaccattgttcaccagggcagaagatccactcgatgctgatgtttggctcagggtggtggaatccaaattcccactgcttaatggagattgttcagatgcagccaagtacgcaggctaccatgctgacaccgatgagaagaagagagacaaattcaggagaggcctcagtactaagctccatgaccgtctcaacacagtcaaggccaacagctacaatgagctagtcaacatggccatctctcaggaggattgcatcacggcccgccaggcagagaagaagagaaagacccctatggcaggactatcagctcagcctcagcgcttcaggattgtgtccgacactcagagcagaggacctcagcagtag

SEQ ID NO: 7088 - DNA, 492 bp, Zea mays
  Peptide Sequence Number=SeqID_50463
atgggttgctcgacccatcactcgcgacgctgctcgcgggtgtcacttccacgacgcgctctacaccctgctacgccaggcactcgaccggcatacttggtccatcgagtatcgctgtgtggtcttccaggacagtcgcggggtttacctgaaccgctaggaggcgacctgcttggtgcgccgtccagagaacagtttccggggtgcggaggaggcgtgattgtctcacctgttggtgaggacaatcctaggttgagtagcacagtcaacctagccgccgtgctaaacatagagttggaccatgcactagacgagctgagtagggctcgtgctgagatcgcccagctgcgggctgagcgcgcggagcgtcgtcacctagaggatggctcccccgctcccgtcgggactcagcacccataccgctcacctcggcgtggacaccaggcttatggcgaccccgactgcaggaccaagataaatttagaaccatag

SEQ ID NO: 7089 - DNA, 1312 bp, Zea mays
  Peptide Sequence Number=SeqID_50464
atgaagacgctgtgccccaagcccggaaagggcggcaagatccacccttcgcccgccgaggaccccaccgcggcggcattccgcctcctcccggccgccatcctcgtcctcgtcgccgggctgtgccccgaggaccagcgggtgctggcccacctcgtcacgcgctcgttcctgctgggctgggacaccatcacggcgccgccgccggagcaggcgcgcgggggcccgcgtcgcaggcgcggccacccgcccaccgtcgggtgcctgtgcttccagtgctacggcagcttctggtcgcggtgggactgctccccgcagcacgaccgcatacacgccgtcctcgacgccttcgaggagcacctcaacgccgccgagtccgccgccgccgccaccgccacccctccctcctccaagcgccgcgacaagggaaagcgcagcagggctcctgccgctactacacctccgccacagccgccgacgcggggcagccccgagtcccaggagcccccatccgaggtggcgcatgaaccctcggcgccgctcctcccttcctgcccttgtaccccgccaccaccggcccccgcggcgtgcctctccgagaacaaggagaatgtcccggaagagactggcgcggaggccaaagcggagcaatgcggcggcgaggtggcggcggaggccgatgaagagaggaagcgcgggtgggcggacgtgatgggcgggggaaatgcggcgggggagtcaagccgcgcgacgcaactgctagcataccagagcctcggggtgttgtacggcggggagggcggcaccttcgcgctctactccctcatctgccgccacgtccgcgccggcctcctgcccggcggcggcaccagagatgagctcatggaggaagagaagaccaccgggcgtcatggtgagcgacccgtgtccagggacagggcggtgctggagaagtacagagtgatgcagcggctgttgctgctgttcacactgctcgggacatgcatggtcatcggggacgacctgctcacccgacagtctcaggttggaccccttgccacagtcttggttttggatggttggtctcaatccgcttcccccgtcgcttcacgaccgagtcgcatgcccgcatccgcccgcttctcccccaccccaatcaacatgcgccatccccggatcccgccgccgcacaagccgcctcgaccccgacaccggcccgtgcgcgccatccctgctgactacatcgaggggcacgcaactgcacttcaagccgccgcacaagccgccgcaaaagacgcctccaactgccaat

SEQ ID NO: 7090 - DNA, 171 bp, Zea mays
  Peptide Sequence Number=SeqID_50465
atggagttgagattaagacctgcaaatggaaaagtagagggtatgtccaagggtcagacagggtcaaaggcgacaacaggcaatggtataagagaaaagatgaagacattgaagagccagtggtataagtacaacaaagaatggaggtatgtcaaggcttacacgcggtaa

SEQ ID NO: 7091 - DNA, 684 bp, Zea mays
  Peptide Sequence Number=SeqID_50466
atgggcgcgattaaggtcaaggctcagtacactcaagggaaacgatctagcctcgcccgagcccagcctcaggcaaaggcagccgaccccggaggattcacgtctcgcccgagggccccctcaagcgacggacacaccttcggctcgcccgaggcccagtctttgcagagaagcaaccttggccagatcgccacgccaaccgacccctcgggcgccataggaagctccgcctcgcccgaccccagggctcgggctcaacctcgacactggacgacggactccgccttgcccgaccccagggctcggacacagccttggccttggaagacggtctctgcctcgcccgacccagggctcggactcaacctcgacctcggaagacggactccgcctcgcccgaccccagggctcggactcagcctcgacctcggaagacggactcgacctcgacctcggaggagcctccgcctcgcccgacctagggctcggaccgaccacgtcacagggggcgccatcattaccctacccctagctagctcaggctacggggaacaagaccagcgtcccatctggctcgccccgccccttatggaagcaaggagacgtcagcaaggattcgacatccccgacagctgtccttccatagggcccaagcgctcctccgacggccacgacatcacatga

SEQ ID NO: 7092 - DNA, 690 bp, Zea mays
  Peptide Sequence Number=SeqID_50467
atgactggcgtcctactttggccgaagccaaattcaagatctagtgagcgtttcccctcacctaattccaagaatggctacccggtttgctctggccacggtgacagtgcggataatcaaaaggaacaatgtgttcccgttgatccatggcggtctagttcaatcagaggggtcgaggagcttgaggaggacctaaggacgctagaacaatcgactagagcgcttgaacgaacctggaataagctggccacggtgaagaaggcaagagcggtggccattgaatcggacgacgacgcgcggcggtcggaggagtgggaggtcactggcgcaagggatttgtggcatctaccgtggcagctctcaccggcgatgatcagacggccaaagtacgtggcgcaaggccgtgaatcggctatcaccggcgagctcatccgaaacgaccgtggcaactcggtgaacagtggccgagagctgggccacgagattataaaaaagagtgaaaaagacacccacgacgcccgggctgaagcaaagcgagctgaagaagctgcagaatgcgaaaggtgtatagctgaactatccccgcctccggagccatacgacccccttgctgatccagaaatgaaggaagcgttggaaattataagcatggcagactccattctcgacgaagtcatcacaaactcttga

SEQ ID NO: 7093 - DNA, 159 bp, Zea mays
  Peptide Sequence Number=SeqID_50468
atggcgagagtagcatgtaccctccgtggcaagaggctggacggtggtgtatctgtgctctcggtgaggaagcgacaaatttttgttgcttctgttcaaaggtggtacccaaagacgagcaccaagactagagttgcgggagggaaggccctccgttaa

SEQ ID NO: 7094 - DNA, 261 bp, Zea mays
  Peptide Sequence Number=SeqID_50469
atggggagctcgtatataatcggcgcggatgctcggctgggtgatcttcggtggttttccgcggcggcacgaagcaggtcaagccaggtcggcatcaacctcggtggcgggcaacccgtctcggcgctggtctctgaagctctaaataggattcctgatggtacagtactgaaaatatcccaggatcagataacttcgccgccggtgaaccgtgcgctcggattcacgccggtcgccgtgattcgtgccgcagggaagtag

SEQ ID NO: 7095 - DNA, 345 bp, Zea mays
  Peptide Sequence Number=SeqID_50470
atggccgttggaagtgttctgtcgcatggcgcaccggacagtcaggtgcgccaccggacactgttcgataatgttctgtctgcggagtccaagaaagttgcaggagaagcccctgagcagcaacagtttggtgaaggcaagtgttatctgacatatcatgtgacagaacctcccaagtcattaggcccacctacagttgtccttgtccatcagacctcagataaccctgcaggtgcacctgatcacttgacaagttcggtatctgtgttctttaccttgcccaagagcgtttcacccgtcacgcagatattacaacacatcgaaggtacgagtatgcggaagtag

SEQ ID NO: 7096 - DNA, 390 bp, Zea mays
  Peptide Sequence Number=SeqID_50471
atggactccaagcgccggctgcaggggcccttctcgctgcgcatcactaacgagtccggcgagacactagtggcttaccaggtcatccccgcaaactgggcgcccaacagctactaccgctccaacatccagtacgaggcttttggctctgctactggacaggctactggctctgctgttggactactcattagctctgctactcgactgcacacgttaattaccaggatcattggcttgatctgtttggtattgttgtatcatttgcaagggattgaggtagttgatgtagctctgtgggaaatgtacacttgtatttggtgctggatagctgggctgtcctgtcttgttctagctgttgtaggggctcacagctttgaactgttctag

SEQ ID NO: 7097 - DNA, 480 bp, Zea mays
  Peptide Sequence Number=SeqID_50472
atgagcacgagggtgaagatcgcaagtcatcgacacggtgctgtgaccaagggtgatggcgaggcggagatcgaggatgagcacatgaagggaaatgatgatgctgtcgctcacagcacgaaggcgaatgacaacgacatgggtagtgctggatgtggtcgaatccgttcagagcttcacttcggcgaccaccagatcgatattgagactcgacggcagcgcaacaccaccacgggatgggggcaaactggctatgatggcctaggtcgggtgcggaggctgacagcagggaacttcatgatgggcagcgaggctcgacggcgaacgagggagatagcgcggactggggaaggactcggcaagcagcaggcgtgggcgagcggagcaggcaagacaccaggcgttgcgggcgagcaggaaaaggactcggtgtgggagttcgacgcgtcgtggcgagcaaaggggcactgccgcgcataa

SEQ ID NO: 7098 - DNA, 639 bp, Zea mays
  Peptide Sequence Number=SeqID_50473
atgggggacttgtggaccaacgtaagggctgatctcgcaaagatgcaagccatgctccagaaggttgagcaagggctgctgcaaatcaaggtagcagtgcaacatgagcagcaccggctggtgttgtccacacggctccagacgtcggcggttgtgggcatacaagctgctgctcgtggcttccttgcacgacggagaacgcgggagatgcgccggcagatgctcgaggcagccttggtcacggttgacctcggcacacgggggcacgacctcgccctgtcgaacggccatcagcagcggcatcgggccgctatctccaagtgtgagcatggtacgtgtcccgcgggcgacaaacttcaactctacggcagcggcggtaaggaaggcacctccctcgtcatcggcaaggacgcactacttagcgccaccacattccgctaccggccgccacgagggcgccttcactggttattgttgcgacctattccaggtcaagtagactcagtatttgaacactcgtcatgctgcagctcgaggacgagctgcttgtccaggaggggtgtagtgtcagggcctaaggaggcccacgtaggggctacggtagcagcagcgatgggccctctaaggaggattagataa

SEQ ID NO: 7099 - DNA, 465 bp, Zea mays
  Peptide Sequence Number=SeqID_50474
atggcagcatggtaccgcggctgggggtggcttgtgcaaggcctcgctagcggtgcctgccatggtggtgcacctagcagcggactgcaacgactagtgctagatgattttgtgcccaagtggagttgcgttgatgtcataacagtggcggacccagagggtatgccgggtatgcaccggcatatcctgcaaaaccagtgtcgaatgcacatggcccgtaacgcgcagcggccacgcagggcctgttataatgggccggatcacacgtgggcctccatgctgggcgaggtcgcaagatgggacgacctcgtcacaggtcttcgtccgatgtcgtatgggacgaagggtgagcctgtccattgtcttgtctccgttggtccaacgattgcggcgaaggcatcgagcgaagggtggcgtcttcgccttcgccccaacatttgccctccgagggaccagttcgactaa

SEQ ID NO: 7100 - DNA, 462 bp, Zea mays
  Peptide Sequence Number=SeqID_50475
atggggaagggtaacaaacgcaagcgtgagccgactcctccgtcggaggacttcggcgacttagaatactcggaggaggagttctcctccgagtccgaggggtctccggctcccgtctctcccccggcgtcgtctgatgattcagacgactcccaggggattgccgcggaagtctggacgtacatccgggccgtcgagcgctccgggctcgagggctcggatgagtcggagttctcctcggacgaggaggactcggacggcggcgaggacgaggatgacgacgatgacgacggcgacgacgacgacggtggcgacggtgacggcggcaagggcagcaccagaggcggcagcagcacgggcagcaccagaggcggcagcagcaagggcagcaccaggggcggcggcggcaacgacagcaccaggggcggcggcggtggcagcagcagcaaggccagtggctaa

SEQ ID NO: 7101 - DNA, 162 bp, Zea mays
  Peptide Sequence Number=SeqID_50476
atggggctcggtgtatgcggctcgctctgccaaggtggcaatgagattgatggttctggttatgactatggtgctggttgtcagcattgcaaccactgctcaggagaagatgaagctgtggaaggagacttccaggagttccaagattacgacgagttctag

SEQ ID NO: 7102 - DNA, 753 bp, Zea mays
  Peptide Sequence Number=SeqID_50477
atgcatcgcgtctttccaccttccgagcccccagatggggggcgcccgcggttcttccgccttgtcgtcgttggaggaacgcaacttcgcggaagttggtacctttcaaccatcgttcggcttcaaggattttcatcaggcagaccggctgcatcccctccccggtggtcacccaagacggtgaccaccagttccagggtggggagaagcaagccgggctgcggcctctgcccctccctcagcttcaaggatgttcatcatcagtgctggggaggggagtgcgccgagttggggcctgtctctgcgcgggcagtggcccgctccttccctcagtggtcgtggggaagggcgttcgccgttcgtggcgctggcagctaccgcgtgtccggctctccggcccgagcggcttcggcgccgcttccggtgccacctcccgccgaggcaaccggaagaggtttctccgccgacgagatagtcggtgccgcccgcggactgacctccaactctacggccttctgcttgtcctcgcccctcgagtggggacgtgggcgagggccttgtggcagcagcatccgccctgaggtcatcgcttctgctgttcggctgctcggagcagaagttgttgtcgctgctgctcttcgggcgacggcgagccatccgtcggtcttctgttgctccgcaggccctccaacgtgggggattgttcgtacctgcggaggcggaaccggagttccgtttgtaatggcatcttga

SEQ ID NO: 7103 - DNA, 660 bp, Zea mays
  Peptide Sequence Number=SeqID_50478
atgagggcccaggcccacacgtcatgtaaccggcgcgccggttactacgtacaagaaactgcaccgccactcgcgccactaccgcgcctcctcgactgcggaaccggtaccgcgactcgaggcaaccctgcgcatgacccaacagtgccaaccacgcacatcggtcacgggtcagtcagccgcgggagaaggcgcgacggtcgatacggccagaaatgggccgacagtaatggcggtggtaggcgggcggaagccgccgtcacgtcgtcagcaagctcgcgccccctcctgggacagcgagaggaccctctcccacggcgtgaagacgacgcgtccgcgttccgttcctcgaacggctcgcgcacgcacaacgaccgccccgtgaaccactcgtccagtcgcattaactctgcgacaggacaggcaacacctttgggatcgggaaaggggatactccgaaagggatccttctccgcgaaggaagcgggccccgagccccctactgataagaggttcgaaggctggcccctcggaagggttcaacagccgcctcagagcactcgggttctgcgcccactactggtcagaggttcgaaggccggcccctcggaagggttcaacggccgcctcaggccactcgggctctgcgcccactactga

SEQ ID NO: 7104 - DNA, 297 bp, Zea mays
  Peptide Sequence Number=SeqID_50479
atgtttctagggaccgtagcagatctggagaagtcacgcaaagagaacgatgttgaggatcacgctagcctctccgccaagaagtgccaggaagcgggactgcgggagtatatggaggcatcagccttgaaggaggacttgtgcgccgataatggtggcaagggcgggatccgccgcgcgcaggtggaggatagtgacgtccacgtcgccgaccgtggacaggggcatggcaggcgacaaggtggaggtggaggcaagggagagagtctgggacactatcacagacacgagagataa

SEQ ID NO: 7105 - DNA, 591 bp, Zea mays
  Peptide Sequence Number=SeqID_50480
atggggcacgtgcgtccactcggattacccgttagcaactcactggagacaccatgttcggcgccctccgagggcaacatggcgctttcccccctcctccttgcggaaaggcgacgcaggggctcacttcgccgctccactgaccggcctgacaagaagacagtgccgcctgcgtcgctccgactgctgtgccactcgatagaggtgaggctgacagcagccaagtccggcctcgggcgccataggaagctccgcctcgcccgaccccagggctcggactcagcctcggctctggaagacgacgaactccgcctcgccccgaccctagggcttggactcggcctcggctccggaagacgacgaactccgcctcgcccgaccctagggctcggactcggcctcggctccggaagacgacgaaactccgcctcgcccgacccgggggctcggactcgacctcgacctcggagaagcctccgcctcgcccagggctcggaccgaccacgacataggggggccatcattaccctacccctagctagctcaggctacgggaacaagaccggcgtcccatctggcttgttccggtaa

SEQ ID NO: 7106 - DNA, 111 bp, Zea mays
  Peptide Sequence Number=SeqID_50481
atggcaaaacatggtgggaaggtcatcgagccgttttactccaaggctgccgttactccgctggcgcacctgacagtccggtgctacaccggacagtctggtgaattatag

SEQ ID NO: 7107 - DNA, 843 bp, Zea mays
  Peptide Sequence Number=SeqID_50482
atgtcctcgcactttcctcatgcatcgcgtccttccaccttccgagcccccggatggggagcgcccgcgttgcattcgtcttgtcgtcgttggaggaatgcaacttcgcggaagttggtacctttcagccatcgctcgtcttcaaggattttcatcaggcagcccggctacatcccctcgtcggtggtcacccaagacggtgaccacgagttcgatggtggggagaagcaagccgggctatggcctctgccccgccctcagcttcaaggatcttcatcatccttgctggggcggagggcgaggcgagctggagctctacctcccgcacgggtcggcgggccacctcttcttccagcttctgggggtggaaaccatcctccagctctgcggaggaggcgccctccaaccatgtcggggaaggcgaactgttgctgcccagccagggtgcaacattccgtcctctgtcctcattttcgtggtgagggcgagagtgaggacctgccggtgcgctttggggcggccggcgcttgctggtgcggtgtcggtggacaggtggacgccgccatcggtgctgaggtggtggcagctggagaaagcttctccgctgacgagaccgtcagcgctacccgcggaccaacctccggctctttggctttaatgttttgttctcgtcccttgagtgggggacgcgaacgagagccttctggcggcaacgtccgtcctgggtccatcgctgctgctgcagaggtcgctggcgagtcgctcggagtttgtcgtcccgcaggctctccgatgtggaggttgttcatacccgtgggaggggaaccgaagttccgtttgtaa

SEQ ID NO: 7108 - DNA, 519 bp, Zea mays
  Peptide Sequence Number=SeqID_50483
atggccaagcaggaggcgagccgaagtgaccgcaatcacttcgccgctccactgaccgacctgacaagtggacagcgccgcctgcgccgctccgactgttgtgccactcgacagaggctcggactcggctcggccccggaagacgacgaactccgcctcgcccgaccccagggctcggactcggccttggccccggaagacgacaaactccgcctcgcccgaccccagggctcggactcggccctggcctcagccgacggtctccgcctcgcccgaccccagggctcggcctcggcctcggccccgaaagacgacgaactccgcctcgcccgaccccagggctcggactcggccctggcctcagccgacggtctccggctcgcccgacccaggggctcggactcgacctcgacctcggaagacagactcgaccttgacctcggaggagcctccgcctcgcccgacccagggctcggaccaaccacgtcgcaggaggggccatcattgccctatccctag

SEQ ID NO: 7109 - DNA, 51 bp, Zea mays
  Peptide Sequence Number=SeqID_50484
atggcagtgagcaagctcagggaaatccgaacgatgcagtggcgctattga

SEQ ID NO: 7110 - DNA, 1542 bp, Zea mays
  Peptide Sequence Number=SeqID_50485
atggacaaggatcgccaaggggcggcgcaaaaacgccaggcgactatcagggttcacgaagctcggccgaaaaggcagcggggaacggcgaaggctgcggcctccggtggaggcaaaccgccgttgccggcgaaggcgggcgcctctgcacctagcaaggcgccggaggcgacggtgggcgccggaggctccaaactgacgaaggtggtgccgccggccagcggagtggcggaggctgcgaaggtggctcggacgttgccactgccgggcaaacgcgttgccgacttcggcaccgagattaatgtggatgattatcttggggggtcgggcgagggccagcttgctcttgctgcgcctggcgcggcgactgtgacagctgcgctagcgccgaaggcaaggggtgagacccttggcgtcggaggcgaggtgtcggccctcgcgctggtcagggacgaggcaggcgcggcgacccgccggctgaagggagtgacggaggcgttgagtcaggcgacggaggcgctgagtcaggtggctgacttcaccagccgtactgcgtcgggggcccttacggcagctttgtctgccgaagtcgagagacttcggacgcaacatgctgacgctgtccgtgagaagtcggcctccgacagcaagtgccgtaaactggcggacaaggtggccgccctggagaaggagaaggctgacctccggcgccagctggcgggggagaggagggaggccaacgaagccatcgccaaagagcaggctgcgcaggcggaggccaagctggcgcgggcggaaggcaatattgccaaagagctcgccggtcagctgcagcagcggcttactgccctggagagctgcgcgaagggggccgaggccgcgatgcgggcggaggccgaacggacgcgcactcagctggtggctacatatcgcgagctgggtgcgcggactggtgacttcgaggtgccggagcgcgagcccgagcttcgctgtctcgaatgggtgcaggaggagctgcaggagctccccactgtcttggaggggttaatgtcgttcgcctccctggtcacctgcgaggcggcgatgaacgcactctctcgcgaagggtgccggcactttgaggccctcgaccaggcagatgaggattttgggcgagatatctttgaggttgaagaccccgtggtgaaggaatccgccggggccctctatgaccggatgtggggttcgtacggtcgtgaggtggcggagcgcggcgagcgggtggacgacttcggggcactgaacagcgcgttgcctgacccggagacgacccctgcggaggccgcgactggagtcgccctgggaccgaccccggagactgcggaagacgcaccagtcgcccccgcatctgctgcggccggcgaagacctgcccccaaaggtggccgaaggcgcgcctgatgcccccgcagctgctgtgccgagcgttgaagatcccgcggcggtggaggcggaggcagcggcggaggctcccgcagcggcagggccttcgcaggtggcgtag

SEQ ID NO: 7111 - DNA, 579 bp, Zea mays
  Peptide Sequence Number=SeqID_50486
atggagcggacactcacctgggacacgtacccgcgctcgggacgcatcatgggctgggtaagggcgctggcatccagcctccctaccatgaccgctacccgcctgcggaggtcgtcggcggagagggaagccgaggacatctgcgaaccctccaagtcaatccccggcttcatctccgaaagcggcaaccgccgctctgccaaaggaagcaccctccggcgatggatggcggcaaccacccccgcagcggtgagccccccatctcgtaacctctgcaaggcctccagaagagactggagcttctcctatttctcgcgtgtggcccccccaatgccagttgctgccggtggcggtcaccactcattgagagaacgacgggagccttccgtcgtcgttacggaggtaaaaccaccggcgctgccaccccttgttcaaagacacaaggatggcagggatgtacagctgcgcgcgccccggcctcagctggagcgtgcagccaccggcccgcaccgccatacggaccttcttcgcctccgtcgtcgaggcaaagagctccgcggagaagcgatgggtccatag

SEQ ID NO: 7112 - DNA, 1068 bp, Zea mays
  Peptide Sequence Number=SeqID_50487
atgaaacggctcgctggcactctgaacccctgctcgtggaaggagacgaaactgaccacataccccggcagcggagtcgggtcggcctcgctcgcaggggccatccactccggctacgggtcaccggagaggggacggagcaaaccatcggtgacgagggcctccagatcgtccactgtgacggtggagaaaggccacggatcgcgcggcggaacgacggtcaccttgtcaaccatcgctgaacgaagggggtggaggcagaggggacaagggaccgggaaaggggatatttcgaaagggacccttctccgcgaaggaagtgggccccgagccctcctactgatcaggggttcgaaggctggcccctcggaagggggttcgaaggctggcccctcgaaagggttcgacagccgccccagagcacgcagagtgagggatgactctaggagcgattttgtaacggaatcccaccagagggaggcatcgagccctcggaccctatcgaacgggtccgggtccggcaaatcacctgcagagactgatgggcacgatttaggtcaatgcttcgtctacccaaggggcgcgatctcgcctcgcccgagcccaacctcgggtgggaactgtagtcccagacgaagttacatctcgcccgagggcctcctcaggcagtgggcgcaccctcggcacgcccgaggcccaactcgagcaggcttcgtcaagaagcaaccttggccaaatcgcctctccaaccgaccgtatcacaggcgcattcaatgcgaggatcacctgacaccttatcctgacacacgtgcctcagtcagcaaggtcgaagcctcggcctcagaaggaggtctccgcctcgcccgaccccagggctcagcctcaacctcggcttcggaaggtggtctccgcctcgcccgaccccagggcttagcctcaacctcggcctcgggaggaatcgcgtcctcgcccgaccccggcctcggcctcaggagaagtctccgcctcgcccgaccttgggctcagaccgaccgcgccacaggggatacatcattaccctacccctag

SEQ ID NO: 7113 - DNA, 168 bp, Zea mays
  Peptide Sequence Number=SeqID_50488
atggaggcgctcccggctgatgaccaaaggccctttgaagacctcgtaatgcgcgatgagaaggaggtgatgcggcaatggaacgaacaacgcgacaaggaagaggcggaactgctgcataaactctccaaacggcgcaaggaggcggtggacaaccgcaaccactag

SEQ ID NO: 7114 - DNA, 249 bp, Zea mays
  Peptide Sequence Number=SeqID_50489
atggcggtgaagcgcgacgacggctcggttcaacggtggcggacaacggcggctgcgtggaggacggcgggtgagcgcgggcagagaaaatcagggagggagaggagaaattggagcgtgtcccgagttgcggacgtcgaggccaagctcaccgtggccgagggcacggcggggctccgacgtcgacggggaaacgggctcgggacggtggctcctctctggcgtgcaaatgagggaaggagagggtga

SEQ ID NO: 7115 - DNA, 416 bp, Zea mays
  Peptide Sequence Number=SeqID_50490
aggagccggcaaaaccgatagagcaagaggtccccaccgaagatttactcgagccaacggggtgccacatgatcttcggcaaggctgaggcttacgacaacaagcgtcacatcaaggccacccaccgcatcccgcatcctagggcctacccccttgccgtcgatccgattgtagcctctaagcgcctcaccaaggtgctcatggatgggggaagtggcctcaacatcatgggccagggccgcacgccggacaggggccgcgccggggaccacgctgcccggggcaggggccacacgccggggctgaggggccacgcacaggggcgccagggagtcgcgcccgaggggccgggggccgggcggggccgcgccgtgcaaggtgagcagggggaggggctgccgcgccaggggggctag

SEQ ID NO: 7116 - DNA, 1266 bp, Zea mays
  Peptide Sequence Number=SeqID_50491
atgagcagccacgcggttggaacaagcaacggcggatccggggatgcggccgccgggggcgcggccaggaggaacaccaggatgcccaaatattccaagttcacacagcaggagctgcccgcttgcaagccgattcttactccaaaatgggttgtctctgttttcttaatcgttggggtcatctttgttcctattggtgttgtttcactgctagctgcaagagatgttgttgagattattgatcggtatgatgaggcatgtgtgccagttaacatgactgagaacaagcttgcttacatccagaatgagaccatatccaaagagtgcataaggaatcttacggttacaaaatatatgaagcagcctatttttgtgtattatgaacttgataacttctatcagaaccataggagatatgtaaagagccgaaatgatgcgcaactaagagatgctagtaaagctaaccagacatccgcttgtgaacctgagaagaccacagctaatgggcaaccaattgttccttgcggccttattgcttggagcttgtttaatgatacatataatttcactcgtggtaatgagaacttgacagtggacaagaaagacatctcctggaagagtgatagggagcataaatttggtaaagatgtctatccgagcaacttccagaatggtgcacttaaaggtggagcaacacttaacccaaagatcccgttgagtgagcaagaggacctcattgtttggatgcggaccgcagcacttccgacgttcagaaagttatatggcagactatactttgacctcaaggagaatgacacaataacagtgagattgaataacaactacaatacatatagctttggtggcaagaaaaagctggtcctctccactgcaacctggcttggggggaagaacgattttcttggctttgcataccttatagttggtgggctctgcattttcctggcatttgcattcaccttgctgtacttcgtaaaaccaagcccattttatctgtgcatcttttattgtcagttaaaggttgaggtagccctgagggctaaggctgtaggctgtgtgggaaactgggagaccacaactacttatcctggaacagacgctaggatgtttcggaacaccaagtgtccgtactactcgaaatgtagcttgtatgaaatgaaatgctctgaaccagaaatgtcgatgggcataagcaagcatggttcaggaaagaacttcatgtatattttttacgaaggggtctag

SEQ ID NO: 7117 - DNA, 318 bp, Zea mays
  Peptide Sequence Number=SeqID_50492
atggctgacattccggaaggagcacccgtcatgactggtatcttttcagttttgaaatatcctgcaattattctttttgattctggtgcatcacatagttttatcagtacaaaatttagtgccaaatgtcagctacctttccatcacacaaatgggggtattacaatttcaacaccaacaggatccaaaatccatccttggcgccagaaagtcaactgggagaaacgccacctagatcagatcaaacccctcgcttttgtggctcctcctgaaccacctgttcttctcctgtgggggggtgtgagacagcaagggtga

SEQ ID NO: 7118 - DNA, 750 bp, Zea mays
  Peptide Sequence Number=SeqID_50493
atgacttctcacggatcctcggacgaagggaatgcacagtctcacacggacggacttgcacgagagggtttcccccgtatcttgtgggaggtacttcagggagctggttacacgacgcctccccaggctgaggatactatcgaggcgattgcccttcacggactgaccaccttctttggattccaccccttggagctgtccactcaccccattggtttgttccccgtggagaaggaggacaacccaatgtggaaggaccgagtggagcatgccaaggatatatgggctatctacctaggtcagaccgctcacttgacggtgcggtgcatgaatgccctgtatcgtcttcaagtgatgcgaggagaggcaatgtcccatctgatggcattgttggaggctaccaagatcaccttggataacagagaggaacttgtggtagacttgtccactgagatggtggaaaaagacttacaagtggagcaattgtcaaatgagatccaagagcttgacgagttagtgggaaccagggagaacaccatcgaggttctcgaggatcagcttatcaacactcagcagcatcttgcggaggctaaccagcatctggatatgcaccatcaggagacacaggacatggaggccaacgaggatgtcgacatcgagggaggagaggagcctgcctccagcttggacactgctggctcagggagaccaccttcccctgagtcgagcattgcctcgtttgctcactag

SEQ ID NO: 7119 - DNA, 675 bp, Zea mays
  Peptide Sequence Number=SeqID_50494
atgggggagcctgtcccatcactcctcgtgctcctcctctgccgaggtttgaggtttttgcctaagcataatggattaagacttggattgccccttaaatgttttagtaggcactcaaggggttttgctggtttggttaggagactcacacggtccacgtgctccggcgggattccaaactccggcgagcacgattgcgctattctagtggcgggggtcctttgttcaagcttgggcaagcttcacggcctcttagtggagctatctaagggcttggatcgagcagaggagggcgggaaagggttcagccacagtggttgcccttgggcggctttggcgggtcgcgggaaggtcgccggagctatgggcgagctcgggggcgtttggcgtggtagagaggaggcaacagggaagctagccgggcactggggagggctttatagccgtggcatgaacgtggtcacggggcggccgcgggcgcacgggcgtgctctgagcgcgcccccgagtgtcagccctcgtcgaacacgtgtgggtttgcttctgccatggttcaacggccgatttgaacgccttagcgtgcagatcttggcaaaacccccatgtacggtctcttccctccaccaaatcctaccttttttatgtgagttccaagcaaggatacggtcggggtag

SEQ ID NO: 7120 - DNA, 417 bp, Zea mays
  Peptide Sequence Number=SeqID_50495
atggccacttcaacgctgggggctggatattgttgggccactacccacggcccaagggaacctcaagttcaccttcgtcgccgtcgagtattttaccaagtgtatcgaggcaagggcagtatccacaataacgtcaaagactgcctagaaattcttctgggaaaagattgtttgccaattcggagtcccgtccgagctccacattcgacaatggcaaacactttggcctccgccacttcagggacttctgcttctccatcggcaccaagcttgccttcgcctcagtatatcacccacaatctaacggcatcgtggagcgcgccaacagcaagattttcactgccatcaagaaaaatgcttctcgacgacaagaagggtaaatgggccgactactacctgaagcagtctgggcgctga

SEQ ID NO: 7121 - DNA, 1149 bp, Zea mays
  Peptide Sequence Number=SeqID_50496
atggcttgcctcagaagggccaactcctgctacatggcctgcatcgcggctaacattgccgccggactcatcgagtccccactaggagcttgcagactacctggagccctacgaggcggcatagctacagccacagggatgagaataataagtgtagtggccgtcagtgccggccctggcggggggcagggtgtgcagccgccctgggcctcaaaatttgtggggccccctagatatgtacaccgcaccagctcacgcgtcgcactgtcgcagttgcagctacagctattcccaaacagggcgctgttcccaaatcccaactatggaatctggttcagtcgccgttgcgctacttcagtatgcatgtcgccttgggccttgcacccaacccaagtgaccgagaagagcaaattgctttgtgcaatcatgccacggagaaaggaaccatccggtagtgaaaaaaggaaaaagagaaaacgggtggatgatttcattgaatcgcagagaggagcaatggataaatttgtaaagagtaattctagtgcatcgatgaatccaaacaatgaattggcaatagttgtggaggaagaggaaccaggtattgagatttctgaagaagagggaaatgttgacaccgacaacttcgatgataacaatgtaagtggtgctgaaaatcccaatatttcatcagaagcacggacacaacctactaatgttgatgaggagccggtttatacttatgatatctatgatcctagaaattgggatcatcttgataataaagcaatagatatattagttgagaaagggcctataagagagcaaggtattgagtttcctctagatgatgcctcgagacatttctcatatactcattattatagaaaattaagcaatggagagatttttaagactagtggtagcaagagtcagagtttcttagcacatgatggatataaaaattggaggcatatcagtgagaagcttaaagagcatgaaaatagtgttgatcatattagtaatatgaacagaaagaagcttttcaaaattgaaattattgaagaactatttgaggtcaacaatgtctcaagaaaggttaaatcatttggcgactttatgcatcgagaaaaaattattggacgagattga

SEQ ID NO: 7122 - DNA, 369 bp, Zea mays
  Peptide Sequence Number=SeqID_50497
atgtcgttcgggccggtgaaccatcagcacaggcgcggtctcttctacagcagtgcgatccggcgcttcaagaggtcgccgaccacgtgcatcgacgttaggccgcccgtagccaagcccttgatcctgtccaatacaggcaggaagtatggcaaaagggacggcttggtcctccactgcttggagtcgagcgctggcccatcgctcggcaggacgaggcggtcgttggcctcggcgctggtgttgggtctatgcttcgtcgccgaaggtcttcaagggagaagcggcttaaaatgtgtgagcaggtatcttcggactcgtatcagaaagggaaaagctacaaaggttgacacagcgccgaagctgtga

SEQ ID NO: 7123 - DNA, 648 bp, Zea mays
  Peptide Sequence Number=SeqID_50498
atgccgcgtacgaggaaaaccgcgcttaagtccaccggacctattggcgtgcctcgtcatcagttggctccaagacatgaagggatcagcagcggcagcaacgatccaatcagagacttagaagcccaagtggaacagcttcggacggagttacgtcaccgaaacagggtgtgggcagaagatggtcagcgtattaatgagttggcagctgacgtcagacgcctggaagacaagcttgttgaacgggatctggcggtcgattgggccgtcaactcacgttcggttgcttgggatcgggaagccaaagctcgtgctcgtgtgaccgagcttagtgcggcccttgacaacttgcagatgccatcaaggactcgtgcgcatgacgtgcgggtacttcccgtggtcaggaagatactcctaatccaccacttgtaccaccaatgctggccgaggctatcgctgccttggccaacgcgactgcagataatacccgctttttacgtgaaatggcgggtaaccaattccagcagcaaggcggaagggctcctccccagggaccgcgtgaaacctcatacttggacttctcttaaatgtctcccccactcgttaaagctgaagatcctcttgaagctgatgagtggatcagggtaa

SEQ ID NO: 7124 - DNA, 936 bp, Zea mays
  Peptide Sequence Number=SeqID_50499
atgaatgcgttgtcccgcgaggggtgcaagcactatgaggtcttcgaccggtccgatgaaaactttgggcgcgaaatttttaaggacgaagaccctgtggtgaaggattccgcgggggccctcttcaattggatgtggggtcctcatggccgggaggcggttagggagcggtctgatcgggcgagagagcagatggcgcgtgccgaggatgtcgaagaccttgggggtctgaacggcgcgcggcctgaggccgaggtcaacccggtgctgcccgaggctgaggtcaaccctgaagctattgagggctcctccgccggatctatgcccactatgtctggtgaaggctccttgccagcccctgcgccgacggcggagggccccccgaaggcggtggcagagctggcagcggaggatcccaaggcggcggcagggccttcgcaggttcaagattttgggcctgcgcacgcaaccgctactgatactgctaattttgtggcggcttcgaccgtggttgcggaaaatgattcgggtgattctgtgtctaagttttttgagtctgatgattctgggagtttggtggtgtggacggaagagtcttcggatgatgatttggattattttgcggcgttggatgtggctgcggcggaggcttctccgcgtgtggtgggtgctgaagttccgggtccaagtgttgggtgtaggcgtcgaagggctttggtgaagcgtagagtgagtgaggtggagggtggtcatcctcgtgtggacaggactggcaagcgggaattgttgtcctcgctagctggggcgagtgtaggtgagggggaattgcgaagtctttttgagggtgaggagctgaggataatgctgtttaactatagggagatgggtattatcccgaaggttgaaccaatattaggtgtgatgccctcgctgtac

SEQ ID NO: 7125 - DNA, 495 bp, Zea mays
  Peptide Sequence Number=SeqID_50500
atggtcgggagagccagcaattcctcttgcagccactcgaggaagcgaaggcccgcctctcggtcgggcacctcgaagtcagcagtccacgcacccagctcgcggtatgagtccacgagctgtgtgcgcgtccgctcaacttccgagcgcgtagaggcctcggccctctccatgcggccgtgcagagcgttgaaccgcacctcccattcctcagcgcgttggctggcgagattcccctacgcccgcgccaatttggcctgcgcctcggcgatggcctggttggccttcctcctttcctccaccagctggcgccggaggtccgtcctcttgccatccagggcggccaccttctccgacagcctgcggctcttgctctccgcagccgacttctcccggacggcgtccgcgtgctacgcccgaagtctctcgactttgacagacacatatgcagtaagggcacccgacgccacacggtcggcgaagtcggctgcctaa

SEQ ID NO: 7126 - DNA, 675 bp, Zea mays
  Peptide Sequence Number=SeqID_50501
atgtcttcgcccgagctccgggagtcttcggcgcggatgctggaggttaccgggggtcgatggcccaagaacgttcctatcccccacgcggctggcgaagacttctttacgtctcgcatggctcgtgacttgagagtgtttacttacgggcggaatattgctgctgttgtgtcggcagtgatgaacaaggatcgccaggatgctgcgcagaagcgccgggtagtcatcaggctccccgatgctaggcgtgaagcgaagagagcgcgggggagtgtgaaggctgccgtccccggcggtagccagccgacgctggctgcgaagcctgccgcgcctggatctagcaaggtgccggagagcacgaaggcggtcggtgccggcggaaccaagtctgccccggacagagctgcgaaggtccgggagcttccttcgccggggaaacatgttgtcgactttggcatgaatattagcatggacgactatctcgttgggtcgggcgaggggcaactggttgttgtcccgcctgcggtggcaaccatggagtcaaccgcggtgcttggggtgaagggtggcgctttcagcgctggcggcaagatttcggtggccactgctgtcagggacgaagcaggcaccatgtcccgccggctgagggaggcgtcgcagcagttgtcgcagtag

SEQ ID NO: 7127 - DNA, 1044 bp, Zea mays
  Peptide Sequence Number=SeqID_50502
atgtcttcgcccgagctccggaagtcttcggcgcggatgctgaaggttaccgggggttggtggcctaagaatgttcctatcccccacgcggccggcgaagacttttttacatctcgcatggttcgtgactggagagtatttccttatggacggaatattgctgctgttgtgtcggcagtgatggacaaggatcgtcagggagctgcgcagaagcgccaggcggtcgtcaggctgcctgaggctaggccgaagaggtcgcgggggactgcaaaggctgctgccctcggcggcagccatccgacgctggcggcgaagtctaccgcccctgggtccagcagggtgccagaggccgtgaaggcggccagcgccgatggaaccaagcctgccccgaccggagctgcgaaggcccgagaattgcctccgtcgggcaagcgcgttgccgacttcgccaccgagattagtgtggacgattatctcgttgggtcgggcgaagggcaacttgttgttgttccgcctgcggtggcgaccgcggcggctgccgtggtgcccagggcaaggggtagcgctctcagcgccggtggtgagattccggcgctcactgccatcaaggacgaggcgggcgctgtgtcccgctggctgaaggaggcattgagtcaggcggctgatttcgctgaccgcgtggcgtcgggggcccttacggcggttgtgtctgtcgaagtcgagagacttcgggcgcaacatgcttacgccgtccgggaaaagtcggccgccaacagcaagtgccgcaagctggcggataaggtggccgcgctggagtgcgagagggctgacctccggtgccaactggcggaggagagaagggaggctcatgaggccctcgctaaggcgcagtctgcgcaggcggaggccaaattggcgcgggtggagggtagccttgccagacagcgcgccgaggaatgggaggagcggttcaacgctctgcagacccgtgtggagagggccgaggcttcgacacgctcggaggctgagcggacgcgcaaatag

SEQ ID NO: 7128 - DNA, 546 bp, Zea mays
  Peptide Sequence Number=SeqID_50503
atgaagagtgccttcctcaatggccctatcaaggaagcggtatatgttgagcaacctccggactttgaagatagtgagtatccttcacatgattatgatacagaaattcgagatgtcaatgatgggagagttgaaaatgccaaacccatcaagactcccatgggaactaatgggcatctcgacctcgacatgggaggtaaatccatagatcaaaagggccggcgcgctaaaattcaccggactgtccggtgtacaccggacagtgtccggtgctccaacaggacgcggctcaggaactcgccagcctcgggatttcacgaaggctgctccgctataattcaccggacatgtccggtgtgcaccggactgtccggtgcatcctcggagcaacgactacttcgcgccaacggctaccggcaacgcattaaatgcgcgctgcagcgcgcagaaggcaggcgcgcccataccggcgcaccggacaatgaacagttcatgtccggtgcgccaccggacatcgtggcggacccagaagtcagaactccaacg

SEQ ID NO: 7129 - DNA, 243 bp, Zea mays
  Peptide Sequence Number=SeqID_50504
atgaggaaatggctcaagaagaagaggatgaagaccaagacgatgagccacctaaagaggaggacattgatcaaggtggagatgaagatgatcaagacaaggaagatgatcaagagatttaggatcaaagaccactgcatccaagagtccaccaagcaattcaaagagatcacaccgtcaactccatacttggtgacatccacaaggaggtaccaaatgggtattccgcaacaagcaagatga

SEQ ID NO: 7130 - DNA, 255 bp, Zea mays
  Peptide Sequence Number=SeqID_50505
atgtgcagctcccatcctgccacattacaactgatgacgagtgcgtctgtgtggggcaagctgcgaaggttggtgtctcttgcgtcgaaggttaatgtgtgcaaaaaattcaacaagggtcaatacctccaaaatgagctcctcatgaacgcagtcatgaaaaataaaaagagtggtaatggatacaattcatttgtgcaaaagaaagcaataaatcaaaacaaggctaagcaaaatcctaagcacatcaagtga

SEQ ID NO: 7131 - DNA, 477 bp, Zea mays
  Peptide Sequence Number=SeqID_50506
atgggaacagaagcagtgcgtgtgctccggtgctggcgagtgcggcgagactggcccgacgacgcagggttaagtgaggggcagtccgagctgggcgccatgggagatggtggtcggtaccggcgtttagaaccagcaactggtggagctcagcgccgtggaggagcaggagatgggacggcgctggggcgtggcttgggaaatggcataggggaggagtcggccagggagttcaggcttggggagctgtggtcgacgatggaggctgggcgcagggaggcgcgcgctggagcagcgacgcgggcggccgagctggagtcgggcgcaatccgagctgggcgagctgggcgcgcggccgactggagcagtgcgcgtgcagagggcagggagggcacgggcctagggagaagacgagggaggcggccagcaggggagatgacggttggagagaaaaatggagagggagcttgcggctga

SEQ ID NO: 7132 - DNA, 366 bp, Zea mays
  Peptide Sequence Number=SeqID_50507
atgtacattgcgctggccaggaacgaagtccctctctatgtttctggcgacttgctggtctccgtatatggtgattacgccctgggggcctgggatcttcatgcacaggaaggggattacaaatgggcccgaacggtcagcaggacgctgcatgggccccgccatcagacgacacgatcctcgctgggacgcgacactctttgctctagggcgcagggtctttggtccttgccaaggctcttgcccagagccacccaagctggtgacgtcgacgagcgaagtcatgaggagcgcccgcttcaaacagtagatcccttcgcttcaaagccttcggtggttcttagacggatacctcggctttggtaa

SEQ ID NO: 7133 - DNA, 645 bp, Zea mays
  Peptide Sequence Number=SeqID_50508
atgagcacgggcccacgtgccagagagagggggagggcgaacgacgttgggcggctgacagggaggggagaaccagtcggggagaatccaaccgccgatgaggttcaacggcggttctccgccgttgttccggttatccatgatagaggagggagtagcagtggaagcaacaatccaataggggatctggaggccagggtggagcgacttatgtcagaactacgccatgggagtagggagcgtgcgcgagatagccgccgcattgctgagctagtggcagaagtttatcgcttacaggaggaaattgcggaacgagatacgactattgactgggccgtaaattcacgctctttcgcctgggattgtgaggccaaggctctagcctgggtagcggaactaagcgcatccctggaaaatctgcaagcgtattgtaacaccatgcatgaagaggtgcacttgttatatgaccgactgcatccaaatgtgtcactagaagttgcagcaatggaagctggaccatctgaagcagctaatggagaacctgatggggagttggacctttttggagcccctccttccatgaaccttgcagatgaacgttctcccgaagctggcagtggagcggctaaagacgaagataattag

SEQ ID NO: 7134 - DNA, 741 bp, Zea mays
  Peptide Sequence Number=SeqID_50509
atggcgttaacattgtctgagaggcctcaagcaggaataccatctaaggccagacttcaggcaaatgaagccgagcagctgagcagcagcagcagatgggcgcgtggccgattggctgcgtcgtcctcgtccactcgtccgcgtggaagcaagcaagcagcagatgggcgcgtggccggctggctgcgtcgtcctcatccactcgtccgcgtggaagcaagcagcagcagccagcagggagcaccggcacaggagcaggcagcgcgctgcggcctgcgagcgacggagcgagcggccggcagcaagcggaaatggggcacgggcgcacgaccgcacggggactctgggagcactgcagtctgcagggcgcggagcagggatgcagcacagtccggggacggcgcggagggaggcacggccacggagccgagcgcgcggcgtgcggcgtgcctgcaggcgagcggcggcggcggaagaaactccgcctcgcccgaccttaggcctcagcctcggaaggtggtctccgcctcgcccgacccctgggctcagcctcaacctcagcctcggaaggtggtctccgcctcgcccgaccccagggctcggcctcaacctcggcctcgggaggaatcacgtcctcgcccgaccctggcctcggcctcaggaggagtctccgcctcgtctgaccttgggctcggaccgaccgcgccacaggggatacatcattaccctacccctaactag

SEQ ID NO: 7135 - DNA, 654 bp, Zea mays
  Peptide Sequence Number=SeqID_50510
atggcgcggtcggtccgagcccaaggtcgggggaggcggagactcctcctgaggccgaggacggggtcgggcgaggacgcgattcctcccgaggccaaggcgatcctcacattgaatgcgcctgcgatacggtcggttggtgaggcgatttggccaaggttgcttcacaacgaagcctgcccgagctgggcttcgggcaagtcgaggctcctggctacggcggcgggggttttcatctctgtgggcttcatctaccgccacctccaccgtggcgccagcaaccggcgcctgccggagatcgtgcccttcatgttatgcgtctgcgctggcgttctccatttcctcctgttcgtgggggcttcagcagcttcaggtggcgcggacgtggatcacggcgctgaagcccgcgcgcttggtctggctgctctccgtgtcctgcccgccgcggccacggtgaccttctttctgggcaccatgctgatattcgccgcgcgtatcagcgccggaggagaggagccggtccaggctcccgtgggcctccggctcctcagcaggatggctttggctgctgcggcagcactggtctgcatgatggccgtggccgtctacggggcctactgctcgaggctggaggtcgggatcccaggactgtga

SEQ ID NO: 7136 - DNA, 546 bp, Zea mays
  Peptide Sequence Number=SeqID_50511
atggaaggctcttggatcattagaacatcctactgcttagaggaggaaggatttcctcatctcttgcggagttgcgcgcttcgcatggggatccgcaagaagccggattatgtctggaaggaataccgcgaaaacggagttgagaagtgctctatggcagtctacctaggagaaagccgaagttatccaaaccaccctcctttccaagtcaccttcactggacaccacttcccagacacttgccaaaatgttgcccgaaaagccctccaacagctatgccaaaactacagcaaagagaggaaaagacttcaggccctgtcagggagagatcctaccgaggatgaccccaccatcgtctacatggccggatatctccacactctcgataaccactacgatgacctttcctcccactgcacccacgtaaactccagggtggaaagcttagagcagcaggtcaaggaacttaaaaaggagaaggcatccctccaagagtgtctcgatatagcagagggtgaagaggccaacactcgtgaagcctactga

SEQ ID NO: 7137 - DNA, 525 bp, Zea mays
  Peptide Sequence Number=SeqID_50512
atgctggtagactacacaacggtacttgatggaccaattgtgtcggtcgaaggcccgacgcagcagggtgtcgagagcgtcgtggaagtgacacccacgagcggcgtcacgagcgatgggtctagcgatccatccctccggctctggctcctccgagagctccgtgccatggctcaaactgccacaagcgtcgtcgtcatctccgtctctgtcagggtctcctccagcagccgggatgccatgtggtggtgcagggggtatctctggctagggtgtaggggaaggcgacctctcagactccacctcctgctgaggagagggggaagaatcatgctgctcctggtcctgctcctggcatcggcgctcctgctcctcgtgcaggcgacgatgcaatctctggaggtgactggactgacctggcaccgtgcgacacagtggaagctccgccaggcgagaaggcaaaaaggggatcacaaacttacgtgcagtgcacctgatacgggccatctacaaaagacatcgtaa

SEQ ID NO: 7138 - DNA, 951 bp, Zea mays
  Peptide Sequence Number=SeqID_50513
atggactacatgctgtttgaggttgctgaattggatggagcagcaatgatttgtcacactaacagcaaaatgaaagggaaatgtgcccttgggccatttctaagtattttggtgattgagtgccaacacaagtggactcaagttaatctatggataaagtgcaaatcaagtaaaaagactaatgtattatgtctaagtgctggaaacaggagaaatcaagttgaaaaagagatggctctgttcaaccaaagacagctcggtctgggtgcaccggacagtgtccggtggtgcaccggatgtccggtgtgccagaccagagtctgtcaactggctgctctcgggaagcaattaacggcgtacggctataaatcaccggactgtccggtggtgcaccggactgtccggtggtgcaacagtcgaccgggccaacggtcggccacagaatccgcgcgcgacgcgtggcaagagccaacgatcagaaggggcaccggactgtccggtgtgcaccggacagtgtccggtgcgctaacggctccaagactgcaacagtcgacttcgccaaatgaggaaagaaatccgcaccggacagtcccaataatgatagtgaccaggaacaagggaacaagagggaaaataagaaagcttacaataaggctaagggcgaggcacaccttggaaaggagtgggactcggattgttcgtcgtccgactccgacaacgaaggactcgccgccaccgccttcaacaagtcggccctcttccccaacgagcatcacacctgcctcatggaaggactgtccagtgccccaaggaagagcaactctgaactcgccaggttcgggaatccgctccgctataattcaccggacatgtccggtgcacaccggactgttcggtgagccagcggagcaacgactattccgcgccaacggtcacctgctacagcattaa

SEQ ID NO: 7139 - DNA, 786 bp, Zea mays
  Peptide Sequence Number=SeqID_50514
atggctcatagaagatcccaaaagaacaagaagacaactccaaaggagaacaaggagactaaccctttgaaggaagaagaagaaaatgaacgatggagaccaaacgatgaatccacctctccaaatggtttgtcttcccatttcgattcctacatatgttgtgtggctaatgaaaatgatagcggaagcacaaacgagaatgaggaggaagaaagaagcttcatgcaactctacgctcgcctaagccaagaagataaggcgatcatgctcaaacttctagaaagagcgagagagcaaagcgaagctcgtcaaaggctagagaatgttctctccttaaaaatgctatactttgacgagttgactaaagaacatgaggagctaaagtgctctcatgttgatttggtccaaagtaaatcttcctttgagctagaatttgcaggaacaaacaatgattcatatcaaaagctcaaagaagaaaatgagaggctaaaaaggagcttgacacaactaaaagggaagtgcattgctcaaccttcacaagataaccgtgatcacatggtgaagaagcttgagacgggaacaaccgaggcatgcactaactcccttgaagaaaatgtcaaggacttgaggattgccaagaggaaggaacaaaagaagaaaatcaacacctcttccaaaagcctcaaccatgcctccataaaaggtaacatccaaggaaacaaagaattaatcctatgccaaaaaatcaaggcctacaacatggaggaaagccaaaggatgatatag

SEQ ID NO: 7140 - DNA, 624 bp, Zea mays
  Peptide Sequence Number=SeqID_50515
atggctcctcctaagcagacaccccgaatgcgggttggaccacgaggcatgcccaagcatcatatggcctcccgtgcagtggagaccggcagtagcagtcgtgcacctcagtcgcaggattactctaatgagctacatgaggaagttcaccagctttactaccagttgcaccctaatgacgcgccaggagccgcggaggcagaaggtggtgttgtactagctgatgggggtgagcctgatgcaaacttagaggaagacgtagctcctatgcttgtaccaggtgttgagtctccaggaggcagtgatgtttctgagatagatagtgatacagaggatggggatggcacatcgcgtggtggtgcagaagctgatatcaaccctccaccaccactagttccacctacactggcagatgccattgctgccctagtgaatgccactgctaataatgctagggttttgcatgagattgctcatcatcaaaacaatcagggtggtcctcgtattccccagaatcatcaaaggaatgcgacatacatggagtttatggaaactcggacgccagtgtttgctaaaggagaagaatcacttgatgcaattgagtggctgcaggtgattgagtag

SEQ ID NO: 7141 - DNA, 195 bp, Zea mays
  Peptide Sequence Number=SeqID_50516
atggctgctggccagagctggagctcggcagcaacagaggggcggctggccatggagaagaagctctctactgaaattctgggcgccatccagggagcttcaacagtggggcgcttggctgctcttcgtggacagcagagggaggcaccatgttcggacatgagatatttggccgagtcagataaaattgattag

SEQ ID NO: 7142 - DNA, 345 bp, Zea mays
  Peptide Sequence Number=SeqID_50517
atggaggaccttgtggtagacttgtccaccgaattggtggaaaaggacctccaggtggagcatatggccacccaaatccaagagcttgaggagcaagtaggggccagggagaataccatcgaggttctcgaggatcagctccttaccacgcagcaacaacttgaggaagccaaccagcacttggatatgcaccatcaagaaattcaagacatggaggcagaaggagccgatgaggatgtcgacatcgagggaggagaggagtcgaagcctgcatccagtttggacactgctggctcagggagaccaccttcccccgagtctagcgttgcctcgtttgcccagtag

SEQ ID NO: 7143 - DNA, 324 bp, Zea mays
  Peptide Sequence Number=SeqID_50518
atgaccagggagaagaaagatacgggaagagggaaaagaagaaggcctacaagaaggcgaagtgcgaggtgcaccttggcaaagaatgggattcggactgctctacttccgactccgacgacgaaggactcgctgcctcagccttcaacaaatcgacactcttcccaaacgagcgccatacttgcctcatggcaaaggagaaaaaggtgtaaggattttgatgttgatgcatgtgttgagcaccttacttctattacaaaattaaatggtgaagtggcaagtcttaatgcccaacttaagactgcaaaaatgacgaatctctag

SEQ ID NO: 7144 - DNA, 474 bp, Zea mays
  Peptide Sequence Number=SeqID_50519
atgacacagaattttgagatttcgatgatgggtgagttgccttacttccttaggttccaaggaaggcaattcaaggcggcccctttcttctcccaaagtaaagtccaccccaagccttgcccaagggtttcggggatgaaggaccccaaacccggggaagacccccattggccccggacggccatgtggccctccaccaaaggaggacaatgtgtcgtccggcggccgcgctgccgtcgtccgaccactgtgctgtcgtcgccgccaagctcgttcgccgccgcgctgggaatcaatcaatcaactgacctcccgtgcaagaggaaggggaagaggaatcgactggccgttcacgcagtggggaagaggaagaggaatcgagcgtcgtccgtggaagtggagtctgaaactctgaaccgcgtggccgcccgtggaagaggaagaggagtggactggctacccgccgccgcatag

SEQ ID NO: 7145 - DNA, 1848 bp, Zea mays
  Peptide Sequence Number=SeqID_50520
gatgccgcgcacgaagaatgcatcggcgtcagggggtggcgatgacgaggaccctcgtcgccccttcaggcaggtgaaggggaagactgtctttttggagcagcaggaaggccgcaagaagcggcgttcggacagagaggctcgtgcagcagcagcagctgcagcagccgctgcacaggcagcacttggagatcagccggatgttccatcagatcagattgctttccgtgctcgtcgtctcgcctcccggtctcgctcctccactcacacctccgcttccactccgccacccactctgcctgctccagtcactcatattgctccatccacctcccaccgccatacccactaccagcactacgccagcttccactgctttcccctgcccccgctccccgcttcagctcctcctgttcatccacctcgcttccgtgagcgtgatgagactgaggtccatccactttgtttcggatcctcgtctgatttgatcttcagcgtgctactgcagcccggggctcagatgtcagctcagattgcgctacgagtgcaccgcctattggatcttccagccttcttgctagcagccggtgctgagtctgaggcacatctcacctatttgccaggccttctgtcctttctgactatcagcggcagatatgttgaggagtgggtccgcgtcttctatgcctctgtttggattgacccagatcatcattggatgaggttccgctttgagcgcgaggatgtcacgatcactgccagtcagatcagacagctttttggattccctgagtcgactactcgccttcacagtctctgctacggcacttcagatcctccacatcgccctcacggcggtgtggctccagggacagctcacgtcgcggccctgttccgcccgcctttcacagatgggtcgcgacgttctccagcagacttcactactgcagcgaagtacttatatgagctcgtcagacggacactcctgcctaggatgggatacagggaggctaccactcatattcagctttggctccttggtgccctgagcacccttgaggcctcacgccttgtgtttggatcttatcgtcctgctcctgagattccagtgccagcttatgctcctgtgtttgacactcaggccgaggatgcagcacttcgacagtttgacacccagggtacagcagctgatgatgatgatgatgatgatgatgatgattttgggattcctcctccgcctccgcctcctatgcctccacgctcacatgatcatgaggctgggagctctagtgctgcccctgctactcctccggctatggaccctgctcttgcttcgattctccagactctcactcagcagcaggctcacctggcagccgagcaggcccgtttatcagataggatactctccatgtttcagaacatgcaggacaggcaggatgcacttcagcagcagcttattcaggatagggcagagaatagggcattcatggccctcatgcttcagcattctgatatctcagcacctccggttcagtctgctccgccttcttcgcttcacgctccagtggtgccttcgatcttgtctgcgccccctgttgttacctctccgctccggccggtcaccttggcgttcacttctccggttctcagctctgtctgcccgcagccgccagtgccaccagcatctgctgttaccactaccgttgtggcagtatctgtgactgcttctgttccgatcctggatccgagactgactctgaccctccgtcggcattcgctctgctacctcgacctcgaccggatgcgcccccgccgcctcctcctgcttcagatgtttaggttcag

SEQ ID NO: 7146 - DNA, 465 bp, Zea mays
  Peptide Sequence Number=SeqID_50521
atgaacgtcaacgagggagagtggttcgacggtcttggcggtagggaacgggcacaaggtaaaacgctcttgggcaagcgtataaatgagttaagaactgacatccgacatttgcaagatgagcttgtcgaacgggatttggcactcgattgggccgtcaactcacgttccattgcttgggaccgggaagccaaagctcgagcccgtgtggaggagcttagcacggtcgttgataacttgcaggtgtactgcaatacattacatgaggaagtccatgaattgtattcgcgactgcaccccgacgtacctgctgaccctatcggaatgggagctggaccttctgtaacagcaggtgaagcacttggtggagaaatggatcttttcaagccccctccttctatgatcctggctgataaatggccccctacacccgacaacgaagctactaaggatgataaatactag

SEQ ID NO: 7147 - DNA, 978 bp, Zea mays
  Peptide Sequence Number=SeqID_50522
atgaactcaagactcccgaaacggagcaccgtccccgggttggagaggttgctggagactgcccatctggagcttgacgggaagctgttcgtcaacacgcagcaggcccctacctggcgcgccaactgtcggcgtttcgagatgggggtagggggttacaagcgtccatgcgggagagggagtgagcggcttcaagcgagcgcctgtctcgtcctcgtcctcgcgcggccaaccttctctaagagggccctggtccttccttttataggcgtaaggagaggatccggggtgatgatggcgcctcctgtcgacgtggctcgtctgcgccctaggttgggcgatgtggaagctcctccgaagccgaggtcgagtctgtcttccgtggccgaggtcgagtccgagccctggggtcgggcggagcggagttcgtcatcttctggggctgagcccaagtccgagccctgggtcgggcggagcggagttcgtcgtcttccgggacttagcccgagcccgagccctgggtcgggcggagcggagttcgccgtcttccgggacttagcccgagtccgagccctgggtcgggcggagcggagttcgccgtcttccgggactttgcccgagtccgagccctgggcggagcggagttcgccgtcttccgggactttgcccgagtccgagccctgggtcgagcggagcggagttcgccgtcttccgggactttgcccgagtccaagccctaggtcgggcggagcggagttcgccgtcttccgggacttagcccgagtccgagccctgggtcgggcgaagcggagcttcctatggtgccttcggtcgggcctgactgcctgtcagtctcactctgtcagcgcagtcggagtggcgcaggcggcgctgtccttctgtcaggccggtcagtggagcggcgaagtgacggcggtcacttcggctctgtcggctcgggggcgcgcgtcaggataa

SEQ ID NO: 7148 - DNA, 996 bp, Zea mays
  Peptide Sequence Number=SeqID_50523
atgaggaagtacatgtactatatggtcgactacacccggacgtgcctgccgaccctgttggaatgggagccggacccttggggacaacagatgccatcaaggactcgtgtgcatgacggtgcgggtacttcccgtggctgggaagatactcctaatccaccacctgtaccaccaatgctggtcgaggctatcgctgccttggtcaaagcaactgcagataatactcgctttttacgtgaaatggcgggtaatcaattccaacagcatggcgggagggctcctccacagggaccgcatgaaacctcatacctggacttctctgaaacgcgtcctccactctttgttaaagctgaagatcctcttgaggctgatgattggatcaggtacctggtggggaaattttgtggcagttcaaccagccggacatcagaaggctgtcacacggcgctggcagtagaagccaagaatacaggccaaggaaaatccaagggatttggaggtgacaggtccaatcagggacctaagaagcgaacaaggttggtaatccgacctttcaatcagaatcgttcttcgcctcgtccaccctcctatccattcaaacagcctgttttcattcgccctgccactgcccccacttctacaaatcagccaagagcccctagtgctcgtttccccgccctccctagttcctcaactggctgcttcaactgtgggaagtttggtcattttatcaaagactgcccatatccgaggcagaataagtccaacaatcaacagaactcggggggctcaaatcaaggcaaagggaacgtggcaaataattcagcaggcaaaaatgtgaagaagactgggcgaacttattacacacaagtggccactacaccggaaggagagccgataatgatggtaccacagaaagatctcaggttcagccccctcgccgccggtgatcttgcgcttggattcacgccggcgccgcgattcatgcctagttaa

SEQ ID NO: 7149 - DNA, 354 bp, Zea mays
  Peptide Sequence Number=SeqID_50524
atggccatcaatggcgtcagttcatggatgagagtaatggggagaaacggacgcattgaatcaccattaacgaagaaacggacagcggtgtcgcttgggcttcgggtgcgcatggcgcggtcggtgcggggcaacaagcatcacgctctaggcatggtagcgtcggctggcacaaggagagggataaaccctgagtatggaattactcagcaagtcttacccgaccaaagaaaagactctcaagggtatgctggttatatgggagtcaaggatgaagtccacgacggcgtcgcgcggaggatgaactccggcgagcatgcagaccggccggaggaggacaagaccagtgcttag

SEQ ID NO: 7150 - DNA, 234 bp, Zea mays
  Peptide Sequence Number=SeqID_50525
atgacggggagctccgccttgcccgaccccaagcctcggcgtcggcctcagcctcggcctcaggagaaggtctccgccttgcccgacctcaggccacggcctcagcctcagcctcgggagaagtctccgcctcgcccgaccctaggcctcggcctcgggagaagtctccgccttgcccaacctgggcctcggaccgactacgctacaggggatgcatcattaccctactcctag

SEQ ID NO: 7151 - DNA, 240 bp, Zea mays
  Peptide Sequence Number=SeqID_50526
atgacgaggaagacgaccctgtgccatcgtggaccgtccgaccctgtgcgcggaccgtccgatctcagcagtgcttctccaaatagcgacacaaggctgactaatttgtcggtgacggagcataaaagattagaagatgacatgaagaaaatagacaaagaggtccagcgacaacaagatcaggtgcccaaggtggcggagaagtggttcctctcgcacttcagggtagattaccactag

SEQ ID NO: 7152 - DNA, 618 bp, Zea mays
  Peptide Sequence Number=SeqID_50527
atggcctcagggcaaatgctactgctaaaaggccctcgttcacgtccactcacgggggacgagaaccaactattaaagccaaagagccggaggtctggggcgcaggtgccactgacggtctcgtcggcggaggcaaccgcttcggcaagagggagcctcacctatggcgatcgccccctcagcaccgacaacagtggccacctgcccactaacaccggaccggcgaagggcgaccgccccaaatcgcaccggcagccgacggcgcaaggaggacctggacgtggccggcccacgcacggcgcgaccgacacccgtgtggcagacgggcagccacactccaccccggcggtaggaggtggcaccggaagcagcaccagagccgctcaggccagggagccagacacgcggcagctgccagcaccacagacagcgagcgcccttctcccccgatcactgagggaaggagcgggccgctgtccacgccgaggtgaaccgcagctcggcgcaccctcctccccagcacggatgatgaacatccttgaagctaagggtaggggggaggccacggctcggctcgctattccccaccacaaggcctatggtcatcatcctgggtga

SEQ ID NO: 7153 - DNA, 768 bp, Zea mays
  Peptide Sequence Number=SeqID_50528
atggaggcccgggaccacatgtcatgtaaccggcgcaacggttactacgtgcaaggaaaccgcaccgccactcgcgccaatgccgcgtcttctcgactgcggaaccagtgccgtgactcaaggcagccctacgcggcaagcgacacctccggcaggagaagcgggcgccgtttcacctccgtcatgatgaccacggactgggaaagggggtatttcgaaaaaggatccttcccagcgaaggaaacggggccccgagccctcctactgatcaggggttcgaaggttgcgccctccggggttcggcaaccgccccagagcactcgggctccgtgccctctactgatcaggggttcgaaggctggcccctcggaagggttcgacagccgccccagagcacgcagagtcagggatgaccctgggtacgtccgttacatggccgaggctcgagctacgctcccgagtgagcgcaccctccgcacgcctgaagcccagcttgggcagactctgtcatacagcgacctcgaccggatcgccctcccaactgaccggagctccgcctcgcccgaccccaagcctcggcctcagcctcggcctcgggagaaggtctccgcctcgcccgacctcaggccacggcctcagcctcggcctcgggagaagtctccgccttgcctgaccccaagcctcggcctcgggagaagtctccgcctcgctcgacctgggcctcggaccgactacgctacaggggatgcatcattaccctactcctag

SEQ ID NO: 7154 - DNA, 261 bp, Zea mays
  Peptide Sequence Number=SeqID_50529
atgcggcttcatatccttagaggtatgaaggcagaagtcattcttgcatttgcagacatttgcactcatgagtttgatattattttacttgctgagatgtgtcatctcactcttgcattactcaatgcagccttaattttgtacggaagtatagacattgaagacgatgcagagagttatgaggttttgaatttatgggtcatgctccgtcaggttctggtggcagatcttggatatttcccatggaagttggggttatag

SEQ ID NO: 7155 - DNA, 195 bp, Zea mays
  Peptide Sequence Number=SeqID_50530
atgtccgggtgcccgggattctttcgtcctaatggggaatgggtcacattgcttctgtttcatggcactggcacggtggatctgaagtttacttcgagaaagatcgtgcagctgaagaatgtgcatcatgctccctttctatacacaagaatctcgttagcggaacccttctgtgtagagatgggttcaaggtag

SEQ ID NO: 7156 - DNA, 1947 bp, Zea mays
  Peptide Sequence Number=SeqID_50531
atgccgccggccgccgcctcgtctgaggagacgttgagtaacgcgatggtggaagagttgcgcgccggcgactctgttgaattcggtgtgtcacggatgacgtcaggccgtattgaagatatgcagcggttgggctactttggcggcggggtcgctcgcgctccggggacggaggaagtccccgagccggagggcgagttggttgttttcgaggcgttcttcgccgccggactccgcttgcctgcgcaccgggtctttgaattaaatcaactgccgtacgacggctaccctggtcaggacgaagcagaccgccgcgggaagaaaccggcggtggaggccggaggcgaccccgcgctggcggccgccacctcttcgaaaaagagaaaattagtgatggacaaggatcgccaagtggcggcgcggaaacgccaggcgaccgtgagggttcacgaagcccggccgaagaggcagcggggagcatcgaaggctgaggcctccggcggaggcaagccgccattgccggcgaaggcgggcgcctccgcgcctggcaaggcgccggaggcgacggtgggcgccggaggccccaagctgtcgaaggtggtgccgtccgccagcggagtggcgaaggctgcgaaggcggcccgatcgctaccgccgcccggcaaacgcgttgccgacttcggcaccgagattgatgtggaggattatcttggggggttggacgagggcccgcttgctctagttgtgcctggcgcggcggtcgcgacggctgcgccagcgccgaaggcgggggtagagacccttggcgctggaggcgaggtgactgccctcgcgctggtcagagacgaggcggacgcggcgacccgccggctgaaaggggcgatggaggcgctgagtcaggtggctgacttcaccagccgtactgcgtcgggggcccttacggcggcgttgtctgccgaggtcgagagacttcggacgcaacacgcggacgctgtccgtgagaagtcggcctccgacagcaagtgccgcaagctggcggagaaggtggccgcccttgagaaggagaaggcagacctccggcgccagctgatggaggagagaagggaggccaacgaagccatcgtcaaggagcagtctgcgcaggcggaggccaggctggcgcgggcggagggcaatatcgccaaggagctcgccggggagctgcagcggcggcttgctgccttcgagagccgcgcggagggggccgaggccgcggcgcgagcggaggccgaacggacgcgcacgcagctcatgacttcatatcgcgagctgggtgtgcggacgggcgacttcgaggtgccggagcgagaggccggacttcgctgtctggagtgggtgcaagaggaactgcaggagctccccactgtcttggcggggttgatgtcgttcacctccctggtcacctgcgaggcagcgatgaacgcgctctctcgcgaaggctgccggcactttgaggccctcgaccaggtggatgaggattttgggcgagatatctttgaggtcgaagaccccgtggtgaaggagtccgccggggccctctatgaccggatgtggggttcatacggtcgagaggtggtccgggcgcgggccgaggctgcgagggctcaggcggagcgtggcgagcgggtggacgattttggggcgctgaacagcgcgccgcctgagccggagaccacccctgcggaggccgccactggagtcgccccgggactgaccctggtgaccgcggaagatgcaccaggcgcccttgtacctgctgcggccggcgaaggccttctcccaagggtagccgaaggcgcgtctgatgcccccgcagctgctgtgccgggcgctgaagatccagcggaggcaacggcggaggcggcggcggaggctcccgcagcggcagggccttcgcaggtggcgtag

SEQ ID NO: 7157 - DNA, 803 bp, Zea mays
  Peptide Sequence Number=SeqID_50532
aggaactggggtgtagttcgcttcgccgtcgtgccgttaatggggctcggtgtatgcggctcgctctgccaagatgatgaggaggaggatggttatgatcatgcttatggtaatgcacctgcaccagtatttgacactcaggccgaggatactgtacttcatcagttcgaggctcaggacgcagcagttgatgatgatgatgatgactttgggattccacctccgcctcctatgcctccatgctcacatgatcatgaggctgagagttctcgtgctacccctgctgcccctcctgctatttaccctgctcttgcttcgatcctccagacacttactcagcagcaggctcacttggccgccgagcagacccgtcaggcaacaacccatcagcagttgtccgagaggatgctctcgatgtttcagacaatacaggacagggcattcatgactcttatgctacagcattctggtgtatcgattccctcggttcagtctgcacctcctccacctcttcaggttcctgttgtgctagcgattcagccaggaccccctcttcctacagttggtccttcttcctctccgctccggccggtcaccctagctttcacgtcaccggttcttagctccgcctgccctcagccgccagtgccaccagcttctgctgttaccactactgttgtggcggtgtctgtgaccacttcagatccagcagcttctgcagcgcagcctcagtccgagtcagtaccagctccagcttctacagcagatcctggatccgagactgactttgacccccagctggc

SEQ ID NO: 7158 - DNA, 834 bp, Zea mays
  Peptide Sequence Number=SeqID_50533
atggtgcaccttattttggggttaccaaatgctgggggaggaaagccattaggcattgatgaagttgttgttgcaaataatttaagggctgaacttggtttatccaaagaagaatttggtgttgcagctctacaagatcgtttaaggaaaggatttgacgatgatctaagcatcagatccttctttctgatactgttcaataggttgttgttccctactgcaagctggggaataactaaccatgaggttcttctaactgaagaaatggatcatttccacgagatggattggtgccaactcatattcaatgatttatgccaagcggccaagaagtggcatactaggagcgttaccaatgtttctacaaccatttacggatgttccatcgtcattcttctgtactatctggatcatcttcatgactcagctgcacctcagaataaacgtggaacaccacacataaaatattttgataggaatattattcaagcattgacaagagctgacaagggcaagatacgccaaggacaagaaccatttggggattgttcgaacaggacaaacacttttgatgtaccgcgtcctgacccatgtggccagcacaccattcacatcgaactcccgctcatcagagatttgatatcaagcaagctgaaccagcatccatccctccaccgactaggattcatagagaagctgtcacattatgacacggaggttggcaaggcttgttcagtgatcaaacagactcttcaccagattgttgagaaacaatacaatctatctgatgtttttggcgagttaattgatgaggtcctccgtgctgagtcatag

SEQ ID NO: 7159 - DNA, 372 bp, Zea mays
  Peptide Sequence Number=SeqID_50534
atgcaggcggcatgcaaccgcgtcaagtcggcgcacccctccgacttccaacgcgcccagcatggaggcccaggcccacacgtcatgcaaccggcgcgccggttgctacatgcgtgcaactgcaccgccactcgcgccactaccgtgcctcctcgactgcggaaccagtaccgcgactcgaggcaaccctgcggacagcaagggaaccctctcccacggcgtgaagacggcgcgcccgtgttccgttcctcgaacggctcgcgcacgcgcaacggctgccccgcgaaccactcgccccgtcgcattaactccgcggcgggacaggcggcatctttggcaggagaagcgggcgacgcttcgccttcgccataa

SEQ ID NO: 7160 - DNA, 756 bp, Zea mays
  Peptide Sequence Number=SeqID_50535
atggagcaccgtcccgggctggaaaggttgctggagactgcccatctggagcttgacgggaagctgttcgtcaacacgcagcaggcccctccctggcgcgccaactgtcggtgtttcgaacccggggggtccctgggccgacgaggtaatgatggcgactcccatgacgtggtcggtccgagccctgggttgggcgaggcggaggctcctccgaggtcaaagtcgagtctgtcttccaaggccgaggtcgagtccgagcccctgggtcgggcgaggtggagaccgtcggctgaggccagggctgagtccgagccttggggtcgggcgaagcggagttcatcgtcttccggggctgagcttgagtccgggccctggggtcgggcgaagcggacttcgtcgtcttccggggctgagcccgagtccgagccctggggtcgggcgaagcggagttcgtcatcttccggggctgagcccgagttcgagccctggggtcgggtgaagcggagttcgtcgtcttccggggctgagcccgagtccgagccctggggtcgggtgaagcggagttcgtcgtcttccgaggctgagcccgagtccgagccctggggtcgggcgaagcggagttcgtcgtcttccggggctgagcccgagtccgagccctgggttcgggcgaagcggagtttcctatggcgcctgaggccggacttggctgctgtcagcctcactctgtcgagtggcacagcagtcagagcggcatag

SEQ ID NO: 7161 - DNA, 912 bp, Zea mays
  Peptide Sequence Number=SeqID_50536
atgtctttgcgctcccttatgcatcgcgtctttccagcttccgagcccccggatggggaactcccgcaatccttctgccttgtcgttggaggaacgcaacttcgcggaagttggtacctttcagccatcgttcggcttcaaggattttcatcatgcagcccggccgtatcccctcaccggcggtcacccaagacggtgacctccagttcgatggcggggaaaagcgagccgggctgtgatcttggtcccacccttagcttcaaggatgttcatcatcctggctggggcgggggccgggctgagccagagctctacctcccgcgtgggttcgtgggtcagcctctccctcagcattcaagggagagggcgctcagcggcccagcgggagggtcggacttcgataacgccttcggtgagcaggcctgcaaagttaaagggaaccctcggccgctctttgatgagccgaagccggaggtagcggtgtcagcacggacagaggctaagttggctcgaaaagaagacttggtcggccagagcctggccgggtcgttcactggcaggaccgacgccggagttgagttgccggggccgggagcctggccgatgtcctcgggggacagctggccgaggcctcggggtggccggccgagccgtctgctcgagccggattcctggagaagaccctggcggcgatggcccgggcgtggtgctgatgccgtccttcggagtggggatccaccaaccgcgtcgccgtccgaggctaggtcagaccccgccgaaggtgtagatgacgccaagggtgctgctgctccccctccgtcaaggtctgagcctgcaggattggttcatcttgtagtgtgcgtatattttctgcggccgccgaagcccaaacatactgcagtcgtgttgtaa

SEQ ID NO: 7162 - DNA, 291 bp, Zea mays
  Peptide Sequence Number=SeqID_50537
atggcccacaagggcaaggcgacatccaacatcacctacaatccggatgacgagcccgaggaatacaacaaccatgccatccacagtcgcctcagaccagctagaagaagagatgacggaatgtatggagatgaaggcgaggatgagggtagagagggaggcagagcgggaggcagagcaagtggctcgcttggcggatcagcaaaggatggcatagatgttccaatacatgtagagccttggcgctgcatagagtcttgctccaccacctccattgtttcctacaactga

SEQ ID NO: 7163 - DNA, 384 bp, Zea mays
  Peptide Sequence Number=SeqID_50538
atggctaacagtggatggtggcgaggtcacaatgagcggacggtccaaggacaggcacagacagtccggcacgatgccgaggcaagggcgcatggccgaggcgaggccggggcaggggtcggcgcgacggcggatggtccggcggcggtggcgatggtggccaagcaagagagagagaaggaaagagagggaaaaggagaggacattttccgtagcttttgtttttttggggcgcacggtgggatcaatgcccaagctgtgttcaatgatggtgcggctaacgtcgacgaggtctacgacagaccatgcaaagacgtcattgttgtggttgaggcaagagagaggtctttcttcttctgctggcaagaggtcttcgctgattag

SEQ ID NO: 7164 - DNA, 429 bp, Zea mays
  Peptide Sequence Number=SeqID_50539
atgggcaagaacaacaagcgcaagcgtgagccgactcctccatcggaggagtttggtgactcggaatactcagaggaggagttctcctctgagtccgaggggtctccggctcccatccccctgcgtgagtcgtctgatgactcagacgactcccaggggcttgcggtggaggtctggacgtacatccgggccgtcgagcgctccgggctcgagggctcggatgagtctgagttctcctcggacgaggaggactcggacggcggcgaggacgaagatgacgacgacgacgacgacggtggcgacggcgacggtgatggcggcaacggcggcggaggcagtggcggcaagggcagcaccagaggcggcagcagcacgggcagcaccaagggcggcggaggcaagggcagcggcggcaaggccagtggctaa

SEQ ID NO: 7165 - DNA, 195 bp, Zea mays
  Peptide Sequence Number=SeqID_50540
atggcggcgagcgagcgcggggcacgggcgaggctggggagcggcgacgcggcgggcgtggagccgggagtgagcgaggcgcaccagacagtccggtgcacaccggacaagcattgttcactgtccggtgccctgtcacgtcagctgactgttggggtctgtagcattcgactgttggatccgaccgttacctag

SEQ ID NO: 7166 - DNA, 90 bp, Zea mays
  Peptide Sequence Number=SeqID_50541
atggccctttttgcctcccctctttatccacccctgctcgcaggctccaaaccttcatggaccctgataagctttttgagtgctaggtga

SEQ ID NO: 7167 - DNA, 432 bp, Zea mays
  Peptide Sequence Number=SeqID_50542
atgtgcaagagtaacaaacgcaagcgcgagccgacacctccgtcggaggacttcggcgactcggaatactcggaggaggagttctcctccgagtccgaggggtctccggctcccgtctctcccccggcgtcgtctgatgattcagacgactcccaggggattgccgcggaagtctggacgtacatccgggccgtcgagcgctccgggctcgagggctcggatgagtcggagttctcctcggatgaggaggactcggacggcggcgaggacgaggatgacgacgacgacggtggcgacggcgatggtaacggcagcggcagcggcgggggcagcggcggcggcgacgggagcaagggcagcaccagaagcggcagcaccaagggcagcaccaagggcggcagcggtggcagcagcagcaaggccagtggctaa

SEQ ID NO: 7168 - DNA, 192 bp, Zea mays
  Peptide Sequence Number=SeqID_50543
atggcactgagttggttcctgctggcttgttgcaagctgcttcgggtggcgaccttacgcccggtcatcaatcgatttctcacgatttgggagtcccttcgttcttctccaatctccaggaagaaaaacgtgtccttgctgcgtctcgcgacaatcttgacagactgtatcgcgactctagcaactcgttga

SEQ ID NO: 7169 - DNA, 429 bp, Zea mays
  Peptide Sequence Number=SeqID_50544
atgggcaagaacaacaaacgcaagcgcgagccgacccctccatcagaggactttggcgactcggaatactcagaggaggagttctcctctgagttcgaggggtctccagctcccgtccctcccccagcgtcgtccgatgactcggacgactctcaggggattatcgtggaggtctggacttacattcgggccatcgagcgctccgggctcgcgggctcggatgagtcggagtactcctcggatgaggaggactcgtccgaggaggacggtggcggcgacggcgaaggcgacgacgacgacgacgacggaggcgatggcggcgacgatggcggcaggggcggcaacggcggcggcaggggcggcaacggcggcagcaggggcagcggcggcggcggcagcagcaggggcagcaacaaggccagtggctaa

SEQ ID NO: 7170 - DNA, 192 bp, Zea mays
  Peptide Sequence Number=SeqID_50545
atggcactgagttggttcctgctggcttgttgcaagctgcttcgggtggcgaccttacgcccggtcatcaatcgatttctcacgatttgggagtcccttcgttcttctccaatctccaggaagaaaaacgtgtccttgctgcgtctcgcgacaatcttgacagactgtatcgtgactctagcaactcgttga

SEQ ID NO: 7171 - DNA, 399 bp, Zea mays
  Peptide Sequence Number=SeqID_50546
atgggcaagaacaacaaacgcaagcgcgagccgacccctccatcagaggactttggcgactcggaatactcagaggaggagttctcctctgagtccgaggggtctccagctcccgtccctcccccagcgtcgtccgatgactcggacgactctcagaggattgtcgcggaggtctggacttacatccgggctgtcgagcgctccgggctcgcgggctcggatgagtcggagtactcctcggacgaggaggactcgtccgatgaggacggtgacggcgacggcgaaggcgacgacgacgacgacgacggaggcgatggcagcgacgacggcggcaggggcggcaacggcggcagcaggggcagcggcagcagcaggggcagcaacaaggccagtggctaa

SEQ ID NO: 7172 - DNA, 432 bp, Zea mays
  Peptide Sequence Number=SeqID_50547
atgggcaagaacaacaaacgcaagcgcgagccgacccctccatcagaggactttggcgactcgaaatactcagaggaggagttctcctttgagtccgaggggtctccagctcccgtccctcccccagcgtcgtccgatgactcggacgactctcaggggattgccgcggaggtctggacttacatccgggccgtcgagcactccgggctggcgggctcggatgagtcagagtactcctcggacgaggaggacggtggcggcgacggcgaaggcgatgacgacgacaacgacgacgacgacggaggcgatggcggcgacgacggcggcaggggcggcaacggcggtagcaggggcagcaacggcggcggcaggggcggcaacggcggcagcaggggcagcggcggcgggggcagcaacaaggccagtggctaa

SEQ ID NO: 7173 - DNA, 471 bp, Zea mays
  Peptide Sequence Number=SeqID_50548
atggcggtggcaggcgggcaggagcagcggtcacgtcgtcagccaagcttatgtcccatccaggggcagcgagagaaccctctctcatggcgtgaagacggagcgcccgtgatccgttcctcgaacggctcacacgcgcgcaacgaccgccttgcgaaccactcgccccgtcgcattaactccgcggcgggacaggcggcgcctcagggaccgggaaagggggataccccgaaaaggatccttctccgtgaaggaaacaggccccgagcctccctactgatcagaggttcaaaggctggcccctcggaggggttcaacggccgcctcagagcacctggtttctgcgcccactactggtcagaggttcgatggccggcccctcggaagggttcaacggccgcctcaggccactcgggcttcgcgcccactactgatcaggggttcataggctggcccttgaagggttcatag

SEQ ID NO: 7174 - DNA, 384 bp, Zea mays
  Peptide Sequence Number=SeqID_50549
atgtcgttaggctataaggcctttggcattctgtcctcctatccatggtgcggcccatatttcaccaactttagcgtggccagagagcaaaacaatacaacagcggtcatcctgtccttcggcaacctccgcctccacgacgacgccaaagcaaccgctcagtcagctccactccgcgtcctccctctccacgacctccacctcttccgcttcaacgagcatccgatggagataaatggcgccttcttcgactcagtttttctcccgcactttgccgacgccagagatctcgctgttcacaacctcccctccgcagttgcaactgagtcgactgtgcgtgctatcgcaagaggaaattgccccttctccggctttgttacctga

SEQ ID NO: 7175 - DNA, 2925 bp, Zea mays
  Peptide Sequence Number=SeqID_50550
atgtctctcgatttcaagctcatccttgacgagctcaatcggcgattcgacgagctagagattcgctgggaccggcgcttctcgccctctacgtaccttgaccatccgcccacaccgctcagcgtccaccaatcctccgacgcatctgccagcacgccgcccaccccgactgcagccgttggggtcgtcgtcatcgccgacaactggggcgggtgcttcgatgacggcgagcagtactacgaggcgtcatccgtggtcgccgacaactggggcggactcttcgagggctgtgatgctgtcgccgatatctcttcgaacctgctcgactccgaccccgacgaggcgttcgtcacctcccactcggacaaggcgctgctcgacaaccaccaagccggcgtcactgatgatggaccagcggccacggcaacctggtggtggtgtgcttcggcgactggcgacatggagagcacgctcaaggggattcgcggcagcgacgcgtcgtgcgtgctggacctggacgacgtagccactttggcaggcgccgtcgtggacacttacgacgaggaccgcgccaccgaggagcagctcgccacgcccttggacacgctcctgtgcgccggcctcgaccctgtcaagtcgcacagcgggtgtctgctgctgcagcgcctcaagcttttgcctacctcgattggtgcccaggtggtattcgaggaaatgcagcaaagcgccatcgtcagggacgcgcacgcctacggcgtcacggtgcatgtgccgcccgtttgcatgcttgatggagttcactctcaacatttttttggaacagggattataatatatcattctgagcacctgggtctggttgcagttgataggaaaacagtggttgtatctatcgctgctatactgctttcatttgctccatattccattgaaatatctggagaggttgttttcctccgtcctgttcacaactttgccctgctcgcttatgatccttctgcactaggagctggagcatctgttgtccgggctgctaagcttctatcaggtagtggtgccactatagttgaggaccagaaggtgttggaggaaaagaatgctcagaatacagtgctgctacatccgttgcttcctatggttgacaaaggaccatggccaccacctgtacagttggaaattcatagtagtggtattcagctaagaccagtaccttggccatctctttactattatgcagtttgggcgtcgtggattgagttaatggtcgtggccggttacatttcgccaaagcctccttggttgtcgtttgcttcagaggccaagaatgtacacgatctgttcattggggtgttcttaggagatgtctattctatgtcactgaggcagcagttgcatgatcctggacagaagcctgttccatatcagtatttggcaagctactatggtgcactattgggttgctcttggagtgtggatggcaaatatttactgtcagttggtgacaatgatcttgtgcaagtatggagcatgaatgacacaaatatcgtttcatgtggcgaagggcataactcatggactggtgcgctgtgtatggcattctatgcacaatctgaagaaactaggcagagtcattctgttcataagtttgctctgggcactcttgccttcgaacacactttatccagtggatcgccaatccgatcagaagtggagttattgcctgaatctgttgaagtcattgacaaagattatggttggacacgatacccaactgcttctctagaatccagcattgcacgagattgttgtccctctacggtggctcaccgacaatcagtagtggaagctcttctacagtgtgataggaaatcatctagcagagttgtagtatcacagtgggagtcatttttagctgattattttaggcatacctgctttgcttctacagttgattacttcctgaatggcttgcagcagcaacatggggattgcatatcttctttcagagttcacctaattatattgcaatttctgaatgtcactgcatctgaaactaaaagtggagtttgtgcagctcacaattatctgtcagattcactagaccagcaagctggtattggttggccacttgctagacatgatgagatggtttggccacaaacagctgtggtcagttacaacaaattagtcgaggttcaaagtaggaatcctagtatctggcctatgccatggttttctttcaccatcatgagtggaggtactgcagtttggtattgtgacacctgctggacgcctccatctccacctacatatccggaggaaaaacatcaacgcccatatggtgctccttgtcggattgccttgttggtggactttgagcttaattatcaacaactgaaatttgtaaactatggaagaattcatttttacatctgggaagaattggagagctaccagtcagtcatgaatagccaagttcaacgcacacatgatcaggatagcaggtctatggtgctcctaaagggcaatctggtcttcatcttgcctgggttaattttggtcgctcatgatctgggcggtgcctgtcagagggacacaaatgggactctccaaaatacgcaggactttgtctgctccaacggcaaggaccgaccgctaatgacaagcatctggcaaccgcgtctcaacttagaacgtgactcactacttgaacaggtgctgcagtgccaatctgaagaggaccgtgttcgggaagcgaagttgtgctatcacgttccttatcggcttgggggcaagccgacgcttaaggaggggggaatgtcagtaatgcgcgggttgcacgggaggaacacgacagtggacaagagtgtgtcggaccagctacacgccagatgggctgcgacgttcgacaaggcccagctgtag

SEQ ID NO: 7176 - DNA, 747 bp, Zea mays
  Peptide Sequence Number=SeqID_50551
atgatgctgacagacaaggactccaagaggatgacgaccaagtttgaggagctttgcaacgaagacaagatcttggtgttctttaagaagctgcttaatgagtggaaccaggaattggatgagatgactgagctagagaagcggacagtaaaggagaagtccatggttgcaacattcaagcagtgtgcacgatatctcagccggctgtttgagttctgcagaaagaagggctcggactcgggctcagccccggaagacgatgaactccgcttcgcccgaccccagggctcggactcgggctcagccccggaagacgacgaactccgcttcgcccgaccccagggctcggactcgggctcagccccggaagacgacgaactccgcttcgcccgaccccagggctcggactcgggctcagccccggaagacgacgaactccgcttcgcccgaccccagggctcggactccggctcagccccagaagacgacgaactccgcttcgcccgaccccagggctcggactcaaccctggcctcagccgacggtctccgcctcgcccgacccaggggctcggactcgaccttggccttggaagacagactcgacctcgacctcggaggagcctccgcctcgcccaactcagggctcggaccgaccacgtcacagaaggcgccatcattaccctaccccaagctgactcaggctacgagggacaagaccggcgtcccatctggctcgcttcgctaa

SEQ ID NO: 7177 - DNA, 531 bp, Zea mays
  Peptide Sequence Number=SeqID_50552
atgcagtcggcatgcaaccgtgccaagtgggcgcgccccttcgactccaacgcgcccagcatggaggcccaggcccacacgtcatgcaactggcgcgccggttgctacgtgcgagcaactgcaccgcccgtcgcgccactaccgtgtcttctcgactgcggaaccagtaccgcgactcgaggcaaccctgcgtatgacccgacagtgccagccaggcgcatcggtcacgggccggacaggcggcacctttggcaggagaagcaagcgacgtttcgccttcgccataatgaccgcgtcagaaaagggattgggaaagggggataccccgaaagggatccttctccgcgaaggaaacgggccccgagcccccctactgatcagaggttcgaaggctggcccctcggaagggttcaacagccgcctcagagcgctcgggctccgcgcccactactggtcagaggttcgagggccggcccctcggaagggttcaacggccgcctcaggccactcgggctccgtgcccactactga

SEQ ID NO: 7178 - DNA, 867 bp, Zea mays
  Peptide Sequence Number=SeqID_50553
atgggtcggcgcgaggcggaacgcgaaggggggaaagtagctggagggagacaggcgtgggaggtggaacccgcggccttcgtgttagccccacgcccaggtcggggtaatgatggcgcctcctgtgacgtggtcggtccgagccctgagttgggcgaggcggaggctcctccgaggtcgaggtcgagtctgtcttccaaggccgaggtcgagtccgagcccctgggtcgggcgaggcggagaccgtcggctgaggccagggctgagtccgagccctggggtcgggcgaagcggagttcgtcgtcttccggggctgagcccgagtccgagccctggggtcgggcgaagcggagttcgtcgtcttccggggctgagcccgagtctgagccctggggtcaggcgaagcagagttcgtcgtcttccggggctaagcccgagtccgggccctggggtcgggcgaagcggagttcgtcgtcttccggggctgagcccgagtccgagccctggggtcgggcgaagcggagttcatcgtctttcggggctgagcccgagtccgagccctggggtcgggcgaagcgaagttcgtcatcttccggggctgagcccgagtccgagccctggggtcgggcgaagcggagttcgttgtcttctggggctgagcccgagtccgagccctggggtcgggcgaagcggagtttcctatggcgcctgaggccggactgggttgctgacagcctcactctgtcgagtggcacagcagtcggggcggcgcaggtggcgttgtccccttgtcaggccggtcagtggagcggcgaagtgactacggtcacttcggctctgtcgactggagggcgcgcgtcaggataa

SEQ ID NO: 7179 - DNA, 1248 bp, Zea mays
  Peptide Sequence Number=SeqID_50554
atgccgtcgagtacaccatcggcagcagtggaggaggtcccaactgcgcctgcccccgccaccgagggtgacgcggggggcacgtccagctccgacccgccacccactctagaggagccggaggtggttcttgggtggcggctccgatctggcaccgagccggaagcagcgccgtttcccctcccccgggtgctgtctcgtgcgcatcaggcccttcaagagatcgaggcggcaatctggcgggaatgggaggcgctagaatctgagcaccagcgcctcagcgactggcgtacccagctggaggagcgcaccaaggcggcgtcccaccagttcgcctttgagcggtccgaactggcgtgggaccgcaaggactacaagaaggacctccagaaggtgtacgccagggagctggaggcgagccggaaggagaagaggttggccaagaaggaggagcacttgaaccagagggaggaggttgtcacagagctccaggccaagctgaatgccttcaatgaaatcctggaggagcagcgggtccagcaaaccacggctgtggagagcctgcaaaagctacagcgggagctcgatggcaaggcccacgatgccgcccttgccgaggagaagcttaaagcgaaaggagaatcattggacaggcgggagacgggtctcgccaggcgggagaaggatcttgccttcaaggaggaaatgcttgagaggcaggagaagtcgttggccgagcatgagctcgaggtggagaaggagtggacgctggaggagcgggtccgctggttccaggcggcgcacgcagcactggccccccaggcggtggaggcgatgaagaagacacttgaagatctccaggcggagcatcgagccgaggtccagcgcatcgccgcatgggccggcgaggcgagcatgacactggtgtcgctaggggtgagtcccatcccggtgtcggagctgctgacgtccatctccgacgcgctcccggtgctggactccgccgccgaccgcctccgacgcctggaccagatccttggcgcccacctggaggccgacggcggcaggctctgtcgggcggtgattgagtacatcctgacgtgcttctggagccacgacccgaccatctccttggagccgatgatcgctggtccagtggccgacaccgaagacgccgcctgggagggcgtacaagatattgtggaggtggtggccgagcgcttccagcgggatcctaccgatgattag

SEQ ID NO: 7180 - DNA, 279 bp, Zea mays
  Peptide Sequence Number=SeqID_50555
atggagtcttctgagccgcaggaggcggaaggatgggtcgcccgacccatcacccgtgacgccgctcgcggttgtcacttccacgacgcactcgacaccttgttgcgccaggctttcgaccggcacacctggtcgatcgagtatcgttgtgtagtctaccagcacagtcacgggagatgtctgacaacaggcgccgatgcatacaggcgtgctcagctagagcagcatgaccagcaagaggagcaacagaggcagcctcccccaccacccccgatgtga

SEQ ID NO: 7181 - DNA, 837 bp, Zea mays
  Peptide Sequence Number=SeqID_50556
atggagactacccatctggagcttgacaggaagctgttcgtcaacacgcagcaggcccctacctggcgcgccaactgtcggcgtttcgaccccgggggtccctggaccgacgaagtcgaggctgagtccgagccctggggtcgggcgaggcggagaccgtcttccgaggtcgaggtcgagtccgagccctggggtcgggcgaggcggagtccgtcttccgaggtcgaggctgagtctgagccctggggtggggcgaggcggagaccgtcttccgaggtcgaggtggagtccgagccctgggattgggcgaggcggagttcgtcgtccgaggtcgaggttgagtccgagccctggggtcgtgcgaggcggagaccgtcttccgagtccgagacgagggccgagccctggggtcgggcgaggcggagcttcctatggtgcccgaggctggacttagctgctgtcagcctcactctggcgagtggcacatcaatcggagcagggcaggcgacgctgttttcctatcaggcgatccttgcattgattgctcctgcgatacgatcggttggcgtggcaatctggccaaggttgcttctccgtgaagcctgcccgagctgggcctcgggcgagtcgaagtcctacatggccgcatgtgccattgtgtacgacaagctccgacgcagccgacacttggacgtggtccagagcggctacaccgcgctgtccatcgtcaaacagggggacctcatggtcgtcgctaacgtcgacgactctcgggttgttctgggcaccgcatccgacgacggcgccatcacaccgtccagctcatcgtccacctga

SEQ ID NO: 7182 - DNA, 498 bp, Zea mays
  Peptide Sequence Number=SeqID_50557
atggggagcgcccgcgttgctttcgtcttgctgtcgttggaggaacacaacttcgcggaagttggcagcccggctgcatccccttgccgatggtcacccaagacggcgaccaccagtttgatggtggggagaagcaagccgggctgcggcctctgccctgccctcagcttcaaggatcttcatcatccttgctggggcggagggcgagctgagccggagctctacctcccgcacgggttcgtgggccaccttctccttcagcattcaggggagaaggcgctcaccggcctagcggaaggggcagacttcgacaacgcgggccgagcggctgcaagcgtcgtcagctccagcatgcctggttcgctggctcagctggctctggctcggctcccggtgccccctcccgctgtcgggcggaatgtggctatctgcccgccgtacgggcggctgttgcgctgcgcgcaccaggggaccgcccaagacgtcgcgcgctgctag

SEQ ID NO: 7183 - DNA, 270 bp, Zea mays
  Peptide Sequence Number=SeqID_50558
atggcatatacacgacaactttttgtgttagaaatatgggaagacaactgtggggagtttcctctgattgatcttggtatgttcctcacaggggacgacaaggccgaggggttgtcgctgatgtcgttattggtgaggttgacggtggtgatgccgtggatgctggagtggcgcttgtccttgacgtcggagttgaggcggatggtgtacttctgtgcatggctagccaactacattggagttgaggcagatgttcctccagtcccttaa

SEQ ID NO: 7184 - DNA, 480 bp, Zea mays
  Peptide Sequence Number=SeqID_50559
atggtgtgtttgggcctcggcggccgcagaaaacacacactacaagataatccgatcctgcaggctcggatcttgacagttgaagggagcagcagcaccctcggcgtcaactacaccttcggcgaggaatccggctcgagcagacggctcggccggtcaccccgaggcctcggccagctgtcccccgaagacatcagcccggcccgaggcctcggcaactcaattccggcgtcggtcccgccagtggacgacccagccaggctctggccgaccaagtcttcttttcgagccaactctgcctctgtccgtgctgacaccgctacccccggcttcggctcatcgaagagcgaccgaggggttcctttaactaagcaagagaagcctcggacggcaaggccgaccgagccgagggactcctacgcctccgggatacggatacctcactcgtcacctttgcacggggcgactcacgcttggtga

SEQ ID NO: 7185 - DNA, 687 bp, Zea mays
  Peptide Sequence Number=SeqID_50560
atggctaaaaggtaccaacttccacgaagttgcgttcctccaacgacgaggcggaaggatcgcgggtgttccccatccgggggctcggaaggtggaaagacacgacacatgagggagcgcgaggacatggtcgctttccaagggggtcaccctccttttaaaggcgactctccctacttgcgtccccagccgtcgcgggctgagtcttctccaacacgctccaaggtcctccccctacggcgcgggggctgggtcccacgcgtcatgcaaactggcccagggcagaagaagccaaaccgcccagcggttacaagcattcctccactttcgcccagaccagcgggtgaaagggcggacagccgtgcaggcagcatgcaactacgccaagtgggcgcgcccctccgactttcaacgcacccagcatggaagcccaggcccactcgtcatgcaaccagcgcgtcggttgctatgtgcgagcaactgcaccgccactcgcaccactaccacgcctcctcgactgcggaaccagtaccacgactcgaggcaaccctgcgtacgacccagcagtgccagccaggcacgacggtcaatacggccaaaaatgggccggcagtaatggcggtggcaggcgggcaggagcagcggtcacgtcgtcagccaagcttacgtcccatccaggggcagtga

SEQ ID NO: 7186 - DNA, 363 bp, Zea mays
  Peptide Sequence Number=SeqID_50561
atggccgcctcgcgaaccactcgccccgtcgcattaactccgcggcgggacaggcggcgcctaaggcaggagaagcgagcgacgcttcgccttcgccataatgatcacgtcaaaaaaggaaacaggccccgagcctccctattgatcagaggttcaaaggctggcccctcggaggggttcaacagccgcctcagagcgcttgggttccacgcccactactggtcagaggttcgaaggccggcccctcggaagggttcaacggccgcctcaggccactcgggctccgcgcccactactgatcaggggttcgtaggctggccctcgaagggttcacagtcgcctcagacacagagcgagggatga

SEQ ID NO: 7187 - DNA, 870 bp, Zea mays
  Peptide Sequence Number=SeqID_50562
atgacgtgtagcctacgattgtcgctaaatttcggcagcataaccccgctgctctccaagcacacgcctgaacatggtgtgttggagaacaactgggttacacaaccgaaattccgcgtcaatcgaggcgaggcggagctcggtgcggtggagagagccggtgcccgaggctctcgggccgagggcggtggtgggggcgaggctgccgcgcagtgggtgccccttcgagaggcgagggcgcgagtggccttcttcgcggacgacgatgtcgatgacctcacacgctctgttgcccatcatcatgccatcgtggaggtgtgtgtgaaggccgcctcgaagaagcccgacacgcttggcgactgtgagtgcttcccacccacacctccctcggacaattccgctcggatccctagccatttcactgaccttgctttgctttgctttgctttggtatggtatggatggaactggaacctgctgccgaactggaactggaacctgctgccggcaggcccattctcgcagaggatgttgctcatggtggaggagaagaagccctacgagatgaagctcgtcgacctcggcaacaagcccaaatggtccgtctcgctccctctcaacattctgcagcctgcacgtggtgtctcaccagtaacgactggtttggcaaagtgccacacttcatttctagaggttgttgaagccttgccagtagaagacaattccatagatgtggtgatcggcacactggtattgtgttctgtaaataacatcgacatggcactgagagatgatacgttgctctgcttggttcaaggtgtgcttgatccctcgcagcaatttgtagccgacgggtctgagcctggatag

SEQ ID NO: 7188 - DNA, 507 bp, Zea mays
  Peptide Sequence Number=SeqID_50563
atgggcctccagatcgtccgccgtgacggtggagagaggccacgggtcgcgcggcggaacgacggttaccggtcggccatcaccaagcaaaggaggtggcggcggagcggacaaggtgcgcagttttctttctctggctattccctcaggttgcggaaacctaagcgggaggcgagcagcagagtaaagaaccaccaccagtccctcttccgaatatataaaggcccgggcaagacccgttcaacactccgcccgaacccgccgcgaaatccaaaactcgaaggcgaaacgaccgttcctcgaacgactcgcacaacggctgccccgcgaaacacttgtcccgtcgcattaactctgcggcagggcaggcggcacccttggcaggcgaagcaggcgacacttcacctccgccatgatgaccacgtcaaaaaaaagggaccgggaaaggggatactccgaaagggatccttctccgcgaaggaagcgggccccgagccctcctactga

SEQ ID NO: 7189 - DNA, 312 bp, Zea mays
  Peptide Sequence Number=SeqID_50564
atggcggaaccatattactcaccagttccaaaggaggaaaggattgaagttgaaattgcagtaactaccgccaccagactagcggcattcttagtagatgggaagtttgttggtgtcaacatccatgtggttagagatttttttggatgtcttcccagaggagtttaccagggatgcaactggatagggaagttgagtttggtcattgatctcttacctggggctgcccctacttttcaaacggccatacaagatgtctgtagaagagttaaagggactgaagaggcggttaacagaattacaagaggctag

SEQ ID NO: 7190 - DNA, 1077 bp, Zea mays
  Peptide Sequence Number=SeqID_50565
atgaagcacgtggaccgtcctccgaataatctcaaacgtataacaattcagtcaagccaggagtgtctcagtgttgatattccgtgcgcagaacattctaatccatgtccagacgtgagaaatcctccaaatgttgacagtcaaactttgatcaatgaaatagtacaactggattctgatgaagatgacttcatgcgagctattaagaagcgtagtgtttctgaaagccatacaagagttctaagaaaagttgtgacaaagaggataaaagctgaggatcttccccgacagaggctcaatgtcaggtgcaacccacaagatgtcattgcaagcattcacatattgaatgaaagacaacgtcaggccataagatgtaaaggtttctctaacattcttgatatgacagtagatgcgttgtatagtagatcacaccttcgatggttgatggataagcttgaccacaaagacatgacaattcgtcctagtccaggaaaggaactaaaaatcacaaaggacattgtgcatcttatccttggtgtaccaaatcatggcggtggaaaaccattggggattgatgaagcagttgcagcaagtaacttgagggcagagttcggtttagctaaagacgagttcaatgtgacattgctacaggatcgtttaaggcaaggcgaggatgatgaccttaccatcagatgtttcttccttatcttattcaaccgtctgttgtttccaactgctagctggggcataacaaaccatgaagtgcttctgacagaagaaatgcaccgtttccatgagaccgattggtgccagcttatttttaatgacctttgtgaagctgcgaagaagtggcataaccgaagcaccacaaacgtctccacgactatatacggatgctcaattgttgtccttttgtattacctggatcacctgcatgcagcggctgcccctcaaaataagcttggtacacctcgcataaaattctttgataagaatatcataaaagctttgactaaatccgacaagagaaagacacgccatggggccgaaccttttggatattgtgaactagattag

SEQ ID NO: 7191 - DNA, 552 bp, Zea mays
  Peptide Sequence Number=SeqID_50566
atgacgaagcaatcaatgcaaatgcaaataggttatagccctgggctctatttaactacaggaagccctgaccagcttcaggaggcaccggtcgggcgcggcggagtgggcgacggtggtgctgttcatggtgcttgcggtcgtggtgctgctgggcgccgtggccgtccttgtggtggtgctgctgctacagccccgcgtgtcgtacgtggcggtgcgggcgggctggcggtgctctgcgcctacccgttccgcgtgcccgccaggggcgtcctcccgctggcgtacgtggcgcgcgcgcagggcgccccgctgggcgacgccggcagcgccgccatggaggccgcgctccgcgacggcgtggtgccattccgggtggatggggaggcccggacgcgatggaaggtcgcggggatcatcggcgccaaccagtggacgcgcctgcgtgccagctccgcttcttctggcccaacggcaccgtgctccccttcagatgcatctccaagtccaagttcttgttcttctgaccgccgtgccctctgtattgtctag

SEQ ID NO: 7192 - DNA, 3894 bp, Zea mays
  Peptide Sequence Number=SeqID_50567
atggcggtcagcgcgagcgcctttggcggacatgtcgtcggggcgctaaagggcctgctgctcaacggtccgctgccgcgcaaggcgggcgcggagctccatgagaagctgaaacaagaggtgcgctacgcggcggacgccgagaaccgggtgctcgaggacgaccgcgcgcggcggtggctggcggagctgcggcgggtgctgtacagagcggacgaccgcatcctgcaggcgtacgacgcgcaagagcagcagcggacgacggcgtccgtattatctctaccggtgagtgatcgagcggccgtttcccttccctttttggcttcggtttttttaaggtcgtgccgagtgccgacaatatctgtctctcctcattcacagatcatgcgccgttttaccatggacatgtacatcaagcgagagataagcagcttgctcaaggacatagatttactatccgagaaccgtcctcccgcgctcacgagcagcgatacggcaacctaccagcacgacggcagatcgtcgtcatgcgacggtctggacgacgacctcgtgcgccatggcagcagtctagtggaggcagagaagatcgagatgaggatcctgccactggtcgacaagctgacagagcaccacgagccacctcgcgagttcctcatcttcgcgatctacgggccgggaggggtggggaagacgaccgtggccaggaagatcttcgacgaccagaggacgcagagcgccttcagcgcgcgcgcgtgggtgtccatctccagggcgtccaccgttgcccagatcctacaggcaacctgcgccgccataggcgtccttcaagggcccaaaacgaaggcggacgcgctccagacgcagctggccgacaggatcgagggcaggcgggtctttctggtcttcaacgtgcacaacggcggcggcccctcgagccaccaccaccagggcggcagcacaggcgccgagatattcgggaacctggtcgaggtcctcaagctcttccgcgccgcccaggggagccgtgccctggtgacgaccaccgacgagaacgtcgggaacgagattcggtcggcgcagatccagaagggcgccgccgaagggttcggcctccagaccgaccgcctgtggcagctgcccgtggaagacggctgggcgctgctcctccgggcagccggtctggagccggcgaaggtcacgcctgagctgaagaaggtcggcgtggcgatcgtgcagaggtgcaactgcctccctctcgccatcgaggccgtcggcggccttctccgccggaaggggtacgcgcaggaggagtgggagcgggtgcgcgatagcgaagcgtttgagctcaaggatcctgccacggggacccaaggaggggctgggagcagcgtgtacctgagctaccagcacgcgccgccgcgcctgaagcagtgcttccactatctctcgcttttccctgcggacgtcgagatcgagcggcgccgtgtcactcagctgtggatctcggagggtttagttgaccctggctcgtcggaagaggggtccagcaccagcagccgcagccgcaggcaccacaacaacaacacgcaggagacagccgccggtgagcagcagagtggcgcttcccaagaggggtccagcaggtccagcaggcacaacaacaacaacaacaacacgcagagtggcgcttccactgaaatcgccgccgccgccgctgctgatgacgatgatagagaggacagcacttcctcatcccaagggccacctagagagctacctcgcctcagcagcagtagacaccattctccaagaactagtctaccagataccatgccgagccatcgttcggatcaagaagaggtggctgactgctacttgacagaactcgcagggacgggccttcttcaacgaacaaacagaaggggtcagtacaagatgcacgatcaagtcaggaagatcgcagagtccctgactgaaaacgaggtgtgcgctggcgatcccaggtacgcggctactactacactgccggagaacctgattcgtctgtcgttcctgaacaaaggactcgccgctctccctgaaaacgtcgcgaggatgacgggtctgaggacgctgctcctgtccggcaacccactcggcgaaaccgacgtggacaccgtgtgcaagaacctgggaggatcactgcgagttctcgacctctcagaaacagagatccgatctgttccgaagtccttgggaaatctggcgcgccttaggcacttggatctttctcgtacgaaaataacagcagtccatgagtccgtcggccgcctcaggaggctgcggttcttgggtttgcgggggtgtggagatctcacttcgcttcccagaagcatacacaagttagcgaagttggaatacctcgacttcagagacagtggcgttgccaattccacaaggtcgttgcacagcctgaggcatcttactctccttcatggctttgtggtcgacagcgtgtcttcttcaaatgccgtacttctggaagatctgaagcacatgagccgtctaagtgacctgcagataaacattacaaaaaccgtagcaggaaagaatgcagacgacaagatgctgaaggagaaaggcagtctcagaaacctggagctcagatggtgtcctgttagctcagcggtggatccgaagacactggaaacaatgctgacgcagcttcatcctcatcagtgtttggtgtcgctcaagatcgacggctaccatggagctgcctatccagaatggctgtgttcctctgaccttccgaacctacagcgcctaagcctggaaaactgctggtcctgggagaggttgccgccgatctggcatctccagaagctgaggtctctcagaatggccaacctccccaagctgcaaagaatcgatatgccacagccaccagcggaggcggcggcggcggcgtttcctaacgtggaggagatggaggtcgagggcatggaagttctggagtgctggtcagacttccaacccggcgacctgctgcagctgcgcaagctggcgctcagacggtgcccgaaactgtgcagtctcccgggcttggagcactgcaaggtgatatcgacgatggagctgaaggacgcagaactagtacatgaactcgcgaacatccccgtgcaggagctggtcgtggaggcaatgccgagtcttacgcgagtgtcgaacctcccgctgatgaaggtcttcacggtggtcggctgcccgcagctggagaggctgtcgggggtggactcgctgcagcacgtccacgtgcgagacgacgagcaccagctgcagcggcttccggcgtggctggggggccagcagcatttcccgaggatcgagacgctggacgtggaaggcggagaggagctcctcgcgaggtgcgagcgcggcaatgaggactggcacatcgtccgggagatcccgcgcgtctacgcgtaccgttcgcctggcaggctgccgtacttctcgtacgcccggggcagcgacttcttctgcaggcacaaggcgccgcagggagcagatgcgccgcgcaagggccgccctcttcgctcgccggagtctgcggcctcgtcgtcgtcgtcgccgtccaggcccggaggaggaaacgatgctgcagcagcagaagcagctccggccgatgaggcccgcaggaggttctggtcacggggaccgcgtccggttgacgagacctacaagaagttcttgtcggtgatgtctctgttcgtcgtgatcgtgctctggatgatcacgagcctcaccgactcccatcgcaacctgctggaggacatcgccttgtttttcttctacgtctgcacggtgtgctacttcatttttttggtgacgaaacggcgcaatgtgtaa

SEQ ID NO: 7193 - DNA, 999 bp, Zea mays
  Peptide Sequence Number=SeqID_50568
atggccgccctcctgcggctcgccgcagcccgatccgccctccccaggcgcgccctcgccccacaccggaggctcgcggcggcggcggcggccgcgatggaggagtggtggtccgactgggagcaggacggcgaggaggaggcgcgcgcctcggcgccggccgccggccttgaccccgccggcgggggccccgggggcgtgcagtgggtcgtcatgggccgccctggcccgcagaagcacgcccacgccgcgcgcctcgccgaggtgctcgccgtgccctacatctccatgggcgcgctcctcaggcaggagctcaacccctcctcgcaactctacaggaagcagaagagcgtgctggccatgtcttccccgcgtgatggtccaccttcgtggacgggggtctctaagggtgtgtcgaagtgggctgatttagttccatttgcctatacacagattgcaaactctgtgaatgaagggaggcttgtgccggaggacatcatatttgggttgctgacgaagcggcttgaggacggatacaacaagggtgaaaatgggttcattcttgatgggattccacgcacccgtatgcaagctgagattcttgacgagattgtggatgttgatttggttcttaatttcaagtgtgctgatggctgtttcatgaagaagcaatcgagaggcaacatctgcgcccactgtggacagctctttgacgtcagcaattcagcatctacgaactgtagccccagcctcgggagctatacatggcattctcaggcagaacctgctggtgttttaggcctcgaagcctcaaggatggagaggatgcgcacatatgctgagcagaccaagcagctggaagattactacaagaagcagaggaaaattgtggaactgaagacatctgctcgcccggtggagacatggcaggggctcgtagccgccctgcacctccagcatctggactcgcccccgacaccgcacaaactcaccgcgtaa

SEQ ID NO: 7194 - DNA, 1062 bp, Zea mays
  Peptide Sequence Number=SeqID_50569
atgccttgctcctctcgcattcatcgcacccttccgccttccgggcctccagatggggtgcgccgcctggctgcaatctcccgccagtggtcatctagagggatgaccactagccttgtggtggagagaagcgagccgggctgtggcctccccctgccctcagcttcaaggatgttcatcatccgtgctggggaggagggcgagccgagttggggtccccccttccacatgggctggtgccgtcagctgccgcgtgtctggctcctcggcctggatggctttggtgccgcctccggcactgcctcctgccgcttggtcggggcgtggatgtccgctcaccgcacgggcgacggtcacgccatgcacaggagcaaggacctcttcgcgcgcgttggggcagctgccattcgccggtacagcactggtgcgcaggtggccactgacgtcggtgctgaggtggtcatcgccgctgaggtggtcgccgccgttggtgctggggtggtcgattccgctggcgagccgctcggagctagctaccccgtggccctactggcgtggaggcttgatttgttgaggttggataccagcgtgcctgaaaaggttgtcaataattctcgggaggctaagcggccacacaggctccggaccatcccatggaacggggtcccgttctctggagccggctcccaggctgtcggacctcccaactttcgtatcgggggccctaaactgcaagcctggctgctcaattcggatgtcgtcatgtcagtgcagatgggaaccaagcctcgcaccttggtgaagcgggagatgaacttccggagagtctccccgggctcctacctcaccgcatggaggtgggcctccacaccgtgctgctggaactccaacgggttcaatgttctgtcgtacttttctggcagcaaagtcttgatcgaggttgcgaccatcgatgttttggcggcgctcgcgcgccctttccaaggagacccgggcatcctctcccgcaagcctgcggttgagttctgcccggaggtcgttggtctatgcgccccttactga

SEQ ID NO: 7195 - DNA, 1509 bp, Zea mays
  Peptide Sequence Number=SeqID_50570
atggacattagcctcctggggtggtccggagcccgtgtagccgctcagcctggtcctgtaccatgggcctgcacgctccaccgccctgcgacaaaggcgaccacctcagcaccgacagcggcggccacctctgcaccgacgactcgccagcaatggcgatcacctcagcacgtgcgccattgcgaaaaggtcctcgcccccatcttcccatggggggcgacaacgaggccattaaagccaaagagtcggaaggctcgacggcaggtggcgctgatggtctcgccagcggaggcaaccacctctgcaacgggcatcctcaccagcggcggcgaccacctcagcgccgatgacagcgggcacctctgcaccggtgggcggcggctgcctcagcacacgcgaagaggtcctcgctcccgtcctcactgtgggagtgaggacaagaccatccaagaacgcggtcgccgcccccgcgacgtacgacatcttgtaccgccctccggtgcggccgccggcgcgggagaacctgtggatgtggcggacctgcgcatggcgcgaccatcgcccgtgcggtggacgggcagccacgccccaaacaaacggcagaaggcagcgtcggaggcggcgccgaggccatccaagccggggaacgaggcacgcggcggccggcggcacccgcagccggccggtctcgtgtacccgaagtttgcctcctccgcaaggctggtgaatgcccttcttccccaaatgctggaggaagaagcgggccgccagcccatgcggaaggcgggaccccaactcggctcgccctcctccccagcatggatgatgaacatccttgaagctaagggcaagggggaggccgcagcccggctcgcttctctccaccacaaggctggtgatctccccactcacgccccaaagcgtcacgggcaaagtctcccccgatgtgcaccagggttaccgccctatgacccgggggccaggccctacatgtcatacagactgatccgaagcacgaagaaggcgaaccaccgcacaaggagcgtgcaactgccccgcagttatgtgccccttcattttcggagcaaccagcggtcaggaaggcgaaccaccacacaaggagcatgcaactgccccgcagttatgcgccccttcattttcggagcaactagcggtcaggaaggcgaaccgccgcacaaggagcaagcaaccgccccgcggttaagcgctccctcatcttcgccgaaaccagcggtcgaaaaggcgaaccgccacgcaagaagtgtacgaccgccccgcggttgtgcgccccctcagcttcgctgcaaccagtggttcaacatgggggcccaggcccacatgtcatacaaccagcgcgccgcggtggcattaagtacgagaatcatgggccaatcaaccgtgggaataggcgtgacagtcggcttgaccctaagcgggccagcagtaattgcgccaagaggcgcgcaggagcagcaggccaaccgctaa

SEQ ID NO: 7196 - DNA, 822 bp, Zea mays
  Peptide Sequence Number=SeqID_50571
atggagctcaccggagcgacggggaagtgcgacggcactagctcgattggctcggggagaagcggaggagatggccggagctggtgtggagagaacggggctcgggcagctccttctataggcgcccagaagagggatggaggggacggtgagcaccgacgagctcgccatgatggcgggaatggagcaaacggcgattgggacggctcgggcaggcgaggggtgaggggatggctcgggtacagtggcggggtaatcaccgaggccggtgcgagccttaatggcgaggcgatggggcgtgaggcgctcggcggcgaacgcaccgttcccgcgacggaggaaagggcggaagggcttaccggcggcgagactgctctggcgggggagctcgtcggcggagaggagtccggcctatccagggcacaattgatcaatcaaataggtcagagagcttcaccagggatcaaggaaggcgggcgaccgaagtctggtgaggacgatcttggttctctggtgaagttctgtcgggtccgagagtttgggaagcttcacaagctattggcgaagctaaccgagcggctagcgcgacttggaagtgaccggagtgggctggccacggtggccgaggctcgggtggcaatggcgggcgtaagagagctcgccggagctaaggaggggcgtctggccggcgaaggcttgcaggttttgctgactggatcaagagatagagaggggagaaatcgggtttgtctcactgccgcgcacaaagagaagatcccggggatcaaggtgaacacgctcggtcttaggctcaagggctga

SEQ ID NO: 7197 - DNA, 1119 bp, Zea mays
  Peptide Sequence Number=SeqID_50572
atggggctcggtgtatgcggctcgctcttccaaggtggtgatgaggatgatggttttggttatgactatggtaatgcattgtgtgatgatgtccagttatgtaactgttgtatggctcgccttagacacactgcatggaagtctgtcatccccttcttaccctctcgtctcgctgagcgtccgctccgccgtccagtgacaggtcagtctagccacttggagaggctgcaccaccgcctgcacgaggagcaggagcgtcgacgacaggagctagagcagcagggctcgtctttctcacttcagcaggagatagagtctgtgaggagttgttcccttgtgctcccgctggaggtgccccctgcaccaccactgagcgccccagccgctggaggagacccaaacgacggaggcggcgacgacaactcaagccacatcaccgacctttccgccgaccaggagttggaaggatgggttgctcgacccatcacttgtgacgctactcgtgggtgtcacttccacgatgcgctcgacaccctgctacgtcgggcactcgaccgacgtacttggtccatcgagtatcgttgtgtggtcttccagcacagtcgtggggtttacccggaccgttgggaggcgacctgcttggtgcaccgtccggagaacagtctccagggtgcggaggtctgcttagagcactattccatctctgagcgggactcagctgaggcggccatgcaagatgtcgcacgacgtgcgctttcgcactactgcccagtgctcggcggggtagccgatggtctcaacctgaagtattacccccgccgcccatctggcagaacaggaggtgtggttgtctcacctgtcggtgaggacaatcctaggttgagcaacacagtcaacctagctgtcgtgctaaacacagagctggaccatgcattagacgagctgagtagggctcgtgctgagatcgcccagctgcgggctgagcgcgtggagcatcatcacctggaggatggctcccccgctcccgtcaggactcagcacccgtaccgctcacctcggtgtggacaccaggcttatggcaaccccgactgcaggaccaggataaatttagaaccatag

SEQ ID NO: 7198 - DNA, 348 bp, Zea mays
  Peptide Sequence Number=SeqID_50573
atggcgaaagagcaccaacccccacggggttgcgctcctctaacagcagcaagaagaagacaagaccggcagcaccaccacgagcgcgagctctccggcggtgagatcgtcgaagggggtggccctaacgtggatccctccagagaacaccggcgcaccccatctggaggcccggaaggcggaaggtgcagcgactcgaggcaacccgtgcatggcccagcggtggcattaagtacgaaaatcacgggccagtcaaccgtgggaataggcgtggcagtcagcatgaccataggcgggccgacagtaattgcgtcaacaggcgcgcaggagcagcaggccaacttctaa

SEQ ID NO: 7199 - DNA, 846 bp, Zea mays
  Peptide Sequence Number=SeqID_50574
atgaccgaggctcgggctacgctcccgaggtaccctaggacatttccgagaccagcgggaacgatttgtaatggaatcccaccggagggaggcaccaagccctcggaccctatcgaatgggtccgggtccagcaaatcacctgtagggaccgagaaaggggatgttgcaaaaaggatccttctcggcgaaggaaacgggccccgagccctcctactgatcaggggttcaaaggttgcgccctccggggttcggtaaccgccccagagcactcgggctccgagcccattactgatcaggggttcgaaggctggcccctcggaagggttcgacagccgcccagagcacgcagagtcagggatgaccctgggtacgtccgttacatggccgaggttcgggctacgctctcgaggtaccctaggacatttccgagaccagcgggaacgatttgtaatggaatcccaccggagggaggcaccgagccctcggaccctatcgaatgggtccgggtccagcaaatcacctacagttggcaaggtcgaagtgactacagtcacttcacccctttactgaccgttctgacaggaaaacagcactgttcatcccgctccggcaactgtgccaaccaccaggacaagactagcaacagtgctctcaaaccccctacggaagcaaggaaacgtcagcaagatccataccgcatcgccagctatgcttctacagggcacaaggcacttctccgacggccacattattacatctacagggctcaaggcacttctccgacggccacgttattacctatacagggctcaaggcacttctctgccagccacgttagcacatag

SEQ ID NO: 7200 - DNA, 909 bp, Zea mays
  Peptide Sequence Number=SeqID_50575
atgagcactcgacggctgacctctttctctctgaatttcacctgccctttctacgccggcctattaaaaaaagagggccagtccatcggcgtcatcgccgatggcatcgacaagaacgacaagccgcataaggtcaggctctactccatcgccagcagcgcgatcggcaacttcggcgactccaagacagtctcgctgtgtgtcaagaggctcatctacaccaacgatgccggagagatcaaacatatgtatgaacaacagaagaaaaagattcagcacaaaagatctatcggtgggcctgtagtggatcttggcaagattgtacaagtcattttggctaatgagataggtcttggcaagactgtacaggtgttgtcagcgtattcttttttcctggatgcatgcaggttttttgagcatattcttttttgcattgcaatagcaagcattgttctcattggtgaaattggaggtatgactgaggaggatgttgcaacattcatccaggtgagaagaactgcctgcaaatcattaggagtgctggcaaaattttctactcagtacacagagaaggccttggacttgttgatggacatgatgaatgatgatacagaagcagttaggctgcaggctctagaagcactatttcgtatggcaacatatggatgtttgagtgtgcaggagaagcacatgcatatggtattaactatgaacatactccgttcacaaatgcatgactggtccttccagatagataactatcatagatctggaatggttccattggctgacctatatgaggcggagggggtgattctattgcaggaggagaaggagggagtgattctcctagaggtggaggaggatgaagtggtgatcgacttcaagccaactccaagtgccatgtag

SEQ ID NO: 7201 - DNA, 498 bp, Zea mays
  Peptide Sequence Number=SeqID_50576
atggtgctctcatatctgtcagaggcttcctttgtgggaggcagtaaagatcaaagcggaatctcgtcgaatcgtgcaaatcctgatgattttgttgctctgatcggctatggtgtgtgctcaaggcttagctacgagtgttccagagaataccgcaacagcacagttccacttgcttcccacggactgccggaaccgggcggcgactacgtaccccgcactgactccggcggcgagctcctggtctcggaggaagggccgccgccgcgccggagagcgtgctcctcagaatggagtggaggtgaacgatccgcgggagagcggcggactggagggggaggcggggcggcggcggctcacgcggggtgggagagggggaggcggggggacgaacgtgggcgtgggcgggcggacggtgtagatttacggaagcgagcggacgatgcagattcaccgaaggcagaaccaggggaggcagcctaccccttgcagccttaa

SEQ ID NO: 7202 - DNA, 1392 bp, Zea mays
  Peptide Sequence Number=SeqID_50577
atgaagccaggccgaagaggcagcgggggggcggcgaaggctactgccctcggcggaggccagccgccgctggcggctaagtcggccgtccctgcatccagtagggcaccggacgctgcgaaggcggctgtcaccggtggtcccaagtcagcgaaggctgccccttcgtccagcgggttgccggaggctgcgaaggcggctcgagggttgccgccccctggcaagcgcgttgctaacttcgccaccgacattagtgtggaagattattttgttgggtcggacgaagaccagcttcttgttgttccgcctgccgcggcggccatgacggctgccgtggtgccaagggcgaagggcagtgctggtggcgagatgccggcactcactgccgtcaaggacgaggcaggtgccgtgtcccgccggctggaggagatgaaggaggcgctaagtcaggcggctgacttcgcaaaccgcgcggcgtcgggggccttgacggcagttgtgtttgccgaagtcgagagacttcggacgcaacatgctgacgccgtccgggaaaagtcggccgccgacagtaagtgccgcaagctagcggacaaggtggctgtgctggaggctgagaaggctgacctccggtgccaattggcggcagagagggaggaggctactgaggccctcgccaaggcacaggctgcgcaggcggaggccaatttggcgcgggcggagggcagcctcgccaggcagcgtgccgagcagctggaggagcggctcaacgcgctgcagagccgtgtggagagggccgaggcctcagcgcgcacggaggctgagcggacgcgcaaacagctcatggattcataccgtgagctaggcgcgcggacgggtgagtttgaagtgccggacctagagcccggacttcgctgccttgagtgggtgcaggaggagctgcaggcgctccccaccatcgtggaggggtttatgtcttatgcttctctggtcacctgcgagggggcgatgaacgtgctctctcacgaagggtgccgacactatgaggtcttcgaccaagctgatgaagatttggagcgtgatatctacaaggttgaggaccccgtagtgaaggaatccgccggagccctctacgaccggatgtggggcccccacggtcgagaggtggtcagggagtgggctgagacggcgaggagtcaggcggcgcgcggcgagagggtggatgacttcggggctttgaacagtgcgctgcctgacccggagccgaacccggcagtggctgtgcccgaggccgctcctgagccgcccccggaaagcgccgaaggcgttcccgatgcccttgcagccactgcggcccggcggagacccttcgtcaactgccgcgccgagggctga

SEQ ID NO: 7203 - DNA, 420 bp, Zea mays
  Peptide Sequence Number=SeqID_50578
atgggactctggttccgctcccgcgggtatgaacaacctccacgccagggtgcccgcgagatgacaaactccaagcggcttgccggcgacctcttcagcagcagagacaacgacctccaccttgggcggctaaacagcagcagcgatgacctcaggacaaacgctgttgtgaagaggccctcgcccgcgtccacacacgaggggcgaggacaagccgttaaggccgaagagtcggagggcgctgaccgtgggttcgaacccaccgacaccgcgccggcgaacagcggccgccccaaagcgcaccggcaggtcctcactcccgtcctcgccgaggccgccccagaacacgagcaccgccctcgcggcgtacgacgtgttgggcgaccccccggcacggctgactgtgcgaggaggacctag

SEQ ID NO: 7204 - DNA, 345 bp, Zea mays
  Peptide Sequence Number=SeqID_50579
atggcgcttccccccctcctcctccttgcggaaaggcgacgcaggggcgaaaacagcgccgctcgccccgctccgactgccgtgccaaccacccaggcgaagactgccaacaagtcacgatcaaccaccaagttcggccccgggcgcaacaggaagctccacctcgcccgacctcaggctccggcctcgggaggaggtctccgccttgcccgacccccggactcggcctcgacctcaggctccggcctcgggaggaggtctctgcctcatccaacacctagattcggcctcgacctcggtcttgggaggaatcgcttcctcgcccgaccccagcctcggccttaa

SEQ ID NO: 7205 - DNA, 453 bp, Zea mays
  Peptide Sequence Number=SeqID_50580
atgggcgattcacgtggcgcctgttgcgcacgagccgttcgaggaacggaacacgggtgcatcgtcttcacgccgtgggagagggctctcctgtcgcttcaggaggggacgcgagcctgcggggctgccttgagtcgcggtgttggttccacattcgaggaggcgcagcattggcgcgagtggcggtgtagcttcttggggagaaccctggagtatgtcagtggagacttcgcccgtgacgctaaggggtacaacgtcgccttgctcttgctgtcgttggaggagcgcgacctcgtggagatcggcgcccttcagccatcgctcggcttaaggatttttgtcgtgcagcccggctgcattccctcaccaatgggcagtttggtggggagaagcaagccgggctacggcctccgccccgccctcagcttcaaagatcttcgtcatccgggctga

SEQ ID NO: 7206 - DNA, 546 bp, Zea mays
  Peptide Sequence Number=SeqID_50581
atggatgagatcgttccaaagcagaacatagatccaggacggaaggtgatcatgctgtggaaggtgacggccattgagctagcttggatcgtcgacacaccccctacctggcgcgccagctgtcggtgttttgggtccgaccgcacacccggggttgcccctcaaggtgtttttaggagtaggacggtgtcgacgactgtagcaaaatggttcgtgccagttgcacgagggacagtggacaatgtttacagtgtcccacccctttgctcaaccatagttgatggtgaaaaggctctaattgcctttggcagttacaacgggaactacaacaacgagctgtcgtcgccgcttatggtgacaattgcctatgttgtaattactaccacagatgagaaacccagagatattgttgcgacagatgattttgatatcaagagaactcaacctgcaagtaattccaaaatgattgttgctgaaactgatgtacttactggagagaatggtaaactagcgaccagactggcagaagttcgtgatgaaaattaa

SEQ ID NO: 7207 - DNA, 861 bp, Zea mays
  Peptide Sequence Number=SeqID_50582
atgaacgaaaatggagatttgcaggatagaattgggattcagatgggtcaagttaagatggtagaaatcaaggaggccgcggaaaaagggagaaatgggaaggccaagaccgcggagaaggaaaggagcataaatcacggactcatgggtatcctcagttgggacagtaaccccatggcaaatccgccaagagcagagttccctcggaggaagaaccccgatggacacgagatggaaaagttcggactcagagatgacggacatgtggaccagtggcatctagccactggccctgttgctgccgccgctgctgtcgcccctgctgttgcccctgctgccgccaccgtcatcgtccttgccgccgctgctgccgcccctgccgttgccgtcaccgtcaccgtcgccgccgccaccgccttcgtcgtcgtcgtcgtcatcgtcgccgtcctcgtcctcgccgccatcgtccgagtcctcctcatccgaggagtactccgactcatccgagccctcgagcccggagcgctcgacggcccggatgtacgtccagacctccgccgcgagcccctgggactcgcgtcagacgactcacgcagggggatgggagccggggacccatcggattcagaggagaactcctcctctgaatactccgagtcaccaaaatcctcagatggaggagttggctcgcgcttgcgtttcttgcccatggtggaaatgcgggtagaagaaagaaagcaggcagtggagaacagcgagagatgtgaaaaaaccaggcaggcaaaggcactatttataggaaaagaaggcaaccgctcacctccaaccgtggtcactgaacagtcgcaaagcattcaataa

SEQ ID NO: 7208 - DNA, 240 bp, Zea mays
  Peptide Sequence Number=SeqID_50583
atgcgccgctatgtacgacaagctccggcgagccgcctcttggacgcggtccagagcggctgcaccgcgctgtccatcgtcaagcagggggacctcatggtgtactacctcgctgatgagcccggggtgcacttcgtctggcagcccagccaagagtcatcggcacttgccatgtcgcgcgcgttcgacgactactatatcaaggactgtgacgtcatctcggcgccggagttgacatag

SEQ ID NO: 7209 - DNA, 246 bp, Zea mays
  Peptide Sequence Number=SeqID_50584
atgtgggcagtcactcaatctgaactcgtacggtccaaccccagggttatgaaggctggggagcaccgggaggataaggagggggaatgttttgtctggtttggacatggcggtggcctgactccttccgaaaaaggagatcggcctcctgggactagtaattgtatcacatttgagtcccagaggattggggacgcttcaggtggtatcagagctgttaggttggctgcaggatgtaacccttag

SEQ ID NO: 7210 - DNA, 207 bp, Zea mays
  Peptide Sequence Number=SeqID_50585
atggcggcggtgggtgcgctgcggtcggcggtagtcgctgcaaagggggtgtggggcggtgctgctagtgcgcatggaggcgggcacgcgtgcgaggggcacggcttaatccaggctttaagggtaagcttcctggtatcttcttggggctctagccaaagtgaagaaaaacttcactacccaatgcatgcagaggactgggcataa

SEQ ID NO: 7211 - DNA, 228 bp, Zea mays
  Peptide Sequence Number=SeqID_50586
atggagaaaaagaagaagcctgtagcaagcttatggaggaccagatcatcaaagcatataagtctctggatgagaagtggtcatccaagttttgttgaagaagcaccagaggaccaatcaaggaaggaatccatatgggagtttgcaagggaaagccggatgctccgcaagggccagattttgttgaagttccatctcctcgaagagttgcaaagtgaagatatgtag

SEQ ID NO: 7212 - DNA, 219 bp, Zea mays
  Peptide Sequence Number=SeqID_50587
atggactgggtttgtgtctcgccggagaaaacgccacgcggtggcacggcgtcgcggtgtcctagcaagctgaggttggtgacggcacgtgaaccattgatcgtgcatcgaacatccctgattagaagtgaggtagaagagccagtggctgaggatcctggtgtccagcagattgaggttgctgagcagaagctcattgaaggcaagttgtgcccttaa

SEQ ID NO: 7213 - DNA, 195 bp, Zea mays
  Peptide Sequence Number=SeqID_50588
atggccatgatgggttcaacatcggaaaagatgtacctctaccagactaatactagaaaggccaacacgcaatgggagtggagagatggcgagagtagcgtgtaccctccatggcaagaggctggacggtggtgtatctgtgctcttggttggcgtgaacccgatctggtcttaagaaccccggtggcaagttga

SEQ ID NO: 7214 - DNA, 1005 bp, Zea mays
  Peptide Sequence Number=SeqID_50589
atgtgctcccactgttatgtggcattcccaccgtttgaggtggcagaggacgatgaggacgaaggggccctccggtgcgctgcccgcatgagaagcgggcgtgatttggttgaggaattcatcggttatggagtgtggcccttggcgcatggctgggtgcttggcgaagtgtgccctcaccagatgcctactttgggcgagcggctggtgcggagtcctacctttgctttggatttgcgcggccggaacccagccgcgtttgttcgtgaagtagaggatggggctgtgaggattgtggggcggtatgcgccgaggatggaggctctgcggagttgggatattcgtggatccaatgttcgcttgaaccgtgtctttgagttaaaccgtctgccatatggcggttaccctagagacgaggctgctgctgctatcgatcgccgcggaaaaaagccaacgaccacggctgaggaaggcccttctcgggaggctgcgccggccattaagaagagaaaactaggtacatcagctgaggggttgggggtctctggtcattttgctgtggagttaatggggacttgtgcgaccctcgggggaaggatgtcttcgcccgagctccgggagtcttcggcgcgaatgctggaggttaccaggggtcgatggccaaggaacgttccgatcccccgagcagccggcgaggacatatctacgtctcgtttggcccatgaaatgaagatttttccttatggacggaatattgctgttgttgtatcggtagtgatggacaaggatcgccaagatgcgacgcggaagcgccgggcgttcactagggtcggggaccctagtcgcgaggtcaagagggcgcggggaggcgcgaagtctgccgcccccggcagcagcaaactaccgccagctgcgaagccagccgtccccgggcccagcaaatcttcgtcggtgcgagggttgtcgcttccggctcgggcaagccgccctcggctgagcctatga

SEQ ID NO: 7215 - DNA, 585 bp, Zea mays
  Peptide Sequence Number=SeqID_50590
atgaggttctgcagcctgcgcgaccgcctggacaaagcggaggcctcttcacgcgcagaggttgaggacccggtgctgaagcagtcggctggggcactttacgataggatgtggggccctcacggccgtgagactgtccgggagaggtccgactgggctatggaccagatggcgcatgatgaagaggtcaaagacctcgggggtctagatagcgcactgcccgaggcgttgagtgcgaaggaggggactaggggggagctggcgccaacatccgatgttggcgagggccccttggcaactcccacgccgccccgtgccggccgctgctccaattggagtggacgcttcggtgttggcgagcgaaccggctgccgaagaccctgcggcgtcggtcgacccttcgcaggtggcagaataggggctagggctatcggtgttccaacatatgggcctgcgcaagcaaccgctgctgatgatactaattttgtggcggccgcaaccgtagtgcctgtcaatgacagtttaactggttctggatttgggtgtttttcgtctgatggtgagtctggaagtccgtttttctag

SEQ ID NO: 7216 - DNA, 2559 bp, Zea mays
  Peptide Sequence Number=SeqID_50591
atggtgcggagtcccgccttcgcgctaaatctgcgaaaccgtgatcgggccgccttcgtgcgtgaagctgaggatgaggcggcgcggattgttggccgttatgtgccgaggaccgagggccagtgcagctgggagatccgcgggtcgaatgaccgtctgaatagggtcttcgaattgaaccaactgccatatgacggctatcctggtcaagacgacgcggaccgtcgggggaagaaaccagtggtggaaactaaaggcgaccctgcgccggcggccgccccatcctctaagaagaggaaactaggtactggcatgggaggacttggggtttccgatgggtttgctagagagttgatgaggacatgcgcggccccgggggaaaggatgtcttcgcccgagctccgggagtcttcggctcggatgctgaaggttaccgggggctgctggcctaggaatgttcctatcccccccgcggccgacgaagactcttttacatctcgcatggttcgtaaatggagagtttttccttacgggcggaatattgctgctgttgtgtcggcagtgatggataaggatcgccagggagctgcacaaaagcggcaggcggccatccggcttgttgaagccaggccgaagaggcagcggtcgggtgcgaaggctgcggcccccggcggaggcaagccgccgctgccggcgaagtcgggcgcccctgcatctagcaaggtcgcgaaggcggcccaagcgttgccgttgtcaggcaaacgcgtcgccgacttcgccaccaacattagcgtggacgactatcttggtgggtcggacgaaggccaacttgttatggttacgcctgccgcggcgacagtggttgctgccacagcgccgaaggcgaagggcggggctcttagcgccggaggcgaggtgtcggccctcgcggttgtcatggatgaggcgggcgctgcgacccgccggctgaaggaggtgacagaggcgctaagtcaggtggctgacttcgccagccgcactgcgtcgggggctctcacggcagctgtggctgccgaagtcgagagacttcaaacacaacatgctgacgccgtccgtgagaagtcggccgccgacagcaagtgtcgcaagctggcggacaaggtggccacgctggagggagagaaggctgacctccggcgccagctggcgggggagaggagggagaccaacgaggctctcgttaagtcgcaggctgcgcaggcggaggctaacctggcacgagcggagggcaatcttgccagggagcgcgccgagcagctgcaggagcggctcaccgccctggagagccgcgtggagagggccgaggccatgtcgcgcgcggaggcggagcggacgcgccagctgcttgtggatacataccgtgggctgggcgcggggaccggtgatttcgaagtgtcggaccgggagtccggacttcgctgcctggagtgggtgcaggaggagttgcaggctctccccactgtcgtggaggggtttatggcgtatgcctccttggtcacctgcgagggggcgatgaatgcgctctcccgggaagggtgccggcacttcgaggtcttcgaccaagtcgaagaagattttgagcgagatatctttaaggttgaggaccccgtagtgaaggaatccgccggagctatcttcgaccggctatggggcgaacacggtcgtgtggtggtcagagagcgggctgaaacggcgagggttcaggcggcgcgtggcgagagggtcgacgacttcggggcgctgaacagcatgctatctgacccggagccagccccggtggaggccgtgcctgggcccgtccttgggccgaccccggagacagcgggagacgcgccgggtgcctccgtagccgctgcggccggcgaaggcctgcccccagaggtcgccgaagtcgcacctgatgcctctgcggcggctgcgccgggcgccgtagatcccgcagcggtggcggcggagataacagcggaagcaacggcggagccaacggcggaggctcccgcagcgttcaagattttgggcctgcgcacacaacccgctactactaaaattttggcggcttcgaccgcggaagatggtaatgaatgtggtgggtctgcatctgagtttttggattgtgctgactctgggagctcggttgagtggactgaggagtcgtcggaggaggacttggactactttgcggccttggatgtggctgcggcggaggcttcgccgcacgtcgcggacgcaggagatgtgccaggtcctagcaccgggagacgacgacgaagggcggttgcgaagcgtagagttagtgggacggagggggctcggcttcgtgcgtcttctgcggggatagccttcgcggtaggcttcggttttttcgcatttgtgctaatccggctgcgcccttgggcgacttctgcgcggatggtctttgcgatagacttcggttttttgggcacttgttgtgctagtccggctgcacccttaggcgacttctgcgcggatttgtcgcacgcgagggtggctagcgcttag

SEQ ID NO: 7217 - DNA, 150 bp, Zea mays
  Peptide Sequence Number=SeqID_50592
atggagagccacacaaagaagcccatcaacgatgttttcctcaagctcggcaatgtccttgccctcaaggagcatgaaaagctggtcgaggcggagcatgaagagcaggtcgaggcgatcctcctccacattggcgctgaaggagcctag

SEQ ID NO: 7218 - DNA, 141 bp, Zea mays
  Peptide Sequence Number=SeqID_50593
atgagcaagaacacaagagacacaagatttatcctgaggttcggtcacaccaccaaggtgccctacttcctcgttgaggcgcccacaaagagccaggggattaagttctacaatttgaaccttggtacaaataaagtatga

SEQ ID NO: 7219 - DNA, 444 bp, Zea mays
  Peptide Sequence Number=SeqID_50594
atgggcaagaacaacaagcgcaagcgtgagccgactcctccatcgaaggagtttggtgattcggaatactcagaggaggagttctcctctgagtccgaggggtctccggctcccatccccctgcgtgagtcgtctgacgactcagacgactcccaggggcttgcggcggaggtctggacgtacatccgggccgtcgagcgctccgggctcgaaggctcggatgagtcggagtactcctcggatgaggaggactcggacggcggcgacgagggtgaagacgacgacgacgacgacagcgacggtgacggcagcggcagtggcaggggcggcggcgacggcagcagggacagcaccaagggcgacagcagcaggggcagcaccaagggcagcagcaggggcagcaccaagggcggcggcggcagcaggggcagggccagtggctag

SEQ ID NO: 7220 - DNA, 453 bp, Zea mays
  Peptide Sequence Number=SeqID_50595
atgcggcacctttggcaggcgaagcaggcgacgcttcacctccgccatgatgaccgcgtcaaaaaagcaacagggaccgggaaaggggatactccgaaagggacccttctccgcgaaggaagcgggccccgagcccccctactgatcagaggttcgaaggctggcccctcggaagggttcaacagccgccttagagcactcgggctccacgcccactactggtcagaggttcgaaggctagcccctcggaagggttcaacagccgcctcaggccactcgggcttcgcgcccagtactggtcagaggttcgaaggctggcccctcgggagggttcaacagccgcctcaggccactcgggctccgcgcccactactggtcagaggttcgaaggctggcccctcggaacggttcaacagccacctcaggccactcgggctccgcgcccactactga

SEQ ID NO: 7221 - DNA, 459 bp, Zea mays
  Peptide Sequence Number=SeqID_50596
atgaggaccaacacgacggaaggagttcggcgaagggtggggcagggggccacggccacgcagggaggccgcctcgcgctgcaccgccgggggcgggcgcgccgggactgcgccgaggtggacgcgacgagccgcgcacagggcgagggggcgcgcgcgccacggctggccgcgccaaacgctgggcgccggagccgccacgccggggtgcccgcgccaaggcagcgcgcccgcgctggggccacgccggccacaccgcaggtcccggggccgcgcgcccttgccgccgagccgggccaggacggctggctaggctgcgtcaccggccgccgcgacgctgctggccacgtctggccgctgtgcgctggcgagccgcgccgggccgccgaggccgctgcagggggggccggggagagggaggggcgggggaaggggagggcgagcggcgtcgacggatag

SEQ ID NO: 7222 - DNA, 195 bp, Zea mays
  Peptide Sequence Number=SeqID_50597
atggcgcagatcacggcgcaaagtctgcccgaggcaaagcttacccatgatgaggtatcaagaaagggtaatcaaatttcaaggaaggaaatgcatcaacggtttaccacacaactcctatcacctaatgcatcaaacaaggtgataaagattttaaaacacaaagaggtggcaaatgcactggggcttgcctga

SEQ ID NO: 7223 - DNA, 150 bp, Zea mays
  Peptide Sequence Number=SeqID_50598
atggccatgatgggttcaacatcggaaaagatgtacctctaccaggtgaagaagcagcaaacttttgttctggtcagggcttctgttccaaggtggtaccaaatgaagaaaatcaagactgaagctgcgggaggaaaggtccttcgttaa

SEQ ID NO: 7224 - DNA, 174 bp, Zea mays
  Peptide Sequence Number=SeqID_50599
atggagagtcatgatctccgggcagaaagggaatcacgacttgtgggtggcaatgagattgatggttctggttatgactatggtgctggttgtcagcattgcaaccactgctcaggagaagatgaagctgtggaaggagacttccaggagttccaagactacgacgagttctag

SEQ ID NO: 7225 - DNA, 264 bp, Zea mays
  Peptide Sequence Number=SeqID_50600
atggccacgagcgcggcagcgccattgctgaggccgcacatcaaaatatccgttgcgttgaactccgttccaaggggtgctaaacacagcgtagaacatggcgagcgtgatagtggactcaccagtgatctgcgcagtccagaccacccgcccacggcgcatcgcggtattccgagtcccagcgaaaaattggatgttcccagctctcttatcgtcgaattgagggttgcagaagcttccacaagcgctcacgacccttcttga

SEQ ID NO: 7226 - DNA, 159 bp, Zea mays
  Peptide Sequence Number=SeqID_50601
atggcgagagtagtgtgtaacctccgtggcaagaggctggacggtggtgtatctgtgctctcggtgaagaagcagcaaacttttgttggttatgttccaaggtggtaccaaatgaagaaaatcaagactgaagctacgggaagaaaggtcctccgttaa

SEQ ID NO: 7227 - DNA, 552 bp, Zea mays
  Peptide Sequence Number=SeqID_50602
atgccccctgcaccaccacagggcatcccagttgcaggaggagaccctgacggagacagagacgacaacgacaatggtggcagttcgagccatagcacgaagctctcagaggagcaggagccggaaggatggatcgcccgacccatcactcgttacgccgctcgcggttgtcatttccacgacgctctcaacaccttgctgcgtcgggcctttcaaccgacacacttggtccatcgagtaccgttgtgtggtctactagcatcatcgcgggttttacccgggccaatgggaggcggggtaattgacagcctcgatctgaagtactaccattgcccctcgaccgacaatgctggaggtgtgattgtcacacccattagtgagggcaatcccaggctgaacagcatggtcaacctggccgtcgtgctcaacaccgagctataccacgcccttgatgagttgggaaaggctcgggcagagattgcagaactgcgtgctgagcgcatgatgtctgataacaggcgcagaggtggaaggcatgctcagcaggagtag

SEQ ID NO: 7228 - DNA, 234 bp, Zea mays
  Peptide Sequence Number=SeqID_50603
gtgcctgtggcaacaaggtcgaggccgaaccccaacaagagtagctcactggacaagaaatttatggagagcttcctagaggcatgcagtgctgatgaagatggcatgcttggtttttgtgttcaaagtgatggcaatggacaaaagcacctaagtgccatagcggctaatgacgagtctatcttgtccaataccaatggtgttccaggatttccgccaaagaaggcaacctag

SEQ ID NO: 7229 - DNA, 579 bp, Zea mays
  Peptide Sequence Number=SeqID_50604
atggcccgcgcccgcgcctataaaaccctcccagacttcgactgtactcttccgcgcaccctcgaacctcaccggagtctagctcaccgccgtttgcccgtgcgcagcgtgtccgcggccgcccaatccctctgtcaccgtagaccggccagtagagccattcccaactccgtccagccctcggagaagactgtgcacacctccgtgaagctccccgagcgaggaatcggagtttgcttcgccggagaagccagtccacgctcgccggagctctcaaccccgccggagtacatggaccgggtaatccactcaaccatccttcgattccttgtgcacacggtcgctacgttaccccgtgaagctcaccgtgcccttggattgaaccagttcgccgtggtttggccgggggaaggactgcgggtgagagggagagaagactgtaatcttgctgacggagagtacatcctcgtgccggagcaaggagctgctcaggaggtagccccggatccagcacccgagcctgcaccagaggacctgtctgccactgctttggaaggcaagccccggttttatgcataa

SEQ ID NO: 7230 - DNA, 1398 bp, Zea mays
  Peptide Sequence Number=SeqID_50605
atggatgatgattccacggacgacgagttcgttcgagctgttgaggccgaggagcggctacttgaagctcaaaatgaggaagacgatgctcgatgtttcctcctcggtagcagttctgctgctgctatcgatgttgatggctccaatgcggggataggtacggagacaggaacagcggggacaccgggcacgacggagacgcacaaccgatccaccagcccaacgtccgatgctagcacatctgttgttgtccctggtaagcgctctaggaggaggggtcccacctccaaggtctggttgcattttgaggaggttactgagaaccagggaggcaacgagaaaaaggagttcggaagtcaaatggaggttcgctgccaaaccaacttttgccagaatgaagatggtttccccaagttgctgagagcatgcacagttcgcctcggaatcaggagtcaaccagagtatgatggtcgtgagttcgtcgagcatggcacagagaagtgtgtcgtgactgtatacattggatccagtccacaccatgtggaatggagtgtcactgctgctgggcacagattcaaagacacctgccaagtcgtcgctcgcaaggcattgagggccctgtgtcagatctatgaagaagaagtggccgacactccgctcagattctttccgccctttcagagagaccgtcccgcttggatggccaggatgcgtgcattggaagggcagcagttgcttgaggatgaccccacagtcgtgtacctcactgcatacctgctcacccttgatgcacagtatgatttcttggctcggcaccaccgtcagatgattgctcgagcagaagatgcagagaagctcaaccgtaagctccatgtggatctcaccacagctcaagcccgtgtagctgccttggaaagtcgtgaagtcattgctgttgaagccctgaagcaagccaaggatgagcacatccagaagttgatggaggcctacttggtaacccataaccaacgtagagccctgcggatccaagagcctgctccatccaacccagttcaacccaggagagctgaagacccccagattcttgaaggtcacccggtctctatcagaggagagaagaaggcttgggaactcccggaaggaaccatagtcttggaaggaattccagtcttccctcaggctatgaataagcaagagcaccccgagtcctcccaagatcccctgccagagttgtttgagcccctcaccatgaagaagattctagcaccatcccttgaggtcaaggaagaagctgcaagcaccccgccagcaccaccgccctctgaggagctacaagagccagtcccgcttgaagaagagttcgaccgcgtcttgccatctcagtcgccgccagaagaa

SEQ ID NO: 7231 - DNA, 477 bp, Zea mays
  Peptide Sequence Number=SeqID_50606
atggacaggccggggaaaagagaaggtgatgcagctattgaaataatgtcatttctaaagaacaggaaactaaggctatatactttctctgtgaacagatatccattggagttcacctctaggaaaataggaatcattactccatacaaaagccaactctctatacctcgttcaaagttcacttcctcttttggtcctgagattgttgccgagatggaaataaatactgttgatggatttcaaggtcgtgaagttgatatcttgttgttgtcaactgttagagcctcaaattcttcagatggtagccatcacactggtgaagcacacagcattgggtttgttgcagatgttagacgtatgaatgtcgcactaacacgtgccaggctttctctatggattgttggaaatgcaagaactttgcagattaattcacactggaattccttagtatgtgatgctgaagaacggaatctgtaa

SEQ ID NO: 7232 - DNA, 597 bp, Zea mays
  Peptide Sequence Number=SeqID_50607
atggccggctttcggcaaggtccggacgatttctccttcccgtacacgagcacgaggacagcgcacgacaggctccacggttgcctcttggcggcaggatttgaccaggaggcatgccacagccggtaccaatcggccatgtatcgccgaaacccgggcaggggacctagcgagcacctcgtctccaagctgcgacggcacgaagccctgcagaggcggtgcggccccggcaccgcagcctactccagcgcgctggagcagctcaagtccggcaagaacgccggcgagtcccccgtgaatctaaagtgcaggtacctggtgtccatctcgtaccgcgggcttgggaaccggatcatcgccgcggcgtccgtgttcctgtacgcgctcctcaccgaccgtgtgctcctcgtcgactccagcaacgagatgggagagctgttctgtgagccgtttcccgacacgacgtggctgctgccctggaggagcttcccgctgtggaactttagctccgacacgcgcccacaacgaagaaaccaccacgacatccacctcccatttccccgcgctcggatcggcggtgttggcaaaatcttctaa

SEQ ID NO: 7233 - DNA, 522 bp, Zea mays
  Peptide Sequence Number=SeqID_50608
atggaggggctccatgccaagaagcggctccgtccggagattttaggggagtcagatgggagaagtttggttggcgacggcggtgccgctgtcgcgactgttgccccagctacatgtggagctgctcccacagccgaggcaaaggaagaagagaaagtggaagagaaggaagtgatgatcgcgcgcgcgcgctcgtccgccgtcgccctgcccagcccttcgccggtcctttcccaggccttcgacgcgtccttcgccgtcgaagagtccccagcagactggttggggtccggccaagctgctgtcctccttcccgtgcatttgcagctgtcagagctcaaaagattcagcttcccaagaagcaaagtcattgtggatggaagagttgtgaataaagctggaacacaagtatctgacaagtctgtcatcgaaatcaaggctgaaatcccaaaatatgattatccacaggtggctttactgactgtttacttcagcatggagcatcacatgtttatggtgtag

SEQ ID NO: 7234 - DNA, 1185 bp, Zea mays
  Peptide Sequence Number=SeqID_50609
atggaggcccaggcccacacgtcacgcaaccggcgcaccgaatgcttcatgcaaagcaactgcaccgccacttgcgccaccaccgcgcctcctcgattgcggaaccaataccgcgactcgaggcgacccagcgcacgacctagcagcgccagcctggcgcggcggagcagcgggcgacgcttcgccttcgccgtaataaccgcgccaaaaaagggaccgggaaagggggataccccaaaaaggatccttccccgtgaaggaaccaggctccgagcctccttactgatcagaggttcgaaggctggcccccccgaaaggttcaacagccgcctaagatcacgtgggccctacacccactactggtcagagaggctcgggggctgctctcgcaaacccggctccggccgaaccgttgacagcgtcaacataccagcccgagaacttgggccccgaccgtacacccgggctacggccagttcgcatgagggaacaaccagaccagccgaagcattacgcgaggcattaagacctcgaaggagtgaaaccactcctccgaggcctcgggggctacacccggcgggtgtgctcgcgcgcacccaccggaacaaaatgcaaccaagaaaggctggtccccttgcaaaaaagtgcgacgaaagcctccaagcgagtgctaacactcccttcgaggctcaggggctactgacggggaccataattaggggtaccctcaagactcctaattctcagctggtaacccccatcagcataaagctgctaaggcctgatggggctcggactcgggctaagtcccggaagacggcgaactccgctccgcccgacccagggctcggactcgggctaagtcccggaagacggcgaactccgctccgcccgacccagggctcggactcgggctcagccccagaagacgacgaactccgcttcgcccgaccccagggctcgggctccgccctggcctctgccgacgacctccgcctcgcccgacccaggggctcggactcggccccggccatggaagacagactcgacctcggcttcggaggagcctccacatcgcccaacctagggcacaggccagccacgtcaacaggaggcgccatcatcaccctaccccgagctgactcgggcccgcaagggaacaagaccggtgtcccatctggctaa

SEQ ID NO: 7235 - DNA, 864 bp, Zea mays
  Peptide Sequence Number=SeqID_50610
atgtcttcgcgctcccttatgcatcgtgtctttccacctttcaagcccccggatgggggatacccgccgtctttttgcctcatcgttggaggaacgcaactccgtgggagttggtacctttcagccatcgttcggcttcaaggattttcatcatgcaacccggctgcacccctccgccggcggtcacccaagatggtgacctccagcttgatggtgggggaaagcgtgccgggctgcggcctctacccctccctcagcctcaaggattttcatcaccagggctggggaggggactgcaccgtgcctggctttcggacgcgagtggcttcggagccgctcgcggcgccgacgtctgccacggcagctggaagaggttcttccgccggcgaggtagccaaggccggccacggaccgacctccaactctacggccttctgcccgtccttgcctcacgagtttgggcatgggcgggggcctctcagcagcagcatccgccctgaggtcagtgctgccgctgttcggccccccggagcagaagtcgtcgtcgtcgctgctgctggagtgggcgacggcgcgccgttcgtcggtcttctgttgcttcgcaggccctcccccatcgagtgcggttactcgcctgttgattatctgaaccgcttcaccaagcatgagtcgccccgtgtcaaggtgacgagtgagcgattgcccgggcgttgcgatgacgtcgtccttcggagcggagatcctcggaccgcgtcgccgtccgaggctaggtcggacctcgctgaaggtgtcgtcgatgccgagggtgctactgcccccttccagcatcaagacccgagcctgcgggatcagagtgtcttgtag

SEQ ID NO: 7236 - DNA, 456 bp, Zea mays
  Peptide Sequence Number=SeqID_50611
atggagcctggcggagggacaactgtcggagcgattgagtccttgctgacgtcctcttgcttccgtaagggggctgagagccgccgtcgtcacagacgggcgcgcggcggcggtggtgggcgcgctgcggtgtcggcggcggtggcggacgagctgcggtgtcggcggcgggcgctcggcaaggcacggcgctcggcacggcgcggtgtcgacggcgggcgcggcggccggagcgcgcgcggcgcagcggccggggcgggcgcgcggcttggcggctctggcgagcgcgcggcgcggtgggcggggaagcggggcgaggtcggcggcgcgcggcggctgcggagtgaatcgggcgcgcggcggctgaggaaacagagaacaagcaagcgcgcggagaagaaaccgcggcgaaggttaagtcctagctcggcgccaagatctatggcgccgagctag

SEQ ID NO: 7237 - DNA, 375 bp, Zea mays
  Peptide Sequence Number=SeqID_50612
atggcctgcggcaatatactcggcttcagcgagcttgggaggagttgccatatgaaattgggaggaaattcctctgcaaaatgctatgtcaggtgctctgatgggagttcacgatggtacagtgcccccaacggatcagatcggacgcagcaaaagaatcccaccgccggtgacctccccgccgcgattcgcgtcgccggcgtcgtgattcacggtcgggaacacgaagaagtggaagccactgaagagcaagcaccaccacctttggaaacacaggctgagaacggtttctacttcgatatttgtggatctgagcctgactcacccataaacaaaggcaagccccagtgcatttgtcacctccttgtgttttaa

SEQ ID NO: 7238 - DNA, 645 bp, Zea mays
  Peptide Sequence Number=SeqID_50613
atgacttctcacggatcctcggacggagggaacgcacagtcccacacggacggacttgcacgagagggttttccccgtatcttgtgggaggtgcttcagggagccggttacacgacgcctccccagttcgtggtgcagctgttcgagaagcaccgagtgccccgctgtagggtgaggatgtccctagagcctcatcccttacagccaggctggcgttcgttggactccgagtctttcggataccgggcggaggacactatcaaggcgattgctctccacgggctgaccaccttctgtggttttcaccccttggagttgtctactcatcccattggcttgttccctgttgaaaaggaggacgacccaatgtggaaagaccgagtggagcatgccaaggatatatgggctctttacccagggcagactgctcacttgacggtggaacatatgtccaacgagatccaggagcttgaggagctagtgggaacccgggagaacaccattgaggagatccaggacatggaggccaatgaggatgtcgacatcgagggaggagaggagccggagcccgcatctagtctggacactgctggctcagggagaccaccttcccctgagtcgagcgttgcctcgtttgctcactag

SEQ ID NO: 7239 - DNA, 591 bp, Zea mays
  Peptide Sequence Number=SeqID_50614
atgtctccggcgccgagttcgcatcattcgcaaaccaattcgaggaaggagaagcggatgcggaaggtggacaccttcgcgccgcacaacgatggccaccaatggaggaagtacggcgagaagaagatcaacaacaccaacttccccagcgaccactcgtgcaacagcgccttcctcccgctctccccctccgagttccagctgcggacaccgtccgggaaggccgtctccatctgcttcgactcctcgtccggggcggcggcggccgtggcgtcggtcgccaccaatgctagcggcggctcgccctcttccagcgccgcggcggcgcggcgaggcacgccgccggatatcagttacccgtccgacctgcggcggtctgacacttacccgtggggcgccggcgccgtggagcagaagctggcgtcctgcgccaccgagtgccacgacgccttctcggccggcgccgtgccggaggaggtggtagatgcaggcagatttgggtctatcagggacgacagcaggcccgggttaggtctgctaaataataagacttcagctcgtgctgatgaggcaaagaacatggttaactga

SEQ ID NO: 7240 - DNA, 558 bp, Zea mays
  Peptide Sequence Number=SeqID_50615
atgcctggcccgtacatggttcgcattcgggttggccttctaaaacccgggtgtgacagtcggcctcgctctcgggggccgaccactcagggctgcggcccaccggagagaggacgaagcaaaccgtcggaaacaagggcctccagatcctctacagtaacggtggagaaaggccgggtcacgcggcggaacgatggtcgccttatcagccatcgccgagcggaagcggtggaggcggaggggatgagggatcaggatagggggatatttcggaaaaggatccttctcagcgaaggaaacgggccccgagccctcctactgatcaagggttcgaaggttgcgccctgcggggttcggcaaccgccccagagcactcgggctccgagccctttactgatcaggggttcgaaggctggcccctcggaagggttcgacagccgccccagagcacgcagagtcagggatgaccttgggtacgtccgttacatggccgaggctcgggctgcgctcctgaggtaccctaggacatatccgagaccagtgggaacgattttgtaa

SEQ ID NO: 7241 - DNA, 438 bp, Zea mays
  Peptide Sequence Number=SeqID_50616
atgggcaagaacaacaagcgtaagcgtgagccaactcctccatcggaggagtttggtgactcggagtactcggaggaggagttctcctccgagcctgaggggtctccggctcccgtctctcccccggcgtcgtccgatgactcggacgactcccaggggatagccgcggaggtctggacatacatccgggccgtcgagcgcgccgggctcgaaggctcggatgagtcggagtactcctcggatgaggaggactcggacggcggcgaggagggtgaagacgacgacgacgacgacgatgacggcgacggcggcagcagtggcaggggcggcggcgacggcaggggcagcaccaagggcggcagcaggggcagcaccaagggcggcagcggcggcagcaccaagggcggcggcgacggcaggggcagggccagtggctag

SEQ ID NO: 7242 - DNA, 412 bp, Zea mays
  Peptide Sequence Number=SeqID_50617
atggacagaccgctccatcggtccccaccgccccgatggatagttcctatgaatgagccgccggtgtaccgcccagtcaccatccaccatgaccccaaccacgttcacccgatggtgtcaaaggttcacactcagccaataaaaagatcaagtttttggattcaacaaaggagcaaagggccaaccgaaggctcctctggtctggcgcaccggactgtccgaggcgactccgctataattcaccggactgtccggtgtacaccggacagtgtccggtgctccaagggaagtcgggctcaggaactcgccagcttcgggaaatgccaacggctagtccgctataattcaccggacatgtccgaagtcaggcgcacccattctggcacaccggacagtaaacagttcttgtccg

SEQ ID NO: 7243 - DNA, 264 bp, Zea mays
  Peptide Sequence Number=SeqID_50618
atggcgcctttggcaaggcctgactgcctgtcagtctcactctgtcaagtggcactgcagttggagtggcgcaggcggcgctgtccttctgttagatcgctttatgctgatgggggttaccagctgagaattaggcgtcttgagggtacccctaattatggtccccgacaggcttccactacacgacggttcacttacagctacctacggttggttgctaaaatagccttcagcgacctacggttggtcgctaaaaacttttag

SEQ ID NO: 7244 - DNA, 162 bp, Zea mays
  Peptide Sequence Number=SeqID_50619
atggtgggtacaagtgcggtcactacacggcggcagccggggtcagtggagcattgtaccatgcaggatttggttgatggtgtgacttggcctaccaccctgccaccaggttggacggtcgagtgggatgtggctccggcaggagaggagcatgaggagtag

SEQ ID NO: 7245 - DNA, 1122 bp, Zea mays
  Peptide Sequence Number=SeqID_50620
atgggcaccgaacatggtgtctccagtgagctgcaagcggggcccacgcgatctgaggcgactgttgaacccctcggagggctagccttcgaacctctgatcagtagggggggctcggagcccggttccttcacagggaaggatccttttcgggggcggccgttgcgcgtgcgcgagccgttcgaggaacggatcacgggcgccctgtcttcacgccgtgagagggggttctcttgctgcccccggacgggacgtgagtctggccgacgacgtgaccgcttctcccgcccgcccgccaccgtcattactgccggcccactttcggccgtattgaccgtcgcgccaggctggcgctgctgggtccatttggcgcgccggttgcgtgacgcgtgggcctgggcctccatgctggcgtgttgggagtcagagaagcgcgtccacctggcgcgattgcatgccgcctgcatggctgcccgccccttccgctcgttggtctgggcaaagggagagttgcctttaaaaggagggcgacccctttcggaaggtgaccatgtcttcttcctcccttatgcgtcgcgtctttccaccttccaagcccccggatgggggtacctgccgtcttttcgcctcatcgttggaggaacacaactccgtgggagttggtacctttcagccatcgttcggcttcaaggattttcatcatgcagcccggctgtatccccccgccggtggtcacccaagacggtgaccaccagttcctgggtggggagaagcaagccgggctgcgatcttggtcccaccctcagcttcaaggatgttcatcatcctcgctggggtgggggccgggctgagccggcgctctacctcacgcgcgggtccgtgggtctccctctcccgcggcgttcgggggagagggcgctcactggccctgcgggcggcccggacttcgacaacgcggggctggtcgacggcgggcgtcgtcacctccagcgtgtcgggctcgtcggcttggctcccggtggcccctcccgccggagggcggctgccgcgtcgtccgcgcccaccctgaggcctgcgctgctgcagctcgaccatccggagcgggggtcgttgtcgtcgtag

SEQ ID NO: 7246 - DNA, 399 bp, Zea mays
  Peptide Sequence Number=SeqID_50621
atgtggtgcaagcgtggtccaaaacgttatataagaaagaaacaattcatgcatatcttgtgccaaaggttcatctacaactatactaattcgactgtccggaataccgtagattattccggacaggagaagctttttggaaaaacaggccaagtgcggaccgtccggacccctgcggcggaccgtccgcgacacaagaatgaccctcggacagaaccaatgcaaaaacacaagtttccactacagactgtccggaggaaaagcaaagaccgtccgagccctcgcgcggaccgtccggcctcaggcgcggaccgtccggtcgccgttgatctacaggggcggaccgtccggacctggctcgcggaccgtccgcgctcggcagaatggtgcaacggctag

SEQ ID NO: 7247 - DNA, 430 bp, Zea mays
  Peptide Sequence Number=SeqID_50622
gtgccaaaggttcatctacaactatactaattcgactgtccagaataccgtagattattccggacaggagaagctttttggaaaaacaggccaagtgcggaccgtccggacccctgcggcggaccgtccgcgacacaagaatgaccctcggacagaaccaatgcaaaaacacaagtttccactacagactgtccggaggaaaagcaaagaccgtccgagccctcgtgcggaccgtccggcctcaggcgcggaccgtccggtcgccgttgatctacaggggcggaccgtccggacctggctcgcggaccgtccgcgctcggcagaatggtgcaacggcttggaagtggttggtggctataaatacaaccccaaccacttccattcaacacatccaagcattccaaccttcaacattcaatacaagagctag

SEQ ID NO: 7248 - DNA, 327 bp, Zea mays
  Peptide Sequence Number=SeqID_50623
atgggctacgtgcaagtgaacgcgagtgcgtgctacaagaatgtggttttggggttgtcatccatgtgcggttctgcgaatcgcgtcgtgcggggagccatgcgcaggggtagacgcgtgatgtccgtcttgacgagcgaggacatggcgcccacctcgcagtggctggtcggggttcgtgcaggggctatccgagggtgggacgaggttgctgctgtgcgggatcggcctgaccgcgaccgcgaacagacgaggacgttcgacagcggtgactcggcacggctgaccggctacgggcgcacgacacacacggggtggccgcgctga

SEQ ID NO: 7249 - DNA, 387 bp, Zea mays
  Peptide Sequence Number=SeqID_50624
atgacaaaggaagccaacctcaatggcagcaacacagctcccaatcttcagggccacaacaaagctcttctaggggcagaggcagcaggggcttcggaggaaggtacggagatcaacccagaagactatattgcttattctgcggtgaagacaagggccacaccacaagaacatgccaagtcacaattcagaagcaaaaagagattgccgaagctgaggcacgacagaattagccgaagcagacttctgaagtcatcaaagtcgttcctacgggagcacatacctatcgacgacttcgtcgtcgttggaattagtgacgctcattacatccagcgcttctttcatcacgagatcggcctagggctcatatggctcgggcagcggtga

SEQ ID NO: 7250 - DNA, 510 bp, Zea mays
  Peptide Sequence Number=SeqID_50625
atggccttgctctccacagtggaaacatgctctgtttccaacctgagctggtgctgcctgattgttctgctgggctgttggggtgatggcatcagcgtgggcatgggtggcgagggtgtcgagcgcatcgtggaagtgacacccgcgagcagcgtcgcgagtgatgggtcgagcaacccatccttccggctcatggttagcagaaaggtcggtgtcgtggctcgagctgtcgtcgccacctccgtcatctgggtctcctccagcagctactccagaagctggggcgcccagtggtggtgcagggggcgcctccagaggaagcaccggggagcagctcctcacagactctatctcctggtggagcgagaaagaagagccctgctgctcctgtcgtcgacgctcctgctcctcacgcaggcggtggtgcagtctctccaagtggctggactgtccggccacgggacggcgaagcatgtaactcctaggctggagatagatgcaaattcatga

SEQ ID NO: 7251 - DNA, 861 bp, Zea mays
  Peptide Sequence Number=SeqID_50626
atgaatacgttgtctcgcgagggctgcagacactacgaggtcttcaaccagtcggacgagagctttgagcgcgagatcttcaaggccgaagaccctgttgtgaagcagtcagcggggcactttttgataggatgtggggggcgcatgatggagcgtgccgaggacgtcgaggaccttggaggtctggtcggcgcgccgcccgaggctgcggagggcaatccggtgctgcccttggatgcaggtgaaggccccttggccgtgcccgtgcctgctatggccggagaagaccctgcgtcggcccctgagccgacggtcgaaggtgccccggagacggtggcggagccgacagtcgaagaccccacgaccacgaccgtgccctcgcaggttcagcgttttgggcctgcgcacgcaaccgctactaacaatgctaattttgtggcggcttcgaccgtggttgctgaaaatgattcggatgattccgtgtcaaagttttttgagtctaatgattctgggagttcggttgtgtggacggaagagtcttcggatgaggacttggattattttgcggccttggatgtggctgcggcggaggcttctccgcgtgtgatggatgctgaagttcttcctggttcgagtgctgggcgtaggcggcgaagggcggtggcgaagcggagagtgagtgaggtggagggtggtcatcttcgtgtggacagggctagcaagcgggaattgttgtcctcgccggttgggtcgagtgtaggtgagggggagttgcgaaatttttttgagggtgaggagttgaggataatgctgttcaactatagggagatgattatcatcctgaaggttgagccaatgtaa

SEQ ID NO: 7252 - DNA, 228 bp, Zea mays
  Peptide Sequence Number=SeqID_50627
atgaggcattattcccttgaggataatggatcttggacgaaggttgatgacaatacggttacgaagttatacctctgccttggcaaaggatggttcccgaatgatgcaatttccaataccggaatccgtgaacagacacagcctgtgagaaattacaattatgccctttctaaaggattacaacagcgacctaagcacttatggactagagggtcattctacttttaa

SEQ ID NO: 7253 - DNA, 681 bp, Zea mays
  Peptide Sequence Number=SeqID_50628
gattatatcaaagagtattaccatcatacagaggaggaaaccaaagactatgaaccatgtacaatagtcttcaacccaagaatcaccaagcattgtgatcttagaggcgagggagtggaaaatggagttgcttgcgatttggcagaggggattttatctggtgccacgcggcagcaggtgcgacatggggagggggcggtgttgctggcgataatggtgatgggcttcaagggtgccaaaggttcacacttagccaataaaaagaccaagggacttcacgctgaactcttcaccttcgggaaaatccagaggcgctccgctataattcaccggactgtccggtgtacaccggatagtgtccggtgccccagggaagagcggccctggaactcgctagcttcgggaatttgctccgctataattcaccggacatgtccggtgtacaccggactgtccggtgaaccagcagagcaacgactacttcgcgccaacggtcacctgcaggcgcatttaatgcgcgccagaagcgcgcagaagtcaggcacgcgcgagacggtgcaccggacaatctacagtacttgtccggtgtacactggacagccaggcgggcccagaagtcagatgctccaacggtcgaatcccaacagcctggtgacgtggctggcgcaccggacatgtccg

SEQ ID NO: 7254 - DNA, 123 bp, Zea mays
  Peptide Sequence Number=SeqID_50629
atgacgaggggattatccctccttgccaagggaaaatcagcaagtctcctttgggagctcaagctgaaggttctggtaaaattgaatctgaaaaacaagttatttaggaatagagttaggtaa

SEQ ID NO: 7255 - DNA, 696 bp, Zea mays
  Peptide Sequence Number=SeqID_50630
atgaacagagtgctcactgccgacgacgacaagcgatggaattggggggctagcgctttgctcactgccttcgtgatgaccgtgcccacgctcgtcgtcatcctcctcggcgggagcattgctggcacgccgctggtctgggttaggacagccatggccggctttttggcaagcaaacggtctgtaggtccagacgatttatccttcccgtacacgagcacaaggacagcgcacgacaggctccacggtggcctcttggcggcaggatttgaccaggaggcatgccacaaccggtaccaatcggccatgtatcgccgaaacccgggcaggcgacctagcgagcacctcgtctccaagctgcgacggcacgaagccctgcagaggcggtgcggccccggcaccacagcctactccagcgcactggagcagctcaagtccggcaagaacgccgacgcgtcccccgtggatccggagtgcaggtacctggtgtccatctcgtaccgcgggcttgggaaccggatcatcgctgcggcatccgtgttcctgtatgcgctcctcaccgaccgcgtgctcctcgtcgactccagcaacgagatgggcgagctgttctgcgagccatttcccgacacgacgtggctgctgccctggaggagcttcccgctgtggaacttcagcttcgacacgcgcccacaatga

SEQ ID NO: 7256 - DNA, 1038 bp, Zea mays
  Peptide Sequence Number=SeqID_50631
atggatgaatctggtgtgaaaaatgagatcagaagtcagatagaggttcgctgccaaaccagcttttgccagaatgaagatggtttccccaagttgctgagagcatgcacagttcgcctcggaatcaggagccagccagagtatgatggtcgtgaattcgtcgagcatggcacagagaagtgtgtcgtgactgtatacattggatccagtccgcaccatgtggaatggagtgtcactgctgctgggcacagattcaaagacacctaccaagttgtcgcccgcaaggcattgagggccttgtgtcagatctatgaagaagaagtggccgacaccccgctcagattctttccgccctttcagagagaccgtccagtttggatggccaggatgtgtgcattggaaggtcagcagctgcttgaggacgacccctcagtcgtgtacctcactgcatacctgctcaccctggatgcccagtatgatttcttggctcggcaccatcgtcagatgattgcccgagcagaagatgcagagaagcgcaatcgtaagctccatgtggatctcaccatagctcaagcccgtgtagccgccttggaaagtcgtgaagtcattgctgttgaagccctgaagcaagccagggaggagcatgtccagaagatggaggcctacttgattcttgaaggtcacccggtctctatcagaggagagaagaagacttgggaactaacggaaggagccataatcttggaaggaattccagtcttccctcaggctatgaataagcaagagcaccccgaatccgcccaagatcccccgccagagttgtttgagcccctcaccatgaagaagatttcagcaccgtcccgtgagatcaaagaagaagctgcaagcaccccgccagcaccaccgccctctgaggagctacaagagatagtccagcttgaagaagagtttgaccccatgttgccatctcagtcgccgccagaagaagtcatcaacatcagctccctcttaacccatccaggagatgtctcagattga

SEQ ID NO: 7257 - DNA, 243 bp, Zea mays
  Peptide Sequence Number=SeqID_50632
atgggtcgcaccgggctcgagggctcggataagtcggagtactcctcggacgaggagaactcctcggactcgtccgaggagggcggcgacggcgatggcggtgacagcgacgacgacggaggcgatggtgatggcggcggaggcgacggcaagagcggtgacggcggcggcaaaggtggcagcggcgacggcggtggcggcagcaagggcagcagcaggggcagcaacaaggccagtggctag

SEQ ID NO: 7258 - DNA, 285 bp, Zea mays
  Peptide Sequence Number=SeqID_50633
atgtcggacgaccttgttgttcctgtccactttgaagttggccaagaactttgctttcgcctcttggatcatccgctccttgtgctcctcgaactggagctgctcgtcagccggcaaggggcggacggtccgggcgcgggggccggacggttcgcggcctggcgcgaggcggcggtgctctctggtcaggcgcggacggtctacggcacagggccggacggggcggcggaagatcgccgacggcgcctggatctcgctcccgagagggacaccgtcggggagtag

SEQ ID NO: 7259 - DNA, 414 bp, Zea mays
  Peptide Sequence Number=SeqID_50634
atgagattgatggttctggttatgattatggtactggttgtcagcattgcaaccactgctcaggagaagatgaagctgtggaaggagacttccaggagttccaagactacgacgagttctaggcgtggaaaaattgttttggcaaccaacattgcggagagtagtatcactatagatgatgttgtctatgtgattgattgtggtaaggccaaggagacaagctatgatgccttgaataagctcgcatgccttcttccatcatggatatcaaaagcttctgctcatcagtgcctagatccagtattgacaattgctgctgctctcgcatatcgaaatccatttgtgctcccaatagatagaaaagaagaacctgatgctgtcaaaagatcgtttgctggtgactcatgcaagtaa

SEQ ID NO: 7260 - DNA, 2118 bp, Zea mays
  Peptide Sequence Number=SeqID_50635
atggacgacgaagctatagccacagaactacggcttgatgtgatgacgaagaccaagtataatgatgaccaaaaaaggatgttggaacttgctctcttgggcaagcactcgagtggccacccgtcccctgttaaagacgtttatgccctcaagtacccggccagggtcggcgccaatagtgacggcgccgactcctggcacgtaggcgccacatcggcgctccggagcgatacctcggtgtcatctatattggcgtcatgtaacctcggtgccaatagtgatggtgtcgaggcaagctccccttgcctaagggaaaagtccgaaatggacgaagcatcaaatcaaacctcaactaatttgaaggctcataacaaggtcgacaaagataaccttgcatccacaagggcagagatgggtgaggtaagagaagagaacaagaggctaaagacaatgctgtcacgcatcgtagaggactaccggtctctccaattacagttccacgacgttcttcaaaaaggagaacccatggagaagaagcttgctgaccaccggccctcgaccatcacgccacccaccggcatcgaggagtccgaattcgtctcgctgagcctcggcacgggcacaggcacgcacaagaaggaagagaagagcgtcatcatcagtgctgccgaaggaaaatggagggaagactacttgatgatgggtgttaaagaagaagaaggcctgtcactcggactgtcatcatcagcccgcaaagatgacgatggcgcggctaataacactggaaaggtccagcccgatgtgacgaccttgagccctgaagctagctccgaggacgccaaggacgacgacaccacggaggcagcagaccggcaatggctgccaagcaacacgcagaagaagtcgaggaacgtcggcgccacggaacctgaggatgacgacgacgtaggcccactgctgccacagaccaagaagacaagggtgtccgtaagggcaaggtgtgatgcaccaacgatgaacgacggatgccaatggagaaagtacgggcagaaggtagccaaggggaacccgtgcccccgcgcctactaccggtgtacagtggcagcaggatgccccgtcagaaaacaggtgcagaggtgcgcggacgacacgtcgatcctgatcaccacgtacgagggcacgcacaaccacctgctgtccgcctccgccaccgcgatggcctccaccacctccgccgcagcgtccatgctcacctcgggctcctcctccacctccctcggcttcttccccgccgcctcgccggcggcggcgcacgacgcctccagacacttcttcctcccgaccggcggcgccgcgtccgtcacctccacgccgtcctacccgaccatcacgctcgacctcacctcgccggcggcggccacctcgcaggcgttctctctgagcaacagcaggttctcgtcgggcttcggtggtcccggcggcgctaggtaccatcatcgtcccacgagcttctccttctccaactccgggcccagcgcgctgtccgccgctgcatggccggcggcgaccggtggtgctgggtacctgagctacgggtcaccagctgctgcgtccttgttcaacggtggcggtggcgctgcactgatgagcagcaccaacgggaggcaagggcgacaaggcggggaagtccccgcgctctaccagccgcagcagaaggcggcagcggcgagcgagagcgcaccggcgggcgtactcaccgacacgatagccaaggtgatcacgtcggacccgggcttccagacggtgctggcggccgccatcacgtcgtacgtcggcacgcagggcggtaacaaatcgtcgccgtcggcgggaggagaagagggcgggagccagctgcagctggggctcaagtgggggcagcacctcggcctgggcccgtcgccgtcgagcgccggcgcggcgtgctcctcatcggcgctgctggcacggtcatcgtcgacgaccgcagcagcggagcagggttccagtgggcatcggtcgtcgttcctgcagccgtcgctgggcttggcaggctctcacagcgcctccgcctctcctgtggaaaaccgggagcactga

SEQ ID NO: 7261 - DNA, 696 bp, Zea mays
  Peptide Sequence Number=SeqID_50636
atggcgaccacggcgccgctgctctcgccccagcgcgcttgccctacccatctccggcgccgcctctcgcccctacatctcgtattccccctcgacgcgtcagcgaggcggctgcgccttcgccgggcgccgccaccttgttcggccaagttcggcaagttcgacgcctccgacgccccggcggaggccgaggaggcggggggcgcgacggatggtgggctggcgcagcccgtggaggaggacgacagttgcttgccatcggatttggagggcgcgattcggcagtcagggaaggcgagcgcagatttcgtaaactccggaggcatgcgagctatcgcagaactgctgatccctcagttggaattcctcaacgaggaaggagcacaggctgaactctgggcgttgtcaaagattttcctggacacacttgtacaagagacaggacagaaagttactgccattttccctgacgctggagcagctgcccttctcaagcatcaatggaaagatgcacaattcaagtgtgccagtttaggtgaccggaagccagttggtcctgaagatgaggtcgcagttatgattatccctgatcatcagatgctggaagctgttgaacgcatcacatctcaactctctgatgatcctgtatggaacttatgcctgatcagattgcaaatttctgcagatcctgtgtaa

SEQ ID NO: 7262 - DNA, 402 bp, Zea mays
  Peptide Sequence Number=SeqID_50637
atgccgcgtcttctcgactgtggaaccagtgccgtgactcgaggcagccctgcgtgtgacccaacagtgccaattgagtgcaacgatcacgggataaaactaagtcacgatctcccacgagtccggcctcaggcgcaacaaggagctccgcctcgtccgacctcaggcctcgacctcaggcctcggcctcagcctcggcctcggaagaagatctccgcctcgcccgagcccagcctcggcctcggaagaagatctctgcctcgtccgagcccagcctcggcctcaggagaagtctccgcctcgcccgagcccaacctcggcctcaggagaagtctccgcctcgcccgaccttggcctcggaccgactacgctacaggggatacatcattaccctactcatag

SEQ ID NO: 7263 - DNA, 576 bp, Zea mays
  Peptide Sequence Number=SeqID_50638
atgcatcaaccttgctttctacagtatctcctcctcatcctcgtgcctctgctgctgtctgcctctgcttatgatagatcagcttctatcactaatgaccccttgagcctcactagcgggcagaaggaattgagaggtcacctgacggagagggaggtcggctgtgtctccctggccgacggcggtgcagaagccagaggcacgagggcggcgagcggggagtcgcacccgagcctcgagcgtggtgagcgcggcgagcgcgttgctctgcagctggatcgaaccgcggtacctcccttccccgcggacggcgctcacgtcccgctccagcaccagcacctcgaaccccttccgcctggcggcgagcgcgaaggccaggcccgccgatgccgccgccggccaccaggacgcgcgccttgggctccaccaggacgagccccgcgcgggcaggaggaaggccggtcctacgcctcagtcgcggccgtggccgtggcgcggacggggagtaaagcgcggcgagaatacggagcgctcgattgccgcgggcgacggggtggagctagctcgccgtgctag

SEQ ID NO: 7264 - DNA, 688 bp, Zea mays
  Peptide Sequence Number=SeqID_50639
atgggtcgacaagaggatccaacttcttcaagaccatatgcgtttgcatgtgatgaaagaaaaggcaaaaagaaggctcccactccaagttcctcaagtgatgaagaggaagaagaagaaagtgatgatgaagataatcaaccatcaacatcatcctccgaggatgaagaaacaatccaacgcatcggaaaggtaatggggatgatccacaagattaatctaatgggtgtgcccctgcaggtcgagaatcttctctttaacattgacaagaaaaagcaaagaaagagaggatgcttcgcatgcggggagaagagccactttagggacagttgtccagatatggccgaagccacaaaagggaggagcaaaggcaaggcgcttacaagtgtcaaaacttgggatgactcttcaagcgaagatgaacccccaaggacgcacaaccaccgttcctcatcacgctcattacgatcatcacgcatgtgccttatggcaagaggtaaaatgagtattccatcctctagtgatgatagcagtagtgatgatgaagatgttgatcctaggacaatagatcttgccatgagaatcgccgaaaggatgttcctcaagatgaaggaagatgaggcgaagaacaagattgaagaagaaaatgatcgatggagaccaaacgacgaatccacctcttcacaag

SEQ ID NO: 7265 - DNA, 915 bp, Zea mays
  Peptide Sequence Number=SeqID_50640
atgacgcctcagatgacttctgatgcagcatccaacggcccacaacccttttcccacatccactcaacgaagatcaacttttgggtcaacatttttttgggatattatagagacctccagaagtgggaggccctcacgacagagtaccaggccaagttgagcgccctggaccagactctggaagcccaacgggcccagcaagtcaaggatgtggagaggctgcaaaagtggcagcaagagctcgagggaaaggctagcgatgccaccctcgctgaggagaaccttaaggcgaaggagcagtccttggacaggcgggagacggacctcgccaggcgagagatgcatctcgtcttcagggaagaaatgctcactcggcgaggcgagttgctggctgagcacgagctcaaagccgaggagaaggagaggaggctggaggaccagatccgccaattcaatgctgcgcaggcggcgccgggtccccaggcggtggaggctaccaaaaaagctcttgaagatctccaagcggagcaccacgctagggtccatcacatttccgcgtgggccggcgaggcaagcacaacactggtgccgctagggatgagccccatcccagtgtcggagctgcctgcgtctatctccgatgcgctccctgtgctggactctgccgctgatcgcctccgacgcctggatcagatccttggtgcctgcctggaggtagagggtagcaagctctgccgggctgtggtggactacgtcctgacgtgcttccggggtcacgaccccgccatatccttggcaccggtgatcgatggtccggtagccaccaaagaagacgccgcccgggagagcgtacaagatacagtggagatggtgggcacccgcttccagcggatcctgccgatgccgaatagctga

SEQ ID NO: 7266 - DNA, 1344 bp, Zea mays
  Peptide Sequence Number=SeqID_50641
atggggcgctacgtgccgaagacagagggtctacggagctgggatatccatgggtccaacgacagattgaatcgggtcttcgaattgaaccgcttgctatatggtggttatcccggggaagacgccaccgaccgccgcgggaagaaaccgatgggcgtgaccgaggaagggccttcgcaggaggctgccccggccactaagaagagaaaattagggtcgggtgagggacagttggttgttgtcccgccttcggtggcaacgacttcgccatcggcggtggtaagggcgaagggagccgcgcaggacccgtgggccgccttctgcgtgagcagcgagattctgacggccgctgccgctaaggacgtggcgggcaccatgtcccagcggctgacgcagcagttgaagcaagtggccgacttcgccgaccgtgttgcgtcgggcgtcctgactgcagacgtcgctgccgaagtcgagagtcttcgggcgcaacatgcggatgctgtccgggagaagtcggctgcggagagcaaaaaccgcaggctggcggagaaggtggctgccttggaggccgagaagacggacctccggcgccgactggcggatgagaggagggaggctaaccaggccatcgctgaagcgcaggctgcgcgagcggaggcgaaggtggcgcgggcggagaacagactcgccagccaacgcgccgaggagtgggaggcaagattcaacgccctacgcggccgcgtggacaaggctgaggcctcggcgtgctcagaagtcgggcggatgcacgcgcagttcgtggatgcgtaccgcgatctgggtgcgcggaccgtagacttcgaagtgcccgaccaagaggcagaccttcgcttcctcgaatggttgcaggaggagctgctggggaccctgaacgcgttgtcccgcgaggggtgccgacactacgaggtcttcgaccaatcaagcgagaactttgaacgtgaagttttcaaggccgaagaccccgtggtgaagcagtcagcgggggcactcttcgacaggatgtggggtccgcacggtcaggaggcggttaaggagcggtctgaccgggtgatagagcagatggcgtgtgccgaggatgtcgaggtccttggagatctggtcggcgtgccgcccgaggctgaggtcgacccggtgccaccttcgagtgccggtgaaggctcctcggcagcattcgtggctaccgtggccagtgaaggacctttgccagcccctgcgccgacggtcgaagaacccccgaaggtggtggctaagccggtgactgaagaccccacggccgcggccgggccttcgcaggtggctcagtag

SEQ ID NO: 7267 - DNA, 95 bp, Zea mays
  Peptide Sequence Number=SeqID_50642
atggtgaacggcagtggagcttcctgggtgtgcgcgcagagcgagagagagggcaagggtgctcggctggggcgcaactatgcaggggagggcga

SEQ ID NO: 7268 - DNA, 459 bp, Zea mays
  Peptide Sequence Number=SeqID_50643
atgtgtgatgatgtccaattatgtaatcgctatgaggtggagtctgagaggcagccctcccctgcgcctcagctagatgtgccccctacaccaccacagggcatcccaactgctagaggagaccctaacagagacagaggcgacgacgtcggtggcagtttgagccacagcacgaagctcttggaggagcaggagtcggagggatggatcactagacccatcactcgtgacaccgctcgcaggtgtcacttccacgacgctctcgacaccttgctacgtcgggccttcgaccgacacacttggtccattgagtaccgttgtgtagtctaccagcatcgtcgcgggttatacccggaccagtgggaggctacttgtttgatgtctaaaaacaggcgcagaggtggaaggcgtgctcagcaggagcaacaggcaccccaggaagaggcagctcagcagtag

SEQ ID NO: 7269 - DNA, 429 bp, Zea mays
  Peptide Sequence Number=SeqID_50644
atggtcggctcgtcgcttgtggtggccggagctggtctggccttgtgcgcaagagagcgagctcatcggcagcgagaagcttggcctgaacacgatggtatagctcgatctagtgagtcggggagctccacagaagcccggtccacgtgcggcggcagacgaccgaagtctggtaaggatgatctcactgtttcggcggggcagggccttggctcgagcttggaaaggcttcacgtcctctcggggaagctgtccaagggctcagacgaggttgggggtcaatgggaatggctggccatggaggccggtcttcagaggaggaggcgggtcacggggaggtcgtcggagctgcgtgctggctcgggaaagctaggcggagtgcggaggagtgacagggagggtgcccgtgcacgatggcgtgctttatag

SEQ ID NO: 7270 - DNA, 1029 bp, Zea mays
  Peptide Sequence Number=SeqID_50645
gcggctgacttcgcagaccgcacggcgtcgggggccctcactgccgttgtgtctgccgaagtcgagagacttcggacgcaacatgctaacgccgtccgcgaaaaatcggccgccgacagtaagtgccgcaagctggcggacaaggtggtcgcgctggagggggagaaaactgacctccggcgccaactggcaggagagaggagggagaccaatgaggccctcgccaaggcgcaggctgcgcaggcggtggccaacctggcacgggcggagggcaatcttgccagggagcgcgccgagcagttgcaggagcggcttagcgccctggagagccgtgtggagagggccgaggccgtgacgcgcgcggaggctgagcggacgcgcaaacagcttatggattcataccatgagctgggcgcgcgaaccggtgacttcgaagtgccggaccgagagcccggacttcgctgcctggagtgggtacaggaggagttgcaggcactccccactattgtggaggggtttatgtcgtatgcctccctggtcacctgcgagggggcgatgaacgcgctgtcgcgcgaagggtgccgacacttcgaggtcttcgaccaagctgatgaagattttgagcgagatatctacaaggttgaggaccccatagtgaaggaatccgccggagccatctacgaccggatgtggggtccacacggtcgcgaggtggtcagggagcgggccgagacggcgagggctcaggcggcgcgtggcgagagggtggatgacttcggggcgttgaacagcgcgctgcctgacccgagccgatcccggcggaggccgtgtccggggccgctctggagccgcccccggagactgcggaaggcgctccggatgcccccgcagcagctgcggccagcggagacccgcccccagagaccgccgaagcggtggaggcttcaccgcacgctgcggacacagaagatgtgcctggtccgagtaccgggcgccggcggcgaagggcggttgcgaagcgtagagtga

SEQ ID NO: 7271 - DNA, 390 bp, Zea mays
  Peptide Sequence Number=SeqID_50646
atggcctgggtcccagggggttgtggggtcggttttatacctagacggtgcccggagtccgagcgggtgcgagcagcaagatccgcggaggtggttgagctcgcgcccacggagtccgcggcgacggactcacgcactgtgcgcgcaatgcgcgggctgttgcgcggaagaaggagacctgacgacgcggggcccgcgcgtcagccagtaagagcagagagcaccgctgggttccgtggcgcactggatgagaggctgccgacatggggcccacgcgtaaggggctgcgggagtgttataccttcctgggccgcgcgggagttagtgtatattatcgggctggagaatatggttaagataggtatggatgagttagactacatgatgtag

SEQ ID NO: 7272 - DNA, 192 bp, Zea mays
  Peptide Sequence Number=SeqID_50647
atgaccgtcctcgccgatgctggtggctcgacccgtgagcggaaccagtggggggcgccagacccttgcctctttcccctaccgcgaattcctgggtggcgcattgagaattgctcgtcggagctattatctggctacttagttcgcattgcgcttgttggactgaagaaaggagcacgggggtgcggggca

SEQ ID NO: 7273 - DNA, 543 bp, Zea mays
  Peptide Sequence Number=SeqID_50648
atgttgttgactgtaactcaatggttcgtgctggatgcatgggaaggggacagaaaatctttgaaaattcttactgacacacccaatgggtgtgcccaagtaggggtggaaacgagccgagccgagcctggcccggctcgattatctgacgagcttgagaaactggatcggcttgacggaggctcgcgagcctgctacgctcaccgtatagtggctgcagtatgcagagggcggaggtcgagcgtcacgcgactgccgtgccgacaagactgtagagggcagaggccggaggtgttggggctcggggtcggtgggccatcaaggagacgacatcgagcagtcgggggtcggccaccgcccgtcggtgctcggcgacgaggcaggaggggtcgtggttggcctcgccacgtcgatggcaagcgcaagcatgctctgagtcctccctcggaggacctcagggactcggagtactcgaaggaggcctcctccgagtctgatcgttcgcctgctccagcttctcccccagcgtcatccgaggactaa

SEQ ID NO: 7274 - DNA, 339 bp, Zea mays
  Peptide Sequence Number=SeqID_50649
atgacgccgacatcctgcacttctgtgatgttgtcgaccaggacgcgggcccctctgttgcgcgcgctctacaaggctggatccatcatcgtgctcggtaagactgacttccttaggccagacatgtctgtccataggcaggtcattgataatgggattcttccaatacttgtgaagatagagaagaaaaaagagaagctccttagtgaaaaaatggaggtgatcaagggtctaagggaaaggttttcacattgcaactcaaacatggacgcgaaccagggtgatgctgacagctcgttggacaggctgtggcagaagaaggctgagatcaagcagtag

SEQ ID NO: 7275 - DNA, 981 bp, Zea mays
  Peptide Sequence Number=SeqID_50650
atgagcccggcacgttttaagcaattacgggtcaggccgtgggccgagggcgtccacaggactgatggtgcacggttctgccttcctccgcgcgtctgcgcccctgccccccgaaatctcgcaccgcgcgtccaagcccctacgccgccgccgcctcctcctcctcctcctcctcctctccccctcactgcgccgccaccttctcggttccgcgtgtccgcgactcctcacagcaaccgcccttcccctggtcctctctctctcccccattccccacgaatcccacctccgcgatgcctgatatgcgacgagcacggcatcgaccacaccggaaagtacgccggcgactccgacctccagctcgagcgcatcagcatctactgcaacaaggccagcgacgaccgcttcgtcccgcgcgccgtcctcatggacctcgagcccggcaccatggactccgtgcgctcgggccccttcggccagatcttccgccccgacaatttcgtcttccagtccggcgccggcaacaactgggccaagggccactacaccgagggcgccaacaacaacaggaaccgcacccgccatccgcgctccaaatctcgctgctcactttctaagcgcggggaggaggcgggccagctgagtcggtcggcttccgagtcgtcgtcttcggcggggagcatcggccgcacgccgtctggaaggcgggccggccggcgcggcagcgacgtcgacggcgaccgctccagtcgcgagagtttcgaagcccaagatcagaagaggagcatgcatgaaataagtagaggagaaaggcggagttggtctgggcagaagagaaagcctgaacctttagtagaaaagaagtctgttcgtgctgctgcagaagagttctttgcaaaggcttctcaggaacttattggacatagtgattgcagggtcaagggtcctgttatactcatttctgatgaagatgaggactag

SEQ ID NO: 7276 - DNA, 543 bp, Zea mays
  Peptide Sequence Number=SeqID_50651
atgtccatggcgctgagccgcttcacgcaatggctatggccggggagcgccgcggcgccggtggccgcccacgagcaccccaacgaggggctgacgagctcctccttcccggacttcccctccggcttccgggagcccgacaccgtcacgttctacaccggcaggggcgccggcggccgccgcgcgcgcccgaggagggtcaggaaccggcgccgcagccgcggtgagccccgtgtcgaccgggagtacgacatggtcatcgtcccgtccgacggcggtgggtgcctctccggctctgactcggacgactccgactggtccatcggctggctcgagccacaggcaccggagcttcagacggatggcgaccccgagaactgcttcgccgtcctcgtgccctgctaccgccacggccgccaagagcagcagcccgggaggcacgagggcaggtttcttggcgccggcaccctcaccaatggtggattctctggtgagcgtgccgacctcaatgtatcgatgaaggaagacatggaaaagccctaa

SEQ ID NO: 7277 - DNA, 927 bp, Zea mays
  Peptide Sequence Number=SeqID_50652
atggggacatattcttggctaaggatatttggtacacacttattagtaagacagatggtttgtaccattcaaaccactcggatcaacaccaactacatccctccgccacggcaagttcctgtctacccagtggtagtcgaggaaattcctgtggatctcccttgcattcatgtggagaatggggtcattctggaggacagctcggaggagtttctgcctacgcccacccagttggcagaatcactagccttcgctactggatcatcggcttcagcaccgccagcaccagtagtccaagcccctgctcctggaggtgacgacccagacgactctggtgacaatgatgaagacgacgatgaagaagaagacaacagtgaacagcaagaccacttcatgaggataggacctgtcaccgaacattatacatcaatgttcgagacagggcacttccctaacctgctgcaggatgttctgcaagcgttgggaacctacgtccgacccctatatgagacaaggcgagtgtacgagcctcctcgggcttgctactacatcactcgcattcatgtcagggtgatggatgcaagggatagagggttcaagactctatcagctcatgagtctctgacgccgctatccacctacgttgcttcggtcagcgatgctactaggcaaactatgtggtccctcagccacacttaccggcagcagctgcacgacacgaagtacaggcatcttcctctatgtctttgtggagaaagccagaccagcattgttccaggtggagatggaaaagatcgcctcaacaccctagctggtgtagtggcaggtcttaacaccgacctggacagtgctaccctagacctctccagggttcacttggagttggaggatgcacatgcaaggattgcagccctggagctcagctag

SEQ ID NO: 7278 - DNA, 171 bp, Zea mays
  Peptide Sequence Number=SeqID_50653
atgaagctgctcttcagaagaaagattttgaacttcaatcaatggaggcggctgaagcaggtcttcaactcagttggagccagttctgagaaatttgaaccttctgttgaagactgccagggaccttcgaacacattgagggcaaaggttatgctcttgacgaagttatag

SEQ ID NO: 7279 - DNA, 625 bp, Zea mays
  Peptide Sequence Number=SeqID_50654
gcgccccctgcaccgccgcgggatgttcccggctgttggaggagctactggaggagaccccgacgacgacgactcagaccacagcacggagtcttctgagccgcaggaggcggaaggatgggtcgcccgacccatcacccgtgacgccgctcgcggttgtcacttccacgacgcactcgacaccttgctgcgccaggctttcgaccggcacacctggtcgatcgagtatcgttgtgtagtctaccagcacagtcgcgggaggtacccggaccgctgggaggctacctgcctagttcgccgtccggaggatgacctccggggtgcggaggccgtttcggagcactattccatctccgagagggacactgcagaggcggctatgcaggatgcagcacgactcaacctagtcgcagtgcttaacactgagctggatcactctctggacgagctaagcagggctcgaacggagattgcggagttgcgtgctgagctggcagagcgccatcaccaggagggtggttcccccgctcctgttgggactcagcacccataccgttcaccgccacgtggtcaccacacttatggttcccctgtctgtaagaccaggatagatctggatccttag

SEQ ID NO: 7280 - DNA, 375 bp, Zea mays
  Peptide Sequence Number=SeqID_50655
atggagagtcatgatctctgggcagaaagggaatcatggcttgtgggtggcaatgagaacgatggttttggtattgactctggtgatgctagtccactacagccaaacaggacacttgctgagtatgttgatgtgtactcacccttgctctacacaccaaaccccccccatccccaggttgtctgcattgcaaccactgctcaagagaagatgaagccgtggaaggagacttccaggagttccaagattacgatgagttctaggcgtgggttagcggcaacccccagtcggctgcctgtgaaggccgcgtgtatctacgtttcttttccgcactttgattattataaagactatgtggatgtctcagacagatga

SEQ ID NO: 7281 - DNA, 972 bp, Zea mays
  Peptide Sequence Number=SeqID_50656
atgtgtcggcggtccggttccaacaatgggtatcagagccaggttggcccagtgcattctcagacaaaatctcggctcacaatatgtgaggggagattgttgggaatagtctcacattgtgtgactggatggacgcgcggtgtgtgcgagcggccccaacggacacgccatgtctcggcagtccggttccacaaacaccaccaccatcaaccgcgccggaagcaacgagagcgctggcgacgacgaccagcaacagcaacatctagaggtggacggcgactagcaccagtacccggtgccggtggtccgccgcccgcggggccgccccgcggggtccagccgtccaagaacaagccgaagccgccggtgatcatcacgcgggacagcgccagcgcgctgcgcgcccacgtgctggaggtggccgccggctgcgacgtggtgggcagcgtggcggcgttcgcgcgccgccgccaggtgggcgtgtgcgtgctcagcggcgccggcagcgtggccaacgtgcgcatccggaaccagcccggcgccgtcgtgacgacgaccctggcggggcggttcgaggtgctctccctctgcggctccttcctgccgccgctggccgccacgggcctcaccgtctacctctccgccgggcagggccaggtggtgggaggcgccgtggctgggccgctcgtcgcctccggccccgtcgtcatcgtcgccgcctgcttcggcaacgccgccttcgaccgcctcccgctcgaagacgacgagcccctgccgcagccgcagcagaaccagcacctgcagcctcatccgcagcagggccccggttgcgtgctgcccggggccgccggaggtctgcagccctcctccccgccgctgccattgcccggacaacacccgctcgccgaccagctcccccacaccctcatgaatggcctgcctctccccgccgacgcatacggctggtgctaa

SEQ ID NO: 7282 - DNA, 231 bp, Zea mays
  Peptide Sequence Number=SeqID_50657
atgaactcgcgctcgaagagagagtcaagagatagaaagatcggtgcaccagtggggggtaccaggaagattcgttatgatgcttgcgtgggtcgccatgtacccctgtgccaaatcagcaaccatggcgagcagagatggaaagcgggaggagaaatctctggcatgtccgtcgtcagggaatctacggggcggatggcgctccaggatcccgcgccgacaaggaagtaa

SEQ ID NO: 7283 - DNA, 1542 bp, Zea mays
  Peptide Sequence Number=SeqID_50658
atggagagggaccttcaggacgctgcgcagaaacgccgggcggttgtcaggatcgcggatcctatgtgcgaggcgaaaaaggcgcgggggagcgcgaaggctgctgcctctggcggtagcaaaccggtggtggctgcgaaaccggccgcccccgggcacagcaaggcggcggttcgggtgaggggcaacttactgttgtcccgcctccggtggcgaccacttcaccaactgcggtggggggcgaagggtgccgcgcgggacccgtgggccactttctgcgtgagtggcgagatcctgtcggccgctgccgctaaggacgtggcgggctccatgtctcagcgactgagggaagcgtcgcagcagctgtcacagcagctgaagcaagtcgagcgtctccaggcacagcatgcggatgctgtgcaggagaagtcggttgtggaaagcaagaaccacaggctgtcagagaaagtggccgccatggaggccgagaagacggatctccggcgccagctggcagaggagaggagggaggcgaacaaggccatcgctgatgtgcaggctgcgcaggccaaagccaaagtggcgctggcagagggtagtctcgcccgccaacgtgccgaggagctggaggcgaggttcaacgccctgcgcagccgcgtggacaaggccgagtcctcgacgcgcgcggaggtcgagcggacgcacacgcaggttgtggacgcgtaccgcgagctgggtgcgcggactgctgacttcgatgtgcctggccaagaagcgggccttcgcttccttgaatggttgcaggaggagctgctggtgctcccgaccattgtgacaggtttcatgtcctttgcctccctcgtcacctacgagggggccatgaatgctttgtcccgcgaggggtgcaggcattacgaggtcttcgaccaagtggacgaaaactttgaacgtgaaatcttcaaggtcgaagaccctgtggtgaagcagttggcgggggcactctttgataggatgtggggtccgcacggccgagaggcggtcaaggatcggtccgaccgggcgatagagcagatggctcatgctgaagacgtcgaggaccttgttggtctagacggcgcgctgcccgaggccacggagtgttttcagtctgatgattctaggagttcgattgcgtggacggaggagtcttcagatgaggacttggattattttgcggcgttggatgtggctgcagcggagccttcgccgcgcacggagggttccgaggaactcccgggcgcaagtaatgggtataggcagcgaagggcggtggcgaagcggagagtgagtgaattgtcgcgaattggtaggcgttatcgtagcgaggcggagagaggtcgtcttcgcgtagacgggactggtaagcgagaattgttatcctcgccgattggggtgagtgtaggtgagggggagctgcaaaatctgtttgagggtgaggaactgaggataatgctgttcaactacagggagatgggtatcatcccgaaggttgagccaatgtaa

SEQ ID NO: 7284 - DNA, 297 bp, Zea mays
  Peptide Sequence Number=SeqID_50659
atgtcatggggaacatgtctcttgaaattttggagcttgtttgtgattgatccaaggggtttaagcctaaggtccctgtggagaagtggtagagagtcatttggtcgacaagttttgttaaacttgctccccctgttgccatggaaaactgagagtttgcagggggtcaacagggaggtttgccaagttcagagaacacctatcccatttcaggtcagtgaagctcacaccaattactacttgaactctaccactattggttgcctggaactaggtgtgaaatttggtctaaaatag

SEQ ID NO: 7285 - DNA, 165 bp, Zea mays
  Peptide Sequence Number=SeqID_50660
atggaattactcagcaagtcttacccgactaaagaaaagactctcaaggatatgctggttatatgggagtcaagggtttcaaggagggtaatcaagatcaaggaaggtaatgcaggaattgtttttatcaagcaactcctatcacctaatgcagcaagcaagtga

SEQ ID NO: 7286 - DNA, 243 bp, Zea mays
  Peptide Sequence Number=SeqID_50661
atggaattactcagaaagtctttcccgactaaagaaaagactctcaaggatatgctggttatatgggagtcaagggtttcaaggagggtaatcaagatcaaggaagaaacaccctccaacttctattccttcacgcgacacgaccccgacggtgttcatgcgcggagaggctccggcgaggtcctgaaccggccgattagggctatgaccggcgccgagactaggactaacccaaattcatga

SEQ ID NO: 7287 - DNA, 72 bp, Zea mays
  Peptide Sequence Number=SeqID_50662
atggcctatgctgtcggccaccgagttgcgcagccgcatttcacaaggttaagtgtaacacccggattttag

SEQ ID NO: 7288 - DNA, 990 bp, Zea mays
  Peptide Sequence Number=SeqID_50663
atgtcttcgcgctcccttatgcatcgcgtctttccaccttccgagcccccggatggggaacacccgcaatccttctgccttgtcgttggaggaacacaacttcgtggaagttggtacctttcagccatcgttcggcttcaaggattttcatcaggcagctcggccgcaccccctcgccggtggtcacccaagacggtgaccaccagcttttgggtggggagaagcaagccgggctgcgatcttggtcccgccctcagcttcaaggatccccatcatccttgctggggcggaggccgggctgagccggagctctacctcccgcgcaggttcatgggtcagcctctccttcagcattcaagggagagggcgctcaccggcctagcgggaggggcggacttcgacaacgcggggctgatcggcggcgagtgtcgtcagcttcagcgcgtcgggctcgctggctctggcttggctcccggtgcctcctctcgccgcaagggcggttgttgcgccgcgcgcaccggaggaccgcccaagacgtcgcgcgctgctagggcggcgttcgtgttctggggctgtcctgcctttgccccggtacggcgcctctacacggaggtcggtgctccgctcgtccgggaggatccgagtggggatctgccggtgggcagacggctcctgtcgtcggtgctgaggtggtggtggctggagaagtcctcgtcgccggcgggatcaccgccaccatccgtgctccgggcctccggctctttgtacttgtcctcgcccctcgagcgtggatgtgggcgagggcattgttgctgcggcgtccgacctgaggccatcgctgctgcagttcggccacccggagcggaggtcgttgtcgctgctgctggagcgggcgacggtgggcgacctggagccttatcgccccgcgggccctccaatgtggggaggttgttcgtacccgcggggacggaaccggagttccgtttgtaa

SEQ ID NO: 7289 - DNA, 447 bp, Zea mays
  Peptide Sequence Number=SeqID_50664
atggagcgcgaaggggggaagaagccggagggagacaggcgtaaaggggaaacccgcggccttcgtggtaatgatggcgcctcctgtgacgtggtcggtccgagccctgggttgggcgaggtggaggctcctccaaggtcgaggtcgagtctgtcttccaaggccgaggcgaagtggagttcgtcgtcttctggggctgagcccgagtctgagccctggggtcgggcgatgcggagttcgtcgtcttccggggctgagcccgagtccgagccctggggtcgggcgatgcggagttcatcgtcttctggggctgagcccgagtccaagccctggggtcgggcgaagcggagttcgtcgtcttccggggctgagctcgagtccgagccctggggtcgggtgatgcggagttcgtcgtcttccggggctgagcccgagtccgagccctag

SEQ ID NO: 7290 - DNA, 945 bp, Zea mays
  Peptide Sequence Number=SeqID_50665
atggccttcaagagcacagtgaatcggacccacttacggttagttcgtgaggtagaagccattggaggaaatgtctctgcatcagcttcccgtgaacaaatgagctatacatatgatgcattgaagagctatacaccagaaatggttgaagttctcattgacaatgtgaggaatccagcattccttgattgggaggtcaaagagcagataagaagctttgtgcatatggccaacgacgccttcggtaggagagtcgccaaacttcttggcgatgtccttcatgtgttgcttttagttcttttaaagactcctctgagtgttgtcctgcaagttgttgctgctcctcctacccctgcctctgcaattggttttgagggatatgagaagcacctcgagatcagcttctatgaggcacctgtcttcgctgaccccaacggaaggggattcctgtttgtctacccatacaagattctgatcaagacctgtgggactacaaagcttctgctcgctattccgaggatccttgagcttgctaaagagctctcattgccacttgttgcagctaaatactcccgtgggacattcatattccctgatgcacaaccttccccaaacaagaactttgttgatgaggtttccttcctaatcacttctttgatggcctcaggtttggtgtttcaagacaaagaacatattgaagaatttgaccagaactcaagcatcaaccatgtcgagattagcgtgcatgatatggttagttcttgtttgctaagcataactgtgaccagtggcatcgtcaaggagtgcatcgtgaccagtggtgctggcagcaaggccatggcactcagggtccatgggtcgtgggtgtggcttgttcaacgcctactattcgcgggagtcggtgaggtgcctgctaaacttggtggaagtggagttcagttatga

SEQ ID NO: 7291 - DNA, 359 bp, Zea mays
  Peptide Sequence Number=SeqID_50666
atggcttacgcttcccacccgagtcgaatcatccccggcaacaccctcgggggctgggtaattgtcaacaccatccttgagggccaaccctcggagaagactgtgcacgtctccgtgaagctccccgagcgaggaatcgggctctgcttcaccggagaggccggcccaaggtcaccggatttcaaccgaccgccggcaaccgtggaccgaggccggagcacacgccgccgacgagctcgcccgcctgctcacgtggaccgggcgattccggccatccccgacgacgagccgtacctcgacgtgatcgccagaccctccccgagccaaccctacccttcgccggacctccctcgccgccg

SEQ ID NO: 7292 - DNA, 1602 bp, Zea mays
  Peptide Sequence Number=SeqID_50667
atgcagtcggcatgcaaccacgccaagtgggcacaccccttctactccaacgcgggcggaagcagcggtcacgtcgttagccaagctcacgtcccctcatgggacagcgagagaaccctctcccacgatgtgaagacggcacgcccgtgttccgttccacgaacggctcgcgcacgcgcaacggctgcctcgcgaaccactcgccccgtcgcattaactccgcggcgggacaggcggcacctttggcacgagaagcgggcgacgcttcgccttcgccataacgaccgcgtcaaaaaagggaccgggaaacgggataccccgaaaggggtccttctccgcgaaggaaacgggccccgagcccccctactgatcagaggttcgaaggtcggcccctcggaggggttcaacagccgcctcagagcgctcgggctccgcgcccactactggtcagaggctggccctcgaagggttcacagccgcctcagacacagagcgagggatgatcctgggtacgttcgatacataaccaaggctcgggctacgctcccgagagtgaggctgacagcagccaagtccggcctcaggcgccataggaaactccacatcgcccgaccccagggctcggactcgggctcagccccggaagacgacgaactccgcttcgcccgaccccagggctcggactcgggctcagccccggaagacgacgaactccgcatcgcccgaccccagggctcggactcgggctcagccccggaagacgacgaactccgcttcgcccaaccccagggctcggactcggtctcagccccggaagacgacgaactccgcttcgcccgaccccagggctcggactcgggctcagccctagaagacgacgaactccgcattgcccgaccccagggctcgggctcagccccggaagacgacgaactccgcatcgcccgaccccagggctcggactcagccctggcctcagccgacggtctccgcctcgcccgacccaggggctcagagtcgacctcggccttagaagacagactcgacctcgacctcgacctcggaggagcctccacctcgcccaacctagggctcggaccgaccacgtcacaggaggcgccatcattaccctaccccaagctaactcaggctacggggaacaagaccggcgtcccatctggctcgccccggctccagcgctcctccgatgaccacgacaccacacgaaccgggtgccaaaacctctctggctgccacgatggcatagccctcttacagagggttggccgcgcggggaaggacgggacggcgctcacgaaggatgatatagcttttctggaattttgtatcaagtgcgctaattactgctcctcgaaagaggttgtcttcagccttaaacttagcctcatcctcaggagagtcacgagatggaaataccctcacttgcggctggactgtgactctgaaggttctgctctcgtgtcccaaatgacaagggtctctcgtgtcccaaatgacagggcttctcccctacttaacctttcgcggaaggaagctgaaggagaagggtcgcatggggcacgccaagagacgggcagttaa

SEQ ID NO: 7293 - DNA, 114 bp, Zea mays
  Peptide Sequence Number=SeqID_50668
atgcggttgcctggtccgaaggtattccttcgtttgtccttttcaacggtgcttcctcaggccatgttcggttacaccttgactgaagaggatttaggggtgtttggtttctag

SEQ ID NO: 7294 - DNA, 135 bp, Zea mays
  Peptide Sequence Number=SeqID_50669
atgggggctcgctatctttggttgccagatctgcggtggctgctatgtgttgggaagtgtcaaggtgtcatgggttatattgaacaacaacaacaacaacaacaaagtcttttagtcccaagcaagttggagtag

SEQ ID NO: 7295 - DNA, 396 bp, Zea mays
  Peptide Sequence Number=SeqID_50670
atgaatgccgccgcacggcatgggcccctcctgcatgcgaacagcgagccgatcgacgaccggcatcggctgggctggccgcgtggtgctgccgccgccggccagccccccaccacctcctcccgctgccgcccccccctccctctcttccctctgtttcatcccgacgcgccgccgaggagcgcctgcagggctgcctcgcccgcgtcgttcgcagccgcgcggcttcgtcccgacgcgacgctccccctcgaccggatccgcgccgtcatcccgtcgcgccgccgcctggacgcgacgctccccctcgaccggatccgcgccgtcatcccgacgcgccgccgcctgcaagactgcctcgcccgcaccgttcgcagccgtgcagcttcgtcctga

SEQ ID NO: 7296 - DNA, 261 bp, Zea mays
  Peptide Sequence Number=SeqID_50671
atggagagtcatggtctccgggcagaaagggaatcacagcttgtgggtggcaatgagaatgatggttttggtattgactctggtaatgctagtccactacagccaaacatgatacttgctgagtatgttgatgtgtactcacccttgctctacacaccaaaccccccatccccaggttgtcaacattgcaacccctgctcaggagaagatgaagccgtggaaggagacttccaggagttccaagattacgacgagttctag

SEQ ID NO: 7297 - DNA, 81 bp, Zea mays
  Peptide Sequence Number=SeqID_50672
atgccgagaaatatggtaaatcggtacatcctagatttgggtgatggtgtgacttggcctccatccctgccaccgggatag

SEQ ID NO: 7298 - DNA, 2742 bp, Zea mays
  Peptide Sequence Number=SeqID_50673
atgcgtgaagcaaaggtggctcctaacattcaagaacttgatcagaaagcagcagctgctgctgcagctgctgctcgaaaggccctcacgagtgtacagactttaccaaaaggagttgaggttttagatcctttgggccttggtgtcattgataataaatccctgcggttgatcactgacgcttcagtaagttctccaatttcaagggagaagtctcaaggtttggaccccaatatgcgagacaaagttatctattcatctccaaattttgatcccaaagttttcctttcgtgggtccacaaagacacgagcgctgctgacttagaggctggtgctctcaccttgaaaactgatctcaaagggagaacacagcagaaaaaacagttagtcaaggagaacttcgattgttttgtctcgtgcaaaactacaatagatgacattgagtcgaaattgagacagatagaggaagatcctgaaggtgcaggtactgctcacttgtattcagtgacacaaaaaattagcggtgtggcaaatcgtgcatttgagcctctatttgagaggcaggcccaagctgaaaagatcagatctgttcagggaatgcttcaaagattccgaacactatttaacctaccaagtgcaatccgtgggaacattagaaaaggagaatatgatcttgctgtcagagagtaccaaaaagcaaagtcaattgttcttccttctcatgtggggatactaaaacgtgtactcgaagaggtcgaaaaggtgatgcaagaattcaggggcatgctttataagtccatggaggatcctcatcttgatcttgctgagattgagaacattgttcgtctattgttggagttggaacctgaaacagatccagtgtggcattatttaaatattcagctggaagttgattctaccattggtgattctcctcgagttgatcagttgtcaacaaactttatggctgaggaagctgatagtttaagggccacctacattcgtaggctaacttctgtactgatccagcatgttccagctttctggagattagctttatctgttttcagtggaaaatttgccaaggcagcttctggtaacgtagtttctgattttgatgtgaatgcaaagccgactgcaaataagaatgatgaaaaaggtggagaagtaaagtacacaaaccacactcttgatgaagttggtagtatggttcaggctactatatcggcttttgacactaaggttcagagtaccttccgtgattttgaggaatgcaacattctttgtccatacatgagtgacactataaaagaaatagctaaggcctgtcagactcttgaagggaaggattcgtctccaactgctgtaaaaatgttgcgcacacttcattttgaaatgacaaagctttacattctacggctttgttcatggatgcgggcaacaacaaaggagatatcaaaagatgagacttgggttactttatccacccttgagagaaacaagtcccagtatgcgatttcatgcttgcccctggagttccgtgacataacagtttcagctatggaccgaattgatactatgattcttaatctgatgagcgagactgcgaagtcatatgacatttctcaaccacttcaggaaatcaatgagtctgttagacttgcatttttgaattcctttctggactttgctggttatctggagaggtttggaggtgaactaaccgagaacagaccaaacaaagaaaacaattatgtctcaaatggatacataaatggtactagagaaacatttgttaacacagatggagatttgcacaaaaagctgctggttgttttgagtaacattgggtattgtaaagctgaactttcagaagaactttacagcaaatatagacacatttggtctccagtcaggaataatgaggagcgaagttctgacatgcgagacctgaggacttctttctctgcacttgaagagaaagtcctggaccaatatacttttgcaaagtcaaacttgatcagaagtgctgcacaaagttatcttttggattctgggatttattggggagcagcgccaatggtaaagggcattcgagatgcaactcttgacttactgcacatccttgtagcagtacatgcagaggtatactctggcgctcggcctctgttggagaagacaatgaaaattttggttgagggtttggtcgacatctttcttagtgtttttcatgagaataagaccaaagatattagattgttggatgcgaatggtttttgtcaactgatgcttgagcttgagtattttgagactgtactgcacacgtacttctcacctgaggcgcaacaggctatgaaatctttacaagagaatttgttggaaaaggcctgtgaaagtgttgcagaagccatggaaaatcctggacaccaacgtcgaccaacccgtggcagtgaagatacagcatcggatgacagacagccatcagtatcacctgatgatttgcttgtgcttgctcagcagtgcagtagtgatctgctgcaaggggagttggagaggactcgattgaacatagcctgtttcatggagtcgacccttcaaccaacagctgcgccagcaggcccaaagcctgccgcacattcttcttaccaagcacagcatgctcccgtccaaacgtcctcgcctagttttagaaggcagcagactggtacaagttcccctgtagtctccaggcggcgccggtga

SEQ ID NO: 7299 - DNA, 618 bp, Zea mays
  Peptide Sequence Number=SeqID_50674
atggcgccccctgtcgacgtggtcggtccgtgccctaggttgggcgaggtggaggctcctccaaggtcgaggtcgagtctatcttccaaggtcgaggtcgagtccgagcccccgggtcggacaaggcggagcccgtcggctgaggccagggctgagtccgagccctggggtcgggcaaagcggagttcgtcgtccttcggggctgagcccgagtccgagccctggggtcgggcaaagcggagttcgtcgtcttccgtggctgagcccgagtctgagccctggggtcgggcggagcggagttcgtcgtcttccggggctgagcccgagtccgagccctggggtcgggcgaagcggagttcgtcgtcttctggggctgagcccgagtccgagccctggggtcggcctcactctgtcgagtggctcagcagccggagcggcgcaggcggcgctgtcctcttgtcagaccggtcagtggagcggcgaagtgactgcggtcacttcggctctgtcgactggagggcgtgcgtcatgataaaggtgtcagaccacctttgcattaaatgcccctgcgatttggtcggttggcgtggcgatttggccaatgttgcttcttggtga

SEQ ID NO: 7300 - DNA, 1029 bp, Zea mays
  Peptide Sequence Number=SeqID_50675
atgtctttgcgctcccttatgcaccgtgtctttccaccttccgagcccccggatgggggacgcccgcaatcattccgtcttgtcgtcggaggaacgcaacttcgtggaagttggtacctttcagccatcgtttggcttcaaggattttcatcatgcagcccggccgcatcccctcaccagcggtcacccaagacggtgacctccagttcgatggtggggagaagcgaatcgggctgcggcctctgcccctccctcagcttcaaggatgttcatcatcagtgctggggaggggactaccgcgtgcttggctctctgagccgagtggcttcggagccgctcccggcgccgccttgcgccacggcagccggaagaggtttcttcgccgacgagctagccggtgccgcccacggactggcctccaactctacggccttctgcccgtccttgcctctcgagcccccaatcgtgtggggttgttcgtacctgcggaggtggaaccggagttctgtttgtaatggaactttgagtgctgactcgcctgtcgactatctgaaccgcttcaccgagcgtgagtcgcctcgtgcgaaggtgacgagtgagttaaaaggaacccctcagccgcccttcaatgagccgaagccggaggtagcggtgtcagcacgggcagaggcagagttggctcgaaaagaagatttggtcggtcggagcctggccgggtcgtccactggcgggaccgacgccggagttgagttgccgaggccacaagccgggctgatgtcttcgggggacagctggccgaggcctcgaggtggccggccgagccgtctgctcgagccgaattcctggagaagaccctggtggcgatggcccaggtgtggtgctgatgtcgtccttcggggtggagatcctccaaccgcgtcgccgtccgaggctaggtcagatcccgccgaaggtgtagttgacgccgagggtgctgctgcccccttcaactgtcgacgtccgagcctgcaggatcgggttgtcttgtag

SEQ ID NO: 7301 - DNA, 396 bp, Zea mays
  Peptide Sequence Number=SeqID_50676
atggagtttgctaggctgaccatatttttaaatgtcgtcaaaagttcgcctgcaactgcggtctcgtcgtgtccgtcggtcttcaacttcagcgaccactatcatcttcatctgcaacatcgtcgttgcctccttggtgttcgttgccgactccgctacctgtttgaaccagaattcatcgtcatcttacccatgccgtggccgcaatttcctatgtccctagtccacgtcgtcgtccagttcagattattcctatgtagaagaaggtggagctgtagaggaagaataaagcgaagttcaatgcgttgctcactaggcgttcgacaaaaggctcaaatcagagattgttatcgtattgagaatatcaagcctgagttagtgatggttaaccggtaa

SEQ ID NO: 7302 - DNA, 627 bp, Zea mays
  Peptide Sequence Number=SeqID_50677
atggacgtggccgacctgcacggcgcgaccgtcgcccgtgcggtggacggacagccacaccccgaccaggcagcaggtggcagttcgcctcctccgcaaggctgcctcggtcttgggagaaggtctctgcctcgcccgaccccaggcctcggcctcgggagaaggtccccgcctcgcccgacctcagcctcggcctctggacgagtcacaacctcacccgacctcggcctcggcctcgggaggagtcacaacctcgcccgaccttggcctcggcctcaggagaagtcaccgcctcgcccgacctcggcctcggaccgactacgatacaggggatacatcattaccctacctctagctagtcgcctcaggctacgaaggaacaagaccggtgtcacatctagattacttcgtcaacaggcaatgatggtccctgcatgcgtccatgacgtcgattgttctcagctctctacgaaggcaaagaaacgtcagcaggaccaggggccgcaccgccagctacacttctacagggctcaagcactcctccgctggccacggacacgcagcgtcaaattcactagtcggttgagggtcctcgcgggtccaaaacgccaaaagatagagatgagg

SEQ ID NO: 7303 - DNA, 147 bp, Zea mays
  Peptide Sequence Number=SeqID_50678
atggatggttctatcaagcaatatatacaactagacaacccttgtgacctacgatctcttgctctatattacctcacatttcatagcaagaacaagtgcctcccgttgcctccagaaattcaaagattcaagtttgcacgcaagtag

SEQ ID NO: 7304 - DNA, 954 bp, Zea mays
  Peptide Sequence Number=SeqID_50679
atggggtgcgcccgcgttgccttcgtcttgctgccgttgggggagtgcgatctcgtggagatcggtacctttcagccatcgttcggcttcaaggattttcgtcgtgcagcccggctgcattccctcaccaatgagcagtttggtggggacaagcgagctgggctgcggcctccgccccgccctcagcttcaaggattttcgtcatccgggctgaggcgggggagcgcaccgagtggggagttgcctccgcgtgggtcggtaacccttttcttcccccagcgtttgggggagaaaggcatcctccagccctacggaggcttcctccagccatgcgggggaaggcgaactgctgctggagcggttgccggtgagccgcttggagttcgtcctcccgcgggcctcctggagtccctcggctcggtcggccttgccactcaaggcttctcttgcccagttaaagaaaaccctcggccgctctgcgatgagccagagccggaggtagcggtgtcagcatggacagaggcggagttggctcgaaaaaggggcttcgtcggcctaggccgaggaggcgtagcagcggtggccggagcctggccgggtcgtctactggcgggaccaaccccggagtcgggctgccgagaccctggcggcgatggcccaggcgcagtgctgacatcttccttcgaggtggagatccttcacctgtgttgccgtccgaggctgggtcagattccgccgaaggtggagacgataccgagggtgctgctgctccccctattgatgtctgaacctgtgggaacagacttgcttgttggtagcataatcgttaatccgagcgagagttacttatcgcagaaggtgatgagtgagaaggtgatgagtgagaggggttccccccttctagccctcgagggagggtcaggctttgccgaggcaaggctgacccttccttga

SEQ ID NO: 7305 - DNA, 450 bp, Zea mays
  Peptide Sequence Number=SeqID_50680
atgtgcctcatccagtggtacctgttcttgacctatggggggtgtgagacagcaaagtggaccaagggcataacttgcctggcactggagattccagttaccagggtgattcttcaaatcctcgtgaccgcactgctagtcgtagcaatacaaacagacatgcccacgaaggggtacgggtggcaatggaccgcaggatcggatggtgacggtttagatcaccaactcgtacaactaccgccgtatctaggcgtgggttacgtggttatgagactcacaaggagggttaacgtaccggagataactgggataatggccgtcagtggccttgcggcggtgcgcgaaatcatcccaggcgggttgtcgaggcgcggtctttcacccttccgtgcccagaaccctgtcgacgagtgtgaagaacgagagcggcaaactctacacacaccgtag

SEQ ID NO: 7306 - DNA, 1605 bp, Zea mays
  Peptide Sequence Number=SeqID_50681
atgccatcaacattaatcgccgccaccgttgatagcatcgtcgagccactgccgttgtcaatcttgcgcgccccgcgtcacattggctcacgtccacggtcggctgctgcttcaataatgcggaaggttgatcgacccccaaccaatccgaagcgtttaatcattgagtcaagtcaagaatgtttcagtgttgacattccacgctcgactgacatggcagaccctacaaatacgccatctgatagtgatcctcctcagcatagaaagaggggtgttgcagctgctgctaaaaacattgctatgcctaatgtggatgatgatgatgactttgagccacccaaaaagaagtgcaatatatcaatggatgccccaaataagacgcataggctcaacatcagatgcaacccaggagatgttcttgcgtccattcagatattgaatgaaaggcaacgccaagctatagtcagaaaaggattttctagtattcttgacatgacaattgatgcaattggatgtcgaacacttctctgttggctcatgcagaagctagaccccagagacatgactcttcgtattggtctagacaaagaactcaaaatcaccaaacagactgtccatcagatattgggtcttccaaatttgggtggtggaaagccccttaatattgatgaagcgaacgatgcggcaacacttcgggcctcattgaatattagcaaggatgagtttgttatttcaaagctccaagacagattgaggctaggccaggatgatgatctttctatcagatgttttttctcattctcttcaaccgtctgctattcccaacagctagctggtctatttcgttcaatgagtgacttatgtgaggctgcccagagatggcacaacaggagcattaacaatgtgtcggcgacgatatatggttgttccatcattgttcttctgtattatttggatcatttgcatcatgctgctgctccaaacaacaaaaatggcactccgcgcataaagtattttaataagaatattataagggcgttgtcaatggccgataagcggaagcctcgccagggtggtgaaccatttggtgtttgcccttttcggagcagcagtgagacatgttatgtctcaaaatcgccatctacttgtcagattgagtttccaatgaggccagaaacttttgatgaagacccaaatcaacatggtcgacttccaaatataatcatccaactccctcttatgcaagacctgatggcaaataagattcagatgcttcctgtacatcaacgccagaagttccaagctacgttgattgattatgacttagaggttggcaaaatatttgcctctatcaagcaatgtttgaatactattagtacaaagcagtccaatctagctgctacatttggagatttgattgatgagcaaggtcagacagtggtaggtggcacagttgaccatgattctggaccagtatttgacaagactcctattgggagtgtttctgcaccaggcctcttcttatctgaattagaatgtgctcgcgctcttcgggcatacttgtgttctaggttcattgaattggacagatttagccttgaatag

SEQ ID NO: 7307 - DNA, 857 bp, Zea mays
  Peptide Sequence Number=SeqID_50682
atgggtcgagcgcgtgggcgagcgcgaaggggggagaggcgaggcggccggagccgagcgtgagagaggtggaagtcccgcggccttcgtgttcgtcccgcgcccagccggagagatctgggcaccctgctggcgtgatgtcgtggctgttggaggtgcggcggagcctgatggagggacagctgttggagcggtcgagtccctgctgacgttgtcctgcttccggcgacgtggggtttcctccgaagccgaggttgagtctgccttctgttgccgtggccgagcccgagccaaggggtcgggcgaggcggaagtcgttcggccgaggccagggtggagtccgagccctggggtcgggcgagtcggaagtcgttcggccgaggccagggcggagtccgagccctggggtcaggcgaggcggagtttcgtcgtcttccgggtcttagcccgagtccgagccctggggtcgggcggagcggagttcgccgtcttccgggtcttagcccgagtccgagccctggggtcgggcggagcggagttcgccgtcttccgggtcttagcccgagtccgagccctagggtcgggcggagcggagttcgccgtcttccgggtcttagcccgagtccgagccctggggtcgggcggagcggagttcgccgtcttccgggtcttagcccgagtccgagccctggggtcgggcggagcggagttcgccgtcttccgggtcttagcccgagtccgagccctggggtcgggcggagcggagttcgccgtggcgcctttggcaaggcctgattgcctgcctttgcagctttatgctgatgggggttaccagctgagaattaggcgccttgagg

SEQ ID NO: 7308 - DNA, 672 bp, Zea mays
  Peptide Sequence Number=SeqID_50683
atggtccgaaacctagagacagtactgtccgggcttatcctccggactgtccatagtacaaatcccaaaaaccacacagtccctgcccaaaccaaatttggcacctgcagacggtccgcccatcaaggccggaaagtcctcactataattcagggactgtgccgagagcagcctcctctggtcaggactgcggacggtctggccccaaggcctggacggtccgtagtgcaaatgaacaggacctgtctgaagtggacagactttggaccccactggaggattgcggatggtccgccctcaaggctcggacgtatcttctctaaactcctgaagaccggcaaaaacaaaacctatgttatacctttgccttcacttgatccacaaccaatgcttataaatctccaagatttcctattctatgtggtccaaccctgcattcttatttctccaagaaccgttagtccacaaacagttgtcattaattaccaaaacatcactaggggcctagatgattcacacctggccgcgggagaacgggacctcgggtatcagtcccccgagcaagtcctcaaggacatcctaactggagactccgactccggtgatgacaacgaccgccgcatgaagctgtacgtaatgtatggcggaagctggggagctcacctctcgtag

SEQ ID NO: 7309 - DNA, 336 bp, Zea mays
  Peptide Sequence Number=SeqID_50684
atggcacccaagagagctagctcgaaggcagccccatccgttgacgaagcagtgaaggcagcgctgctggccgagaaaaagggcaaggcccctgcagacaacacccaccaagaagcctgcgaagacgacgcactcaacaagagacagcgcaacgaccaacccactcccgaaggctccctccgcacctgcagctctggaggacagccacaagaaccacccccaggcttcgctccaccagagggcgaggacaccacagaagacggcgaaatcatcggcatcccagccgaggaacagctacagctgcgggccctgcgcatcaagaaccgcaacctctag

SEQ ID NO: 7310 - DNA, 489 bp, Zea mays
  Peptide Sequence Number=SeqID_50685
atggcgcccaagcccagcttctttctccctcagctcccatggtgctctctgtctcctgctcgctctctggtgctgcgtgtcttctctgctcgtcggtgctcgccgcgggagacggcgctcggtcgcccaaccttcctgctcctccctgctgtcgtgtccctcggcgccggtcgcttcttcttgctattccatgccgcggcaatcgccctgctgctccagtgcgcccagccaagcgattctctgctctgcgcgcggtgctcgataaattgcgtaagtcacgaaactctcgtcgacttggcagttcttgcgattatcgagccaggttcagttatagcgagttatttcgctattccggtacgtgaattaaccacgcgatgcggagaaccagaactgagtcgaccacaagatggtgctgatgaacggaactggagatggacagacgaagcaagtatctggacaaaggatggtcgtcaagtgatcgtcgtctaa

SEQ ID NO: 7311 - DNA, 156 bp, Zea mays
  Peptide Sequence Number=SeqID_50686
atggcggtgagccctgatctgttgccaggggatcgatggggacggttgatgttctctggaggacatggttgttggagtgacttggccgtccatcttaccacgggttggactgtcgagtgggaccctacctcggctgaggaggagcatgaggagtga

SEQ ID NO: 7312 - DNA, 684 bp, Zea mays
  Peptide Sequence Number=SeqID_50687
atggaggaccaagccatccctctcgccagagttcctgcccgtactggacaggatcaaggtctttgctacgggtggcctgacatcaatgcacgtggtcggcgatctcctgaagcgccggatcgcaccgctgcagaggaggccatgcctgtcctgctggacatcccggcgctctgtgatgactcaggcctgaggacggcgatcttgaccacgttgccgaccctcgacgacatcggtgtggcggttgccagactggcggtcgggaccccctccgcgggatctggatttctgatgcaccggctggaggtccctagcccgccggaatccgctgagggtggtgccgacggtccgctgccagctactgccaggacagtgccagcggcttcccatgccccagccggggatccggcggcagcggcgccagtgtcaggcggcgtcgcagtggcggtggaggaggtcccagctgggggatctgcgcccactcccaacactggggatgacacaggaggcgcgtccagctccaaccccctgcctgctccggaggagatggaggtggtgtttgggcggcgactcttgtcgggtgctgagcaagaagctacgccagtccccctcccccgcatgctgtcctgttcccaccaggtccttagtgaaactaaggcagcaatcttgcgggactatggatgctga

SEQ ID NO: 7313 - DNA, 1224 bp, Zea mays
  Peptide Sequence Number=SeqID_50688
atggaggagcatgcagtggcatggcgtcgtggcgacgacgagagcgcaacacgttatcagcactgtctcaaggagaaatcagagaagggaaaagaggaagaacacgctgttcttgacaagaacagcaagatcgatctgcacatcaacagcaaggtatggagcataccgtttccatgcgcatacgccgtatgcgcgaggttcttcacattgttgatgatgcgatgttggaagcgttcaccgttgggcaagccactgcgcttccaccggtgcacgcgatccctgaacgccgtgtgcaagtgcaaaatgtgcacttctgcgttatccatggatggacagcggtggttccgctgccggtggtggagtgtggactccccactgcaaccccgtcgccaccggtgccggtggttgacgtgggatcgtctgcatccgctcctatggacgtcgatttggaggcaccaccgccgcctcgacccactgcagaggcagttactcgccgttcttcatctccaccggcgccagtggtcgtcgggaccatcgctgcccgtcgtggacagcctgctcgcgctgttgatgccccgagaggccgcatcattttcactggccatcgccccagtggaatggcctcgtcttcctcctccaacgggagggcctaatggccctcgattcggccgccgcgtcggccgtacgggggagggagtagggagcggcgcggcaagccccggcacgggcacgctctgcggagcagggccggcacttgacgcaggccaccggcagcgctcggcgcgggccacctgcagcgctcggcgcgggccccacgagggtgctcggcgcgggccaccggcagcgctcggcacggagcccgcgggcctcttcctccaaggcgcggcaggctccctggtggagccacgagcgcgcaggagaggagcccgacggcggctggagcaagccgctcccttctggcgcctcctactggagggtgcgctgcacccaggagcgcgcggctccaaggcccggcgacggcgcgcaccaggcgtggctcggcccggctcccacccagcgcaggcgacgagcgcgaggctacgaggtccggcagctggcggctctccgcccggcggcaggcggtgctcgggcgggccccacgtgggcgcgctgctttcggcgaggcgcggcggccaggcggcctcaggcccaggcggcggtggcctggaggccacgacctggtag

SEQ ID NO: 7314 - DNA, 162 bp, Zea mays
  Peptide Sequence Number=SeqID_50689
atgaaccctgttctccatggatgcatcgagctacaccccgagcgggagttcgcgatgaaggacctaagaccccttcaccacttcctcggcatcaccgctgagcgtcagcctcagggtctcttcctccaccagcgtcagttcgccatcgacatcctagagtag

SEQ ID NO: 7315 - DNA, 48 bp, Zea mays
  Peptide Sequence Number=SeqID_50690
atggcgatgccatggccggtcggtggccaaacacgagctctaggctaa

SEQ ID NO: 7316 - DNA, 852 bp, Zea mays
  Peptide Sequence Number=SeqID_50691
atgtccggtcagtcgagtcacctggagaggctgcaccaccgcctgcgtgaggagcaggagcgccagcgtcagcacagggagcagcagggctcttcctccccgcctgagcaggaggtggagtccgtgaggcgtcgctcctctgttccccagctggaggcaccccctgcaccaccgcgggacgccccggctgttggaggagctactggaggaggtcctggaggagaccccgacgacgatgactcagaccacagcacggagtcctctgagccacaggaggcggaaggatgggtcgcccgacccatcacccgtgacgccgctcgcgtctaccagcacagtcgcgggaggtacccggaccgctgggaggctacctgcctagttcgtcgtccggaggatgacctccggggtgcagaggccgtttcggagcactactccatctccgagagggacactgcagaggcggctatgcaggatgcagcacggcgtgcactctcccagtactgttccttgttcggtggggtggccgacggtcttaaccttaggtactacccccgccgtcctactggcagcaccgagagtgtggttgtctcacctgttggtgaggataaccctaggttgagcagcacagtcaacctagtcgcggtgcttaacactgagctggatcactctctggacgagctgagcagggctcgaacggagattgccgagttgcgtgctgagctagcagagcgccgccaccaggagggtggttctcccgctcctgctgggactcagcacccataccgctcgccgccacgtggtcaccacacttatggttcccctgcctgtaagaccaggatagatctggatccttag

SEQ ID NO: 7317 - DNA, 393 bp, Zea mays
  Peptide Sequence Number=SeqID_50692
atgccgagcaggcgatcgacatcgtcgcaccactatttcatggcccccggggaggtcgtggagctaggagggtggcgcaacaactctctggccgctgacagcgccctaggcgcagttctagatgccctggacgtttgtgcgggagtgtgctgccgcgcagagtgcacagcagtggtcgcatcaggcgctgggaggttggtggcctgtggtgtggaagaggcagacgcttcttccatcatgaagtcctcgggcaagaaatcatggtgctcgactatgtggactatgatgttgagcagaagaacaagcaaaaacctagagcttaagccccctacctggcgcgccaaatgtcggagaggaaatctccggcggggtggcggaatgcacccgccctaa

SEQ ID NO: 7318 - DNA, 735 bp, Zea mays
  Peptide Sequence Number=SeqID_50693
atgagttcgtcttcttccagggctgagcccgagtccgagccctggggtcaggcgaagcggagttcgtcttcttccggggctgagcccgagtccgagccctggggtcggacgaggcggagttcgtcgtcttccggggctgagcccgagtccgagccctggggtcgagcgaggtggagttcgtcttcttccggggctgagcccgagtccgagccctggggtcgggcgaggcggagttcttcgtcttccggggttgagcccgagtccgagccctggggtcgggcgaggcggagttcgtcgtcttccggggctgagcccgagtccgagccctggggtcgggcgaggcagagttcgtcgtcttccggggctgagcctgagtccgagccctggggtcgggcgaagcggagttcgtcgtcttccggggctaagcccgagtccgagccctggggtcgggcgaagcggagtttcctatggcgcctgaggccggacttggctgctgtcagcatcactctgtcgagtggcacagcagtcggagcggcgcaggcggcgctgtcctcttgtcaggccacctttgcattaaatgcccctgcgattcggtcggttggcgaggcgacttggccaaggttgcttcttggtgaagactgggcctcgggcgagccgaagctttgtgctgatgggggttaccagctgagatttaggagtcttgagggtacccctaattatggtccccgacagtag

SEQ ID NO: 7319 - DNA, 255 bp, Zea mays
  Peptide Sequence Number=SeqID_50694
atggcccatgaaattataaagaaaagtgaaaaagacgcccatgacgcccgagtagaagcaaggcaagctgaagaagctgcagaccgcgaaaagcgtatagctgaattatctccgccgccggaaccattcgatcccctggctgatccacaaacgaaggaagcgctagagatcattaatatggctgaatctattgttgatgaggttgtaaacaaattactgaacgaagttgccgaaaaagttcttaaagaggaatag

SEQ ID NO: 7320 - DNA, 594 bp, Zea mays
  Peptide Sequence Number=SeqID_50695
atggcctcaggcggtggccgttggctactcggctgggcagctgcccgctggcccctacactgcgcggcgtgggttggacttgggagcgtggctgcgtggggcagcgacaatccgtcatttgagaacaagtccacaacattggcgcccatcgtgggtgtactcacttccacaaccttcggcaaagcattgaccttcgtcatgccgccgaagaagataacggcgccaggggatgcactgcagccactggacacaaaccaggaaactctctctctctccgagaggctcgaagccagaagagaaaggccactagtccaacattccaggaggaagagttggaccaggagatcagggacatggaaatcattcaccaacatgtacaaaggaaaaaggagaagatggctcggctggccgaacttcaaaggaagatcgatgaagctactgaggaagtgtgtcatcttgctcaagatgatcaagaccgaaggccccaacccagggagcttcgtcaagagggcttattcaacgaagatggatggcacaatcacgtcgtggcaaaatatcaaggacatgctggttaccagtttccaaggcttttag

SEQ ID NO: 7321 - DNA, 1191 bp, Zea mays
  Peptide Sequence Number=SeqID_50696
atgcctatgctatccgcagtattgtatgaacgacaaagcaatgatgacctaatattatcagatgaagaaattcatggcagcagcaaacctactgctaattggccatctcatgctagacgtcataggaaaagagatcctgatgttattggtatatatgtagataacgatggagtctttaaaaaggaggggcgtggtacccttaagggtatagcagcagccaccaagcgaatcaagaacggtgatcacaaacttaagattgaattttcatctaagcttggaggtcctgtaggaccaaacgctcgcacttttgtggatgaaatcgtattgtttacaaagaaaaaggcaccactcattggagtgaaaaagtggaaagatatagagctcaatgttagatcttctatagcctctaacgtactgcgaaggtgggagtttctaaccaatgaggacgtgcatgaaaagatctggtctattgctaaggagagatacaaaggatggcgatcaacgttaagctcaacatacaaggcatacaatagttatgctgaaaggatgaaaaacaagcctgaagatgtagacatcgtcgagtggcattacatgatgttgtattttggatttgagaaattccagaaaataagcagccggaactcggaaaaccgtcagaaacaaagaacgaagcatataatgggttctagaactttttcccaaataagctttcaacagagagatccagaaactggtatagaaccaaccgatctatccctttggatgattactcattgtaaaaatgatgaatggtcggaagaggcttcacgtggcatttatgagaaggcagctgagaaaattgttgagaaaatatatcaaacagaaagatttaagctaacaagagaagaggaaaatgctattttccaaacaacattcaaggaaacaacaggatgtaaggcaaacagacttcatggtcatgggtacctatcaagatatccaacaagaagtcaagtgatggaatcaaagttcctcgaacaagctcgtgccacggttgcaaccaaccaaaagaacattgaactcgaaagtcaggtccagttgttaaatgaaaaacttgcgtgtgaggttgcagaacgagaagaatactacaggaaaaaatgcaagcactgcaagaagaagaagaaagaaaaagacaagtgcttagagaagaaatga

SEQ ID NO: 7322 - DNA, 204 bp, Zea mays
  Peptide Sequence Number=SeqID_50697
atggggccagcgcaccaccgtcattggctattggaaggacaacaatgtgtgactattgggggcctccctcttccgaaggtcctcaaaaactcaactaacatgtttttcagtataacaaagactgttacaggaggcttcggctttgagatgaaggttatgcagccagccgaagaacgagacataaatgttgcagtgtccaactag

SEQ ID NO: 7323 - DNA, 657 bp, Zea mays
  Peptide Sequence Number=SeqID_50698
atgctgaaaggaagaaaaaacaagcctgaagatgtagacatcgtcgagtggcattacatgatgttgtattttggatctgagaaattccagaaaataagctgccggaactcggaaaaccgtcagaaacaaagaacgaagcatataatgggttctagaactttttcccaaataagctttcaacagagagatccagaaactggtatagaaccaaccgatctatccctttggatgattactcattgtaaaaatgatgaatggtcggaagaggcttcacgtggcatttatgagaaggcagctgagaaaattgttgagaaaatatatcaaacagaaagatttaagctaacaagagaagaggaaaatgctattttccaaacaacattcaaggaaacaacaggatgtaaggcaaacagacttcatggtcatgggtacctatcaagatatccaacaagaagtcaagtgatggaatcaaagttcctcgaacaagctcgtgccacggttgcaaccaaccaaaagaacattgaactcgaaagtcaggtccagttgttaaatgaaaaacttgcgtgtgaggttgcagaacgagaagaatactacaggaaaaaatgcaagcactgcaagaagaagaagaaagaaaaagacaagtgcttagagaagaaatga

SEQ ID NO: 7324 - DNA, 1089 bp, Zea mays
  Peptide Sequence Number=SeqID_50699
atgcattgcgcccttccaccttccgagcccccggatggggagcgcccgcgttgctttcgtcttgctgctgttggaggagcgcaacttcgcggaagttggtacctttcagccatcactcggcttcaaggattttcatcaggcagcccggctgcatcccctcgccgatggtcacccaagacggtgaccaccagtttgatggtggggagaagcaagccaggctgcggcctctgccccgccctcagcttcaaggatcttcatcatccttgctggagcggtgggcgagctgagccggagctctacctcccgtacgggccggcgggccacctcctccttcagcattcaggggagagggcgctcaccggcctagcggagggggcggacttcgacaacgcagggccgatcggccgcaagcgttgtcagctccagcgtgcccagttcgctggctcagctggctctggcgcagcttccggtgccacctcccaccgctgggcggagtgcgactatctgcccgccgtacaggcggttgttgcgccgcgcgcaccgggggaccgcccaagacgtcgcgcgctgctagggcggcgttcgtgttcttgggttgtcctgcccttgctccggtacgacgcctctgcgcggaggtcggtgctcgcccgtccgggaggacccgagtggggatctgtcggtgggcagatggctgccgtcgtcggtgctgaggtggtggcggttgaagaagtcctcgtcgccgacgagatcgccgccaccatctgcgctccgggcctccggctttttggctttgatagcttgtcctcgcccctcgagtggggacgtgggcgagggccttatcgcagcagcgtctgccctgaggtcatcgctgctgctgtttggccgcccagtgcggaggtcattgtcgctgctgccggagtgggcggcagcgagccaactgggattttgtcgtcccgcaggccctccaatgtggggtgttgttcgtacctgcgggagtggaaccagagttccgtttgtaatggcaccttgagtgccggtgtctgttcattgtggctgtcggggcctgaacatctatgtatttgggcgtaa

SEQ ID NO: 7325 - DNA, 214 bp, Zea mays
  Peptide Sequence Number=SeqID_50700
atgcgcctaggggtcccttttatagccccaaggcagctaggagccgttgagaacacatctggaaggctatccttgccttctgtcgtcgggcgcaccggacagtccgtcgccggagaaaaacccgagagcggcctcttcggccgaggcagcctggcgcaccggacactgtccggtgcaccaccggacactgtccggtgcaccaccggacagtccg

SEQ ID NO: 7326 - DNA, 1557 bp, Zea mays
  Peptide Sequence Number=SeqID_50701
atgatctgctacgtgctgtggttagctgcgtgctgcctcctcctcctcttgtacagcgtccgattcaggtcccgcatcagccatggcaacggccccaggacctacccgttgattggctgcctggtcagcttctaccagaaccggtggcggctgctggactggtacaccgagatgctggcggcgtcgccgacgcagacgatcgtcgtggaccgtctgggcgcgcggcggaccgtggtgacggcgaacccggtgaacgtggagcacatcctcaagggcaacttcggcaactaccccaaggggaagcccttcaccgacatcctcggcgacctgctcggcaccggcatcttcaacgtcgacggcgagctgtggtacgcgcagaggaagctggtgagccacgagttctcggcgcgcgcgctcagggacctggagttcgccgtgctcgaggacgaggcgcgggagcgcctcgtgccggccctgggcctggccgcggcgcgcggcgacgccgtggacatgcaggacctgctccgccgcttctccttcgacgtcatctgccgcgtgtcgctgggcgttgaccccggctgcctggacccggcattgccggcgccgaggctggccgcggcgttcgacgcggccgcggggatcatcgccaggcgcggcgccgcgcccgtggccgccgtgtggaaggccaagcgcgcgctgggcgtgggctcggagcgcatgctgcgcgaggagatccgggtcatccacgaggccgtcatggacctcatccgcatccgcaagaaggagcgcggcctgcaggtcaacgacgccgacgggcggaggagcgacctgctgtcgcggatgatcgaatgcgggtacccggacgagatgatccgcgacatggtgatcagcttcatcatggccgggcgcgacaccacgtcgtccgcgctgacatggttcttctggctgctcacccgccaccgcgacgtggaacgggaggtcctgcgggaggtcacgggcggcggcggcgcgagccacgccgcaggcgggcagggcaagatgagcgtgctccacgcggcgctgtgcgagacgatgcggctgtacccgccggtggcgtgggactccaagcacgctgcggcgggcgacgtgctgcccgacggcacccgcgtggagcgcggcgaccgcgtcacctacttccagtacgggatggggcggatggagtccatctggggcgccaacgccgccgacttcagcgtgcagcgctggctgtccataggggaggacaacgcgccccccgccgcggtggccggcgtgtcgccgttcaagtacccggtgttccaggcggggccgcggacgtgcctcggcaaggagatggccttcgtgcagatgaagttcgtggccagcaccgtgctccggcggttcgagatcgtgcccgttgacgagggccgcgtgccggtgttcctgccgctgatgacggcgcacatggccggcgggctcaacgtgacggtgaggagaagaggggaacccattgccgctgctgctactccactcgatccttctgctgatccagtattataa

SEQ ID NO: 7327 - DNA, 174 bp, Zea mays
  Peptide Sequence Number=SeqID_50702
atgcgaaaccagaaacagtgccagaggagaccgtacttgcgttgccgacatcttgcgccattccacagcgctccgcgtatcagaggatggttcagtattgtctttgccccggggaagaaagttggtaggtctaaggagttgttgaagccagatacgaatcaagctgattcatga

SEQ ID NO: 7328 - DNA, 339 bp, Zea mays
  Peptide Sequence Number=SeqID_50703
atgaggacttcaaagccgactccagcgatttggatttggagctcacagaaggggctgactccagaagggctttctccagaggtattagctcaagcttattttctatggtgggccccctcattgaagagcctccatctctgcctgtgccattacgtcactaatcaaggttttgcagaggcagttaattgcttccctcagctcgaggagctagacattacattctgctcattgtatggcatcgtgtgtgagactgctgggagagcctgcccgacaacgtcgtcgtctagctctgccggagcaggcaaggacgtgtatccccttaaatgttatgccgcttaa

SEQ ID NO: 7329 - DNA, 891 bp, Zea mays
  Peptide Sequence Number=SeqID_50704
atggaagttggtcaacatgcaccagaggtcgaggctgctgaagcatcagatgaagatgttgaggcctacatcggcaaagccaccggtgcccctcaggaggcctccagcagctccctcctgtcgtgcctcggaagtagtagctcatgttctatatgtggcgagctgatgatgagtcgggcgatggaagttggtcagcatgcaccagaggttgaggctgctgaagtatcagatgaagatgttgaggcctacatcggcaaagccaccgctatgcagtgctccggtgagccgtggttgctgcgccgccatggcctactgtctggccggcgcgggggctgggagcggctgggcgcgacgggactcggccacggccttgcctggtcacgtagagccgggttggccgcgtcggccgatggagcggatgacgggaggacaaccattgatgcagtgcggcggagaggaaacaagaacaaagcaagctgggaacaccggacattattacctcgcgacgtggcccggacaccggacattcttacggatgacggcgagcacgacatgggggtgacgagggtgcgcagcaaggttgagggaagggaggaggagcgcggcaggctaggcgcgcgtgggcagaggcagtctgatgggataaagcataagctaaaatggagatggatgaagcaacgacgagaggatgaactgacagcggtgtcttccgctgtggagatctattggggcccagaaccggtggcgagcagcggcttcggcttagatctgaatgccggattcttcgtcttacggcttgaatcgagctgggaggctgtggatctgagcacgggaggttctagagctagcgaaatcgcaaggctattagggttcctttcggagcgcgtctga

SEQ ID NO: 7330 - DNA, 444 bp, Zea mays
  Peptide Sequence Number=SeqID_50705
atgggcaagaacaacaagcgtaagcgtgagccgactcctccatcggaggagtttggtgactcggaatactcggaggaggagttctcctccgagtccgaggggtctccggctcccgtctctcccccggcgtcgtccgatgactcggacgactcccaggggatagccgcggaggtctggacgtatatccgggccgtcgagcgcgccgggctcgaaggctcggatgagtcggagtgctcctcggatgaggaggactcggacggcggcgacgagggtgaagacgacgacgacgacgacgacggcgacggtggcggcagtggcagtggcaggggcggcggcgacggcagcagggacagcacccagggcgacaacaggggcagcaccaagggcagcagcaggggcagcaccaagggcggcggcggcggcaggggcagggccagtggctag

SEQ ID NO: 7331 - DNA, 1158 bp, Zea mays
  Peptide Sequence Number=SeqID_50706
atggggaacactggaggagctgctcctggcgtgcgccgtgacccggaacggcgtgacgagctaggactcggtggaggcggtgctgcccatggagatggtgacgccggttgccaggatgtcgtgacgaaggtggcatgcgacgcaacccatggagatggggacgccggttgccaggacggcgagacgaaagtgacatgcggcatagcccatgggaacaccggttgccaggacgatgagacgaaggtggcatgtggcgcagtccatggagatgggggcgccggttgccaggacgacgccgtgaaattggcagcagaagccatgagatcggatcaaaacccaaggtacatgctacacttcgtcaatattgcggtccgtatcctatctgcgcccgttcttcatgtatcaggctttaagggttcatgctcaaatatatggcagcggagttcctactggagtacacgacagtcccagagcaaggtttaccctctttttatacctaggaaaaatgcttgcacaggcggtgaagaaacctcattgtcagaaagtggttcgagtaacttcggagttgactctgtggattctgtcaagaaacagtcttttggttccacgagaagtaatagctttaacctctctggtgcatcttcccactccatggagaggcatcaatatttgcagagaggaatatcactattgaagacaagtgttacagcaattactacttactattataactcactgggcttggatgtgccatccaatctttctacttttgaggcgttttctaagttgctccatacgttatcgtcatcaaaggcctttcgaactgcttttgaattgaacattgcttcaaggtcagaaaagcaagcacagcagctaaacagatcgatttggaagtcaagttcagccgtatcgtcggacagcagttttatggacagcatgcacacaaccatcatgcccagcactctagacaacctcctcctgaactcaaaccagagcttcttgtacaccgctaagttggtgaagcatggtggcgtgccagatagcatattcaacggttgggacctggtagagcgtgaggtcctaccgccaccgccctcgcggttcgaagatgtcgcgcagtgggaaagagccatgtatgctggcacaaaaaagaaatga

SEQ ID NO: 7332 - DNA, 1029 bp, Zea mays
  Peptide Sequence Number=SeqID_50707
atggggcagggcaaggaggtgaagacgcgaccggaccccgaggtggagatccaggagaagggcgagatcttcttcttctaccgacccaaggtgggcaaggacgaggcgcacggtcccgacgacgtgcagcgcatgtacatcgtcctgcgccctgagtccgccggcggcggcggccgcaccgtcgaggagaagcaggcgccggactccggcaaggaaggccgcaagcgccgccggcagggagacggcgcccaggaagaaagcgaggagaaaggcgcggatggcggccacggcaaggaggaggtgaacatcgaggaccagccgttgctccggctggtcgtgatggggaggaagagcctgccggacccagcgaagcacagccgcccgtactggggttacgtcgagctcgtcaccaccaaggtcgacgacatcaaggacgcgctcaaggaagaggagtacagcacggcgacgcggggtaagcggcacagggcggcggcgcgggcgctgggcgagggcgtgtaccgcatcgtgaagcacgagtccgagtccggctccggcgggcggcggcggagcccgcgcccgcacacccacctcgtgtacaagctggagctcccatccacccgcggcgccatggagccgcaggaggcgatgaacgtggagccggaggcgtcgttcctcgtgcaggtcaagaaccccgacccgccctccggcggccgcgacggcgggttccgcgggctgcagagcaagcgccgggccgcgttccccgcgcacctgcaggacgcgttcgggggtcggcggtacgcgccggccgacccgccggacctgctcaactacgaggggtgcgagctgctgctgatcgcggcgtcggacgatgtggaggacgagctcgggctgcagctggagggggaagtggaggacggcgaaggtgagggtgtggagactccgcagggcgcgctggggtgctccgacctggtgaagatgttcggcgaggtggccgacgtgaagccgctgctgagcgggagctgggactag

SEQ ID NO: 7333 - DNA, 597 bp, Zea mays
  Peptide Sequence Number=SeqID_50708
atggctgaaaggtaccaactcccgcggagttgcgttcctccaacgacgaggcggaaagacggtgggtatcccccatccgggggcttggaaggtggaaagacacgatacataagggagcgcgaagacatggtcgccttccaagggggtcaccctccttttaaaggcgactctccctacttgcgtccccagccgtcgtgggctgagtcttctccaacacactccaaggtcctcccctacggcgcggggctgggccccacacgtcatgcaagccggctcagagcagaagaagccaaaccgccgcgcccgggaccgggaaagggggataccccgaaaaggatccttccccgtgaaggaactaggctccgagcctccctactgatcagaggttcgaaggctggcccctcggaagggttcgacagccgcctcagatcgtgtgggctctacacccactactggtcagaggttcgaaggtcggcccctcgaaagggttcaacggccgcctcaggctactcgggctccgcgcccactactgatcaggggttcgaaggctggcccccgaagggttcacagccgcctcacacacagagcgagggatga

SEQ ID NO: 7334 - DNA, 972 bp, Zea mays
  Peptide Sequence Number=SeqID_50709
atggacacttgtctcctggggtggtccggagcccgtgtagccactcagcctggttccgtaccgtgggcctgcacgctccgccactctgcgacgggcccaggtcccaatcgaggctacctcctgggggccatcgccaaatctttcttaggaatggactactatgcaccagcagggtcgcgttggaagctagctccgggcagcctcaccggcggcggcgaccacctctactccgagcggcccaccaaaggaggcggccacctctgcgccgttggctcgccaccaacggcggccacctttgcaccggtggcttgccggcaacggtggccacctcagcgcgtgcgaagaggtcctcgctcccgtcctcatacgagggtgaggacaagaccatccaagaacgcggccgccacccccacggcgtacgacgtcttcaaataccgggacatcccatccaagcaggcgatataccatttcgagcactcgctcagtctgggcgcgctcgggatgaagtcacaaggccatgcggtcaggaaggcgaaccgctgcacaaggagcgtgcaaccgcctcgcggttatacgccctttcatcttcgccgcaaccaacggtcaagaaggcgaaccaccacgctaggagcgcacaaccgcctcgtggttgtgcgccccctcggcttcgctgcagccagtagaccaacatggggcccaggcccacatgtcatgcacctggcgcgccggtcactaggtgcaaaaaagtcgcaccgccgctcgcgccaataccgtgtctcctcggggccgtcgcagaagactgagaagataaattttcaaaaccagtgcagcgactcgaggcaccccgcgcatggcccaacaaagacattaagtgcggaggtcacgggccagtcagccgcggggacaggcgtggcagtcggcgtgaccatgggcggaccggcagtaattgcatcaacgggcgcgcaggtgtag

SEQ ID NO: 7335 - DNA, 414 bp, Zea mays
  Peptide Sequence Number=SeqID_50710
atggagtcacggggcaacgacggtggcgcagggacgcgacggacgacggtggcggagctccggctgcgcgagaatcactccagtgagcgtgggccgactgaaccagggagggaaagggcacaccaaagggtgtcccgagcagctgacagtgaggcggagctcaccgtggcactggacggggcgcgaacgcgacagtggtcgcagaacaggcggcgggcggtggtggggttctctgcacgcgtgggcagagcgagagagagggcgagcgagtatggcagagggcgtaaatgggcgaggggaggtgggcgagtagggcgcggggctcaaaagtggctcggacgtggccggagaacgtgcggacgtgggcgcatccacggcggggagatcgtgggcgagaggttagagacgagctga

SEQ ID NO: 7336 - DNA, 405 bp, Zea mays
  Peptide Sequence Number=SeqID_50711
atggcagccggagaggttttggcacccggttcgtgtggtgtcgtggccgtcggaggagcgctggagcctggcggaatgacagctgtcggggttgtcgagtccttgctgacgtcctcttgcttccgtttgggcgatgtggaggctcctccgaggtcgaggtcgagtctgtcttccgtggccgaggtcgagtccgagcccctgggtcgggcgaggcggagaccgtcggctgaggccaaggtcgagtccgagccctggggtcgggcgaagcggagttcgtcatcttccggggctgagcccgagtccgagccctgggtcgggcggagcggagttcgccgtcttccggggctgagcccgagtccgagccctgggtcgggcggagcggagttcgccgtcttccggggctga

SEQ ID NO: 7337 - DNA, 258 bp, Zea mays
  Peptide Sequence Number=SeqID_50712
atgggggaggtggatgttttgctgttgctggtgtggaggtgggtgtgggggaggatgtcggctggctgcgcccgtgccatcctgtctccggtggccttcgtctctgggcagtctcttgtaggaaatgataacaagttacaaatgtaccttcggcttgaaggaaagcaaaaataccagcgtgaagcaaaagcaaatgcccaatgcgtgattacaggagagcgcgtgaacagtacaggggtactgttcacctatttatag

SEQ ID NO: 7338 - DNA, 585 bp, Zea mays
  Peptide Sequence Number=SeqID_50713
atgcgcgggcatacgaaggccggcgatgaaaaatgcctaaaaacaaccaattcgccctcgggctcgggaacctcctctgcccccgggacgtgcccaaccccgccgccaatataccctaaccgttgcatatcttgcacgcggaccaacgacatccgcgaaacaccgaattccaccgtatcacccggtcataattccgctgccgccacagtgcccgagagatcttcggaagacgcctcggccgtcggcgtggtcgcaacagacgaggaggaagacgtcatagctacgtaccgtcgacggcggcgcgcggtctgcttcacgcgggccagttctccgatgaacaggagcaaggagggcagacgagcaggcgagcagtttggaagggaggctagggttttcgcggcgcgcagaaaggtaaatttcaatctgcgccgccccgccccctttatatacacagggcgcgacgcttcggtaagcccgcaatccaacagtgcggcgtcaatcaacggtcatgtcaaaaaccccgtggaaccacttcgagcaagggcagcgtctccaccatctagcgacgccttcgacaccagatga

SEQ ID NO: 7339 - DNA, 861 bp, Zea mays
  Peptide Sequence Number=SeqID_50714
atggaggtcttcgccaagcaatattgtctgcgctggcagaagagaaaaaatggacataagattgcgcaattcggatcgtgcactttcacgccaaagtccgggaagacttcgatggaagttgtggagctggtcccctgtgctcgaaataagtggggcaactggtgggactactggttctatgtttcggaggctgaagtcgaagatcacccagggctccccgccgccattatgtgttctcattattatgtggcgtacccgccatttgaagtggcggaggatgatgaaaatgaaagggcccttcggatcgctgcccgcacgagtagtgggcgcgatctagttgaggaattcatagggtatgaggtgtggcccttggcgcatggatgggcgctgggcgaagtatgccctcgcgagatgccctccctgggtggacggaaggtgcgaagttcgctttttgctttggatgtgcgagggcgggatcctgccacggttgtgcgtgaggctgaggatggggcagtgagaattgtcgggcgctatgtgccaaagactgaggcccagcggagttgggatatacgtggatccaacgaccgcctaaatagggtcttcgagttgaattgtttgccgtatggcagttatcctggggaggacgtcgtcgaccgccgcgggaaaaaaccagcggctgtgactgaggacgaccccgcgccggaggccgccccagccactaaaaagaggaagctaggtactgcagtgggagaactaggggtctctgatagctttgctatggagttgatggggacatgcgcggcccccgggggaaggatgtcttcgcccgagcttcgggagtcttcggcgcggatgctgtag

SEQ ID NO: 7340 - DNA, 804 bp, Zea mays
  Peptide Sequence Number=SeqID_50715
atggctcgtggcttgagagtgtttccttacggacggaatattgctgctgttgtgtcagcagtgatgaacaaggaccgccaggatgctgcgcagaagcgccgggcggtcatcaggctccccgatgctaggccgaagagggcgcaggggactgcgaaagctaccgtccccagcggtagccaaccgatgctggcggcgaagccggccgcccctgggtccagcaaggtgtcggagagcgcgaaggcggtcggcgccggcggaaccaagtctgccccggacggagctgcgaaggtccgggaactgccttcgccggggaaacgcgttgccgacttcggcacaaatattagcgtggacgactatctcgttgggtcgggcgaggggcaacttgttgttgtcccgcctgcggtggcaaccacggcgtctaccgcagtgcttggggtgaagggtggcgctttcagcgctggcggcgagatttcggcggccagtgccgtcaaggacgaagcgggcactgtgtcccgccggctgagggtggcgtcacagcagctggcgcagcagctgagtcaagcggccgacttcgccgaccgcgtggcgtcgggtgcccttactgcagacgtggttgccgaagtcaagagacttcgggcacagcacgcggacgccgtccgggagaagtcggtcgcggagagcaaaagccgcaggctggcggagaaggtggccgccctggagggcgagaggacggacctccggcgccagctggtggaggaaaggagggaggccaaccaggccatcgccaaggcgcaggcggcgtag

SEQ ID NO: 7341 - DNA, 957 bp, Zea mays
  Peptide Sequence Number=SeqID_50716
atggagagggtcgaggcctctacgcgctcggaagttgagcggacgcgcaaacagctcgtggactcataccacgagatgggtgtgcggactgctgacttcgaggtgcccgaccgagaggcgggccttcgcttcctcgagtggctgcaagaggaattgctggcactcccgaccatcgtggagggcttcatgtcctttgcctccctcatcacctgcgaaggggccatgaatgcgctgtcccgcgaggggtgcagccactatgagggcttcgaccgatccgatgaagactttgggcgcgagatttttaagttcgaagaccctgtggtgaaggactccgcgggggccctcttcgactggatgtggatggcgcgtgccgaggacgtggaggacttcggacatctgaacagcgcgcagcccgaagcggaggtcaacccggtggtggccgaggctgaggtcgacccggcaccacccccggaaactggtgaaggctccctcgctgcccctgcgtctactgtgtctggtggaggctcgtcgccagccactgtgccgatggcggaggatcccccgaaggcggcgacggagctggcagcggaggatcccatggcggcggctgggtcttcgcaggttcaggattttgggcctgcgcacgcaaccgctactgctaattttgtggcggcttcgatcgtggtcgctggaaatgaatcagatgagtctacgtctaagttttctgagtttgatgactctgggagttcggttgtgtggacggaagagtcttcggatgaggacttggattactttgcggccttggatgtggctgcggcgaaggcttctccgcgtgttatggatgctgaagttttgcctggtccgagtgctgggcgtaggcggcgaagggcggtggcgaagcgtagaggctggcaagcgggaattgttgtcctcgccggttggggcaagtgtaggtga

SEQ ID NO: 7342 - DNA, 1653 bp, Zea mays
  Peptide Sequence Number=SeqID_50717
atggtgacaggctccgtcatgcggtcaatggttggaatgctgttacatataagcgcgtcgacttctggcgaccggcccgtctcacgcctcggcagctcaccggtggctagggatggcaacgtgcacattttacccgcgtgcccgcggtttaataaatatttattttatgactatgcccgcgggtgccataaacctgcgggtagcggatttagcctgttggccctgaatgcggcatgccctaatgtggtggttttgggcgcaggtgttgctgggggtgcatcgtcaggcaagagtaccgtgtgcaagatgatcattgatcagctccgtgaccagcgtgtcgtggttgttacgcaggagtccttttattatggattgacggatgaagaattagtacatgtccataattataactttgatcatccagacgcatttcatacagagctacttctctcttgtatgcaaaacttgaaatgtggcaaagctgttgacatccctaactacaacttcaagacatacaaaagtgtcccaaatgcaaggaaggttaatccttcggatgttattattttggaaggaattctagtttttcatgattcacgcctcagggatttgatgaacatgaagattttcgttgatacagacgctgacgtacggttaacaaggaggatccatcgtgataccattgacaagggtagagatctcaaagctgtgttagaacagttctcaaaatttgttaagcctgcttttgaagacttcatcctcccaacgaagaagtatgctgatgttatcatcccacgcggaggagacaatgatgtggcaattgacctaatcgttcagcatattcggactaaacttggacaacatgatcttcgtaaaatacaccctaatctgtatgtaattcagactacttatcagatacgaggcatgcacacaataataagggatgctgccacagcaacacatgatttcatattttatgctgatcggttgattcgattggttgtcgaacatggtcttggtcatcttcctttccaggaaaagcaggtcatcactccgactgggtctgtttacactggtgtggagttctccaaaaggttgtgtggtatctcagtgatcaggagtggcgaaagtatggagaatgcactacgtgcatgctgtaaaggtataaagattgggaagattcttattcatcgggaaggtgacaatggacaacagctcatctatcaaaatttaccaaaagatattgcaaataggcatgttctgctgttggaccccatattgggaacaggaaactcagcagttcaagccatctcccttctattaaagaagggtgtacaggaagcaaatatcatatttcttaatcttatttcagcgccccaaggagtgcatgtggtgtgcaagagattccctagaatgaagatcgttacttcggagattgagtccggtctaaatgatgatttccgtgtcgtacctgggatgggcgaatttggagacagatacttcggaacagatgaatatcagtcatcgacgccatttttctgtgacgataaaaatcgtgtcaggtgggtttctattcaacttttcgctggcgcacttgccctgcaaggggttgacgggtactctactctttggttgaaactgcgcaggctcttgtga

SEQ ID NO: 7343 - DNA, 372 bp, Zea mays
  Peptide Sequence Number=SeqID_50718
atgaagatcaacctctactcgtttaggactgatgtcgtcgtcaccatcggtgagaggtgcttgtgctgggtcgactactaccacggtatgctgctcatttatgtcctcactaacagcaacaacaacaacaacaggctccgttatataccactctcatctaaggctttgaagactggtctgtctgatggtgacatcattaagctcgtctatattattaccaaagagcatccttctccttatcccttcaccatagaaacatggactttggttggtatccaccaaagtagacgggagaaggatgtcaacttgaccatgggagccagtgagttcttcaatctttttgacaacgctgccaagagttgcctcccatga

SEQ ID NO: 7344 - DNA, 1746 bp, Zea mays
  Peptide Sequence Number=SeqID_50719
atggtatcaaaccactctcccttctcccttctccctcctcctcgcctccccctagccgtcaaggcccagcaactcgcttcttccccaacgccggtggcttctcttcccagttggcttccctctcgacgcctaggcaactccctcccccacgcaggcacgcgtcctcagcaagaccccttctcttcacgcgcaagtaggtgcctctcgggcgcgcgcggcttttccccaccgctggtggcttctcctcctgcaccctcctccccgctagtgtccctccccaacgcaggcgtacatcccccactggcgagccctcttctgccactaactacaaacagccacagtcttagccaggagggttctgactgcgccgctatgattttggaggcgctcgcctcgaagtatggtcttgaggctgatgcgctccaaatccgacgtgctgcgtccaactcgtacctggttttcttcccctccgtggatcacgttgttcgcgccttggctggtggaaattccatttccataccccccccctccggctgcatcttaggaggtggtcacgacaggcgtcggcctctggtggaggtgccctcccctgtgcttatggatgttgaacttggcgggattccggcacacctctgggggattgatacggcagagcatctgcttggtggacactgcattgttcagggattacatccggatactgttgatgggacggatttgtcagttctgaaactgaaggcttggggtttctctatggattgcttgccttctcgctgtgatctccatgttgaagagccgacgtctattggagaagatggatcctgcttccctcgcacattgatttactccatttcggtgaaagtgactactccggttgctttgctggttgaggagcagcctctgttttcctcccctgatgatgatgaagaccgggatagcaagcatcagcggcagaggcagcatattccggatcatcagttctcttcggtccggacctctgttcatgcacggttgggaccacgtatcactcctggtgggggaggtggaacagttgatgccgctcctctcccaaattcctcggttgatgagttgcaggcgcctgttccctccttccctggcagtcccccgtctcctgcgttaggggcgccaattattgctaatattggaccccttcctgcttcagttgggggttctgttgtttccaccggtgggaagactgctgatatgacattggagcctttttccgggaatgccctagttcctttggtttcaacatttaatttggaggagcaatctgcgtcaagaattctggtttcttcatgggactacaagatcagggccaaacctccctgcttcaagatttatgtccgtaaaaaaatcccagttcagctagcacagtctgaggagattggaacttctactcctttgcagaaatttaaagatggaattacaaaacagatcaatggaatcctaccggcccctatccaaccagtcaaacggaagagaaaactgattcctagcaatttcaacctaaggcgaagcaggagggtggccaagataccacctgagttaggctctccctctgctgcaaaggtcaactctggtggttcacaggtgtttatgggcctcatcaagataacctcaaacttgcctttcttcaggagctcggtgtggtcaggaatgaataagctggatcaattctctggagttaaaggaaataccgctatgtgggaggagattcacctg

SEQ ID NO: 7345 - DNA, 96 bp, Zea mays
  Peptide Sequence Number=SeqID_50720
atgggcttagcaaactactgtgttccagcaggagaggcttaccagaaggctcttgacattgcctttgagataactcagaagtgccattttaattga

SEQ ID NO: 7346 - DNA, 447 bp, Zea mays
  Peptide Sequence Number=SeqID_50721
atgaggtttgtcggtacccaaaaacaagggtaccccttggcacaatatgaagacactatgccggaggagaggtctctagttgtacggggaacggttctgtgccgcaccacatctaccgctccggggtcgccatgtggccaggaagaggggcgtaccccaagatgcgcgcagtgggtccggacctacttccttctacagggaaagcaccggacccccgtgcttgatgaacggacctccgagacaggtcccagacccttctacgtggggtccggactactcaccgccgggtcccgggattctggagcagagaatgcccaggccctgctcaggcaggagtccaagggcgacatgtgtctaggcccagcttggtgcgaacctgtccgcggaacgcttctattccctgcccagatgaagacttggtgctgccaaatggcatacagtgcataa

SEQ ID NO: 7347 - DNA, 601 bp, Zea mays
  Peptide Sequence Number=SeqID_50722
ccagtctagtaggattggtaatggagggtcccgtctgacttcaggtcttagtgctctggctcaacccttcaagcttcgtctgtccccagctcaaggtgaaaaaccacttcgggattattcatcaaatattgtgcttatcaatccatttgccagtttagcagctgttgaaggatttctttggcccagagttcaacacagtgaggttgcgtcaaagcctataattccatctggtaataattctgaatctgtggttcctggcaccatagctggtgcatcattagcaactgcaatggatcaatctggtcggcgtccaacaacaagatcaaagtcatctgctgcatggggtggtacatcaaagaaggattctcatgatgaaagcactactactgccaaaggaaaactaggtgattccaatgagtgtaacattggctcagccagttttagccaggtgcagccatcatctggttccggtgctagaaacacttctagcagaggacccgattctactgaatttcaaagtacgagcacattcgggtcatttgttgctgcgacgatggctgggctagcttctgttggtggtcgcagtgttataggtggttga

SEQ ID NO: 7348 - DNA, 114 bp, Zea mays
  Peptide Sequence Number=SeqID_50723
atgactggtagtttcattattcatactgtggatgttacgctctgtggagctactttaccgctacgaatgaagcggacgaaacaactgaattctgtcatggtgctttctgactaa

SEQ ID NO: 7349 - DNA, 2285 bp, Zea mays
  Peptide Sequence Number=SeqID_50724
gaattcttggggctgctgatttgagggaacacttgaagtctgataaatctcctccaaaagaatctgagtctggtggtggtggtatccatgggccatgtgctgaatttggacatcagcgcaatgccttggaccaaggaactaaagttggtgatggtgaaaatgttaacccagaaaacctctctctgtactacaaggatccaaaagggtgcatccaaggtccttttcctggatatgacatcattggttggtttgaagctggatattttggtattgatttgctagttcgtgttgccagtgctccctgtgattctcctttcttattacttggggatgtcatgccacacttacgggcaaaggtaagggtgcctccaggcttcagcaataccaaaccaagaagtatgacagatgcctcacatctaggatcagtgtatcttggaacatctgattatggatccataaacaagaatggctgtgtaactgaagcagaaaattactttttggaggctccagtgtctagtaaaatccagaatcctagagcagcaactaatgttgttactggaggtatgaatgaatggaggtttgtttccggtgagaaagtgaatagtataaaccatcttgaagtacagaaggtgcagttagagacagaaaatacctttcaaatagaagatgttactcaagagatactaaatgtgcaccaaaatctgcataattctcagcaaataggtattgatgctcaacagcattacgttttaacacagaatcaaccaactttagcttgtttgaactctcaaatcacacagccagaaaagtttctcggtggaatatatcatgatcctcagttaaacatcaaccaacaacagtatctgctatcagagctacacttgcaacccctgattcctggagtccctgaacctcaatcctctctattgaacaacatgctacagctcaggcagcaggagcaacagcaacaatacatttctcagtccatacctcatgatcgttccatgcagcagctttatgattcttcccatgggacaatacatacttcattgtcatctggtgaccgtatgaagctttgtcttcaaagaacagaagagattcttgatcttgctctgaagttacctggtcatggtaagcataatctacaactacatgcaagtgtgaaattgagagacacaggaaatattggtttgtcggaaagttgcgctactgccctaccactgccccatgaaatgatgggtcatgcagcttggaaagaatgttctgctagtctcacacagggctctgcagttgttgatgctctttcacaaaaagaaagtattgtagactcaccatctaagaaaactccaagttatggttctaacgattatagcaagatgactgtttttgaagttacaggttttcctcaaccatttcaaggtcttcagaaaccgaaaagtgtagcatctcatatctcaaatgaagttcatgaaatggatatttcctctgtccatcctcattcatggaaacctactccaggtgttagggctaaatcagtgttggaaattcaagcagaggaacgattggaaactcagagggaaatagccctggaaaatacaaagagtaacagaagtcatttacatgatttatcggcaagagaggaactgataaagtcaaatgctaaagctggtgttatcataaacagtgctgatgatacatcttttcctcctctggcaccttctattactcagtctgatgctcatattcatgatggtgctgatttcattgagttcaagggcacaagaaagataagtaacagggggaagaaacccaaaggttctgcagttaaaaccccagcatcacatgcaaatgttatacctggaccagctactgatcctgcacaggtggaagaagaacaggaatcagctaatcttcagcaactagtaccagcatcatcccatgcaaaagggcctatggaccagcatattcatgggaacaattcatcctggcaaggttctgaatcacctccatcgaggggtaacgaattcctcaaaatgacttctcatgtttccagtcactccactcctaattcagaagagtatctgttttgggagcctcgtgagcatgcaaagcaagataagccgagactccaatcacctccgagttccgtggtcaatacaaggtctactgcattggacattcataagaaggggaagaaaggtacaaagctgagcacgtcagctttggggttcaaggttcagagcacccgtatcatgatgggtgagatcgcgcatgttgacgagtag

SEQ ID NO: 7350 - DNA, 1230 bp, Zea mays
  Peptide Sequence Number=SeqID_50725
atggcggccatggaggaggactggatctttattggtgacggcgccggtggtagcagcgatacagacagcgcctccgacgacgacgacagtggattcatgatcgtgaggcggggccgcaaaggcggtgatcacagattcgacgcggcggcgcacccgcgggtggcggccgtggccgtggccatgcctcaacccacgccaccgggtccggggctctccttcagggtggtatcgtcggacggcggcggccgccgcgagcatcccggatgcaacgacgagccgtcggaatcctttcacgacgacattgataacgacaggtctgacacggaagatgacttctctgggtctgacgaggaagcagagaacggcaaccgagacatcttccacatgctttttccaagagctacgggtacggcatgcgacgccaatatcgacaactatgaggacgagagcgagcacggctatatcgacgacgacgaggaggatgaagatgggtcctcgtttgacattgatagttccgacggcgaagaagaggctgctaccgctactgcggcatgtgactggtacaacgccgaggacgacgatggcatcgctgatgtagcagagaacggcaaccaagacatctttgacatgctgttgcccagggagcgtaccatcgacgacgctgctatgacgactgcgaacatctttcgcatgttgtttcccagagctaaggcatgcgtcgccaacatcatcgacggcgactctgaggacgggagcgagcaccgctacatcgactatgaggcggagtttggcatgctgttgcccagggaatgtgccatcatcgacgactatgaagacgagagcgagcacgtctacattgactatgaggcggagtttggcatgctgttgccccgggaacgtgcgctgttcacatcggcggcccagagtggtccggcggaagccctgttcacattcacagtgcggagcagggagcgtgcgctggtggcgatcgaggaggtgcggcggcggcgggaggccgcgcaacaggagctggaccgcgcgctggcgagacaggcggcggcggctgccgaggcgttggagtcggctctgcgtggcggtaccaccactgccaagcggcaggccactggagtcacgcagcccgccgtggccgaccttgatgccccggctgacttcaacttcatcatcggcgtttgtatgttcgtgtaccttgttgtttctctttttctctag

SEQ ID NO: 7351 - DNA, 1191 bp, Zea mays
  Peptide Sequence Number=SeqID_50726
atggaggacgagtggatctttcttggtgatggcatcggcggcaggagcgacacagacagcgcctcctccgacgacgacagcggattcacgatcgtgctgcggcgccgcagaggcggcgatcgctgcagcgtcgtcgtcagcgacgccgacgacgcgccggcgcagccacgggtggcgcccgcggccgtgccgcagcccacgccaccggggctctcctcccacatctttgatatgctgttgcccagggagcgtaccatcgacgacgcgccggcgcctcagccgcgggtggcgcccgtggccctgccgcaacccacgccaccggggctctcctcccacatctgtgatatgctgttgcccagggagcgtaccatcgacgacgaggaaggggcatgcggcgccgacatggacgactatgaggacgagagcgagcacggctacatggactacgaggcggagattggcatgctgttgcccagggaacgtgccatcgacggttccgacggcgaagaagaagctgctactgcggcggcttgtggctacaacgctgagccgagcgacggaacccgacagccggagtttgccggtcgcgctcgcggctacgactacgacgacgttgatactgattctgacaaggaagatcagggcgacgactatgaggttgcggcccatgtcaatgggacaagcctcctctacggttggccaagagccacgagcggcgtcgagagccagcgctggagaattgctagccaacgtcaggcggagaggctggcgttgtgggaggatttcgagctgtgggtgctggatgacctgctgcggcaactcacggcggaggcgttcgagctgtgcctgcacgcagcggcccatggtggtccggcggcggagcgctgtgcttgcgcgcggacgggggaagccctgttgacactgcggcactgggagcgtgcgctggcgatcgaggaggtgcggcgtcgggaggccgcgcagcaggagctggaccgcgcgctggcgagggcggcggcggcggccgacatggcgttggagttggccctgcacagctgtcccactgccaagccagtcgtggaccgtgaggagtctagtgtttggtctgttatagagtccccattagtttcagataggagtttgggtcgtccatctaggatccagttaattgttggtttaaaattgttgggatag

SEQ ID NO: 7352 - DNA, 285 bp, Zea mays
  Peptide Sequence Number=SeqID_50727
atggccatcgcctcccgcgtctcccgcctcgaggccgacactgcgcgcctccgccgtgacctcgccgaccgtgaccgcgccgaggccgacctccgcgcctgcctcgccgactccgacatgcgcctggccgccgctctcgacgagaacgcgaaggaaagggactcgctcgcggcgacggtcaaaaagctgaccaggaatttggcgaagcgcatatttgtccccaacatggatcgttttaatgaagagagcgagcatggccttactgtcgctaagagatcaatctga

SEQ ID NO: 7353 - DNA, 606 bp, Zea mays
  Peptide Sequence Number=SeqID_50728
atgtatcgtgggggccttgaccgcttcgagaaggcacaagccttggagcccttctcagtgaagtccaagacaggcaccaagaaggcacctgcagctgcaggaacaactaaagcactggctctattgacgttgccacaaaattctatttttttgccgggacctcaacaaccatccataagagaaactccaagaaagaagatacaactatctacagaaacaataaaaaaattttcttctcggactgctcaatctgcaaatggaaccagcgaaacagataaaggtcatgaaaggattctagaaacgatcaacacagttggacatgacgatctaaaggtgctgccgggattgcatttcatgccccaatcaacaactgggccagaaatttcaccagctgctatccctgaattgatgtccaagccaacggaggcggttccaccagctggatcaatggttcgttcaggcactgaggtcatcagttcccgtggtggtcgccgttgtgctgtacgtgacgccgtcccaggttttgatggtcatagccatgctttacctgctgcgacatccccggttccgcagcaggatgccctccgtgcctttcaacttctatag

SEQ ID NO: 7354 - DNA, 441 bp, Zea mays
  Peptide Sequence Number=SeqID_50729
atgtgggctgagaagctcacagaagattcttttgtttttgatggtgctacaagaaatataattgacggggcacgaagggaaatggaggatgacccccaggctaacaacgaggacataggaagatgcatgtttcttgagttcttaatgttcatgacatatgaggctatgctcaacagcagatcctcaaaggctacacatatgcttacagaaaaaagttttgatcctgctagcagcagcctgattagaaaggaggtgaaaatgaaattggctgaaattgcttgtttattgctgaaccagaccttcctgattgatcccaaatacccctccttttgcctaattaacccctgttacgagcgccttataaatgttcccgggcccgtaacaatagctcaaggttacacctggaaactggagagaaaaggaagatgtaattcagtctga

SEQ ID NO: 7355 - DNA, 567 bp, Zea mays
  Peptide Sequence Number=SeqID_50730
atggggagaggcaaaccgggctgtgatcccgatcccgccctcagtgttgagggtgttcgtcatcctcgccggggcggggagcgaggcgagccggggctccaccttctgcgcgggtcggcggaccacctcttcttccagcttctggtggtggcaatcgccctctggccctacggcggagacgtcctccagccatgccggggaaggcgaactgttgctgcccagctaggatgcaacattccgcccctcttccttgcattcgcggcgaggacggcagcgaggatctgccggtatgcttgggggcgacccacgtttttgaaagggaaatgtgcccttgggccatttctaagtattttggtgattgagtgccaactcaagtgcttaaaatgtgaatttatgcaatggatgaacaaagtgcaaattaagagcaaaggaagaaaaagaaaaggaaaaaggtggctgtgtacagccaagaggctgtttcgggctggggcaccggactgtccggtgcgccaggctgccccagccaaagtagccgctctcgggaatttgctgacggcgtacggctaa

SEQ ID NO: 7356 - DNA, 525 bp, Zea mays
  Peptide Sequence Number=SeqID_50731
atgcggatggatattgatgatatgtcctatgaggtatacttcttatgggctaaggggttagtctatgccatgaacacagccgaggagcttaagtttgtcaaagacatagctgcatcaacaggcattgtccttgatccagtctacagtgggaaggtggtttatggattgctaaaagacatggctggcaatccagccaaatggaaagaatacaggcccttttatgctgctattaccccacttcccaaacgtcttattaaaaaaggctgggttgtacttgcgagccctccagagttgcctgatatcaagcgtgccattgtaaatacccatgtcattgaaccacagtgggctttggaatgcatgaaagaccttctactggttaatctgaagggaaatcttcagattgttgtgcaggccgcgaaagaacactctgagcagctaggggttgatggcttgatgcttgcatcaaattatttgagcaattcaaatcttatgagggcctttactttttcttgggatcctatctga

SEQ ID NO: 7357 - DNA, 1179 bp, Zea mays
  Peptide Sequence Number=SeqID_50732
atgtcttcttcctcccttaagcgtcgggtcttcccgtcttccaagcccccggatgggggggtatccgccgcctttccgcctcctcgttggaggaacgcaactccatgggagctggtacctctcagccatcgttcggcttcaaggattttcatcacgcagcccggtcgcaccccttcaccggcggtcacccgagatggcgacctccagcttgatggtgggggaaagcgagccgggctgcggcctctgccccttcctcagcctcaaggattttcatcaccaaggccggggaggggagagtgccgagttggggtcggcccctgcgtgggcggtggcccgctccttcactcagtgatggggggagaagcgggcattgcccgtggcgtccggcagctgcagcgtgcctggtcttcagccgcgagtggcttcggggccacttgtggcgttggcgtctgccacggcagccggaagaggttcttccgccggcgcggcgaccgggaccggccacgggctgacctccaacttctacggccttctgcccgtccttgcctcacgagttttggcacgggcgggggcctcctggcagcggcatccaccctgaggccttccccctcggagtggggttgttcgtacctgcggagggggaaccggagttccgtttgtaatggcacttcgaatgccacggggccgacgccaaagtcgatcagtcgaggcctcggatcgggctggcgcccttgggagccggttgaccgaggccccaggggtaaccggttgagccgcctgctcgggccggattcccggaggagcccctgggccgcggcgccgcccgaggctgggtcgggcttcgctgaagacgtcgttgatgccgagggtgctacagctcccttcggcgtgaagactcgagcctgcaggatccgatcatcttgtagcgtgtgcttcctgcggccgccgaggccagaagaaaacaccctcgctgcacttgcgaagctgcgccttttttcctcctgtttcgagcatctggacttcgccggtaacagggatgtttgtgtgagcaagagctgcttttcgcggaagggacgagtgaggtatctgtatcccagaggcgtgggaatccctcggctcggtcggccttgccgcttacgcgtactttcacccgtccatgaggccctgtccctgacttag

SEQ ID NO: 7358 - DNA, 1725 bp, Zea mays
  Peptide Sequence Number=SeqID_50733
atggctgaaaggtaccaactcccacggagtcacgtgcctccaacgacgaggcaaaaagacggcgggttccccccgtccgggggcttggaaggtggaaagacgcgacacataagggaggaagaagacatggtcgccttccgaaagggaccaacgggcgaaagaggcgggcagccatgcaggtggcatgcaaccgcgccaagtggacgcacttctccgactcccgacacgccagcatgggggcccaggcccacgcgtcgcgcaaccggcgcgccggatgctgcatgcaagcaactgcaccacctgcgccaccaccgcacctcctcgattgcggaaccaatgccgcgactcgaggcgacccagcgcgtgacccggcagcgccagcctgacgcggcggccaacgcggccaaaagtgggccggcagtaatgacggtggcaggcgcgcgggagcagcggtcacgtcgtcagccaagctcacgtcccatccgggggcagcaagagaaccccctctcacggcgtgaagacgacgcgcccgtgatccgttcctcgaacggctcgcgcacgcgcaacggctgccccgccaactactcgccccgtcgcattaactccgcggctggacaggcggcgcttctggcaggagtaggaccgggaaagggggataccccgaaagggatccttccccgtgaaggaaccaggctccgagcctccttactgatcagaggttcgaaggctggccccccgaagggttcaacagccgcctcagatcgcgtgggccctacacccactactggtcagaggctggcccccgaaaggttcacagtcgcctcagacgctgagcgagggatgaccaggggggaccgggtccggcagatcacccgccggtacttttgggcgtgcctctgggcccctagccgacccccaacgaacggggcacggacgtccactcggattacccgcttgcagctcaccggagacaccatgttcggtgcccatcgagggctcgggggctgctctcgcaaacccggctccggccaaaccgttgacagcgtcaacataccagcccgagaacttgggccccgaccgtacacccgggctacggccagttcgcatgagggaaccaccagaccagccgaagcattacgcaaggcattaagacctcgaaggagtgaaaccactcctccgaggcctcgggggctacacccggcgggtgcgctcgcgcgcacccaccggaacaaaatgcaaccgagaaaggctggtccccttgcaaaaaagtgcgacgaaagcctccaagcgagtgctaacactcccttcgaggctcaggggctactgtcggggaccataattaggggtaccctcaagacgcctaattctcagctgggctcggactcgggctcagccccggaagacggcgaactccgctccgcccgacccagggctcggactcgggctcagccccagaagacgacgaactccgcttcacccgaccccagggctcggacaccgccctggcctctgccgacgacctccgcctcgcccgacccagggctcggacttggcctcggccatgaaggacagactcgacctcggcttcggaggagcctccacgtcgcccgacctagggcacaggcccgccacgtcaacaggaagcgccatcatcaccctaccccgagccgactcgggccgcagagaacaagaccggtgtcccatctggctagctccgctagatag

SEQ ID NO: 7359 - DNA, 723 bp, Zea mays
  Peptide Sequence Number=SeqID_50734
atgggtcggcgcgaggcggagcgcgaaggggagaagaagccggagggagacgggcatgagaggttgggcgaggtggaggctcctccgaggtcgaggtcgagtctgtcttccgaggccgaggtcgagtccgagcccctgggtcgggcgaggcagagaccgtcggctgaggccagggctgagtccgagccctggggtcgggcgaagcggagttcgtcgtcttccggggctgagcccgagtccgagccctggggtcaggcgaagcggagttcgttgtcttccggggctgagcccgagtccgagccctgcggtcgggcgaagcggagttcatcgtcttccggggctgagcccgagtccgagccctggggtcgggcgaagcggagttcgtcgtcttccggggctgagcccgagtccgagccctggggtcgggcgaagcggagttcgtcgtcttccggggctgagcccgagtccgagccctggggtcaggcgaagcggagttcgtcgtcttccggggctgagcccgagtccgagccctggggtcgggcgaagcggagtttcctatggcgcctggggctgggcttggctgctgtcagcctcactctgtcgtgtggcacagcagtcggagcggtgcaggcggcgctgtcctcttgtcaggctggtcagtggagcggcgaagtgactacggtcacttcggctctgtcaactggaggacgcgcgtcaggataa

SEQ ID NO: 7360 - DNA, 321 bp, Zea mays
  Peptide Sequence Number=SeqID_50735
atggagctactattgcagggatggatcacttccgcacaacgcatgagcataactcccgttcgagaggagctcggtgtggacgtcgacacattggaaggagggaggcgcgaggtagcagtggggtcaccgatagaggacagggaagaggcggcggcgttcgcggatcctagcatcgcgcgcgaggaggggtcgtggggcgcaggcggcggcgttgcggggctggcggctcccaaatgtggattccccggcggtgacggcgcagagttggaggttgctggggcggggatccgggccgctgtgcggggggggggggggtggtga

SEQ ID NO: 7361 - DNA, 900 bp, Zea mays
  Peptide Sequence Number=SeqID_50736
atggcgtcgagcgctggcggcgcgtcgtcgtcgctggtgaagaacgagccctacatgcgtgctgtcaagatctacctcaagagcctagacatccaaatggagaaacagctagccaagacatggagaagcacaacgggtcgtagtaccaattgcacatctggtgtctcaagaagttcactaaggattatgtttgcaaataattccattaaggagtgccggggttgccgctttgttgaagctcaagttttggatggagcaggaacaagcattgctgcattggaaacaatctggaatgcattgggctttaacgtgtctgggcctgagctgttcagtgcgcttagaggtcgtctttacgacagcaacaaaaatttagtaatggcaacattgtccaccattggtggtcttgtatctgctatgggaccttctgttgaaaagtcaagcaagggtattttggcagatgtgctgaagtgtcttggtgacaataagaagcacatgcgagaatgcacattgactgctctagattcgttggttgctgcagcccaacttgaaaagatggataaatcttctaaagttcgcaaagctgctgaatcctttatgaatgaaattctcaggatctgtggccaagaaatggtgggacggaaattgaaagatttgccatcacctactttggccattgtatcagaaaggctgaaactgtctactttgaaagatttgccatcacctactttggccattgtatcagaaaggctgaaactgtctactgcacatgaaggattttctgaatctgttaaggtggtgtcaacaagcatgagtttgccatcaaaagcaggtttaaagaacaataaacatggtcctaacgatcgtggttctaatgtgggcaaacctgtgtcccaagtataa

SEQ ID NO: 7362 - DNA, 1452 bp, Zea mays
  Peptide Sequence Number=SeqID_50737
atgttcctgttcgagggccccttcggatccgtcctgcacatcaccgactgcctcagcgccctgacgccccacctcgcccgccgcatcgactacctcttcctcgcgcggtgctccctgcgcttccccgccacgcaggactccatccgccaggtgatcgactgcatctggaagcacccgagcgcgttggttgtgtatctcgtgtgtgacatgctggggcaggaggacgtcctcgtcggggtgtccaaggcgttcgggtccaagatctacgtcgacagggagaagaactccgactgccaccagaggctggcgcatgtcacgcccgagatcctcgccgccgacgacgccgcaccctccacccgcttccacgtgctgtcgttcccgcggctgtcggagcaggccacggagatcctcgcgcaggcgcgcgccgcgcgccagctgaagcccctcatcatcaggccctcctcgcagtggtacgcgtactacgacccacctccaccggaggaggcatcgacgcagcagcagcagcagaaaccggtgctaacggaggccatgtgcgacgagttgggggtctggcacgtctgcttgtcaatgcactcctcccgggaggagttggagcaggcgctggggatcctcaagccccaaatgggtcgtctacaccatgtcgtcgtgcatggtgggtggacctcagctatctcggcccaggcagtgctgctgacagtagaagctgtcgagaagctcgaggaagtgttcagcgcttgtgctccctctaatgatatcagccaggcactagaggagggtgcagaagcaacagtggttgatttcgagtatgagagtgtcgagatcattggtgacgatgagcttgaagccaaggattctgcaaatgagcttgagttttgtaggcatagtaagcctattcaagtggttgggttaactgaagctgcaacaagggaacagaatccggtctctgatgaatctgagctgctgaacgacatcaaatctgatggcggagtagaagtagttgatctaactgaaggtggaaagaaagagcataatttgggtgcagagactgaacatgatagagggaacagagaggctgaactgggggcgcaagaacagaacctgaatgctcgtgctcgtttgacggtgggagtttgcaggcataaggtgattgctgacgaaggtacggaagcgactgaagggatggtctcagctgcgcatgttccagaggatggcaccactgttacactaggaacagggaggagcactgatcatcagtactctgaaagggcgagcgattcttcaaccgttgtcggatcatcgaagggcctcaacgcgagcctgaggaggctgtacaggtcgatgaacgtactggtgtcgcgccccctaccatcgctcgtccaactgacggcggcctccaagcggcccagagtctctcaaactgcgcagttgtag

SEQ ID NO: 7363 - DNA, 2043 bp, Zea mays
  Peptide Sequence Number=SeqID_50738
atgaccgaacaagtcttaatgctcggaaactcttctgccgaaacaatttttcgtgccttctcgactatatcgatagcagaatcctacggacgagtaagagtacacgtaagcggcaaggccgaccgagccgaggaactcctacgcctccgggatacggatacctcactcatcaccttccgtgaaaacagcaccctcgacgtcaacaccaccttcggcgaagtccgaccgagcctcggacggcaacatgggcgaaggatctccgctctgaaggacgacgtcagggccacgcccgggctatcgccaccagggtctcctccaggaatccggcctgagcagacggcttggccggccgccccgaagcctcagccagttgtcccccgaggacatcagcccggctcatggcctcggcaactcgactccgacgctggtcccgccagtggacgacccggccaggctccggccgacgaagtacgaacaaccccccacgttggagggtctacggagcaacagaacaccgacggatggctcgctgacgcccgctccggcagcagcgacaacgacgtccgccccgggtggccaaacagcagcagcgatgacctcagggcaaacgctgctgcgacaaggccctcgcccgcgtccctgcccaaggggcgaggacatgcaaaaggccatggagttggaggtcagtccgcaggtggcgctggctatctcgtcggcggagaaacctcttccggctgcctcggtgggaggtggcaccggaagcagcgccgaagccgctcaggccggagagccggacacgcggcagctgccagcgccacgaacggcgaacgcccttccccccaatcactaagggaaggagcgggccgctgcccgcgcggggaccggccccaactcggcgcactcccctccccagcactgatgatgaacatccttgaagctgagggaggggcagaggccacagcccggcttgcttctccccaccctgcaacaggtggtcaccgtcttggaaggtggaaggacgcgatgcatgaagggagtgcgaagacatggttgccttccaagggggtcaccctccttttaaaggcaactctccccacttgcgtcctcagctgtcgcggaccgagtcttctcaacatgctccaaggtcctccccctacgacacaggggctgggtcccacgcgtcatgcaagctggcccagggcagaagaagccaaaccgccgcgcgcggtgcgcgtaactgcccagcggttacaagcgctcctccactttcgcccaaaccagcgggtgaaagagcggaccgccatgcaggcggcatgcaaccgcaccaagggggcgcaccctttcgacttcgacgcgtccagcatggaggcccaggcccacacgtcatgtaaccggcgcgccggttactacgtgcgagaaactgcaccgccactcgcgctagtgtcgcgccttctcgactgcagaaccagtgccgcgactcgaggcgaccctgcgcatgacccgacagtgccaaccgagcacatcggtcacgggtcagttagccgcgggagaaggcgcgacgatcgatacggccagaagtgggccagcagtaatggcggtggcaggcgggcggaagcagcagtcaagtcgtcagcaagctcacggaccgggaaaggggatactccgaaagggatccttctccgcgaaggaagtgggccccgagcccccctactgatcagaggttcgaaggctggcccctcggaagggttcaacagccgcctcagagcactcgggctccgcgcccactactggtcggaggttcgaaggctggcccctcggaagggttcaacggccgcctcaggcaactcgggctccgcgcccactactgatcaggggttcgtaggctggcccccgaagggttcgacagccgcctcagacgcagagcgaaggatgaccctggaatcccaccagagggaggcatcgagccctcggaccccgtcaaaaggggaccgggtccggcaaatcacccgcaagtacttttggagcgcgcctccgggccactag

SEQ ID NO: 7364 - DNA, 159 bp, Zea mays
  Peptide Sequence Number=SeqID_50739
atggacaggcaaggaaccgatgacgtcgtggttgtgcacgagcgcggctccggcaacaatgacacgaagaacttctgcgcggagaggcctcaccagtatgccgaggacggggagacgagcaatcagcggtcggcaactgtcattgatggcaagcagtaa

SEQ ID NO: 7365 - DNA, 258 bp, Zea mays
  Peptide Sequence Number=SeqID_50740
atggccgcctcaggctactcgggctccacgcccattactgatcaggggttcgaaggctggcccccgaaggggttcacagtcgcctcagacaccgagcgagggatgaccagggaggctcgggggctgctctcgcaaaaaccggctccggccaaatcgttgacagcgtcaacataccagcccgagagcttgggccccgaccgtgcacccgggctacggccagttcgcatgagggaacgaccagaccagccgaagcgttaa

SEQ ID NO: 7366 - DNA, 526 bp, Zea mays
  Peptide Sequence Number=SeqID_50741
atggcgcctcctgttgacgtggcgggcgacgtggggtttcctccgaagccgaggttgagtctgccttctgttgccgtggccgagcccgagccaaggggtcgggcgaggcggaagtcgttcggccgaggccagggcggagtccgagccctggggtcgggcgaggcggagtttcgtcgtcttccgggtcttagcccgagtccgagccctggggtcgggcggagcggagttcgccgtcttccgggtcttagccgtgtccgagccctggggtcgggtggagcggagttcgccgtcttccaggtcttagcccgagtccgagccctggggtcgggcggagcggagtttcgccgtcttccgggtcttagcccgtgtccgagccctggggtcgggcgggagcggacccgtgtccgagccctggggtcgggcggaacggagttcgccgtcttccgggtcttaacccgtgtccgagccctgggtcgggcggagcgggagttcgccgtggcgcttttgcaaggcctggattggcctt

SEQ ID NO: 7367 - DNA, 156 bp, Zea mays
  Peptide Sequence Number=SeqID_50742
atgccgagagtagcgtgtaccctccatggcaagaggctggacggtggtgtatctgtgctctcggttgacttggtcactgacttgttcactgacttggtcactgaactcaaaggggtgataaaagatggctggtataggcccaagtgcctgaactag

SEQ ID NO: 7368 - DNA, 732 bp, Zea mays
  Peptide Sequence Number=SeqID_50743
atggatttatcagctggtgaagaatctctgaaagaagtcgtacatgtggcagaatcatttttttctaatgcaggcgttgactatatggtccataatgcagccttcgaacgtcctaaacggagggctctagaagaaagtgaggaaggtcttaaggctacattgaatgtcaatgtcttcggaactattactttaactcgccttctagcaccttacatgcttgatagagagatgggccattttgttgtgatgagtagtgctgctggaaaggttcctgctcctggtcaggccatttactctgcctccaaacatgctcttaatggttactttgcttctctgcgatctgagttgtgtacaaaaggcattaaggtcactgttatctgccctggaccgattgaaacactacaatcttctgctgcagcttcttcatcgcaaacacattctgctgagaaacgtgagaaacgtgtttcggtggaacggtgtgttgaactgacaattgttgctgctactcatggactgaaagaagcatggatatcatatcagcctgtgctgactgttatgtacttggtgcaatacatgccaacaattggttattggctaatggacaaggcacaacccacgaggcttgctagtgttgtcgtcgagcaggttggtgcaaaacggctggatgcggccgcaaagaaagggaacacgtatagttggagtctcattttcagcagcaagaagtcagcatga

SEQ ID NO: 7369 - DNA, 114 bp, Zea mays
  Peptide Sequence Number=SeqID_50744
atggggcggttccaggaagaagctctatggcaaactcaactttccgctctggtggcatacctggtgggactaactcggtcaccacttcctctcctagtggggacaccaacttga

SEQ ID NO: 7370 - DNA, 696 bp, Zea mays
  Peptide Sequence Number=SeqID_50745
atgccgacctcctcttcttccgctgccgctacgccgccggccgacccctcgccgccggccgccgcctcgtctgaggagacgctgagcagttcgatgacggaggagttgcgcgccggcgattctgttgattttggcgtgtcacggatgtcgtcggtccgcgtgcaagatatgcagcggttgggttacttcggcggcggagttgctcgtgtcccggggacggaggaagtccccaagccggagggcgagttggttgttttcgaggcgttcttcgccgccgggtcggacgaaggccaacttgctatagttgcgcctgccgcggcgaccacgacggctgccgtagtgccgaaggcgaagggcggggctcttagcgccggaggcgaggtgtcggccctcgcggctgtcagggatgaggcgggcgctgcgtcccgccggctgaaggaggtgacggaggcgctgagtcaggtggctgacttcgccaaccgtacagcgtcgggggccctcacggcaactgtgtctaccgaagtcgagagacttcagacacaacatgctgacgccgtccgtgaaaaatcggccaccgacagcaagtgccgtaagctgacggacaaggtggccgcactggagagggagaaggctgacctccggcgccaactggcgggggagaggagggagaccaacgaggccctcgccaaggagtag

SEQ ID NO: 7371 - DNA, 903 bp, Zea mays
  Peptide Sequence Number=SeqID_50746
atgaacgcgctctcccgcgaagggtgccggcacttcgaggtcttcgaccaagccaatgaagattttgagcgagatatctataaggttgaggaccccgtagtgaaggaatccgccagagccatctacgaccggatgtggggtccgcacggtcgtgaggtggtcagggagcgggccgagacggcgagggctcagagggccgtgtctggggttgccctggagccgaccccagagactgcggaagacgcaccggatgcccccgcatccgctgcggccggcgaagacctgccctcagaggtcgccgaaggcgcgcctgatgcccccgcagctgctgcgccgagtgctgaagatcccgcggcggtggcggcggaaacaacagcggaagcaacggcggagccagcggcggaggctcccgcaacgtcagggccttcgcaggttcaagattttgggcctgcgcacgcaaccgccactactaaatttttggcggcttcgaccgcggaaggtggtaatgaatgtggtggatctgcatctgagttttttgattttgctgactctgggagctcggttgagtggactgaggagtcgtcggaggaggacttggactactttgcggccttggatgtggctgcggcggaggcttcgccgcacgccgcggacgcagaagatgtgccaggtcctagcaccgggcgccgacgacgaagggcggttgcgaagcgtagagttagtggggctgagggggctcgacttcgtgtgagtagggctggccggcaggaactgttgtctttgccgagcgcctcaagtacaggtgaaggggaactgcgaagtctttttgcgggtgaggagcttaggataatgttatttagttatagggagatgggaattattcctaaggttgagccgatgtag

SEQ ID NO: 7372 - DNA, 174 bp, Zea mays
  Peptide Sequence Number=SeqID_50747
atggagagtcatggtctccgggcagaaagggaatcacggcttgtgggtagctatgagattgatggttctggttatgactatggtgctggttgtcagcattgcaaccactgctcaggagaagatgaagctgtggaaggagacttccaggagttccaagactacgacgagttctag

SEQ ID NO: 7373 - DNA, 141 bp, Zea mays
  Peptide Sequence Number=SeqID_50748
atgggcaagaacaacaagcgcaagcgtgagccaactcctccatcggaggagtttggtgactcggagtactcagaggaggagttctcctctgagtctgagtggtctccgactcccatccccctgcaaatagctgccgagtaa

SEQ ID NO: 7374 - DNA, 450 bp, Zea mays
  Peptide Sequence Number=SeqID_50749
atgggcaagaacaacaagcgcaagcgtgagctgactcctccatcggaggattttggtgactcggagtactcagaggaggagttctcctctgagtttgaggggtctccggctctcgtccccctgcgtgagtcgtctgacgactcagacgactcccaggggctcgcggcggaggtctggacttacatccgggccgtcgagcgctccgggctcgctggctcggatgagtcggagtactcctcggacgaggaggactcgtccgaggagggcggtggcggcgatggcgatgacgacgacgacggcgacgacgacgacgaaggcggtggcggcgacgacgatgacggcggcggcaggggcagcagcggcggtggcaagggtgacgacggcggcagcagcaggggcggcagcggtggcggtggcagcagcaagggcagcaacaaggccagtggctaa

SEQ ID NO: 7375 - DNA, 813 bp, Zea mays
  Peptide Sequence Number=SeqID_50750
atggcgaagccgtggggggaagcttcttgcggaagagaagatggctgcagtgctccgctcggaaccggcgcactgtccgccaacagactggtcaggcgtgccgtctgctggacgaccctgacgccgtctgccgacggattggacaaggcgtatttaatgtcgagagggcttgtcgcctgtcagcgcggtggcaggcggcgcgtcccttccgcaataaatgctgaggtcgagcggttgcatgggccttacgtcaggctcggtccattggcttatgtcacgggcctcaagccaagcagcagcagcggggccccacctgggcaggaagtcccactcagaggtggacacgtgtcggcaccggacccctattcgtgctggggtctcccaggtcctggagccctgccagggcccagtccctactctgagggaccaggggcttacccaagagacccgacatgccctcttgggagcttcggacccgttagtataggggtccggcgtcctttcggaggtccggacctatcgatgcaccttgggaagttttatctttccttgccatgtggtgttcccaaccctgcccttgcggtggggtcgggtgctgcttcccgtgcgaccagggggtgtcgtatgggtgcggtgtcttcatactgcagaagggggtacccctgtctcaaggtaccgacaccatggtttctcaacatcagggaggtgaggtcatggcagaggggtgtcagggtagaagaggccttgcaggatctggactgggtgttggccatgcaggaagagctcaacaacttcaagagaaacaaagtctag

SEQ ID NO: 7376 - DNA, 916 bp, Zea mays
  Peptide Sequence Number=SeqID_50751
atgaacgcactctcccgcgaagggtgccggcacttcgaggtcttcgaccaggcagatgaagattttgagcgagatgtctataaggtcgaagaccccgttgtgaaggaatctgtcggggccctctacgaccggatgtggggtctgcatggttgtgaggtggtcagggagcgggccgagactgcgagggctcaggcggagcgcggcgagcgggtggacgacttcggggctctgaacagcgcgctgccaggcccggagccgacccttgcggaggctgtgactggggtcgccctggagccaaccccggagaccgcagcgatcgggacggctgcctacacatccgctgcggccggcgaagacctgcccccgaaggtggccgaaggcgcccctgatgcccccgcagctgctgtgccgagtgctgaagatcccgcgaaggtggcggcggaaacaacggcggaggcagcggcggaagcaacggcggagccaacggcggaggctcccgcagcgtcagggccttcgcaggttcaagattttaggcctgcgcacgcaaccgctactactgagtttttggcagcttcgaccgcggaaggtgggaatgaatatggtgggtttacatctgagtttttttattttaccgactccgggagctcggttgagtggactgaggagtcgtcggaggacttggattattttgcggccttggacgtggctgcggcggaggcttcgccacacgccgcggacgcgccagacgtgccaggccctagcaccgggcgccaccgacgaagggcggttgcaaaacgtagggttagcgcggaggagggggctcgacttcgtgtgagtagggctggtcggcaggaactgttgtctttgccggccgctgcgagtacaggggaatgggaactgcgaagtctttttgcgg

SEQ ID NO: 7377 - DNA, 126 bp, Zea mays
  Peptide Sequence Number=SeqID_50752
atggcgaacttcttcagaggcttcgtctatctacctttgcaggtgttcaaaactcaaaaagtggaagtgagttcaccggaggtgggcgccaatgttggggacttgttctcaaatgataagagttaa

SEQ ID NO: 7378 - DNA, 156 bp, Zea mays
  Peptide Sequence Number=SeqID_50753
atgcaggcggcatgcaaccgcaccaagggggcacaccctttcgacttcgacgcgtccaagcatggaggcccaggcccacacgtcatgcggctttcaggggaagagctcgacaggggctttggagctcaacacaagtggcacgcatctggcagatag

SEQ ID NO: 7379 - DNA, 467 bp, Zea mays
  Peptide Sequence Number=SeqID_50754
ttgccgtggcgaagaaaagggcggaggggcttaccggcggcgagactgttccggtgaagtggccgaggggaggtccacggaataccagagaagctatgagcgaaaggaatcgggcggagactcactggatagctcggtccacgcgcggcggcggaagaccgaagtccggtgaggtcgatctcgggcctccggtgaagtccggtcgggtccgagggcttggcgagcttcacgggctactggcggagctagccgaagcactggttgggctggagggtggctggagtgggctggccacggcggccgtagctctagcggcaatggcgggcggaaacgagctcgccggagctaaggaaaagtggctggccggtgagggtgagtgcggggcgaagagagagatatggagccaggaaatctggtctgtctccctgcccaaacccgaggcaaatcccaagttttgtcgtgtctag

SEQ ID NO: 7380 - DNA, 1137 bp, Zea mays
  Peptide Sequence Number=SeqID_50755
atgccgtccgctatggccaaatccctcctcctccctcaccctttcttctccgtctcaccccgcccacaccctcatccgcgcgccggattccctgttctcaagccccgccgcgccgcgctgctcgcggccacgcccgcgccggacgccaacaccagctccaacaacaaccccctcgccgcgctctggcgccgcaccctgcagcccctcggcgactacggcttcggcaagcgcagcgtctgggagggcggcgtcggcctcttcatggtctccggggccgccctcctcgccctcgccctcgcatggctcaggggattccagctccgctcccgctttcgcaagtacaacaccgtcttcgagttcacgcaggcgtgcggcatctgcgtcggcacgcccgtccggatacgaggggtcaccgtcggatccgtcgtccgcgtcgactcctcccttaggagcatcgatgcaactgtcgaggttgaagatgataaaatcatcataccacgaaattcaatggtcgaggtgaatcagtccggtcttctaatggagacactcattgatatcacaccaaaggatccactgcctgcaccttcagtaggaccacttgacccagactgcaccaaagaaggcttgattctctgtgacaaagagaggatgaaaggacagcaaggtgtaagcttagatgcattggtgggaatatttacccgtctgggtagagacatggaggagattggtgttagcaaaagctataagttagctgaaaaagttgcatctataatggaagaagcacaacctcttcttacacggtttctttcaatcagtacggctgcaactgtggaacagattgaggctttagctgaagaaatgcaacctttgctctctgaggttaatgatagtgatctgctgaaggatgtggagactatagctaaaggcctggccgacgcgtctggtgacctaagaaggctgaagtcgtccatgcttaccccagagaacacagatcttattaagcagtctattttcacccttatatttaccctaaagaacattgagagtatcagctccgacatctctggtttcacgggcgatgagacgacaaggcggaacatcaaacttctgatcaagtctctcagcaggctattgtga

SEQ ID NO: 7381 - DNA, 504 bp, Zea mays
  Peptide Sequence Number=SeqID_50756
atggggtgtcggtgctatgaggaagatgaaaatgagatagatgaagaaacagctaggggtgacaacgggtcggagtctaggcgtcttaggatgttcaatggaggcttggtgttctgctccatgcgcctaggggtcccttttatagccctaaggcagctaggagctgttggagctccatttggtaggcaattattgtcttctgtccgttggcgcaccggacagtctggtgcaccaccggacatgaacagtgcacgatttctttccttgtttggcgaagccgaacgttgcacccgcggtccccttggcacaccggacattgtccggtgcacactggacagtctggtgcggcttataaccgttggtactggccacgcatcgcccgttgatttcgtgttgatcgcgctgccaaccgttggcgcggacgttgttggctcaccgaacagtccggtgaattttagccgcagtgtcctcgacgattcccgagagcagcgagatcgtcgctga

SEQ ID NO: 7382 - DNA, 600 bp, Zea mays
  Peptide Sequence Number=SeqID_50757
atggctcgtcttagacacactgcacggaagtcagtcattcctttcttgccttctcgtctcgcggagcgtccgcttcgctgtccagtgactgcaagagatagagtctatgaggagctgctcccctgtgctcccgctggaggcgcctcctgcaccaccactgagcgcccagccgctggagtagctgctggaggagacccagatgacgaagcacagtcgtggggtttacccggaccgttgggaggcgacctgcttggtgcaccgtccggagaacagtctccggggtgcggagtgctcggtggggtagctgatggtattaacctgaagtattacccccgccatccatctggcagcacaggagggctcgtgctgagattgcccagccgcgggctgagcgtgcagagcattatcacctggaggatggctcccccgctcccgtcgggactcagcacccgtaccgctcacctcagcgtggacaccatgcttatgatgccagaaaacatgcacagaggaggaaggcatgctcagcaggagcaggcagccccacaggatgaggcaccccgtcagcagctgccacccccgcccccgatgaccatcgagtag

SEQ ID NO: 7383 - DNA, 1320 bp, Zea mays
  Peptide Sequence Number=SeqID_50758
atgcccagtggaatcgtggttgtgcgctgtcgacggcgagcacccaggccggagctggcagccatcaccgtccgaagacatcacgacgagcctcgatacgatctcgcgatctccccgaccggcaccgaactccgaacgtcgagaatagcgttcgcccaaggcactaggcggtccgcggtggcgcacgagaatcactcccgcggcagccccaccatgcttccgccgcgctatagtgaacctcgcccaggcttgcccgtcgacctgcgcccgagccccaggtacttcggtgaagcgcccaggacaccgcaggagccgcggcgacgacgcgcggtcggttttcctggccagcaggcccacgttgtcagcggcccagaagacgagtttgtgcccgcggtgcgcatgaggaggaaatcaggccagagggcccacacgacagtgagccgagcacaccggggcgggcgagcgcgccgcggggcgccgaggatgggccacgccatggtcggccgcgccgggacggggggcggggtcgcgccgcgccgagacgccacgccggggtcgaggcaccatgcgccatgggcgcgccgaggcggggacgagcgagcgtggagccggggcagggaccgcgcgcaggccaggggtccgcgtcgagccgaccgtggcgggcagcagcgagcgggccacgccgggccgtcgcgggcaggccgcgcgagcagccgcgggcaagccgccgagccggccgcggggcaagaggaggagggggaatcggggaggagggagagggaggcaagctcaccacgaggacgaagacgacgcgggcgggcaggcttcggggcggctgcgaacgattcggaggggagaggagcgaaccgcacaagagagaagacagcgggcgtcgtgggagagatgaacagggacggcttcggggcttacaggcgggccccacacagggcggcggcggcggctgggcaaccgcccagcacgcacgcgcgcggggagagcggggcaagctgttgggggcggctgggccgcgcggggggggggggctcggctaggccgcgccacgacgccgagctggaccgcgagccggccagccggcccaggagagggggaggcacgagggggccgcgggagaaggggggacgtgccagatgggccgctagagggggaaacacccccaagagagaggggagaaagagaagggaaaaggaaaagctaagggcatcccactccaccctcatggttgcactgttttcccgggcggtcatccaacgaacaggtccttacggagaggcactcgaaaaacagctcgagtcccattaa

SEQ ID NO: 7384 - DNA, 258 bp, Zea mays
  Peptide Sequence Number=SeqID_50759
atggggacgtattcttggctaagaggtgatgacccagacgactctggggataatgatgaagatgatgacgacgacgaagatgatgaggaaaacatcaacgaggaggacaacgacgttcaacatgactacttcatggggtttgggcctgtcaccgaacattacacatcaatgttcgagacggggcacttccccaacctgctgcaagacatgttgcacgtgttgggaacctacgtccgacccttgtacgaacttaaataa

SEQ ID NO: 7385 - DNA, 948 bp, Zea mays
  Peptide Sequence Number=SeqID_50760
atggaaggcaaaatcatttctggcaatgtgaatgtgaagaaccaaatatcgagggaggatctaaaagaagcattcaaaaattttggaactgtccggatgcgccaacagagtgaaaccctaggaaaacatgccatgcactttcttgctggttatatttccatgttttctacacagggtccttttcagacagggataacacggataagctgtgcaggggagctcttagcacatattagaacagtgaagatgtacagttgggagaaactattcactgaacgtttggtggaaagaagagaatcagaagtgaagcatctcgcggtatttacttgtgttgcactctttaacacactaatatcaccgctaaactcatttccatgggttattaatgggatgattgatgctgttatctctagcagacgactgagtaattatttatctactccagagcatcactcatccgagttaaatgcctctgctgaccttttaaaccaccactttaagagatattccaaagttggttctggtaaatcatctttattgaacacaatcattggagagactcgtgtcatcagtgggttcaattgcctatgtaccacagaagtaatagaggcatgtgcgcttcatgttgacatattggcaatgaccagaggagatatgtcacatattggagagaaaggtaccaacttatctggtggacaaagagctcgtctagcattggcaagggctttgtaccacaattctgatgtatacttgtttgatgacatccttagcgcggttgactcccaagttgcttcgtgcatcctggaaaaggctattatgggggcaccaactaatgcagaaaacaagattactaagcacacacaatcttcagtaaaacgacagagttctgatggctctgttatgtccgatggccccgggcagccgtcggacataacacaatacgtctga

SEQ ID NO: 7386 - DNA, 2040 bp, Zea mays
  Peptide Sequence Number=SeqID_50761
atggcttgtttctggcatggtgtcacatggcccaacccacggcccaactcggaagatgggtacaagagcagcatcagagaaatgaggaagcagagaagaaaagaatcggatcttattcccttctgtcgccgtcttcaggcgcgattcagctcgccaacgctcgacggcggccctgcggtgcgctcacgtcccggtggtggctcaccggaggctacggccccatcacagatggtattcagagccgttccaatccctggagaaattttttgccatcctaccctaccctatttctctctcgattccgctcaaatccgagcagtcgggagaaccatattcgaccgggagctgttccacgtcgacctcgacgatgcacccgtcttcgacgccgacactgacaacctcagcgtcgaacccatctttgacgacgtggtgttcgaggacattgagcccaacttcgacgacctcgatgacgagcccctcttcgacaccaagttcgacgagctcgacaagggatcagtattcgacactgagtcgatccccgaccatgtcgccgtctccgtgttcgagttcgtcaggccggagtatgatgctgagctcaccgtcttcgacaccgactcggacagcctcaacgacctgccggtagtcgacatggggccggtccatgacgccgagctcgccgtgttcaaccaaggaaacgacggctcctcgactgcacacaccggcgtcctcgacgggcaccctgtctttgacgtggagctcgtatttgatgaggagcctctcatcgaaatcgattgcagcatctttaacactaatgcgcccttcatgtgtttgacagattgtctgagctacgtcgatgacatggtgtctgctacttttaaggaggggcatatctttgataaggagactgtagtagaagcagtacagaaggaaagtggcagggattactatactgctcacggtgagaatgccatgtttattgcaaggacatactatcacacaatttctgctttacgtcatttaggcagcaactctggtggaatctcaagtgtcggtgtgagcgaggctatgtttgagaccattgtccgcaagatcttattagataggactgactgtactttagatttctacgagggtagtagctctgattggaggttatcaaaatctggaaaacctggaaatattggtggatttgaagacattttgtttataaacaatgacatgcaagagtcaccagtcatgaccaacaggaagcttgggttggctgaattccgtgaagatagccgattcacaaatgttggatcagcacttcttgcattatgtctcacagcagattgtgagaaatccatcaattcacattctcttcaagatgccattactaaatgcagtattctgttgactgagagaaaaaagtctaacttcaaatcaaaggatcttgtgcaagatcttgaaaaaatcagaagttctgttaaactagttcatgatctgatatctcaatttgactactctcttggtgcccttggagctctactatcttatgctgagttgctagcaaatgatactaattatgggaattacacaattgaaaagtacaatttggactgctacatgagacttgattctgctgcggtgcgagcattgaccattcatgaagaaaaaactgatgtaaacaaaaacttttatttgtttggcttggtgaacagaacgtgtactgttgagatgggaaagatattgcttaaccaatggctgaaacaacctcttttagatgtgaatgaaatcactagcagattatatatggttcaggctgctatatctacttttgataccaaaactactattagaacagttgtgcaaatacacatgtgtgaacctgctggtgcttctcgaaatgttgaacacatgagtcagctacaaaagccttgggatcctggtggttttcatattgggcttgtttctagagcgcagcgtgttggtttcaatttcagagaatatattgagctgctggagaggtacaacaaggcaccattctctctgaagacttag

SEQ ID NO: 7387 - DNA, 705 bp, Zea mays
  Peptide Sequence Number=SeqID_50762
atgccactgcgagggcgccaaaagcactcgaggcctaatggatcgtacatgatccaaagctgcttcagggcatgcgtactgctggtgtttgggctgggcgcggagtccccgctgtggctggcgctgaaccacggcgggcggaccgtattcctggaggagaacgagttctacgtcaagtacctggagccgcggcaccccgggatggaggcgtacgacgtgtcctacaccacgaaggtgcgcgacttccgggacctgctggaggcggcgggagcagcgagggccaaggagtgtcggcccgtgcagaacctgctcttctccgagtgccgcctcgccatcaatgacctgcccaacgacctctacgacgtggcctgggacgtggtcctcatcgacgggccgtccggctggaaccccaactcacccggccggatgccgtccatctttaccaccgccgtgctggcgcgctccggcgccaccgcggccaagggccccaccgacgtgctcgtgcacgacttccagttcgaggtggagcaggtgctgagcagggagttcctgtgcgacgagaaccgggtcaccggcagcggcaccccgtcgctcggccacttcgtcatccgcgggggcagggccggggccggcgatgccttctgctctgcccaggaggacggctcgtcgggggagaagacgtgccgccgccgcagccacaagtaa

SEQ ID NO: 7388 - DNA, 366 bp, Zea mays
  Peptide Sequence Number=SeqID_50763
atggctcaccggagaactcggtccacgggcaggggcgggcgaccgaagtccggcgagggtgatcttcgccttccggtgaagttctgccgggtccgaaggcttggaaagcttcacgggcctatggcggagttaccccaagcgctggcgagacttgggggtgactggagtgggctggccacggtggccgaggctctggcggcaatggcgggcggaaagagctcgccggagctaaggaggggtgtctggccggcggtgagatttggagcccagaaatccggtctgtctccctactcaaacccgaggcaaatccagggttttgtcgtgtcgagggctcgcgtcccaatgccatcttctggcatgcgatag

SEQ ID NO: 7389 - DNA, 1089 bp, Zea mays
  Peptide Sequence Number=SeqID_50764
atggcggtggcaggcgggcaggagcagcggtcacgtcgtcagccaagcttacgtcccacccagggacagcgagagaaacctctctcacggcgtgaagaaggcacgcccgtgttccgttcctcgaacggctcgtgcacgcgcaacggccaccccgcgaaccacttgccccgacgcattaactccacggcgggacaggcggcgcctctgggaccgggaaagggggataccctgaaaaggatccttctccgtgaaggaaacaggctccgagcctccctactgatcagaggttcgaaggctggcccctcggaggggtttaacagccgcctcagagcgcgtgggctccacacccactactggtcagaggttcgaaggccggcccctcagaagggttcaacggccgcctcaggctactcgggctccgcgcccactactgatcagggcgggaacgatcttgtaacggaatcccatcagagggaggcatcgagccctcggaccccgtcgacaggggaccgggtccggcagatcaccagcagctcaccggagacaccatgttcggcgccctccgagggcaacatggcgctttcccccctcctccttgcggaaaggcgacgcaggggcggctcggactcgggctcagccccggaagacggcgaactccactccgcccgacccagggctcggactcgggctcagcccctgaagatgacgaactccgctccgcccgacccagggctcggactcgggctcagccccggaagacggcgaactccgctccgcccgatccagggctcagactcgggctcagcccctgaagacgacgaactccgcttcgcccgaccccagggctcggactcagccctggcctcagccaacgatctccgcctcgcccgacccaggggctcggactcgacctcggcctcggaagacagactcgacctcggcctcggaggagcctccacatcgcccaacctagagcacggaccgaccacgtcaacagcaggcgccatcattaccctaccccaagctgactctggctacgggaaacaagaccggcgtccagtctggctcgctccgccagacaagcaatga

SEQ ID NO: 7390 - DNA, 456 bp, Zea mays
  Peptide Sequence Number=SeqID_50765
atgggcaagagcaagaaaggtgacagctcttcacatcactcgggcgacaagcgcaagcgcgagctgactcctccctcggaggacttcggcgactcggaatactcggaggaggagttctcctccgagtcagagggctctctggctcctgcctctcccccggcgtcgtctgatgattcagacgactcccaggggatcgccgcggaggtatggacctacatccgagtcatcgagcgtgccgggctcgagggctcggatgagtcggagtactcctcggacgaggaggattcctccgactcgtccgaggagggcagcggcggcgacagcggtgacgacgacgacgacggaggcgacgacggcgacgacgacggaggcgacggtgacggtggcagtggcagcggcaagggcggcagcggcatcaagggcagcagcaagggcagcaacaaggccagtggctag

SEQ ID NO: 7391 - DNA, 639 bp, Zea mays
  Peptide Sequence Number=SeqID_50766
atggccgaagctctggcggcaatggtgggcggaattaagctcgtcggagctaaggggaagtggctggccggtgaggggacagggagttgtagcgtcaccaaggtgccagtgtcagaatgcctggtcccgaggttgagctgcgccaaaaccgtgtcaaatgaatttggtttgagttcaaactttcccagaatgtgttcaagagatacaacgggtaactcacagcacatagattgtctacgtgggaagaccagctcagctagcacaaggttctgtcccagaaaaccaattccgccgcccacgtccgggcctgcacgacgcgaggttgacggatatactagagccgctaccggagctgaaggagacgtccacggcaccagcctgaaaagaggaacaccacgcagcagggagcccaagtaccaagccacggtggacagagaccagagaatcaacgagcagcaccaaggcacgacatcaacagcaccacaccaccaccacagagaacaacagatagccgacgatacggatgagaccagacacccggaatcgagcagatcgaaggatttctcgctggaacagtggattggatggaaccgtagagtccaggggaaggggatccacttcccttatgtagggagctga

SEQ ID NO: 7392 - DNA, 426 bp, Zea mays
  Peptide Sequence Number=SeqID_50767
atgagtttcattcaagctgagaagggcatagctgttgccaaggttccccgttcaacgcttgcagccatatccctctgccagcctggcggtggtggggagggagattgggatggagcatgtgccgatgtggctgcgtgcgttcccggatctgcacacctatgtcagcatatggtgatcagcgagatcgactcgtcaatcgctacctcgctgcaggccgtgaagctgctcgctctgtacctcactggagacaaggaaggtgctatctccagtctcaaggaatggttgagtgattcagcaactggaagcaatcttgttctgcgattgattgccggaattatatttatgcgtgagcaggactacaatgaggctctcaagcacacacactctggaggaactctggatttgtatgtttaccttttcccttga

SEQ ID NO: 7393 - DNA, 261 bp, Zea mays
  Peptide Sequence Number=SeqID_50768
atggaggagggatgcgatgtgacgagtgattggataatttccccaaactggctaaaagaaagcgtcagagaagggcaatttgtagaagaagcacaatatgttctggaagatgaagaatataggatgcaatataagtctgaacttagagatgcagttatgagagctaaagaaaggcataactccttatttgctggttataagcacatccaaccctcttttgatgttctcttagccattattaaatctaccggaggcaagtaa

SEQ ID NO: 7394 - DNA, 378 bp, Zea mays
  Peptide Sequence Number=SeqID_50769
atggctgctcggtctgggtgcaccgaactgtccggtggtgcaccggacagtgtccggtgccaaaggttcatctacaactatactaattcgactgtccggaataccgtagattattccggacaggagaagctttttggaaaaacaggccaagcgcggaccgtccgggcccttgcggcggaccgtccgcgacacgaggatgtcactcggccagaaccaatgcaaaaatccaagtctgtgctatggactgtccggaggaaaagcaaagaccgtccgagcccttgcgcggaccgtccggcctctagcgcggaccgtccggggcggaccgtccgcaccaggagggcggaccgtccgcgctcagcagaatggcccaacggctag

SEQ ID NO: 7395 - DNA, 1704 bp, Zea mays
  Peptide Sequence Number=SeqID_50770
atgtcgtcttcttcctcatctactgcaaacacgccgccggccgattcgtcatccgaagatactttgagcgatttggtggcggcggagttacagccgggccacatagtggagttcggcgtttcgaggatttcctcgtatgtatgggcggcgacttcgtacggtggtcagccttccgtagaggtcttcgccaagaattactgtctgcattggcaaaaaagaaagattggaaacacgattgcacagtttggatcgtgcaccttcacgccgaggaccgaaaagacttcggcagaagtcgtggggttagttccctgtgctcgcaataaggtgggcaactggtgggattattggttttatgttttgggaagcaaagtcgaagacctcccagggctccccgcgaccgtgatgtgctaccattattatgtggcattcccacaatttgaggtggcggaggatgatgaggacgaaggggccctccggtgcgctgcccgcatgagcagtgggcgtgatttggttgaagagttcattggttatggagtgtggcccctggcacatggttgggtgctgggcaaagtatgccctcgccagatgcctactttgggccagcagctggtgcgaagtccgaccttctctttggatctgtgcgaccgagacccagtcgcgttcgttcgtgaagtggaggacagggcggtgaggattgtggggcgatatgcgccgaggacagagagtatgcggagttgggatatccgagggtcccatgttcgcttgaatcgggtcttcaaattaaaccgtttgccatacggtggttatcctggagatgacgctgctgcggctgttgaccgtcgcgggaaaaaaccagtggtcgtggctgaggaaggcccttcgcgagaggctgccccagccactaagaagagaaaaataggtactgtagtgggggggttgggggtctctgatcgttttgctgtggagttgatggggacttgcgcggcactcgggggaaggttgtcttcgcccgagctccgggagtcttcggcgcgaatgctgaagatggcgcatgacgaagaggttgaggatcttggtgatctggacagcacgctgcccgaggcattgggggtggagctggcgctgccatccgatgcgggcgagggcccctcggcgacccctgcgctgactggagctggcgaagacccccttccgacgtttgggcctgcgcaagcaaccgctgctgactatactgattttgtggtggcctcaaccatagtgcctgccgatgatagtttgtttggctctgtgtctgagtgttttgagtctgatggtgaatctgggagtttgtttccttggacggaggagtcctcggatgaaggtttggattattttgttgcgttggatgtggctgcagcggagacttcaccgcgtgtggagggtgccagggatcttgctagtgtgagtactgggtataggcggcgaagggtggtgggaaaacatagtgtgggtgaattttcgcgaagtggtaggcaccgtcgtatggggatggagcgtggccgtctccgagtagaccgggttggtaaacgagaattgctgtcctcgctgattggggcgagcataggtgagggagatctttggaatctttttgagggtgaggaattgaggataatgctgttcaattacagggagatgggtatcatcccgaaggttgagccgatgtaa

SEQ ID NO: 7396 - DNA, 264 bp, Zea mays
  Peptide Sequence Number=SeqID_50771
atggtctcccattccggttatggtgggtacaagtgcggtcactgcacgacggcagtcggggtcagtgaggcattgtacgccaaggcggtgagccctgatctgctgacggggaatcgatggggacggttgatccttgcttgtggcataatttttacaggttctctggaggatatggttgctggagtgacttggccggccatcttgccaccgggttggactatcgagtgggaccccgcctcggttgaggaggagcatgaggagtga

SEQ ID NO: 7397 - DNA, 1914 bp, Zea mays
  Peptide Sequence Number=SeqID_50772
atggggcaggagacggaggtggtgcagtcggtaagcgacctcccggtgcaggaccctccaggagaggagttctccgccgccgacctcgcctgggtcaagtacgccacctccgagcaccaccgggacgacgtcgccctcataccctacgaccggatggaggccttcatcgccggcgagagcaacaaccccgagtgccccacgcgcttccacatcgagcgcggccgcaagcgtgagaggggcagcctcagggagtaccggagtgacgagtacctcctctacaggatgtattggtgctcctttggccctgagaattatggggagggagggacaatcttgcctagcagaaagtacaggctcaacacgaggaaccgtgctgcacgcccgcagtcgatgcgtggctgcacctgccatttcaccatcaagaggctctatgctcgcccttccctgctgctcatcatctaccacgagaggcgccatgtcaacaagtccggcttcatatgccatgggcccctcgacagggatgccatcgggcctggcgctaggaaaatgccctacattgggagtgaaatccagcagcagaccatgtcattgatctacctcggtgttccagaagagaacatactgcagacacatatcgaaggcatacagcgctactgtagcaaggatgccaaggttgataaccttgcctctcagtatgtccagaaacttgggatgatcatcaagagatcgacacatgagttggatctggatgaccaagctagcatcaggatgtgggttgacagaaataggaagtctgtattcttctaccaggattcaactgaggcagatgcctttattttggggattcagacacaatggcaattgcagcaaatgatgcgctttggccatcagagtcttttggcttctcattcctcatttggtgtaagcaagctaaagtatcccttgcacacgctccttgcattcgactcaaggcagcacgctcttccagttgcatgggtcataacccgctcagttactaagaaggacacattgaaatggatgagcacacttactgatcgaatacattctatagattccacatggggaattggtggttttatcattgatgacccggcttcagagctgggtccaatcagggaggtgttcgcctgcccagttctgttctccatgtggcacatcagaagaacctggcttaaaaatgtaatcaagaaatgcagcaatgttgagctggatgctcttcaacgtgtggactggctagtgcataagctcacaacagagctgcattcgagctactggatcaacctatttgcagacgaaagcgggtcatttcccgaggtgaaagcagactatatcgcatccacgtcatggcaaagggcactccagatacctgacgatgctgttaccttcgacgacaaggatcctcttgtagctagagtggtcagccagaaggaaaccagccagacacggactgtgtggagccctggttctgaattctctctttgcaattgctcgtggtcgatgcagggtaacctatgcaagcacgtgctaaaggtcaacatggtctgcggagcacgcaaagactttcagccctcgctgtcgttccagtcgttccagcatgtcctgcttgatctgtggcagaaaccattggacgattcgttctcgcttgacctctcggtagcgcgggtcatgcagatgcaggagaagatcaaacatgtggctgagctcgccacctccagtggtatcgcccaagttgcagggaagttgccgatgcaatggacaaaaaagagagggagaagagtaggcgtcaagcccacaagcgcgctgctgcttcctcgttctaagggcagtttgcagaaggacttgaccccgaagaacagcaggaagaggaagaggctatctagatttaaagggtaa

SEQ ID NO: 7398 - DNA, 2004 bp, Zea mays
  Peptide Sequence Number=SeqID_50773
atgacggttcatctgatatattttcctaactcaaggctattcttaaacgagtttacggttgagaaattgatcaaggaactaccaactgcgccatcggatttatcgaatgctgaagttcctaacagtgacactggaacaccaaatggggtggctggaacaggtgtcagcgaaacacaaagcattctcttagaaagaattgctagcgagatgaaccggcttaaattctacataagtcatgcacagaacctcccttttattgagaacatggagaagagggtccaaggtgctacaaaactgcttgatggtagcttggagcgctgctttgtggatggtctggaacaccgtgatgctaaagttatatacaactgtttgcgtgcttatgctgcaattgacaacacatcatcagccgaagagcttttccgtacagcagtggtgtctccattgattcagaaaataatccctcaaaattatgcaagagctgttgctggggcatcatctgatgagctggaagaggattatcaacaaataaaggaatgtgtacaaaaagattgtaaatttatattggaaatatcttcctcagaaaactctggattgcatgtttttgattttctgggtaattcaatactcaaagaagtcctttctacaatccagaaaggcaagcctggggccttttctcctggaaagcctaaagaattcttgaggaactacaaagcgagcttaggatttcttgattttcttgaaggtattcttaggttgcggcttgattattttgctgccaactatgttgaaccagaacctggttccaccatatccttttttcatccttttgttccacaagctccccagtccaatatatcttcatttttcaatggttactgcatctccaagtctgctgtaacgaagttccgctctgagcttgcttacacagatttcatgcgacaatggaatgttggtgtctacttttcgttgcgatttcaggaaattgcgggcggccttgattctactcttacaaacacttttagtcctactggattgaatgaggctcaagggaaaccattgctcttgaagcaaagtattaagctcttagaaagtttggattcatgttggagtgatgaggttcttgtattctctcactgtgataaattccttcgtctgtccttgcagcttatttcaaggtatacaacatggctttcatctggtttaacggcacgtaaagcttctgacgggagcccgaattcacctgcagatgctgaatgggcactgtctatacctatagaagatttcatatatataatgcatgatgtgcatgctgtaattggcgagctttcagaatcaggcagcttcattggacatgtgaatcagttactagggtcatgccccattgaagtatttaatcttgtgaaacaaagtatactgcaagctgttgaacctttaaaggaacggttgcctgcaataatcaatgttatgattggaatcatagttaagaagtctaacgaggacttgaagcacctgaaaggaataacagcgacatataggatgacgagtaaacttccagtcaggcattctccatatgtatcagggattttacatccgttgaaggtgtttcttgaaggggaccgaatacgctatctatcagaagatgataaaactaagttgtgtcgtgggtctacagataagattactgcaatttactatgacttggtctctgaagttgtcactgtgttactcagatcaatttatttcaattctctgaaggcaaggaaaaccgagtcttcgttgcaaagactgcgccaaggtgcacaaaggcgagtaggagctagtacagatgcctcagataacatcatatctgatacagacaagatctgtatgcagctatttcttgatattcaggagtacgcacgaaaccttcgtgcgataggaatagacgcgagagagattgattcctacagagctctatggcagtgtgttgccccaaaagacagacaagagaacattcagttttga

SEQ ID NO: 7399 - DNA, 1062 bp, Zea mays
  Peptide Sequence Number=SeqID_50774
atgtcttcgtgctcccttatgcatcgtgtctttccaccttccgagcccccggatggaggatgcccgcagcccttccgccttgtcgttgggggaacgcaactccatgggagttggtacctttcagccatcgttcggcttcaaggattttcatcatgcagcccggctgcacccctccaccggcggtcacccaagatggtgacctccagcccctggatggggagaggcaagccgggctgtgatcttggtcccgccctcagcttcaaggatgttcatcatccttgctggggcggagagcgaggcgagccggggctctacctcctgcgcgggccggctggccacctcttcttccagcttctggtggtggaaaccttcctccagctctgcggaggaggcgtcctccagccatgcccgggaaggcgaactgttgctgcccagctaggatgcaacattcctccctcttcctcgctttcgtggcgaggacggaagcgaggacctaccggtgcgctttggagcggcccgctctttggctttgatggctggtttgcgtcccttgagcgggagcgcgaacgggagccttccagtggtcgcgtccgtcctgggaccatggctgctgctgcagaggtcgctggcgagtcatccggaactcgtcgccccgcaggctccccgccgaggccaggggtagcggtgtcagcatggacagaggcagagttggctcgaaaagaagacttggtcggccggagcctggccgggtcgtccgttagcgggaccgacgccggagttgatcttccgaggcctcgggccgggctgatgtcttcgggggacagctggccgaggcctcggggtgaccagccgagccgcctgctcgggctggattctcggagaagaccctggcggcgatggcccaggcgtggtgatgacgtcgtccttcagagtggaggtcctcggaccgcgtcgctgtccgaggctaggtcgaacctcgccgaaggtgttgtcgacgccgagggtgccgcggctcccttcaactgtccagatccgagcctgcaggatcggattatcttgtag

SEQ ID NO: 7400 - DNA, 714 bp, Zea mays
  Peptide Sequence Number=SeqID_50775
atgcaggcggcatgcaaccgcgccaagtgggcgcacttctccgacttccaacacgcccagcatggaggcccaggcccacgcgtcaagcaaccggcgcgccggatgctgcgtgcgagcaactgcaccgccacccacgccactgccatgcctcctcgactgcggaaccagtaccgcgactcgaggcaaccctacgcacgacccagcagcgccagcctggcgcgacggggaagcgagcgacgcttcgccttcgccataatgaccgcgtcaaaaaggctccgagcctccctactgatcagaggttcgaaggctggcccctcggaggggttcaacagccgcctcagagcgcgtggctccacacccactactagtcagaggttcgaaggccggcccctcggaagggttcaacgaccgcctcaggctactcgggctccgcgcccactactgatcaggggttcgaaggctggccctcgaagggttcacagccgcctcagacacagagcgagggatgaccatgggtacgttcgatacataaccaaggctcgggctgtgctcccgagaggctcgggggctgctctcgcaaacccggctccggccaaaccgttgacagcgtcaacataccagcccgagaacttggaacccgaccgtgcacccgggctacggccagctcgcatgagggaacgaccagaccagccgaagcattatgcgaggcattaa

SEQ ID NO: 7401 - DNA, 273 bp, Zea mays
  Peptide Sequence Number=SeqID_50776
atggcgcctgaggccgggcctgactgcctgtcagcctcactctgtctagtggcactgcagccggtgcggcgcaggcggcgctgtccttctgtcaggtcgcgatttggtcagggttgcttcttggtgaagacagagcctcgggcgagccggaaatatgttcgtcgctggaggggggcctcgggcgagacggagatcctccggggtcggctgcccttgcccgaggctaggctcgggcgaggcgtgatcgagtcccttgaatggaccgatccctga

SEQ ID NO: 7402 - DNA, 1720 bp, Zea mays
  Peptide Sequence Number=SeqID_50777
atggagcttgacgggaagctgttcgtcaacacgcagcaggcccctacctggcgcgccaactgtcggcgtttcgaccccggggggtccctggaccgacgagtaaattgtcgccgcgtgccccagcctagatgggtcggcgcgagacggagcgcgaaggggggaaaccagagggagacaggcgtaaaggggaaacccacggccttcgtgttgtcccgcgcccaggtcgggtgcgcttgcagcgaggcggagttcgtcgtcttccggggtcgatgccgagtccgagccctggggtcgggcgaggcggagttcgtcgtcttccggggccgaggccgagtccgagccctggggtcgggcgaggcggagttcgtcgtcttccggggccgaggccgagtccgagccctggggtcgggcgaggcggagcttcctatggcgtctgaggccggacttgactgctgtcagcctcactctgtcgagtggcacagcagtcggagcggcgcaggcggcgctgtcctctcgtcaggccggtcagtggagcggcgaagtgactgcggtcacttcggctctgtcgactggagggcgcgcgtcaggataaggtgtcaggccatcctcgcattaaatgcttctacggcacggtcggtcggtgtggcgatctggccaaggttgcttcttggcgaagactgggcctcgggcgagccgaagctttgtgtagatgggggttaccagctgagattaggagtcttggggggggatgagatggctctcgcgctcgcgtcctgtcctctcgggttcgcgtcccgtcccctcccctcccgtccgctcacctcctccccgtccggcgcctcctcccacgccaccaaccgcccgccggtggtcactctgactccggcgaccacctcaccaccgcgtattctctctcggaaggcgctgacttccacctcctccttgtccccggtggcgtggccggccctgacggcgggtcggtccaagttccatcgttggcaggaagtgtctcctgcgtcaaatgaaggtccctacctccccttcccggcgtctgcttctccgacggttgtggcgatacctggttcgatggacgggcgcatgtccttcagggacgtgatgcttacggcctcccaggcgccgccccccgtggtgcttctcaaggaccccactccaccggtgaaggtcgttcgtgtggccgcggcgcaccacattcactcgccgaagcacgttgttcccgatgttgatggggtggttgcgctcgtggattgtcccattcgatcttctatgtgggatcgcctgtctctgccatgcgaggctgcgaaggaccgggcggccggcgtcatcaggcgtacttcggtttggcggcggatcaccccggcgagctcttcggacggcgatattggggcggctgtctctgctcctgtgcatggggctgctcctaacaatgaggatggtgctcctgtcgtcgagggctcgcagtccaggatggggcgcaagcggcggaggggtccgcgtcgtaggcctgaggcttccagggggcctcctcctcccctttccccgccggccttcgtttctggcgtcttggagagccaaagggctgggcggactgcagctgtaagagatgttcccgctctgagacctatatgcgtcatggagttctcgacggggtttgctcgggaggaaattgatctccgacgtgccctcttcgtctccatcactg

SEQ ID NO: 7403 - DNA, 528 bp, Zea mays
  Peptide Sequence Number=SeqID_50778
atggaggcaggagttgatacactacctgcagaagcccatcttgacacgaatgtaggcttggggagtgcttccctggtggcaagtgatccttgcatggggaaggatgagaattctaaagaggaggaaagccaggagaagggagctatgtgcagtgctgcttgcaaggtgaatgctgaggcaaagcaaggagccaaggactgccacctgccaaatgatgaggactcaacggtaaaggccatgaaaagagcttctcattgcaatctggacgatgatttgggcgggttgaagtcagctgagcaagtgttgcaaccagtcactacttcaccgagtagtcaacttccatcagaaaatggaagtagacaggacgagaataatatgaccaatccttatactgttagtgaagacgaggtcgatgaattaaacaatgacctcttagctcacctaattaaggatgtatcagaagtggattttgatgatgtagacctaggcacaaaactttgtgatcttatgaccccttcaagaaagtaa

SEQ ID NO: 7404 - DNA, 309 bp, Zea mays
  Peptide Sequence Number=SeqID_50779
atgggcgagagcaagaagggtggtagttcttcgcatcactacggcgacaaacggaagcaggtgtggacctacatccgggccgtcgagcacgccgggctcgagggctcggatgactcggagtactcctcggatgaggagaactcctcggactcgtccgaggagggcggcggcggcgatggcagtgactgcgacgacgacggaggcgatggtgatggcggcgacggcggcggcaaaggtggcagcggcgacggcggcgacggcagcagcagaggcagcaacaagggcagcagcaacagggccagtggctag

SEQ ID NO: 7405 - DNA, 141 bp, Zea mays
  Peptide Sequence Number=SeqID_50780
atgtctagatgtagaggagtagactcctcacaccgggtactccttgaattggttgatggtgtgacttggccttcgtccctgccaccgggacagatggtcgagtgggttactgcttctgcaggagaggaccaggaggagtag

SEQ ID NO: 7406 - DNA, 177 bp, Zea mays
  Peptide Sequence Number=SeqID_50781
atgggagaccttgtctcaggtcgcgtgaggggatatgtctgcgggcaggttcactcaggatttaacaacattatgctaaaggaagaaaaaactaagttagttggtaacttagggtttcttggttatacgtggcttttagtagtttatgcttatcactctaggtttaggttttggtaa

SEQ ID NO: 7407 - DNA, 522 bp, Zea mays
  Peptide Sequence Number=SeqID_50782
atgggggagcctgtcccatcactcctcatgctcctcctcagccgaggcagggtcccactcaacagtccaacccggtggcaaggtggacggccaagttatcccagcaaccatctcctccagagaacctgtaaaaattatgccacaagcaaggctgagtatactaatactcagctagacttacccggttacaatggatcaagcagtctcattagctgcgagaagcagacgattcgaatcgagtttttatccttgcaagggctcaccgccttggcgtacaatgccccactgaccccgactggccgtcgtgcagtggccgcacttgtacccaccataaccggaatgggagacctcgtctcaggtcgcgtgaggggtaaagtctgcgggcaggttcactcaggtactaggcttaccgatttaccatatttctcgggttttaataatttccaaaaattctgtaaaaattacagtgggttgtcgctggctattctagcttgttctaagaacttgaggcttaaagtataa

SEQ ID NO: 7408 - DNA, 78 bp, Zea mays
  Peptide Sequence Number=SeqID_50783
atggccgccgacgccgacgtggtccattccattccctggccagcaactgactcgcttgaatgccccttgcggttaatc

SEQ ID NO: 7409 - DNA, 558 bp, Zea mays
  Peptide Sequence Number=SeqID_50784
atggccgtgatgggttcgacatcggaaaagatgtacctctgtcagctgactccaaggcatgaggagagcagcagcggtagtaacgatcccattagagaattagaagcccaggtggagcagcttcaaacggagctacgtcacagaaactgggtgtgggtagaggatggtcagcgtataaatgagttgagagctgacgtccgacatctgcaagacgagcttaccgaacgggatttggcaatcgattgggttgtcaactcacgttccattgcttgggaccgggaagccgaagctcgagcccatgtggaggagcttaccacggccatcgacaacttgcaggtgtactgcaatacattacatgaggaagttcatgaattgtattcacgactacaccccgacgtacctgccgatcgtgtcggaatgggagccagaccttctggaacagcatgtgaagcacttggtggggaattggaacttttaaagccccctgcttctatgaacctggctgacaaacggtcccctacaaccgacagcgaagctactaaagatgataaatactag

SEQ ID NO: 7410 - DNA, 255 bp, Zea mays
  Peptide Sequence Number=SeqID_50785
atggccgccgacgccgacgtggtccattccattccctggccagcaactgactcgcttgaatgccccttgcggttaatcaggaactcgggtgtagttcgcttcgtcgtcgtgccgttaatggggctcggtgtatgcgactcgctttgccaagatgatgatgaggataatgctggtttctattatgattatggtaaagaagaaggtgtcgaggtggatctccaggagttccaggacttcgacgagttcgaggattag

SEQ ID NO: 7411 - DNA, 288 bp, Zea mays
  Peptide Sequence Number=SeqID_50786
atgaagatgctgccgactctgatcttgactgatttggaggagttggaggttgccaaatggataggcgcaagaggaaagaatagcgagaaaaggcaaagcttgcaaggcatcaaagaaggggaagcaatcaatggtgaagtaggtgaggcattatcctcaaacagcgatgaaaaagaggaggctttaaagggtaggttcaaagtaagcatgtgggcaaggccctgggtatcacgagagtttaaaggtgataaagggcaaggatgtaggagaggaggtaaatgtgcataa

SEQ ID NO: 7412 - DNA, 159 bp, Zea mays
  Peptide Sequence Number=SeqID_50787
atggggctcggtgtatgcggctcgctctgccaaggtggtgacgaggatgatggttttggttatgactatggtgctggttatcagctttgcaaccattgctcaggtgaagatgaagtcgtggaggacttccaggagttccaagattatgacgagttctag

SEQ ID NO: 7413 - DNA, 1953 bp, Zea mays
  Peptide Sequence Number=SeqID_50788
atggcccgtggcgaggtgtccatcgtccgggtcgacctacatcttcgcgctctactccaaggtgctccgctccaagctgggctacaaccaggagacgctcaacaagctctccttcttcaaggacctcggcaccaacgtgggcatcatatctgggctggtgcagcaggtagccccgacgtggctggtgctgctcatcggcgccggcatgaacctggccggctacctcatgatctacctggcgctgacacgggacgcacggcgccgccgcccgtctggctcatgtgcttctacatctgcttcggcgccaacgcgctcaccttctccaacaccggcgcgctcgtcgcctgcgtcaagaacttcccggagagccggggcatcgtcatcggcctactcaagtcctttgtcggcctcagcggcgccatctacacgcagctctacctcgccatctacggcgacgacgccgcgtcgctcgtcctcctcgtcgcctggctccccgccgccttcaacatcttcaccgtctacaccatccgcgtactgccgtatgcccgccgccgcgacggcgggaagccatacaacacgcccttctaccacttcctgtacctctccctcgccctcgcctcctacctcctcgtcatgatcgtggtggagaagcaggtgcagttctcccacgccgcgtacgtcgtcacctccacggctctgctcatcgtcctcttcagtcccgtcggcgtggtcgtcaaggaggagtacaaggccgtatcccagctagaggagtcactgcagcagccgccggccatcgctgtcgaagaaccaaaagcaggcactgctggcaaaggcgacgacgagtcatcgtcgcctcccttgtgtggcggcggcggcatggcctgcctcaccaacatgttcaagccgcctgcgctcggggaggactattcaatcatgcaggctctggtcagcgtggagatgctggtgctgttcgtcatctccgtgttcggcatcggcggcacgctgacagccatcgacaacatggcgcagatcgggcagtcgctgggctacccggccaagagcatcaacaccttcgtctcgctcatcagcatctggaactacgccggccgcgccggcgcgggctacatctcggaattcctcctcgcgcggtacaggctaccgcggccgttggtgctgaccgccgtgctcctcgtctcctgcatcggccacctattcatcgcattcggcgtgccgcagtctctgtacgccgcgtcggtgatcatcggcttctgcttcggcgcgcagtggccgctgctgttcgccatcatctccgaggtgttcgggctcaagtactactcgtcgctcttcaacttcggctccgcggccagccccgccggcgcctacgtgctcaacgtgatcatcaccgggcgcatgtacgacgccgaggcgaccaggcagcacggcggcgtggccgccgtgggggacaagatctgcaagggggtggtgtgcttcaagcgccccttcatcatcatcacgggcgtcacgttcgccggcgcgctcgtgtcgctggtgttggtctggaggacaaggaacttctacaggggggatatctacgccaagttcaaggtgacaccggcggcggcttctgagtctgagtccctggacggcaaaaacgtcgagatggcggaggagacggagggaaagaggaagaaacaggtgaacaacccgagagtcgtcgatgttggcgacaaccatgaggcctccctgcttaacgatggacaacgcggtgcagctgctctggaccgcgtccaagtggtggcttcacgggagcttgtcatacacagcggcgcatgcgaccacgtaggactgcttctagaggtcgaactgacagtcgccaagcttcttctcgtcatcgatgagcgacgccaacgtgagtgcctcctgctcatggtgtttgttcggggtttcaagtaa

SEQ ID NO: 7414 - DNA, 195 bp, Zea mays
  Peptide Sequence Number=SeqID_50789
atggccctgggcggaggcatggagctccgttgggcgggggtgggtctgccgggagaagctcctggcccggcctgggcggacctcagcacggcggttcggggcataacagggcggacgatcgacgacggagttggtgctaggcggaggctcggccgcggaggctcgacgtcggccgtcggtggcttggctcgctag

SEQ ID NO: 7415 - DNA, 285 bp, Zea mays
  Peptide Sequence Number=SeqID_50790
atgacgtccttgatggtgggttctgccatggccaaaggtttggcggttggaggttgtgatggtggtgggctagaatgggtggcggctgctgtggatgactgggtggagcggattgtagtcgcgctccaggccttcaccgagagggagagcccctgccggtggcttgagagagttgagggagagagagcagccactaatggtggcgccatcctgtgtagcgcgctcagctgcgcgtctgatgtcacgacggcgcctatacttgcgcccgtacatgacagaaaatga

SEQ ID NO: 7416 - DNA, 486 bp, Zea mays
  Peptide Sequence Number=SeqID_50791
atgaagatgagggctcctgtcgtggcctttgctgctcttctcatgccgctgctggtggctacaagagcacatgaaggcgcagtagtcatcgtcatcatcggtgtggagccaggacgcaacgggggccgcgtccgcccgtcgccgctgtggccaggggccgcgtccgccgctgctgtggttgtgggtggctggggaggtggagcagaggcggagggagaggtggtgagggcgccgagcgcagagacggaggaagggaggaggccgagcgcagatccgagcgcagatccggagggaggggcaggacagggaggagtgggagacgtggtgcgcggcgtggagctccacgaggcaggggtggccgttgatggcggggagagggaaggagggtggggatccgcggggcgactacggcagaaccgtgcacccctacaagcagatgggccacaagcagatgggcctcctgcgttgtcaacaaatacaagttaa

SEQ ID NO: 7417 - DNA, 303 bp, Zea mays
  Peptide Sequence Number=SeqID_50792
atgaagaatcaagagcttgcaggatcaagaaagatgaccatcaagaaagatgaaagcaaaaggcaaatgcgttgcaaggacaagcatcacatttgctacaattgtcgtgagaaaggtcatttattcaagggaataaggattaacctttatgggaatcaagcaaaagacctacaaccaagtgatattcaaaggatgccacataggaaaaatgaagcacttgagaatgaacttaaaatattttaccttgtcttggaaaagttccaatcatatggtagattgcaagtttatatttttatattgtga

SEQ ID NO: 7418 - DNA, 636 bp, Zea mays
  Peptide Sequence Number=SeqID_50793
atggagggcggcgactcgtccggcgccggcgccggcggcgccgtggccgcggcggccaagtggcggagcgacgcgtcgcgggcgttccagtactacctggaccgctcgacgcctcacgccacggggcggtggctcggcacgctcgccgccgcggccatctacgcgctgcgggtttacatggtgcagggcttctacatcgtcacctacgggctcgggatctaccttctcaacctcctcatcggtttcctctcccccatggtcgaccccgagctcgacccttccgccgcctccgaggggccggcgctgcccacccgggggtccgacgagttcaagccattcatcaggcgcctccccgagttcaagttctggtatgccatcacaaaagcttttgttatagcttttgtgatgactttcttctcagtgtttgacgttcctgtcttctggcctatactcctctgctactggattgttctctttgtccttacaatgaagcgccagattgtacatatgatcaaatacaaatatgtgcctttcagtatcgggaagcagaagctggctaaaaacgtgagtgtttggcagtccgcaacagcttttggtggtcaaaagctgccagaagccgaaacaaacggggcctaa

SEQ ID NO: 7419 - DNA, 1257 bp, Zea mays
  Peptide Sequence Number=SeqID_50794
atgggcgcggaggcagcgcatccgcagcaacagcctccctcctccgtccgaccctgcagggaggcggcggcgcccgcggtgctggggctgcagctctcggcgctgatcgaccacgtcgcgcgcgtcgactggtccctcctcgaccgcgtccctggcgaccgcggcggctcgcagcaggatgaatcgcttgccatcatgtcatgtggttgtttgtttgagcctttaaggtttttagtgattaaatctagtgtcgctttcactgaaaaggggcctgcctgttggttggcatgctctgcactgcacacttcaggaaaggtgtccattgtggagttgaatcatattcttaatgaagtgaatacccacatccttccttcccacaatgatctcaccccaataactacaatagccggtggaagtgttgccaacacaatccgtgggctctcagctggttttggaatatcaactggaataattggagcttgtggggatgacaaccagggacttttgtttgtcaacaatatgagctttagtggtgtagatctcacaaggttaagggccaaaaaagggcacaccgctcagtgtgtgtgcttggttgatgcaagcggcaaccgcaccatgcgtccgtgcctatctagcgcagtcaagatacaggccaatgaatttagaaaggaggatttcaaaggctccaagtggcttattgtgagatatgcacaacagaacatggaacagattattgaagctattaggattgctaaacaggaaggcctttcagtatcattagatttggccagttttgagatggtccgtgactctaggtctaagcttattaaccttttggagaccggtaacattgacctttgcttcgccaatgaggatgaagctagagaggttatagggggaggtctggaatcagatccagaggaggcgcttgcgttcttgggcaagtattgcaaatgggctgtggtcacacttgcttcaaagggatgcatggcaaagcatggcaaacaggtcgttcaagtgccggccatcggggagagcaacgcggtggacacaactggagcgggcgacctgttcgcgagcgggttcctgtacgggctggtgaaggggttgccgctggaggagtgctgcatggttggggcgtgcagcggcgggtcggtgacgcgggcgctcggcggagaggtgcggccggagaactggcagtggatgtacaagcagatgcacgccaggggcatgctgctccctgagctcaagaactga

SEQ ID NO: 7420 - DNA, 114 bp, Zea mays
  Peptide Sequence Number=SeqID_50795
atggcgatgatgggttcaacatctgaaaagatgtacctatgccaggtgaggaaacagcggagttttgctgcttctgttcaaatgtgggtacccaaggaggagccccagaagtga

SEQ ID NO: 7421 - DNA, 672 bp, Zea mays
  Peptide Sequence Number=SeqID_50796
atggcaagaacagagaaggaggagggagatgtgctgctgttgggcgccggcaaggggaagctgcaggggtggcgcccatgggatcttctcccactgcgccagggaggagatgggagcagagagcttgggcgccatggctgctgggcgaagctggggctcggtctgcaacagtgggggtcggcaatggggaagaagctctctgctggaaattcagggcgccatggagcaagaagcagaggaagccgtgaccaaggggagagaagggggcgctgtgcacagggagtagggggaggcgcctgctggcttgaggaagaagaaggggaggagggcgccatggatcagcgctcgcccacgccatggacagcagagggaaacgttgggggagctcgattgctggccgaccatggagaagacgactccctgctgcagccgctcgccaggaggaggagcagggaggggcgccgagggaggtgcttgctgctcgccagaagggggcgccggccatggagaggaaaggagccgtgctccctgttgctgctgccgtgggatgcctgctgcgcgatggagaagaagacagggaggctgctgtggcggctggaaaaaaatgaggggtgggaatgcaaaatagcccaagtgcaaggagagagggctgctatttatagagaaccctag

SEQ ID NO: 7422 - DNA, 618 bp, Zea mays
  Peptide Sequence Number=SeqID_50797
atggggcttgtgctcgcgcgcagggaatcctcggcgccgtggctgctggccggagctggagctcggcagcaacagaggggcggctggccatggaggaatggagctgctgcgtcgccatggacacgaacctcgccgaggtcagcccaaggagctacagcgcgcagggaagaaaggctgcctgctgcagtgcgaagaagaaaacaggggcgtccatggaggttgcaggacgtcgggctgggggcagcacgccacgggagagtggccagcgccatgggagggggcgagcagagctgctgcgttccagggagaagaacccgagctcgccgggggctggcggccatggctgctggcggccaaggggagagcaggggcaccggcgtgctcccagggagctcctgctcctgcggcaagaagcagagggaggaggagcagccgccatgggagggagcttgctgccggagaagaggggcgccctgctgcagccgtggagaggaagggagagctgctgttgccgtgggaggactcctgcgcgaggtagaagaaggcaggggaaatcggctggagaaaggagaaggtgagtggcggctgaaaatttttaggggtggtattgcaaaatag

SEQ ID NO: 7423 - DNA, 126 bp, Zea mays
  Peptide Sequence Number=SeqID_50798
atggtgggtagaagtgcggtcactgcacggcggcaaccagggtcagtggggcattgtatgccaaggcagtacttccttgatttggttgatggtgtgacttggccttcatccctgccaccgggatag

SEQ ID NO: 7424 - DNA, 200 bp, Zea mays
  Peptide Sequence Number=SeqID_50799
ccgccacagcagcctccctgtcttcttctccatcgcgcagcaggcatcccacggcagcagcaacagggagcacggctcttttcctctccatggccggcgcccccttctggcgagcagcaagcacctccctcggcgcccctccctgctcctcctcctggcgagcggctacagcagggagtcgtcttctccatggtcggcca

SEQ ID NO: 7425 - DNA, 514 bp, Zea mays
  Peptide Sequence Number=SeqID_50800
atcgacagcgagtggcccgacctggcgggcgcaacgcagcggggggtgcatcgctgctgctacggctttggcattttgtcaaacacgacgcaagcacgacagcgcagggagtacactgttgtcgcttggcgggttgaggagtatggggtggctctagggagggagctccttgctgcaggcatgcatgggagagggacgcctgcacttggggagggcgctggctgggagaggggctcggccatggcaagaacagagaaggaggagggagatgtgctgctgttgggcgccggcaaggggaagctgcaggggtggcgcccatgggatcttctcccactgcgccagggaggagatgggagcagagagcttgggcgccatggctgctgggcgaagctggggctcggtctgcaacagtgggggtcggcaatggggaagaagctctctgctggaaattcagggcgccatggagcaagaagcagaggaagccgtgaccaaggggagaagaaagggggcccct

SEQ ID NO: 7426 - DNA, 90 bp, Zea mays
  Peptide Sequence Number=SeqID_50801
atgcagctcagcttcaggttcatgccatcgaagtctgctaagccttctgataatgtgaaaagaagatttaggaaggctatgtttacttga

SEQ ID NO: 7427 - DNA, 780 bp, Zea mays
  Peptide Sequence Number=SeqID_50802
atgaacactggcattcgaagtgccattacaaacggaaccccggttccacctccgcaggtacgaacaaccccactcaatggggggcctgcggagcaacagaagaccgacgaacggcgcgccgtcgcccgctccagcagcggcgacgacgacgacttttgctccggggggccgaacagcggcagcgctgacctcagggcggatgctgctgccaagaggcccccgcccatgcccaaactcgtgaggcaagggcgggcagaaggccgtagagttggaggtcctcccctacggcgcgggggctgggtcccacacgtcatgcaagccggctcagagcagaagaagccaaaccgccgtgcgcggtgcgtacaaccgccccagcggtacaagcgactctccacttttgcccagaccaacgggcgaaagggcgggcagccgtgcaggcggcatgcaaccgcgccaagtgggcgcaattctccgactcccaacacgcctagcatggaggcccaggcccacgcgtcatgcaaccggcgcgccgaatgcttcgtgcatgcaactgcaccgccacttgcgccactaccgcacctcctcgactgcggaaccaataccatgactcgaggcgacccagcgcgcaacccagtagtgccagcctggcgcgacggtcaatgcggccaaaaatgggccggcagtaatggcggtggcaggcgggcaggagcagcggccccgtcgtcagccaagctcacgtcccatccgggggcagcaagagaaccctctctcacggcgtga

SEQ ID NO: 7428 - DNA, 427 bp, Zea mays
  Peptide Sequence Number=SeqID_50803
gaaagtgaactgctgttggcttgtggccaaacaggccaagagtcacagtggcacgcttccaatggatgaccttgaattagctccaaggcccaaggacatcctgctcctcaaggacacgctcaagccatctaccgcgggactcccttgtcccatcggagacgaagccgatggcagccagagagccgcctcgcctcttgctgcccctactccacgcccgattcgtctgggaggagggcctttagccgacattccatggggtcagcgcgcgggggcccgtgtcggcctcgcctcgtggcggtcagtcgatggaggcgtcgcggacggctgcttcaacaacggctctacagatgttaggcgacagcttccattcatgatacttcgtccaaagttcaagaatcaagacacatattaccatttatgtgcatag

SEQ ID NO: 7429 - DNA, 1086 bp, Zea mays
  Peptide Sequence Number=SeqID_50804
atggagttgccggtgagctttctgcgcgaccaaggcggaggaggaggagcagaggagcagagcggcacccagctggagcacgaggaggatgtcccctgcgtgctggacatcttcgtgcacgaggcgcggggcacccacaagaccatccgcgtctacggggaccaccaggacgtgtacgcgaggctggcgctgacgtcggcgcccgaggccggcgccagcgcgcgtctcggcgagcgcctcccgccgctgcgcgtcgcccgcgggaggctggccgtggacgtgctcaagtgcgagctctggatgcgcagcgggggcgtcccggacgaccagctcctcggcttcgcgctcgtgccgctcgccgccgtcgccgcggccgacggcgccagggtcatcgcggccgacttcgagctctcgtccaccgacctcctccactcgcccgcgggcgccgtgcgcctctcgctcgccctccgtccggggcacgccgacgcgtgcgagccgtcggaggcggccgtcctcggcctcggccccgcgcccatggccgttgaccttgaccactcgaggatcgagttcacggaccttagagttagagtggagcaggagaagtcggcgtcctctgacggtgacggcagcaccagccggaacgctgccgcctcgacggccagcacggtgagcgaggaggacagggcgttctcttcttccgccgaggcggcacagcagccgcccgacgtcgaggaggccaccacggcgtcggcgcccgtgtcccggcgctcgccggacacgccgacttcgcgcggcgggaaggccaaggccaaggccgacgtcgacgtgctcccgtccccggccggggacatcgtcgacgtggaggcggagcagagcgcgatgcagcggcagatcatggagatgtacgtgaagagcatgcagcagttcagcgagtcgctggccaagatgcagctgccggttgcgctcggcggcggcggcggcgtagtagagaaggaagagacgcccgatgacaagaaggtgatcgagcggcagcaggggaagaaggacggggcaagggtgttctacgggagcagagctttcttctga

SEQ ID NO: 7430 - DNA, 234 bp, Zea mays
  Peptide Sequence Number=SeqID_50805
atgccggggaaggcgaactgttgctgtccagctaggatgcaacatttcgtccttctcctcgctttcgtggcgaggacgggagtgaggacctgccggtgcgccttgccaactatcagcgttggtggagaggcggacgccgccgtctgtgctgaagtgggggcaactggaggaagcttccccccgtcgaggtcgtcggcgccgcctacggagcggctcccggctctttggctttaa

SEQ ID NO: 7431 - DNA, 324 bp, Zea mays
  Peptide Sequence Number=SeqID_50806
atggcgcctagggccggacttggctgctgtcagcctcactctgtcgagtggctcaacagtcggagcggcgcaggcgacgctgtcctcttgtcagaccggttagtggagcggcgaagtgactgcggtcacttcggctctgtcaactggagggccacctttgcattaaatgcccctgcgatttggtcggttggcgtggcgatttggccaaggttgcttcttggtgaagactgggcctcgggcgagccgaagctttgtgctgatgggggttaccagctgaggtttaggagccttgagggtacccctaattatggtccccgacagtag

SEQ ID NO: 7432 - DNA, 405 bp, Zea mays
  Peptide Sequence Number=SeqID_50807
atgcccatggggccatggtgtggctggctgctaagctatgcatttagctgcaggcacgcatataggcaggtgactgccggggctgctaacgaattggaaaggggccttggtagtggaaaacatctggacgagtgtggaggtggtgctgcgcttgttcggcgtggacttcctgtgctccgttgcattatcagtgtgcctgttggtactctgtctgttctgattgttgtccaccgtggcctggtgcttgggctctctgctgcgcggtgttcatcttctcgggctggtgccgtggacgtctccctcggctccggcagcggctctagtatctccgtcaacctcccgccgtgcaggcccggacgtgggcggcggaattggttttctgggacagaacttcgtgttcgctga

SEQ ID NO: 7433 - DNA, 792 bp, Zea mays
  Peptide Sequence Number=SeqID_50808
atggcgcctcttgttgacgtggtcggtccgtgccctaggttgggcaaggtggaggctcctccgaggttgaggttgagtccgtcttccaaggtcgaggtcgagtccgagcccccgggtcggacaaggcggagaccgtcggctaaggctagggctgagtccgagccttggggtcggacaaagtggagttcgtcgtccttcggggctgagcccgagtccgagccctggggtcgggcggagcggagttcgtcgtcttccggggctgagcccgagtccgagccctggggtcgggcgaagcggagttcgtcgtcttctggggccgagcccgagtcggagccctggggtcgggcggagcggagttcgtcgtcttccggggctgagcctgagtctgagccctggggtcgggcggagcggagttcgtcgtcttccggggccgtgcccgagtccgagcccttgggtcgggcggagcggagtcttccatggcgcctagggccggacttggctgctgtcagcctcactctgtcgagtggctcagcagtcggagcggcgcaggcggcgctgtcctcttgtcagaccggtcagtggagcggcgaagccacctttgcattaaatgcccctgcgatttggtcggttggcgtggcgatttggccaaggttgcttcttggtgaagactgggcctcgggcgagccgaagctttgtgctgatgggggttaccagctgaggtttaggagccttgagggcgagaaaagagtaagcatgaagaacttagacgctattgatgagattgaattctag

SEQ ID NO: 7434 - DNA, 960 bp, Zea mays
  Peptide Sequence Number=SeqID_50809
atgattacctttacaaactggacaaaattggaggatgttgttgaggttccgccagcatttcctgtccttacctactcactcacaccgatagaccagctccatttgtgtgtcgacaacagggagtactacacagatgctattggaattgtcacttccatctcagccgtggcaccgcaccgatccagagggcaacatacaaccagctctaagaggactatttccctgtgcaatgtcagttgggacctaatgccctttgttttagatggactgtgcttgtctggaggctcaccctgtaagtggtacattaatcctgatgttcctgaagcaggtgccctcatggctagtgcgaggaaagcgcatagtcccatcaagtggaacgaggttctatcttcgaatcagcctatgcctcatgttcctgaggaacagaaaatcgcttacatcagagatctgcacccatttgagaataagattggtgataggtggtggtacagtgcatgcaaaaaatgcaccggcacaactgtggctcatggggattcctacaagtgcggcgatcaagtttgcgctaccattggcacgcccaaccaaaggtacaaactgcttctcactgcaggggatgagacgggtgacacagacttcatcctctttggtcagatggcgcaacgcatcatcaagaagccgtgcgatatgctcattaccaacaatccgatcggctttattcctgatccaatcacagatctgctcgagaagacgtatatatggaatgtcaacgcagtcgtggcagagatagatactgcaaaggactccatacaagcatcttcatcggggccaaaacagtcacaaactgtgctattgcaaggcgcacccagtggcattgaagacactcctaccaaagcctctagcttggtcatgccttcaaccctgctcacgccacaaagttcccgcaaccagtgtgcaagataa

SEQ ID NO: 7435 - DNA, 1694 bp, Zea mays
  Peptide Sequence Number=SeqID_50810
atgacattggtcgacaacttagagatacattgggaaatcctaactacaacataccacaggaacaactcatgtccctcctgatacgcaaactctcagatgcctttgctaatagtgacgggaacataaatgactatggtctgccaaagatagatgtccaatgcgcttttgtggatgacaacagattaattaatgatgaaattgaccatgagccattaatgttgtcgatgcacgctgattccttggttacacaattgaatgcggaccagcgaaccgtttacgatgccatacttgggcgtgtttacagtaactcaccgggatttttctttgtctgtggccatggtggcacaggcaaaaccttcctatggaacactataatcgcaaggttacattccgaaaagaagatagtgcttgcagtggcctcctctggtgtcgcatccctacttttgcccaaagggcgcactgcacattcaagatttaaaataccattcaatgtaaacgatgctagcacgtgcaatgtcaataggggtaccatgcttgctgaacttatacaggtgtcctccctcattatatgggacgaggcgccaatgacccatcgttggtgctttgaggctttagataagacaatgcgtgatattctttcagaacatactccttcaaatgcgctcctcccgtttggtggcaagcctgtagttcttggtggcgattttcggcaaatactacctattgttagaaagggatctcgctcttccatagttaacgcctctattacaaactctaatctatggcgccatgttgtcctccttaggctgcacaccaacatgcgcctttttgatccctctttgcaagtagatgcgcgaaacgagctcgacatgtttgccaaatgggtactatctgttggtgatggtaccttgcctgctgaaagaagagcgagcgagcgtgaggctacgtggattacagtccctgaagatttgttgctccgagttgagggtgataaggtagctgcgcttgtatcaaaagtatacccagattttctgttgaattacatagatcccacgtacctttcctcgcgtgccattgtttgcccaaataatgccacagtcgatgatgttaacaactacattctctcgcttgtccctggagacaccatccaatacctgagttgtgacgttatagcaaaatcatcggaaaacataccagacttcgacgtcctctaccctaccgaattcttaaactcaattgatgcaaacaatttccctacccacaaactcgagctaaaaaagggtgccattgtgtataatggcacacggcttcttgtcactcaactcggtcaacgcatcttgcactgtgtagcgcttacaggatcaaatgttggggaagaagtcttaataccaaggattgccctcaacactacagatgtgaagtggcccttcacacttcagcgacgccaatttccagtacgtctgtgttatgcaatgacgataaataaaagtcaagggcaaacgttatcaagagttggtatttacctcaagggacctgtctttacacatggccagctttatgtggctgtctcccgttcaacgtctagaaatggacttataatcctgattgaaaatgaagatggctcgtgtggctcacagactcggaatgttgtttacaaggaagtccttgctgccgctgatgcggctgccacttag

SEQ ID NO: 7436 - DNA, 381 bp, Zea mays
  Peptide Sequence Number=SeqID_50811
atggccagagcaaaatacttgaccaattgtgcaattaagctggggaaaatggtcagggtagatccgatttcatgtccgccgctcggagaacccagccgttgccccagtcggccggtccagaagctcgtcggagctcagccgcgtgcgagcgccgtcggggacttagaacacgaagaagaagaagtcactgaagacaggacaccaccaccctcagatcctcaagcaggcaactgcttttacttcgatatttgtggatccgagcaggactcacctgttaacaaaggcaagccccggatccactttagtaagcatttatgcaaaacagagtctttgattattgagaagccttaccttgactccctaaagccagcatacccttga

SEQ ID NO: 7437 - DNA, 1149 bp, Zea mays
  Peptide Sequence Number=SeqID_50812
atggggcatcatcacatatctaggtcgtattttcgacagacagatataaaacagagtgggaatgcctcgattgatatcatgtccaagttcttcaagctgatggtggttctacaattaatgaatgatttgaaccgaagtgttcaagatgccgctatctcttgtattgaggcttatactgtgcttgaggttcttcgacctctctataattcccctaacatactagaacaaaagtttagtaagatcttcactaatcactacatagtgcagcactgggctgttaatattttttgtaccatgtgtcataagcatgagatgttgcctgtagagtaccaatgctttattgcagtcttcctcctcgtccgccccaatgtcggcaagtcagccctcttcaacaggatcattgcgtctctgcgagctaatcagttctgtgagcgtctccctagccccaatggcgagtcaactgttgattgccatcagatctcaaagatgccaaatcttgcattcaccatagcaaacaatactttcaccttaacaccagagcagtacatagtgaagttggagcaagcaggacaaactatctgcatcagtgggtttatggcatttgacgtagcgcctcctcgtggtcctctctgctacgctgaacatatctgtactactcttaagtgtgcaacgagggcgtccaccgagggcatcaccgtgcccccgctcgccccctccacgcccgcgcctgtctgcgtctgcccccttcgtctccccgcaacggccgcgtccccaccccagatttccgcgctcgtgagagccgcccagagattgctcccctggtcccccctctacccccggccctacccccgtcctcccgacacgaaccccacacacacatttgcttcgcccacccacatttgtgacccccgccccgcagcccctgccccagcacagaagcgccacaaggatgacggcggagagggtgatcctgcagacccgcgacgacgtcatctatggggtcttcacggagggcggcaccgcaatgatggcggcgaggaggccgacctcaccaagcccatccagttcatctccaccagcaagttcaccctgcagatttccatctccaacacgtcggcgaagaagaagctctacggtctggaggagtaa

SEQ ID NO: 7438 - DNA, 406 bp, Zea mays
  Peptide Sequence Number=SeqID_50813
atgactgccgctgctcctgcccccgcatggcaccatgcgccgtcacagtggatggtccacaccttcactgcggacatgtccggctacgttactggcctggtgccaaaggttcacaataagccaaaaaaagaccaagaaaaagggttcaaactaaagagcaaagggacaaccgaaggcaccctggtctggcgcaccggactgtccgaggcactccgctataattcaccggactgtccggtgcaccaccggacagtgtccggtgctccagaggagagctactctggactcgccagcttcgggaatccactccgctataattcaccggacatgtccgaggagcagagcacgcgcgggtggcacaccggacagcctacagggtatgtccggtgcaccaccggacagccag

SEQ ID NO: 7439 - DNA, 312 bp, Zea mays
  Peptide Sequence Number=SeqID_50814
atgcaggaggagctgctggtgctcccgaccattgtggaggatttcatgtccttcgcctccctcgtcacctgcgagggggccatgaatgcgttgtcccgcgagggctgcaggcactacgaggtcttcgaccaatcagacgagaactttgaacgagagattttcaaggtcgatgaccctatgatggagcgtgctgaggacgtcgaggacttcggagctctagccggcgtgccgctcgaggttgcggaggtcaaaccggtgctgccctcggatgcaggttcagggttttgggcctgcgcacgcaaccgctactga

SEQ ID NO: 7440 - DNA, 267 bp, Zea mays
  Peptide Sequence Number=SeqID_50815
atggaaagtacgtcacaacagggtaaaggactaacaagtgtgctaagtgttgaacatgtgctaaatgcaaagctaataaggttcaacacaagtaaacagacaaccgatcaaaccaaggttggaagcaagaagagcttcgaggtaccgagtgcacgggagaaagtcaaggagaccaggaacccaaaggcaggggtgaagaaggagacttgcggaatcaaggttgatcaagttaagaagagttatggtgcatcaaggaacactacataa

SEQ ID NO: 7441 - DNA, 798 bp, Zea mays
  Peptide Sequence Number=SeqID_50816
atgactgtgatcaaggcagctggagcggagccgtgcggagacggcggcgcgtacggcgcgaggcggcggcagtcgctgcgggcgcggtacgcgtacgggttcgtcttcttcgccaccaaacctgctggcctggttcgtcagggactacggggcaagggcgctccgcggcttgcatcatgtgccggtctgcggagcaggggactccaagtgcttccagtccggaggagtgcttcgagtaagcttgggctgcttcgtatccttcatctaacaagcacgaatgttaagatatttttctgggtgatgtttgccacaacatttggaactcgcaagctccatgaagctcgtaattcgtggcattctggatgttggattctgaagtctcttgtgtatgccatgtcgatcggcatcccatttatcatccctaacatcttcatccaattttatggtgaagttgctcgactgggtgccgggatatttctcctcctccagctcataagcatgctccacttcatatcatggtgcaataaacgatggatgccagatcctggatcaaatcaatgttacttcagtcttcaggtcctgaagctagaactgaccatggcgtgtcacccttatgtgattctcagtgggttgtttgggttattcttgtcaaccatctcctacattgcttcgtttgttggaattggcgtgctgtatgttctgtatgtccccaactcctcttgtgcgttcaacatcttcactattacatggacggcaatcttggtgactataatgatggcagtatcattgcactccaag

SEQ ID NO: 7442 - DNA, 303 bp, Zea mays
  Peptide Sequence Number=SeqID_50817
atggcgcgacggtggcccggggcgacggtggcggacctccgcggctgcacggggaacggcgacgaggggggaagagggtctactggagcgcaaatgggggagggggagagggcgagtggggctcggggctcaagtggccaggggcaggtcagttgcgagctccacgcgcgacgtgggcgcggggaaggcgggcgcgcgcagctcggcggcggttacgcggggacgacggggctgacagcccgggcccgcgagcagagagagagagaagagcggaggcgggtgcgcgagaagcggctgcgctga

SEQ ID NO: 7443 - DNA, 916 bp, Zea mays
  Peptide Sequence Number=SeqID_50818
acacactgcacgtaagtcggtgattcctttcctgccgtctcgacttgcggagcgtcctctgcaccgcaccgtgtctggtcagtcgagtcacctggagaggctgcaccaccgcctgcgtgaggagcaggaacgccggcgccagcacagagagcagcagggctcttcctccccaccccagcaagaggtggaatctgtgaggccccgttcctctgtggcccagctggaggcgccccctgcaccaccgcgggacgtcccggctgttggaggagctactggaggagatcctggaggagaccccgacgacgacgactcagaccacagcacggagtcttctgagccgcaggaggcggaaggatgggtcgcccgacccatcacccgtgacgccgctcgcggttgtcacttccacgacgcactcgacaccttgctgtgccaggctttcgaccggcacacctggtcgatcgagtatcgttgtgtagtctaccagcacagtcgcgggaggtacccggaccgctgggaggctacctgcctagttcgccgtccggaggatgacctccggggtgcggaggccgtttcggagcactattccatctccgtgagggacactgcagaggcggctatgcaggatgcagcacgacagagtgtggttgtctcacctgttggtgaggctaaccctaggttgagcagcacagtcaacctagtcgcagtgcttaacactgagctggaccactctctggacgagctaagcagggctcgaacggagattgcggagttgcgtgctgagttggcagagcgccatcaccaggagggtggttcccccgctcctgttgggactcagcacccttaccgctcaccgccacgtggtcaccacacttatggttcccctgtctgtaagaccaggatagatctggatccttag

SEQ ID NO: 7444 - DNA, 1131 bp, Zea mays
  Peptide Sequence Number=SeqID_50819
atgggaggctccgacgaccacgcccgcaggaagccgtccctgccatggacggtgcgcgtccagctggccgcgctcgccctggtgcaccgccgggacggcagcgtccggcgcctcctcttctccctcggcgacctcaagtctggcaccacgtctcgcccgggtgcctcgggggtgcgctccgcggacgtcaccatcgacgcctcccgcggcctgtgggcgcgcgtcttctccccctcgtccggcgcggacgcggacgccgcggcggcccccgttcccgtcgtcgtctacttccacggcggcgggttcgtgctcttctccgcggcgtcccgcccctacgacgccttctgccggcggctctgccgcggcctccgcgccgttgtcgtgtccgtcaactaccgcctggcccccgggcaccggttccccgcggcgtacgacgacggcgtcgcggcgctccgctacctcgacgccaacgccgactccctgccggcgcacgtcccggtcgacctctccagctgcttcctcgccggagacagcgcgggcggcaacatcacgcaccacgtggcacagcgatgggcggtggccgcggtgtcgcccacgaacctccgcgtcgccggcgccgtcttgatccagccgttcttcggcggggaggagcggacggcggccgaggtggcgctggacggggcgtccgcgctgtcggtggcggcgacggaccacttctggaaggagttcctaccggagggcgccacacgggaccacgaggccgcgcgcgtgtgcggcgagggcgtcaagctcgccgacgcgttcccgcccgcgatggtggtcgtcggcggcttcgacctgctcaaggactggcaggccaggtatgtggaggcgctgcgcgggaaggggaagccggtgtgggtggtcgagtaccctgacgccgtccatggcttccacgtgttcccggagctcaccgactccggcaagttcgtggaggagatgaagctgttcgtccaagagcacaagtccaccaacaccaagcgtgccgtctaccaaggtcagcgcagtctgggtgcatcggactgtccggtggtgcaccggacagtgtccgccaacggctcccaggcgccaacggtcggcttcgccaaataa

SEQ ID NO: 7445 - DNA, 66 bp, Zea mays
  Peptide Sequence Number=SeqID_50820
atgggggtggtcgccaacgatgtggtcggggtgcggggaggcgccagcgagggggccatcatctag

SEQ ID NO: 7446 - DNA, 297 bp, Zea mays
  Peptide Sequence Number=SeqID_50821
atggctacaaagttccacaccaagagctggcaacacactcgattcaaaggtcttttctctattgcttattgcagctacatttttacagtaatccgtatttctcacggtgctgcagcttacaatcgcgaagctgcacgcaagagcctgctgcgaaagaagggaataacatcagacaatttgtcggtatatagacttttagcgacacacaagctgttggcacaagaatatgtcgacaaaaatttgtctgacggcaaagataggtctgtcggcaataacataaacattgtcgacatatag

SEQ ID NO: 7447 - DNA, 939 bp, Zea mays
  Peptide Sequence Number=SeqID_50822
atgaccatgaggcatcgtcgcagcagtcggagtcatttttgctgccccctcccgacacctgtaaattttgtatgccttcacgccgtgaagccacatttgcggccattggcaatggctgtatccactgtttcgatccatatatttggtgatgtcccttcttcacctcttgttgggctgcttcaggacaaaatcaataactggagggagacatctcttatattgacatccatccttttcgctgcagttgtgttctggttcattggtgtgtctgaggctgcacaagatgctcttgatcatcttttcaaccaaggccacaatctcgtaacagaaaatgagatttctgatacctttactaggctggttgaaaggctaccacaagtggtacttggaagcgaggagacaaccacactttcacatgctaggatgttgttggctctgaccttttatgctggtcatagctcacagttttctggttccatggacaagctaattgtatcaaagccactatctatcgggtatctttattcagttgctgagttgaagagtggcgcctattctaaagatacaactaacatatctctgcatgccacgtcaacatttgcagcctccaaaatatctgttatccatgataatgctttgccaaattcattacttggtacagttgaatatgagttgccccatgtgcctccatggtttattcatgctggtatccagaagctttatggggttcttgctggaataattagacttgttggcctatcaacagtgtcagtgggctggtgtggtctgcttagcagcaggtcctacatacatgatgacgacccgcttgcatgtgtccactctgttgctgactcctacacaggcatggcctttcgatgctttcgagctctgcttagcagcaggtccatgaaaaagaccaaagttgaagaccacgcttga

SEQ ID NO: 7448 - DNA, 405 bp, Zea mays
  Peptide Sequence Number=SeqID_50823
atgaccgaggataaacaaaggcaaaagctcaagcaaaagccatcaagaaaaatctccaacacctacatcaaaaaggtggacaaaaaggctgctacaccatatttgatcaagaagaaaaagaatggaaaggtgatagcaatcaaggccgacaagcaagccaacaagggaaagggggccaaacgcatctgggtgccaaaggaaataatttcaactatgaaaagcaccaagaaggccttcgtcaaagtgccgagacctgcgaagggtgtccctgcccgctttgtccctgtcggaccagcggctgcagcgaaggcctcgagcgaagggtggcgtctttgccttcgccccaacatttgccctccgagggaccagttcgacaaagtcacctggtgccgaagacgtcgttag

SEQ ID NO: 7449 - DNA, 294 bp, Zea mays
  Peptide Sequence Number=SeqID_50824
atggcttcaatgacgataacgaagttcgtagaagataggttgatgaatgtgctcacctgtggactcacccgagaaccgagcagggaacggcctgatggcatcgcggctgctcgcagagggtttgcggctaacccccttaacaggagcgttgatatgcacttggtgaaaatgtcgccgactctgatcttgactaatttggaggagttggaggttgccaaatggacatgtgcaagaggaaagaatagcgagaaaaggggaaactactctatggccatcgaaaggcaaggggaatga

SEQ ID NO: 7450 - DNA, 120 bp, Zea mays
  Peptide Sequence Number=SeqID_50825
atgtatggtttacaggtggtgacgaggatgatggttatgattatgcttatggtactggttgcctttggtgcaatctatgctcagtttgatttatattatgtaaatggctctagtctgtaa

SEQ ID NO: 7451 - DNA, 495 bp, Zea mays
  Peptide Sequence Number=SeqID_50826
atgacagatgcctctgtacctggtgatcaataccagcacccaacacaagacttccctatttacttagccaagggcatccaataccaacctcgtggttgcactgtttttccagggtgtcactcaacaaaccgtctgttggggaccttcggcatccgaaggtatcttcggactcaagtcggcatcacagtaaaccagaataatacgaaggttggtgcagcgccgaagtatttgagaacaagtccccaacattggcgcccacctccggtgaactcactccactctgagttttttgaaacccttcgggcgatcataaaccttcgttatgcgccgaagaaagcttcagcttctggggctgcagcttctgcaaccactggacacaatcaggatgaggatgggggagggggagggggctcgccggtgacggggacggggcgaggcggccggcggcaggggcggccgagggcgacggttggacagggggcggcggcggcttag

SEQ ID NO: 7452 - DNA, 549 bp, Zea mays
  Peptide Sequence Number=SeqID_50827
atgtggcatggcgccctgggcgacttgaggaagaagatgacacgaggactgttgaacttcgcactgacaaccaggattagatccattgatgggatgcatgggtcgtcggattccgatggacgctcccgattaaaaagatgcataccccttcggcgtttaaaacctgggccaccggatgtttatccgtgggctctagttagatcgtggcatggcgcactctggcccgctgatccccgatcgggcagcccacattgcgcaccgcagcgaggttacgagtcatctgaagatcatcgtggtacctggaatctcaagtcccaggcaagttgtgcccttgatcacttctatttacccaatgatgttcctgttaatcattatgatctgcacagtttgttatttgtcgttcatgataagatcattatgttaattggaacatggagcgaccacccgggaaaacagtgctaccacaagggtgagtgtaaaactggtatatcagccgtgctcatggtcatgagcggctcagaccctcacatgagtaatttatggaactaa

SEQ ID NO: 7453 - DNA, 240 bp, Zea mays
  Peptide Sequence Number=SeqID_50828
atggcggggcctgcgcctcttgaggggccgactcgccaccaccatggagaggcgaaggatgcgagagtactcctcgacgaagggtcccctgagcaaagactatacgtgagcgaattatcaaaggtggtgtccacaactcagccaagcgttattatgagagtgaaggtggatgtgctgctacttcccacttcactggatgagcaacaagcacctgcattgagtaatgcaagagtgagatga

SEQ ID NO: 7454 - DNA, 417 bp, Zea mays
  Peptide Sequence Number=SeqID_50829
atgaagaagacgttagaagatctccgggcagagcatcgcatcggggtccagcgtatcgccgcatgggtcgatgaggcgaactcggctctggtgccgctgggggtgagccccatcccagtgtcgaagcagtcggtgtccatctctgacgtgctcccggtgctggattccgctgccgaccgcctccgatgcctagatcagatccttggcgcccgcctggaggctgagggcagcagactctgtcgggcggtgatagagtacgtcctgacgtgcttccggagctacgacccagccatctccttggggttggtgatcgccggcccagtggccgataccgaagacgcccccccggggagcgtacaagacactgtagacgtggtggccaagcgcttccagcgggatcccgctgatgacgagtag

SEQ ID NO: 7455 - DNA, 351 bp, Zea mays
  Peptide Sequence Number=SeqID_50830
atggcggcgctcgcgggcccgccggctcccaccggcgcgtcgtcgtccacctgtccgccgtggatcggcctggagccgtgcttcgccacgccgttcgtgtcctgcacaaggccgtgctggcgtcttggttggcctgccgaccccaagactcaggggtggatcgtccaactccacgcagggaagacccgcttctgccacaaggctgcggaccgtccgcaccgtcgtagagagcccgccaagtggaacaaccctaaggataactctgatatctcccctggcaatatcatcgagccgactatggagggcctatcgactgaagaatttcagaagctggaggacatcaggaaatag

SEQ ID NO: 7456 - DNA, 381 bp, Zea mays
  Peptide Sequence Number=SeqID_50831
atggtagtgaaaaacgagagctccgagatcatccagatgctcaatgccaagttcaacgacattgctacgaacctcgggctggacctctacctggttcacctccgggcctccatcgacaaggtcaatgagctggtctatgatgccatcagcaacagtgtgttgactagctacacctcgaccttagggagatcatcgacttctatgacagggttgaatatgaattaccgagcaggaaatatgttcaagttgcatgcttgcgcagtctgccaattggatatgaaacctggtgagagcatctctgtccaagtttgcatcttctgtgacgattgggcacttggattgttttggttaactattgcagcggtacagatcaagagttga

SEQ ID NO: 7457 - DNA, 456 bp, Zea mays
  Peptide Sequence Number=SeqID_50832
atggcgcctcctgttgacgtggtcggtccgtgccctaggttgggcgatgtggaggctcctccgaggtcgaggtcgagtctgtcttccgaggctgaggtcgagtctgagcccctaggtcgggcgaggcggagaccgtcggcggaggccagggctgagtccgagccctggggtcgggcgaagcggagttcgtcgtcttcaggggctgagcccgagtccgagccctggggtcgggcggagtggagttcgtcgtcttccggggctgagcccgacagtcggagcggcgcaggcggcactgtccttctgtcaggccggtcagtggagcggcgaagtgactgcggtcacttcggctttgtcgactggaggacgtgcgtcaggataaagctttgtgctgatgggggttaccagctgagaattaggaaccttgagggtacccctaattatggtccccgacagtag

SEQ ID NO: 7458 - DNA, 1050 bp, Zea mays
  Peptide Sequence Number=SeqID_50833
atgctggccgtgctgccctccctggtgctcacctctgccccctgcgttggatggccggttgctcctgccctaggtttgtcaagcgctaactctgctccatctatccctgctcgaatcttgctgattggccctgcgcagattatactcatgcccgaccgtggtacaacagcaacagccatgaaaccccatcgtgtcgcgcccgccctcgacgtgttcgacggaatatcgcagcacgtgccgacccgatctgcagccctgctaccgtcgacgttgtgcctcgcgcttcaccaatgcgatgaaatgtctgagcgaatagacgacatgcgacccgagtttgattctgccaggttgtttgatgtgtattttactcattgtgatttagttgatgatgtgtttacagtgagctacatggctgagcgcattgtaggtcaaggttcttttgggattgtcttccatgcacttggagttcttgtagatagactcgtgaaagctgctgattcagttttggtatgcctatcgaaagggttaggcgcacctgtcggatcagtgattgttggtttaaaggccttcattgacaaggccagaattctccgaaagaccctaggcggtggaatgagacaggtgggagttctttgtgctgctgctcatgttgccgttcgtgacactgtgggaaagcttgcggatgaccacaaaaatgctaaagctttggcagtttgggtattgaagcttttatgtcttgttgggttcattttcttagagggactgaagaaaatcgagcagattacagtggactcagcttcagtcgagaccaatatgttcaagctctgcaaggtgaggtctgttctgtttggccagaaaggcatcccctacctgaacacctacgatggccgcaccatgcgctaccccgaccctctcatcaaggccaacgacaccatcaagatcgatctggagaccaacaagatcatggacttcatcaagttgtatttgccctttcatggacttcatcaagttatatacttagttaggctcaatgttagcacaaacagttga

SEQ ID NO: 7459 - DNA, 219 bp, Zea mays
  Peptide Sequence Number=SeqID_50834
atggatgttttgatgattaggaaccttggagaggaccagcaaggacttgcaaaaggcctaggtgttgaggaggagcagcaagggcgccacaacaggaaggagatcaagtccgactcagctgcgactccatctcgggaattagccctcgtggcgaggtcaatcacgcagcacacgattgataaccagaggagaagtggtgctgcgattgcggggttctag

SEQ ID NO: 7460 - DNA, 306 bp, Zea mays
  Peptide Sequence Number=SeqID_50835
atgcgcagatcggcaaatttattgccgatgtgcgtgggaggctgtcattgcccaaggagctgttcttcagctggcaaggtttcccatgtcggcgtgatgatattgctggtggaaacttcagagctatcctttgaaccggccattgagggccgatttgataggtctatatgtgttttccccagcggagtcgccaaaaagtatgttgacgcctttttcgggcgccaagcactcaacaagaaccaatggcagtgctctctgcacaggcgtggacggtcgcggccaggggccgaatggtccgcggcctag

SEQ ID NO: 7461 - DNA, 609 bp, Zea mays
  Peptide Sequence Number=SeqID_50836
atggaactgctcgagataagatccaaagagccgtccctccacgtgctgcttcttgctaggaacccagacaaaggcagacttcagttccactgtgttgagaaacatatccacaattgccaacactctcatggtgcaactggtcagctggacacgccaaagaagcggtctgctgggccagcccgggtcctcagtgcatatatacattctattagagatgaagagtatatacttcatagagaaggtggaaaggtcttcttggagagcacgttcatttccagcttgcttaagcgtgatggtgatcctaagatactcttgaattttaaggaagacacacttgaaaacagggtggacaactatttacaagctgacatagtgttcattccaataaacatagaaaattttcactggtacctggcaattgtcaatgctaaaaaaatgagggtttcttgcggtctatggatggtgaactatatggaatattggacagggtcttctctgtctaataacataactcagaatgatataacaaagtttagatttaagctacctacaatattgtggaactcaagattacacacaaagaaaggacatcaagagactgaccattag

SEQ ID NO: 7462 - DNA, 309 bp, Zea mays
  Peptide Sequence Number=SeqID_50837
atggcgcttcctgttgaggtggcgggcctgtgccctaggtcgggcgacgtggaggctcctccgaagccgaggtcgaagacctgggcggagtccaagccctggggtcgggcgaagcggagttcgtcgtcttctggggctgagcccgagtccgagccctgggtcgggcggagcggagttcgccgtcttccggggcttagcccgagtccgagccctgggtcgggcggagcggagttcgccgtcttccggggcttagcccgagtccgagccctgggtcgggcggagcggagttcgccgtcttccggggcttag

SEQ ID NO: 7463 - DNA, 717 bp, Zea mays
  Peptide Sequence Number=SeqID_50838
atggaaggccgctccgctaaaattcaccggactgtctggtgtacaccggactgtccggtgcgccagcagagcaacggctacttcgcgccaacggtcgactctgacagtgtacagtacacgcagcaggagtcagagcagaggatcagaggggcaccgggactgtccggtgctacaccggactgtccggtgccacatgaggacaaagcctccaacggtcgaccagctccaaccccaacggataggatgacgtggctggcgcaccagacactgtccggaacaaacgatgattcatatcaaaagctcaaggaagaaaatgagaggctgaagatgagcttgacacaactaaaagggaagtgcattgctcaaccttctcaagataaccgtgaccacatggtgaagaagcttgagatgggaacaaccgtggcatgcactaaaacccttgaggaaaatgtcaaggatttaaggattgccaagaggaagaagcaaaagatgaaattcaatacatcctccaaaagcctcaaccacgcctctacaaaagccccctcctctataaatacagaggtcggcctgcccgagcctagacaactcctaggatctctcctccccgatggggtccctcccgggagcgagatccaggcgccgccggcgaccttcgccaccccctgctcacgcgcggaccgtccggccatcaggcaagaaaccctagccctgcgctag

SEQ ID NO: 7464 - DNA, 300 bp, Zea mays
  Peptide Sequence Number=SeqID_50839
atggtacagtgctctattgtggatcagatcggccgcggcagaaaaatctcaccgccggtgactccccgccgtgattcgtgtcactggcgtcaagattcaaactcgtggtggatggataacgtcgcgaggaaaaggatctctgccgccgaaaacgaagaagagatcgaagtaactgaagagaagacaccaccaccttcggaatctgaggccggaaattgtttctactttgatatctgcgggtccgagcttgactcacctactaacgaaggcaagccccggtgcatttgccaccttccttga

SEQ ID NO: 7465 - DNA, 786 bp, Zea mays
  Peptide Sequence Number=SeqID_50840
atgatggaaaatttcggcagcaaaacagtgcaaatagcaatgaatgctgtggtaacttcacaactacttgtcagtttatatagtgctgcagtggaccgcaaggatcaaacagtaactctgcaaggtgggaccgacacgcgctcggaagtcggatcgtttctccgcaacgagctcagggaaggtgttttttggaccttcggcttcccgaagctgaagaggcttttttcacgggtcaagctcgttacgaagaacgatctagcaccgcgaaaggggctactgttggggtcgtgcttcggtgcgccgaaggtttcacacgaagaagcagcttcggctgaagtcgtctccaagagatggccgaagatggctcatcttagacacactgcacggaagtctgtcatccccttcttaccctcccgtctcgcggagcgtccgcttcgtcgtccagtgactgcaggagatagagtctatgaggagctgctcccctgtgctcccctggaggcgccccctgcaccaccactgagcgcccccactgctagagtagctgctggaggagacccagacaacggaggtggtgacgacagctcgagccatgtctccgacttttctgctgaccaggagccggaaggatgggttgctcgacccatcactcgcgacgctgctcgcgggtgtcacttccacgatgcgctcgacaccctgctacatcgaaaacttgaccgacgtacctggtctatcgagtatcgttgtgtggtcttccagcacagtcgtggggtctacccgaaccactga

SEQ ID NO: 7466 - DNA, 318 bp, Zea mays
  Peptide Sequence Number=SeqID_50841
atgtccggtagccgttggcgccgaagtagccgttgccccgcagttacaccggagagtccggtgaattatagcggagcagccgttgcaaattcccgaggctgtcaagttccagagccgcgtcctcttggagcaccggacactgtccggtgtacaccggacagtccggtgaattatagcgcgccggctctgaaaattcccgaggctgaggagttcagcgcgaagtcccctggtgcaccggacactgtccggtggcacaccggacagtccggtgcgccataccagggagcctttcgggaagcctttagctctctactttga

SEQ ID NO: 7467 - DNA, 789 bp, Zea mays
  Peptide Sequence Number=SeqID_50842
atggcggcaaccgcgggcggcaacaagatccgcaacgccaagctggttcttcttggggacgtgggcgccggcaagtccagcctggtcctccggtttgtgaaaggccagttcgtcgagttccaggaatccaccatcggcgcggctttcttctcgcagaccctggcggtgaacgacgagacggtcaagttcgagatatgggacacggcggggcaggagcggtaccacagcttggctcccatgtattaccggggcgctgcggctgccatagttgtctacgacatcacgaacgcggcctcttttacgcgtgcgaagaaatgggttcaagaacttcaagcacaaggaaactcgaatacaatagtggctcttgccgggaacaaggctgatttgttagatacgaggcaggtgtcagcagatgaagcaaaggcgtatgctcaagagaatggtctcttcttcatggaaacttctgccaaaacagctaccaatgtgaacgacgtgttctatgagattgcgaagaaactgcttcaagggcagcaggttcagaacccacaaggcgggatggttctcaaccagagaccacctgagaggatggtttctagatgcaactcttttatcagtttgatgatcagtggggtgaacccaaacgacaatgttcagatgtgcatcagtttgatgtacagaatttggatacatatctggttgtatcctaaaagcgtgatgcgcatgcgctacataaacggaggcatcatccaggcagttgctcatgctgctgatttgattcaaaacgagtaa

SEQ ID NO: 7468 - DNA, 669 bp, Zea mays
  Peptide Sequence Number=SeqID_50843
atggcgcctgccccgcctggctcggcggcctcggcgcagtccgcagctcgggcgctcgccatggcctgctcgcggtcggcccccagctcgcccgtcctctcgtcctgtccccacggcccacggcctggagctcggccggcgtgcctagtgcgcggccgtggcgaccccgcgcggcgtgccccagccccaggcgtggcccggcctctcccctcttcgcgcggtgcggcgcgacacgtccgactcggcccagcgtgcgtccatggcgctcggcgcgaggcgtgtccagcgcggatgcccttcgcgcggtgcgacccctacgcgatgtggggcgcccctggcgtcctagctcgcccgcagctcacctgcggcagcccgtgcgacttgctcgtggcggcctgcgtagcgcgtggcagcccgtccgcggcgtgcttgcagcagtggctcgctcgcgtgcgcagcagcggccagctcgctcgcgtgcgcagcagcggccagctcgctcgcgtgcgcagcggcggcccgctgcctcggccagctcgctcgcgcagcctgtttgtccgtgcgcgcagctcggcacggcgcgacttgggccacacaaggggatcttttaatttgcctgattatgcacgccacgccattgacgtcgtccaaatcctgattcttgtatag

SEQ ID NO: 7469 - DNA, 417 bp, Zea mays
  Peptide Sequence Number=SeqID_50844
atggggactcacatacaagagacaaccctaggtgctaggaggaggcctgcgccagatttttgccaagattcgtacgcttgcgatctcggcgagctgttgaacaagggcagaagaacacttccacgtgttcgacgcgctctgagcgcgccagagcacgcccagcgcccaaccccgcgcgccccgcgccgcgccgagccgcgctcgtgtctcctgctcgcgctcgcgcctataaagcccactgaagcttcaaccgtactcccccgcgtgctctccacctcaccggagccagagatcaccgacgtttgccctgcaaacggcgtgcccgcggccacccgatccctcgccaccgtagaccgaccagcagagcccttcccagccacgcccgaccctcggaagagaccatgcatgcctcggtga

SEQ ID NO: 7470 - DNA, 729 bp, Zea mays
  Peptide Sequence Number=SeqID_50845
atgacgaaggtgatgcttgccgaaagtgttcaagactcaaaaaatggaagtgagttcaccggaggtatggcccctcctgtgttcgatgaaatgccccctactacagtgaggatgtcattgcccttccaaggtgctttggaggttctgcgcctagctcatggagtggggaaccagatgcccaacgattgcaagcagaatgttgtgcctgatgccccatggttgtttgttgaaatgtcacagcaagtaagtacatactcaatgtccagtgaaatgggtcttacagtggcatgggatggggagatgcaagctgaaactcacacgcatgaaggattactgcagcaacttgctcaaggtgaagaagccttaaaagaatcatctaagaaggagggtgacgttgaagatgaggccagcaggcctgacccaccgagtgaggcaaccgcagtggttatgaatggaggaaacagggatgagtttattcctgctagtgtggtcagtgtgcttgaggatgaccctaaggagcaggatgctaaaaatgttgatgctactagtgctgacggtatcctttctcaagaattggctccaaaatcaatcaatgaaactaatggtgcaggcgagattgtaggcgtcgctagggttgatgatcatgaagaagaggttgtgggtagcgacatacttgaggctatgacagatgaagtggatgaggaagaaggttgttttgaaggttgttag

SEQ ID NO: 7471 - DNA, 327 bp, Zea mays
  Peptide Sequence Number=SeqID_50846
atggggaggagggaccacgaggcgctctacttattctcgggcgcccaggtagtcgcggataccgcggcgaagaccccgcccgaacaccacggccccggcgagctcgcgaagtccgttgagccgcggcgattctgttgggagaggatcgccgacaggcgggacccacaacgcagtgaggaggagcgcggcgagagatttaccgagcgcggacaagcaagccctggcaagtgggtcccgcgtcgcagtgggagtgcgagacgcggcgcaagggagactgacaggtgggttgtcagattttcaaatgtatcaattggaatccaaaggtga

SEQ ID NO: 7472 - DNA, 77 bp, Zea mays
  Peptide Sequence Number=SeqID_50847
gtgaagagttcccagagatgccagcacaacctgggctccaatacgtggctttcatgcatcaaatactcaccaactga

SEQ ID NO: 7473 - DNA, 417 bp, Zea mays
  Peptide Sequence Number=SeqID_50848
atgaccgccccgcgaatcgcccgtcccgttgcattaactcctcgacagggcaagcgacacctttggcaggcgaagcgggcgtcgtttcgcctccaccatgacgactgcgtcaaaaaagccaccccagagcactcgggctccaagcccattactgatcaggggttcgaaggctggcccctcggaagggttcgacagctgccccagagcactcgggctccgcgcccactactgatcaggggttcgaaggctggtccctcagaagggttcgacagcatccccagagcacgcagagcgagggatgactctgggtacgtccgttacatggccgaggctcgggctatgctcccgaggctcgggggctgctctcgcaacccggctacggccaaaaccgttgacagcgtcaacaaaccagcctaa

SEQ ID NO: 7474 - DNA, 1206 bp, Zea mays
  Peptide Sequence Number=SeqID_50849
atggggagcacccgccttgccttcatcttgctgccgttggaggagcgcggcctcgcggggattggcgcccttcagccatcgctcggcttcaaggattttcatcatgcagcccggctgcattccctcaccaatgcttcaaggatgttcatcatccaggctagggaggggggcgcaccgagatggggcctgcctccgcgtgggccggcgacccgcttcttcctccagcattcgggggagaggggcatcctccagctgtgcggaggaggcatcctccagccatgcgaggggaaggcgaactgctgcttcttggacagggtgcagctgttcgtcctccacccgggcgacggtcgccggccgcactggggggtcgcacaacacgttgtacgccgcgagggcggtactcgtgttccgggacggtcccgttctcgttcttgtggcgagagcgggagtgaggacctgccggtgcgctttggggcggccgccacccgctggtacggtgttggtgggcaggtggccgctgacgtcggtgccgaggtggtggtcgccataggtgaggctgcctctgccgaagcggttgcttctgccgacgacaccgtcagtgtcacctatgctccgggcctctggctctttggctttaatggctggttctcgtcccccgtgaggggatgtgaacgagggcctttcagcagcagcgttagccctgaggccatcgctgcagctgtcttgccgcccgagatggaggtcgttgccgcgctgttggtgcagcggtcgccggcaagccacccgaagtttgttatcccgcaggccctctggtgtggaggttattcgtacccgcgggagtggaaccagagtcccaacattcggtcgctttgcgatgagctggagccagaggcagcggtgttggcgtggatagaggcagagtcagctcgaaaagaggcttcgtcggcccaggagcaggtggcttcccaggccaaggaggtgcagcagcggcggctggagcttggcaggtcatccgcgagcgggaccaaccccggagtcacgctgccaaggccacgagctgggctgaggtcctcgggggacagctggctgaggctatggagcggccaaccaagaatcgcttatccgagcgagagttacttttcgtggaaggtgatgagtgaggattctgttatcgatatagtcgagaagacacgaaagtcgttctag

SEQ ID NO: 7475 - DNA, 555 bp, Zea mays
  Peptide Sequence Number=SeqID_50850
atggctgggaaaagactgggcgtctattttcagaaagatcaggggctaaaccagagttttctccaagacacagatcacagctacgtggactgcgggttgttttcggggaaacataagggctctttaataaaaatgcgtcgcgaaggggtatcgtgcgccccagaccgtccgatctcaaacggagcgctcagattagttttaacttataccgaaccggtatattgcccacgacagaccatggagcagcggcgggcgggcgatacctccacaactcacgacgatggcgctcgacacggcatcccagggcttcaacaaggaggttgctgcaacgcggccctggtgggaacccagtggctcatccaccggtcacaaggcttgagggaggagggtgaagttcacggccaaggcgcgatgcggaaagggaatggcggggcagtgagcgcgcaacagcggagtgcaggcggcggcggagcatctaggtcaggcttcggctttatagtctggcgcagggacaatctcgaccgactaaactcagggttgaggcgagatttctga

SEQ ID NO: 7476 - DNA, 96 bp, Zea mays
  Peptide Sequence Number=SeqID_50851
atggagaaccacccgagaaaacagtgctaccacaagggtggtgaagagcaggtggtcgaagaggagccgcacaacgaggagttcgacttgatctag

SEQ ID NO: 7477 - DNA, 126 bp, Zea mays
  Peptide Sequence Number=SeqID_50852
atggccttttcgaaatgggagcagtaccaggcctcgctgaggtgccagtggggacagcctgacgagtgtggggtgtctgtggagtcccctgtggagcgtactgagctgggcgtggtcctcctctag

SEQ ID NO: 7478 - DNA, 378 bp, Zea mays
  Peptide Sequence Number=SeqID_50853
atgaaggacgcaaacatcaccgatggtgacgcgctcatagacgaaatggaggtcgatctcgacatgatttgtccgctggtgctagacgagattggtggagagaaaaactacaatgacattgtcgcggagacaacatgttgccgctttgacgaccaggagacacgaacatcatcatccatcaatggcgacgcgttcgcagacgaaatggaggtcgatctcgacatgctttgtctgctggtgctagacgagggcgagggcgggaggggaggctgtgatggccaacaaacccgcgccagggctggccgagtcgccggcatcgaggacgagggccaagacagccacccaggacccaacggcggctggacaggctacggctag

SEQ ID NO: 7479 - DNA, 1446 bp, Zea mays
  Peptide Sequence Number=SeqID_50854
atggggggcacccgtgttgccttcgtcttgctgctgttggaggaccgcgacctcgcgggggctggacccttcagccaccgctcggcttcaaggattttcatcatgcaacccggctgcattccctcaccaatggtcatccaggatgatgaccaccagttcggtggtggggagaagcaagccgggctgcggcctctgccccgccctcagcttcaaggatcttcatcatccgtgctagggaggagggcggggcaagtcgggctgtccgtcctccacccgggcgacggtcgccggctgcaccagggggtcgcacaacacgtcgtatgccgcgagggcggtactcgtgttccgggacggtcccgttctcgttcttgtggcgagagagggagtgaggacctgccggtgcgctttggggcggccgccattcgttggtgtagcgctggcgcgcaggtggccgctgtcgtcggtgctgaggtggtggtcgccagaggaggtttctccgccgatgagaccgtcggcgccacccgtggtcagacctccggctctttggctttgatggcttgtcctcgcccctcgagtgggggcgtgggcgagggccttcttacagcagtgtttgccctgaggtcatcgctgctgctgtttagccgtccgaggcggaggtcgttgtcgctgctggtgcggtggtcgtcggcgagccacctggagtttgttgtcccgcagaaccttcggctgctttgcgataagctggagccggaggcagcagtgtcggcgtggacagaggcggagttggctcgaaaagagacttcgtcggcccaagagcaggtggcttcccaggccgaggaggtgcagcggcggtggctggggcttggccaggtcatccgcgagcgggaccaaccccggagtcacgctgctgaggccgtgagccgggctgaggtcctcgggggacagctggctgaggctaccgagcggccaatggagacccgggctgtgagggcccaagcgcggtgctggcgtcctccttcgaggtggagatccttccgcccgtgttgccgtccgaggccgggccagattccgccgaaggtggaaacaacgccgagggtgctgctgctccccctgccgatgtccgaacctgcaggaacagtttgtctgaaaatcgcttatccgagcgagagttacttttcgcggaaggtgatgagtgaggattctgttatcgatatagtcgtgaaggcacgaaagtcgttctggcagaaaagttttcgagcgttaggactcgttctacagcagaatccctcgttcgagcatgagttacttttcgcggaagacctcgccttgatcgttggccagcttgtatgttccgggcttcaaaatcttggcgatgatgaacggcccttcccagggaggagtaagcttgtggcgccttcgggcgtcttgccgcagccgaagtactaa

SEQ ID NO: 7480 - DNA, 480 bp, Zea mays
  Peptide Sequence Number=SeqID_50855
atgggggacttgtggaccaacgtaagggctgatctcgcaaagatgcaagccacgctccagaaggttgagcaagggctgctgcaaatcaaggtagcagtgcaacatgagcagcaccggttggcgttgtccgcacggctccagacgtcggcggctgtgggcatacaagctgctgctcgtggcttccttgcacgacggagagcgcgggagatgcgtcggcagatgctcgaggcagccttggtcacggttgacctcggcacacgggggcgcgacctcaccctgtcggacggccatcagcagcggcatcgggccgctatctccaagtgcgagcatggtcaagtagactcggtatttgagcactcgtcatgctgcagctcgaggacgagctgcttgtccaggaggggtgtagtgtcagggcctaaggaggcccacggaggagctgcggtagcagcagcgatggaccctctaaggaggattagataa

SEQ ID NO: 7481 - DNA, 150 bp, Zea mays
  Peptide Sequence Number=SeqID_50856
atggcccaggccgaagctgccttctccgcagatgacacgaaggatccgtcagctgaagcaaccttgatgggcggaaaattctataatgatgtctgggttacagtggtggtggcggtggaagctgaggccaagaagcctgtgaatggctag

SEQ ID NO: 7482 - DNA, 1752 bp, Zea mays
  Peptide Sequence Number=SeqID_50857
atgggcggcggtggcggcaggctgctggggcggggcggcttctcgctctgcggtggtgggggaggtacctcgcgtgttggcgcgacccgtgtgccatggatggaatatgcgcggtgggggaggcgcggttttgaggatggaaaggagcgtggcgggcgggatgtgagggagtcgctgcagccgggatgcgaggaaaccgcggtcgaggatggaaaggagcgccatcgaaggaagccgcagctgcttgatttgaggatgggaaggagcgcagcgggcgggcgggacgtgaaggagccgctgcgggcgggatgcgaggaaaccgcggtcgagcgacggcgatggggaggagggtggcagaactgtgcaccactggttgtggacgcctacagcgttcacagccaaccgtggtgcacgttctgccgcatccagagcgtccaacccgcatccaacgcccctgccgcatcccgcgtccctcccgcgctcgtccctgccgcagcccccgcgatccccttcccacgtatggcgttcctgccacagcccccgcagccccgcgatcccgcctgccaagcatggcgtcgccacgaccgttgcccccgccgtctctctcgccccgcaggcgttccactctacatggaaggtgagccgccggcgccgaaatcgacggaatcacagcccgtgcatccccatctctcgcgctctacatggaaggcaaggcctcgccaaagccgctcgatctgctccctgaaagctggtgccccgctctcccctactctcgcgctctacatggaaggagttgctggagtccaaatcgacggaatcactgctcgcggacggcggcctcgatccacgctctcccctgctctcgtggtctacatagaaggaggcgtccacatcgtgcaccatgttctgcctccctctcccgtcaaccaagcgcgcccccgtcgtgaatcccgccgtgaatgtcgcccacctccctccgactccaaacgcgaggcttcaccagatcaagaacgcgccaagcccgacgctcccaggaccacaccgtccaagccctcgagcgaatccgcgatgcgcaagtcgtggcgcagcctcgcgttcgccctgctcgccgccacactggcgatcacggtggccgcgcttcgaccggtgacggagcacgcagacgccaaggggcggccgccgctgtgcgttcaaagtggccctgttcgcggacctgcatacgcgtggacggactggggccccgcgcaggacgccgcgtccgaccgcgtcatggccgccgtcctcgacgccgagaacccagacttggtggtgtacctcggtgacctggtgacggcttacaacctcctggtcccgaacgcgagcccgaggccggggcgtgccgtgggcgatggggactccccagacggacctcgtggcggcggagaccggcgcgaatcggttgctgtcctactcgtccagcgggcccagggagttgtggccctgcgtggagcatctcggagaagaaccgaccatgcgtcgtgccgctccgtcgggaggacggcgttcagtgggcgcatgaccgcgccggggaggacaaggtccacgtggttgtcatcgaggatcagcgctggcttttcgtcggcatctatgatggcttcaacggcccccgaggccccggacttcctggtcgctaatctctaccgcttcctgctgcgcgagctccgtgggatcttctacaaagaggccgatccgaaatccaagcgactgtgctag

SEQ ID NO: 7483 - DNA, 1116 bp, Zea mays
  Peptide Sequence Number=SeqID_50858
atggctaaaggtgaacgaaaggtacaaattgataatgatattattgatgatagtgatagtgatagtgatgatgaatttgcttcaccttcctatgatgaactagctgacttgcttaaggaatacactcaaatcattaggaagtcaaaggctaaatgtgataagttgaaagatgaaaatgaatttttaaatgccaaatatgacatagttgtaaaagctagtgatgagatgaaagaagaaaacaaaactatgtcatccactgtaaatgagcttaaatcctccctaaaagatgctaaggataagtgttacaagttaaatgaagcaaatagggagttgaaagacagactaataaaaattaaggaaggctatacaaagattaaaattgatcatgataatcttcttgttgcaaatgagcttttatcttgcaatacacatgaggctattatccctgttgttaagattgatgtagcaacctcatgtgatgatttgagccaagatgatcaaactagtcttcatgatgaactgactgaaaaagttgaagccttgacattagacaaccaaaaattgaagagatatttgactgatgcaactactagaggaaaggttgccattgagaacaatgacttcaacaatgagttggcagtggataatgaaaggcttagaaatgaggtcaagaaacttaagagtgaaaatgaacatcttccaacaagtgcgcaaaagttcaacaaaggccaatacctccaaaatgaattgctcatgaacaatgtcatgaaaaacaacaagagtggtattggatataattcttttgtgcaaaagaaagctacaaatcaatacaagccaaagcagactcataagcctatcaaatgctttgagtgtggaaaagaaggtcattttgcccacaactgcaaagccaaaccaccaactcccttgccaaagcactcaagaccatttgccttcaatgcccactattttctaataaaattagcaaatggaaaagtcaaagttacattcctaggtccaccaagcaagagtagacctagacaaatttgggttgcaaagtccttgattgagaaagtcactggtcctatgcaaaatagggccctcaaaattcaagcttga

SEQ ID NO: 7484 - DNA, 768 bp, Zea mays
  Peptide Sequence Number=SeqID_50859
atggtcatgatacttgtcatcctcaaagctagagggttgctccacatacaccacctccatgattggtccattaaggaaggcactattcatgtccatttgaaaaggcttaaaagaatgacgtggcaccaagctctagacttcatttctcttgaagttgttgagctcttcctgcatgaccatcacccaattcgaatcctacaatgtttattctaccccaaaaagctcaatagaagagacaaaggattagtgctcacaaaaattagcaatacgagatcgagtcgttactatcttgctgatgtcaccaaggatttggtccaccgaatgatctctttgtatggtggcacgaactttggctggaggtgcctgtggtacctcttcttcctccttgtattcttgttcatgtgctccttcttgatccatgtgaaagcatctaggcccctgagacaaatgacggcttggtggcgtttggagctcggtgatcaccttggagatcttgttggtgacctggctcgagattgcccacgaaagaatgaccttacgatttattgggcccttgggcctttcgtgaggtcttttactcttccagtggacccgggggatatctgtcccccacaagcccccgatctttgggttgattttgaggtaatcagcccaaagatcccaggtccagcttgcaggaccctgaacttcattgggtgcaccggaggtgcaccggaggtgcacccaatgggtgtagcccccgagcttcgagtagattttggaaaataa

SEQ ID NO: 7485 - DNA, 441 bp, Zea mays
  Peptide Sequence Number=SeqID_50860
atgggcaagaacaacaagcgcaagcgtgagccgactcctccatccgagggcttcggtgactcggagtactcagaggaggagttctcctctgagttcgaggggtccccggctcccattcctctgcgtgagtcgtttgacgattcagacgactcccaggggcttgcggcggagggctggacttacatccgagccgtcgagcgctccgggctcgagggctcggatgagtcggagtactcctcggacgaggaggactcgtccgaggaggacggtggcggcgatggcggggacgacgacgatgacgacgaaggcggtggtggcggtgacggtgacggcggcggcaggtgcagcaacggcggtggcaagggtgacgacggcggcagcagcaggggcggcagcggtggcggtggcagcagcaagggcagcaacaaggccagtggctaa

SEQ ID NO: 7486 - DNA, 492 bp, Zea mays
  Peptide Sequence Number=SeqID_50861
atggcccgcacccgcgcctataaagcccactcaggtgtcgaccacacttctccgcgcacgctgaaacctcaccggagctcaactcaccgtcgtttgcctgtgcacggcgtgtccgcgggccacccgagcccctgccgccgtagaccggccagcccagcctttcccaaccccgtccaaccctcggagacgagtgagcacacctcggtgaagctccccgagcaaggaatcgaagtctgcttcgccggagaggccagtccacggtcgccggagttcacaaccccgccggagtgcgtggaccgggttaagaaaaatagaaaagactgcaacctcgctgacggagagtacatcctcgtgccggagcaaggagctgctcaggaggtagccccagatccagcaccagagcctgcaccagaggacctgcctgccactgctttggaaggcaagccccggtttatgcataacctgttatttatgctattttactacacttaa

SEQ ID NO: 7487 - DNA, 582 bp, Zea mays
  Peptide Sequence Number=SeqID_50862
atgaacaagacaccggcactcaaggtgccattacaaatggaactccggttccacctccgcaggtacgaacaaccccacacgattggagggcctgcggagcaacagaaggccgatgggtggctcgccgccgcccgctccaacagcgacggcgacgacttctgctccgaggggccgaacagcagcagcgatgacctcagggcggatgctgctgccataaggccctcgcccacgccctcactcgagaggcaaggacgagcagaaggccgtagagttggaggtcagtccgcgggcggcaccgactatctcgtcggcagagaaacctcttccggctaccgtggcggaaggtggcaccggaagcggcgccgaagacacccggaccggagagccggacacgcggcaggtgccagcgccacgaacggcgaacgccctcccccccgatcgctgagggaaggagcagaccgctgcccgcgcggagaccgaccccaactcggcgcactcccctccccagcactgatgatgaacatccttgaagctgagggaggggcagagaccgcagcccagcttgcttctccccacccatga

SEQ ID NO: 7488 - DNA, 204 bp, Zea mays
  Peptide Sequence Number=SeqID_50863
atgacgaaggtcaaagcttgccgaaggtggtcgagtgagttcaccggagctgagctttctccccctcccgagccacatgatcttgaaactgatccatctgtgaaggaggcgcttgatatgattaagattgctaatgaggctatggacgaagctgtcgacaagctgttgaacgaagttgccgacaaagttctaaaacaagattga

SEQ ID NO: 7489 - DNA, 129 bp, Zea mays
  Peptide Sequence Number=SeqID_50864
atgtcgggaaatatggtaaccggtccgctacatgacatggttgatggtgtgacttggccttccaccctgccaccgggttggacggtcgagtgggatgctgcctcgacgggagaggatcaggaggagtaa

SEQ ID NO: 7490 - DNA, 1068 bp, Zea mays
  Peptide Sequence Number=SeqID_50865
atgcagtcggcatgcaaccgcgccaagtgggcgcaccccttcgactccaacgcgctcagcatggaggcccagtcccacacgtcatgcaaccggcgtgccgattgctacatgcgagcaactgcaccgcccctcgcgccactaccgcgcctcctcgactgcggaaccagtaccgtgactcgaggcaaccctgcgtatgacccaaaagtgctagccaggcgcatcggtcataggccaggaccgggaaaggggataccccaaaagggatccttctccgcgaaggaaacgggccccgagccccccctactaatcagaggttcgaaggctggcccctcagaggggttcaacagccgcctcagagcgctcgggctccgcgcccactactggtcagaggttcgagggccggcccctcggaagggttcaacggccgcctcaggccactcgggctccgcgcccactactgatcaggggttcataggctggccctcaaaggactcgggctcagccccggaagacgacgaactctgcatcgaccgaccccagggctcggactcgggctcagccccagaagacgacgaactccgcttcgcccgagcccagggctcgaactcgggctcagccccggaagacgacaaactccgcttcgcccgaccccagggctcggactcagccctggcctcagccgacggtctccgcctcgcccgacccaggggctcggactcgacctcggccttggaagacagactcgacctcgacctcggaggagcctccacctcgcccaacccagggctcggaccgaccacgtcacaggaggcgccatcattaccctaccccaagcaaactcaggttacggggaacaagaccggcgtcccatctggctgggccccgcgctcctccgacggccacgacaccacacgaaccgggtgccaaaacctctccggctgccacgatggcatggccctcttacagaaggttggccgcgcggggaaggacgggacggcgctcgcggaccccccgggttcgaaacgccgacaaatcaggaaccaatttagcagggaagtaatcagatag

SEQ ID NO: 7491 - DNA, 306 bp, Zea mays
  Peptide Sequence Number=SeqID_50866
atgaggaatcgggcaaggcctagcccactactcctcctgctcctctcctgctggagcagcatcccactcgaccgtccaacccggtggcagggtggtaggccaagtcacaccatcaaccatatcttgaagcgtacctgcaaaaattatgccacaagcaaggctgagtatactaatacccatctagacttacccggttacaaggggtcaagcagtctcattagctgcgagaagcaaacgattcgaattgagtttttaaaccttgcaagtttgaaaatatatgctagctcaaggggccatcctcaataa

SEQ ID NO: 7492 - DNA, 423 bp, Zea mays
  Peptide Sequence Number=SeqID_50867
atggccggagtaggcctggccacgtgcgcaggcggtcgggctcgtcggcgactcgtgctccggcctactcacgacgatagagttcaattaaatagcacgaggagcttcactagaggtcaaggatgttgtaggcgcaaggaatcgacgaatggcttacagtgtagctcggtctacgtgcggcggcggccggttgaagtccgtcggtgtcaatccggcgtctccggtgaggtgctgtttgggttgggagcaagcgggggcgtatgtgtggcagaacctcccaagttatttggcccacatgcacctgaccttgtctcaaagacctcagacggctatgcacgtgcaccagataagataacaggatccgtccgagtgtcccaaggaccccggataaaccacttacaatcaagacgcaagattaagtaa

SEQ ID NO: 7493 - DNA, 117 bp, Zea mays
  Peptide Sequence Number=SeqID_50868
atggcgtgggtgaggagagaaattcataggaaccgggtaatgaagaaagattcgtgcaatgtttgccaagtgttcgatggattgctcgacctcggattcattgtcatccgcgtgtag

SEQ ID NO: 7494 - DNA, 645 bp, Zea mays
  Peptide Sequence Number=SeqID_50869
atgggttattcaaggaattgtggaggcattaatactattgaagagcaaagccacaggcgagacatcgcaacaatggtacctcaaagaaatcatggatcatctgaaaatccagatgataatcatgttggaaaagaagtcatattatattctatgatgagatcagaagttcctgttgcaatagaaaatattatctcaaccgacccaaccaccaaggtgggagatattcctcttggaagggaggagcaggttacactacgcttccacagtacacggtgcagctgttcgaggagcaccggggccgatgatactattgagtccacggctctgcacgtgctaatgaccttctttggatttcaccccttggagctgtcaacccaccccattggcttgttccccgctgaaaaggaggacgatccgatgtggaaggatcgggttgagcacgccaaggatgtgtgggctctctaccccgggaacaccgctcacctgacggttcggtgcatgagtgccctgtatcgtctgcaggccttgcgaggtgaggtgatgtccaaacttatgggcctagtggagtctaccaagatcaccctagataaccgggaggaccttgttgtcgacttgtccactgagctggtggagaaggatgtctag

SEQ ID NO: 7495 - DNA, 239 bp, Zea mays
  Peptide Sequence Number=SeqID_50870
acaagcatctccgcctgcgctcgcggacccggccgactctgaccatccccgacggcgacccgcacatcgcccatgatcctcgagacctcccctacgtcctcgaccacctcacccggagcagcctcgccgccggtgcgctgcaggatatggttgatggtgtgacttggcctaccaccctgccaccgggttggacggtcgagtgggatgctgctccagcaggagaggagcaagaggagtag

SEQ ID NO: 7496 - DNA, 228 bp, Zea mays
  Peptide Sequence Number=SeqID_50871
atggatggagctcggcacgcgacgcaagagaagcagaggccgagcttggcgcggctggagaggagagcaaagaaggcaccagccatggcgagggagaaactcggcgcggctgggctgggcgcagtgctggagatggccgagaaggagtgtctgtgcgccatgggagggagaggagggagctgggaggccacgaggaagataaggacgacttcaggaaaattagcatag

SEQ ID NO: 7497 - DNA, 111 bp, Zea mays
  Peptide Sequence Number=SeqID_50872
atggggagtcgcgatcctcgggcagaaagggaatcacgactcatgggtaaagaagaaggtgtcgaggcagatctccaggggttccaggacttcgacgagttcgaggattag

SEQ ID NO: 7498 - DNA, 749 bp, Zea mays
  Peptide Sequence Number=SeqID_50873
tggccgcggaggaagaaaggggcggaggggcttaccggcagcgaggctgctccggtgaggtggtcgaggatgtaggggaggtcttgaggatcacggcgatgtgcgggtcgccgtcggggatggtcggagtcggctggaccacgtgcacaggcggagatgctcgtcggcggcgaggagtctggcctaaccagggcgcgataggtcaattgaatggttcagagagcttcactaggtgctggggaagacgtgggtgcaagacattggaagatgacttactgaagcttcatggcttcacggggaagcggtccaggggctggggcaaggctggggttcaacagaaggggctggccacgacggtcgtgatcgagaagatccctctccctgtccctcttttcctcgcgcgaccagtcggcgcagagccgcggcagcttagcacgcacgccctggcctcgtccccggcagccccgcgcagagcccgtgcatgcccctgtagcctcacgcacagcgcgctcagccccagcctcgtccccggcaccgcatcgcggctagccctggcggcggcctctcccactgcacgacacggccccctccactgttgtctccctcacgccccgtgctcctgcggatcggcgaacgcgacgaccatcgctcgcgcaggcaggtccgcgactgagcccctggagcttgacagccctgcgccctggccagcgtggcgcgcgctcgtccctgctgggcgcggcctgacgtag

SEQ ID NO: 7499 - DNA, 390 bp, Zea mays
  Peptide Sequence Number=SeqID_50874
atggcgggtttattctacagaatagcaagggtttatttgcaaaaagcgcacggtgaaggtgtatcatggatccagggccattggatcaacatccgagggcacagattagatcggatttcggccgaaccgatcagcggagggacagggactgagcaaacacggagccgcccgcgacgtggagaagaaggtcccgccagaggaggactccgcgccatggtcaaccgcgggcgaatcaagacgaccacggcggtggccacttccgtcgcgctgtcccatggcgggatgagcacgggcccgcacagacggcggcgtgctgaccagcggcgccctggcgtccagtcttatagccctgaggcagtccggatccaggggcacgacgttgaggagtaa

SEQ ID NO: 7500 - DNA, 204 bp, Zea mays
  Peptide Sequence Number=SeqID_50875
atgcaggaatcccttgcaggaccgccatcgcagcaaaatcctcctgagggcctccctacactgaccactcccctactgcccttgcccctttcggaaaacacaggggctattctagaagattctccagactcagtcgaccctaagttggatggcgggtttattctacagaatagcaagggtttatttgcaaaaagcgcacggtga

SEQ ID NO: 7501 - DNA, 75 bp, Zea mays
  Peptide Sequence Number=SeqID_50876
atggcgcaccacggacggatggacgaaggggaggtcgattttataccgaggatatctggattaggcaacctatga

SEQ ID NO: 7502 - DNA, 722 bp, Zea mays
  Peptide Sequence Number=SeqID_50877
actccacgaatggaccgatatctcggtggcgcggtgaggcggcgaggcacagcgaggcgctgtgcacgcgggcttcggcgacccgcacgacgacggcagcggcggcactccgggcggggcgcggctccgacgacggtgatggcgaggcggagggcgaggtcgaggcgaggagaggtggcgtgggcgagaaactaggcgagaagcacgggttcgaccggttttggaggcgccgtgagcggttgctccactgggagctcgcacaggcggttcagggaagatgcacagtgggcgacttggctccctggcacgcgggcccatctgagcaggcggcggtggacgctgaaccgcccatgcgcggtgcgcgcgatcgtgcgcgctgggcgcaccatagctgggccacgcgggccggcgcggggtgggggcgcggcggacgcgcgctgggccgccacgagcgcgcgttcgcggggtgggcggggcaggccgcagggctgggagctgggccgcactcgcgtgggcccaggaagggaggagggggcgctgggtcaagcgggggggagagggagaaggggaccgggatcatcttctcgttcctaggttgcttcttcctcagagtggtgaccctgtctgactttgcacattctgatggtgttcctccggacacttcttcaattgcgacacgtggaacacgttgtgcactgccgacagactttctggtaggttga

SEQ ID NO: 7503 - DNA, 624 bp, Zea mays
  Peptide Sequence Number=SeqID_50878
atgactcttccccctcgcctcagaaggaggtggagtctgggaggcagccctcccctgcacctcagccagagatgcccccctacaccaacacagggcatcccggctgctggaggagaccctgaccgagacggagacgatgacgacggtggcagttcgagccacaacaaggagctctcagaggagcaggagccagaaggatggatcgcccgacccatcactcgtgacgctgcccatggttgtcatttccacgacgctctcgacaccttactgcgccaggccttcaacctacacacttggcccatcaaggtagctgacggccttgacctgaagtactaccctcgtcgttcgaccggtagtgccggaggtttgattgtctcgctttttggtgagggcaatcacaagctgggcagcatggtcaacctggtcgtcgtgctcaacaccaagctagaccacgcccttgatgagttggacaaggctcaggtggagattgtggaactgcgtgttgagcgcgcggcgcgccaccatcaggagggtggttcccccgcttctatcgagattcaccacccttaccactcaccgccccgtggtcgttatgcttatggcacccctgactgcaggacctag

SEQ ID NO: 7504 - DNA, 984 bp, Zea mays
  Peptide Sequence Number=SeqID_50879
atggcgccgcctaactccgtggcgaagtttcaccggaggcgaggacatgaccacagtgagggtctagggcactgggaaagggctcaggcaagcacggggcacgacatcggcccagaggcaccagagggcacggcctacgatggaggggcccgacggcggcgcagctcaactccagcgagcgattgcgcggacaacagggcagcaaatgggaaattaagggagtggggagtttgctcacctcgagaggggactctagagcgcctgagcaacgacgaggacgcagggaggccttgggtcgacggcggcgaagctccggctgcacggtgtgggttcggtgagtgcgaaccgagagaattaggggagctaggggcaaaccagagggtgtctcgtgttgctgaaaaggggtcgggcgcgtggaggagtggccaggaaacaagcgtcatgggcgcgtccacggcggagagcgcgagcgggaggttaaggaaggggaggtggctgacaggtaccaaaggttcatacttagccaatgaaaagaacaagaattgggttcaacaaaggagcaaagggataaccaaaaggcgctccgctataattcaccggactgtccggtgctccaaggtagagcggctctggaactcgccagcctcgggaatttgctccgctataattcaccggacatgtccggtgtacaccggactgtccggtgagccagcggagcaacgactacttcgcgccaacggtcacctgcaggcgcatttaatgcgcgccagaagcgcgcagaagtcaggcacgcgcgagacggtgcaccggacaatctacagtacttgtccggtgtacaccggacagccaggcgggcccagaagtcagaagctccaacggtcgaatcccaacagcatggtgacgtggctggcgcaccggacatgtctggtgtgcaccgaactgtccggtgcaccatacgacagtcagccaccaccaaacggctag

SEQ ID NO: 7505 - DNA, 780 bp, Zea mays
  Peptide Sequence Number=SeqID_50880
atggagagtcatgatctccgggcagaaagggaatcacgacttgtgggtggctatgagatcgatggttttggtcatgactatggtgctggtaagtggtattctttccgtttggaaaggatggctcgacttagacacactgcacgaaagtccgtcatccccttcttaccctcccgccttgctgagcgtccgcttcgccgtcccgtggccggacagtccagccacttggagagactgcaccaccgcctgcatgaggagcaggaacgtcgacgacaggagcagcagggctcttccttctcgcttcagcaggagatagagtccgtgaggagctgctcccctgtgcttcctctggaggcgccccctgcaccaccactgggcgccccagcttctggagtagcttctggaggagacccagacgacggagatggcgacgacagctcgagccacgacaccgacctctctgctaaccatgagccggaaggatgggttgctcgacccacgacaccgacttccatgatgcgctcgacaccctgctacgtcggacacttaaccggcatacttggtccatcgagtatcgctgtgtggtctaccagcacagtcgcggggtctacccggaccgctgggaggcaacctgcttggtgcgccacccggagaatagtctccagggtgcggaggcctgctcagagcactattctatctctgagcgggactcagctgaggcagccatgcaagatgctgcacggcgtgcgctttcgcactactgctcggttttcggtggggtag

SEQ ID NO: 7506 - DNA, 576 bp, Zea mays
  Peptide Sequence Number=SeqID_50881
atggcgccgccgcgggttgaggattccatggcgcagttggtggccaaaatcgacgacggtaacaaggatatgagtcgacgcatggaggcaatacaagcaacgatggagaagatggagtccacagttcaggggttggtggtcgatcgaaaagaaggtgggcgagatggcggacgtgctgagtcagatgcagcaccagatgaacaagacaacatcgaagggtaccacgattccaccatctacaacgttgggcgcggtactaggggtatggttgcatcgacaacttctaccacgaacatggcatatatggagaccgcgacggggccaactctgcatcacaccgccgatccatttcggaggccgattcatgaaccagagatccatcataattcctttctgatgggagcatttgagaacaagtccccaacattggtgcccacctctagtgaactcacttccacttttgagctgatggcttcgttcaacaatcaagatgaagttgcttcagctacgaagctggtgctcccgataacaggcggttcatgctcagaaccggccaacaagaagcagaagaagtag

SEQ ID NO: 7507 - DNA, 609 bp, Zea mays
  Peptide Sequence Number=SeqID_50882
atgcatcaaccttgctttctacagtatctcctcctcatcctcgtgcctctgctgctgtccgcctctgcttatgatagatcaggtgagttcacctttgatggtttctctggcaacggtctaataaccatggatgttgcagcttctgtcaccaatggcctcttgagcctcactagcgggcagaaggaattgagaggtcacctggcggagagggaggttggctgtgtctccctggccgacggcggtgcagaagccagaggcgcgagggcggcaagcggggaggcgcacccgagcctcgagcgcgacgagcgcggcgagcgtgttgctctacagctggatcgggccgcagtaccacccttccccgcggacggcgctcacgtcccgctccagcaccagcacctcgaaccccttccgcctggcggcgagcgcgaaggccaggctgccgatgccgccgccggccaccaggacatgcgccttgggctccaccaggacgagccccacgcgggcgggagggaggccagtcctacgcctcagttgcggccgcggccgcggcgagaagatggagcgctcggttgccgcgggagacagggtggagctggctcgtcgtgctag

SEQ ID NO: 7508 - DNA, 1053 bp, Zea mays
  Peptide Sequence Number=SeqID_50883
atggttggaatggaccggcatcaggtcaagctttgcatctcatgccagttcaatgctatcgcagctaggaccagcagactggtgttttcgaagtgtagttctctttgcatctcagtatataaattgcaggttcaagagcctgacttaattggggtgagtcatttactagttgacgaaattcatgaacgcggcatgaatgaagattttctcatcataatatcgcgtgaccttctaccaagacgtccagatcttcgccttgtactgatgagtgcaactataaatgctgaactatttttcaagtactttggagatgctccagtgatgcacattccggacattgacattactaaggagtatggaaattacagcagttcaacaaggcagtcccttgaagcttggtctgctgctgaactagatttgagccttgtggaaagtacaattgagtatatttgtcgctatgaagcagaaggtgcaatccttgtgttccttactggctgggatgaaatttcgaagcttctggacaagattaaagggaataatttccttggcagtcctaatagatttcttgttcttcctttgcatggttctatgccaattgtgaatcaacgcgaattttttgacagaccaccagctaatatgagaaaaattgttttggcaaccaacattgcggagagtagtatcactatagatgatgttgtctatgtgattgattgtgcccttgcagacccacgcaggacacataagttcgacggccacgtggccccgtcgaacttaaccgtaagaacgtgggtcccatcgaacttaggggaaaaaattcgacgggccccgtcgaacttaaaaacacacattcttactgttaagttcgacggtacccacgttcttaatgttaagttcgacggtacccacgttcttaatgttaagttcgacggtacccacgttcttacttctctaagttcgtccaaaaatcgtcatcggctatattcgttggtaaacccacgttcttacggctatgatcagaggcagtggggcttaaaatgggcagccgtcagctag

SEQ ID NO: 7509 - DNA, 1014 bp, Zea mays
  Peptide Sequence Number=SeqID_50884
atggcgcctcctgttgacgtggctggtctgcgccctaggttgggcgatgtggaagctcctccgaagccgaggtcgagtctatcttccgtggccgaggtcggggctgagcccgagtctgagctttgggtcgggcagagcggagttcgccgtcttccgggacttagcccgagtccgagccctgggtcgggcggagcggagttcgccgtcttccgggacttagcccgagtccgagccctgggtcggggcggagcggagttcgccgtcttccgggacttagcccgagtccgagccctgggtcgggcggagttcgccgtcttccgggacttagcccgagtccgagccttgggtcgggcggagttcgccgtcttccgggacttagcccgagtccgagccctgggtcgggcggagttcgccgtcttccgggacttagcccgagtccgagccctgggtcgggcgaagcggagcttcctatggtacctttggcccgggcctgactgcctgtcagtctcactctgtcaagtggcaccgcagtcggagtggcgcaggcggcgctgtccttctgtcaggccgctttgtgctgatgggggttaccagctgagaattaggagccttgagggtacccctaattatggtccccgacaaatacagaatgatgaatcttacgtaaatgtatatatcgtagtgttaggaaatagaacctatgcgtcggtcgttttggatcggcatacctcatatgtgacacatgtaagtatggctgaggaccatcgacagatgtatgaaggttggaagaagagagaagatttattcagtgagttggttgccaagacaaatggattttcaaccttgcttttgacaatatgctctgatatacttagcaaagttaaattgttatttgctttggttgtgttggcatcaaacaacaaaaaggcgaagattgaaagggaaatgggcctaaagccattcctatatgtgtttttgtgtttgatgaccaccacaatgtacattatgaactaa

SEQ ID NO: 7510 - DNA, 975 bp, Zea mays
  Peptide Sequence Number=SeqID_50885
atggagcgcgtgattggagggaagtataagcttgggaggaagattgggagcggatcttttggggagctatatctcggtgttaatatacagaatggtgaggaagtgggaataaaattggagcctgtgaaaacaaaacatccacagctgcactatgaatctaaagtttatatgctactgcagggtggaatcactcattttggaaacatagatggtatcccacacctcaagtggtatggtgtcgagggggagtacaatgttatggtgatcgatcttcttggcccaagcttggaagatttgtttaattcctgccacaggaatttttctatgaaaacagtactcatgcttgctgatcaactgataaaccgagtggaatacatgcattccaagggatttattcatcgtgacatcaagccagacaacttccttatgggcttaggtcggaaagctaatcaggtctatatcattgattatggacttgctaagaaatacaaggaccttcatactcataaacacatcccatacagggagaacaaaaatctgactggaacagcacgttatgctagtgtgaatactcatcttggaatagaacaaagtaggagagatgatctggagtctgctggctatcttctgctatattttttaagaggaagcctcccatggcagggtcttaaagctggcactaagaaacagaagtatgacaaaattagtgaaaagaaaatgcttacgtcagcagagattaacactgtaggataccagtttgattacgtatttgactggactgtactcaagcaccctcaaatcggttccaacaacaagcttgttcaatgggacaagaggcccgggacagattcacgggtgctgttgaggcattcgccagaagaaatccaggctctggtcgccatggagatcattccaggcaccaaagccttgcagattcctttggcacatccaacgaagcagtcagttcttaggtag

SEQ ID NO: 7511 - DNA, 684 bp, Zea mays
  Peptide Sequence Number=SeqID_50886
atgccccttatgaaagtttacaacattgactcagacctttatggactaaaagttgtcttccctctggttggttgggggaagcgttatacgttacggtttggagaaagcattttcatggcagttcttgtaaaggaggccatcctcgaggtcattgcgctgcaatcccgtccatccatttgccgatttgcttcagctgcagagagcaacgatcccgcaaaagatgtcggcctagtaaccgcctttcactcacagaaatcgtcggcgtggtcctcggcagctcacttcctcctgctggtggtgatggagaggcgctcgaggctccggaacgtcgtgctgtcccgcgagccggagcctcctctctcggccgcgttccgggccacgggggagcgcgtggacgacctgctgttctcggcgcctgccgagtggtggtgcctctgcactgtggacggccgcccgctgccgccactactgccagaaacccaccggtggttctggtcactgcagtcccccgaggaggtcggccggctggacgaagccgcgggcattttcgacgagctccctccccaggacaagatgtgcgttttctctgagtcggcaacctggtgcatgcatacagttacttgtccgttctccaatattatgcatacagatacgaccatggttgtatctatggttagatcgtaa

SEQ ID NO: 7512 - DNA, 567 bp, Zea mays
  Peptide Sequence Number=SeqID_50887
atggtcgcagccacgagccgaccgaagctcgtcgacatgggtatggggcaagtcggtcttgctcctgacctttctctgtgcgtgcagccgaggaggacatggtggcgcctgccacgcttaggttatcttggcaatgaggagtccagcggtatactacttatgtcgcctctagatgcctatgtcttcatcgtgtccttctccggcaacgaacaggaaaacaacactattcaccccgttccgactactgtgccaaccaccagggtaagactaacaacagtaagtcacgacctctcccgagttcagcctcgggcgcaacagggagcttcgcctcgcccgaccccaggcctcggcctcgggagaaggtctccgcctcgctcgaccccaggcctcggcctcagcctcggcctcgggagaaggtccccgcctcgcccgacctcagcctcggcctcgggaggagtcacaaccttgcccgacctcagcctcggcctcaggagaagtcaccgcctcgcccgacctcggcctcagaccgactacgctacaagggatacatcattaccctacccctaa

SEQ ID NO: 7513 - DNA, 423 bp, Zea mays
  Peptide Sequence Number=SeqID_50888
atggcgcagccgaccgttggcagcctgagagccgttggcgcaccggacatgtccggtgcacaccggacagtccggtgcccccttctagccgttggctcgaccacgtgtcccgcgcagatcgtgcggccgaccgttggccctgccgaccgttggctcaccggacagtccggtgcacaccggacagtccggtgcacaccggacagtccggtgaattatagccgtacgtcgccggtgaattcccgagagcagccacttcgctcgagccagcctggtgcaccggacactgtccggtgcaccaccggacagtccggtgctcccagactcagcaaagtcttggctgttcgagccaaggcattttcaattggatttttcctgtttccagcacttagacacaatacattagtccataaaaccatgtactaa

SEQ ID NO: 7514 - DNA, 576 bp, Zea mays
  Peptide Sequence Number=SeqID_50889
atggagctcatcccgagactgctcctcccgctcatcgtcaaggacgaagaggggtttcgaggcatcgtgggtccaaaaccggagcgcctgtccacaccgctcattgggatcgcgccgcgtggggatgaggtcgccgctccccaagacgagtcgcggttctgcaccccctcctccaaggcgtcgggaccccctgcagtcgacgcatcgggtaccccctcggctgaggaggcgggcttccaatcaccgacctcgagcagcggcacctcagccatctcagcatcagcggtgatgggtggctccacgggcagaacggcaacagcctcgacagaagctggtgccggcgccggcagcacgtcaggtgggctcaaggccgcagccgcgccagcagtctcccccgacacgacgaccgccttgatagaggggtcagcctggggagctcgccccatggcaactcgcgccgcctgggccccccgcttgggggcatcttatgcggaggtcagccaaccggcgtggcacggtgcggcactggctgcagaagccggcaccatcttaagggccttcctgggagccagatag

SEQ ID NO: 7515 - DNA, 129 bp, Zea mays
  Peptide Sequence Number=SeqID_50890
atggccggagaaattattcgaagaagtgaaaagggcattcacgatgctagagaagtagctgaggctgctgaaaagagcgtagaggccgaaggctttaagatttgtttgcgatttgtaatagcaatgtag

SEQ ID NO: 7516 - DNA, 231 bp, Zea mays
  Peptide Sequence Number=SeqID_50891
atggaggagatgacaatgaaagagagtcaggaggtggggactctggggctggtggagagtcaggaggtagggactttgtgggagatgctggcgggtctagatcatcccaagcaaagagcacaaggaaactacatttcgacttggatctacaaaacgtttatgggcacaggacactacaagcaggctataaagtcatggtataggacgagtggtgatgacgaccagcgctaa

SEQ ID NO: 7517 - DNA, 129 bp, Zea mays
  Peptide Sequence Number=SeqID_50892
atggtgaatggcgcggtcaccggtggggaagcagatgcgtgctggcgaatcccgggcgtggtgaatgtcgcggtctccggtggtggggtttcctataaatctacacgagttggtgatagaatggtttaa

SEQ ID NO: 7518 - DNA, 387 bp, Zea mays
  Peptide Sequence Number=SeqID_50893
atggagaatatgcgttatgctgaggagctcgtgagggagtttctagttttcaggggtttcacaagtatcgaagagtcgacattctcgttggagcacccgtacaagggtgccactccccttggtccgtgtaagaaaagtgctctctacgagctggttcttcgccgctctgcctcctcggcagcggcggccagcagcctgcacagcggcaagatgagtacattgtctgaagaggatcagcaggttttggtgactgaggaagagtttcctgaggtgaaagtagatttccaggaaacatttttaggccataacagtccaattagccgatgtcgattttctgcatctgggtcaaatattgctagttcatcaattgatggcacagttaggtaa

SEQ ID NO: 7519 - DNA, 699 bp, Zea mays
  Peptide Sequence Number=SeqID_50894
atgaccgttggtggaggctgtctgtcgtatggtgcaccggacagtccggtgtacactggacatgtccgcggagcagccgctgcaaattcccgaggctgccaagttccagagtcgcgtcctcttggtgcaccggacactgtccggtgtacaccggacagtccggtgaattatagcgcgccggctctggaaaatcccgaggctgaggagttctacgcgaggtcccctggtgcaccggacactgtccggtggtggtgcggtccttttgctttgggctcatactttctccccctttggcatgaatcgccaaaaacggaatcattagagccctttgaattactctctcctcctttggtcataaataaatgggtgaagattataccaaagatgaagtccttttgctttgaactctcccaaaaagatggagagatgcgtggagtgatggcgaaggatgagttacggagtggaaggctttgtcttcgccgaagactccaattccctttcaatacacctatgacttggtttgaaatagacttgaaaaacacattagtcatagcatatgcaagagacatgttcaaaggtatacaaatgagctatgtgtgcaatttagcaaaagaaattgcgcgaatcaagaatattgagctcatgcctaagtttgttaaaagtttgttcatcaagaggcttggtaaagatattggctaa

SEQ ID NO: 7520 - DNA, 2259 bp, Zea mays
  Peptide Sequence Number=SeqID_50895
atggaggcggccgcctccagcctctcgacgctgctttccaccttgcgcgtgaacgggccctggacgccgccgggaacctgggagtcagtcatacctgagagcggtgctgctcgcgtctctcaccttggaggacgccctcgcctgcagccgatctacgagctcgcatcggttactgatgatgctttgattcatctggccttgcatgcgctgtatggtgtcaaaacatcgttagatgagattgaggagctttcagcactgtcttcctcaaatccggctgacaggacctctaaccgtgtcccaaatgtgtggttacgttcctcgagcaccacatccatggggagtattctcaaatctttccgctcgacaggtcttgcggtcttcttcctttgcaagtttgtgcacttttatcttttccaaagtcgagaaatgaactgtgcaagtagagaagttcacgaacatgaagattctggagataaagacactaagcagcatcagccttacactctagtaaaccaagcatttgcagcagcagttaataaggtcctcgaaggctatttctgttcattgaatactttactagcatcaattaggcttaggcgttcagtgggccaatctggtatagcttccaagatttcaaatggaatgagttgtgatcccacttcagaggtcactcttctggaagtttatctacacaccgaggagttaagaaggcatgttaaatcccttggaaatatttgtttccctaagtttgcaggtcttacattgtgccaggagggtttgaatactgatgcaaatgtggagtttgagaatttcccacggggcaccgatttgctttcctatttgtatgtccatattcgtgatgctgatccagttcactatggtcttttgaagtatcttttcattcgttcctgtgagccatactttaacttcattaagtcatggatttaccgagcttctgttgatgacccttatgaggaatttctcattacacaaactgaaaataagggtgctcaaggaatctcttcagacataacagatgatttcatcctcttccccttaaaggtgattgcttttgatactgcatcaaatttcctacataaaaggaccgaccttgtagatgcatctgtttcagatgctgagttattctatggggacagcgacgctgtactaccttgcaatatggctgcagatgaaaaagatgattcttcttcgaattcccaagaatcttcagataaagaagatcccttggaatcttcagaatgttcttcttatacttctatggatgacacagaagttgagagttctacagcatgtgaaaacttgtctagttccatgttctcattatactgtacaagcacaggtgaagcaaaaggctccttggtaaccagtaagctgctttcttcccaatccagttcagttgaccatggaataaattgtgcaatccctattgagtgtgagaaagatgacaggttgagttgcaaacatgtccttgtgcacccacagaatactaagcatactgcggtgcctgatggttcagaactggattatcagtatagccagttttcaccatttgacaggtttatgaagagagccagttgctcatttgaaagcatgaattcagttggggagtttttgtattctgatcataaaaggtcagtaggtaatgcagtttatccattacattctgaatcagggagtactaaactatcaaacagtaaaaactatgaaaagtttgttactataaatcagccatggaataccagtattccttacaatctcagtttgaaccccatactgaaaaatgcagcttgttaccatacagagagtgacatgcaacagaaaagcaagaaccaatcacttgccagttttgattttgagtcagtcatggatccatgtgaagtatattgtgcaaggagcccatcccttcttgttgagtctgtaaatggagcagcaacagctggacagcccagtactcagccttatgaacagcctgattgttctaccaagcttcttcaagctcagacaagaagtcagtcatcccttacttcctcaggagaaatgtcaacaggagatagtcttcagaaaaatgcttctggtggggcattctgggagatatcattactatataatgataaatcaaaagaaaaaccagctatggactttagttcacaatttgatatgccccttgatatagttatcgataagtgcattattcaagaaattttgcttcagtatccttttagctttcctaatcaataa

SEQ ID NO: 7521 - DNA, 990 bp, Zea mays
  Peptide Sequence Number=SeqID_50896
atggacattagtctcctggggtggtccggagcccgtgcagccgctcagcctggtcctgtaccgtgggcctgcacgctccaccgccctgagacaaatccagatctcggcgagtttgcctcccgagggttgttgacaatcttttcagatgcgctggtatccaacctcgacacattaagtatgaactacctccacaccagtaagggccgcgggatagctggctccgagcggctcgccagcggaggcgactacatcagcaccgatggtggcggccacctctgcactaacaactcgccagcagcggcgatcacctcagcatgtacgccgctgcggaaaggtcctcgcccctgtatccctacggggggcgacaatgaggccattaaagccaaagagccgagggtctggtggcaggtggcgctgacggtctcgccagcggaggcaaccacctctgcagtgggtagcctcaccagcggcggcgaccacatcagccccaccagcggcagcgaccacctctgcaccgatgggcggcggctgccccagcacgtgcgaagagccggaggcggcaccaaagccacccaggccgaggagccagacacacggcagctgatggcgcctcagacggccggccccgtgtacccggagttcgccttcttcacagggctggcaaacgaccttctcccccaaatgctggaggaagaagcgggccgccagcccacgcggaaggcggagcccccactcggcttgccctcctccccagcgcggatgatgaacatccttgaagctgagggcaggggggaggccgcagcccggctcgcttctctccaccacaaggctggcacgcaggagcagcagtccaaccgccaatcagactctggtcccacctgcatgctcgcatcctcccctgaggcaggcccagggggcactgtcgataccctgaatcaggggtaccctcttctacagtatgaaggtgctgcactcgtacgacacctctag

SEQ ID NO: 7522 - DNA, 442 bp, Zea mays
  Peptide Sequence Number=SeqID_50897
atgacgcatgctctggcaacggcgccgtcgtccctggtctgtgcaccgccggagtttgagcagtgtctagggcgggatcctggacgtggatccccgatccaacggtggtatgggaagcgggagcgggacctcggccgatctaatctgggcgcctcgtttcagatcggacggattatgagtctagggtttacttgcgccaagccccctgctgtctctgacgagcaagctactgtggatcctgaggtccagcagatagaagttgctgagcaggagctcattgaaggcaagttagcttacgcttgggccatggatgttttgatgattaggtaccttggagaggaccagcaaggacttgggaaaggccaaggtgttgaggaggagcagcaagggtggccacaacatgaaggagatcaagtccgactcggctgcgacttcatctcgg

SEQ ID NO: 7523 - DNA, 57 bp, Zea mays
  Peptide Sequence Number=SeqID_50898
gtcaagaacaggtaccgcaggatgtggcacatggaggatgctgcgacgagttcatga

SEQ ID NO: 7524 - DNA, 1008 bp, Zea mays
  Peptide Sequence Number=SeqID_50899
atggggaggctagaaccccgggcagaatgggaatcacggcttatgggtaaagtgtacaacctatgcagagtgttagaaactggtatatcagtcgtgctcacgatggcccgtatcaggtgcactgcatgtaagtctgtgatcctctttttgccttctcgactggcggagcatcccctgcgacgcacggtgtcaggtcagtccagccacctagagagactgcatcgtcgcctgcacgaggagcaggagcgccgacgccaggagcaggagcaggagcagcaggactcatccccctcgcctcagcaaaaggtggagtccgagaggccaccttcccctgcacctcagccagagatgccccctgcaccacctcagggcatcccggctgctggaggagaccctgacggagacggagacgacgacgacgccggtggcattttgagccacggcacagagctctcggaggagccggagccggatggatggattgctagacccatcactcatgacaccgctcgtgggtgtcacttccacgacgctctcgatactctgctgcgtcgggccttcgaccgacaaacatggtctattgagtaccgttgtgtagtctaccagcatcatcgcaggctatacccggaccagtgggaggctacttgcttgtattgctcgttgtttagcggggtagctgatggccttgacctgaagtactaccctcgccgttcgaccagcagtgctggaggtgtgattgtctcaccagttggcgagggcaatcccaggctgagcagcaaggtcaacttggttgtcatgctcaacacagaattggaccacgcccttgacgagttgggcaaggttcgggcggaggttgcggaattgcgtgctgaatgcgcggcacgccactatcttgatggtggttctcccgcccttgttgggattcagcacccttaccgttcaccgccccgtggtcgcttcgactatggtaccccagactgcaggacccgcatagatttagatccatag

SEQ ID NO: 7525 - DNA, 174 bp, Zea mays
  Peptide Sequence Number=SeqID_50900
atggggagtagctctctccgggcagaatgggaatcacggcttgtgggtggttatgagattgatggttttggttatgactatggtgctggttgtcagcattgcaaccactgctcaggcgaagatgaagctgtggaaggagacttccaggagttccaagactacgacgagttctag

SEQ ID NO: 7526 - DNA, 519 bp, Zea mays
  Peptide Sequence Number=SeqID_50901
atgccgtcaatggggctcggtgtatgcggctcgctctgccaagtttggttcgccccttggggagaagtgcgtgatcaatggagagtcatgatctccgagcagaaagggaatcacagcttgtgggtaaagtgcgcaacttctgcagagtgtttgaaaactgatatatcagccgtgctcgcggttatgagcggccaagggagctccagtgatcagtggtacttgatcagagatgttcggattacaggtggcaatgagaatgatggttttggtatttactctggtgatggtaagtggtactccttccgtttggagagggttgtccgcattgcaaccactgctcaggagaagataaagtcgtggaaggagacttgcaggagttccaagattacgacgagttctaggtgtgggttagtggcaacccccagtcggctgcctgtgaaggccacgtgtatctacgtttcttttccacactttgattattgtaaagactatgtggatgtctcagacaatatgatgtaa

SEQ ID NO: 7527 - DNA, 705 bp, Zea mays
  Peptide Sequence Number=SeqID_50902
ttcgtggacgtgtaccgggagctgggtgcgcggacggccgccttcgatgcgctcggccaagaggtcggcctccgcttccttgaatggctgcaggaggagctgggggtgctcccgatgatcatgacgggcctcatgtcctttgcctccctcgtcacctgcgagggggccgtgaatgcgctgtcctgcgaggggtgtgggcacgtcgaggtcttcgaccagtcgaacgaaggctacaaacacgaaatcctccaggtcgaggacccggtgctgaagcgctcggcaggggcgctcttcgataggatgtggggccctcacggccgagagacgatggcgcatgaccaagaggtcgaggaccttggcgatctagacagcacgctgcccgagggcacgctgccagaggcctcgggggtggagctggcgccgccgtctgatgcgggcaagagcccctcggagatccctgcgccgactggagctagcgaagacctcccgtcggcccctgcaccgatgggtgaggacgccttgaaggcggtggtcgaaccagctgtcaaagaccccgcggcggtggtcgggccttcgcaggagtccttggatgaaggcttggattactttgttgcgttggatgtggctggggtggagacttcgctgcatgtggagggtgccatcgtatggggatggagcgtggtcgtctccgagtggtccggcatg

SEQ ID NO: 7528 - DNA, 216 bp, Zea mays
  Peptide Sequence Number=SeqID_50903
atggcgcttgggccccacgctgtccatgtcgtcttctataaagaacacgagacaacaaagcaccttggggcccatgggcggtcgtggccttaccaaggccatttgcaccgtgcccatcatggtgttgtcggcaccctgactttcatccagttcaggtcgggtttcgagctacatggtgtaggcgacctgtcagaagatgccactgcggcgctctag

SEQ ID NO: 7529 - DNA, 324 bp, Zea mays
  Peptide Sequence Number=SeqID_50904
atgggcgccaccggacattgtccggtgcgccagccacgtcacccaactgctagggttctaccggttttgaccattggagctttgtcttcttgtggcatcggacagtccggtgccacaccggacagggcactgtgcagtctaccgttgcgccaaagagtcgtttctccgctggtggaccagacagtccggtgccacactggacagtccggaaaaggtttaaaccctatttccctttcagatatggaggatgactttggtgtaggcaccaaggacgtggttgacctccttccactgaggacgttatcaatggttccctcaagctag

SEQ ID NO: 7530 - DNA, 2652 bp, Zea mays
  Peptide Sequence Number=SeqID_50905
atggaggtcgttgagttggttccttgcgcccgcaataaatggggcaactggcatgagttttggttctacgttgcggagggcacggtcgaggaccatccggggctccccgtggccgagatgtgctcgcattattactcagcatacctgcagtttgaagtggcggaggaggatgcagacgaaggggcccttcggtgcgcggccgacctgagcagcgggcgcgatttggttgaggagtttgtggcgtatggggtgtggcctttggcgcatggctgggcgctgggcgaagtatgccctcgccagatgccttcccgtggtgggatgctggtgcgaagtcccgccttcgcactggatctgcatagccgcgattcggccgcctttgtgcatgaggcggaggatggggcagtgcggattgttggtcggtacgtgccgaagacagagggccagcgtagctgggatatacgcgggtccaacgaccgcttgaacagggtcttcgagttgaaccgtctgccgtatggaggttatcccaggcaagacgatgtggatcgtcgcgggaagaagccggcggcagagactagagacaaccccgcgccggcggccgccccatcctctaagaagaggaagctaggtattgctacgggaggactgggggtttccgatggttttgctagggaattgatgaggacatgcgcagcccccggggggaggatgtctttgcccgagctccaggagtcttcggcgcggatgctgaaggttaccgggggttggtggcctaagaatgttcgtatcccccgtgcggccggcgaagacttttttacatctcgcatggttcgtgactggagagtgtttccttatggacgaaatattgctgctgttgtgtcggcagtgatgaacaaggatcgtcagggagctgcgcagaagcgccagacggtcgtcaggctgcctgaggctaggctgaagaggtcgcgggggactgcgaaggctgctgcccccagcggcagccagccgacgctggcggcgaagtctgccgcccctgggtccagcagggtgccggaggccgtgaagacggccagcgctggcggaaccaagcctgccccggccggagctgcgaaggcccgagaattgcctccgccgggcaagcgccttgccgacttcgccatcgagattagcttggaagattatctcgttgggtcgggcgaagggcaacttgttgctgttccgcctgcggtggcgaccgcggcggctgccgtggtgcctagggcgaggggtagcgctgtcagcgccggtggtgagattccggcactcactgccgtcaaggatgaggcgggcgctgtgtcccatcggctgaaggaggcattaagtcaggcggctgacttcgctgaccgcatggcgtcgggggcccttacggcggttgtgtctgccgaagtcgagagacttcgggcgcaacatgctgacgccgtccgggaaaaacagcgcgccgaggaatgggaggagcggttcaacgctctgcagacccgtgtggagagggccgaggcttcgacgcgcacggaggctgagcggacgcgcaaacagcttatggactcgtaccacgagctgggcgcgcggaccgctgacttcgaagtgccagaacaagagcccggacttcgctgcctcgagtggctgcaggaggagttgctggcgctccccgccattgtggagggctttatgtcctatgcctccctggtcacctgcgaaggggcgatgaacgcgctgtcccgcgaagggtgccgacactatgaggtcttcgaccaatctgatgaggatttcgagcgcgagatttacaaggttgaggaccctgtggtaaaggaatctgcgggagccctcttcgaccggatgtggggtccccacggtcgggaggtggtcagggagcggtccgacacggcgaggggtcaggcggcgcgtaacgagaaagtggaggactttggggctttgaacagcgcgcagcctgattcggagtcgaacccggtggcggctgtgtccgaggtcggcccggcgccgcccccagaaactgtcgaaggcgcccctgatgcccccgcagccactgcgaccggcggtggctcgtcgccaactgctgcgccgagggctgaggatcctgtgaagatggcggcggagtctgcagcggaggatcccgcgacggctgggtcttcgcagattttgggcctgcgcacgcaaccgctactgctaatttttttggcggcttcgaccgtggatgatgggaatgaatcggatgaatctgcgtctaagttttctgattttggtgactctgggagttcggttgagtggactgaagagtcgtcggatgaggacttggattactttgcggccttggatgtggcagcggcggaggcttcgccgcgtgctgtggatgctgaagttgtgcctggtccaagtgtggggcgtaggcggcgaagggcggttgcgaagcgtagagtgagtgaggcggacgacggtcggcttcgtgtgggcagggctggcaggaaggaactgttgtccttgccgaccgctgcgagtgtgggtgagggggagctacgaggtctttttgcgggtgaggagctgaggataatgctatttaactatagggagatgggaattattccgaaggttgagccgatgtaa

SEQ ID NO: 7531 - DNA, 2637 bp, Zea mays
  Peptide Sequence Number=SeqID_50906
atggctttgcagctgttcagggaaatgcagacactcagttttgacaggcatacattaccatttgctagcttgctcagtgtcgctggggcattgcctgacattaagatcgggagacaaatacatgcacaattaatccttcttggccttactttggaggatttcatgggaaatgccctgattgacatgtactcaaaatgtggtatgctagatgctgcaaagactatttttgcaaacaaaagtgacaaaactgccatttcctggaccgctttgataactgggtgtgtccagaatgggcagcatgaggaagcattgcaactattctgtaacatgagaagagctggtctaagtcctgatagggcgacatgttctagcatcataaagtcttcctcaagcctgggagtgattgggataggaaggcaattgcatgcttacctcacaacatcagggcacatgtccagtgtgttctcaggcagtgcccttcttgatatgtatgcaaaatgtggctgtttggatgaagccatcagaacatttaatgagatgcccgagaagaattccatcacgtggaatgctgtaatttcagcatatgcgcaatatggacaggcaaagaatgccatcaggatgtttgacagcatgcttcactgtggtttttgtccagatccagtcactttcttgagtgtgctagcagcctgtagtcacaatggtcttgcggaagaatgcatgaaatactttgacttgatgagatattacaatagcatgtcaccctggaaggaacactattcttgtgttattgatgccttgggtcgggcaggctgtttcgataaaattcagaaagtgttagatgagatgccatttgaggctgatccagtaatatggagctccattcttcactcgtgcaggatctatggaaaccaggatttagctacagtggctgctgaaaacttgttcactatggttcccacagacgcgactgcctatgtcatattgtccaacatatatgctaaagctggtaattgggaaggtgctgcgcgtgtgaaaaagattatgagagatagaggagttaggaaagagtcgggtaacagttgggttgaaatcaagcaaaagatctacatgttttcttctaatgatcacaccaacccaatgatagatgagattaaagaagagcttgagaggttgtacgaagagatggataaacaaggctatgagcccgatactagctgtgccttgcatatggtggataataagcaaaagttggagtcactaaaataccacagtgagagattggccatcgcttttgccctgatcaataccccaccagggacgccaattacggttatgaagaacttgagtgcctgcctagattgtcatgctgccatcaagatgatatcgaagattgtgaacagagacattattttgggtgccagtgacttcggcagttttcctcacactctggtgttccctatcaccgtgcgggtgtgccgttcagatgcgatcttggacaggaggccctcgcctccgccgccgccacccttttccggcgacgatcgcgagcagaaccacggcaagcggcggcgggatcaacattcaattcctacggtgcctggacgcaggccagtgcacgcgcgtctcgggccatgcgtccgggccgactctgcgcctgggggaacatgtgaaacgatcgcgctcccggtccccttgggggcagagagcaccgcttcggcttctccacccccggtgcgcctcgggccttgtggtggagccggctctgcgcctggatggacagttgggacgatcagtgccccgggccccttgagcgctgaggttgcagtgggggctgaggaagccgcttcgggctctacaattccgacgccagccccttcggtttctcccccaacggcgctcgtcacttcggttatagccccaagagccgccaatgctttaacaaccggctctctatctgaagatcctgggcccgcctcaataattggtgcaatttcctctggtctattggattctgagaggccaattctgcatgacacctcatttaatgtggcggcttttgaggaggctggcggttatcagaggttaggccagggcccagaaagtctttgtgctgatgcttcaggacgggcctctgtgccattttctcatgtcccgcatgtcccggatgttcctgctgataatgctgcacaagtcaggaatccctgggatattatcaaatactcactgcaagcaaaaccaccatgctttaaggtgtactctagaagaagagataccgtgcctgtgcaatcccaggaagtgagctcgccatccccgacccccttgcaagaattcagtcagcacatttctaaagccattaatggtttgctgagtcctccgccaatccccaaacgcagaaagaagaccctactaagaaatttcaggcctaggagatccaggagggtggccaagtttccacctgagctaggatccgaagcagcagcctctgtctgcaagaaattgggattctgtgatgatcatggcattatcactctggaagatgctagcaaatatgttgtcttattcaattcaccactctccagggagcacatcgctgccttggcagcgctgttcggatgggatacatctgagctcgcataa

SEQ ID NO: 7532 - DNA, 1659 bp, Zea mays
  Peptide Sequence Number=SeqID_50907
atggcggcttcgccggcttgtgctccggggctcatctccggccccaccctccctcccctgcccgttgccttccgctgctactgggcccaaaagccctcctccgcgtcgacctcctccaggcgcccgtgccgcaggcggttcgttcccgttgcagctgcctccacccgcacctcctctgcggctgctcggggcctcgacgccgacgacttccgccacccgctggacaagcaggctagctttcttcgatttaacacactctttttctttctgtccaccgttgccagtccatctcaacgtagtatcctcaacgattcattcctgccatcttttgctactgcaggacccgtctcggagcaagttatggtactccagaacattggaacatcagttctcgtctccccgaaccagcttccagatctccaccaactgctggttgaggctgcgaagctcttgaacaccgaagctcctgacttgtacataaggcagaatcctgttccaaatgcctacaccttagcaatcaacggcaaaaaaccattcattgtcgttcacacaagccttgtggagctgcttactccaagggaattgcaggctgttttggctcatgagctgggtcacctcaagtgcgatcatggtgtttggctcacttttgccaatatactcacaatgggagcatacactgtccctggttttggcatggttgctggcttcctggaagagcagctatacagatggctacgagctgcagagctgacttgtgacagggcagctcttcttgtggtgcaagatccgaagaaagagcagctgttctccaattttgaagaattggagctgcagcttgtagttttaacatataatggatacatgcttactctacaagttgaggtagtcatctctgttctgatgaaattggccggaggatgcccatctcttgccgacaagctaaatgtggatgccttcctggagcaagctcgttcgtacgacaaggctgcatcgaacccagttgggtggaatgcacaaaccagagagctttcacaccctttgcctgtgatgcgagccagagagatcgatgagtggtcaagaagccaggagtacaagaccgtagcatccactgcactctgcagaggaggaaggaagaggaccgacaaagatggggatggcattgccattgccgccggcgtcacaggtaggaggatgagcttcctcgcttcgccgccgctgtcgctcaaggcagccggtggaatcagcatcccatgcccgtggcgattggatggccgccgtccacgagcagccccagccagtgttcctcgactagcatcagtgcgaagcgtggtgctggacatcgagggcacgacgagccccatctcgttcgtgacggacgtgctcttcccctacgcccgcgacaacgtccgcacgcacctggacgccacctactccacccgcgagaccaaggacgacatcgccctgctgcgcgctcaggtcgagcaggacctagccgagggcgtccccggcgccgtcccggtcccgcccgacggcgccggcaaggaccgcgtcgtcgacgccctggtcgccaacgtggaggccatgatcgcggcggataggaagataacctcgctgaagcagttgcaggttattgaaaggaaaaatctggccactccatga

SEQ ID NO: 7533 - DNA, 531 bp, Zea mays
  Peptide Sequence Number=SeqID_50908
atgaaaacttcggactggaagggtaggcagcagatgtcgcactccagcgcgtccttctccacggatagtgtcacagtcgcctcttcctcatcctccaaccccgcctcttcctcatcctccaccaccaccttggctttgtttggagtgccgccgtcagaggaagtcgtggtatttttcccggtcatggtttatcacctagaacgcgagaaaggtactcgactaaaaatgtacctagtgccactcctggagtctcctggactatgtcggcttccaagtggttcacctttccatactgggcacgaggctgcccacagttgttgcctccttgttgcattgcattctgcctcactggggcattgggagctggctactgctgagctgctttctttgggaaatgattcgctcaatggccttgttccccacagtggaaacacgcacgacttcctccttgcgctggcgatgcttggttgttctggttggttgctggggcaggaagatgggttgcctggttgctctgacgctgggtactga

SEQ ID NO: 7534 - DNA, 717 bp, Zea mays
  Peptide Sequence Number=SeqID_50909
atgggggtcctctattttctgcattttacgaaatgggtcgaagcacctcctcccgtggggggcagtggtggtccgaactggtgtgagaaccatattaaagctgtaatgaatattggaggatctttcttaggagttcctaaggctgttgctgggcttttctcatctgaagccaaagatgttgccgttgctaggtataaggctcccaagccatcttctggacctcacaagtccagggagtgcctgcctctgatcctcatcatcaggaacaggctcaagtatgcaccgacgtaccgtgaggtcatttctatcctgatgcaacaccatgtacttgttgatggcaagatgtcatttccatccctaagacaaacgagaactacaggctgctttcgtcttcacccaatcagggatgaggatgccaagttcaagctctacaaggtgaggtctgttcagtttggccagaaagacatcccctatctgaacacctacgacgaccgcaccatccgctaccccgacccgctcatcaaggccaacgacaccatcaagatcgatctggagaccaacaagatcatggacttcatcatgtttgacgtcggcaacgtggtcatggtgatcggcaggaggaataccgggcgtgtaggagtgatcaagataagggagaagcataagggcaacttcgagaccatccacgtgctgcttggagctttttgctatgtctag

SEQ ID NO: 7535 - DNA, 465 bp, Zea mays
  Peptide Sequence Number=SeqID_50910
atggagacgcgcacaagcgtgggcaggaccgtccgcaccgtcaaccgaggcgagaacttccccaacatgcccgtcgtgatcttcgctaagtgttgcacgcttttccttaggagctgggactctggggggctagttgggcagtctccggcgaaagcgctgtcgtctgcgcgctgcgccaccgcggctgagaggcatgaggaggtggtgaggtcacgagaacttgaagaccaagttggtacctggaatcttgagtctaaggcaagttgtgcccttgatcacttttctttacctaataatgttcctgttaatcactttgacatgctcagtgcgaccacaagggtggaatgggacgcccttggccaagtaattaggaaagctatggagagattaccttactcgaaaggggcaagcggggagacaccgctgctagagtatagggaggtcctcgggtcgaactatatgtaa

SEQ ID NO: 7536 - DNA, 399 bp, Zea mays
  Peptide Sequence Number=SeqID_50911
gccattgtcagataccatgtctccggtccttggggagagggtgaacaagcagcaagccgaaccatgtcgttgaccagggaccagtacctgcagtcggcatcacatggtggtcggccttgctccaccttcttggtctatgctatggcccataagggcaaggcgacgtccgacgtgagagcaaggagcatgagctcgagtccagccatacgacctcgacacgatagctcacagcatcgcatacaacaactcgagacccaactagaagaagagaggagggaacgtcaagagatggaggcgaggataatggcggagcgggaggcagagcgggaggctcgcctggcggctgatcagaggatggcggagatgttccagtacatgcagagccttggcgccgcatag

SEQ ID NO: 7537 - DNA, 363 bp, Zea mays
  Peptide Sequence Number=SeqID_50912
atggagcaacgactccctgcacggcaacggtcgtctaacacgatgaacagtgccacgacagaagtcagagcgcggaagtcagaggtcatcggactgtccggtgcagcaaaaagacaaactgctccaacggcgactttcaatcgtgatacggtactggtggcgttaatggggcgaaggcgaagacgctacccttcgctccagccttcatctatcccgctgcaccaacggaagcagaaggaccggcgaggtccacccttcgtcttctacactacaagacgaaggcctacgacgacgtcgccccgtcccacgtcctcactcgacctggaggcccatgaatattctggggatagtccaggtgcctga

SEQ ID NO: 7538 - DNA, 1029 bp, Zea mays
  Peptide Sequence Number=SeqID_50913
atgtccggtgcaccaggggactccaactccaaactactcaccttcgggaatttccagaggccactccgctataattcaccggactgtccggtgtacaccggacatgtccggtgctccaaggaagggcggcctcaggaactcgccagcctcgggttttcactccagccgctccgctataattcaccggacatgtccggttcgggtgaggggcaactggctgttgtcccgcctccggtggtgaccacttcgccaacggcggtggtgggggcgaagggtgccacgcgggacccgtgggccactttttgcacgaacagcgagattttgtcgtccactgccactaaggacgtggcgggctccatgtctcagcgactgagggaagcgtcgcagcagctgtcacagcagctgaagcaagcggccgacttcgccgatctcgtcgcgtcgggggccctgactgcggacgttgctgccgtggtcgagcgtcttcgggaacagcatgcggatgctgtgcgggagaagtcggctgcggaaagcaagaaacgcaggctgtcggagaaggtggccgccatggaggccgagaagacgaatctccggcgccagctggctgcgcaggccgaagccaaagtggcgcgggcggagggcagtctcgcccgccaacgcgctgaggagctggaggcgaggctcaacgccctgcgcagctgcgtggacaaggccgagacctcgacgcgcgtggaggtcgagcggacgcacgcgcaattcgtggacgcgtaccacgagctaggtgcgcggactgctgacttcgaagtgcccggccaagaagcgggccttcgcttccttgaatggttgcaggaggagctgctggtgctcccgaccattgtgacaggtttcatgtccttcgcctcccttgtcacctgcgagggggccatgaatgccttgtcacgcgaggggtgcaggcattacgaggtcttcgaccaagcagacgataattttgaatgtgaaatcttcaaggtcgaagaccctatggtgaagtag

SEQ ID NO: 7539 - DNA, 2682 bp, Zea mays
  Peptide Sequence Number=SeqID_50914
atggctgttggaactcgctctcagcagcaagaaggccaacaagggacgtcgccgcaggccttcgtcaaagcgccgagtcctgcgaagggtgtccctgcccgctttgtccctgtcggaccagcggctgcagcgaaggcctcgagcgaagggtggcgtctttgcccgctttgtctttgccttcggctcgtggggcgttacgtgccgaggacggaaggccagcgcagctttgacatccgcgggtcaaatgaacgtttgaacagggtcttcgaattaaatcaactgccgtacgacggttaccctggtcaagacgaagcagaccgccgtgggaagaagccggcggtggagactggaggcgaccctgcgctggtggccgccgcctcctcgaaaaagagaaaattaggtactgcgatgggaagacttggggtgtctgatagtttcgctagagatttaatgaggacgtgtgcggccccgggggagaggatgtcttcgcccgagctccgggagtcttcggctcggatgctgagggttaccgggggttgttggcctaaaaacattcctatcccctgcgcggctgaggaggactgttttacatctcgtatggttcatcggtggaaagtttttccttatgggcgaaatatcggtcatgttgtgtgggcagtgatggacaaggatcgccaaggcgcggcgcgaaaacgccaggcgactgtgagggttcacgaagcccggccgaaaaggcatcggggaacggcgaaggctgaggcctctggcggaggcaagccgccgctgccgacaaaggtgggcgcctccgcgcctggcaaggcgccggagacgacggtgggcgccggaggccccaagctgtcgaaggtggtgccgtctgtcagcggggtggcggaggctgcgaaggcggcccgatcgctaccgccgcctggcaaacgcgttgccgacttcggcaccgagattgatgtggaggattatcttggggggtcggacgagggcccgcttgctctagttgtgcctggcgcggcgatcgcgacggctgcgccagcgccgaaggcggggggagagacccttgacgccggaggcgaggtgtctgccctcgcgctggtcagagacgaggcgggcgtggcgacccgtcggctgaagggagcgacggaggcgctgactcgagcgacggaggcgctgagtcaggtggctgacttcaccagccgcactgcgtcgggggcccttacggcagcgttgtctgccgaggtcgagagacttcggacgcaacatgcggacgctgtccgtgagaagtcggcctccgacagcaagtgccgcaaactggcggagaaggtggccgcccttgagaagaaggctgacctccggcgccagctggcgggggagaggagggaggccaacgaagccatcgccaaagagcaggctgcgcaggcggaggccaggctggcgcgggcggaaggcaatatcgccaaggagctcgccggagagctgcagcggcggcttactgcccaggagagccgcgcggagggggccgaggccgcgatgcgagcggaggccgaacggacgcgcatgcagctcatgacttcatatcgcgagctgggtgtgcggacgggtgacttcgaggtgccggagcgagaggccgggcttcgctgtctggaatgggtgcaggaggaactgcaggagctccccactgtcttggcggggttgatggcgttcacctccctggtcacctgcgaggcagcgatgaacgcgctctctcgcgaaggctgccggcactttgaggccctcgaccaggtggatgaggattttgggcgtgatatcttcgaggtcgaagaccccgtggtgaaggaatccgccggggccctctatgaccggatgtggggttcatacggtcgtgaggtggtccgggcgcgggccgaggctgcgagggctcaggcggagcgcggcgagcgagtggacgacttcggggcgctgaacagcgcgctgcctgagccggagacgacccctgcggaggccgcgactggagtcgccccgggaccgaccccggagactgcggaagatgcaccgggcgctcctgcatctgccgcggccggcgaagaccttcccccaaaggtggccgaaggcgcgccagatgcccccgcagctgctgtgccgagcgctgaagatccagcagaggcagcggcggagggtcccgcagcggccgggccttcgcaggttcaggattttgggcctgcgcacgcaaccgctaccactgagtttttggcggcttcgaccgcggaagatggaaatgaatgtggtgggtctgtttctgagttttttgatgttactgactctgggagctcggttgagtggactgaggagtcgtcggaggaggacttggattattttgcggccttggacgtggctgcggcggaggctgcaccacatgctgcggacgcgccaggcgtgcccggtcctagcaccgggcaccgacgacgaagggcggttgcaaagcgtaggattagtgcggaggaaggggctcggcttcgcgttagtagggctggccggcaggagctgctgtctttgccggccgcctcgggtgtaggggaaggggagctgcgaagcctttttgcgggtgaggagcttaggataatgttatttaattatagagagatggggattattcctaaggttgagccgatgtag

SEQ ID NO: 7540 - DNA, 675 bp, Zea mays
  Peptide Sequence Number=SeqID_50915
atgtctaaaaaggtgaagcagttcactaagggacttgcgaagagagcatcctatgttatgagaaaggaggacttagtgtttaagggcactagttccagctcgagtaggtgtagagctttgctggagcatgttccagagttgcagggtcagacagttggcgttcagaggaatgaggttgcatatggcgaggcgatgtctagtcagcacagactagactatgactggaggacctcacctattgatcctcaggctgtgtatgcaagtggtggaaaagctcatggaaggtacacaatgtttgctaacgtcatcgactcgagccaggtgagggttcagtgtggaggttcatcgaggtctgctgctcatagctcccgttgctccactcaagatccagcagaagtggagcaactgcgagaagaacttaggcgacatcaggattacttgaagcaacaagctacgcaacatgaatattatgctacacagattcagcaacaacaaacactcatacaacaactagcacaggcccaagggatacacgtcccggtgccccccaccacctcccgttcattatccttggtcttcacctccacctatacctacatctccatctatcgaacatcagtactggatgatgagatgtgtcttattatgactatggatgagacttttgtgatgtaa

SEQ ID NO: 7541 - DNA, 1036 bp, Zea mays
  Peptide Sequence Number=SeqID_50916
atggaggccgagaaggtggatctctggcgccagctggcggaggagaggagggaggcgaacaaggccattgctgatgcgcaggctgcgcaagccgaggccaagcttgcgggggcggagggcaatctcgcccgccaacttgccgaggagctggaggcgaggctcgccgccctgcgcagccgtgtggacaaagccgaggcctcgacgcgtgcggagatcgagcggacgcatgcgcagttcgtggacgcgtaccgggagctgggtgcgcagaccgctgccttcgaggcgcccagccaagaagcgggcctccgcttccttgaatggatgcaggaggagctcggggtgctcccgaccattgtgactggtctcatgtcctttgcctccctcgtcacctgcgaggggaccgtgaatgcattgtcccgcgaggggtgcaggcattacgaggtcttcgaccagtcagacgaaaactttgaacgtgaaatcttcaaggtcgaggaccctgtgctgaagcagtcggcgggggcgttcttcgacaggatgtggggcctgcacggccaagagacgatggtgcatgtcgaaggcgtcgaggacctcggtggtctagacgacgcgctacccgaggccgcggaggtggatccggcgccgccatctgatgctggcgagggcccctcgtcgacccccgcaccgactgtagctggcgaagagcccgcaccagcccctgcgccgacatgtgaggacacctcgaaggcggtggtcgaaccagctaccgaagaccccgcggcggcggccgagccttcgcaggttccgacgtttgggcctgcgcaagcaaccactactgacaatactgattttgcggcggagacttcagttgtagtgcctgccgatgatagtgtgcctggctctatgtatgaatgttttgagtccgacggtgagtctgggagttcgtttccctcggatgaaggcttagattattttgttgcgttggatgtggctgcggtggagactttgccgcgtgtggagggtgctgaggatcttcctg

SEQ ID NO: 7542 - DNA, 225 bp, Zea mays
  Peptide Sequence Number=SeqID_50917
atgaagaatgtggtctactatgagaccgactcttcatcaccttccacatctagcgtccagtctacatcttcgaagcgcaaagagcgtaagaagccccttcagctgaagatattccaagcaccttcgaacacattgaaggcgaagttgaggcgcttgatgaagatggtggtggcgaagattgatagtacgaagcacattccgaaggctgctgaagctattttttag

SEQ ID NO: 7543 - DNA, 429 bp, Zea mays
  Peptide Sequence Number=SeqID_50918
atgggcaagaacaacaagcgcaagcgtgagccgactcctccatcagaggacttcggtgattcggagtactcagaggaggagttctcctctgagtccgaggggtctccggctcccatccctctgcgtgagtcgtctgacgattcagacgactcccaggggcttgcggcggaggtctggacttacatccgggccgtcgagcgctccgggctcgagggctcggatgagtcggagtactcctcggacgaggaggactcgtccgagggcagtggcggcgatggcgacgacgacgacgacgacgatgacggaggcggtggcggcaatgacggtgacggcggcggcaggggcggcagcaaggatggcgacagcggcagcagcaggggcagcaacaggggcgacaacggcagagacagcaacagggccagtggctag

SEQ ID NO: 7544 - DNA, 810 bp, Zea mays
  Peptide Sequence Number=SeqID_50919
atgcagtcggcatgcaaccgtgccaagtgggcgcaccccttcgactccaacgcgcccagcatggaggcccaggcccacgcgtcatgcaaccggagaagcgggcgacgcttcgccttcgccataacgatcgcgtcaaaaaaggccggcccctcggaggggttcaacaaccgcctcagagcgctcgggctccgcgcccactactggtcagaggttcgaaggccggccccccagaagggttcaacggccgcctcaggccactcgggctccgcgcccactactgatcagggcgggaacgatcttgtaacagaatcccatcagagggaggcattgagcccttggaccccgtcaaaaggggaccgggtccggcagatcgcccgcagctcactggagacaccatgttcggcgccctccgagggcaacatggcgctttatccccccctcctccttgcggaaaggcaacgcaggggcgtatgtaaaaaagtcgagtctgtccttgaccgtcctctcgccctgtgcggaggctcaggggctgctctcgcaaacccagctccggccaaaccgttgacggcgtcaacataccagcccgagaacttcggacacaccttcggctcgcccgaggcccagtcttcgccaagaagcaaccttggccaagtcgccacgccgaccgaccgtatcgcaggagcatttaatgcaaagggctcggactcgggctcagccccggaagacgacgaactccgcatcgcccgaccccagggctcggactcggactcagccccggaagacgacgaactccgcttcgcccaaccctag

SEQ ID NO: 7545 - DNA, 285 bp, Zea mays
  Peptide Sequence Number=SeqID_50920
atggcgagagtagcgtgtaccctccgtggcaagaggctggacggtggtgtatctgtgctctcggtgtactgcaatacattacatgaggaagttcatgaattgtattcacgactgcacccagacgtacctgtcgactctattggaatgggagccggaccttctggaacagcaggtgaagcacttggtggggaattggaccttttcaagccccctccttctatgaacctggctaacgaacggtcccctacaaccgacagtgaagcaactaaagatgataaatactag

SEQ ID NO: 7546 - DNA, 741 bp, Zea mays
  Peptide Sequence Number=SeqID_50921
atgcgatacaatgtcgatgaggaacctcctgtcagtgatctcaacattttccaatggagaggcacaattactagtaagggcacgttctaccatcttagcatggatgaaagaatgtccgcattgctatacatgtactcgaatatggaagagatggagccatatttcatcaataatgggattagacaaagtcaatatggcataactgaagtaaagcacaaggaacaactttgtggccatgataattttatccttgcacaccaatgcgagcatgtctactatatgtcgtaccgaaatccgaagtttaaagcatggtgggtagttcacaaggaagaggaggacgaagaggaggaggtgcaacaccatgaggaggaggaggaggtgcaggcccatcaggaggaggtcgcgggcatagatgctgaggcggatgacaataccactgaggctcctgccattcgacgaaggggcactcggaagggccactttgtcctacctccgtcagcgcctgcacaatctgaagctcgggtactgataatcccggttggtgatagccaatacgatgacacgtctttcgacggtggaggaattgtcaccgacccgaaaggtgtggtggttccttgcactagctggtcgcacttcgcactagctccacatgctacatatggaacaactcaagacaccatcaagcacgacgtttggagacgctatcgtgcgatgaagtgtgcgacacaacacgtgatttaa

SEQ ID NO: 7547 - DNA, 175 bp, Zea mays
  Peptide Sequence Number=SeqID_50922
ccgtgctcacggttatgagcggccaagggagctccagagattagtgatacttgatcagagataccttggtacaggtggatatgagaatgatggttttgattacgattatggtattggcgaagatgaagctgtggaaggagacttccaggagttccaagattacgacgagttctag

SEQ ID NO: 7548 - DNA, 666 bp, Zea mays
  Peptide Sequence Number=SeqID_50923
atggcgcgtctcttcctcctcctcctattctccctcctccactcctccgtcactgggctcaggcgcagcgacttcccgccgtccttcctcttcggcgccggctcgtcgtcttaccagattgaaggcgcttacctagaagacaacaagggcctgagcaattgggatgtcttcacccatattaaaggtgcttccaaaggtctcagtcacgcatacggtgatctaagccatctaagcaactcaataagggcttgttcggtcacataccacccatggatagatcactggagcctgactctggagatgcgaccaatctgctcgtatctggtgagcctggcccagggtgctttaaggatcgtgcgagcctggatccaaatctacatgcaggcaaccaaacacagagctcgcacgcgcatagtctggctcacagcaaccaaacagcagctacccgcatcctgtgatgcaagcatgcgcagatacaggcaaccaaacagactcttaatgacttcacagaaaaagcagacttcgtttctcacggggaagggaaagaaaacgagtatggaaaccaccgacggggctcaacgttgttttggtcgtttccatgcgtcttggtgcgagagtagacttcgtttctcaggggagaaaccggttccttctctttcacaataa

SEQ ID NO: 7549 - DNA, 225 bp, Zea mays
  Peptide Sequence Number=SeqID_50924
atggcgtcatctggccggaataggctcgccggagtgcggcgaggactgttcctcgtcgtggactttgctctgcgaaaagccaaaacaattatagaaaatgatagaaaaatgaacgtgaagaagaagtggaagtcactgaagaaaggacaccaccaccctcggattctcaggcaggaaactgcttctactttgatatttgtggatccgagccagactcacctgtga

SEQ ID NO: 7550 - DNA, 228 bp, Zea mays
  Peptide Sequence Number=SeqID_50925
atgggcggtcagataagctttttactgaatcaaggcgcactgttcatcggtcttcagaaatattgcgccgtggataaggacctggacctcgccggcgataaggatgccacgacgaacgtgaagaagaagtggaagtcactgaagaaaggacaccaccaccctcggattctcaggcaggaaactgcttctactttgatatttgtggatccgagcaagactcacctgtga

SEQ ID NO: 7551 - DNA, 3309 bp, Zea mays
  Peptide Sequence Number=SeqID_50926
atgcattccgcttccgccgccctcgtccgcgctgcgcctaagccgtggcccgagcagcatcctctccgcttctttccggcaacttcgaaggcggcgggtgagctccaccccacgacctactacactaccctcctcgcgtcgctctcccgggagtgccgacacgcccaccacccgttcgacgcaggtcttcaccgaacccatcaggcgcgggcatgcggggtcctgcacgcacggatcttgcgcctcggcctgcccctccggggtcgcctcggcgacgcgctcgtcgacctgtacggcaggtccggccgcgtgggctacgcctggcgcgcgctggcctgctgcaccggggctccagcgtcaagcgcggcggcgagctcggtgctgtcctgccacgctcggtcagggtcccctcgggatgttctcgatgcgttccagcgtatcaggtgttccattggtagcacgccggaccagtttggcattgcggtggttctgtccgcgtgttcgcggctgggtgccctcgagcacggcaggcaggtgcattgtgacgtgctgaagagcgggttctgctcgagtgtcttctgtcaggcgggtctggtggacatgtatgccaaatgcggcgaggtcgacgatgcaaggaggatgtttgatgggattgcttgccctgacacaatatgctggacaagcatgattgcgggctaccatcgggttggacgctaccagcaagcgctagctttgttttccaggatggagaagatgggttctgtcccagaccaggtaacgtgtgttaccatcatttccactcttgcaagcatgggcagattgggcgacgctagaactctactgaagaggatacggatgacgagcacggttgcttggaatgctgtcatcgcaagttactcacaaagtggtcttgacagtgaagtgtttggcctatataaggatatgaagaaacagggattgatgccaactaggtccacttttgcgagcattctaagtgcagcagccaacatgacagcgtttgatgaaggtcggcagatacatgcaacggcagtaaagcatggcttagatgcaaatgtttttgtgggcagttcactcatcaacctgtatgtgaaacatggctgcatctctgatgcaaagaaggtgtttgacttctccactgaaaagaacattgtgatgtggaatgctatcctttatgggtttgttcaaaatgagctccaagaagagaccattcagatgtttcagtatatgaggagagctgatcttgaggctgatgattttacatttgtgagtgtccttggcgcgtgcattaacttgtattcacttgatttaggtaggcaggtacactgtataacaatcaagaacggcatggatgcagacttgtttgttgctaatgcaatgctagatatgtactcaaaacttggagcaattgacgttgcaaaagcactattcagtctcattccagttaaggatagcgtatcctggaatgctcttatagttggacttgcacataatgaagaggagggagaagctatcaatatgcttaaaaggatgaagttctatggtatagcactagatgaggtttcttttgcaactgcaattaatgcctgttccaacatttgggctattgagactggaaagcagattcattccgcatctatcaagtacaatgtctgctcaaaccatgctgttggcagctctctgattgacctgtattcaaagtttggagatgtagaatcttctaggaaggttttggcacatgtagacgcaagcagcatagttccaataaatgcgctaattacaggtcttgtgcagaacaatagagaagatgaagccatagagttatttcagcaagtgctaaaagatggtttcaagccgtctaacttcacatttacaagcattctttcggggtgtactagacctgtcagttcagtaattggtaaacaagtccattgttacacactgaaatctgctattttgaatcaggatacttcacttggcatctctctggttggaatatatttgaagtgcaaattgcttgaggatgcaaacaaactcttagaggaggtgccagatcacaaaaacctggttgagtggacagctactatttcagggtatgctcaaaatggttacagtgttcaatctttggtgatgttttggagaatgcgcagttatgatgttcgttcagatgaggccacattcactagtgttctgaaagcttgttctgagatggcagctcttacagatggaaaagagatacatggcctcattgtaaaatctggttttgtttcctatgaaactgcaaccagtgccctcatggacatgtactccaagtgtggggatgttatttcttcctttgaaatcttcaaggaattgaaaaacaggcaaaatataatgccatggaactccatgattgttggttttgcgaaaaatggttatgcaaatgaggcacttcttctcttccagaagatgcaagaatcacaaataaagcctgatgatgtcacactccttggtgttctgattgcttgtagccatgctggtttaatttccgaaggcttacatttcttcgattctatgagccaagtttatggtatagtacccagagtagatcactatgcatgtctcatcgatctacttgggcgtggtggtcaccttcaaaaggctcaagaagttattgaccagttaccattcagagctgatggtgtgatctgggctacataccttgcagcatgtcaaatgcacaaggatgaagagagagggaaagttgcagcaaagaaacttgttgagatggaaccacaaagctcatccacgcttgctcagcagggatttggtcggtcgcttcgcctcataggcttgctcggcaaaggacctggtcatccgctccgcctcacaggcttgctcggcaaaggacctggtcgtccgctcctcggcgcagggttgctcgacaaatgggccggaaggaggtcatgggtctacttcggtgcaggaatccctcgcctgaccgccatcgcagcaaaatcaacccaaggacctccttacactgaccactcccctactgcccttgcccctttcggttaccaggatgattcttcaaatcctcgtgacttcactgctagtcgtagcaatacaagcaaacatgggaacaacattgtggcgagggaggtggttctcaccgagggagaaggcgggttcgaggacggcccacggcgcgagcgacactacggcggcaagaaggtcgacgacgagaaatttcgaagccccgagcctccaatccagtccaggaagcccaaggagaccctccccgcatcttga

SEQ ID NO: 7552 - DNA, 2772 bp, Zea mays
  Peptide Sequence Number=SeqID_50927
atggctgaagccatcagcgcgaccagctcgtgcctggaacccctgtgcggttgtctggaaagcacaggcgtgttcgaggcagtgggccgggaggtggccgcgttccttcgcatcaagtcgaattgtggcgacctcgagaaggcccgggacagcctgcgcgccgtcgagacgacagtcagggcgcgggtcacggcggaggaggacaagctgaacgtctgtgatcctcaggtgcaggcgtggctcaagcgcgtcgacgagcttcgcctggacaccatcgacgaggattacagcagtctgtcggggttctcttgcctctgccagtgcaccgtgcacgctcgtcgccgcgcctcgatcggcaagcgtgttgtggacgcgctggaggaggtgaacaaactgaccgaggaaggaaggcggttcaggacatttgggttcaagccaccgccgagggccgtcagtcagttaccccaaactgagaccgttgggttggagcccatgttggctcgggtccatgatttgcttgagaagggcgagtcgagcataattggtgtgtggggtcaaggaggcatcggcaagacgactctcctgcacgccttcaacaatgatctcgaaatgaaagaccaccactaccaggttgttatttttattgaagtatccaattcagagacactgaacacagtggagatgcagcagactatctccgataggcttaatttgccatggaatgaatcagagacagttgagaaacgggccagattcctattgaaggcactggccaggaaaagatttctattgttacttgatgacgtaaggaagagattccgactggaggatgtcggtatcccaactccggacacaaagagcaaaagcaagctgatcctgacatcacgtttccaagaagtatgcttccagatgggtgcacagaggagccgcattgaaatgaaggttttggatgataatgctgcctggaacctgttcttgagcaagctgagcaacgaggcttttgcagcagttgagtcaccgaatttcaacaaggttgttcgggaccaggccaggaaaatattctccagttgtggaggtctaccacttgcactcaatgtcattgggactgctgtggcagggttggaaggaccaagagaatggatttcagctgctaatgacatcaatatgttcagcaatgaagatgtggatgaaatgttttatcggctgaaatacagctatgacaggctgaaacccactcaacaacagtgctttttgtactgcactcttttcccagaatatggatctattagtaaggaaccattagttgattattggctggctgaaggtttgcttctcaatgatcgtcaaaagggtgatcagataattcagagccttatttcagcatgcttgttgcagaccggtagctcattgtcatcaaaagtaaaaatgcaccatgtaatcaggcatatggggatttggttggttaacaagacagatcaaaagtttctcgttcaagcagggatggctttggatagtgctccaccagcagaagagtggaaggaatcgacaaggatctccatcatgtctaatgatatcaaagagcttcctttctcaccggaatgtgaaaacctcactacgttgttgatccaaaataacccaaatttgaacaagctgagttcagggtttttcaagtttatgccctccttgaaagtgctggatctttctcacactgcaataacaacactcccagaatgtgagacattggttgcattacagcatctcaatttgtcacacacacgtattaggttattacctgagcggctgtggttattgaaagagttgaggcatctggatctcagcgtgactgctgaactcgaagataccttgaacaactgctcaaggttactcaatttaagagttcttaatctctttcgcagtcactatggtattagtgacgtcaacgacctgaatctggattccctgaaggcactgatgttccttggaatcactatttatacagagaaggtgttaaagaaactgaacaagactagtcctttggcaaagtcaacatatcgtctgcatcttaagtactgtagagaaatgcagtcgatcaaaatctccgatctcgaccacttggtgcaactcgaggagctgtatgtcgaatcatgctataatctaaacactcttgttgctgataccgagctgactgcatcagattcaggcctgcagctcctcaccctctcagttcttcctgtgctggagaacgtcattgttgcaccaacgccccaccattttcagcacatccgcaaattgaccatttcgagttgccccaagttgaagaacatcacatgggtcctaaaacttgaaatgctcgagaggctcgtcataacccattgtgatgggttgctgaagattgttgaagaagacagcggtgatgaggcagagacaacaatgctgggtcagggtcatccttctgaagaacaggaagataaacggattgatggtggtcaaagtgtgtgcaagagcgatgacaatgcgcatgctgagctcctgaacctgagatcaatcgtgctgactgatgtcaagagcctgagaagtatctgcaagccaagaaattttcccagcctcgagaccatccgggtggaggattgcccgaatctgagaagcatcccactgagcagcacgtacaactgtgggaaactgaagcaggtgtgcggttcagttgaatggtgggagaaactggagtgggaggacaaggagggcaaggagagcaagttcttcattccaatctga

SEQ ID NO: 7553 - DNA, 390 bp, Zea mays
  Peptide Sequence Number=SeqID_50928
atgaaggcgttgcacccgtacgacgcctccaggtcgcacgaagagtggcacctgaccccaccacgtccggagctcccaagagggcatgccggccccccgggtgggtcccaggtccccccgagtgaggtccgggccttagcaaggtcccggggcggagaggacctcggcacaggcaagggcggcgtcagggtcacccagcagacggcgcgcctgaccagtctattggtgaacaacatcccggactccattgagggcgactccgggagcattgtcagcagccagggagttgttgcgacaacctccaagctccacggcctcaccaggggccatgaagcagtggcgggacgacgtcgaccgactactcggtatggcacattctaccccgtctag

SEQ ID NO: 7554 - DNA, 696 bp, Zea mays
  Peptide Sequence Number=SeqID_50929
atgcaggtggcatgcaaccgcaccacggggacgcaccccttcgacttcgacgcatccagcatggaggcccaggcccacacatcatggactgggaaaggggatatttcgaaagggatccttctccgcgaaggaagcgggccccgagccctcctactgatcaggggttcaaaggctggcccccggaaggccgcctcagagcaatcgggctccgcgcccactactgatcaggggttcgaaggctggcccccaaaagggttcgacagccaccccagagcacgcagagcgagggatgactctgggtacgtccgatacatggccgaggctcgggctacgctcccgaggcgcatgcaatgcaaggatcgcctggcatcttatcctgacacgcgtgccacagtcggcaaggtcgaagcgcaacaggaagctccgcctcgccctaccctagggctcggcctcaacctcgacctcggaaggtggtctccgcctcgcccgaccccagagctcggcctcaacctcgacctcaaaaggtggtctctgcctcgcccgaccccagggctcggcctcaacctcgacctcggaaggctacgggggaacaagaccggcgtcccatccaggctcgccccggtaacaagttatgatggccccccacggctccagcggtcctccgacggccacgacaccgcgtacacagggctctag

SEQ ID NO: 7555 - DNA, 699 bp, Zea mays
  Peptide Sequence Number=SeqID_50930
atggcgctcctcctctccccgaccgtttccttcctggtctccccgtctgctccacgccctcgagctctctccgctgccgccaatgtatcctaccccgcctcaaggctgcaatgcaagaacctgtcctcccaacagagccctctgaatgtgactgctacttgtgcttctttcgctgagaagaggctggttcttgtccatgccacggcagagggttctgaggctggtgcggagcagccagaagagccgaaaccagcgaccaagatcgaggaaatgccactcgagtcgaagcagaagatgatcatggagcaaagagcgcggatgaagcttgccaagaaactgaggcagcggcgcaagcggcttctccgcaagaggaagcttaggaagaagggcaggtggccaccgtccaagatgaagaagctcaagaatgtccccgcggggaatggggaagaaaaatgcttcgtagccgaaggtgccacaacttgtttgccttgcgaagccattgtcgcagtcgtggaagtgagttcaccggaggtgggcgccaatgttggtcacttgttctcaaatattgtagatcaagaacaagtcaacacaattgttaattattacggaccttcgtcttccgaagcattatctccgcatggatttaatgctcatcagacgaaggttaagaagaacataccttcatcatttaatatgtga

SEQ ID NO: 7556 - DNA, 1269 bp, Zea mays
  Peptide Sequence Number=SeqID_50931
atggccagcgtcggcgacgacgcgccgctgctcggcggcggcgggaaggcggccgtgtggcgcgagcgctgccccgggtgcaggcagcagaggagggtgcaggccagtgacgggatcccttacgcggacttcctctacgtctggatcgcctgcctctgcgcctctctgccggtccagtcattgtttccttatgtatacttcatgatcagggacttgaaggtggcaaaagaagagcaagacattggattctatgctggttttgttggggctacctatttcctcggaagaaccatcagtgccgtgccatggggcatgtttgccgacaagtatggaaggaagccatgcatcgtgatcagcatcctctcagtgattgtgttcaacacactttttggacttagcacaacttactggatggcaattgtaactagaggactacttgggttgctatgtggcatactaggacccatcaaggttacatcttcacgagcgatagctcttgttattgggccagctcttggcggctttcttgcacagcctgcacaaaagtacccaaatcttttctccgaagagtccatatttgggaggtttccatactttcttccttgtttcataatatcattgctagcagcaggatcatgtatcgcatgcatttggcttccggaaacgctacactttcatgatgatgacaaagtagaagtttttgaagaactggaggcacaagttggtggctccgaatctacaacaaatctgctaaagaattggcaactgatgtcagcaatgatcctctactgtatcttttctctgcatgacacagcttatatggagatattttcactctgggctgtgagcagtacaaaattccggggccttagcctcacatcccaggatgtcggtactgtgctatccttctcaggttttggagtactcgtataccaacttgctatttatccttcccttgcaaagtatttcggaccaatcaagacatttcggcctgcggcgatcctgtcgatcattctcctcgctacgtatcccttcatggccaatctacatggcctggagctcaaaatacttatcaacatggcatcagttttgaagaacatgtttgctgttctcatgggctcagaagcacataagcggactgttcttaccaggttcgagagagaaaaaaatatatatcagggacactgtttgggttttgaacggcaagagttcatgtattgtgttggtccatacttttcgccttatgatgaattaagtcgttatatataa

SEQ ID NO: 7557 - DNA, 399 bp, Zea mays
  Peptide Sequence Number=SeqID_50932
atggacaagaacaataagcgcaagcgtgagccaactcctccatcggaggagtttggtgactcggagtactcagaggaggagttctcctctgagtctgaggggtctccggctcccatccccctgcgtgagtcgtctgacgactcagacgactcccaggggctcgcggcggaggtctggacgtacatccgggccgtcgagcgctccgggctcgagggctcggatgagtcggagtactcctcggatgaggaggactcagacggcggcggcgaggacgaggacgacgacgacgacgacgacgatgacggtggcgacggtgacggtgacggcagcggcaagggcggcggcggcggcagcagcaggggcggcagcggcggcggcagcaacagggccagtggctag

SEQ ID NO: 7558 - DNA, 1578 bp, Zea mays
  Peptide Sequence Number=SeqID_50933
atgtcttcgtgctcccttatgcatcgtgtctttccaccttccgagcccccgggtgggggatgcccgcagtccttccgccttgtcgttggaggaacacaactccgtgggagttggtacctttcagccatcgttcggcttcaaggattttcatcagtcagcccggctgcacccctccgccggcggtcacccgagacggtgaccaccagcccctgggtggggagaagcaagccgggctgcgatcttggtcccaccctcagcttcaaggatgttcatcatcctcgctggggtggaggccgggctgagccggagctctacctcccgcgcgggttcgtgggtcggcctctccttcggcgttcgagggagagggcgctcactggccctgcgggcgggtcggacttcgacaacgcggggctggtcgacggcgggcgtcgtcagcctcaacgcgtcgggctcgtcggcttggctcccggtgccccctcctgccggaaggcggttgccgcgtcgtgcgcacgggaggaccgcccaagatatcgcgcgctgccagggcggcgttcgtgttctggggcggtcctgcctttgcaccgctcgagaagtccccgttgccgacgggatcaccgccaccatccgcgcttcgggcctccggctctttgtacttgtcctcgcccctcgagcgtcggcgtgggcgagggcaaggttgcagcagcgtccgccctgaggccatcgctgctgcagttcggccacccggagcgggggtcgttgtcgttgctgccggagcgggcgacgacgagccgcccgttggtcttctgttgctccccaggccccccgatcgggtggggttgttcgtacctgcggaggtggaaccggagttccgtttgtaatggcaccttgaatgccgactcgcctgttggttgtctgaaccgcatcaccaagcgtgagtcgccccgtgcaaaggtgacgagtgaggcagagttggctcgaaaagaagacttggtcggccggagcctggccgggtcgtccgttagcgggaccgacgtcggagttgatctgccgaggcctcgggccgggctgatgtcttcgggggacagctggccgaggcctcgggatgaccagccgagccgcctgctcgggccggattctcggagaagaccctggcggcgatggcccgggcgtgatgatgatgtcgtccttcagagtggagatcctcggaccgcgtcgccgtccgaggctaggtcgaacctcgccgaaggtgtagttgacgccgaggtcgagaaggctcgaagaatcgcttcggcagaggagctttcgagcgtgaagacttgttcggtccgtggaatcgcttatccgaacgcgagttacttatcgcaaaaggtgatgagtgagccaaagtctgctgagtctgggagcaccggacagtgtccggtgtgccaggctggctcgagtgaactggccgctctcgggaatccaccggcgacgtacggctataattcaccggactgtccggtgtgcaccggactgtccggtgagccaacggtcggccgcgcgatctgcgcgggacacgcggcccgagccaacggctag

SEQ ID NO: 7559 - DNA, 882 bp, Zea mays
  Peptide Sequence Number=SeqID_50934
atgacgccgacatcctgcacctctgttgcgacgctgccgaccaggacacgggcccctccgtcgcgcgcgctctacaagtctggatccatcatcgtgctcggcaagactgacttccttaggccagacatagatcccatacccagatggacagccacaaagaaaaggcacatgacatcaagtccatgctccactgagcctcaacatgcggtggcggatcaagatgacgctcaggatggtcgagcgctgctgcaccgccacgtcgtccctatcagtgcctcaaccgtcagcgttgccttctccgatggctctggtcgtgcatgcggccaccggatgaaccagattgttgataagttgatagattttgaagttgacggcttgatgtcgaaccaaggcgccataggaagctccgcctcgcccgaccccagggctcggactcaacctcgacctcggacgacggactccgcctcgcccgaccccagggctcggactcaacctcgcccgaccctagggctcggactcaacctcgaccttagacgacggactccgcctcgcccgaccccagggctcggactccacctcaacctcggaagacggtctccgccttgcccgaccccagggctcggactccacctcaacctcggaagacggactccgcctcgcccgaccccagggctcggacccaacctcgactccggaagacggtctccgcctctcccgaccccagggctcggactcaacctcgacttcggaagacggtctccgccttgcccgaccccagggctcggactcagcctcgacctcggaggagtcaccgcctcgcccgacctcgggctcggaccgaccacgtcacaggggggccatcattaccctacccctagctag

SEQ ID NO: 7560 - DNA, 888 bp, Zea mays
  Peptide Sequence Number=SeqID_50935
atggatggcggcgaccaccctcacggcggtaagccctccgtctcgcagctcctgcaaggcctccagaaggggctggagattcttctgtctatcgcgcggggccccatagcgccagttgctgtcagcggtggtcaccactcgttgagaaaacgatgggagcctcccatcgtcgttccaaaggatgcagccaccggcccgcaccgccatgcgaactctcctttcccccgtcgtcaaggcaaaaggctccgcagagaagagatgggtccacagatcccagtgggggtcaatccccaaaaaccctttgcaaaccgccacgaagatggctgcttgcgcgatggagttggggttgagattatgcagctcctccctgtagaaatgcagaatcgcccgcatgaaacgacttgctggcactccgaacccccgctcgtggaaagagacgaaactcagcacataccccggcggcggggacggggcggctccgctcaggggagcaatccattccggctgcgggtcaccggagaggggacgaagcaagccatcggcaacaagggcctccagatcatccgccatgacgatggagaaaggccacgggtcgcgcggcagaacgacggttacccgattggccatcaccaagcgaaggaggtggcggcggagcggacaagggaccgggaaaggggatactccgaaagggatccttctccgcgaaggaagcgggccccgagccctcctactgatcagaggttcgaaggctggcccctcggaagggttcgacagccgcctcagagcactcaggctccgcgcccactactggtcagaggttcgaaggctggcccttcggaagggttcgacagccgcctcaggccactcgggctccgcgcccactactga

SEQ ID NO: 7561 - DNA, 195 bp, Zea mays
  Peptide Sequence Number=SeqID_50936
atggagaagaagaaggtggcgatcccgctggtgtgccacggtcactcgcagccggtggtggatctcttctacagccctgtcacacccgatggttacttcttcatcagcgccagcaagggtatgtccttcataaccttcgtccgcaagtcattacatcctaagggagataatgcttcggaggacgaaggacattaa

SEQ ID NO: 7562 - DNA, 111 bp, Zea mays
  Peptide Sequence Number=SeqID_50937
atggggctcggtgataatgaggatgatggttttgattatgattatggtaaagaagaaggtgtcgaggcggatctccaggagttccaggacttcgatgagttcgaagattag

SEQ ID NO: 7563 - DNA, 429 bp, Zea mays
  Peptide Sequence Number=SeqID_50938
atggcgagagtagcgtgtaccctccgtggcaagaggctggacagtggagtaattgtgctctcggttggcgtgaacccggtgccaaaggttcacactaagccaataaaaagaccaagaaaagggttcaacaaaaagagcaagggattaccgaagtgtgccctggtctggcgcaccggactgtccggtgtgtcaccagacagtgtccggtgcaccaccggacagtgtccggtgcaccaggggactccaagccaaacttcgcaccttcgggaattttcagaggcgcttcgctataattcaccggactgtccggtgcaccaccgaacagtgtccggtgctccagaggaaagcgactctgaactcgccagcttcgggaatccgctccgctataattcacccgacatgtccggtgcacaccggactgtccggtga

SEQ ID NO: 7564 - DNA, 948 bp, Zea mays
  Peptide Sequence Number=SeqID_50939
atgaatccgagcagggcggcagccggcaaggcggtagttgtggaaggcggcaaggtacgagaagcccatgtgcggtaccgctgcgcctcgtcgcgggcccgcagcggatgggcgcacggcacactgcttgccgcaacatcgctgcgcagctggtatcacccatcagcacaaagctgcaaaggcctgatgggcgcaactcaggtcaaggctccgtccactcaagggacacgatctcgcctcgtccgagcccagcctcgggcaaagacagacgacccaggaggattcatgtctcgcccgagggtcccctcaagcaacggacacacgttggactcacccgagacccagctcgggcaggcttcgcggagtagcaactttggccagattgcctgcccaaccgacccggatcgcaggagcattcaatgtaaaggatcgcctgacaccgcatcccgacgcgcgctcttcagtcgacaaggccgaagtgaccgcagtcacttcgcccctccactggctgacctgacaggaaaacagcgtcgcttgccctgctccgactgttgtgccaccggccaggggatcggactcaacctcgacctcggacgacgggctccgcctcgcccgaccccagggctcgaactcagtctcgacctcggacgacggtctccgcctcgcccgaccccagggctcgggctcgaactcaacctcgacctcggacgacggactccgcctcgcccgaccccagggctcggactcaacctcgacctcggacgacggtctccgcctcacccgaccccagggctcggactcagcatcgacctcggaggaatcaccgcctcgcccgaccttgggctcggaccgaccattctacagggggggggggcatcattaccctacccctggctagctcaggctacggggaacaggaccggcgtcccatctggctcgccccggtaa

SEQ ID NO: 7565 - DNA, 702 bp, Zea mays
  Peptide Sequence Number=SeqID_50940
atggcgcctcctgttgacgtggtcggtccgtgccctgggttgggcgaggtggaggctcctccgaggtcgagtctgtctcccaaggctgaggtcgaatccgagcccctgggtcgggcgaggcggagaccgtcggctgatgccagggctgagtccgagccctggggtcaggcgaagcggagttcgtcgtcctccggggctgagcccgagtccgagccctggggtcgggcgaaacggagttcgtcgtcttccggggctgagcccgagtccgagccctggggtcggacgaagcggagttcgtcgtcttccggggctgagcccaagtccgagccctggggtcgggcgaagcggagttcgtcgtcttccggggctgagcccgagtccgagccctggggtcgggcgaagcggagtttcccatggcgcctagggccgtacttggctgctgtcagcctcactctgtcgagtggcacaacagtcagagcggcgcaggcggcgctgtcctcttgtcaggccggtcagtggagcggcgaagccacctttgcattaaatgcccctgcgatttggtcggttggcgtggcgatttggccaaggttgtttcttggtgaagactgggcctcaggcgagccgaagctttgtgctgatgggggttaccagctgagatttaggagtcttgagggtacccctaattatggtcctcgacagtag

SEQ ID NO: 7566 - DNA, 354 bp, Zea mays
  Peptide Sequence Number=SeqID_50941
atggcgccccacacgctctatgacgacgacggccctcagccccttacggaagcaagaggacgtcagcaaggactcgacagccccgacagctgtccttccgccaggctccggcgctcctccgacggccacgacatcacacgaaccgggtgccaaaacctctccggctgccacgatggcatccgtgctcacggttatgagcggccaagggagctccagagattagtgatacttgatcagagacattgtggtacaggtggcaatgagattgatggttctggttatgattatggtattggcgaagatgaagctgtggaaggagacttccaggagttccaagattacgacgagttctag

SEQ ID NO: 7567 - DNA, 1170 bp, Zea mays
  Peptide Sequence Number=SeqID_50942
atgagccgcgatcgctacttccaccgcctcctcgacctccacctccacgccaacgacgacctcttcttccccttccctacccctgcctcgtcctgcccctacatcaccgcctcctccgcccaccaccgcttcctcctcgacgaccaccccttctacccaacctcctgcccgctcggcatcacctcccgctccccgatcgacgacaccttcgacctcgacctcctcctccccctccccctccacgccgccgtctccgcgcccccgtgcgcggccttcgacttcgaccccttcctcctcgacaccctcggccaccgcatctccgtcctcgagcgcgcgctcgccctcgccccaccccgccgcaagtacacctacgccgccgaggccaacggcaggaagctcaagtggaccgccgaggacaggcccgccgggggccgcaacctcaagtgggaggccgagctcaggaccccgcacaccgacggcttcgaccgcaagtggaagtgggagtccaaggagtccgccaccggttccaccaaggtcaagtgggccaaggagatcaaggggaagggctgcctcgagccttggtccaactcctactccgtcgaggagacctacggtgaggatgaccatgccgacgacgacagggagaagaagaaacccactggcgtccagaagaaagtcaagggggaaaacaagcagcagcagaagaagcagggcaatgtggagatcgtcgagatcgaggacaacactgccggatgcgtcgccatcagaaaggatgccgcactgctcatccagatgaactacagggcgcacctggcccatcgctcccaggtgctccgttgccttcgcgacctcgccgtcgccaaggccaagctcaaggagatcaggtccttcttctacaacatcacataccgccgccgcatcgcatatgacaatgaagagcgccagaggtttgctgagaagatcattgtcctgctactgacagttgatgcccttgagggaccggactacatggtccgcaacgcaaggaggtccatgctggaggagctggaggggatgctggagatcgtggagcctcagccgccggggaagccgaggacgcttagccgcaggaggttcgatctcccagaaggcggagccatcgaaaaggagacgagggaggagggcaagtga

SEQ ID NO: 7568 - DNA, 564 bp, Zea mays
  Peptide Sequence Number=SeqID_50943
atggcgcctcctgttgacgtggctggcccgcaccctaggttgcgtgatgtggaggctcctccgaggtcgaggtcgagtctgtcttccgtggccgtggtcgagtctgagcccctgggtcgggcgaggcggagaccgtcggctgaagccagggctgagtccgagccctggggtcgggcgaagcggagttcgtcgtcttctggggctgagcccaagtccgagccctgggtcgggcggagcggagttcgccgtcttccggggcttagcccgagtccgagccctgggtcggacggagcagagcttcctatggcgcctgcggccgggcctgactgcctgtcagcctcactctgtcaagtggcaccgcagtcggagcggcgcaggcggcactgtctttctgtcaggccgggttgcttcttggcgaagatatggcctcgggcgagccggaaatatgttcgccgctggaggggggcctcgggcaaggcggagatcctccgaggtcggctgcccttgtccgaggctaggctcgggcgaggcgtgatcgagtcccttgaatggactgatccctga

SEQ ID NO: 7569 - DNA, 237 bp, Zea mays
  Peptide Sequence Number=SeqID_50944
atggcggtgcccgcgccgcaagtcaaggccgcctgcccgcggccctcccccctccttgtttgcgcactaggccaaggccgcgccgccgacatccgcgcactctcgctggaacctggaactggtcagcaacaactcagaaaaagctccaaaatcgtagctcaaacaaacgagccatcagagcttctctggaaaggtattgttaagattttggtctcttttagattatattattattag

SEQ ID NO: 7570 - DNA, 831 bp, Zea mays
  Peptide Sequence Number=SeqID_50945
atgcattgcgcccttccaccttccgagcccccggatggggagcgcacgcgttgctttcgtcttgctgctgttggaggagcgcaacttcgtggaagttggtacctttcagccatcgctcggcttcaaggattttcatcaggcagcccggctgcatcccctcgccgatggtcacccaagacggtgaccaccagtttgatggtggggagaagcaagccgggctgcggcctctgccccgccctcagcttcaaggatcttcatcatccttgctggggcggagggcgagctgagccggagctctacctcccgtacggaccggcaggccacctcctccttcagcattcaggggagagggcgctcaccggcctagggggggggcggacttcgacaacgcagggccgatcggccgcaagcgtcgtcagctccagcgtgcccgcttccggtgccacctcccaccactgggcggagtgcggctatctgcccgccatacgggcagttgttgcgccgtgtgcaccgggggactgcccaagacgtcgcgcgctgctagggcggcgttcgtgttcttgggctgtcctgcccttgctccggtacgacgcctctgcgcggaggttggtgctcgcccgtccgggaggacccgagtggggatctgccggtcggcagatggctgccgtcgtcggtgctgagctggtggcagctaaagaagtcctcgtcgccgacgagatcgtcgccaccatctgcgctccgggcctccggctctttggctttgatagcttgtcctcgcccctcaagtgggggacgtgggtgagggccttatcgcagcagcgtctgccctga

SEQ ID NO: 7571 - DNA, 369 bp, Zea mays
  Peptide Sequence Number=SeqID_50946
atgagcttgacacaactaaaagggaagtgcattgctcaaccttctcaagataatcgtgatcacatggtgaagaagcttgagacgggaacaaccgtggcatgcactaaatcccttgaagaaagtgtcaaggacttgaggattgccaagaggagggaacaaaagaagaaaatcaatacttctttcaaaagcctcaaccatgtctccatagaaggtaacatccaaggaaacccaaaattgcaacttgtgctagaaaagggaaaaaagagacaactacaaagggaggacactcaaatgaaaaaggaagacatcaagagcaacaacaccaaattggataatgagaccttcaaaacaatcatggtgtggttgtaa

SEQ ID NO: 7572 - DNA, 1257 bp, Zea mays
  Peptide Sequence Number=SeqID_50947
atgcattccattctcagcgatgaggtggggttcttgcacccaacacaattctgctcactagattgcgcccgagatggtgactccgcttcacaatctacagagttccattgcgcaagatacttctggtgcagagaccacaagcttgccatctccgccgagatcctccccgagctttaccatgctgctcgggatgcctactacaacgcaagggatgccccactatcgcgcactaatctcatgaggcacaccaaggcactgctcatactttgtcctgacctactcactgcatggaactccaggaaaatggtgctatcagcgttgtatgatttcacaaagctcaaggatgaactgcaattgtgtgccttgatcctttcctactctccaaagaacgagagcacatggagccataggtacaccactacaccccatcttgctcttgtgaagccatcttgcttattgacctctttctttcagacaattcccatctatttggactttggagctgattttgatataataaaactaaactgcatggagtttgaaataactgtctgccacaggagatgggtgataaaacaagttgctgagcaacatcaagatatgttggagcttatagggaatgaatccatactggtcaaagagatagcagagtctttgctgcttgcgctactagacaacttctttgggaatgaagaggattcccttagttgggagtcagatatttgcttgctatggaaggaggagcttaggtgggatgagatgctgatcaaacgctaccaggggagagagtcgttatggaaccaccgtcggttcctttcacacttgtggatacaacacttgctcactgttgaaggaaactggcccgcaacgacatcccagatggatatgtttgtcatccaggagatacaactgctgtcagagtgcctgcatgatcctgtggatgagtttgaggagtcgcgtgtccaagcagagctttcagcgctctacattatgtggataacaaaggcaatcagcagctggttttacccagcttcttgcttatcacaagtcccggatgtgaaggggaagctggaagagaggttgcattttgcctccatggggaggctgaaggacgtgctggcaggagcctgcaggccagagaagaggttttggatgaatttgctcaacctggctgatcaatccagtgacaagtgcgactcaaagatgccgtacgtccgcagcagacaggcaggccgtgatgatgctgagaataactaa

SEQ ID NO: 7573 - DNA, 136 bp, Zea mays
  Peptide Sequence Number=SeqID_50948
atggacgaggaggacatatctgtcatcgtgttctactgctgccatgcgtatcatctgtcttgccttgaaggtggcttagactcgatgagatcaaacagtggtcaggatagtgacggaggcatgtacgatgaggatg

SEQ ID NO: 7574 - DNA, 660 bp, Zea mays
  Peptide Sequence Number=SeqID_50949
atggagcaccgtcccgggccggagaggttgctggagactgcccatctggagcttgacgggaagctgttcgtcagcacgcagcagacccctacctggcgcgccaactgtcggcgtttcgagaccggggtagggggttacaagcgtccacgcggtcgtaaggagaggatccaggtgtacaatgggggtgtagcagagtgctacgtgtctagcggagggagagctagcgccctaagtacatgccaatgtggcagccggagagatcttggcaccctgctgctgagagccgccgtcgtcacagggcacgtggggcgccatcattgcctatctggcggagctagccagatgggacaccggtcttgttctctgcggcccgagtcggctcggggtagggtgatgatggcgctccctgttgacgtggcgggctcgcgcccgaggccgggcgacgtgggggctcctccgaagctggggtcgagtctgtcttccgttgccgaggccgagcccgagcccctgggtcgggcgaggcggaggtcgttcggcagaggccagggcggagtccgagccctggggtcgggcggagcggagttcgccgtcttccgggtcttagcccgagtccgagccctgggtcgggcggagcggagttcgccgtcttccgggtcttag

SEQ ID NO: 7575 - DNA, 4302 bp, Zea mays
  Peptide Sequence Number=SeqID_50950
atgaccgaaggagtagacgttgggaagcagcacttgacatcttcgactattaccaccaatgaggatgctgatgagactgtactttttaaagaagatgatgatgatgatgaagaaggatacctattcgctgggcaagatggtgaatctggtgaggatattgagattgatgaaacccaagatgcctttactgtcaaccctgacgtacctgacttgtacgacaaggtgtatagtaacatacctgaagaaacacatttgctgagcactgttgctgactgcgattactgcaaagcgaagaagtttcagtatgaaccacctggattttgttgtcgtaatggacagattaatttagccgcattcgagacaccgctccagcttaggaggctgtgggagtctgcagatgctgatgcgaggcactttcgtgataacattcgattttttaatggccatttctcgttcacttctctgtactgttgccttgatagtatgactacaaacatggattgtggtatctatacgtttcgtgcacatggcatgatgtaccacaacgtaaggtcgttcggtagggaagttggggcggaacataaacaccttgaactctacttctacgatgatgatcccagcctcgagcatagatatcgtaaatgtcatcaacaacaatttgagaaagacaagtcagttattaaacaattggttgaaatacttaagggaaatccatactctgagcaccttaggagtatggggcacgttgataacattgaagactaccacatcgccttgaaccttgaccaaacgctgaaccagaagttatataattcacccattacttcggaggtagctgtaatttggattgaggggagtgaatgtcgaggtcaattcagtaatagtgttatgctacacgggaaggataggtcaagccacggcatccgttcatatcatggatgctatgatgcactatcatatccattgttcttccctaaaggtgaacttggatggcatgccaatattcctaagtccaatgtttccatggacgaagtagacgcgtaccgcgatcaacataggagaaaacgacctagccatctatgcgtgtctgtacgtgactattactgctacagattccaaattcgtccaagtatattcaatccaatacttcatgggaagcggcttttccaacagttcgcggttgacacctacatcaagattgagagctctcgtttggatttcatatgtaaaaaccaagacagattaagggcggatctatacaagggtttggtagatagcttgcatgaaggcgagaacaaagcagacaaaattggaaagcgaaccgtgttgtctacatcatttattggtggtcctcgtgacatgagacgtcagtatatggatgttatggcccttgtgcggaagtttgggaagccagacatattcctcattatgacgtgcaaccccaattgggatgaaataaccagagagcttctccctatgcagtcaccacaggatcgtccggaccttgttaagcgaggtttgcctcatgtccatttcctactcatcatgcagagaaagtacaagctaacttgtcctgatcagtatgatcaccttatctccgctgagatccctgacaagaagaagtaccctgaactatacaagatggttatcaagcatatgatgcatggaccgtgcgggttgctaaatcctaaatgcccatgcactaagggtcgtgcttcatgcaaaaaccattatcctagagcttttagcaatgcaacgtctcaaggaaaggattcatatcctatttataggcgtcgtgatgatgggcgtaagaaaacagttcgaggttgtgaattggacaacagatgggtcgtcccttacaacccttacctcctctggctcttcaactgtcacatcaatgttgaggcgtgcgggagcatcaaggctgtcaaatacttgttcaaatacatatacaaaggccacgatcgtgtgtctgtggctgtgacagacgcaaacaaggctgatggtgatgttgatgagatcaagcagtatagagatgctaggtgggtgacccctccagaagccctttggaggatattcagctttgatctaagtcaaaactctccaccagtgatgcaactgcagctccatcttgaaaacatgcatatggtgtcatttcacgagcgtgctaaagtaaatcatgttgtccaacgtctaggtgccgataggtcaatgcttacgacatattttgaggcaaataggctacacgaggaggctcggggcatcctttaccgtgatttttctgagtggtacactttgcagcagggcaaggtgtggcaaaggaggaaacgaaacacgggtggacaggttggtagaatagtctctgctcatccagctgagggggagcgcttttatcttcgacttctcttaaaccatgtgacgggtgctacctcctatgcggatctaaggacagtagatggtgacacactaccaacttttcgtgaggcagcacaaaggaggggactgcttgaagcagacgacacaatagatgagtgtctcaacgaagccgctatttaccaaatgccgtcagcactacgaaggttgtttgcaacaatactggtatactgcgagccgaacgatgtggcagaattatggcagagacaccttgactcaatgtcagaggactatcaccgtagtactcaaagcaaaatccatgtgcagcagatggtcttgattgacattagaaacattttgcagtcaatgggtaaagacataaagacattccctctccctgctattattgatagatatgacgattcgcatggtactgatagagagatttacgaggaggaaagtatcgagccgacgacagaagacgttgctctgaaagaaaccttaaacgaggagcagaggtctgcttatgataagatcctatctgtcgttgacaccaataacagtggagtgttctttgtggatgggcctggtgggactggaaagacctatctgtataaggcattgcttgcagcactacgcagtcacgacaagattgcagttgcaacagctacatctggtgttgcggcttctatattgcctagggggaggactgcccattcgcgcttcaagataccacttactattgatgatggtgttgtatgtagcttcacgaaacaaagcgggacagcaaagttgctacaaaaagcatcgctcattatctgggacgaggcatcaatgactaagagacaagcaattgaggcgctagacaatagcatgcgtgatataatgggacggtctaggttgccctttggtgggaagactgttgtgttcggggttgatttcagacaagtacttcctgttgtacgcaaggggtcaagggctcagatagttgctgcctctctacggagttcttacctctgggaatccatgtgccacctaaagctttttcaaaacatgagggcacagagcgacccatggtttgtagaatatttgttgcgcgtcggtggtggaactgaggaagcgaacaacgatggtgatgttcgtcttccagatgaggtatgtgtgccatatactggtaatgaccgcgaccttgatagactgatagatgacatttaccccaatctaaatgaaaacatgtctaacacaagctacatcacttcaagagcaatattgtctacacggaatgactgggtggatatgataaatatgaggatgatcgatcgtttccaaggggagcaaatgatgtaccatagttttgacaccgcggtggatgatcctaataactattacccatcagagtttctaaacacgctgactcctaatggactacccccgcacgttctgaagctcaaagttggatgcccaatcatgttgcttaggaatatagaccctgctaatggactttgcaatggcacgaggttggtggttcgtggtttccaaaaaaacagtattgatgctgaaattgtccttggccaacatgctggaatgcgaattttcttgcctcgtatacctctgtgcccctctgatgatgagatgttccctttccagtttaaaaggaagcagtttccgataagactaagttttgccatgacagttaacaaggcccagggccagacgattcctaatgttggtgtgtacttgccggaaccagtgttctctcatggtcaactttatgttgctctatcaagggccaccgctcgatcgaaagtgaagatacttgccattccagtccacgatgagaagaagaagaagggggttgaaaggaactcagcgataaatggcgcaacatacacaaataatatcgtttataaggaggtccttacgccgtaa

SEQ ID NO: 7576 - DNA, 621 bp, Zea mays
  Peptide Sequence Number=SeqID_50951
atggttaaaaattttggcagcaaaacagtgcaaatagcaatgaatgctgtggtaagaaggcgagtcgccaggatttttacaccaggcgaacagctggtacccactgaacactgggccacagaacccgagaagcactgtagtctgtcaccactgccagcatatgagcctgcatttgattgggagaatgagagtggcttgaagataactgtcaagataaggacgtgccaagaatggaggaacaaaaccatgaagactacaactgagagccgtagttggccgagtcgtttaagcagaacatgcctttttaacacagtgaaggttcgcactattaaagtggaaaagaggatcaatgagattgtgaaccgcttgaataagacaaaggtggaaaggaaacctgatttaaaggctgaaagagaggctattagtgctgctgaaaaggcagaaagaaaggcacagcttagagacaagaaacgtagggaagagatggagaggcttgacaaagagaagcaggctgatatcaggagctacaagggtctaatggtccaagagaagatgacttccaacaagcaaatcgcttctggcagcaagaccctgcaggaacttgaagaagacttcatgtga

SEQ ID NO: 7577 - DNA, 1557 bp, Zea mays
  Peptide Sequence Number=SeqID_50952
atgaagacttctgccctggggggccgaacagcagcagtgataacctcagggcgggtgctgctgccaggaggccccgcccatgccctaaaactcgagaggcaaggacgggcagaaggccgtatatttggaggtcggtccgtggccaaccttggctatcacgccggcggaagaacctcttccagctgccgtgacagacgccggcgccgcgagcggctccgaagccactcgcgtccgaaagccaggcacgctgcagatgccagcgccacggacgacaaccgctcctccctccgatcactgagtgaaggagcgggctgccgcccacgcgggggccgacctcaactcgacacactcccctccccagccctggtgatgaaaatccttgaggctgagggaggggcagaggccgcagcccgactcgctttccccctccatcaaagccgaagaccaacgggcgaaagaggcgggaagccatgcaggcggcatgcaaccgggccaagtggacgcacttctccgactcccgacacgccagcatggaggcccaggcccacgcgtcgcgcaaccggcacgccagatgctgcatgcaagcaactgcctcgcctgcgccaccaccgcgcctcctcgattgcggaaccaacaccgcgactcgaggcgacccagcgcgcgacccagcggcgccagcctgacgcggcggccaacgtggccaaaggagggccggcagtaatgacggcggcaggcgcgcgggagcagcggtcacgtcgtcagccaagctcacgtcccatccgggggcagcgagagagccccctctcacggcgtgaagacaacgcgcccgtgatccgttcctcgaacggcccgcgcacgcgcaacggcagccccgccagctactcgccccatcgcattaactccgcggcgggacaggcgacgcttctggcaggaaaagcggacgacgcttcgccttcgccgaaacaaccgcgccaaaaaaaggctccgagcctccttactgatcaggggttcgaaggctggccccccgaagggttcaacagtcgcctcagatcgcgtgggccctacacccactactggtcagaggttcgaaggccggccccccgaagggttccacggccgcctcaggctactcaggctccgtgcccattactgatcaggggttcgaaggctggcccccgaagggttcacagtcgccccagacgccgagcgagggatgaccaggggtacgttcgatacataaccaaggctcgggctgcgctcccgagctcaccggagacaccatgttcggtgcccatcgagggtagcatggcgctctcccccctcctccttgcggaaaggcgacgaaggggcgtacgtaaaaaagctgagtctgtccctgatcgtcctctcaccctgtgcagaggctcgggggctgctctcgcagacccggctccggccaaatcgttgacagcgtcaacataccagcccgagaacttgggccccgaccgtgcacctgggctacgaccagttcgcatgagggaacaaccagacctgctgaagcgttacgcaaggcattaa

SEQ ID NO: 7578 - DNA, 102 bp, Zea mays
  Peptide Sequence Number=SeqID_50953
atggatagcggcgacaacccccgcagcgggatcgggaaagggggatattccggaaaaggatccttctcagcgaaggaaacgggccccgagccctcctactga

SEQ ID NO: 7579 - DNA, 1338 bp, Zea mays
  Peptide Sequence Number=SeqID_50954
atgcgaacacgcaacgattctccacgtggccaccgcgcccagtccacgctcccccaaccagcccacctaaacccccgacccatcccgacctcttcctcaaatcctcagatccgccccctcctccacccttgcgccgcgctttcacagctctcccgcctccggatccagatccgccgccaccaacgcctgctcctccccctcccgctgcaccaccaccatcaagaggtccagcagggcggcagcggcagcggcggcggcggcgacatggggcgtgacggcggtggcggtgtcgccggcggcatgtctgactcggtgctccggaaggtgctcctctcctacttctacgtggcggtgtggatcttcctctccttctccgtcatcgtctacaacaagtacatcctcgacccaaagatgtacaactggcccttccccatctccctcaccatggtgcacatgggtttctgctcatccctcgccgtcgcgctcgtccgcgtcctccgcgtcgtcgacctccccacatcgccctccatgacgccgcagttctacacctcctccgtcgtccccatcggcgcgctctacgcgatgtcgctctggttctccaactccgcctatatctacctgtccgtgtcattcatccagatgctcaaggcgctgatgcccgtcgccgtctactccatcggcgtcctcttcaagaaggagaccttcaggtcctcctccatgctcaacatgctctccatctcattcggtgttgccatcgccgcctacggcgaggcgcgcttcgacgtgcgcggcgtcgcgctgcagctcgccgccgtcgccttcgaggccacgcggctcgtgctcatccagatcctgctcacgtccaagggcatctcgctcaaccctatcacctcgctctactatgtcgcgccgtgctgcttctgcttcctcctcgtgccctgggccttcgtcgagctgcccaggctgcgcgccgtcggtaccttccaaccggattttttcgtctttgggacgaactcactctgcgcctttgcgctcaaccttgccgtcttcctgctggtcggcaagacctcggcgctgaccatgaacgtcgcgggagtagtcaaggactggctgttgattgccttctcgtggtctgtgatccgtgacaccgtcacaccgatcaacctgttcgggtacgggatcgcgtttttaggggtgggctactacaatcatgtcaagctgcaggcgctcaaggctaaggaggcacagaagaaagccacacaggctgatgaggaggccgggtcgctcttgcaggagcgcgatggacacagtgatcgcaagagcgacaatcaggcctag

SEQ ID NO: 7580 - DNA, 474 bp, Zea mays
  Peptide Sequence Number=SeqID_50955
atgtccggtgcaccagaggactccaactcaaactcatcaccttcgggaaattccagaggcaactccgctataattcaccggacatgtccggtgctccaaggaagagcggcctcccagaactcgcccagcctcgggaattcatttcaggtgctccgctataattcaccggacatgtccggtgtacaccggactgtccggtgtaactgcggggcaacggctacttctggcgccaacggctacctgcagctcaataaaggcgcgtcagcgctcgcagagtcaggccgcccatactggcgcccggacactatacagtacatgtctggctggctgtcgtatggtgcaccggacagtccggtgcataccggacagtccggtgcgccagccacgtcaccaaagccgttgggttccgaccgttggagctctgacttctgggcccgcctggatgtccggtggcgcaccgaacatgtactgtag

SEQ ID NO: 7581 - DNA, 1170 bp, Zea mays
  Peptide Sequence Number=SeqID_50956
atgacgtgtgggacccagcccccgtgtcgtagagggaggaccctggagcgcgccggagcgaaacctcatggaggttggcacccttcagccgtcgctcggcttcaaggattttcatcaggcagcccggctgcattccctcaccaatggtcacgcaggacggtgaccaccggttcgatggtggggaaaagcaagccgggctgcgacctctgccccgccctcagcttcaaggatcttcatcatccttgctggggaggagggcgaggcgagccggagcctgccttcgcgtgggctggcgtcccgcttcttcctccggcatctgggggtggaaaccatcctccagctctgcggaggaggcgtcctccagccatgcgggggaaggcgaactgctgctgcctggccagggtgcagcattccgtcctctctccgggcgactgtggccggctgcaccagagggtcacacaacacgtcgtacgccacgagggcggtactcgtgttctgggacggtcctgttcttgttttcgtggcgaggacgggagtgaagacctgccggtgtgctttggggcggccgacgctcgtcggtgcggtgttggcgggcaggtggatgctgtcgtcggtgctgaggtggtggcagtcggagaaggtttctccgccgacgacaccgtcaacgccacccactctccgggcctccagctctttggctttaatggctggttctcgtcccccgcgagggacgtgaacgagggccttccagcgtcaaagaaccctcagctgctctgcgatgagccggagccggaggcaacagtgtcagcgtggacagaggtggagtcggttcaagaagaagcttcgtcggcccgggagcacgtggcctccctggccgaggaggtgcagcagcggcagctggagcttggccaggtccttccgcccgcgtcgccgtccgaggccgggccagatcccgccgaaggtggaaacaacgccgagggtgctgctgctccctctgttgatgacttgttcgttggtagcagaatcgtttatccaagtgagagttacttatcacggaaggtgatgagtgaggatcccgctatcgaagcagtcgaaaagcgcgaaagatgttctggcagaaagacttttgccgaggaaaattttgatgcagagggggttccccccttctag

SEQ ID NO: 7582 - DNA, 129 bp, Zea mays
  Peptide Sequence Number=SeqID_50957
atgaagagagcatttctatgtaaaggtacaaaaaggtgtcaaaggttcatctacaactattctaaatcgactgtccggaataccgtagattattctggacaggagaagctttttggaaaaacagactaa

SEQ ID NO: 7583 - DNA, 303 bp, Zea mays
  Peptide Sequence Number=SeqID_50958
atgatgactgaaatgaactccattcagtcaaacaagacttgggtgctgtcagtgctacctgcaggccacaaagctatagggcttaaatgggttttcaaggtgaagaaagatccatatggaccaagcagtgcaaacattgaggcattcaagaaggagatgatgaagagttttagtatgagtgacctggggctgcttgaaagggaaataaggtgtcaaaggttcatctacaactattctaaatcgactgtccggaataccgtagattattccggacaggagaagctttttggaaaaacagactaa

SEQ ID NO: 7584 - DNA, 576 bp, Zea mays
  Peptide Sequence Number=SeqID_50959
atggctaccgacaacggtcacttgtcaaacatttctgcgcatcagagctcgcactacgtcagacacatgttaacacgtgcatccggcacatctatcaggacatcttcgatgtgcctacagatcagcaggcaggcccagctgtctgaggtccaacatttcgccctattcacccccccccctctaggtgactttaactactgctcagtgctcggtggggtagctgacggtctcaacctgaagtattacccccgccgtccatctggcagcacaggaggtgtgattgtctcacctgttggtgaggacaattctaggttgagcagcacagtcaacctagccgccgtgctaaacacggagctggaccatatgtcagagaacaggtgcagaggaggaaggcgtgctcagcagaagcaagccgctcagcaggatgaggtgactcagcaacagcaactgccgcccccgcccccgatgtctatcgagcagatgttcctgatgcagactcaggcggttcaagccatcggtcagaccctggccgccattcagcaacagcaacagcagcaggccccacctcagccttag

SEQ ID NO: 7585 - DNA, 1842 bp, Zea mays
  Peptide Sequence Number=SeqID_50960
atggaggtagttgagttggttccttgcgcccgcaataaatggggcaactggcatgagttttggttctatgttgcggagggcacagtcgaagaccatccggggctccccgtggccgagatgtgctcgcattattactcagcatacccgcagtttgaagtggcggaggaggatgcagacgaaggggcccttcggtgcgcggccagcctgagcagcgggcgcgatttggttgaggactttatggcgtatggggtgtggcctttggcgcatggctgggcgctgggcgaagtatgccctcgccagatgccttcccatggtgggatgctggtgcgaagtcccgccttcgcactggatctgcatagccgcgatccggccacctttgtgcgtgaggcggaggatggggcggtgcggattgttggtcggtacgtgccgaagacagaggtccagcgtagctgggatatatgcgggtctaatgaccgcttgaacagggtcttcgagttgaaccgtctgccgtatggcggttatcccgggcaagacgatgtggatcgtcgcgggaagaagccggcggcagagactgaagacgaccccgtgtcggcggccgccccatcctctaagaagaggaagctaggtattgctacgggaggactgggggtttccgatggttttgctagggaattgatgaggacatgcgcggccccagggggaaggatgtcttcgcccgatctccgggagtcttcggcgcgaatgctgagggttaccgggggttggtggcctaagaatgttcctatcccccgcgcggccggcgaagacttttttacatctcgcatggttcatgattggatagtgtttccttatgggcagaatattgctgctgttgtgtcggcagtgatggacaaggatcgtcagggagctacgcagaagcgtcaggcggtcgtcaggctgcatgaggccaggctgaagaggtcgcgggggactgcgaaggctgctgcccccggcggaagccaaccgacgctggcggcgaagtcggccgcccctgggtccagcagggtgccggaggctgtgaaggcggccgccgccggcggtaccaagtctgtcccggccagcgctgcgaaggcccgagagctgcctccgccgggcaagcgtgttgccgacttcgccaccgatattagcgtggatgactatcttgttgggtcgggcgaaggccaacttgttgttgttccgcctgtcgtggcgaccgcggcggctgccgtggtgcctagggcgaagggtagtgctcttagtgccggtggtgagattccggcactcactgccgtcagggacgaggcgggcgctgtgtcccaccggctgaaggaggcattaagtcaggcggctgacttcgcagaccgcgcggcatcgggggcccttacgacagttgtgtctgccgaagtcgagagacttcgggcgcaacatgctgacgccgtccgggaaaagtcggccgccgacagcaagtgccgcaagttggcagataaggtggccgcgctggagggtgagaggaatgacctccggcgccaactggcggaggagaggaaggaggctaatgaggccctcgccaaggcgcagtctgcgcaggcgaaggccaatttggcgcaggcggagggcagtcttgctagacagcgcgccgaggaattggaggagcggttcaacgctctgcagacccgtgtggagagggtcgaggcttcgacgcgctcggaggctgagcgaacacgcaaacagcttatggactcataccatgagctgggcgcgcggaccgctgacttcgaagtgccagaccgagagcccagacttcgctgcctcgagtggctgtag

SEQ ID NO: 7586 - DNA, 1566 bp, Zea mays
  Peptide Sequence Number=SeqID_50961
atggaaggtctccacgcgcaatccgccgcctgccatcgccagcgcgcaatcctttccatccgcgcccgcaacgcccgcccctgcgccaaatcctccttggacgcgccccgacggctggcgcaacccgtcgagcaaatccgcgtagatcccgtctccatctcccgtcaaccaggcgagtcccgccgtgaatgtcgcccacctcccttcgactccgacgctcccaggaccacaccgcccaagccgtcgagcaaatccgcgttgtgcaagtggtggcgcagcctcgcgcccgccctgctcgccgccgcactggcgatcacggtggccgcgctgcggccggcgacggagcacgcggacgccaaggggcggccgccgctgtggttctggccaggaggagtgttcaaagtggccctgttcgcggacctgcattatggcgaggacgcgtggacggactggggccccgcgcaggacgccgcgtccgaccgcgtcatggccgccgtcctcgacgccgagaacccaggtgcgtgcctgcgcacgctctccttttgctttcctggaccctttcccttttcctccgaaagaatcaaagaactgaaacggaactccctctctacctcatggtctctgcggcggcggaatccgatccacgcatcttcgctcagacttggtggtgtacgagcagccatagatgtgcagacatccctattggaagaagatccgaacaagaattatcaagaagacaaaagacatggcgtacttcctgttatggtgcctgaaattggcatgaagtttcaggatgaggtagaggcttggaagttttggaatacatatggcgtccacacgcgctctgttctgcccgccgctctgttctgcctgccgcgcgcaatccgccgcccgcgcaatccgccagcgcgcagacctttccatccgcgcacgcgccaaatccgctgcccctgcgccaaatccaccgccacgcccctgctcgccgatggaaggtccgccgcctgccgctctattctccacgtgcaatccgccagcgcgcagacctttccatccgcgcccgcgccaaatccgccgcccctgcgccaaatctgccgccacgcccctactcaccgatggaaggtctccacgcgcaatccgctgcctgccatcgccagcgcgcaatcctttccatccgcgcccgcaacgccccgcccctgcgccaaatcctccttggacgcgccccgatggctggcgcaacccgtcgagcaaatccacgtagatcccgtctccatctcccgtcaaccaggcgagtcccacagtgaatgtcgcccacctcccttcgactccgacgctcccaggaccacaccgcccaagccgtcgagcaaatccgcgctatgcaagtggtggcgcagcctcgcgcccgccctgctcgccgccgcactggcgatcacggtggccgcgctgcggccggcgacggagcacgcggacgccaaggggcggccgccgctgtggttcgggccaggaggagtgttcaaagtggccctgttcacggacctgcattatggcgaggacgcgtggacggactag

SEQ ID NO: 7587 - DNA, 1023 bp, Zea mays
  Peptide Sequence Number=SeqID_50962
atgtcgcgcacgaagaatgtgtcggcgccagggggaggcgatgatgaggatcctcgtcgccccttcaggcaggtcaagggcaagacattttacttggagcagcaggaaagccgcaagaagcggcctcctcctatccctccacctcgattccgggagcgcgatgagactgaggtacgaccacttgccgcggatcccagactctttgaccttcagcgtgctacagcggcacgagtacgtaggttcagatacgtacccgtagagtcttggttaccagctcagagggaccctgcaacagttgacctattcagcactcgtattcaggagtcctttttcagagctcagatgtctgcacagatagctctgcgagtgcaccgtctcttggaccttccagcttttctactcgccgccggtgctgactctgaggcgcacctcacatatctgcctggccttctgacccttttgactaccagcggcagattcgtcagctctttggatttcccgagtcgacgactcgacttcagcctctgctatggcacctctgaccctcctcgtcgccctcacggcagtgtggctccgggtacagctcacgtcgcggctctgttccgcccgcccttctcagatgggtcgcgacgttcaccggcagattttactacagcagccaagtacttatttgagcttatcagacggactcttctgccgaggatgggatacagggaggctaccacacatattcagctctggctccttggtgccctggtctctcactctgagtttgacgtcgtggatttccttatttgtgagatcgaggacaccgttttggatgggattcgtgctcgtcgacagttgccatatgctcactacttgtgtcacatctttgcgcagctgattcggcctccacagtttcagggcacgcttgaggcctcacgccttgtctttggatcctacggtcctgcgcctgaggctcctgtgccagcttctgctcctatttttgactctcaggccgaggatgcagctcttcgttag

SEQ ID NO: 7588 - DNA, 261 bp, Zea mays
  Peptide Sequence Number=SeqID_50963
atggcgtcgcagtggggggcgctgcgtaggtcgacgtctcgtgcgtcgaaggttaacggtatgtgggaccactttgtctgcacgactgggccggtgacggcgacgtggttgatgctgcggcgccgccgacgacccccgccgcctgtgctcgtggccagggtaactccgaccacctccgacaccgacccgcacaccggcgtgaccgtcgcgacctcccggacgtcactgaccaccccgccggagctctactgccgccgatag

SEQ ID NO: 7589 - DNA, 198 bp, Zea mays
  Peptide Sequence Number=SeqID_50964
atggtgttgctggcggtattggcggtgggtgtgctgcaaagggggtatggggcggtggtagtgcgcatggaggcgggcacgcgtgcgagggggcacggcttattccaggcttcaagggtaagcttcccggtatcttcttggggcttcaacagcaatggcttcacgactttccaaggcagctacacgggcttgtgctga

SEQ ID NO: 7590 - DNA, 1110 bp, Zea mays
  Peptide Sequence Number=SeqID_50965
atggcggctgccgtagtgccgaaggcgaagggcggtgctcttggtgccggaggcgagatgtcggcactggcggccgtcagggatgaggcgggcgctgcgtcccgccggctgaaggaggtgacggaggcactaagtcaggtggctgacttcgccaaccgcacggcgtcgggggccctcacggcagttgtgtctgccgaagtcgagaggcttcggacgcaacatgcggacgccgtccgtgaaaaatcggccgccgacagtaagtgccgcaagctggcggacaaggtggccgcgctggagggggagaaggctgacctccggcgccaattggcaggggagaggagggagaccaacgaggccctcgccaaggcgcaggctgcgcagggggaggccaatctggcgcgggcggagggcaatcttgccagggagcgcgctgagcagctgcaggagcggctcatcgccctagagagccgcgtggagagggccgaggccgcgacgcgcgcggaggccgagcggacgcgcaaacagcttatggactcgtaccataagctgggcgcgcggaccggtgacttcgaagtgccggacccgagagtcccgggcttcgctgtctggagtggcgagggggcgatgaacgcgctctcccgcgaagggtgccggcacttcgaggtcttcgaccaggctgatgaagactttgagcgagatatctacaaggttgaagaccccgtagtgaaggaatccgccggtgccgtctatgaccggatgtggggtccgcacggttgcgaggtggtcagggagcgggtcgagacggcgagggctcaggcggcgcgtggcgagagagtggatgacttcggggcgttgaacagcgtgctgcctgacccggagccgaccccgacggaggccgtgtccggggccgccctggagccgcccccggagaccgcagaaggcgcaccggatacctccacatccgccgcggccggcgaagacctgcccccagagaccgccgaaggcgcgcctgatgcccccgcagctgctgcgccgagtgctgaagatcctgcgacggtggcggtggaggcgacagcggaggcaacggcggaggctccgcaggtggcgtag

SEQ ID NO: 7591 - DNA, 3867 bp, Zea mays
  Peptide Sequence Number=SeqID_50966
atgagttgccgcgcgcacccgcaccggcctagccgcgagctcgcgccgggctcaccacgcgcgcctgctacacgaaggaccgactcgaccgaggaaggcggagagagggaaggggaagaggagaaagggaaagctcacccacgtgcgccgacgatggctgacgaggctagcacgaccagcgacgacaccagaggaccacgagctcggcgcaagggcggcaaggggcttttggcacaggtcggcgctcccctgtcatcggattcgattcccctgctcaatttgccgccgatccgtggttcggatcttctcgccgctcggcgactgtcgcgccattttttctctcgatccgtctgcgagacactaagcgcttcgccgacggtcgaccctgctgacgccaccggcgccaggtggcttgtcgcctactctgatggtgaggacactttgtctgagagggaatctgttggagcaaaagatggacctgccttgcctaatgggagtggaaaggaggctcatgcaagcagtccatctgcggcgaataagaggaagcacaacgacttgggttctaatcaaatggaactcaatgaaccagggacgccaagttccagctcaggtgattccacatggagcataaatggtctcgatgactgtcaccaactctcattgtctagaaataagaacgacgactctgaacattcggttacttcagctggagttacagtgatcaggcagcctcgtggcgtcttgaggttaagaaagctggctcagaatgttagtactgagagttggactggtggtcataatacttcacaagctaatggagttcctaggtcttcccaacacccgaggcggaacaataagagggaatcaattccgtcccaggagaatagagttagtggtgatgaacctgtcagctgcttgaggactgagaatggtacttgtgatcaggataccggcaccaagttctgttccaaaactgagttcttagctgaaaagcagtcacatctttcaggcgaacccccaaaagctgttcatgttgacaagggtgtctatgattatgtcaaagacgatgatggtgatagtttggaagaaaatgctgcctggatgctctgttctttatcagataacaaatgtgctggatcaccaaggaagggaactgataggttgtcaaagagatctttttctcagaattcaaaccattttaagaattcatatgaaaaaatcaaggatatatgtagtcctgctaggttgctgcggaagcgtgatggcaaagttccgttcttgaagcgtcgtcagcgtcggcatttttatgaagtcagccctagcgatgtggatccattctgcattgttaaagagaggatcagggttttttggcctcttgatgagacttggtactttggcatggtcaaggaatataatccggtcacaaggttacatcatgtcaggtatgatggtaaggatgaagaatggatcaaccttcaaaatgagaggattaaacttctgtttttaccagcggaagctcccaataaatctaaatgcaccaactcaaggtcagcgtttgagtcgaagcatgaacagggtgacagagaagacatgcatagaagcggaagcaatacagagagttttgagtcaggtcccatcagctcatggttggctcgatcaaaccaagcaaaatctgctgcactttgtgacatcaacaagcaagatcacagtcattccaatactgttccagtttcatttgaccaaaaacagtgtcgtgcttctgatgccaaggaatctattgattctgcaccatgtagttcacttgcaaatgggggtgtagaggttctcaaggataggaccatacctgaggacgggagctttgttggtgtagagaaatggaaatgggaacaccttcaaggaaagcttcaatatcaatgttccaaaagggagttgtctaaagattccacaaaatgtacaggtcgaagagctcttccttcaatgggtctcttctctaagaagtttgcagaggatcgtatttccatcaatattcctcaagacaaagcaattgatgcaacaaatgataaacctcttgacaaagatgaaaaagaaaagcatcctatatctaacttggttcaggaattgaatgaacatccaattggtcgtgttacaccaactgcccccagaactacttcccatcggaaccggtttacgtctatatcacgtgcttttggagatggttcaaagttactgccagaagaccacatgttgactggcttcgctagtggttctaagaagccacgaagtcaagtttcatactcaggttctcctagaagtgaggaacttggcttaaaaaacaaagatcatttccgcaagatacaatctcatgtcagtgttaagacaagtgatgcaaaaaaacttcctgatagttctagaagtgggcatagcagtccagagctattgacttgcattgcaaatgttcttgttacagtgggtgatagaggttggagggagtatgatacccagatcacaatggattctgatgttcacagtgaacagaggatatgcgtgaaacttgctgaagggaccaagtatgctcacaaggtctgtcaagttttgcagcctggggccacaaaccgctatacacatgccatgatgtggaagggtggggctgagtggtgcctggaatttcctgacagaagccagtggttgattttcaagcaaatgcatgatgagtgctatagccataacatcagagctgcttctgtgaggaacattccaacccctggtgtccatttggttggaatccatgatgataatgatatggtatcctttgtgcgatctgaagattatcttgtccacatcggaacagatgttgaaattgctcttgatgaggcccgtgtgttatataacatggacagtgatgatgaagagtggatatcaagccggcagaaattcttagtaagagacaacaacgccacacttgagttggcagaagatttgtttgagagggttatggacaaactagagaagtttgcatatagccacgactctaatgaactcagcattgttcagatgaaggaactggagactgatgacctacctctggacattattgaagtgatacatgcatattggcaagctaagaggcagaaaaagggaatgccacttattcgacatttccagttcgctatgtggaaggtctacgagcaacagttacatgaatgggaatcgaaagtatgcagaatgcagggttcatcaaatgggtaccaaggaaaaaaaatgcctcccaagcctgcattgtttgccttctgtttgaggcctcgtggactcgatgtaccatacaagggaccaaagcagcgttctcataagaagcttatgtctacaggctgccatagcttttcaagacagcatgatggcttttaccggcaagggtactctcccaggttctctacaagaacaggttctcttcgggcatttgagtcctcggaaagttctacaccaagatttttcaggacaaatattgtcaaaaggagtgcaaccgttgctttctctgatgatcaccagccgtcgccttccttccgccctcagagagttaaacggagcgcatctgaccattggaacactgtcattcatgactggcagaactcaaagcatctctttccgggctcgccccctgttgatattgaggagctcaaactgcgggatgctgcaagcgcagcacagcacgctgctgccatggcgaagctcaagagggaaaaggctcactgcctgatgcagaaggctgaccttgccctccataaggccacggtagccctcatgattgctgatgcaatcaaatcttccagcaggaacaagtctcgggattgccgaaggggatttgatgaatga

SEQ ID NO: 7592 - DNA, 104 bp, Zea mays
  Peptide Sequence Number=SeqID_50967
atggccgctgcccacgagatctccacaaagcaatccaatcctgggggcggaaggtgcaacaggaggagaaggacgaggcgatcgaggctagggcattctaaccg

SEQ ID NO: 7593 - DNA, 669 bp, Zea mays
  Peptide Sequence Number=SeqID_50968
atgtgtcggcattcggcaacagcagcaaaggaggatggagcagaggagcagacacggttcatacacggaatggctatgggccgtactgtcagcatcactttcccaactactcaggaggcgggcgtccaagaaaacaacgccgcctgccctgctccgactcctgtgccactcgccagagtgaggccgacaacagctaagtccagcctcgggcgccataggaagctccgcctcgcccgaccccagggctcggaatcaacctcgacgccagaagacggtctccgcctcgcccgaccccagggctcggactcaacctcgacgccggaagacagtctccgcctcgcccgaccccagggctcggactcaacctcgacgccgaaaagacggtctccgcctcgcccgaccccagggctcggactcaacctcgacgccggacgacggtctccgcctcgcccgaccctagggctcggactcagcctcgacctcggacgacggtctccgcctcgcccgaccccagggctcggactcagcctcgactctggaagacggtctccgcctcgcccgacccgagggctcggactcagcctcgacctcggaggagtcaccacctcgctcgacctcgggctcgaaccgaccacgtcacaggaggggccatcattaccctacccttag

SEQ ID NO: 7594 - DNA, 903 bp, Zea mays
  Peptide Sequence Number=SeqID_50969
atgcatcgtgtccttccaccttccgagcccccggatggggagcgcccgcgttgctttcgtcttgctgttgttggaggaacgcaacttcgcggaagttggtacctttcagccatcgctcggcttcaaggattttcatcaggcggcccggctgcatccccttgccgatggtcacccaagacggtgaccaccagtttgatggtggggagaagcaagccgggctgcggcctctgccccgccctcagcttcaaggatcttcatcatccttgctggggtggaggtcgggctgagccagagctctacctcccgcacgggttcgtgggccaccttctccttcagcattcaggggagaaggcgctcaccggcctagcggaaggggcggacttcgacaatgcggggctgttggctctggctcggctcccggtgccccctcccgccgtcgggcggagtgtggctatccggccgctgtacggggtcgcgccgcgcgcaccaggggaccgcccaagacgtcgcgcgctgctagggcggcgttcgtgttcttgggctgtcctgcccctagctccggtacgacgcctccgcgcggaggtcggtgctgaggtggcggcagctggagaagtcctcgttaccgacgagatcgccgccaccatccgcgctccgggcctccagctctttggctttggttgcttgtcctcgcccctcgactggggacgtgggcgagggcctcgtcgcaacagtgtctgccctgaggtcatcgctgctgctgtttggccgcccggagcggaggtcgttgtcgctactgccggagcgggcgtcagcgagccacctggggttttgttgcccccgcaggccctccaatgtggggggttgttcatacctgcgggggcggaaacggagttccgtatgtaa

SEQ ID NO: 7595 - DNA, 1248 bp, Zea mays
  Peptide Sequence Number=SeqID_50970
atgcaggcggcatgcaaccgcaccaagggggcgcaccctttcgacttcgacgcatccagcatggaggcccaggcccacacatcatgtaaccggcgcgccggttactacgtgcgagaaactgcaccgtctcttgcgccagtaccgcgccttctcgactgcggaaccggagccgcaactcgaggcgaccctgcgcatggcccaacagtgccaaccaagcacatcggtcacgggtcagtcagctgcgggaggaggcgcgacggtcgatacggccagaagtgggccgacagtaatggcggcaccaggcgagcggaagcggcgatcaaatcgactgcatgctcacgtcccctcctggagcaacaagagagccctctcccatggcgtgaagacgacgcgcccgtgttccgttcctcgaacggctcgcggaccgggaaaaaggggatactccgaaaagggatccttctccgcgaaggaagcgggccccgagccctcctactgatcagaggttcgaaggctggcccctcagaatggttcgacaaccgcctcagagcactcgggctccgcgcccactactggtcagaggttcgaaggctggcccctcgaaagggttcgacagctgcctcaagccactcgggctccgcgcccactactgatcaggggttcgtaggctggcccccgaagggttcgacagccgcctcagagcacgcagagcgagggatgactctagggctcggactcaacctcgacgccggaagacggtctccgcctcgcccgaccccagggctcggactcaacctcgacgccggaagacggtctccgcctcgcccgaccccagggctcggactcaacctcgacgtcggacgacggtctacgcctcgcccgaccccagggctcggactcagcctcgactccggaagacggtctccgcctcgcccgaccctagggctcggactcagcctcgacctcagaggagtcaccacctcgcccgacctcgagctcggaccgaccacgtcacagggtgggcccatcattaccctacccctagctagctcaggctatggggaacaagaccggcgtcccatctggctcgccccagtaaaacaagtaatgatggcaccccgcgtgctccatgacgacggcggttctcagccccttacggaagcaaggagacgtcagcaaggatccgacagccccgacagctgtgcttccacagggctcaagtgctcctccgacggccacgacatcacatga

SEQ ID NO: 7596 - DNA, 897 bp, Zea mays
  Peptide Sequence Number=SeqID_50971
atgtatatgcacataaatgacaaggatgggtcttcttccaagagaaaagacttggctctcaacactagccaagaaaagaaagggaaagccaaaatgcaagttgaggaagaattctcaagtgatgatgatcttgatgcaaacattgccttgatgttgagaaagaccaccaaaatgttgaataaactcaaccgagaatgcatcaagtttgattcaagaaagaagaagttcttatccagcaaaataaagcccacctctgagatggactgctataattgcggagaactcggtcatcttgctcatcaatgcaacaagcccaagaagaataagttcaagggcaagaaagatgatgaccgtgatgatgagaagaaggaaaagaaattcttcaagaggaaggaaggcaagcacaagagattccataaaaataaaaatggaaaagcatatattgttggtgactggctcactgacattgaatcctcaagcgggtcttcttcaagtgaagaagagaatgatgaaaaggttgccgccatcgctagggatttctcttcaccaccaccatcaccctcatccacttctcacctatgcctcatggctaaaggtgaacagaaggtacaacttgagaatgatattattgatgattgtgataatgatagtgatgacgagtatgcttctccttcctatgatgaactagctgacttacttaaagaatacactcaaatcattagaaagtcaaaagataaatgtgacaagttaaaggatgaaaatgagttcttaactggcaagtatgacatagatgttaagactagtgaagaaatgaaagaagaaaataaaactatgccatccactaaaaatagctcaaaacctcccttaaagatgccaaagataaatgtgaaaaattaa

SEQ ID NO: 7597 - DNA, 774 bp, Zea mays
  Peptide Sequence Number=SeqID_50972
atgactctaggtacgtctgatacatggccgaggctcgggctatgctcccgaggtacactaggacatttccgagaccagcaggagcaattttgtaacggagtcccatcagagggaggcatcgagcccttggaccctatcgaaaagggaccgggtccggcaaatcacctgcaggaaaacagcgccactcgcccctctccgactgctgtgccatccgccagggtgaggctgacagcagctgagtccagcctcaggcgccacaggaagctccgccttgcccaaccctgggcctcggcttcaggagaagtctctgcctcgcccgaccccagggctcggcccccgcctcggcctcggaaggtggtctccgcctcgcccgaccccagggcccggcctcaacctcgacctggggcggaatcgcgtcctcgcccgaccccggcctcggcctcaggaggagtctccgcctcgcccgaccttgggctcggaccgaccacgccacagggggtacatcattaccctacccctagccagctcaagctacgggggaacaagaccagcgtcccatccaggctcgccccggtaacaagtaatgatggctccccgcgtgcatccatgacgacggtggctctcagccccttacggaagcaaggagacgtcagcaaggtcccgacagccccgacagttgtgcttctacagggctcaaacgcttctccgacggccacgacaccgcgtacacagggctctagcacctctccgacagccacgttggcatgtacatag

SEQ ID NO: 7598 - DNA, 132 bp, Zea mays
  Peptide Sequence Number=SeqID_50973
atgacgactgacaggccacttgagctactccatatggacccattcggcccgatagcttacataagcatcggcgggagaaaaatctcaaacccaagagaccttatagggattcttgagacgggctcaaaatga

SEQ ID NO: 7599 - DNA, 537 bp, Zea mays
  Peptide Sequence Number=SeqID_50974
atgaacgcgctctctcgcgaaggctgccggcactttgaggccctcgaccaggtggatgaggattttgggcgagatatctttgaggtcgaagaccccgtggtgaaggagtccgccggggccctctatgaccggatgtggggttcatacggtcgtgaggtggtccgggcgcgggccgaggctgcgagggctcaggcggagcgcggcgagcgggtggatgacttcggggcgctgaacagcgcgctgcctgagccggagacgacccctgcggaggccgcgactggagtcgccccgggaccgaccccggagactgcggaagatgcaccaggcgcccctgcacctgctgcggccggcgaagaccttcccccaaaggtggccgaaggcgcacctgatgcccccgcagctgctgtgccgagcgctgaagatccagtggaggtgggggcggaggcagcggcggaggcggcggcagaggctccccgcagcggcagggccttcgcaggttcaagattttgggcctgcgcacgcaaccgctactactga

SEQ ID NO: 7600 - DNA, 795 bp, Zea mays
  Peptide Sequence Number=SeqID_50975
atggcgtcgcgcccgcccctccgcactacctccgtcgcctccgtcttttcctccaccgactcctccacttccaccggcccccccggtggcgtcccgcagtccatcaccgcgctcctcaacaacccgctcccctcctccgccgcctcctcgtactcctggttgtcgtggccgcccaccaccataacgctacccgatgcggctccaccgccgccgtcgcacccctgcgagatcacccgcgccgacttcgcaccctaccttgccgccgtctccgaccccttcgcgcgcttcgccgacatccgcctccatgcccacgccgagcttgccgcctcttctgacgccgagggcgcccccgcggcctcctccggcctcgccgcctgtctccgtgaggtgcccgcgctcttctttaaggaggacttcgcgctcgaagacgggcccaccttccaggccgcctgcccgctcgacgacgatgcgctgcaggagcgcctcggacagcacctcgacgtcgttgaggcccaccttgtgcgggagatagcactccggtctgagtccttctatgaggcgcagggccggctgcgcgggcttgatggggagatcgtcacggcggtagggaggatccgcgagctcagagaggtggtccaggttctcacgggggacctcgtcggggcagcgaggcaggtgcaagagctcaatgctacccgaggcaaccttgtggcgctgcagcagaagctcactgtcatcctctatgttagccaggcgcttaccgcgctgaagctgtctgacatggaattacactag

SEQ ID NO: 7601 - DNA, 324 bp, Zea mays
  Peptide Sequence Number=SeqID_50976
atgccaactctgcttctgcccttactgatcctgttgccttttgatatcgtatcaaagattgtgcaggtcccgaaaataactaggaaggctgtctgtgttctctcagtgtttggggccgttcaggattgctatctgctccactctgctgtcatcttaaatcacaagggtcctttagaaatcattcgtgtgtttggatccattttgacatctgatagtcctggatttgggtgcttatctgcgactcttgcttgtggtgattgttctcttgtcggtggcattgcagttggacctctcatagctacaacaccggtgcagggagaataa

SEQ ID NO: 7602 - DNA, 306 bp, Zea mays
  Peptide Sequence Number=SeqID_50977
atgggcggggaaggagcccatgctgctggaggtgctggaggaggaggagaagctggtggcagagttggtcgacatggtgacctaggtgagaggggcagcacaacagagagtgatagtgatcacgccggcgacgtcgacgcggacaagagcacatcaggcactctgttctttcttggggacaatcgtatcaccgggcagagcaagaagcagaaggtcattctgatgaaggcgcttgcgcgggaacgtttctgcgaactgcgcgacaagctcgaactcgtcaagatcaagcagagatgcaaggcttag

SEQ ID NO: 7603 - DNA, 219 bp, Zea mays
  Peptide Sequence Number=SeqID_50978
atgtgcgtttatcaggaactgaggaggcgtgccgtgcctggaccaggccatactaggccttacttctactcgccaggtccgggatggcagttggacccgtgggtatggatacccgcgggtttcgtacccaccggatatggatacgggtacaaaaactcacccgtgggtcctatcgggtcggatacccgaaatacatcgggtcggtcaactgtaatgtaa

SEQ ID NO: 7604 - DNA, 441 bp, Zea mays
  Peptide Sequence Number=SeqID_50979
atgggcaagaacaacaagcgcaagcgtgagccgactcctccatcggaggagtttggtgactcggaatactcggaggaggagttctcctccgagtccgaggggtctccggctcccgtctctcccctggcgtcgtccgatgactcggacgactcccaggggatagccgcggaggtctggacgtacatccgggccgtcgagcgcgccgggctcgaaggctcggatgagtcggagtactcctcggatgaggaggactcggacggcggcgacgagggtgaagacgacgacgacgacgacgacgacggcggcgacggcagtggcgggggcggcggcgacggcagcagggacagcaccaagggcgacagcagcaggggcagcaccaagggcagcagcaggggcagcaccaagggcggcggcggcggcaggggcagggccagtggctag

SEQ ID NO: 7605 - DNA, 1248 bp, Zea mays
  Peptide Sequence Number=SeqID_50980
atggcggccacgctggacggagctgccggatgcaggaagcgcaagcgcgcggcgcctggccttgccgacctgcacgacgacatgctcgagcgcgtgctcgcgcgcctcccaccggccagctacttccgcctccggggcgtctcccgccggtggcgcgccgcggcggagtcccgcagcttccgcgccgcctgcgcgcgcgtcacggcccgggacccatggttcctcatgctcgaggactccgaccaccaggaccaggaccaggacgagcggcggccgcgccccgccgccgtgttcgactccgccgagcgcgccttggcgcggtggcgtggcgcgccggtgccgctgcagccggtggccgccgcgagcgggctcgtgctctaccgcgacccgagcacgggtggcctcaccgtggtcaacccgctcacgggcgcgtcccgcgcgctcccgccgccggcgcgcgtggcgggcgcgctgcaggccgtcgccatgtacggctcgccgtaccgcgtggtgctcatcctgggcgagctgccggagctgtccacggtggcgtacgactcgtccacgaacgcgtggagcgagcaggcggcgctctcccgaaaaccagaggtggagggcgccccgtcccgggagcgcgtcgcggaggtcggcgacggcgacggcgacgacacggtctacttcctgagcaagtccggcgacgtggtggccagcaccatgcagcggagcgcgtcgcggcagtactcgtccgccgtggcgtgcggcggctgcggcggcggcgacgccgtggcctacttcctgagccgctcgggcacggtggtggcctgcgacctggcgcgccgcgcgttcgcggagctgccccggatcctgcccgcctaccacgagcactccatcgacgtggtggcctgcggcggcgccgcctacgcggtggtgctctcggagttcctcgacgccgcgagcctccgcgtgtgggagttcgcggggggcgcgtggcggcaggtggccgcgatgccgcccgccatggcgcacggcttccgcggcgccaaggcggacgtgaactgcgtcggccacggcggccgcctcatggtctgcgtcagctccagctccgccggcgccggcggctgcttcttgtgcgacgtcgggaccaaccggtgggaggagctccctcggcgcgccgcaggggacggcgacgccaccacgggcttcgtgtccgcgctctcgttcgagccgagaattgaggccgccgtctga

SEQ ID NO: 7606 - DNA, 834 bp, Zea mays
  Peptide Sequence Number=SeqID_50981
atgggccctgacctcggcccaaacccggcccgatatatcgggccgtgccgacccggcactaaaatatttcgtgccgtgccgtgcctgggccgtgctttttttaccgtgcttcgggccggcccatcaggcccggcccaaatgtacacctatagtttcggttcagagcacctggcacttgcatgtagtgctgcaagttgggtcgtgccgtgctggcccggcacgagcctgtcgtgcttcgggtctcagttagtcgggcctagccagcacgaaatagagtcgggtcgtgccttaccgggcctggcgaatagaagtaaggcccagcacggccctaaagcacgacgggcttccgtcgggtcgtgctggcccaagcacggcacgcctcagttcctgataagcgcgcatctcggcctctctgtcgccgtcgcgctggatccgagcgttctgcggttgtgggctcgttcgctcgtggcgcagccccaggcggacgccaacacgacgcggtacctgggcgtgcggcgctggccgtggggccggtacgcggcggagatccgggagccggccaccaaggagcggcactggctgggaaccttcgacacagccgaggagggcgccgtggcctacgaccgcgccgtgcgctccctccgccgtggcctacgaccgcgccgcgcgctcccttcaacacagccaagatgcttcgttccacacagggagtgggctcgtccgctcgtggccgcctggggctggacaactggagtgctggggccgtactctcctctcctcggtggtggtatggtgggtactggagttagagaagaccgaatggatcagctgtga

SEQ ID NO: 7607 - DNA, 630 bp, Zea mays
  Peptide Sequence Number=SeqID_50982
atgtgcggatcgtctccgctggtggtcggtccacgcgcgcaggttggggagctcgttggcggcaagggctccggcctaacctgggtgtccacgcgcggctgcgggcaaccgaagttcgacgacaatgatcttgtagttccggtgagacagggcctcgattcatgcttggagaagcttcacgactcttcggggaagctatccaagggctcggttgaggctgaaggtctctggaaatggctggccacggtgggcgacgctcgggtggctcgggcgggtggcacagagcttgccggagctaagggtggtgcctggccagcgagggcgtccacacctatttggttctgccgctccgcgcccgcagtccgctcccgctcccgctcccgcgcccgcagtccgctcccgctcccgcgcccccagtcccccaccaattccccgcccgtcaatccgccgctgccatcgcccgctgtccgctcccgcggccgcgccccgatccccaattccccgcccgtcaatccgccgctgccatcgcccgctgtccgctcccgcggccgcgccccgctccccaattccccgcccgtcaatccgccgctcacgaatgaatggaaggtaggggagccgctgtccgcatga

SEQ ID NO: 7608 - DNA, 183 bp, Zea mays
  Peptide Sequence Number=SeqID_50983
atggtgcaggaagatatgacaccgacctccaaaaaaatcgttgaaacaatcatatcgcctcttgcaaaggaactcgacgagggggacgtagacaaaattgttcctcagaatgtcgacgtcaacatcaaaaaggaaccaaagccccaaccaccaaatgtggccgttgggaggctgtctgcttga

SEQ ID NO: 7609 - DNA, 234 bp, Zea mays
  Peptide Sequence Number=SeqID_50984
atggagacggcgacgctcgggctcggagatggggacggggacggcggagttgggctcggggacgacggagttgggctcggggacggcgcggcctggcgggcgcccagctcggagacggtggcgcttgggctcgggctcggcgacggcgtggcgggcgctcacggctcggagacggggacgggaacggcggcgcagcagcctggcggcgtagtatcagctccgggcgaaacctaa

SEQ ID NO: 7610 - DNA, 606 bp, Zea mays
  Peptide Sequence Number=SeqID_50985
atggccgtggacactactcaaccggagtactggctcaactggaggttcttgctgtgcgcgctctgggtctactcctgcatggccttggcattcttcttgattaagaagtctgatggggcggagccgcacctgatgaatatccagttccagaagaagatgcagctgcaggtgcctacttcagtagggatgctattccctctggcttgtgatgctacacgcccagcaagatctccatccgggccggtgatggcttccacaacctcaagcagctggtattccggtgtttccaaatggcccagcagcaaagatggacgagagcgctctggtgtcgtggggcagcaggtgcaggtccaggggggggatttggaccccgacgctgtgccagaaggaagctgcatagtggaaccagaggaagatgtggtagcagtcttcgtctgcttgaaggcagaggtcacagatggggttggcaatcacacctttctcgaccaagcttactttgtgcttgattttgctttgattgaggagccacataaagagcttcaaccgttccacacaaagtcaggctcctctaggttgggggctgacagagattggatcattgtgtaa

SEQ ID NO: 7611 - DNA, 115 bp, Zea mays
  Peptide Sequence Number=SeqID_50986
atgggcacacacaacgccgccacttcaagcagggtcatgagaatgtctagaagcacaaccctcaacgtcctcctgctcctgaaggaggagaggatcgagagggcaaacactcata

SEQ ID NO: 7612 - DNA, 240 bp, Zea mays
  Peptide Sequence Number=SeqID_50987
atgaagcttcctaagaaaggcgatatcttcctacaattaagcaaagccacgaaagagtctttgccagaggtacagctgagatttccagctgaacttgacttcagctgtgatgagcttcttcagctgcagctgagcttttcagctgagtctgccagtcagactggcagtcaggtcgccaggggtgtcagggggcggttcaaccgccctagggggcagttcaaccgctcctggcctgtctga

SEQ ID NO: 7613 - DNA, 456 bp, Zea mays
  Peptide Sequence Number=SeqID_50988
atgggcaagagcaagaaaggtggtggctcttcgcatcactccggcgacaagcgcaagcgcgagccgactcctccctcggaggacttcggcgactcggagtacttggaggaggagttcttgtccgagttcgagggctctccggctcctgcctctcccccggtgttgtctgatgattcagatgactcccaggggatcgccgcggaggtatggacttacatcagggccgtcgagcgcgccgggctcgagggctcggatgagttggagtactcctcggacgaggagaattcctacgacccgtccgacgagggcagcggtggtgacggtggtgacggcggcgacgaccaaggcgacggtgacggtggcggcgatagtggcaagggcggtgacgacagcggcaagggtggcagcggcgacggtggcgacggcggcaagggcagcaacaaggccagtggctag

SEQ ID NO: 7614 - DNA, 408 bp, Zea mays
  Peptide Sequence Number=SeqID_50989
atgaccatctccgtgtcggcgagccaggacaacaactccttcgacctcgaatttgtggtgcccggcgacgagagtgccggtccaacgccgaagaggattgcgtggagcgcccggggcagccaacgttgtggccatggatgcgtcggcagtggaggccaaggctggagtgttgccaccgacgtcgctgttccgctcggccaccaggttctgcgtctcgcttctcaagctgatgaatcccaagacctcagtagcggccgaggccggggctacgcaagcgccgaggacatgttggagtttggatccgggtgcatgatgccgactcgatgccctagccaagtcgaccatgtcatctgcctggggcccctgcgcttctcaggatttcaacccatagtccatagcaccgtttag

SEQ ID NO: 7615 - DNA, 447 bp, Zea mays
  Peptide Sequence Number=SeqID_50990
atgggcaagagtaacaaacgcaagcgcgagccgactcctccatcggaggacttcggcgactcgaaatactcggaggaggagttctcctccgagtccgaggggtctccagctcccgtctctcccccggcgtcgtctgacgattcagacgactcccaggggattgccgcggaggtctggacttatatctgggtcgtcgagcgctccgggctcgagggctcggatgagtcggagtactcctcggacgaggaggactcttcggactcgtccgaggagggcggtggcggcgatggcggagacgacgacgacgacgacggaggcgacggtgacgacgacgacgatggtggtgatggcggcagcaggggcggcaatggcggcagcgagggcggcagcagcaggggcagcaacggcggcggcagcagcaagggcagcaacaaggccagtggctag

SEQ ID NO: 7616 - DNA, 198 bp, Zea mays
  Peptide Sequence Number=SeqID_50991
atgagactgcttgatccatgcagagcacaagagacaagtggaaatgtgttgacttggcaaaagaagttgattgctaaatgtttgataccatgttctctggaggacatggttgctggagtgacttggccgtccatcttgccaccgggttggactgtcgagtgggaccctacgtcggcagaggaggagcatgaggagtga

SEQ ID NO: 7617 - DNA, 816 bp, Zea mays
  Peptide Sequence Number=SeqID_50992
atggagggcggatactcatcgaaagtcacggcgcaaaaattcccggtgacggcgcgatgcggaattggggcggcgtgcgatcgacatcgaggaatttcgtgcccgcagggacgctccaaccttcaccaatgccacggttacttccgtcgtgccctaagttcctgtggtctttgtgttccacggctatgggaggtttcacccgtgcagtgcacgacgacgcagtggtggtggcggcggcggacccacaactccaccgaagcccgcaaggattccgacggaatcccgcggaaggttgttagcacggccgagtttgggcccgcggaggaagacagacctgtccaaggggtcccactggcagcgggagtggcggagttgaagcgcggtgagagccgggtggtggatctggtgcgagggtcccgcgaagcagtgaggcaacatgggcgcgagtgtaggactgcgtggtgggtccatcaggttggcgtcgagttgtggaacgggacctgggacgcgcggctgacgagaggaccccgcatagcagaggttagagaagttatgcttcccgctcgaccaagagttggccacatattttatcttggcatgtctttcacccagctatggaaatttcatcatgaactaccatacgcatggggcgagaagggcctaaatgagctatgtggcatgctgaaaacatcagagggtgacataaataaaaacgctggtagcagcggccatgggacgacagtcaaaagcaaacccaactttaagaagggtaaatctcaagagaagggcaaggctaaagatatgatcttcaagtaa

SEQ ID NO: 7618 - DNA, 69 bp, Zea mays
  Peptide Sequence Number=SeqID_50993
atgaggatggagcatatagtgaagagcgcagccaagtccgtgttcctccactgtgagcgcgacatctag

SEQ ID NO: 7619 - DNA, 798 bp, Zea mays
  Peptide Sequence Number=SeqID_50994
atgctgtcttcttcctcgtctgctgcaaacacgctgccggccgacgcatcgtccgaggataccttgagcaacgtggcggcagaggagctacatctgggtgatacggtggagttcggcgtttcgcggatttcatcggtccgtgttcaggatatgcagcagtttgggtattttggcagcggagtggggcgtgtcctgggggcggaggaggttcccgagcccgagggcgagttggtcgtgtttgaggcgtttttcaccgctggccttcatctgcctgcacatcgctttgtggcggaggtcctgcagagatttgagatccagttggcccttaataagtgtgaagtcccaacttcggtgtttgaggcgcttggcctcgttgacatcacctggatggtaatatccttgcaagaacagggttattggggcccgccagtcttcggccatgatgaggttgacaatgcgatggccctcggcgttggtggttatttgcagaccctctgggctgcggacggctggtgtgcctctgacgtggtagaacacgtcggagggcagggcttcgcctctagctgctgctttggccaacgcgtcggcttcttcgtttttagcacggtccacatgttgcagggtgaaacccttgaattgcttttcaagactgcgaacggccgtggtcacgccgagtgctttcagcttgcgaaggcccaggataacgacttcgtattctgctatgttattcgtgcatctgtcggattccagagcgaagctgaggcgtgctgcgtatctgtgcttgacaccggtgggtga

SEQ ID NO: 7620 - DNA, 90 bp, Zea mays
  Peptide Sequence Number=SeqID_50995
atggcggggacgcagggaagcctcgggtcgacggtggcggactcgactgcatggggaagactctgggttttcaattcaaattcaaactaa

SEQ ID NO: 7621 - DNA, 636 bp, Zea mays
  Peptide Sequence Number=SeqID_50996
atgtcttcgcgctccctcatgcatcgtgtctttccaccttccaagcccccggatgggggatgcccgcagtccttccgccttgtcgttggaggaacgcaactccgtgggagttggcacctttcagccatcgttcggcttcaaggattttcatcagtcagcccggctgcacccctccgtcggcggtcacccgagacggtgaccaccagcccctgggtggggagaagcgagccgggctgtgatcttggtcccaccctcagcttcaaggatgttcatcatcctcgctggggtggagaccgggctgagccggagctctacctcccgcgcgggttcgtgggtcggcctctccttcggcgttcgagggagagggcgctcaccggccctgcgggcgggtcggacttcgacaacacggggctggtcgacggcgggcgtcgtcagcctcagcgcgtcgggcttgtcggcttggctcccggtgccccctcctgccggaaggcggttgccgtgccgtgtgcacgggaggactgcccaagatatcgcgcgctgccagggcggcgttcgtgttctagggcggtcctgcctttgcaccggtacggcgcctccacgtggaggtcggtgccccactcgaccgggaggatctga

SEQ ID NO: 7622 - DNA, 561 bp, Zea mays
  Peptide Sequence Number=SeqID_50997
atggcccgtgcccgcgcctataaagcccccagggacttcgactgtacccctccacacgcgctcgacctcaccggagcccaatcccaccggcgtttgcccgtgcacggcgtgtccgcggccgcccgatccccctgccaccgtagaccggccaacaggacccttcccaaccccgtccaaccttcggagaagagtgtgcacacctcggtgaagctcctgagcgaggaatcggagtttgcttcgccggagaagccagtccacggtcgccggactccacccgatcgacggtcgccgtggtttggccggaacacccgtcgccgacgagagcacccgcctgcgcgcgtggactggacgattccggccacccccgtcgccgagccgtacaccgttgtgaccgccaagacctcccggagccaaccccgcccctcgccggacccctctcgccaccgaaaacaaggaaaacttagaaaaaacccttacaaaaataaccccaaggcaaaaaacacccccaaccccttggggataattaatgtttttgttatgaagaacataggaaaaatatga

SEQ ID NO: 7623 - DNA, 825 bp, Zea mays
  Peptide Sequence Number=SeqID_50998
atggttcgtacaatccaaaccactcagatcaacaccaactacatccctccaccatggaaagttcctatctacctagtggtagtcgaggaaatcccagtggatctccctcgcattcgtgtggagaacggagtcattctagaagacagctcagaggagtttcggactacacccacctcattggcagaatcactagccttcgtagctggatcgtcagatttagcaccacctacaccagcagtccaagcccctgctcccataggcgacgacccggatgactctggtgacgatgatgaagacgacgaagaagaagaagaagaagaggaggaggaggagaacgtcaacgaaaaagccaacgatgaacagcaggaccactacgtggggttatggcctatcactgaacattatacatcaatgttcgagatagggcacttccctaacctgctgcaggatgttttgcatgcgttgggaacctacgtccgacctctgtatgagacaaggagagtgtacaagcctccttgggcttgctactacaacactcgcattcatgtcaaggtaatggatgcaggtgatagagggttcaggactctgtcagctcatgagtccctaacaccgctatccacctacgctgcttcggtcagcgatgctgctaggcaaactctgtggtccctcagccacacctaccagcagcagctgcacaacatgaagtatagacatcttcctctgcatatttgtggagaaagccagaccatcattgttctaggtggagctggagaagatcgcctcaacaccctagctggtgtggtggcaatcttaacaccgacctag

SEQ ID NO: 7624 - DNA, 486 bp, Zea mays
  Peptide Sequence Number=SeqID_50999
atggagctcaccggcgcaccaaagtcggccacccagagttcaaaaccaaatcggataggactacacgatgctaacgctattgcgaacctgggtggagggtactcaccggaaatcaagggtcgaacgaggaattgctgtggactacatcatggtgtcgctgcgcgacggcgaggaattgctgtggcaccgcggcctctcccttcgattgcggccacgggtggcacccctaagtgccaacgacccaccctggcccttcaccgaggtcagacagcccatggtgacgggattcgcaggcggcggaccggatttcactctgcctctccgctacggctatggaagggaggagggaaggcgcagggaaaagggaagggcgagtggaatgagtcagcgaccgaagcttttatgcaccagcgtggtccacgtggtccggtcctggcgggggaagttcgccggagatatcggaggtcgccgcgcggagtctgttag

SEQ ID NO: 7625 - DNA, 432 bp, Zea mays
  Peptide Sequence Number=SeqID_51000
atgggcaagaacaacaagcgcaagcgtgagccgactcctccatcggaggattttggtgactcggagtactcagaggaggagttctcctctaagtctgaggggtctccggctcccatccccctatgtgagtcgtctgacgactcagacgactcccaggggctcgcggcggaggtctggacttacatccgggccgtcgagcgctccgggctcgagggctcggatgagtcggagtactcctcggatgaggactcgtccgaggaggacggtggcggcgacggcgaggacgacgacgacgacgacgacgaaggcggtggtgacggtgacggcggcggcaggggcggtagcagcggcagcaaggatggcgacggcggcagcagcaggggcggcagcggcggcggcggcagcagaggcagcaacagggccagtggctag

SEQ ID NO: 7626 - DNA, 1707 bp, Zea mays
  Peptide Sequence Number=SeqID_51001
atggcactcctgttgacgtggctggtctgcgccctaggttgggcgatgtggaagctctccgaagccgagctttgtgctgatgggggttaccagctgagaattaggagccttgagggtacccctaattatggtccccgacaaactgatatcatcatcttggcagttttctttagtgttttcttggatattttggacttggcaaaatatgcatatgtacctgtcataaatggtctcactgactataaccatccatgccagataatggctgatgcacttactatgcttgagcagattggtcgtattgaaaacactaaggttgtctatgttggagatgggaacaacattgtgcactcatggctgttattggctgatgtgcttccttttcactttgtatgtgcttgtcccaagggatttgagcctgatgcacacatagtggagatggccaggggtgctggaatcagtaagattgaaataacaaacagtcccagggaagcagttaagggagcagacgttgtgtacacagatgtttgggccagtatgggacaaaaggaagaagttgattatagaaaacagaagttccagggattcacgttcaactcaacacctggttggagacatagtattttagtctctagagataaaaaaagatgctactgtaggcgtacacaatcttttggtgcacggttctgtcgatacgccatcaacgtgcacgtggccgtcaaggaaggttgtcgcgccgcgaatcccccacctcctccccctctgctccccgccatcaacgtgcacgcgtcgcatcgagccgcagatcccccaccctcctccccctctgcacgccgcccgtggttggaccacttcagctttccaggggtcgaggacgaggatgaggcggtagtgttcttccagcagcggtacctggtaggccgcgacagtggatgggctggacccggtggccccatcttcttctactgcggcaacgagggcgacatcgcctggttcgccgccaactccggcctcatctgggatgccgccccacgcttcgccgcccgaggcaatcgttcttccgcggcctcactcgtctcgtactcgtatctcttctttgttttaaaaactttccgtttgaaacgctatattgtttatggtgcgagcgatggtcgctcgcttgcgtacagtgactccaagttcccgacgtatctcacagccgagcaggcgcttgctgacttcgttgtgctgctcactgacctcaagaggaacctatcggcagagggtagccccgttgtgctctttgggggctcatatggtggaatgctagctgcttggatgagactcaaatatccccatattgctattggggtcttgcatcatcagctccgatcctgcagtttgaggacattgttccttctactatattctatgatctcgtatctgatgattttagggaccctgaaaacaagtggagacctttcagattggttgagctcagcgtacagttatctggccatggtggattacccacttccatcagaatttctcaggcctttgccagccaatcctattaaagaagtatgcggaaatatcgacagtcaacctaagggcattggtactctggaacgtatatatgcaggagtaaatgtatattacaattatactgacattgttgactgctttgatctaaatgatgatccccatggaatgggtggatgggactga

SEQ ID NO: 7627 - DNA, 465 bp, Zea mays
  Peptide Sequence Number=SeqID_51002
atgctggtagactacacaatggtactcgatggaccaagtgtgtcggtcgaaggcccgacgcaacagggtatcgagagcgtcgtggaagtaacaccagcgagcagcgtcacgagtgatgggtcttgcgatccatccctccggctccggctcctccgagagctccgtgccatggctcgaactgccaccagcgtcgtcatcgtctctgtctccgttaagggggcatctctagctgaggtgaaggggaaggcggcctctcagactccacctcctactgaggcgagagggaagagtcctgctactcctgctcttgctcctactcctggcgtcggcgctcctgctcctcatgcaggcgacgatgcagtctctccagttgactggactatcctgacactgtgcgacgcagtgaacgctccgccaggcgagaaggcaaaaaggggatcacagacttatgtacagtgcacctaa

SEQ ID NO: 7628 - DNA, 447 bp, Zea mays
  Peptide Sequence Number=SeqID_51003
atggcagaagcaagcttccacgtgttcgacgcgagctggcatccgggggcgcgctcagagcacgccccccaagcgtgcccaccggagttcaagaacccaccggcgcacgtggaccgggagccgccgacgacccccgccgcctgtgctcgtggccagggtagctccgaccacctccgacaccgacccgcacaccgacgtgaccgtcgcgacctcccggacgtcactgaccaccccgccggagctctactgccgccgttttaccccttattctatgatatgcttaaggataaggaaaatagaaaagactgtaatcttgctgacggagagtacatcctcgtgccggagcaaggagctgctcaggaggtagccccagatccagcacccgagcctgcaccagaggacctgcctgccactgctttggaaggcaagccccggttttatgcataa

SEQ ID NO: 7629 - DNA, 354 bp, Zea mays
  Peptide Sequence Number=SeqID_51004
atgggcaagaacaacaaacgcaagcgcgagccgactcctccatcagaggactttggcgactcggaatactcagaggaggagttctcctctgagaccgaggggtctggacttacatccgggccgtcgagcgctctgggctcggatgagtcggagtactcctcggacgaggaggactcgcccgaggaggacggcgaaggtgacgacgacgacgacaacggaggcgacggcggcgacgacggtgacggcggcggcaggggcggcaacggcggcagcaggggcggcaacggcggcagcaggggcggtgacggcggcagcagcaggggcagcaagggcagcaacaaggccagtggctag

SEQ ID NO: 7630 - DNA, 324 bp, Zea mays
  Peptide Sequence Number=SeqID_51005
atgcggtcacaaaagaaagcgttgctccagtatcaaataagacatttgcagaatgggcatagggagctggctactgctgagctgctttctttgggcaatgattcgcccaatgaccttgttccccacagtggaaacatgcatgacttcctccttgagctggcgctgcttggttggtctggttggttgctagggcaggaagacgggttgcctggttgctctgacgctggtattgatttcctccttgctggttgttttgacggtactgctgctgctggttctgacgctgatgttggtgctggtgctggtgctggtgacctggcttga

SEQ ID NO: 7631 - DNA, 534 bp, Zea mays
  Peptide Sequence Number=SeqID_51006
atgaggaggatggttatgattatgcttatggtaatgatggctcatcttagacacaccgcacggaagtccgtcatgcccttcttgccctcttgtctcgctaagcgtccgcttcgccgtccagtgactggtcagtctagccatttcgagaggctgtaccatcgcctgcatgaggagcagaagcgtcgacgacaggagctggagcagcatggctcttctttctcgcttcagcaggagatagagtctgtaaggagctgctcccctgtgctcccgctggaggcaccccctacaccaccactgagcgccccagccactggagtagctattggaggagaccccgacgacggaggtggcgacaacagcttgagcttcagcaccaaccttttagccgaccaggagccggaaggatgggttgttcgacccatcactcgtgacgccgctcgcgggtgtcacttccacgacgcgctcgacaccctgttgttccaggcactcgaccgacgtacttggtccatcgagtatcactgtgttgtcttctag

SEQ ID NO: 7632 - DNA, 135 bp, Zea mays
  Peptide Sequence Number=SeqID_51007
atggcccccaagtggaagaggcagagcaccactactgcaatcatcccgtccatcgaccccaacaacctgtgctcaggaggtgaagttggcaacatggatgacttcgaggagttccaggaatacgacgagttctag

SEQ ID NO: 7633 - DNA, 315 bp, Zea mays
  Peptide Sequence Number=SeqID_51008
atgggtgtgcccaaggggtgtcttgactccttcgactcttctgaggagtggagcaggggcgacggtgacgacgagggcgacgacagtggtgacgacagcggtgagggcggcggcagcgacgacaacagcaagggcgacagtgaaggcaacgacggcagtgaaggcggcggcagcaacggtggtgacgacggcagcaagggcaacggtggcgatggaagcagcaagggcgacagtggcgacggcggcagcaagggcgacggtggtgacggcgacagtagcgacggcaaggccagtggcatagcaccactgatctaa

SEQ ID NO: 7634 - DNA, 1083 bp, Zea mays
  Peptide Sequence Number=SeqID_51009
atgcaggcggcatgcaaccgcgccaagtgggcgcacttctccgactcccaacacgcccagcatggaggcccaggcccacgcgtcatgcaaccggcgcgccgaatgcttcgtgcatgcaactacaccgccacttgcgccaccaccgcgcctcctcgactgcggaaccaataccgcgactcgaggcgacccagcgcacgacccagcggcgccagcctggcgcgacggagaagcgagcgacgcttcgccttcgccataatgaccgcgtcaaaaaagggaccaggaaagggggataccccgaagaggatccttccccgtgaaggaaccaggctccaagcctccctactgatcagaggttcgaaggctggcccctcagaagggttcaacagccgcctcagagcacgtgggctccacacccactactggtcagaggttcgaaggccggcccctcggaagggttcaacggccacctcaggctactcgggctccgcgcccactactgatcagggcgggaacgatcttgtaacggaatcccatcagagggaggcatcgagccctcggaccccgtcgccaggggaccgggtccggcagatcacccgcagctcaccggagacaccatgttcggcgcccgccgagggcaacatggcgctctccccccccccctcctccttgcggaaaggcgacgcaggggcccaaaccgttgacagcgtcaacatactagtccgagaacttgggacccgaccgtacacccgggctacggccagctcgcatgagggaacgaccagaccagccgaagcattgcgcaaggcgttaagacctcggaggagtcaaaccactcctctgaggcctcgggggctacacccggcgggtgcgctcgcgcgcacccaccggaacaaaacgcaaccgagaaaggctggtccccttgcaaaaaagtgcgacgaaagcctccaagcgagtgctaatactcccttcgaggctcgggggctactgtcggggaccataattaggggtaccctcaaggctcctaattctcagctggtaacccctatcagcataaagctgcaaaggcctgatgggtgcgattaa

SEQ ID NO: 7635 - DNA, 1563 bp, Zea mays
  Peptide Sequence Number=SeqID_51010
atgccgcctccggctgcgatgctgctccttacggcggcctcggggcctcccacgctgtcgctgaccctggccgcgaggcgggcgccgctccgggccccaagccggcggaggctgcgggcgctgcggccggcgaggatccgcgccgccgcggcgatcggtggcgagttcggcggcctcggccggcgccgcgtcgtcgtgggagagttcatcgagcgcctgcgcaacgttctgcccgggggcagttggtggcgcctcgaggacggcgatgaggccggggacggggccggccgcgcagaggggagcggtaccaccgccgtgtccgcgctcaggcggatgtgggccctcgttgccggcgacagattggtcatctatgtcggcttcgcgtccctcgtcggcgctgcgctttcggagatcgccataccacatctccttgcagcgtccattttctctgcgcagaatggaggcgcggtgttctaccgaaatgccaagcttctggttgtcctatgtctggtttccggggtgtttaggtttcagaaaagggcagctaaatttgcacaggagttcaccgcaaacgccaataatacagtggcttatggaggctggagcctgagcttgaactatctataccattctactcaggtcattggagtggtgattggaggcctagcaatcatgtctgggaagttaactgctgagcagttgacaaaattcacactctatgctgaatggctaattttgtccacatggtggattggggacaactggtcctccctgatgcagtctgtcggagcaagcctcaagttagagaagttgaaagggcaaattcagtatgctgatgtatcattttcatatccatcaagacctacggtaccaattttgggaggcttgaatttaacactgaatccaaacgaagtagttgcaattgttggtcttagtggaagtggcaagagcactataatcaatttactacttagattatacgaacctacaaatgggcaaatactaattgatggtgtcccgctcactgagcttgatatcagatggttcagggaaagaattggtttcgtcggacaggaaccacgcttattccgaatggatatcagctctaatattaaatatggttgcccaagagatgtcagtcatgaagaagtgatatgggctgcaaagcaggcctatgctcatgacttcataatggctttgcctgatggttataacaccatcgttgatgatgctcttctcagtggaggtcagaaacaacgtgttgctattgccagggcccttctgagggacccatctatcttactgcttgatgaagccactagtgcgcttgatgctgagagtgaacattatgtcaagagcgtcatcacaaaagttagtcgagattcaaaggctaaaagaactgtggtaatcatagcacacaggctatctacaattcaaacagctgatagaattattgtgatggaaaatggtaatattgtggaggatggtaaacacattgatcttattgagaagggtggtctatattcaagattagccaggcgacaaaatgacgatctcaagtag

SEQ ID NO: 7636 - DNA, 690 bp, Zea mays
  Peptide Sequence Number=SeqID_51011
atgtacgacaagctccggcgcagccgtcgcttggacgcggtgcagagcggctgctccgcgttgtccatcgtcaagcagggggacctcatggtcgtcgccaacgtcggcgactcttgggttgttctaggcaccgcattcgacgacgacgccatcacgtcgtccagctcatcgtccacctcaagcccaacctgccacgggtactaccttgctgatgagcccgggatgcacttcgttttacagcctagccaagagtcatcagtactcggtatgtcgcgcacgttcgacgactactatatcgaggactgtggcgtcatcttggcgccagaggcaagacaatacgaccatacccaagtgcagtatcaggacaaatggctcggagcaaaaagcctgcaacggaatagaaacagagagcacggccgaggcgagcccgacggagccgggccaggccaggccattcctcgtcctgtcactgtccgaacccgcttctcctccacctccctctggatcgctgctgtccacgagggagacaggtcaattcgaaatttattatctccggctgggacaaagacccaggacgccaccaaggcgggcacagcatgctgcatgccagcggccatgcaaaatgctcgtcgtccttccgtccgtcctcaatcggtgctcccggcccatgcatcgtccgcggtccgctga

SEQ ID NO: 7637 - DNA, 186 bp, Zea mays
  Peptide Sequence Number=SeqID_51012
atggagggggatggtgttgctggcggtaatggtggtgggtgcactgcaaaaggggggcgtggggtggtggttggaggtggggcacgcgtgtgggggcacgagggcagtgctttgattctcacgcttgttccatgcttcaagggtaagcttcccggtatcttcttgggtaaggcacttttctcttga

SEQ ID NO: 7638 - DNA, 840 bp, Zea mays
  Peptide Sequence Number=SeqID_51013
atggagcagcgtcccgggctggagaggttgctggagactacccatctggagcttgacgggaagctgttcgtcaacacgcagcaggcccctacctggcgcgccaactgtcgacgtttcgaccccaggggtccttggaccgacgaggggctgagaacctccgtcgtcatgggagaacgcggggtgccatcattacttgtttaccggggcgagccagatgggacgccgcccaaggtcgggcgaggcggtgattcctccgaggtcgaggctgagtccgagccctggggtcgggcgaggcggagatcgtcttccgagggcgaggcggagtctgagccctggggtcgggcgaggcggagaccgtcttccgaggtcgaggcggagtccgagccctggggtcgggcgaggcggagatcgtcttccgaggtcgaggcgggggccgagccctggggtcgggcgaggcagagcttcctatggcgcatgaggctggactcggctactgtcagcctcaccctggcgggtggcacagcagtcggagcagggcaggcggtgctgttttcctgtcaggcctttgcagcttgtgctgatggtggttaccagccgagtttaggagtcttgggggtacccctaattatggtccccgacaatgcgcaattgtggctcgatgatcacggtagacagacagtgtctacagggcatgcgaaaaatatgcaactcagcgatgacggttcgactcaaggggagctgtccgataaaacgagagtgttacatagcaatcacatgacgcaaccaagttcgtacgacacaaatactgcgtcgtgttgccaaggcgcagtcaatgcttag

SEQ ID NO: 7639 - DNA, 516 bp, Zea mays
  Peptide Sequence Number=SeqID_51014
atgtcgtcgaggaacgtgagcgcgtcccaggccggcgcgcctcggcagcagaggccagagggaggcgaggaccgcgcgacagtggcacgggtccgagtcaaggaggagcggcggcatgcagcggaggaggtccgcggcggcggagggctggccggcgcggcagagcgcggcgatgtcatcgagccgcttcttgtagaagttgaccaaatctatcaccttgcttgccctgcttcaccaatcttctacaagcacaaccctgttaagaccatcaagacaaatgttattggtaccctgaacatgctaggacttgcaaagagagttagagctaggattttgttaacatcaacctctgaagtttatggtgatccacttgagcatcctcaaactgaggcctactggggcaatgttaacccgattgaaatccgaattgccaggattttcaacacctatgggcctaggatgaacattgatgatggtcgtgttgttagcaacttcattgctcaggctgtgcggtaa

SEQ ID NO: 7640 - DNA, 303 bp, Zea mays
  Peptide Sequence Number=SeqID_51015
atgcaggcggcatgcaactgcaccacggggatgcaccctttcgacttcgacgcatccagcgtggcggcccaggcccacacgtcatgtaaccggcgtgtcggttactacgggcgaaaaactgcaccgccacttgcgccagtaccacgctttctcgactgcggaaccggtgccgcgactcgaggcaaccctgcgcatagcccaataatgctaaccaagcgcatcggtcatggggaccgggaaaggggatactccgaaagggatccttctccgcgaaggaagcgggccccgagcccccactactga

SEQ ID NO: 7641 - DNA, 519 bp, Zea mays
  Peptide Sequence Number=SeqID_51016
atgggcagcggctgcaccagcgcgcgcgaagaggtcttcgctcccgtcctcactacgggagtgaggataagaccatccaagaacgccgcctccacccgcacagcgtacgacgtcttgtatgacctcccggtgcgactggtggtgcgggagaagccgtgggtgtggccaacccgcacacgacgcgaccatcgcccgtgcggtggacgggcagccacgctccgccccagcggcaggaggcagcaccagaggcggcaccagagcagcccaggccagggagccagacacgtggcacctgacgacgccacagacggccgaccccactggtcagaaaggcgaaccgtcgcgcaaggggcatgcaactgccccacggttaggcgccccttcgtcttcgccgcgcccaacggtcaaagaggcgaaccgccgcgcaaggagcgtacaactgtcctacggctgtgcgccccctcatctccgccgcaactggcggtccaacgcggaggcccaggcccacatgacatgtaa

SEQ ID NO: 7642 - DNA, 276 bp, Zea mays
  Peptide Sequence Number=SeqID_51017
atggggagcgcccgcgttgccttcgtctcgttgtgggaggagcgcaacctcgtggaggttggtacctttcagccatcgctcggcttcaaggattttcatcaggcagcccggctgcatcccctcaccaatggggacagggcgctcaccggactagcggagggggcagacttcgacaacgcggggccgatcggccgcaagcgtcgtcagctccagcatgcctggttcgctggctcagctagctctggcacagcttccggtgccacctcccaccgctag

SEQ ID NO: 7643 - DNA, 1167 bp, Zea mays
  Peptide Sequence Number=SeqID_51018
atggcgccgagctgctacgacgcggcagcgtccatgctcctctgcgccgaggagcacagcagcatcctgtggtacgacgaggaggaggaggagctggaggcggtcgggagaaggagaggccggtcgccgggctacggggacgacttcggcgcggacttgttcccgccgcagtcggaggaatgcgtggccggtctggtggagcgggaacgggaccacatgccggggccgtgctacggcgacaggctgcgcggcggcggcggctgtctctgcgtccgccgggaggccgtcgactggatttggaaggcttacacgcaccacaggttccgccctctcactgcctacttggcagtgaactacctcgatcgcttcctctcgctgtctgaggtgccggactgcaaggactggatgacgcagctcctcgcggtggcgtgcgtttctctggccgccaagatggaggaaaccgccgtcccgcagtgcctggaccttcaggaggtcggagacgcgcggtacgtgttcgaggcgaagacggtccagaggatggagctcctggttctaacaaccctcaactggaggatgcatgccgtgacgccgttctcctacgtggattacttcctgaacaagctcaacaacggcggcagcacggcgccgaggagctgctggctcttgcagtccgcggagcttatcttgcgtgcggccagaggaaccggctgcgtcgggttcaggccgtccgagatcgccgccgcggttgcagccgccgtggccggagacgtggacgacgcggacggcgtcgagaacgcctgctgcgctcacgtagataaggagcgggtgttgcggtgccaggaagcgatcgggtccatggcgtcctcggcggccattgacgacgctaccgtgccaccgaaatctgcgagacgcaggagctcccccgtgcccgtgccgcagagccctgtgggggtgctggacgcggctccctgcctcagctacaggagcgaagaggcagcgactgcgactgcgactgcgacttctgctgcctcacatggggcccctggctcttcaagctcgtcctcgacctccccggtgaccagcaaaaggaggaaactcgccagccgatgtgatggatcgtgcagtgaccggtcaaagcgcgcgcccgcccaatggaccaaagagtga

SEQ ID NO: 7644 - DNA, 2193 bp, Zea mays
  Peptide Sequence Number=SeqID_51019
atggcccattcgccggcgcccagcggcggcggcggcggggggccgctgccgctactggtgtcgctcaactgcctcgacgacctctcgctggagcaggaggggctggcgggcgtggccgcggtggagcacgtgccgctctccgccgtcgcctgcggccgcatcgaggccgcctccgcggtgctgctcccctccctcgccttcctcccgcgcgccgcgcagcgccggctgcggccctggcagctgctgctctgtctcggctccgcggaccgcgcggccgacgcggcggcggccgccgacctgggcctccgcctcgtccacgtcgacgccaaccgcgccgaggaggtcgccgacaccgtcatggcgctcatcctcggcctgctccgccggacccacctcctctcgtgccacgcctcgtcggtcccggccgccggctggctcggctccgtccagcccatgtgccgcggcatgcggcgctgccgcggtctcgtgctcggtatcattggccggtccgcggccgcccgctgcctcgccactcgtagtctcgcgtttcggatgagcgtgctctacttcgatccgcgctacgtgggactgttgtataggctaagtaattttagtactacaattactactaagggggtgtttggaaacacagtttttcaaaaccacggtatttcaaataccacagtatacaaatgccatgacatgatctcagttttcaataccacagttttagaataccacggttttgaatacatggaggtgtttgggaacaaagcaagtgggaaaacaaagcggccttctattgttttcccttctgcagcaaggagaatggacactctcaatgatttattagcagcgagtgaccttatttcgctgcattgcggattaacaaatgaaaccatgcatatacttaatgctgactgcctgcagcacataaaacctggagctttcatagtcaatactggtagttgccagcttatagatgactgtgctctcaaacagctcttgattgatggtaccatagctggttgcgcattggatggtgctgaaggtccacagtggatggaagcatgggtgcgggagatgccaaatgttttaattcttccgcggagtgcagactacagcgaagaagtgtggatggaaataagagagaaagcaataactatgttacagtcctttttcttcgatggtgttcttccaagtagtgcaatttctgatgaagatgaggaaataagtgaagctaaaaatgaagatgactatctaggcccacaggcaaaggatagccagtcacagatttttgatactgaaatagatgaaagccacataacgctggagtctgaaaagaaaagagccatatcccaccataaagagcctcaggcgtctggaaagtctgtaaacattggctcccgatctgaagggaggcgtagtcgttctggaaagaaagggaaaaagaggcctgcccatcgcagacctcaacagaaaccagatgacttatctgctgttgagagtgacagtaactattcctcccggagagatgatgacactgcaatgagtagcagggaccaggttgtaagttccagttcacgatttgcctctcctgaggacccaaaatacaagcataaatctctttctgaatccccgatggaaataacatccgagaagaaggtgcctgtactactcagtagaaagtaccctgataaactaaaagatggatttattgtagctttgagagcaagagataattcagggtaccatgttgcaagacagagagtagttggtggtggtggctggattcttgatgttgtctcaaatgctacaaacagggaccccgctgctcagttccttgttactttcaaaaacaagattaataggaagatggagtttgtgtttgcaagccattcttttgatgtttgggagagctggatgctggacggttccttgctggaggttatggtggttgaggtcgtgctcgctggcggtggtggatcaatgctagtccgcttggaggtcaaggtctcgacatgctcgaggggatggcctcacctggaggaggctagaggagtcatcatcggagccgagcgcgggaagcacgggaaaaggagcaccgtcaccgactcaccgtccgaagacgtgcggtcgcatgagatgagaaagatttcactgtttcacggatggaaagagatcggagactaa

SEQ ID NO: 7645 - DNA, 297 bp, Zea mays
  Peptide Sequence Number=SeqID_51020
atggcgcagccgaccgttgcagatgcgggagccgttggcgcaccggacatgtccggtgcacaccggacagtccggtgcccccttccgaccgttggctcggccacgtgtcctgcgcagatcgcgcgaccgaccgttggcccggccgaccgttggctcaccggacagtccggtgcacaccagacagtccgattcacatttaagcacttgtgttggcactcaatcaccaaaatacttagaaatggcccaagggcacatttccctttcagcgacgccttcccgcttgcccctttcgagtaa

SEQ ID NO: 7646 - DNA, 753 bp, Zea mays
  Peptide Sequence Number=SeqID_51021
atgtggaggcctcctagagtgcgctatccgcgctactcctccaccagccgccgcgaggaaacttccggctcctcctacctcgcgctggcgactgcatctaccaggcccgagccctcgatccggcgtgcttcgccgccggcatcgaggcaggtgggcgagaagcggccgtgtggtggcgggtctggcggcgtagagctcgcagcacttgcaaccgacgacgcgcgacccaccgcaatcgaagttccaagcgaggttcccctagctcgtcgccggagagtcgccatcggcaaacggctttgtcgtccgccgacttcgtccaaggttgccggcaaaaggaagcgaagctcgtcgctgccgtcgtcttcgtcttccattcgctccaccgagccagatccgcgaagaccgagagttgttcaaaagcgtagttgtgacatcgttgatgtcgtcaaatcagccttccagcctttcaactcacctttgctggacgaattgaaccgagcactagttgagattgacgacctcgccaaggatctcgaagacgtagcagtgcaaactcagtgggaggtagaaaatatggctaactgtcaagtaaacgataatcgacgacaagaggaagcagtagaggagcttctcattgaagatggttcagaagacgagctactgatagacgaagagtcaccaattaactatgaagaacttgtgggctacaacgatggtcgtgactactcaaccgacgacacatatccctactag

SEQ ID NO: 7647 - DNA, 924 bp, Zea mays
  Peptide Sequence Number=SeqID_51022
atggtgaccaccagtttaatggtggggagaagcaagccgggctgcggcctctgccccgccctcagcttcaaggatcttcatcatccttgctgtggcggggggcaagctgagtcggggttctacctcccgcatgggccggtgggccgccacttccttcagcactcaggggagagggcgctcaccggccttgcggaggaggcgaacttcgacaacgcggggccggtcggccgcaagcgtcgtcaactccagcgtgcctggctcgctggctcagctggctctgtcgcggcctctgacgctgcctcctaccgcttgatccgggcgtggtcgtccgtccaccgcacgggcggtcgttgcgcgtgcgcaccgggggatcgtccaagacgtcgcacgttgctagggcggcgttcgtgttcttggattgtcttgtcctcactctggcacgacgcctccacgcggagtggtcgccggcgagccacctggagtttgttgtcccgtaggccctctggtgtggaggtgacgaatgaggtatccgtattccggaggcgtaggagtccctcggctcggtcggccttgccgctcaaggcttcccttgctcagtttgagaaccttctgccgctctgcgatgagctggagccagaggctgcagtgtcggcgtggacaaaggcagagtcggctcaaaaagaggcttcgtcggcccaggagcgggtggcttcccaggccgaggagctgcagcagcggcgactggagcttggccaggtcatccgtgagcgggaccaacctcggagtcacgctactgaggccgtgagccgagctgatgtcctcgggggacagctggctgaggctacgaagcggccagtcgaggtgtctgctcgggccgggacccttgcggagaccctggctacgatggcccaagcgcggtgctag

SEQ ID NO: 7648 - DNA, 1206 bp, Zea mays
  Peptide Sequence Number=SeqID_51023
atgcaggtggtgtacaaccacaccgcgggggcgcaccccttcggcttcgtcgcatccagcatggaggcccaggcccacacgtcatccgccccagagcactcgggcttcaggctcattactgatcaggggtttgaaggctggcctctcagaagggttcgacagccgcctcagagcactcgggctccacgcccgctactgatcaggggttcgaaggtcggcccctcggaagggttcgatagccgccccagagcacgcagagcgagggatgactctaggtacgtctgttacatggtcgaggctcgggctacgctcccgagaaaggcgacgaaggggcgtatgataaaagtcgagacagtccttgatcgtcccctcactccgtgcagaggctctagggctgctctcgcaaacccggctacggccaaaccgttgacagcttcaacaaaccagcatgaaaactcggaacctgaccatgcacccgggctgcaatcaggtcaaggcttcgtctgctcaaggaacgcgatctcgccccacccgagcccagcctcgggtgggaacagtagtcccagacaaattctcgcctcgcccgagggcttcttcaagcaatggatgctttctcgactcgcccgaaccccagctcgggcaggcttcgttgtgaagcaaccttggccaaatcgcctcacccaccgaccgtatcgcaggcgcattcaatgcgaggatcgcctgacgccttatcctgacacacgtgccttagtcggcaaggtcgaaccaagttcagcctcatgcgcaataggaagctccgcctcgcccgaccctagggctcggcccccgcttcggcctcggaaggtggtctccgcctcgcccgacccctgggttcggcctcaacctcggcctcggaaggaggactccacctcgcccgaccccagggctcggcctcaacctcgacctcaggaggaatcgcgtcctcgcccgaccccggcctcggcctcaggaggagtctccgccttgcctgaccttgggctcggaccgaccacgccacggggatacatcattaccctacccctagctagctcaggctacgggggaacaagaccgccccctacggaagcaaggagacgtcagcaagatcccagcagccccgacagctgtgcttctacagggctcaagcgctcctccgacggccacgataccgcgcacacagggctctag

SEQ ID NO: 7649 - DNA, 471 bp, Zea mays
  Peptide Sequence Number=SeqID_51024
atgaagaaagtagcagtggtagcaacgatcctatcggggatctggaagcacaagtcgaactgcttcaatcagaactccgtcacaggaatgatctatgggtcgcggatgcagccatccgctacttgcaagaccaactcgcaaaacgagatactcgattgggcgattaactctcgtccatttgcctgggctaaggaagccaaagctcgagcccatgtggaggagcttagcttagccatggataacttgcaggtctattataatacactacatgaagaagttcatgtattgtattcacaactgcacccgaacgtccctgtggatctcgtcgggatggaagccggaccttctcatgtagcgggagaagcacttgatggtgaaccggacctttttaggccccctccctctatgaagttggttgatgaatggtcttctacgcccgacagtaaagctaccaaaagtaaaaagaagtga

SEQ ID NO: 7650 - DNA, 456 bp, Zea mays
  Peptide Sequence Number=SeqID_51025
atgggcgacggcggctcaccagctcgagctcgaaccagagaagggccctgcgccatggctggagcagaagggctcgcgtggttgagctcggccaggggaaaaaaggggtgcccgcgcccatggaagaagaaggcacagggagcttggaacgactacgcaggggagggacgctgtccatgggaggggctgctacttggaggaatggagctcggcggccatggagtttctgcccctgcgcacgcacaggaaacagagagaagaggctgctgtgcagaggaggccgaccagggggtggagaagggcgccgagcacatgggctccggatgccatggccgtggctgctggctgagcagggaagaacagggggagggctgggcgtccatggcaggagcgtcggcaaggggaggaagaggactgctggctgagagagtggcggctaggagggtagatgaataa

SEQ ID NO: 7651 - DNA, 441 bp, Zea mays
  Peptide Sequence Number=SeqID_51026
atggacagggatagcagagctgctgctgggcgccatgggagaagagctgagcccccagcttgctgcacgccagggatagtagagggaggaagaagcggctggagcaggcttgcgcagaggagggaggaagggcgagaagcagccggggagggagcttgtccgcgcctgggagaggaagaggcaccatggggagctgctgcgtcgccaggatatggacctcgccgaggtcgatccaagaagctccagcgcgcaggggagaaaggctccctgctgcagccgctctccaggaggaggagcagggaggacgctcgacctgcaacagaggggctccgcgtcgggtaccggcagcttgagctcagccatgggaaaggggcgtccgcgccatggttggaaatggagctgccgtggggaagaatagggtggcgtgggggagatggctga

SEQ ID NO: 7652 - DNA, 183 bp, Zea mays
  Peptide Sequence Number=SeqID_51027
atgtccctgccgaggagcttactgttgggggtcttcttctccaccgaaggtcctcaagacaaagacaccatcggcaaagtgattctcaagactttctttttctctgccgaaggtcctcaagaggaagatctcgtctggaagcaacgatggcaagtgccgaaactgccaccagctttggcttag

SEQ ID NO: 7653 - DNA, 396 bp, Zea mays
  Peptide Sequence Number=SeqID_51028
agcagaaaggataatatctgtgaagtgccgctcaaaatttatgatagagactggacccattaaggcgtttgtagaggatgagcccaatcgaaaggcgtggaggaaagataatgtccgcctggctgccgttgtcaacgaggactttgtgcaggtcccagcctgccacactgcagttgattaccatggcgttgatgtggggtgcgctgcgcagatcaacatctctggcgtcaaaggtttggttgatgcggaggcgggagtgggggtggtacgacttgtaccttctagtggtgctgatatgcgtggttgggtagatgctgggcgtggccgtggtttcttcgtcgtgaaacaggcagtaatatctgcacggttgctgcgcctgtccctggccccggccat

SEQ ID NO: 7654 - DNA, 291 bp, Zea mays
  Peptide Sequence Number=SeqID_51029
atggcacccaagagagctagttcgaaggcagccccatctgttgatgaagcagcgaaggcagcactactagccgtgaaaaagggcaaggccctcgcagacaacacccaccaagaagcctacaaagacgacgcactctgcaagagacagcgcaacgatcaacccactcccgaaggcaccctccgcacctgcagcttcggaggacaaccacaagaaccacccccaggcttctctccactagagggcgaggacgcaacagaggagagcgaagtcatcggtgtcttagcagattaa

SEQ ID NO: 7655 - DNA, 408 bp, Zea mays
  Peptide Sequence Number=SeqID_51030
atgtccggtgcaccagggaggattgccttcgaactcttcaccttcgggtttctcaggcgcagccccactataattcaccggactgtccggtgcaccaccggacagtgtccggtgcttcagagagaagcggctccgaattttagcttcgggaaaacgggaggccgctccgctaaaattcaccggactgtccggtgtgcaccggactgtccggtgcgccagcggagcaacggctacctcgcgccaacggtcgactctgacagtgaacagtgtgaaacagtacacgcggcagaagtcagagcagagaatcagagggacaccggactgtccggtgtgcaccggactgtccggtggcacatgaggacaaagcctccaacagtcgaccagcttcaaccccaacagataggatga

SEQ ID NO: 7656 - DNA, 189 bp, Zea mays
  Peptide Sequence Number=SeqID_51031
atgaagctgtggaaggagacttccaggagttccaagactacgacgagttctaggcgtgggttagcggcaacccccagtcggctgcctgtgaaggccgcggttatctacgtttcgttttcgcactttgatttattttcatttagtggtcatgaccttcttgcctctgggatcacttcttatccggtgtag

SEQ ID NO: 7657 - DNA, 144 bp, Zea mays
  Peptide Sequence Number=SeqID_51032
atggccacgatccacgcggacgtggacatggcgggcgtggatggcgctagcggcgaggaaggggagctgacaggcgggacccgctggtcagcggacccgaggccacggacgcgcgcgagcgaggcgcctagaagggttatttga

SEQ ID NO: 7658 - DNA, 459 bp, Zea mays
  Peptide Sequence Number=SeqID_51033
atgggcaagagtaagaaaggtagcggttcttctcctcgctctggtgacaagcgcaaatgtgagccgactccaccttcggaggacttcggcgactcagagtactcggaggaggagttctcctccgagtccgagggatctccggctcccgtctctcccccggcgtcgtctgatgattcagacgactcccaggggattgctgcggaggtctggacctacatccgggccgtcgagcgctccgggctcgagggctcggatgagtcggagtactcctcggacgaggaggactcctcagactcgtccgaggagagcagcggcggcgatggcggtgacgacggcgacgacggaggcgacggtggtggcggcggcgacagcagcaggggcagcgacgacggtagcaagggcggcaatggcagcggcagcaagggcagcagcaagggcagcaacaaggctagtggctag

SEQ ID NO: 7659 - DNA, 2097 bp, Zea mays
  Peptide Sequence Number=SeqID_51034
atgccctccctgggcgggcagcgggtgcgaagtccagccttcacgttggatctgcatggtcgggatctcgccgcattcgtgcatgaagcgaaagacggtgcggcgaggattgtggggcgctatgtgccgaggacagagggtctgcggagctgggatatccgtgggtccaatgaggctgccccgaccactaagaagagaaaattaggtattgtagtgggggtgggggtctctgaaagttttgctgtggatttgatggggacgtgcgcagccctcgggggaaggatgtcttcgcccgagctccgggagtcttcggcgcgaatgctggagaatattgctgctgttgtgtcggcagtgatggagagggaccgtcaagacgctgcgcagaaacgccgggcggttgtcaggatcatggatcctatgcgtgaggcgaaaaaggcgcgtgggagcgcgaaggttgctgcctctggcggtagcaaaccggtggcggctgcgaaaccggccgcccccgggcacagcaaggcggcggcgagtgcgaaggctgccgcccctggcgggagcaagccacccccgggcgggctcgggaaaggacgaaggccgctttcgccggcacgatgtattgccgacttcggcacggacatcagtatcgaggattatcttgttggtaaggtctttaacaagtatcatggtgtaggttcgggtgaggggcaactgactgttgtcctgcctccggtggcgaccacttcgccaacggcggtagtgggggcgaagtgtgccgcgcgggacccgtgggccactttctgcgcgagtggcgagattctatcggccgctgccgctaaggacatggcgggctccatgtctcagcgactgagggaagcgtcacagcagctgccacaacagctgaagcaagcggccgacttcgccgatctcgtcgcgtcggctgccctaactgcggacgtgctgctgaggtcgagcgtctccgggcacagcatgcgggatgctgtgcgggagaagtcggctgcggaaagcaagaaccgcaggctgtcggagaaggccgaagccaaagtggcgcgggcggagggcagtctcgcctgccaacgcgccgaggagctggaggcgaggttcaacgccctgcgcagccgcgtggacaaggccgagtcctcgacgcgcgcggaggtcgagcggacgcatgcgcagtttgtggacgcgtaccgcgagctgggtgcgcggactgctgacttcgaagtgcctggccaagaagcgggcctttgcttccttgaatggttgcaggaggagctgctggtgctcccgaccattgtgacaggtttcatgtccttcgcctccctcgtcacctgcgagggggccatgaatgctttgtcccacgaggggtgcaggcattatgaggtcttcgaccaagcgaacgaaaactttgagcatgaaattttcaaggtcgaagaccctgtggtgaagcagtcggcgggggcactctttgataggatgtggggtccgcacgggcaagaggcggtcagggatcggtctgaccgggcgatagagcagatggtgcatgctgaagacgtcgaggaccttgttggtctagacgacgcactgcccgaggccacggaggtcaatccggtgccgtcctcggatgccggtgaaggcacctcggcaatcctcgtgcccactgcggccggcgaaggccccgcgccagctcctgcgccgacgagcgaaggcgccctgaaggtggtggccgagccgactgctgagccggcaaccgagggccccacagccacggccgggccctcgcaggttcttgggtttgtgcccgcacacgcaaccgctactgacaatgctatttttgtggcggcttcgaccgtggctgctgatgacgattcgtttggctatgtgtctaagtgttttgagtctgatgattctgggagttcgattgtgtggacggaggagtcttcagacgaggacttggattattttgcggcgttggacgtggctacggcggagacttcgccgcgtgtggtgggtgctgaggctcctccgggcgtcattgtggtgagatggagagtgttcgtcttcgtgtggacgggactg

SEQ ID NO: 7660 - DNA, 324 bp, Zea mays
  Peptide Sequence Number=SeqID_51035
atggccatgatgggttcaacatcggaaaagatgtacctctgccaggaccgtgtcgatgtaggcttgatgaccgaggaccctttaactggtcacatgcctcgtcatgggatccactttagtaagcatttctgcaaaacagagtctttgattattgagaagccttaccttgactcccttaaccagcatacccttgagagtcttttctttagtcgggtgaggaagcgacaaatttttgttgcttctgctccaaggtggttcccaaggaagaaaaacaagagtgaagccgcgggaggacttggtcctccattaggacttttgttttaa

SEQ ID NO: 7661 - DNA, 213 bp, Zea mays
  Peptide Sequence Number=SeqID_51036
atgaggatcaggctcaagaagaagaggatgaagatcaagatgatgagctacctcaagaggaggacattgatcaagggggagaaaaagataatcaagacaacgaagatgatcaagaaatttaggatcaaagaccgccacacccacgagtccaccaagcaattcaaagagatcaccctgtcaactccattcttggtgacatttacaagggggtaa

SEQ ID NO: 7662 - DNA, 1050 bp, Zea mays
  Peptide Sequence Number=SeqID_51037
atgggggatacccgccatctttccgccttgtcattgggggaacgcaactccgcgggagttggtacctttcagccatcgttcggcttcaaggattttcatcagccagcccggctgtacccctacgccggtgcttcaaggatgttcatcatcctcgctggggtggaggccgggctgagccggagctctacctccagcgcaggttcgtgggtcggcctctccttcggcgttcgagggagagggcgctcactggccctgcgggcgggtcggacttcgacaacgcggggccggtcgacggcggacgtcgtcagcctcagcgcgtcgggctcgtcggcttggctcccggtgccccctcctgccggaaggcggctgccgcgccgtgtgcacgggaggaccacccaagatatcgcgcgctgccagggcggcgttcgtgttctggggcggtcctgccttcgcaccggtatggcgcctccgtgcggaggtcggtgccccacttgtctgggaggatctgagtggggatctgccggagggctgacggcccctgtcgtcggtgccgaggtggaggcgactcgagaagattccctcggctcggtcagccttgttgtccgaggcttcccttgcttagttagaggaacccctcggccgctcttcgatgagccgaggccaggggtcgcggtgtcagcgcgaacagaggcggagttggctcgaaaagaagatctggtcgaccggagcctggccgggtcatccgttagcgggaccgacaccggaattgacctgccgaggcctcgggccgggctgatgtccttggaggacagctggtcgaggccccggggtgaccagccaagcctcctgctcgggccggattctcggagaagaccctggcggcgatggcccgggcttggtgatgacgttgtccttcagagcagagacccttggaccgtgtcgccgtccgaggctaggtcgggcctcaccgaaggtgttgtcgacgccgagggtgctgctgctccctttagccgtcaagatctgagcctgcaggatcggattatcttgtag

SEQ ID NO: 7663 - DNA, 546 bp, Zea mays
  Peptide Sequence Number=SeqID_51038
atggccttgctagaccctcccgagtgcctccaggccaaggtggcactcaacttggtgcgcaacctactcggatggggtgcgctggcattcgccagaaggatctgtgtcggtgcctctcccctcggcgacctcgccgccggggagttcgtgttcttcgtctccaacctcccctgcgggttggcgctgccgatctcatctttcttcgtgctgctgctggaggaactcggcctccaactttcagcacttcacgctctgcttcatccaccgggcagccatcttcgcctacctctacgttatgtccgtgggggcgacgcttcttccgtcagcgcccggacgaaagggctcgaggtgtcgaggctggacagcagcatatctaagaaagagttgatgtcctggcccccaggagaggtgctctatgttccagaggttgggaagaggcactccttcagttgtggcaaggtggacgcacctgggtcagcgtatttccgtcaccttgaggggtccttcccagctgggggagagtttgaggagcccttcttggtttag

SEQ ID NO: 7664 - DNA, 73 bp, Zea mays
  Peptide Sequence Number=SeqID_51039
atgtcgcccgacgcgcaccgaagcaacctggcctatgacacgagggcccgggcccacaagtcattcagctggg

SEQ ID NO: 7665 - DNA, 478 bp, Zea mays
  Peptide Sequence Number=SeqID_51040
atggggtcgggcgaggcggaagtcgttcggccgaggcccgggcggagtccgagccctgtgccccgagttccgagccctgggggtcggggcggagccggagttttcgtcgtctttccgggtcttagcccgagtcctagctctgggggtcgggcggagcggagtttcgccgtcttcggggtcttagcccgagtccgagccctggggtcgggcggagcggagttcgccgtcttccgggtcttagcccgagtccgagccctagggtcgggcggagcggagttcgccgtcttccgggtcttagcccgagtccgagccctggggtcgggcggggcggagttcgccgtggcggcgctgtccttctgtcagactggccagtggagcggtggagtgacagtggtcacttcggctctgccgggggcgcgtgtcaggatgaagctttatgctgatgggggttaccagctgagaattaggcgtcttgagg

SEQ ID NO: 7666 - DNA, 447 bp, Zea mays
  Peptide Sequence Number=SeqID_51041
atggccgccgtcgaggtcatgggatcggaggtttcatgtggtacggtgaaaaaggttcacactcagccaataaaaagaccaagttttggattcaataaaggagcaaaggggcaaccgagggcacccctggtctggcgcaccggactgtccggtgtgccaccggacagtaaacagtacctgtccggtgcaccaggggactcagactcaaactcttcgccttcgggaattctcggaagccggcgcgctataattcaccggactgtccggtgtgcaccggacatgtccggtgctccaaggaagctcggcctcctgaactcgccagcctcgggttcgcgcggcagccgctccgctataattcaccggactgtccggtgtgcaccggactgtccggtgtgccagcggagcaacggctccctgcggcgccaacggctccctgcggtgcattaa

SEQ ID NO: 7667 - DNA, 597 bp, Zea mays
  Peptide Sequence Number=SeqID_51042
atggcgtgcacagacaatgtgatgagagccttgttcctcctggcgctcttctgcgtcatgcatggtgagaaggaagagtcaaagcgcatcgatgcgaaagcgtctgggcctggtgggtcctttgacatcaccaagttgggcgcctccggcaacggcaagatagacaacacgaaggctgtgcaggaggcatgggcatcagcatgcggcgacaccgggaagcaaacaatcctcatacccaagggcgacttccttgtcggacaactcaacttcacaggcccgtgcaagggcgacgtgaccatccatgtggatggcaatctactgtcgaccatggacctaagccagtacaaggaacatggtaattggatcgagattctacgcgtggataacctggtcatcaccggcaagggaaaccttgacggattgggcccagccgtgtggagcaagaactcctgcgccaagaagtacgactgcaagatccttcccaactcactggtgatggacttcgtgaacaacggggaggtgtccggggtcactctgctcaactccaagttcttccacatgaaagcacttacttctaggggaagggtcaaggcatag

SEQ ID NO: 7668 - DNA, 156 bp, Zea mays
  Peptide Sequence Number=SeqID_51043
atggaggaggatcgtcgatggatgtatgaaggttggaagaaaagaggtgctttatcaaggactatgtcgatagatctttgtaagaacggttatatgccaggctatgaggtgtgggtgcaccatggtgaggacccacctcctcgtattgtattgtga

SEQ ID NO: 7669 - DNA, 135 bp, Zea mays
  Peptide Sequence Number=SeqID_51044
atggccatgatgggttcagcatcgaaaaagatgtacctctgtcagagatcctcagctgagtataatcgattcggatctccgtaccttcgcggttatgaagacttggtcactgacctatacgtagaactccagtaa

SEQ ID NO: 7670 - DNA, 249 bp, Zea mays
  Peptide Sequence Number=SeqID_51045
atgagtgagaagaagtgtaaagtatgtggtgagcgtagattcgtagaggttgaaaacgacgatggtttgaccgtgaaaaccgagatagcacgtggtgggcttcccctgagtttcatgccattttcgaaaggaacatgggaaaccgtggtactgagtcgttccacaactacgacggctttgtatgggcaggagatggttcagcgccatgggcaggactacgattggaggaaccaaccaatcgacccttag

SEQ ID NO: 7671 - DNA, 189 bp, Zea mays
  Peptide Sequence Number=SeqID_51046
atggagtatcagaggcaacaagctgagtaccaaaagaagaaggacgagtattattcaaacctccaggcccataatcaagctctactctcgcaactagcacaacaagcgggcgtctcgatgccgacatatgggatgccgcctctggactttgcactgcctgccaatgttgttgcctccaccccgccttaa

SEQ ID NO: 7672 - DNA, 141 bp, Zea mays
  Peptide Sequence Number=SeqID_51047
atggccatgatgggttcagcatcggaaaagatgtacctctgtcaggtgaggaagcaacaaacttttgttgtttctgttccaaggtggtctcaaaagaagaataccaagagtaaagctgcgggaggaaaggatcctccataa

SEQ ID NO: 7673 - DNA, 477 bp, Zea mays
  Peptide Sequence Number=SeqID_51048
atgttgtatcatggtttactagctagagaggctactcaagatgaggaatttgaagttatgtatggtgaggacgatgatgaagacaaagatgacgaggatgatgatgattatgatacaaaggcaactcttgaactggttgcaaggaatatttccactaaatctgcagttgctgaacctccccatgtatcacgtgaagaatgtgctcgccaattatttaagttcatttgttcccaacaactagacccgagcatgtccatcattgattttggaggatatggtggttctgtcttggatgttgtccaatcttttgggcctaataaatgccaagaacttttcatgcagggattcattgactgtattcgtgatgatgatatattatacaatccagataccatgatcaacacactcatactaaatgtcaatgttggtgtcggagaggaaattctccggccgggtggcggaatgcacccgccctaa

SEQ ID NO: 7674 - DNA, 657 bp, Zea mays
  Peptide Sequence Number=SeqID_51049
atgattacgtcagctggcgcacggaagcggtgcaccaatcgccaatcaagctttggccccacctgcaggctcatatcctcccctgaggtgggcccaggggccactgtcgataccctgaaacaggggtaccccttactactgtgcaaagatgcagtacccacgcggctatcacttagttgcatggaagaagtggtgcatgtaggaccaagccacgacacgctcgagtctcaggcggctattctaggtccacagcagcgcccgactccaccacgtgggtggctccgaggtcgccgcatagccagagaagacgatatactccaagatgtcaacagtgggtccagaccccatgagaaagtgccaaacccctatacatatagaccggaccccggggaaaggaccacgacccccacgggcgcgacctggacccccggaacgggttccggacccctctgtgtggggtccgggccacccacagctgggtcccagggctctgggacagagaattcccaggccttgctcaaggtcaggcggtacgcccttgctgccgcatgcactatgctcatcatcactcgtacattgccagggaagcttccgctgcacgccaaggctatgcagaccgcggatactaggacgcaggaagattgcactggcgactag

SEQ ID NO: 7675 - DNA, 450 bp, Zea mays
  Peptide Sequence Number=SeqID_51050
atgggcaagggtaccaagcgcaagcgcgagccgactcctccgtcggaggatttcggtgactcggaatactcggaggaggagttctcctccgagtccgagggatctccggctcccgtctctcccccggcgtcgtctgatgattcagacgactcccaggggattgccgcggaggtctggacgtacatccgggccgtcgagcgctccgggctcgagggctcggatgagtctgagttctcctcggacgaggaggactcggacggcggtgaggacgaagatgacgacgacgacgacggcgacgacgacgacggtggcgacggcgacggtgacggcagcggcgacaagggcagcaccagaggcggcagcagtacgggaagcaccagaggcggcagcagcaagggcagcaccaggggcagcggcggcaagggcagcagcagcaaggccagtggctaa

SEQ ID NO: 7676 - DNA, 306 bp, Zea mays
  Peptide Sequence Number=SeqID_51051
atggcgcctgaggtcgggcctgactgcctgtcagcctcactctgtcagatgccactgcagtcggtgcggcgcaggcgacgctgtccttctgtcaggtcgctttatgctgatgggggttaccagctgagaattaggagccttgagggtacccctaattatggtccccgacaagtggatggtatttaccttaatgtattccaagagtcttataaaggtaagatgttgtcctacagaacatcttctgaggaatacacctatatgagtcagactgctggtcacagtatatgggacttgggtaatccctaa

SEQ ID NO: 7677 - DNA, 822 bp, Zea mays
  Peptide Sequence Number=SeqID_51052
atgggcgtgcctgccctctacgcgcgctggcgcgcattaaatgcacagcagccgaagcgaattcccgaagctggtgagttcctgaggccgctcttccttggagcaccggacactgtccgaccgatgcccaaggagaatgactcgtgggcccgggccgctgtgtcaagggctgaaccactaccttcggcggggatgaggaggcgcggcgattcgctcctcgcgtggcggttcgccttctgtgcaccaggagacaagcgcaccagccgtatgacttgtggggccgggccctcgcgacataggttgggtacaccggtgtgcatcgggggagactttcggtggcgcttcggggcgggagcgggggagtctatctttaaaaagggagtcatccctcgagtagcagccgtgccttcgcttttctcccactcgctgtgccctttcgcctccgagctctctgcgccccttcgccttcaaggtctctgctttgctccgctagatggagcgccctggcgttcggtggaaggttccacgccagcgccttccccctcggagcgcgacctcatgggggttggcgctcttccgccggtgctcagtttcaaggatgttcatcagcctcgcggtggtgggaagcgagtcgggttgcggggtggagagcgagctgagctgcggttctgccttccgcatgagctggtgacccgcctcttcctccagcattcggaggaaaggacattcgtcatcattgtgaaggaggcgaacttcggctacgtggcgccggccaggccacaagcgccatctgtcgtcgtgcattcaactctttggctttaa

SEQ ID NO: 7678 - DNA, 585 bp, Zea mays
  Peptide Sequence Number=SeqID_51053
atggcgaccctggagccatccacgtggtggagttgggtgttgttcaccacgcgactagagacagtcgcgtgggcaccatatcttcatgctatagtaaggggtacccctgatccagggtaccgacagtggcccccgggcctgcctcaggggaggatacgagcctgcaggtggggccaaagcttgttccttgcgttaacttggcatgaccggtgcctggggcgccacctctgcgcgcgccgtattaactcggtgcgctcgcgctgtcagcctgccatcggtcacataaactatcgtgcctgttcccgcgacttgactgacccgtggtctctgcacttgatggctttactgggccatgtgcggggtgcctcgataccgctgcatttggttttgaaaattcaccttctttgtcttctgcggcagccccgtggaggcacggtactggcgcgagcggcagttcgacttctctgcacccagaaactagcgcccaaggaggatgactcgtgggcccgggcccccacgtcagagactgggctgttggtttcggtggaggtgaagaggtgcactaccacagacggtggcgtttga

SEQ ID NO: 7679 - DNA, 1287 bp, Zea mays
  Peptide Sequence Number=SeqID_51054
atgggagagtaccggacccctgtacattgtagaccggacctccggaacaaggtccaggccccctgtgagtgcaacccgggcctccgggtcgggtcccgggactctggggcggagaatgcccaggccttgctcaggcaggggtccggtgccaacatggcgggtgcattccgccacccggctggagatttcctctccgacatttggcacaccagggcgtctagggctgcgcctggggcgctgtcagcagccagggaattgttgtgccaccctcctagctccacggcctctctaggagccatgaagcagtggcaggacagcgttgacccaccgactgaggacctgcgggcggagctcaaccgtcggcgtgcggcggaggacgctccagtctctcgggagaggtctaatgacctgcgggtagaactcaaccgcaggcgtgcgggcgatgatgcccgcgtctctctagagagggcacgagagcgccgacagaacatcgagggtcataacctcgatcaagactttgctgcggtaacaccgcaaacgtcagtgggcgcccagatccgggcgggtgtcccattggccggcgtgggctgcgccgctctcgcggatcatctctacgtggcgtcctggctatccaagttccgaccacacctgccagagaagtatgacgcgaacttcgccagcgcttaccaacaacacgacgtggaggcccacctccacgcagtgaggcaggaacccggagaaactctccggacgtttatctcccgcttcaccaagaagttggctacgcatgatgtagaaactgtctccactctctttgctctggccgacaactgtgactggggccaaggcgaccgtaacaaacgcccacggccgcagaggggtaacagcggctcatgccctgtgcaccccaacggtcgccacagcgccgcagagtgtcgcgagatcatcgacctcgcgaaacgcgtcaacacgcggcgtgagcagtcttccggggatggcaccccacctcgtcgccgacctggcaaggaaagggtcgacgacgacgaggtggccgcgactgaaccggacctcgggtatcactcactcgagggggtcctgaaggatgttttccccggaggctccaactccggtgacaacaagggcggttacagcgcaaggacgtggactccatcggcgaattcagatgtcaagcggcaacccgaaatgcactttgtaaccagctgggaggaacccttcaaggtgacggaaatatgccagcccggggagtgcccaccttgctataactaa

SEQ ID NO: 7680 - DNA, 258 bp, Zea mays
  Peptide Sequence Number=SeqID_51055
atgggggatcataaggacgagggttttgaagacttgcaactagggatggtacttggggccatggatgttttgttgattaggaactttatagaggacagcaaggacttgggaaaggccaaggtatggaggaggaggagcaagtgcgtccacaacaggaaggagatcaagtccgactcagttgcgattccatctcgggttcgaggaccagtctgcactaaaatagacgtccaggacgcatccagactccgattgcaatga

SEQ ID NO: 7681 - DNA, 423 bp, Zea mays
  Peptide Sequence Number=SeqID_51056
atggggcacggacgtccggtcggattacccgccagcagctcaccggagacaccatgttcggcgcccatcgagggcaacatggcgctttcccccctcctccttgcggaaaggcgccattggaagctccgctccgcccgacccagggctcggacttgggctcagcccctgaagacggcaaactccgctccgcccgacccagggctcggactcgggctcagccccggaagacggcgaactccgctccgcccgacccagggctcggacttgggctcagcccctgaagacggcgaactccgctccgctcagccctggcctcagccgacggtctccacctcgctcgacccaggggctcggactcgaccatggccacggaagacagactcgacctcgacctcggaggagccaccacatcgcccaacctag

SEQ ID NO: 7682 - DNA, 468 bp, Zea mays
  Peptide Sequence Number=SeqID_51057
atgggcaagagcaagaagggtggtagttcttcgcatcacttcggtgataagcggaagcgtgagccgattcctccctcggaggacttcggcgactcagagtactcggaggaggagttctcctccgagtccgagggttcaccggcccctgcctctcccccggcgtcgtctgatgactcagatgactcccaggggatcgccgcagaggtgtggacctacatccgggccgtcgagcgtgccgagctcgagagctcggatgagtcggagtacttctcggacgaggagaacttctcagactcgtccgaggaggacggcggcggcgatggcggtgacggcgacgacgacggaggcgatggtgatggcggcggaggcggcgacaagagcggtgacggcggcggcaaaggtggcagcggcgacggcgatggcggcagcaagggcagcagcaggggcagcaacaaggccagtggctag

SEQ ID NO: 7683 - DNA, 213 bp, Zea mays
  Peptide Sequence Number=SeqID_51058
atgcgtgaaaatggcattacaaacttggaactaagatattctaaacaaccattgaaccctggtcatgttttccaattagcatctaaaaacgatgcaaagattcttcgaataaactttgtgattagtctgttaaattatgaggacaattcgtaccgatatgtcatccctgcaaacatacaacatcgacttatcgatatcgctaaaaaggattag

SEQ ID NO: 7684 - DNA, 408 bp, Zea mays
  Peptide Sequence Number=SeqID_51059
atgtgcggtcctgtcgattcctctcgcgccatgtgtggccccgtcgaccacgcctgcgccacgcgcgatctcgtcgacacctcccaggcaatgcgcggcccgccgatgagcgtggctcgcttcgccgaccccgctcccgtctaccaccgccgtgggcgtgccactccctcaaaacccactgactcgggcccgtcgacgggcgtggctcactttgccgaacccgccgtctatcactgccacaagccggccacgcccgcggacctcgacgtcccggcggccctctctaaaacgcctgtgtaccacccaatcgccatccaccgcgaccacaggcacatccaactgcaaataatcgaccaaaggatgaaggtgatcaacaatgcactaatgcgctacgtgcaatcactgtag

SEQ ID NO: 7685 - DNA, 843 bp, Zea mays
  Peptide Sequence Number=SeqID_51060
atgacctggaacagcagcagcaggacgacggcgctgtgcgagtgctcaacggtgagaagaccggtcgcagattttttggagagggaagaggaggggattccacatggccggaggcggagggagcagatgggtgaggggcgagacataggcgtacccgtggagccaaatccgactgaaggcacgacgagtttggcgaccgccgcagcatcacagatgcgacggctcaacggcgagtgctctgctcaacggccaaaaaccgcttggaacaggagctcggactcggacacgaacacgcacaccgcgtggaacaggagctcggactcggactcggacacggacactctgaacgatgtaatcccgtttgcctcggtaatatatatttctcctgcaatcccgttcggttcggcagtctctttacaaatttcgcggttccatctctcgtgctcaacagcagtctctagcagtctctctacaattttactaaagttcttttgttatatcaaaatgttggaataccaaaacgtcgttggaggacggctgcagctgaagggtaaagcgttggacgtgaaggatggtggagtaaagaaaaagaagaagaagtaccagcgtgaggagtcgtctcagactgaatctgataagaatggagacgaaaagaactcacattctaactatgaccatctcacacgagcagagcgccgctacatggaacagaagcagaagatcgacataaagaagatggccaaagtcgcaaacaagtcgtacaaggaccgcatgcaggacttcaaccaatacctggctaacctcagcgagcactatgatatccccaaagttggtcctggctaa

SEQ ID NO: 7686 - DNA, 3042 bp, Zea mays
  Peptide Sequence Number=SeqID_51061
atgccggaatctgccatacacgggcaaagtcacggcgcgtgtgtcgtaggacggcgcttccagggaaccttggtaactattgatagcgcagctcgcggcagtggtaaggtggacgcaccgacagtgatgaagaatatgagccccggcgagcgcacattttatactttatttagtgggcctgcagaacaagcaccgctagaggaagaggaagagatatatctctggcgcaaagattttgatttctttgcagatgcaaactcagtaatgcatcatgcagggaacatcgacgacgcgaaagcagaaaatcctgatgattttatgactttggtggctaattgtttaggccttggacgaggttatcagcttgttactgaaccagcacatgaaattattggaaaagaacgaaaaaatcgtaaacgatgtcgtgttccaacttcgtcgaggaccctctcgaccaccaccccggataatattccctttggcattcaaaagaacccacaagaaccgcatgtgtcagattacgctggtcgtgcacacattcttcacccggtactggactcatccaaaaggtcactcgacattcctagctcgacctccacactagcccaaaaaatggtcaagcatccctcatcaaggtggttcaacgactgtcggccgcagcttcgattggatgtgcctgtatgtcggaagatgttaatatgggcccgtatgatgctggtgaaccacgaagaccgaagtatgctacaaaaatctaatatctatcgcggtgtgctagcttcactttattgttttcaagctgacccatcattggtagctgccttcttgacatattggaatgttgatggacatacattggttaccagtcaaggggagatggggtatccactacataccatctctgatgcgatggggatccctatctcaggtcgtctttatgaagaattcattcctccttgctctgacgtccatggtcacttggagactctttatgctatttatgctaacttatgcccatcagagctgcagccaggcccaggattagtgagtcttaccgcttggttagaccacttttttgatgataaagctgattcttttggcagttctttattggatggctttgctgaccccaaagatccgttacttcagaagcttcgtttccatgtcgcggttcaaggtgaccgtcttgcagccattcttggtgccgagacattatcttaccgatctatatatccttcaacggtttaccgtgctgcatttatagcagcttggctatgcacttattgcattcctgtcgaagctggccaatacattcgtcctgaggtatttcatatggtcgttcagatatcagaaggcgttcgcagagcaattggtgtcacaagcttggcttttctatataattgtttggataatattcatgataatataattagtgggacacggtccgcgaacgagtgttccctttttctcccgggtcatttcatcatgggctggttcgcctctttttggaagcaagctcggaaatcaacgaccttacattgtccagttaaatttcctccttttgtcatagatttgacgaagttggaacaacccatgcctataacagaggcacatcatatattttgggattttgatggtgatggtcggggactgcgctcgctagattttttgggccgatcctcgctgcgattcccaggaggtcaccgaccggtatttattcgagatggtcgtacgaagaatgagaaacaaccatttgccatatcagtttctgcaatggagctacttatgagcagcctctttggtggtattactcataggcgtggcgaacgttctgacaacctggtgtattgtccgcatcgcttcgcacacatgtttaactatgatcaactcatcccatattttgattatcgtgctgctgataatgtaactgatagtttgaactttcgaagttactctccctcgagccgaaaggaaacacttcaaatttgtgttcggcggcatctttcttattatgatcaacctgagggacatgctctcgtggtgcaaccttctaatcttggaactagacgttcatacaattatattatctggtgtaacaatgcttttcggtttcttcgagatccttcattcttttgtgataggatttttatgtcagctgtaatcgaaacaacagtcgctgcccctgcagagggtgacattgatcaacctgctaaagaaacagcagtcatcaaatattctcttctccctggtgatagtgaacatgaccgggaagatacgacccccacaactgtgtccagacttggtcaaggaaaaaacattggcataatacaagctcgtttgcaagacaaggcatctgctctaacctcttcatccgaattacctttgctagtagactcaggccaatctacgcacactagcaaagggtcacgtgcaaacactgatctacttgatgatacattatcagatggcggcttggcatgtcctccggatgatccagatttcctgaatgacttcgtcttcactggagcgctggagccctttacagacttattcacagacctcccaaatgaggtcatggagatgcaggcctcgcatactcaggttccaacatcaggcaacttagaacagactgatatggtgcatgtttcgcaaccggttagttcgactggactaatgtcaagcctcgaccaggatgtaccctcgacgcaacctggctcgaaccaagctagtgtgcataaggtcaatactcccaagcggaaagcatatgacaccgacaaccttgccgcttctgatcctaaaagcaagaaaactagcaaagacaaacacagagatcttgaattggtcgtagagtctgaacaattatggaatgaggttgaacaagccatcagcttatttcgagcacaagcaagtgccactgatgtcattggagagaagccaaattatagcgaatttgatgctcggcagcctgtgcatatatttgagcctacagatgttccggcaccacgctttatgcaatatgctcatggggatcttgatcgcttctga

SEQ ID NO: 7687 - DNA, 138 bp, Zea mays
  Peptide Sequence Number=SeqID_51062
atgggtgagacgttcctgaaaacttggatgcttgaagttgtggtggttgggggggtatttatagcccccaaggccccaaccaccaaggtagccgttggggaagctgctgacgatgggcgcaccggacaggtaaggtaa

SEQ ID NO: 7688 - DNA, 1017 bp, Zea mays
  Peptide Sequence Number=SeqID_51063
atggccgcgagttcgacaatcatgcctctcgttctttctttgtcaccaacggtgtccagcctcgatgcctctgctcgcgcctcttcccatctcacgtgcggccccattgaccctgcctgcgccacacgcggcctcgtcgaccataccagcaccacgtgcaaccccgtcgacactacttgcgccacgcgcggccccgtcgactcctcccgcgccatgcgcggtcccgtcgattcctctcgcgccatgtgcagccccgtcgaccacgcctacgccacgcacgatctcgtcgacacctcccaggcaatgcgcggcccaccgacgagcgtggctcgcttcgccgaccccactctcgtctaccaccgccgcgggcgtgccactccctcaaaacccactgactcgtgcccgtcgacgggcgcggctcactttgccgaacccgtcgtctatcattgccacaagccggccacgcccgcggacctcgacgtcccggcggcccgctctaaaacgcctgtgtaccacccagtcgccatccaccgcgaccacaggcacatccaactgcaaataatcgaccaaaggatgaaggttcttcaatactcgatgccaggatgccgatggagctcggactcggacacggacacgaacacggacaccgcgtggaacaggagatcggacacggacacggacacggactctctgaatgatgcaatcccgtttgccttgctgaagggtaaagcactggacgtgaaggatggtggagtaaagaaaaagaagaagaagtaccagcgtaaggagtcgtctcaaactgaatctgataagaatgaagacgaaaagaaccaacattctgactatgaccatctcacacgagcagagcgccgctacatggaacagaagcagaagatcgacatgaagaagatggccaaagtcgcaaacaagtcgtacaaggaccgcatgcaggacttcaaccaatacctggctaacctcagcgagcactatgatatccccaaagttggtcctggctaa

SEQ ID NO: 7689 - DNA, 537 bp, Zea mays
  Peptide Sequence Number=SeqID_51064
atggtcgacgaggccgcgtgtggcgcaggcagggtcaatggggccgcacgtgagatgggaagaggcgcgagcagaggcatcgaggctgcacgtggtgcaggcaacgacgcaaggtggggcgcctggggtggaggggtaatcggattagactcgagaagggagtcaagatcggtggtcgtaggaggggttgtgccatatagggcgaagtggggagtagggtggctcactgccttcgagggaagacggttgaggaggtcctgggtggccaagacgatgatgccaagtgatggaggaggtggtggagaccaaggcgggaggtggagacgcgccagtggtggaaggccggaacgtgtagaggggctcagtgctgtcacagctcgcgagagggttcctggtggccagatccttcacagaaaaaccagaggggtcaaattcaatgtaacaagaattgttggtggtgaaccaacgaacagaaaggagattataggtgatgtgtggggctatgagaacgtcgttgagatagaacgacccaggtga

SEQ ID NO: 7690 - DNA, 201 bp, Zea mays
  Peptide Sequence Number=SeqID_51065
atgggtatggcggattttgatacccatgggtattttattgggtcatttgttatgcccatcgggtatggtgggcatggtgggtatgggtatggcttcgtgtgcccactgggttccttacccactgccatccctaccattgttatcccaatccacaatttcgaacgatacactattatctcatatggaaagaaattgccataa

SEQ ID NO: 7691 - DNA, 1086 bp, Zea mays
  Peptide Sequence Number=SeqID_51066
atggacaacgaggttctccgagtaagcgaattctctgctcctggcttgcaggaggtagtcttcgcccggggcgctggaggttgcgctatttcctgctccgttctggctttttcagagattttcgaggaaggcttcttctccggtggatccgttatacgatgcataattccttcttcatctgccatggatgagatggttccgaagcagaacatggatccagggcggagagcaatcttgtgttggaaaacgatggccattgagctagcttggatcagcgacacaccccctacctggcgcgccagctctcggtgtttgggacccgactgcacacctagggttacccctcaagggggattttctagtatggaggatgctagagaatggactagatggctgatgaatgacctccctcttgatgggacgtttgaacaatggaagaaacacacctccacgtgttcgacgctttctgcccgcgccagagcacgcccgcgcgcgcccccgcatgcccagcgccgcgcccgagccaagccagcgccatgggcccacgcccgcgcctataaagccctcccaggcttcgactgcacttttccgcgcaccctcaaacctcaccgaagtttagctcgccgccgtttgcccgtgcgcagcgtgtccgcggccgcccaatccctctgccaccgtagaccggccaatagagccattcccaaccccgtccagccctcggagaagactgtgcacacctccgtgaagctccccgagcgaggaatcggagtttgcttcaccggagaggccagtccacgctcgctggagctctcaaccccgccggagtacgtggaccgggtaatccactcaaccatccttcgattccttgtgcacacggtcactacgttaccccgtgaagctcaccgtgcccttggattgaaccagttcgccgtggtttggccgatacactcgccgccgacgagaacacccgcctgcgcacgtggactgagcgattccggccatccccgacgtcaagccgtacctcgacgtgaccgccagagcctccccgagccaaccccacccttcgccggacctccctcgccgccg

SEQ ID NO: 7692 - DNA, 300 bp, Zea mays
  Peptide Sequence Number=SeqID_51067
atgaccaaggcatcggttcaaaacttcagcatcaatgacgatggagaggaagagatccttcaaagagaaaccaaatgggtcgaactcaatagagcaaaaattgtgacgagtaaatttgcgaatggatatgagattacgaataagtttgggaacaggaaaaatgtcgttaagaacaaaagaacggctagggggtgtgtggaggaagaaccgcgcaagctcccgactaatcctcgttggtgcccctacacaaaagggaagccccacgcgagggccaagcacctcggtcgagtaactccgtag

SEQ ID NO: 7693 - DNA, 432 bp, Zea mays
  Peptide Sequence Number=SeqID_51068
atggaggacttgagtagaatgaccccgacaattgtgatcgaaaagattgcggcatttgaaatgtcgcgaaaatgggtcgacaagaggatccaacttcttctagaccatatgcttttgcatgtgatgaaagaaaaggaaaaagcaaagaaagggaggatgctttgcatgcggggagaaggccacttcaaggacagctgtccaaatatggctgaacccaccaaggggaggagcaaaggcaaggcgcttacaagtgtcaaaacatgggattactcttcaagcgaagatgaacccccaaggacgcgcaaccatcgatcctcatcacgctcatcatggtcatcacgcaagtgccttatagcaagagtaaaatgtgcattccatcctctagtgatgatagcagtagtgatgatgacgatgagcgaaatccctccgtag

SEQ ID NO: 7694 - DNA, 81 bp, Zea mays
  Peptide Sequence Number=SeqID_51069
atggccatgatgggttcaacatcggaaaagatgtacctctgtcagccttaccttgactccctcaagccagcatatccttga

SEQ ID NO: 7695 - DNA, 2448 bp, Zea mays
  Peptide Sequence Number=SeqID_51070
atgccttcccatggtgggaagctggtgcgaagtccctccttcgcactggatctgagtaaccgcgatccggccgcctttgtgcgtgaggcggaggatggggcggtgcggatcgttggtcggtacgtgctgaagacagagggccagcgtagctgggatatacgcgggtctaatgaccgcttgaacagggtcttcgagttgaaccgtctgccgtatggcggttatctcgggcaagacgatgtggatcgtcgcgggaagaagccggcggtagagactggagacgaccccgcgccggcggccgccccatcctctaagaagaggaagctaggtattgctacgggaggactgggggtttccgatggttttgctagggaattgatgaggacatgcacgaccccagggggaaggatgtcttcgcccgagctccgggagtcttcggcgcggatgctgagggttaccgggggttggtggcctaagaatgttcctatcccccgcgcggccggtgaagacttttttacatctcgcatgaagcgccaggcggtcgttaggctccatgaggccaggccgaagaggccgcgggggactgcgaaggctgctgcccccggcgggagccagccgccgctggcagcgaagtcggccgcccctgggtccagcagggtgccggaggctgcaaaggcggctgccgccggtggtactaagtctgtcccggcgggagccgtgaagggccgagagttgccgccgccaggcaagcgcgtggccgacttcgccaccgatattagtgtggaagattattttgttgggtcgggcgaaggccaacttgttgttgttccgcccgccgtgtcgaccgtggcggctgccgtggtgcccagggcgaagggtagtgctcttagtgccggtggcgagattccggcactcactgccgtcagggacgaggcgggcgctgtgtcccgccggctgaaggaggcattaagtcaggcggctgacttcgcagaccgcgcggcgtcgggggcccttacggcagttgtgtctgccgaagtcgagagacttcgggcgcaacatgctgacgccgtcctggaaaagtcggccgccgacagcaagtgccgcaagctggcggataaggtgtccgcgctggagggtgagaaggctgacctccggcgccaactggcggaggagaggaaggaggctaatgaggccctcgccaaggcgcagtctgcgcaggcggaggccaatttggcgcgggcggagggcagtcttgccaggcagcgcgccgaggaattggaggagcggctcaacgctctgcagacccgtgtggagaggaccgaggcttcgacgtgctcggaggttgagcggacacgcaaacagcttatggactcataccatgagctgggcgcgcggaccgcttacttcgaagtgccagaccgagagcccggacttcgctgcctcgagtggctgcaggaggagttgatggcgctccccgctatcatggaggggttcatgtcctatgcctccctggtcacctgcgaaggggcgatgaacgcgctttcccgcgaagggtgccgacactatgaggtcttcgaccaagcagatgaggatttcgagcgagatatttacaaggttgaggaccctgtggtgaaggaatccgcgggagccctctacgaccggatgtggggccctcacagtcgagaggtggtcagggagcggaccgagacggcgaggggtcaggcggcgcgtggcgagaaggtggaggacttcggggctttgaacagcgcgcagcctgactcggagtcgaacccggtggcggctgtgtccgaggccgccccggagccgcccccggaaaccgtcgaaggcgttcctaatgcccccacagccactgcgaccggcggaggcccgtcgccaactgccgcgctgagggctgaggatcctgtgaagatggcagcggagccggcagcggaggatcccgcgacggctgggtcttcgcaggttcaagattttgggcctgcgcacgcaaccgctactgctaattttttggcggcttcgaccgtggatgatgggaataaatcggatgagtctgcatctaagttttctgattttggtgactctgcgagctcggttgagtggactgaagagtcgtcggatgaggacttggactactttgcggccttggatgtggcagcggcggaggcttcgccgcatgctgcggatgctgaagttgtgcctggtccgagcgctgggcgcaggctgcgaagggcggttgcgaagcgtagagtgagtgaggcggacggcggtcggcttcgtgtgagtagggctggcaggcgggaactgttgtccttgccggccgctgtgagtgcgggtgagggggagctgcgaagtctttttgcgggtgaggagctgaggataatgctatttaactatagggagatgggaattattccgaaggctgagccgatgtaa

SEQ ID NO: 7696 - DNA, 483 bp, Zea mays
  Peptide Sequence Number=SeqID_51071
atggtggtggagaccatcaacgtcaccccgcagcggctacataccaggaattccttagcacccagccaccattgttcacaagggcagaggacccacttgatgcagatgtatggttgcgagtggtggaatccaaattcccactactccatggagcttgctcagaggtcacaaaagtcagatacagatgagaagaagagagacaggttcaggagggggctcagcactaagctccgtgaccgtctcaacaccgtcagggccaacagttacaatgagttggtcaacatggctatctcccaagaggactgcattacagctagacagacagagaagaagaggaagacccctgtggtaggaccctcagctcagccacagcgcttcaggattgtgtccgacacccagggcaggggaccccagcagcagcaagggcgatgggtgatccgacctcagcagcagcagcagcagcaggcacccaaccgcacctag

SEQ ID NO: 7697 - DNA, 1092 bp, Zea mays
  Peptide Sequence Number=SeqID_51072
atgaacgtatgtgagctcactcttgctgtctcacactcccccacaggtcaaggacagcccatccggagagtggtgctgacaggtgggcccaatggggcagtcgctgttgttgcgaacaaggcacctctgtctctggtggatggcccccgctgtcagtctcgtcttcaacaccgtaagcctcggagggaactcgcgcgcgcggactccatcctctacacccgtcggccggatttaccggttccgcactgcagattctgttgggacctcgggctatatggggggaaggatagaggaggcccggctacgccgcagaaacaccgtcgcgctattcccttgtttactacttccagccaccaacaaaaaaaccgtgcgacagaagggtggcgccgcacgtggagcttgctggcgccggcaattggaggccactatgtgatgggggcatgcgcagggtctcctcgggcttccttggctagattggtggctcggggctctggaatttctcgccggtgggggaacttcgccgcggatccgccctcctccgtgggcagcgaccctggcgccattaacccaggtatgaaggacctcttccgcctcactttggtctcctatgtgcgccgcagcaaactaatttcgggattggggcgtgtgggaggcaatcgcatgggcgccggcgagcttccgccgtgggtgcaccatctccgccgctctggtggtcgtgaggtggaagacctcccatggtcgttagattcggatagacggtggatattatacatgggaatacctgttgggaggacagagcgtgagccgttcgatctagatcgcggctcggactcagcctcggctccggaagacgacgaactccacctcgcccgaccccagggctcggactcagcctcggctccagaagacgacgaactccgcctcgcccgaccccagggctcggactcagcctcgctccggaagacgatggactccgcctcgcctgaccccagggctcggactcaacctcgacctcggaggagccttcgcctcgcccgacctagggctcggaccgaccacgtcacaggggggccatcattaccctacccctag

SEQ ID NO: 7698 - DNA, 474 bp, Zea mays
  Peptide Sequence Number=SeqID_51073
atggcctcagggcggacgctgctacaacaaggccctggcccacgtccccactcgaggggcgaggacaagctatcaaagccaaagagccggaggcccggagagcggatggtggcggtgatcccgtcagcgacgaggacttcttcagccgccaccacctcagcgccgatgacggaagccatctgcccactggcagatccccactcggatcctcctaggtgggcgagcaccgacctccgcgcagaggcgccataccggggcaaaggaaggacagcccaagaacaccaacgtcgccctagcagcgcgcggcatcttgggcgatcctccggtgcgcgcggcgcgacgaccgctctcacggcgggagggggcaccgggagccgagccagagccagccgagccagcgagcccaacgcgctgaagctgacgacactcgccaccggccagccccacgttgtcgaagtccgaccctcccgctag

SEQ ID NO: 7699 - DNA, 414 bp, Zea mays
  Peptide Sequence Number=SeqID_51074
atggggctcggccgcacggcgcaggacgtcagggtcacggcgtcggggctcctgggcgcggctccaacggtcctggtgtgggggagggcgcaactcagatggcctggcgcggtgcagggcagggcatcgggcctaggcggctgcgctcctggcagcacgggtttgggaggaaaggggagggaggagagagaggccaggtggggccggtttgcaagagaggaaacggacggggagaagacaaagagcggcggcggtggcttggaggagccaggggagggcgcgactggtttacttgggccccttgtgggccttaggttgatggtttttatagtgttacaaacctacccctcttcgaagaatctcgtcctcgagattaaggaacttccgagaataactgggggaattctgccctga

SEQ ID NO: 7700 - DNA, 777 bp, Zea mays
  Peptide Sequence Number=SeqID_51075
atgacgacaactagacagatgacgatgatcgagacgacgacgatctgtgctagtgtgtgctgtgtggaggtatttctcaagaggaaaatatctggagaattatcggtggaatatttggacaatatttctggaatagaggggatcactggggaaatatctgggcagtatttctgggaagaatttgaggggggtcactggggaaatatttgggcaagcgagtttgagaaaatttcaagatttgaatttttgggatgctacacaagtcctccttcggaggactttggcgactcagaatacttggaggatgcctcctccgagtatgatcgatcgctcgctcctgcttctccagtggcatcatccgaggattgggatgactccatgggactgtctaacgcggaccgagcgtactggcgctccatcgagcgtgccaggctcggtggatcggatgagtcagaggaggtctcctcagaagaggtggactcctccgactcctctgaggagtggagcagcgacgatggtgacggcgagggcgacggcagcagcggcgacgacgatgacagcaagggcgacaacgacatgggagacggcgacggtagcacgggcgacggcagcaagagcgacggtgacggcgagggcgatggcagcaagggcgatgacgacggcagcccgggtgaagacgacggtatcaagggcgacggtgacggcgagggcgacgacgatgacagcaagggcgacggggccagcggcaaggccagtggcataatgccgctggtttaa

SEQ ID NO: 7701 - DNA, 462 bp, Zea mays
  Peptide Sequence Number=SeqID_51076
atggaggtccgttgccaaaccagcttttgccatactgaagatggtttccccaagttgctgagagcatgcacagttcgcctcggaatcaggagccagcaagagtatgatggtcgtgaattcgtcgagcatggcacagagaagtgtgtcgtgactgtatacattggatccagtctgcaccatgtggaatggagtgtcactgctgctgggcatagattcaaagacacctgccaagttgtcgcccgcaaggcattgagggccctgtgtcagatctatgaagaaatgattgcccgagcagaagatgcagagaagcgcaaccgtaagctccatgtggatctcaccacagctcaagctcgtgcaactgccttggaaagtcgtgaagtcattgttgttgaagccctaaagcaagccaaggatgagcatgtccagaagttgatggaggcctacttgatcacccataactaa

SEQ ID NO: 7702 - DNA, 123 bp, Zea mays
  Peptide Sequence Number=SeqID_51077
atggggtccgggcatagtacttgctctgccgaggctggttgcagaggtggtgacaaggatgatggttatgactatggtaatggtaaagaagaaggtgtcgaggcagatctccaggagttctag

SEQ ID NO: 7703 - DNA, 363 bp, Zea mays
  Peptide Sequence Number=SeqID_51078
atggctcaccggagtttctccggcccgcctgaggccacctcaccgccgctctcccctctttgcccgtggattcatggcctcttccccgccatcgagttagccgtggcgccctcttcccctttgcccaactccagcgaccccggagccaccctagcccacgcctgcctcaactacgacgaccttaccaccgcggagaggagcggcaccgcccgaagccatctattttccctcgatctgatttcccctccgtccaattcagatcgaacggcccggaccgcgggatactgcttcacgcacgcgtgcctgacacgccctgtcccgcatgtcagcgccacccgcagccgctcatccttcccggtctga

SEQ ID NO: 7704 - DNA, 840 bp, Zea mays
  Peptide Sequence Number=SeqID_51079
atggggggcacccgcgttgccttcgtcttgctgctgttggaggagcgcgacctcgcgggggttggcacccttcagccatcgctcggcttcaaagattttcatcatgcagcccggctgcattccctcaccaatgggagggggcgcaccgagttggggtctgcccccgcgtgggccgacggcccgcttcttcctccagcattcgaggggaaggatatcctccagctctgcggaggaggcatcctccagccatgcgggggaaggcgaactgctgctgcctggccagggtgcagcatttcgtcctccgtccgggcgactgtggccggttgcaccggggggtcgcacaacacgtcgtacaccgcgagggcggtactcgtgttctgggacggtcccgttctcgttctcgtggcgataacgggagtgaggacctgtcggtgcgctttggggcggctgccgctcgctggtgcggtgttggtgggcaggtggccgctgtcgttggtgctgacgtggtggttgccgctggagagggttcccaccgcagcggtggctgcttccgccggcgagaccgtcagtgccacctgcgctccgggcctccggctctttggctttgatggcttgtcctcgcccctcgagtggggacgtgggcgagggccttcttatagcagcgtttgccctgagaaccttcggccgctctgcgatgagctggagtcggaggcagcaacgttggcgtggacagaggcgaagtcgactcgaaaagaggcttcgtcggccctggagcacgtggcttccctagccgaggaggtgcagcggcggtggctagagcttggccaggtcgtccgctag

SEQ ID NO: 7705 - DNA, 1086 bp, Zea mays
  Peptide Sequence Number=SeqID_51080
atgcaggaggcgtgcaactgcaccacggttgtgcaccctttcggcttcatcgcatccgatgggctggcccctcggaagggttcgacagccaccccagagcactcgggcttcaagcccattactgatcaggggttcgaaggctggcccctcggaagggttcgacagtcgccccagagcactcgggctccgcgcccactactgatcaggggtttgaaggctggcccctcagaagggttcgacaaccgcccagagcacgcagagcgagggatgactctgggtacgtccgttacatggccgaggctcgggctacgctcccgaggtaccctaggacatttccgagaccagcaggagcgattttgcaacggaatcccaccagagagaggcatcgagccctcggaccctatcgaacgggtccgggtccggcaaatcacctgcagtcacttcaccctttcgctgaccgacctgacaggaaaacagcgtcgctcgctccgctccgactgttgtgccacccaccagggtgaggctgacaacagccaagttcagcctcaggcgcaacaggaagctccgcctcgcccgaacttaggcctcggcctcgggaggaggtctccgcctcgcccgaccccagggctcggcctcaacctcggcctcgaaaggtggtctctgcctcgcccgaccccaggactcgacctcaacctcggcctcaggaggaatcgcgtcctcgcccgaccccggcctcgccctcaggaggagtctccgcctcgcccgaccttgggctcggaccaaccgcgccacgggagatacatcattaccctacccctagctagctcaggctacgggggaacaagaccggcgtcctatctggctcaccccgggctcaagcacttctccgacggccacgttatcgcctacgcagggctcaagcacttctccgacagccacgttggcatgtacacagggccttcatgcaagagggtcgcgcgggagaacgggctaacgaacaggctcactctctctcgcgcgcgaacgcttggacccccggggtcgaaacatcgacagatactgtttaagattcttaagtctggatga

SEQ ID NO: 7706 - DNA, 855 bp, Zea mays
  Peptide Sequence Number=SeqID_51081
atgaagggggcgcactaccgcggggcggtagcacgcgccttcttcgcactcgaaggccagcacgccagatgtatgacttgtgggaccgagcccccgtgtcatgggatggataccccggtgtgcatcgggggaggcttctcgcggcgcttcgaggcgagagcaggggagtctgcctataaagaggggttcatccctcgagtagtagtcatgccttgcttctctcccactcgcggcgtcctttcgcctccgagctttctgcgcccctttgccttcaaggtctctgcttcacgttgtcgtagtttgccatggccttgtgacttcatcctgagcgcgcccaagcagagtgagtgctcgaaatggtataccgcttgcttggatggaatgcgccggcgctcggcggaaggatttgcgccgacgtcatccaccccgatgaacttgccgctagagacactcttccaccggttcttggcttcaaggatgttcatcagcctcgcggtggtggagagcgagctgagccgcggcttcgcctctcacatgggctggtggcccgcctcttcctccagcattcggaggaaaaggatgatcaccagccttgtgaaagagacgaacttcggctacgcgatctcggccagaccgcaagcaccgccttccgccgtgctcccagcttcatggcttggatggtcttgtcctcacccacaggtggtcacctccgctggtgagccgtccggagctagcttcccacgcggccccactggtgtggaggacccgccatctgacactagccatcctttgatacatgctcgggacctgcagggtctagtctgggaggccaagttgtgtatccggaccccctag

SEQ ID NO: 7707 - DNA, 423 bp, Zea mays
  Peptide Sequence Number=SeqID_51082
atgcctggtgggatattcagtcgacccaagctagaggataacgacgtgaacctcgaagacgcgagcccgaagcgcttcgcctacaaggctacaatctatgtcagaagctgcgcgtttggatgggattccagtttctgcggccagaatccgcccaagagtgtggacgcgtgcggttggcgcttagaaagaaaagatcacacgtgggcctcagagccgaacgaggccgcgcagcgggttggttccgccgcaggccttcgtctggtgccgaatggagcgaagggtgtccccgcccgttttgtctctgtcagaccagcgacctcagcgaaggcctcgagcgaagggtggcgtctttgccttcgccccaacatttgccctccgagggaccagttcgacaaagtcacctggtgccgaagacgtcgttag

SEQ ID NO: 7708 - DNA, 1416 bp, Zea mays
  Peptide Sequence Number=SeqID_51083
atgcaagtagtggagttggttccgtgcgcccgcaacaagtggggcaattggaatgaattttggttttacgttgctgaggctactgtcgaaggccatgaaggactccccgtgtctgagatgtgctctcattattactctgcgtatccgccctttgaagtggcagaggaggatgcagacgaaggggcccttcggtgcgccgccggtcagagcagtgggcgtgatttagttgaagagttcgtggcgtacggggtgtggcccctgcgcatggctgggcgttgggcgaaagttaatgaggacgtgtgcggccccgggggaaaggatgtcttcgcccgagctccgggagacttcggctcggatgctgaggtgatggacaaggatcgccaaggcgcggcgcaaaaacgccaggcgactgtcaggctgcatgaagctaggccgaagaggcagcggggggctgcgaaggctgcggcctccggcggaggcaagccgccgctgtcggcgaaggcgggcgcctctgcacctagcaaggcgccggaggcaacggcgggcgctggaggctccaagtcaacgaaggtggtgccgccggccagcggagtggcggaggcttcgaaggcggcccgagcgttgccgttgtcgggcaagcgcgttgccgacttcggcaccgatattactgtagacgactatattggtgggtcggacgagggccagcttgctatggttgcgcctggcgcggagatcgcgacggcggccatagtgccgagggcgaggggcgaggcccttggcgccggaggcgaggtgtcggccctcgcggtggtcagggacgaggcgggcgcagcgacccgccggctgaagggagtgacggaggcgctgagtcaggcgacggaggcgctgagtcaggtggctgacttcgccagccgtactgcatcgggggccctcacggcagctgtgtccgccgaagtcgagagacttcggacacaacatgctgacgctgtccgtgagaaatcggcctccgacagcaagtgccgtaagctgacggacagggtggccgccctggagaaggagaaggctgacctccggcgccaactggcggcggagaggagggaggcaaacgaggccatcgccaaagagcaggctgcgcaggcggaggccaagctggcgcgggcggagggcaatcttgccaaggagctcgccgaacatctgcaagagcggcttaccgccctggagagccgcgcgaagggggccgaggccgcgatgcgtgcggaggctgaacggacgcgcgctcagcttatggatacatatcgcgagctgggcgcgcggaccggcgacttcgaggtgccggaccgagagcccgggcttcgttatctgcaatgggtgcaggaggagctgcaggaactccccactgttgtgggggggggttga

SEQ ID NO: 7709 - DNA, 318 bp, Zea mays
  Peptide Sequence Number=SeqID_51084
atggcgaacaaggtagaagggttattaccgacaatctcggcgcgcagaggatccggcgacgacgaaggcggatccgcggcggatgacgaagtgcgacgagcaattcgacgctcccgggacgaagacgagcccaggcaaactccgcaccggcttcaaggggtcccggagatggatcccgcacaccaaatcgaggatgagtcgacggcgagcgagtcttggcgcgcggcggatttgagctctaacctggcggcggcgctctcgggttctaagggatggataggcggtcgaggtggcacggacgggttccagggacgctga

SEQ ID NO: 7710 - DNA, 204 bp, Zea mays
  Peptide Sequence Number=SeqID_51085
atggcgggtgtccgctgcgtttggggaagccggacccccatgccttctcccagcttcggatgcgccccgaccaggggaggtggggtggcacaagcccttcccggccacgggtccccggaggatgcggtggaccgagcagcgcggcgggtcgccgcggaggaaaagaagaagaagaaggacgcggaaaatgcccggttccgttga

SEQ ID NO: 7711 - DNA, 396 bp, Zea mays
  Peptide Sequence Number=SeqID_51086
atggcggccacaacgcgattgtcgacagggttctgttacgaggaggagatagagctgaccaacggggcccacaggtcagccaccaggcacgcgcgcgtgaatgagagcgcggcgccaagcacgcgaccgagaggcagaggtgtgggccagtatttgtcagcgacaaaaaggctagcgctggcaagtgctgggccgcgctggtggggtgtagattgggttgtggttatgcataaaaccggggcttgccttccaaagcagtggcaggcaggtcctctggtgcaggctctggtgttggatcttgggctacctcctgagcagctccttgctctggcacgaggacgtactctccgtcagcaaggttacagtctatcgaaatgcaatgaacatggtttctag

SEQ ID NO: 7712 - DNA, 339 bp, Zea mays
  Peptide Sequence Number=SeqID_51087
atgggccgaatcacccgtgggcctccatgctggacgaggccgcacggtgggatgacctcgtcgcaggtcttcgtccgatgtcgtatggggcaaagggtgtccctgcccgttgtcttgtctccattggaccaacgactacggcgaatgcctcgagcgaagggtggcgtcttcgccttcgccctaacagaaaacgaagaagaagtcgaagtaaccgaagagaagacaccaccaccttcggaatctcaggcaggaaattgtttctactttgatatctgcggatccgagcctgactcacctataaacgaaggcaagccccggtgcatttgccaccctccttga

SEQ ID NO: 7713 - DNA, 1998 bp, Zea mays
  Peptide Sequence Number=SeqID_51088
atgacttcgcccgagctccgggagtcttcggcgcggatgctgagggttaccgggggttggtggcctaggaatgttcctatcccccgcgcggccggcgaagacttttttacatctcgcatggttcgtgaatggaaagtgtttccttacgggcggaatattgctgttgttgtgtcggcagtgatggacaaggatcgccagggagctgcacagaagcgccaggcggtcgttaggcttcatgaagccaggccgaagaggcagcggggggctgcgaaggctgctgcccccgacggaagccagccgtcgctggaggcaaagtcgaccgtccctgcatccatcagggcgccggaggctgcggctgccgccggtggttccaagtctgggaagactgcaccggcgtccagcagggtgccggaggccgcgaaggcgggccgaggtttgctgccgccgggcaagcgcgtcgccgacttcgccaccgacattagtgtggaagactatcttgttgggtcggacgaaggccaacttgtcgttgttccgcctgccgcggcgaccatggcggctgccgtagtgccaaaggcgaagggcggtgcccttagtgctggcggcgagataccggcactcactgctgtgagggacgaggcgggtgctgtgtcccgccggttggaggagatgaaggaggcgctaagtcaagcggctgacttcgcaggccgcgcggcgtcgggggccctgacggcagttgtgtctgccgaagtcgagagacttcggacgcaacatgctgacgccgtccgggagaagtcggccgccgatagtaagtgccgcaagctggcggacaaggtggccgcgctggagggggagaagactgacctccggcaccaactggcggaggagaggaaggaggccaatgaggccctcgccaaggcgcaggctgcgcaggcggaggccaatttggcgcgggtggagggcggccatgccagggagcgcgccgagcagttggaggagcggctccacgctctgcagagccgtgtggagagggccgaggccgcgacgcgcacggaggctgagcggactcgcaaacagcttatggattcataccatgagctgggcgcgcggatcgctgagtttgaagtgccggaccgagagcccggacttcgctgcctggagtgggtacaggaggagttgcaggcgctcccccactatcgtggaggggtttatgtcttatgcttccctggtcactgcgagggggcgatgaacgcgctctctcgtgaagggtgccgacactatgaagtcttcgaccaagctgatgaggatttcgagcgtgatatctacaaggttgaggactctatagtgaaggaatccgccggagccctctacgaccggatgtggggcccccacggtcgagaggtggtcagggaacgggccgagacggcgaggggtcaggcggcgcgtggtgagagggtggatgactttggggctttgaacagcgtgctgcctgacccggagtcaaacccggcggaggccgtcctggagccgctcccggagaccgccggaggcgcccctgatgcccccgcagccgctgcggccggcggaggcccgcccccggagactgccgaaggcgttcctgatgcccccgcagccgctgcggccggcgaaggcccaccgccaactgctgcgccgagggctgaggatcctgtgacggtggcggagtcgacagcggaggctcccgcgacagctgggtcttcgcaggttcaagattttgggcctgcgcacgcaaccgccgctactaattttttggcggcttcgaccgtggatgatggtaataaatcggatgggtctgcatctaagttttctgattttggtgactctgggagctcggttgagtggactgatgagtcgtcggatgaggacttggactactttgcggccttggatgtggaagcggtggaggcttcaccgcacgctgcgaaatgcagaagatgtgcctggtctgagtactgggcgtag

SEQ ID NO: 7714 - DNA, 408 bp, Zea mays
  Peptide Sequence Number=SeqID_51089
atgaagagagctaaaatttacataactattggagttgctcttacatggccgaggctcgggctacgcccccgaggtaccctaggacatttccgagaccagcaggagcgattttgtaacggaatcccatcagagggaggcatcgagccctcgaaccctatcgaacgggtccgggtccggcaaatcacctgcagggtgaggctgacaacagctaagttcagcctcaggggcaacaggaagctccgcctcgcccgaccttgggcctcggactcaggtggaggtctccgcctcgcccgaccccagggctcggcccccgcctcggcctcggaaggtagtctccgcctcgcccgaccccagggctcgccctcaacctcggcctcggaaggtggtctccgcctcgcccgaccctag

SEQ ID NO: 7715 - DNA, 714 bp, Zea mays
  Peptide Sequence Number=SeqID_51090
atgggacaaactcggatgctgctcttccgccacggggggaaaacatcgtcgagttcgctgccgccgggcgagctgacgaccgtcgttgtcgcgctgcgggggaaggagtaccatgtcgtagctgccgtcgaggaacatgaactcgagactcccgaaacagagcagcgtctcgggctgaagaggttgctggagactacccatctggaactcaacgggaagttgttcgtcaacacgcagcaggcccctacctggcgcgccaactgtcggcgtttcgaccccgggggggttcctggaccgacgagtcgggcgaggcagagactcctcctgaggccaaggccggggtcgggcgaggacgcgattcctcccgaggtcgaggttgaggctgagccctggggtcgggcgaggcggagaccaccttccgaggccgaggttgaggctgagccctggggtcgggcgaggcggagaccaccttacgaggccgaggcgggggccgagccctggggtcgagcgaggcggagacctcctcctgaggccgaggcccaaggttgggcaaggcagagcttcctgttgcgcctgaggctgaacttagcttttgtcagcctcaccctggcgggtggcacaacagtcggagaggggcgagcggcgctgttttcctgtcaagtcggtcagtggaagggcgaagtgactgtggtcacttcgacctttgccgattga

SEQ ID NO: 7716 - DNA, 789 bp, Zea mays
  Peptide Sequence Number=SeqID_51091
atggtcctgtatgagacactccggctatacagcgcggtgccgttgatcgcgaggtgggcgacgacgggcgcggacctctgtggcgtgaaggtgcccaagggcaccctcctgctgaccccaattgcgatgctccaccgcgacgaggaggtgtggggcgcggatgccagcgcgttcaacccgtttcggttccaggacgacatgggcagggtcgtgacgcacccgaacgcgctgctgtccttctccctaggcccacggtcgtgcatcagacaggacttcgcgatgctggaggccaaggtcacacatgcgctcatcctgtggtgcttcgcgttccgggtggcgccggagtacgtgcatgcgctagccgacttcctcacgctgcagccgtcgaaagggctccccgtcgtgctcaagtttcgttatcatcatatttcgaaagggctccccactccgttgtggttcgtcggccccacgttcgccgtgcttattggtctcgtcttcaaggaagggaaagcttcttgcataagggatggtgagcacagtgcgccgtatggcatgggcacactgtttgacaacagactggacatgcgcgccgtctgcaggaagacccttgacaccgtctgccagcggagtggacatgacgcattacatgcaaagagggcacatcgtctgtcagcatggtggcaggcggcgcgtcctctccgcaataaatgcagagaccgcgaggccttagagtcctcacgtcaggccccgcccgttggcttatgtcatgggccacaagccacgcgatag

SEQ ID NO: 7717 - DNA, 2004 bp, Zea mays
  Peptide Sequence Number=SeqID_51092
atgccggacaccctctcggacgccttcgccgccgcggtgctcctctcctccaccgacaagccggacacgctgcccccggggaggctctcgccagtctccccgctcccgcactcctcctccaagcacgggcaccagcaccctcaccccaccccgagctcctcctcgggctcctctggctccgtctcccggtccctactcgcgcccgcctccagcctcgcctcgcgccggagccactccggcgagatcccgctcccctccgacgcgcccccacgcgggaccgcgcgcccgggtcaccgccgcaccggctccggccccctcatcttcacatccggcgcgtgctccagctccgccacctcgccgctcaccaacgcgctccccgcgggcaacatctgcccctccggccgcctcgccaagccgctcccctcctcctgctccgccgctactccgccacccccgccccgcgcctcccgccacgacgtgctcggctccgggaccgccaactacggccacgggagcatcgtccgctcccgcgccgccaccgacgatgacgcggtcctcaggcgcgccatgtcggccgccgaccccgaggagctcaagagggccgggaacgaccagtacagaaagggctgcttcgaggaggccctcaggctctacgaccgcgccctcgccctctgccccgacaatgccgcgtgccggggcaaccgcgccgccgctctcattggcctccaccgccttggcgaggccgtcaaggagtgcgaggaggcgctccggattgatccatcctacggccgcgcgcaccaccgcctcgcgtccctgcatataaggctaggacacattgaggatgctctgaagcacctgtcacttgcaatcccacagcctgacctcctagagttgcacaaattgcaaacagtggagaagcactttgggagatgtctggatgcgcgaaaggctggtgactggaagagtgtgctaagagaaagtgatgctgctattgcggctggggctgactcctctgctctgctcttggctgctagagcagaagcccttttccgtctcaatttacttgatgaggctgatgttgcaatctctagtgcctccaaattgaattatacatcttcatgctccccagacaccaaattttgcgggtttattgccaacgcctacctcttttatgtacatgcccaagttgacatggcattaggaaggtttgaccatgcggtgtcctccatagataaggctagaataatagatccaggaaacactgaagtgataaccatgcataacaaagtgaaatctgtggccagagcacgatctctagggaacgagctcttcaattctggaaaattttcagaagcttgcgttgcttatggtgaagggctgaaacaacaccctgtgaataaagtcctgtactgtaatagggcagcttgtaggttcaaacttgaacagtgggagaagtcaattgaggactgtaatgaagctctcaagattcaacctaattataccaaggctttgctcaggcgggcagcatcttatggcaagatggagcgatgggcagaatctgtgaaggattatgagattctcagaaaagaacttccaagtgacacggaggttgctgaggcctatttccacgcacagattgctctcaagtcatctcgtggtgaggaggtatccaacatgaagtttggaggagaggttgaagcaattattggaatggaacaattccagttggctacatctttgtcaggtgtttcggtcatccatttcatggcagcttcaaatcagcagtgctgcaagatttctccatttgttaacacgctctgtaccagatacccatccgttaacttcctcaaggtcgatgtgaacgagagccctgctgttgcacgcgccgaaaacgtgaggacagttccaacattcaaaatctacaaaaacggcattagagtcaaagagatgatctgccccagccaacagctgctggaatattcagtgaggcattacgggatttag

SEQ ID NO: 7718 - DNA, 621 bp, Zea mays
  Peptide Sequence Number=SeqID_51093
atggccgaagctctggcggcaatgacgggcggaattgagctcgccggagctaagggaaagtggctggccggtgaggggatagggagttgtagcgtcaccaaggtgccagtgttagaatgcctggtcccgaggtcaaactgcgccaaaaccgtgtcaaatgaatttggtttgagttcaaacttttccaggatgtgttcaagggaatttggcacaactttgatatttggatctcctggctttgagtttcgaaaaacagagaacgcagatgatctttgggaagagctgactgggagacgccacctagatcaagtcgaaagccttggtgctaggcggctcctcttcgaccacctgttcttctcctgtggagggtgtgagacagcaagagctctggacgggacgccaaatttcaggaaggccaggggctctggcgcaaaagatcctaagacacagacgacactccaggtggactgcgggttgaaacctaaataccatgggggttcttttgcaaaatgcgtccgcgaaggggtatggtcaaatcgtggccgcccgattagaaacgagcgcccggatttgctccaagtacttaacgaactggtacaacatcacgccctttggatctag

SEQ ID NO: 7719 - DNA, 1272 bp, Zea mays
  Peptide Sequence Number=SeqID_51094
atggagttcaccggctcattcagagaagcaaatccactagaccgcatctccaactgccagtactcgccaccgcctcggctgcctcctccaccgccactcaatcatcccccgccactgccgccgctcgagccggacgacatgaacgcttcccgcacccgcgtgcagctccaacagacccttgcgcgggcaatttttcgcgggactcgcaatttcgcgcatgcactgtcgattggggaggaggagctcattaagaagtacagaaagcagtccttcgttgttcgtcaggaaaaagaacaatgcagcaccttcggcgactcctacaccgacaccggcaacaaggtcatcctctacggcccggcggcggcggatctgtggatcaacaagccgccgttcgggatgaccttcttcggacatccggccggtcgcctctccgacggcagactggtcatagatttcatcgcccaggcactggggctacctctccttccgccctcgctggcgaaggaccagagcttcaagcaaggcgcgaacttcgccgtggctggcgccacggcgctgaagacgagcactacgaggccagcgctctacccacagctggccgtcgccggcggtgccgtgcctcctccgaacaacatctctctcgctgacgagctgggctggttcgacgccatgaaacccgcgctctgcggctcaccccaagcatgcaaggactacttcacgaaggcgctgttcgtcgtgggcgagctgggctggaacgactacggggtcatggtgaagctgatcaacgacggcgccacggcggtcgtggtgtcggggatctcgccgatgggctgcgctccggggaacctggtgctgctggcgagccaggacccggccgactacgagcccgacacggggtgcctcaagggaatgaacgagctatccagggaccacaacgcgcagctgagccaggcgctgacgacgctgggcggcaggtaccccggcgcgcgcgtcacctacgccgacctgtacggccccgtcatcgccttcgcggccgcgccgacgcgcttcggcttcgactccgcgctgagggactgctgcggcggtggcggcggcaagtacaattttaacctgagcgccgcgtgcgggatgcccggcgtggccgcctgcccgaacccgtcggcgtacgtcaactgggacggcgtccacctcaccgaggcggcgtaccaccgcgtcgccgatggctggctcaggggaccctatgccaacccgcccattctcgacacggcgtag

SEQ ID NO: 7720 - DNA, 366 bp, Zea mays
  Peptide Sequence Number=SeqID_51095
atgaacagacaccggcaatcaaggtgccattacaagcggaactccgattccacctccgcagctacgaacaaccccccacgttggagggcctgcggagcaatagaacaccgacgagactccaggtggctcaccgccgcccgctccggcagcagcgacaacgacttccgccccgggcggccaaacagcagcagcgatgacctcaagacagacactgctgcaacaaggcccttgcccgcgtccccgcccaaggggcgaggacatgcagaaggccgtagagttggaggtcagtccgcgggtggcgccggctatctcatcggcagagaaacctcttccggctgcatcggtgggaggtggcaccggaagtag

SEQ ID NO: 7721 - DNA, 951 bp, Zea mays
  Peptide Sequence Number=SeqID_51096
atgcaggcggcatgcaaccgcaccaagggggcgcaccctttcgacttcgacgcgtccagcatggaggctcaggcccacgcgtcatggatcgggaaaggggatactccgaaagggatccttctccgcgaaggaagcgggccccgagcccccctactgatcagaggttcgaaggctggcccctcggaagggttcaacagctgcctcagagcactcgggctccgcgcccactactggtcagaggctggccccgaagggttcgacagccgcctcagacgcagagcgagggatgaccctgggtacgttcgatacataaccaaggctcgggctacgctcctgaggctcgggggctgctctcgcaaacccggctccggccaaaccgttgacagcgtcaacataccagcccaagaacttgggactcgactatgcacccgggctacggccacacaaagctgcaaaggcctgatgggtgcgattaaggtcaaggctcagtccactcaaaggacacgatctcacctcgcccgagcccagcctcgagcaagggcagccgaccccagaggattcacgtctcgcccgagggccccctcaagcaacggacacaccttcggctcgcccgaggcccagtcttcgccgagaagcaaccttggccagatcgccacgccgaccgacccctcggctccggaagacgacgaactccgcctcgcccgaccccagggctcggactcagcctcggccccgaaagacgacgaactccgcctcgcccgaccccagggctcgaactcagcctcggctccggaagacgacggtctctgcctcgcccgagcccagggctcggactcagccttgacctcggaagatagactcgacctcgacctcggaggagcctccgcctcgcccgacccaggacttggaccgaccacgtcacagggggggccatcattaccctacccctag

SEQ ID NO: 7722 - DNA, 144 bp, Zea mays
  Peptide Sequence Number=SeqID_51097
atgttcggattgcagttgacaatgagactgatggttcttggttttgtctctggtaatggttgtccgcattgcaaccactgctcaggagaagatgaagccgtggaaggagacttccaggagttccaagactacgacgagttctag

SEQ ID NO: 7723 - DNA, 162 bp, Zea mays
  Peptide Sequence Number=SeqID_51098
atggctgacattccagagggagcacccgtcatgactgttttatcagtgccaaatttagtgccaaatgccagttgccctttcaccacaccgatgggggcattacaatttcaacaccaggaggcagggttgccacctatcaaatcaacagacacgtgcccataa

SEQ ID NO: 7724 - DNA, 417 bp, Zea mays
  Peptide Sequence Number=SeqID_51099
atgttgcagctactcaatgttggctggcgacggagcgaccgcatggggtgccgtggcagcagtgcgaggcaccggcacagtatgacctgtaacaaggaaatccagagagctagggagcgcactggtggggtcagcacaaaaaggaaatcacatctcgtcgaagacaacatgacgggaaatgataatccatctagtggtgaggtcaagacagcgataacccttatgggaagaggggtatccgagaaatacacaatctgtggaacgtggtgccagcttgtgtttggaggtggctgtgaggttgggatagcaaaggcaaccgaaaacacgaagaatggtgtagtcagggggctgctggtggagttgctcaaagggattctatggccaatggctgagcagggacatctgtttaggagatag

SEQ ID NO: 7725 - DNA, 465 bp, Zea mays
  Peptide Sequence Number=SeqID_51100
atgggcaagagcaagaagggtggtagttcttcgcatcactacggcgacaaacgcaagcgtgagccgactcctccctcggaggacttcggtgactcggagtactcggaggaggagttctcctccgagtccgagggttcaccggctcctgcctctcccccggcgtcgtctgatgactcagacgactcccaggggatcgtcgcagaggtatggacctacatccgggccgtcgagcgcgccgggctcgagggctcggatgagtcggagtactcctcagacgaggagaactcctcggactcgtccaaggagggcggcggcgatggtggtgacggcgacgacgacggaggcgatggtgatggtggcggaggcgacggcaagagcggtgacggtggcggcaaaggtggcagcggcaacggcggtggtggcagcaagggcagcagcaggggcagcaacaagaccagtggctag

SEQ ID NO: 7726 - DNA, 561 bp, Zea mays
  Peptide Sequence Number=SeqID_51101
atgggcggcgccgacggcctcaatgaggggggagctttttccggctgccaccacatcagcacggacggtgacgtccacctctccaccaacaaggcgcgccggcaggtccccactctcgtcctcgccgcgaaagccaggaggaggacggaatgttgcatcctagctggacagcaacagttcgccttccccggcatggctggaggacgcctcctccgcaaggctggaggatggtttccaccaccagaagctggaagaggaggtgaccagccggcccgtgcaggagattctccccccacgggcgtgggggctgggtcccacacgtcatgcaagccggtcccaggggagaagaagccaaaccgccacgcgtgcgtggtgcatgcaaccacccggcggttacaagcactcctccactttcgcccagaccagcgggtgaaagggcggacggccatgcaggcggcatgcaaccgtgccaagtgggcacgccccctcgactccaatgcgcccagcatggaggtccaggcccacgcgtcatgcaaccggcacgccggttgctacgtgtga

SEQ ID NO: 7727 - DNA, 219 bp, Zea mays
  Peptide Sequence Number=SeqID_51102
atgaagagcaccaagaaggtttggatcccgaaagggaacctcattgtaaggaaaatgaagtccccggagaaagacaacaagcttccactgcaaatctacatgaactcttacgtctcacaagtctaccacttgtcttcaaatggtccgccattggtttcaattggtaactttgagactacatttaacattatttacatgtcttctctagcatttggttag

SEQ ID NO: 7728 - DNA, 853 bp, Zea mays
  Peptide Sequence Number=SeqID_51103
atgcggtggttctaccgcaaaggctcatcgggcttctccagcgcctccacggctgaggatgtcaccgccggcgtcgacggccaaggtctggtcgccgtcatcacaggtgcgtcgagcggcatcgggctggagacggcgcgtgtcctggcgttgcgcggcgtgcacgtcgtcatggccgtccgcaacgtctccgccgggctcaaggccagggaggccatcgtggctaagatccccgtcgcacggattgacgttctggagctggacctcagctccatagcttccgtaaggagattcgcctccaattttgactctctaaacttgcctctcagcattctcattttgaacgactttgttgcttatgggcaatccaagcttgccaatattcttcattctaatgaactgtctcgaatactcaaggaggatggagtgaatatttcagccaatgcagttcatcctggtgtcatcatgactaacctttttaggaacaggactattgtctctgctttactgaactccattggaagaatcatatgtagaacagttgagcagggtgctgcaacgacatgctatgttgcaatgcatcctcaagtgagggggataagtggaaagtacttcaccaattgtgatgtagccaacccgagctcacaagcttcagatgctgagttggccaagaagctatggcaatttagcttgcaaattctcggcgcccaggccgaccaggccccgcggcggcgaggcgccaagtcgttcgtgctcccacggctgccgcggccgaagctgagcgtgaaggagcggaaggagctggcctcgtacgctcatggcctcggcaaaaagctcaagtcacaacaggtcg

SEQ ID NO: 7729 - DNA, 375 bp, Zea mays
  Peptide Sequence Number=SeqID_51104
atgccgcgaaagttcggagcacatagctggcgaaggcacgggaggagctcgtcctccactctggcaggcgggtggcctaggtggaggtgcagagctctgctcggcctcgacggcgtctcgatctgggcggccctgccttgctcggcctcgtcagaaaagggaggaggcacggtggggcccgacaaccggttgccacgaaggttgaggcggagcaacggcaaggaggactgcggcgagaagcgactgggcgacctcatcatcgtcggctatggcgtcgtcgccgtaggggggggcgaagatgtcgttggcgtccccaacttcctcccacatcgagctcatgttgtccctcagcgctatcatggatccggggaatag

SEQ ID NO: 7730 - DNA, 1038 bp, Zea mays
  Peptide Sequence Number=SeqID_51105
atggctcgcctcagccaggctcccaagttgaacgaggataccaaacatgcgaaccttgtttcaaatggtcctggtcgtgcgttgggccagacaaccaaacatatccgtagccttcgttttatttgcgacggcgtggagcatccagccaagcccgcgagccgcacgccgctcctgctcccgctcccgctccgagcgcctcaggccatgtcaggcggcgtcggcccgacggcggggggcggcatcacgctgccatccatgggcgcgcccccgccgccgctgcacccgacgcccacgtcgccgacgacgcgcccgcaccaccactactacctcttctccatcaagcagctcaacacgctgggcgcggcggccgtgcttgccttctccaccacggtcccgctctcggagatcgccttcgcggtgctcctccccccctacctcctcgtcctcgcctggctcgccttcccgcagcgcccggggaagcccaacccggccgcgcccgtcttcccgggcgtcggcgggcggctccgcctcgccttgcacaccgcggtggggttcgtcgtcggcgccgcgctcccggcgctctacatcctcgacggcctccgggccggggacacggccggcgtcgccgccgcggccccgcacgcgttcctcctctccgcgcaggtgttcaccgagggcatcgcggcggcgtggcccggcaccttctcgctccccgtcagggccgccgtgcccgtgatgtacagcgcgcgcaggatgttcgcggcgtccgagtggctgcgccaggagctgcaggagcgggacgacctcgggcgcggcccgcccgtgccgccgcggcgggtggtggccggcagggcgctcgcggcagccaacctcgccttctgggggctcaacctcttcgccttcctgctgcccttctacctgcccagggcactcaggagatactatctcggcaacgaccatgaggatgacggcggcgcacgcgcgcactcgaagcagcagcagcagcagcaacagggtgaagcgaagaaggattcgtag

SEQ ID NO: 7731 - DNA, 483 bp, Zea mays
  Peptide Sequence Number=SeqID_51106
atggcgcctcctgttgacgtggtcggtccgtgccctaggttgggcgaggtggaggctcctccgaggtcgaggtcgagtctgtcttccaaggtcgagcggagttcgtcgtcttccggtgttgagcccgagtctgagccctggggtcgggcgaagcggagttcgtcgtcttccggggccgagcccgagtccgagccctggggtcgggcggagcggagttcatcgtcttccgaggctgagcccgagtccgagccctggggtcaggcgaagcggagttcgtcgtcttccagggccgagcccgagtccgagccctggggtcgggcggagcggagttcgtcgtcttccggggctgagcccgagtccgagccttggggtcgggcgaagcggagttcgtcatcttccggggctgagcccgagtccgagccctggggtcgggcgaagcggagttcgtcgtcttctggggctgagcccgagtccgagccctag

SEQ ID NO: 7732 - DNA, 516 bp, Zea mays
  Peptide Sequence Number=SeqID_51107
atggctgaaaggtaccaacttccacgaagttgcgttcctccaacggcaaggcggaaggattgcgggcgtcccccatccgggggctcggaaggtggaaagacatggtgcataagggagcgcgaagacatggccgcctttcaaggaggtcaccctccttttaaaggcgactctccctactcgtgtccccagccgtcgcgggctgagtcttctccaacacgctccaagggaccgggaaagggggataccccgaaaaggatccttcttcgtgaaggaaacaggccccgagcctccctactgatcagaggttcaaaggctagcccctcggaggggttcaatggccgcctcagagcacttgggttctgcgcccactactggttagaggttcgatggtcggcccctcgaaagggttcaacggccgcctcatgccactcgggctccgcgcccactactgataaggggttcgtaggctggccctcgaagggttcacagtcgcctcagacacagagcgagggatga

SEQ ID NO: 7733 - DNA, 531 bp, Zea mays
  Peptide Sequence Number=SeqID_51108
atgtcatccttccaccacgtggggaaggcatcgtcgatttccccgccggcgggcgggttgtcgaccgccattgtcgctgtcgcgcggtgggggaaggagtatcatgtcgtagctgccgtcgagggacatgaactcaagactcccgaaacggagcaccgtcccgggccggagaggttgctggagactgcccatctggagcttgacgggaagctgttcgtcaacacgcagcaggcccctacctggcgcgccaactgtcggcgtttcgaaacccgggggtccctagaccgacgagtgaattgttgccgcgtgccccagcccagatgggtcggcgcgaggcagaacgcgaaggggggagaagcagccggagggagacaggcgtgggaggtggaacccgcggccttcgtgttagcctcgcgcccaggtcgggttgggcgaggtggaggctcctccgaggtcgaggtcgagtctgtcttccaaggtcgaggtcgagtccgagcccccgggtcagacaaggcggagaccgtcggctga

SEQ ID NO: 7734 - DNA, 1161 bp, Zea mays
  Peptide Sequence Number=SeqID_51109
atgacgacggcggctctcagcccccttacggaagcaagaggacgtcagcaaggacttgacagccccgacagctgtccttccgccagactccagcactcctccgacggccacgacaccacacgaactgggtgccaaaacctctccggctgccacgatggcatggccctcttacagagggttggccgcgcggggaaggacgggacggtgctcgcgcaaggccgctcgctccctcccgcgtggacgcttgtaaccccctactgcaagcgcacccaacctgggcgcggggctaacacgaaggccgcgggttccacctcccacgcctatctccctccggctgcttctccccccttcgcgttccgcctcacgccgacccatctgggctggggcacgcggcaacaattcactcgtcggtccagggaccccccggggaccgggaaaggggatactccgaaagggatccttctccacgaaggaaacgggcctcgagcccccctactgattagaggttcgaaggctggcccctcggaagggttcgacagccgcctcagagcactcgggctctgcgcccattactggtcagaggttcgaaggctggcccctcagaagggttcaacggccgcctcaggccactcgggctccgcgcccactactgatcaggggtttgtaggctggcccccgaagggttcgacagccgcctcagagcacgcaaagcgagggatgaccctgggctcaagggctactctcgtgaacccggctctggccaaaccgttgacagcgtcaacataccagcccgagaacttgggactcgactatgcacccgggctacggccagggctactgtcggggaccataatcaggggtacccccaagactcctaatctcagctgcgccgcctgccctgctccgactgccgtgccactcgccagagtgaggtcgacagcggctaagtccagcctcgggcgacataggaagctccgcctcgcccgaccccagggctcggcccccgtctcggcctcggaagatggactccgcctcacccgaccccagggctcggacttgacctcggctccggaagacgacgaactctgcctcgcccgaccccagggctcggactcgacctcggctccggaagacgacgaactccgcctcgcccgaccctag

SEQ ID NO: 7735 - DNA, 1332 bp, Zea mays
  Peptide Sequence Number=SeqID_51110
atgcccgaggggttcggtcccgagacctccaggtgggcgacttggtgcttcgactacgacaagatgcccgagggcggcacaagctcacgcctccctgagaagggccattcatcatcgccaaggctcagacgtcgatggagggggagcagcagcaccctcggcgtcaactccaccatcggcgaagtccgaccgagcctcggacggcaacacggtcggaggatctccactccgaaggacgacgtcagcaccacgcccgggccatcgccgctagggtctcctctgggaacccggtccgagcagacggctcggccggccgccccgaagcctcagccagccgtcccccgaggacaccagcctggctcgtgggctcggcaactcgactccggcgttggtcctggccaagccccggccgacgaagctccctttttcgagccaactctgcctctgtctgcgatggcaccgctgcctccggctccggctcatcgaagagcggccgagggcctcgacagccacaatgaacaaacactggcactcaaggtgtcattacaaacggaactccggttccacccccgcatgtacgaacaacgccccacgttggagggcctgcggggcgacaaaacccctggtggcttgccgatgcccgctccggcagcagcgacaacgacccccgctccgaagtggccaaacagcagcagcgatgacctcagggcggacgctgctgcgacgagctcctcgcccacgtccccactcaaggggcgaggacaagctatcaaagccaaagagccggaggcccagagcgcggatggtggcggcgatctcgtcggcaacgaggacatcttcagccgccaccacctcaacgtcgacgatggcagccatctgcccacctgcggatccccactcggatcctcccagacagatgaagcaccaacctccgtgcaagaggcgttcgagcccaacgcgctgaagctgacgacgctcgtggccagccccgcgttgtcggagtccgccccttccgctaggccaccgggctgcctgatgaaaatccttgaagcagagcgatggctgaaaggtaccaacttccgcaaagttgcgttcctccaacaacagcaagacgaaagcgacgcaagcgctccccatccgggggctcagaagccgtcgcggactgagtcttctccaacacgctccaaggtcctccccctacgacacgggggatgggtcccacgcgtcatgcaagctgccccaggacagaaggagccaaaccgccgcgcgcggagcgcacaacagcccagcggttacaagcatttctccactatcgcccggaccagcgggtga

SEQ ID NO: 7736 - DNA, 426 bp, Zea mays
  Peptide Sequence Number=SeqID_51111
atgacgactcaaggaggtttgcagccgacaagcaatgaagctaatatgtgcaccaacgacaatggtagccaacttggtacacggattgtggacgagattatggccgggaagaacgtcttctttgatcttcctcacaagttgactggtgagatatggaccttgaaattccattgcattggagcacaacctggaaaagaaattgtcacagtaaatattgataaagcttatgttgccttttacaacgtggtgtacataaaatcgaaacttggatattctgggagggacttcttgttttacaagaaacgatgtggcattgatcgatccaggctattggcacttgattacatccaccaagaagaggccatgctccatgcccagcaggagacctcccccgattcctggtggatgccaaataggggattttga

SEQ ID NO: 7737 - DNA, 696 bp, Zea mays
  Peptide Sequence Number=SeqID_51112
atgaaaaacaagcctgaagatgtagacatcgtcgagtggcattacatgatgttgtattttggatctgagaaattccagagagatccagaaactggtatagaaccaaccgatctatccctttggatgattactcattgtaaaaatgatgaatggtcggaagaggcttcacgtggcatttatgagaaggcagcagagaaaattgttgagaaaatatatcaaacagaaagatttaagctaacaagagaagaggaaaatgctattttccaaacaacattcaaggaaacaacaggatgtaaggcaaacagacttcatggtcatgggtacctatcaagatatccaacaagaagtcaagtgatggaatcaaagttcctcgaacaagctcgtgccacggttgcaaccaaccaaaagaacattgaactcgaaagtcaggtccagttgttaaatgaaaaacttgcgtgtgaggttgcagaacgagaaagaatactacaggaaaaaatgcaagcactgcaagaagaagaagaaagaaaaagacaagtgcttagagaagaaatgaggcaagaaatggttgctgcccttgctgctgtagcacaacagagcaactgtgaaagcaccactccaatcgatccttcttccgttgtccctactaaacttctggaactcatcccagctgatctctcttgcacttgcaccaagtag

SEQ ID NO: 7738 - DNA, 240 bp, Zea mays
  Peptide Sequence Number=SeqID_51113
atggttaaaaattttggcagcaaaacagtgcaaatagcaatgaatgctgtggtaacttcacacctactcgtctgtttatatagtactgcagcatttgagaacaagtccccaacaagcgccgcactcactgcagagtgcgaagctgccacatacaatagcaatggagcccctagcatgggtggagttaatgttgttaaatcaatcaggtattgcttcagctcttcgaaagctttctattga

SEQ ID NO: 7739 - DNA, 72 bp, Zea mays
  Peptide Sequence Number=SeqID_51114
atggggaagcctgtcccatcactcctcatgctcctcctcagccgagcagcatggatcgagcagtctcattag

SEQ ID NO: 7740 - DNA, 210 bp, Zea mays
  Peptide Sequence Number=SeqID_51115
atgggggggggggtggggttgggcgccaggggcgcgcagggccgggccgggttgggctgggctgggctgggccacttcgcggatcgaagacccacgacgtgcgcggaccacaaaacggaattaaatcgcgaatcgaaatccggaacggaacgagacgaacactcaacatcagacaaagaaatgtgcttcggcatgatgcaacacccatga

SEQ ID NO: 7741 - DNA, 867 bp, Zea mays
  Peptide Sequence Number=SeqID_51116
atgacatctcacggatcctcagacgaagggaatgcacagtcccacacggacgagcttgcacgagagggtttcccccatatcttgtgggaggtacttcagggagctggttacacgacgcctccccagtacgcggtgcagctgtttgagaagcaccgagtgccccgctgtagggtgagaatggccctagagcctcatcccctgcagccaggatggcgtttgttggattcagagtcttttggatacagggctaaggatactatggaggcatttgctcttcacggactgaccaccttctgcggattccaccccttggagctgtccactcaccccatttgtttgttccccacggagaaggaggacgacccaatgtggaaggaccgagtggagcatgccaaggatatctgggctatctacccaggtcaaactgctcacttgacggtgcggtgcatgaatgccctgtatcgtctacaagtgatgcatggagaggcaatgtcccatctgatggcattgttggaggtgaccaagatcactttggataacagagaggaacttgtggttgacttgtccactgagatggtggaaaaagacttacaggtggaacaattgtcaactgagatccaagagcttgaggagctagtgggaaccagggagaacatcgaggttctcgaggatcagctaatcaacactcagcagcagcttgcggaggctaaccagcacctggatatgcaccaccaggagatccaggacatggaggccaacgaggatgtcgacatcgagggaggagaggagcctgcctccagcttggacactgctggctcagggagaccaccctcccccgagtcgagcgttgcctcgtttgctcactag

SEQ ID NO: 7742 - DNA, 366 bp, Zea mays
  Peptide Sequence Number=SeqID_51117
atggagagtcatgatcttcaggcagaaagggaaatcacggcttgtggcaatgagaatgatggttttggtattgtctctggtaatgctagtccactacagccaaacaggatacttgatgagtatgttgatgtgtactcacccttgctctacacaccaaaccccccccaggttgtcagcattgcaaccactgctcaggagaagatgaagctgtggaaggagaccaccaggagttccaagattacgatgagttctaggcgtgggttagcggcaacccccagtcggatgcctgtgaaggccgcgtgtatccacgtttcttttccgcactttgataattgtaaagactatgtggatgtctcagacatatga

SEQ ID NO: 7743 - DNA, 510 bp, Zea mays
  Peptide Sequence Number=SeqID_51118
atggtagttattggaagattatgttcttctacccatgatgcagtaatgaatgaatgtgttgctccagtatcaaataaaacacttctgcaatatgggagtcgactagaaacatacctactatcatgtccggggtctcctgaactgcttcagcctccaagtggttcagtctcccatgattatagcgtggctgagagcgtttgcccggtccaggctgagacacattctgctttgctggggcattggggcctgaatgctactgggctgccttcttcggacattgcatcacccaatggcctcgctctccacattgaaaacatgctcttcttccgccttgaactggtgctgcttgactgttctgctggtttactggggcagggagacgaggtgcctgctgattctgcctctggaactgacctcctcctgactgattgttctggcgattctgatgctggtgttgaggatactgcctttggaacagctactgctgaggtggacgctggttctgcctaa

SEQ ID NO: 7744 - DNA, 354 bp, Zea mays
  Peptide Sequence Number=SeqID_51119
atggcctcagctaatgttggagcctcgctgtcaggggtaggagaccattcgtcgaccaaattcatggaaggaggaggcctaaaaaggtctagttcccctccaagggcttcacccactgctccagaaggtccggcttccatcccgacaggatccacaggtggtggatgtcagttcttaattcgtttattcgctcaccatcctcgacccatatatcgttcctatgacggagctctgttcgaagctattctacttgaccttccagatccccgattggatcattgctaccactactactgtcctcatgtcttggagctagttgatggcgagatttgcctattcaccctccccctctag

SEQ ID NO: 7745 - DNA, 348 bp, Zea mays
  Peptide Sequence Number=SeqID_51120
atgggctccgcctcgcccgaccccagggctcggactcagcctcgacctcggacgacggtctccgcctcgcccgacccccgggcccggactcagcctcgcccccggaggagtcactgcctcgcccgaccccgggctcggaccgaccacgtcacaggaggggccatcattaccctactcctagctagctcaggctacggggaacaagaccggtgtcccatctggttcgccccggtaaacaactctcagccccttacggaagcaaggatacgtcagcaaggatccgacagctccgacagttgtacttccacagggctcaagcgctcctccgacggccacgacatcacatga

SEQ ID NO: 7746 - DNA, 423 bp, Zea mays
  Peptide Sequence Number=SeqID_51121
atggtgaccactagttcgatggtggggagaagcaagccaggctgcggcctctgccccgccctcagcttcaaggatcttcatcatccttgctggggaggggggcgagctgagcccgagctctacctcccgtatgggccggcgggccacctcttccttcagcactcaggggagagggcgctcaccggcttagcggagggggcagacttcgacaacgcggggccggtcggccacaggcgtcgtcagctccaccatgcatggctcgctggctcagctagctctggcgctgcttccggtgccacctcccaccgttggggcggtgcgtggctatccatccgccatacgggcggctgttgcgccgtgcgcaccgggggaccgcccaagacgtcgcatgccgctagggcggcgttcgtgttcttgggttga

SEQ ID NO: 7747 - DNA, 799 bp, Zea mays
  Peptide Sequence Number=SeqID_51122
atggcgcctcctgttgacgtggtcggtccgtcccctgggttgggcgatgtggaggctcctccgaggtcgaggtcgagtctgtcttccgaggccgaggtcaagttcgagcccccggcccgagtccgagccctggggtcgggcggagcggagttcgccgtcttccgggtcttagcccgagtccgagccctggggtcgggcggagcggagttcgccgtcttccgggtcttagcccgagtccgagccctggggtcgggcggagcggagttcgccgtcttccgggtcttagcccgagtccgagccctggggtcgggcggagcggagttcaccgtcttccgggtcttagcccgagtccgagccctggggtcgggcggagcggagttcgccgtcttttgggtcttagcccgagtccgagccctggggtcgggcggagcggagttcgccgtcttccgggtcttagcccgtgtccgagccctggggtcgggcggagcggagttcgccgtcttccgggcggcgctgtccttctgtcagactggccagtggagcggtggagtgacggcggtcacctcggctctgccgggggcatgtgtcaggatagagctttatgctgatgggggttaccagctgagaattaggcgccttgaggcccccgagcctctgcacagggcgagaggacgatcagggacagactcggctttttacatacgcccctacgtcgcctttccgcaaggaggagggggggagtgcgccatgttaccctcgatgggcaccgaacatggtgtctccggtgagctgcaagcgg

SEQ ID NO: 7748 - DNA, 546 bp, Zea mays
  Peptide Sequence Number=SeqID_51123
atggctggaggacgcctcctccacagagctgggggatggtttccaccaccagaagctggaagaggaggtggccagccgacccgtgcgggaggtagagccctggctcgcctcgctctccgccccagcaaggatggtcctccccctacggcgcgggggctgggtcccacgcgtcatgcaaactggcccagggcggaagaagccaaaccgccgcgcgcggtgcatgcaaccgcccagcggttacaagcattcctccactttcgcccagaccagcgggtgaaagggcagacagccgtgcaggcggcatgcaaccgcgccaagtgggcgcgcccctccgacttccaacgcacccagcatggaagcccaggcccacgcgtcatgcaaccggcgcgccggttgctacgtgcgagcaactgcaccgccactcgcgccactaccatgcctcctcgactgcggaaccagtaccgcgactcgaggcaaccctgcgtacgacccagcagtgccagccaggcgcgacggtcaatgcggccaaaaatgggccggcagtaa

SEQ ID NO: 7749 - DNA, 402 bp, Zea mays
  Peptide Sequence Number=SeqID_51124
atgggaaagaacaacaaacgcaagcgcgagccgactcctccatcagaggactttggcgactcgaaatactcagaggaggagttctcctctgagtccgaggggtctctagctcccgtctctcccccagcgtcgtccgatgacttggacgactctcaggggattgccgcggaggtctggacttacatccgggccatcgagcgctctgggctcgagggctcgaatgagttggagtactcctcggacgaggaggactcgcccgaggaggacggcgaaggtgacgacgacgacgacgacgatggaggcgacggcagcgacgacggtgacggcggcggcaggggcggcagcagcaggagcagcggcggcgacggcagcagcaagggcaacaacaaggccagtggctaa

SEQ ID NO: 7750 - DNA, 165 bp, Zea mays
  Peptide Sequence Number=SeqID_51125
atgacacaaagggagcattccccagactttgaccatagaccagggggcttcttttatgtcaaaagagtgaccgacaagagagtgacaactttaggagaaatagaaaaggacaagatcatggtcgccaaagcttacaacaagaaggtcaaggctaaatcattctag

SEQ ID NO: 7751 - DNA, 525 bp, Zea mays
  Peptide Sequence Number=SeqID_51126
atgtggcagccggagagatctgggcaccctgctgggcgtgatgtcgtggctgtcggaggagcggtggagcctgatggagggacagctgttggagcggtcgagtccctgctgacgttgtcctgcttcctcggagcggcgcaggcggcgctgtccttctgtcagactggccagtggagcggtggagtgacggcggtcacctcggctctgccgggggcgcgtgtcaggatagaggtgtcaggccacctttgcgttaaatgcccctgcaatttggtcagtcggtgtggtgatttagtcaaggttgcttctgagcgaagccaaggccttgggcgagccggtgatgtgtccgccataaaaagggggcctcgggcgagacggaagtctctcgagctttatgctgatgggggttaccagctgagaattaggcgccttgagggtacccctaattatggtccccgacaatatccttggagtagttatgtttttgagattgcttgtgttgaatatctttcaattaatgatccatga

SEQ ID NO: 7752 - DNA, 243 bp, Zea mays
  Peptide Sequence Number=SeqID_51127
ccaagagggaaaagtgaggcggccaagaaaggggagggggtggcggccaagaaggggaagggggtggccaccaaggagacaaccgatcaagccaaggatggaggcaagaagcgcttcgaggtaccgagtgcacgggagaaggtcaaggagactaggaacccaaagccccggggtgaagaagaagacttgcaaagtcaggttgatcgagttaagagttatggtgcatcaaggatcactacataa

SEQ ID NO: 7753 - DNA, 60 bp, Zea mays
  Peptide Sequence Number=SeqID_51128
atggttgtaaataagaaggaaagaataaggcttcacaaaaggtttgaagaactattttag

SEQ ID NO: 7754 - DNA, 558 bp, Zea mays
  Peptide Sequence Number=SeqID_51129
atgacggcgaccacctctgcactagcagcgacaacgacctctgctccgagcggctcgccagcagcagcgatcacctcagggggagcgctactgcggataggtcctcgcccccgtcctcctacggggggtgacagcgaggccattaaagccaaagggccagaggtccggcggctggtggcactaacgttctcaccagcggaggcaaccacctctgcagtgggcagcctcaccagcggaggcgatcatatcaaccccaccagtggcagctatcacctctgcaccgatgggcagcggatgcaccagcgtgcacgaaaaggtttttgctcccgtcctcactacggaagcgaggacaataccatccaagaacgccgcccccatggtgtacgacgccttgtacgacctcccggtgcgaccggtggcgcgggagaagtagtggatgtggccaatccgcgcatggcgcgaccgtcgcccgtgcggtggacgggcagccacgctccgccccagcggcaggaggcagcgccgaaggcggctgagagcacctacagggggggtgagtga

SEQ ID NO: 7755 - DNA, 249 bp, Zea mays
  Peptide Sequence Number=SeqID_51130
atgggcgcgattaaggtcaaggctcagtccactcaagggacacgatctcgcctcgcccgagcccagcctcgggcaaaggcagccgaccccggaggattcacgtctcgctcgagggtcccctcaagcaacggacgcaccttcgactcgcccgaggcccagctcgggcaggcttcgcggagaagcaaccttggccagatcgccacgccgaccgaccgtatcgcgagagcatttaatgcaagggtcgactga

SEQ ID NO: 7756 - DNA, 894 bp, Zea mays
  Peptide Sequence Number=SeqID_51131
atgtcgcgtcttctcgactgcgggaccagtgccgtgactcgaggcagccctacgcatgacccaatagtgccaattgagtgcaacgatcacggggaccgggaaaggggatattttgaaaaagaaccttctcagcgaaggaaacgagccccgagccctcctactgatcaggggggttcgaaggctggcccctcggaagggttcgacaaccgccccagatcacgcagagtgagggatgactctgagtacatccgttacatggccgaggctcgggctacgctcccgagtcacttcgccctttcactgaccgatctgacaggaaaacaacgtcgctcaccccgctccgactgctgtgccaaccacacggcctctggaggaggtctccgcctcgcccgaccccaggactcggcctcagcctcggcctcaggaggaatcgcgtcctcgcccgaccccggcctcggcctcaggagaaggctcaggcacttctccgacgtccacgttatcgcgtacacagggctcaagcacttctccgacagtcacgttggcatgcgggcatgggcgcgggcgcgtcgggcctggcgggcgcggagcccggcggccaaggtggcgcgcggcgccgggctgggcgacctcccggagctgtgcaccgcggaggtgctgctccgcctcggcgcgccggacatatgccggctcgcgcggctcaacctagcgttccgcggcgccgcgggcgcggacttcgtgtgggaggccaagctgccggggaactacgcccggctcctgcgcttcgtggacgaggccgaggaggagggagggagtgggcgggattggagcgcggtggggaggaaggacgtctttgcgaggctcgccagacctgtgccgttcgacggtggcaaaagg

SEQ ID NO: 7757 - DNA, 1991 bp, Zea mays
  Peptide Sequence Number=SeqID_51132
atggacgtcgagggcgaggtccccgccgccgccgcggcggcggtggcgaacggcctgggcggcgcgggcgcggaggaggcctctccggcgccggtctcggctgagcagctcgacgtggaggcgtacgcggcgcagtactcggggcggacccgcctcgtgcgcctcctctttgtcgccgaccggtgcggggtggaggcgatgcagctcgaggcgctgcggatggcttacgacgagatcaagcgcggggaggacgtgcagctccaccgcgacgtcgtcaccaagatcggcggccgcctcggtccgcgctacggcctcgaccaggcgtgggtcttcagcgtctcccgccgcgccgaccagcgcaaggagaagctcgagagcgagctcaatggatacaggatgtgcatgaatgtgattctggttagcattgagctggggcaatatgcacatgtttcaaactatgtcagcaaagcagagcaaacccccgactctctggatcctaccattgttgcaaagctgaaggcagctgcaggattagccaacttggaaacaaagaaatacaaatttgctgctcgtaagccagtggcagagcttggacctgtatcaagcagaggccaaccattaaggaacaaggctaatcttaatttttcttttgtcaagccaaatggaattgaactaggaaacaacttctctgaagtcatagctcctcaagacgtggcagtctatggtgccctttgtgcacttgcttcttttgaccgttcagacctgaagagcaaagtcattgacaatatcaacttccgtaactttctggagctggtgcctgaagtaagggagctggttaatgatttttatgcaagccgccgccaccttcctctactccctcccctctcagtcgccgctgccggccaccatctgactgcaccggccgcgcccctgcgccgccggccgcctccaccgcacccctgctctgccggagtgcccccccgtccctctgcgcccgcgccgtcggaccacaccggagccgcgcgaccctgctccgccagaaccgcgtgcccccctccaccgcgcgtgaccctgctccttccggtctcgtctgcttcaagcgtcgccggcctcatctgcttccagcgtcgccgaccagatccacccgcacgcagccgcctgcgcctcggccatcgcagcgggcgctcgtcccggccgccgtcgcggccttcctcccgaccgtcgtcccggccctacctagtcgctgtcgcggcttcgtctgcttcaagcgtcgccaacctcgccgtcgaccttctccacccggccatggaccaccaccacgtcgctgccctgcagcacgctggcgccgtcgcgaccgacgcagccgcccacatcaacgctgccgcatgtacggcccctgctggtgctgcagcgggtttcgcccctgctggcactaccgcaggctcgacccttgctggcacggccaccctcggcgcggacacgcgcctgggccgcgcccctggctgccagcctatcctcgcctgttgcggtcagcgcacgcgccgccggcctcatcccctccgggcttggcctaccgggctacccggcgactataggcgccctgaccggtcttctatcgccgacccaccttcccaggcagctccctgggttctccaccactcgtccgctcgctgccgacgcgacctggacttctacgacaccttctaccgactccgcgctggcgtctaccattgccgccatccaggctgccctggaggccttgaaggagcgcgaacgcgcaacgacccgcgctctggagcaggagcgcacattgggagccactctggctgcccagatggctattgcctagcgtctcatcatcggcgccccctccggtcgttcatgagacatcaccgcccttcccagagactccccactcctctggactcgacgccgaccacatcgccgccctccacgcgcaggccgttggagttcacaacatttggggcctc

SEQ ID NO: 7758 - DNA, 750 bp, Zea mays
  Peptide Sequence Number=SeqID_51133
atgtcttcttcctcccttatgcgtcgcgtctttccaccttccaagcccccgaacggggggtacccgccgtctttccgcctcatcgttggaggaacgcaactccgtgggagttggtacctttcagccatcgttcggcttcaaggattttcatcatgcagcccggctgcacccctccaccggcggtcacccaagatggtgacctccggcttgatggtgggggaaagcgagccgggctgcgatcttggtcccaccctcagcttcaaggatgttcatcatcctcgctggggtgggggccgggctgagccggcgctctacctcccgcgcgggttcgcgggccaccctctcccgcggcgctcgggggagagggcgctcactggccctgcgggcggcccggacttcgacaacgcggggctggccgacggcgggcgtcgtcacctccagcgtgtcggagtcgtcggcttggctcccggcggcccctcctgccggagggcggctgccgcgccgtgtgcacgggaggaccacccaggatgtcgcacgctgctagggcggcgttcgtgttctggggtggtcctgcctttgcaccgggatggcgccctcacgcggaggccggcggaggcggctcgagaagtccccgtcaccgacgggatcaccgccaccatccgcgccccgggcctccggttcttcgtacttgtcctcgcccctcgagcgtcggcgtgggcgagggcaagattgcagcagcgcccaccctga

SEQ ID NO: 7759 - DNA, 1071 bp, Zea mays
  Peptide Sequence Number=SeqID_51134
atggtcgccttccaagggggtcaccctccttttaaaggcgactatccctacttgcgtccccagccgtcacggactgagtcttctccaacacgctccaaggtcctcccctgcggcgcgggggctgggtcccacacgtcatgcaagccggctcagagcagaagaagccaaaccgccgtgcgcggtgcgcgcaaccgcccagcggttacaagtgaccctccactttggcccagaccaacgggcgaaaggggcgggcagccatgcacgcggcatgcaaccgcgccaagtgggcgcgcttctccgactcccaacacgcccaacatggaggcccaggcccacgcgtcatgcaaccggcgcgccgaatgcttcgtgcatgcaactgcaccgccacttgtgccaccaccgcgcctcctcgactgcggaaccaataccgcgactcgaggcgacccagcgcacgacccagcagcgccagcctggcgcggcggcggcgcctctgggaggagaagcaagcgacgcttcgccttcgccataatgaccacgccaaaaaagggactgggaaagggggataccccgaaaaggatccttccccgtgaaggaaccaggctccgagcctccctactgatcagaggttcgaaggctggccccccggaagggttcgacagccgcctcagatcgcgtgggccctacacccactactgctgcaaaggcctgatgggtgcgattaagtcagggatcagtccattcgagcgactcgatcacgcctcgcccgagcctaacctcggacaagggcaaccgaccccggaggatttccgtctcgcccgaggcccccctccaacggcgaacatatttccggctcgcccgaggccctgccttcgccaagaagcaacactgactaaatcgccgcaccgaccgaccaaatcgcaggagcatttaatgcaaaggtggcctgacacctttatcctggcgcgcgccccccggcagagccgaagtgaccgccgtcacttcgccgctccactgaccggcctgacagaagggcagcgccgcctgcgccactccgactgcggtgccacttga

SEQ ID NO: 7760 - DNA, 399 bp, Zea mays
  Peptide Sequence Number=SeqID_51135
atggagctgcgcgcggtccctgacgaggcagaggacccctggcgacgactctggggagccaaaagacgacgcagcggatgcgcagacagctgcgcgcagacagccgcgacaccggcggcgtccctggcgaggcagaggatcctccctggcgagtctgacgcgcagacggcggcgaacgctgacggcgaggtggacgcggcggacggcggcgcgcagatccggcggacgaccgcggacggcgcgcagatccaacggatggccgcggacggcgcgcaggatgacgcgcagacggcggcggacgaggcggacggcggcgcgcagatccggcggacgacccagcggatggccgaggacggcgcgcaggacggcgcgcaaacggcggcggacgaggcggactga

SEQ ID NO: 7761 - DNA, 129 bp, Zea mays
  Peptide Sequence Number=SeqID_51136
atggcagtcggggttagtgaggcattatacgccaaggcggtttaccttgcaaggtttaaaaactcgatacgaatcgtctgcttctcgcagctaatgagactgcttgatccattgtactgcattgagtaa

SEQ ID NO: 7762 - DNA, 165 bp, Zea mays
  Peptide Sequence Number=SeqID_51137
atggccatgatgggttcaacatcagaaaagatgtacctctaccagaataagataacacgcaatgggagtggagagatggcgagagtagcgtgtaccctccatggcaagaggctggacggtggtgtatctgtgctctcggttggcgtgaacctgatctggtcttaa

SEQ ID NO: 7763 - DNA, 159 bp, Zea mays
  Peptide Sequence Number=SeqID_51138
atggcgagagtagcgtgtaccctccgtggcaagaggctggacggtggtgtatctatgctctcggtgaggaagcagcaaatttttgttgcttttgttccaaggtggtgcccaaagaagaaagccaagactgaagcctcgggaggaagtgtcctcctttaa

SEQ ID NO: 7764 - DNA, 489 bp, Zea mays
  Peptide Sequence Number=SeqID_51139
atgtcttcttcctcccttaagcgtcgtgtcttcccatcttccaagcccccggatggggggtatccgccgcctttccgcctcctcgttggaggaacgcaactccatgggagttgctgcagcgtgcccggccttcagccgcgagtggcttcggggccgctcgcggtgccggcgtccgccacggcagctggaagaggttcttccgccggcgcggcggccgggaccggccacgggctgacctccaacttctcggccttctgcccgtccttgcctcacaagttttggcatgggcgggggcctcctggcagcggcatcgaccctgaggtcagtgctgccgctgtccggccccccggagctgaagtcgtcgttgtcgccgctgccggagcaggtgacggcgcgccgttcgtcggccttccattgctccgcaggccttccccctcggagtggggtcgttcgtacctgcggaggggggaaccggagttccgttcgtaa

SEQ ID NO: 7765 - DNA, 273 bp, Zea mays
  Peptide Sequence Number=SeqID_51140
atggctcaccggatagctcggcctacacgcggtggcgggcggccgaagtccggcgacggtgatcttgttgttccggtgaggaagggcttcgatccttgcttggagaaacttcgcggctcctcagggaagctgtccaagggctcggttgaggctgagggtctctggaaatggctggccacggtggcctgcgctcgggtggctcgggcgggtggcgcagagctcgccggagctaaggacggtgtctggtcagcgaaggcttatgggttttgctga

SEQ ID NO: 7766 - DNA, 156 bp, Zea mays
  Peptide Sequence Number=SeqID_51141
atggggaagcctatcccatcactcctcatgctcctcctcagccgagtgatcgcacttgtacccaccataaccgaaatgggagaccacgtctcaggtcgcatgaggggtaaagtctgcgggaaggttcactcagcttttggccagaacactatttaa

SEQ ID NO: 7767 - DNA, 444 bp, Zea mays
  Peptide Sequence Number=SeqID_51142
atgggcaagaacaacaagcgcaagcgtgagccaactcctccatcggaggattttggtgactcggagtactcagaggaggagttctcctctgagtctgaggggtctccggctcccatccccctgcgtgagtcgtctgacgactcagacgactcccaggggctcgcggcggaggtcgggacgtacatccgggccgtcgagcgttccgggctcgagggctcggatgagtcggagtactcctcggatgaggaggactcggacgatggcggcgaggacgaggacggcgacgacgacgacgacgaaggcggtggcgacggtgacggtgacagcagcggcaggggcggcagcagcggcagcaaggacggtgacggcggcggcagcaggggcggcagcaggggcagcaacaggggcggcagcggcggcggcagcaacagggccagtggctag

SEQ ID NO: 7768 - DNA, 453 bp, Zea mays
  Peptide Sequence Number=SeqID_51143
atgaacaagacaccggcactcaaggtgccattacaaatggaactccggttccgtccccacgggtatgaacaacctccacaccagggagcctgcggggcgacaagctccgggcgactcgccagcgacctctgcagcagcggctatggtcccaggacggacgcggccaccggaaggctctcattcgcgtccccgctcaagggacgtgaaccagacattaaagccaaagagccggaggccgaggatgcctcctccgcagagctggaggatggtttccaccaccagaagctggaagaggaggtggccagccgacccatgcgggaggtagagccccggctcacctcggcctccgccacagcaaggatgatgaacatccttgaagctgagggaagggcggaggccgcagcccggcttgcttctccccatccaggggctggtggtcaccgtcttgggtga

SEQ ID NO: 7769 - DNA, 666 bp, Zea mays
  Peptide Sequence Number=SeqID_51144
atgcaggcggcatgcaaccgcgccaagtgggcgcacccctccgactccaacgcgccagcctggaggcccaggcccacacgtcatgcgaccggcgcgccagttgctacgtgcgagcaactgcaccgcccctcacaccactaccgcgcctcctcgactgcggaaccagcgagccgaagcagcggtcacgtcgccagccaagctcatgtcccctcatgggacagcgggagaaccctctcccacggcatgaagacggacaggcggcacctttggcaggagaagcgggcgacgcttcgccttcgccataatgaccgcatcaaaaaagccaagtccggcctcaggcgccataagaaactcctctccgcccgaccccagggctcggactcgggctcagccccggaagatgacgaactccgcttcgcccgaccccagggctcggactcgggctcagccccggaagacgacaaactccgcttcgcccgacccaggggctcggactcgacctcggccttggaagatagactcgacctcgacctcggaggagcctccacctcgcctaacccagggctcggaccgaccacgtcacaggaggcgccatcattaccctaccccaagctgactcaggctacgggggacaagaccgtcgtcccatctggctcgctccgctaa

SEQ ID NO: 7770 - DNA, 450 bp, Zea mays
  Peptide Sequence Number=SeqID_51145
atgggcaagagtaacaaaagcaagcgtgagccgactcctccgtcggaggacttcggcgactcggaatactcggaggaggagttctcctccgagtccgaggggtctccggctcccgtctctcccccggcgtcgtctgatgattcagacgactcccaggggattgccgcggaagtctggacgtacatccgggccgtcgagcgctccgggctcgagggctcagatgggtcggagttctcctcggacgaggaggactcggacggcggcgaggacgaggatgacgacgacgacggcgacgacgatgacggtggcgacggcgacggtgacggcagcggcagcggcggcggcggcgacgggagcaagggcagcaccagaggcggcagcagcacgggcagcagcaagggcagcaccaggggcggcggcggtggcagcagcagcaaggccagtggctaa

SEQ ID NO: 7771 - DNA, 81 bp, Zea mays
  Peptide Sequence Number=SeqID_51146
atgcggcttcatacccttagagatgatgttgttttatactctcagaggtgcttgttgctcatcaagggaagtgggaagtag

SEQ ID NO: 7772 - DNA, 498 bp, Zea mays
  Peptide Sequence Number=SeqID_51147
atgcacccactgggactcttccccgccgagaagagggatgagcccatgtggtgcaacagagtgagccacgtgaaggacgtgtgggctatgcatctcgaccaagttggaagaatcactgttcagtgtatgagcgcactgtatcgcctacaggccctgcagagcgatgctatagcacatctcactgatcttgctcatactactaagatcactcccaacaatcgagaggacttcgtggttgacttgtcttcgaaattggtggaaaaagacatacaggtggaacagttgagccagcgcatcgcgaccctagagcagcaggtgaaaatccgggataacaccatcgatatcctggagatccagctccatgatgtgcaggaggaacttgaggaagccaatgaccacctagagatgcaccaccaggacatgaaggcaaatgaggcaggaagcgagggagaggaggatcccgaggaattagagccagctcctggtcccaatgtgtaa

SEQ ID NO: 7773 - DNA, 393 bp, Zea mays
  Peptide Sequence Number=SeqID_51148
atgaagctccccaagccctcagacccagcgcaacctcaccggaaacccagaatcaccctcgtcggacttctttcgctcaccggcgaacgtggaccggctccccgagccaaccaattgagctatcccgtcgtgagcaggccgaaaaactcgacgccgacaaactcccccgcctgcgcacgaggaccggccatctccgacgccgacccgcacctcgacgtgaccatcgtaacctccccgacctccctggacacctcaccggagctagatcgccgtcgaaaaatgaaaaaggggatagaaaatagaaaccagagagtgaccatatttttcctagtatgcctaagtgatatagatcataggaaaaatatatggaaccctggtctagtgatgatctaa

SEQ ID NO: 7774 - DNA, 507 bp, Zea mays
  Peptide Sequence Number=SeqID_51149
atgaggaaaaaacacggctccgtgccaaaaatacatacatgttcaggccccgacagccacaatgaacagacaccggcactcaaggtgccattacaaacggaactccggttccgcccccgcgggtatgaacaacctccactccggagagcctgcggggcgacaagctccgggcaactcgccgacgacctctgcagcagcagccatggtcccaggacggacgcagccaccgaaaggctctcgttcgcgtccccactcaagggatgcgaaccagacattaaatccaaagagccgaaggacgcctcctctgcagagctggaggatggtttccaccaccagaagctggaagaagaggtggccagccgacccgtgcgggaggtagagccccggctcacctcgctctccgccccagcaaggatgatgaagatccttgaagctgagggcggggcagaggctgcagcccggctcgcttctccccaccatcgaactggtggtcaccgtcttgggtga

SEQ ID NO: 7775 - DNA, 777 bp, Zea mays
  Peptide Sequence Number=SeqID_51150
atggatgaaggagctcccctcggtggtctagagtctgaggacgacgccgagccgagccacgggattcacaccgttctttatagtctatggggccgaggccatcttgcccacagacttagaatacggttccccgagggcgagggcttacgacgaccaaagcaaccgaacaaaccgagaagactcactggaccggctggaagaggctcgggacatggccttactacactcggcgcggtatcagtagtccctacgacgctaccacgcccgaggggttcggtctcgagacctccaggtgggcgacttggtgcttcggctgcgacaagacgcccgagggcggcacaagctcacgcctccctgggaagggccgttcgtcatcaccaaggttctgaagcccgagacatacaagctggccaacagtcaaggcgaggctcagacgtcgacggagggggagcagcagcaccctcggcgtcaactacaccttcggcgaggtccgaccgagcctcggacggcaaagtccgaccgagggtctccactccgaaggacgacgtcagcgccacgcccgggctatcgccgccggggtctcctccaggaatccggcccgagcagacggctcggtcggccgccccggagcctcagccagctgtcctccaaggacaccagcccggctcgtggcttcggcaactcgactccggcgctggtcccgccagtggatggcccggccaggctccggccgacgaagtcttcttttcgagccaactctacctctgtccatgctaa

SEQ ID NO: 7776 - DNA, 315 bp, Zea mays
  Peptide Sequence Number=SeqID_51151
atggagagactcgcagttgccgagttccagctcaacaagtcgctgcatcagggagaggtgcgagagattaaaaggttagcttcccctcatgatgattgtgcgctggcaaacgcactggaggcgatagatatttctgcatggttctatggaggccggagaggatcgcttaggccgcccttcgccgggagagcatcgacctcgtcaccctcggtgactttcactctggctcgcctccttccttcacgggtcccaccgttcccgcagcagcagcaggtgatgcagcttcgcgggaggtgcgggctcccctccatctaa

SEQ ID NO: 7777 - DNA, 234 bp, Zea mays
  Peptide Sequence Number=SeqID_51152
atgtgccggctgccgagcgccgcgcttgggcgttggccattggcgttgtgtgtgtgtacacagtacagtacaaaatcccctgaaggaacgagtaaaggtttgggcttacggttgcaggacgacctaaagggactgaagcgattcaaccagcccagcccagtcgcacttgccgtcgcggcccatctgttccgttctgttggctcagctcagcgtcttggagaattcgacaaataa

SEQ ID NO: 7778 - DNA, 1188 bp, Zea mays
  Peptide Sequence Number=SeqID_51153
atggaggcggcgacgatggtgtggacggcggcggtggtcggggcggggctggtgtactggttcgtctgggtgatgggcgcggcggaggtgaagggcaagcgggcggtggatctcaagatgggatccatcacgcgggacaaggtgcaggacaagtacacgcagtactggtccttcttccgccgccccaaggagacggccaccacggcggcgtcggcggagaaggtgccggccttcgtcgacaccttctacaacctcgtgaccgacatctacgagtgggggtggggccagtccttccacttctccccgtccctccccggccgctcccaccgcgacgccacgcgcgtccacgaggagcgcgtcgccgacctcctcggcgccaggccgggccaccgcctcctggacgtcggctgcggcgtcggcgggcccatgcgcgccatcgccgcgcactcgggatccaacgtcgtcggcatcaccatcaacgagtaccaggtgaaccgcgcccgcgcgcacaaccgcaaggccggcctcgactccccgcgctgcgaggtcgtctgcggcaacttcctctccatgccgttcccggacgcctccttcgacggcgcctactccatcgaggccacctgccacgcgcccaggctgcaggacgtgtacggcgaggtctaccgcgtgctcaagccggggggactctacgtctcctacgagtgggtcaccaccccgctgtaccgcgccgaggacccggaccacgtcgagtgcatccacggcatcgagcgcggcgacgcgctcccggggctccgccgccaggacgagatcgcgtccatcgccaaggaggtcggcttcgaggtgctcaaggagcaggaccttgcgctgccccccgcgctgccctggtggacgcgcctcaagatgggccgcatcgcctactggcgcaactccctcgtcgtccgcgtgctcaccatgctccgggtcgcgcccaagggcgtctccgaggtgcacgagatgctctacgagaccgcgcagcacctcacccgcggcggcgagaccggcatcttcacgcccatgcacatggtgctcctccgcaagcccgccgccgccgcctccaccgaggaggccaactacggcgtgcaggatcggtcgctgtcagaggagagacagcccttcgactttggcggtggcatgtgctgttccgcatga

SEQ ID NO: 7779 - DNA, 808 bp, Zea mays
  Peptide Sequence Number=SeqID_51154
atggacaaggatcgtcagggagctgtgcagaagcgccaggcggtcgttaggctccatgaggccaggccgaagaggccgcgggggactgcgaaggctgctgcccctggcggaagccagccgccactggcggcaaagtcggtcgcccctgggtccagcagggtgccggaggctgcgaaggcggctgccgccggcggtaccaagtctgtcccggcgggagccgtgaacgcccaagagttgccgccgccgggcaagcgcgttgccgacttcgccaccgatattagtgttgaagattatcttgttgggtcgggcgaaggccaacttgttgttgttccgcccgccgtggcgaccgcggcggctgccgtggtgcccagggcgaagggtagtgctcttagcgccagtggcgagattccggcactcgctgccgtcagggacgaggcgggcgttgtgtcctgccggctgaaggaggcattaagtcaggcggctgacttcgcagaccgcgcgacgtcgggggcccttacggcagttgtgtctgccgaagtcgagagacttcgggcgcaacatgctgacgccgtccgagagaagttggccgccgacagcaagtgccgcaagctggcggataaggtggccgcgctggagggtgagaggactaacctccggcgccaactggtggaggcgaggaaggaggctaatgaggccctcgccaaggcgcagtctgcgcaggcggaggccaatttggcgagggcagagggcagtcttgccaggcagcacgccgaggaattagaggagcggctcaacgctctgcagaccc

SEQ ID NO: 7780 - DNA, 87 bp, Zea mays
  Peptide Sequence Number=SeqID_51155
atggcgcaactgtcctactgcatggcggggacagttttgtgggcgcaatttgaggccaacaatgatactagagatatagtaaaataa

SEQ ID NO: 7781 - DNA, 1062 bp, Zea mays
  Peptide Sequence Number=SeqID_51156
atgagttctccgatcaaggaccaaggattagtgcccgagcacatggacaagagtgttgctcaagaacaatccagcagtgaaggatatgaaacgcctagtgacccttttcctaccactagcatagatagggccgctctccgtgagttgcaacgtgaccctacttatgatccacgagaagctgaggaggtcgtgtctgaatttcgtgcgatactcgaagaagccgtggcacgatacgaagacgtaccggagccgacccaagacgcaccggaacagaccaagacaacaaccgagacgtcaaggaaaaggaagcagagtgatcgaaaaagaggtgacagggggctgaacaagtttcccgacaaaacatacaaaatctcagacagactcgacgtgcaacttgtaacgatgtttgcattaatgcaacatgatcagcaggagattctttacggtaccaagcccaatgctagtgccagtaaaagggttgggtatctcaacccaatacttatatccgaggaaagccacacttttagaatcgggaaagacaacgatgaaatacggggaaagacggacgaagaagttgagaagcgtataaaggatatgaagaaggattttgaagctcgatacgccacctacataggacatgcaatgcttcaatttcaagacagggaagccataatggccccgtacaactttaaggcttatagattctataagatgagaggtggaaagtacgacctgtcgaaaaaactcgtgccactagacatccatcatcactggccgcaatttcaacgaggaaacccggagaacttgaccgaagctgcattgtatggcatagtcgaggacctctgcacattcatattgaaagagatcatttatgtagctagtagatggcctaacatgtcgccggacccgactgttggttggatgctggcttggcgcagcctgcgcctcacgccggtcactgagtcacggcacgtacgggtactaggacatgtaggttatgccaagcgtgagaccgactgctcgatcgcggtgtccgcctctcgttggccgcgccggcggtag

SEQ ID NO: 7782 - DNA, 330 bp, Zea mays
  Peptide Sequence Number=SeqID_51157
atgcaggtggcgtgcaaccgcaccgcggtggcacaccccttcggcttcgtcgcatccggcatagaggcccaggcccacacgtcatgtaaccggcgcgccggttactacgtgcaagaaaccgcaccgccacttgcgccaatgctgcgccttctcgactgcggaaccggtgccgtgactcgagggaccgagaaaggggacatttcgaaagggatccttctccgcgaaggaagcgggccccgagccctcctactgatcaggggttcgaaggctggcccctcagaagggttcgacagccgccccagagcactcgggctccgcgcccactactga

SEQ ID NO: 7783 - DNA, 294 bp, Zea mays
  Peptide Sequence Number=SeqID_51158
atggatgagaagcgatcccaccccgatcaatcctcctccgtccgatactacgccaacgttccagatccccccccagcgaacaggcttcggcaggttgttcgggcaggtcgttaccgctgcgaggaatcggggaagaagatccacagggcgcgcggcgggatctacggcaagagctccggagagaagaacgcacgacatctgacaaggcgggcccgcgttccagatagcagaagggagaagcgagcgcacgcggttccgtttccagctcgcaaccgagaaggacggaagacctga

SEQ ID NO: 7784 - DNA, 483 bp, Zea mays
  Peptide Sequence Number=SeqID_51159
atgtcccttggtgattatgcggtggatggcaatgaccaggacattagcgatgtctctacttctgaggtatcacattccaccgatgatgtccctactaaggtagaggagctaacgactaatttggctagtcaggataagctacctaggcttgttgctcaagagaggaaacattttaaattcaaatatgagagcacacttaaggaacttgagtctgttagaacttcagttgtggtgtctgacgagacaaaatgtgatgagtgtgctctacacatgtcgaacatcacaactttgcggaccaagtacgtcaccttgctagatgagcacgacgagttgagatcaaaatctagactattaggatggggcccaggagaacatatggctcatggattctggttgttcgtgccacaagatcagaagcaacaaatggttctctggcctcaaccccatgaatggattctcttctttgatttggaagtggcatag

SEQ ID NO: 7785 - DNA, 84 bp, Zea mays
  Peptide Sequence Number=SeqID_51160
atggcggccgtgctcgggaaatggtggcggacgatggcgcttgcctttcacggcgaactcagcactgaggaaagaaattcttga

SEQ ID NO: 7786 - DNA, 864 bp, Zea mays
  Peptide Sequence Number=SeqID_51161
atgcagtgtttaagaattgcttcggtaaaggctgctgatataacaagcaaaataaagaaagcaatattaacaggacataaggaaaatgaggaatttgcgcttgccatgtgtccagcagaaccatatgtcctatcaggaggaaaggacaaatctgttgtcttgtggagcatccaagaccatatatctgcccttggggattcctcgtcttctcctggagcatctggcagcaagcagtctgttaaaactgcaaatgaaaaggagagccctaaagttgatcctagaggtatatttcatggacatgacaacacagttgaagatgttcagttctacccttccagggatcagtgcaacttcttcaaaattccccaggttctccacgctctcgcccactacaatgccagacaccctggtggcgagttcgatgctgtgaagcccctgaagcagagccgcgtgggattccggggccaggcatggttccatatcaacttctgggctcgcccccgcagcagcagcagtaataacaagacaatcaagcgcttctttgctgaggtgcactacaagccaacctcgatcagtagcccctcatcgtcttcgtcatcacttgcaataactgcagttcctatagttgaaatatgcatcattatcgaggaacctctatcccaatataggcgtagctgtgccttttgtcccagctaccgggacattttacaccctaagggttgccgtaagttcgtctgtggaaatgacaaggacctgtttgaacagcgattggacccttgctgctgcactggtatggggattgggaagatgccattcactgcccgcccagacatgtctgcttttctcaacatcagtcctaagtag

SEQ ID NO: 7787 - DNA, 321 bp, Zea mays
  Peptide Sequence Number=SeqID_51162
atggcgccgcgctcctgcttgaggaggaaggaccctagatctgggttgtcaagccagtcgtcgatggtaaaggacgcgagacatgctccccctttgttgattgccactcaagttgaaagtaccaaatctgcggccaacagaactccaacttggagtagtgccaccaaatttgctaccatactggcgtcccttgtaggatccaggaccatacatcgatccatgatgctgcaagaacatacattatcagcactgagcaataagtggaaaagtagaaactttagaagagaaacactacctctgtcaaatgagctgaatggttga

SEQ ID NO: 7788 - DNA, 474 bp, Zea mays
  Peptide Sequence Number=SeqID_51163
atggcgaccgccaccgcgtccgtggcgccgccctccacctccacctcctcggtcctcctgcaccgccgtctcccttccccggcgcccgcgcccgcgtccgccgccttcccccggctctccggcccggccccgccgccgcgccgcgcgcgcctgctcctccgggtcgcgctcaccaacgaggtggcctcggacgacgtggcggccgaggaggccgcggccgcgcccaagatcggcaggcgggtgcgcgtcacagcgccgctccgcgtctaccacgtcctcaaggcgcccgacctggacatccagggcatggagggcgtcgtcaagcagtacgtctgcgtgtggaagggcaagcgcgtcacggccaacttccccttcaaggtcgagttcgagctcgccgtcgagggccagcccaagcccgtccggttcttcgcccacctccgtgaggacgagttcgagttcgtcgacggagagtga

SEQ ID NO: 7789 - DNA, 1113 bp, Zea mays
  Peptide Sequence Number=SeqID_51164
atggcggcctccgccgcagctcaacgtagatctgcaggaagtaggacgacgtacgagagggcagagctcgaggcgctcagggacgccccgtcgaaggaggctcacgcgcggctctgggccgacgtccgcgctacccttgtcgcctccgggttctccggtgagtatgacgggctgctcgttgccgaggaggacgtgaggagcaggaggggtaatagggggatgaaggctatgagcgtgaggaagtggcccgaagaggcggcggcggcggcccggtttttgggcgtggcagagattggtgcacacagaaatggggatctggcggtttgtcacgaacaccgatttgtatctgctcatgaccatgctgggacgtctggagtggttgaagagtcgtttcatcaaggtgaagatgttgaatgtgaagatgacagtgatgatgactataacggaattctgaagcctgcatttgctgtggatggagatccagattttgagtctggtgagccacttgatggctttgagtaccttcggcgtgtcaggtgggaagctaaccaaattcctagagtcaaggtggccaagatatattcaagtgcagctagaaatgagcaaactccttatatgccagaaattccggatataccaaagtgcttacctgatttgcgtgcgtcaaaacaatgggaggacagatttatcgtcgactttgaggaaaccaggatggataaaaaatacgacaacaaccacgtgctctctgagcttgacaattctgatgaaccatctgtatctagtgggacaaaaatctcaacaaaacctggcagcgggacggagccacagactgacccgacgctgacaatgattcgcagcatggatgcagtgtcaagagctgcgacacttcggaactacatcgatatgattcagagcttggatgcactatcaaggaacaactgcatgtggctcttcgcactctgtgttgccgttcacactcccctggacgcggagacatgtgcctcactgaggtccttgctgcgcaagtgcgccagcatccttgccaccaagactgagatggacgatgaagtcgtaatgctgaatatactgatgacaatttcgggaagggcttaa

SEQ ID NO: 7790 - DNA, 414 bp, Zea mays
  Peptide Sequence Number=SeqID_51165
atgcggcggtcaccctccggcaggaggggccgccggaagcccggccgacgactccgacacgctggaggtgacgacgcccgccgtcgatcagccccacgttgtctaagtccgcgtcgtccgcagggccagcgagcgcctccacccccaaacgccgcgggaaagggcgacccgcggacccgcgcggaagggaccgggaaagggggataccccgaaaaggatccttctccgcgaaggaaccgggctccgagccccccactactgatcaggggttcgaaggctggccctccgaagggttcaacagtcgcctcagatcgcgtgggcccgacacccactactggtcaggggttcgaaggccgcccccccgaagggttccatggccgcctcaggctactcgggctccgcgcccattactga

SEQ ID NO: 7791 - DNA, 234 bp, Zea mays
  Peptide Sequence Number=SeqID_51166
atggccacacgtccaaacaaaagcacatattttcgggccgggcaaccgctctgcatgccgttcattcgacccgacacaaagggaacttcggcagttactacgccagacgggcgatgcacggcagctggtgctggtgctggcacggttaagttaaggtttctcgacgccaataataagggagagttaaatgcgacagcggcgaggttgttcaggcagctgagctcccttgattaa

SEQ ID NO: 7792 - DNA, 105 bp, Zea mays
  misc_feature (19)..(19): n is a, c, g, or t
  misc_feature (76)..(76): n is a, c, g, or t
  Peptide Sequence Number=SeqID_51167
atggccgccctctcgagcntctgcctctccgtcctcctcgcgtcgtggctcgtgtgcgcggcgtgcctcttcgtcntcgggaacgcttcgggggcggcgcacagg

SEQ ID NO: 7793 - DNA, 903 bp, Zea mays
  Peptide Sequence Number=SeqID_51168
atggaggtccgttgccaaaccagcttttgccagaatgaagacggtttccccaagttgctgagagcatgcacagttcgcctcggaatcaggagccagccagagtatgatggccgtgaattcgtcgagcatggcacagagaagtgtgtcgtgactgtatacgttggatccagtccgcgccatgtggaatggagtgtcactgctgtggggcacagattcaaagacacctgccaagtcgtcgctcgcaaggcattgagggccctgtgtcagatctatgaagaagaagtggtcgacaccccgctcagattctttccgccctttcagagagaccgtcccgcttggatggctaggatgcgtgcattggaagagcagcagctgcttgaggacgaccccacagtcgtgtacctcactgcatacctgctcacccttgatgcacagtatgatttcttggctcggcaccaccgtcagatgattgctcgagcagaagatgcagagaagtgcaaccgtcagctccatgtggatctcaccacagctcaagcccgtgcaactgccttggaaagtcgtgaaaggagagaagaaggcttggaactaccggaaggagccatagtcttggaaggaattccagtctcccctaaggctatggataagcaagagcaccctgaatcctcccaagatcccccgccagagttgtttgagcccctcaccatgaagaagattccagcaccatcccttgaggtcaaggaagaagctgcaagcaccccgccagcatcgccgccctctgaggagctacaagagctagtccaacttgaagaagagttcgaccccgtgctgccatctcagtcgctgccagaagaagtcatcaacatcagctccctcttgacccatccaggagatatctcagattga

SEQ ID NO: 7794 - DNA, 1143 bp, Zea mays
  Peptide Sequence Number=SeqID_51169
atgtccttcgcgctcccctcatgcatcgtgcctttccatcttccgagccccccggatgggggacgcccgcagtccttccgccttgtcgtcggaggaacgcaacttcgtggaagttggtacctctcagccatcgttcggcttcaaggattttcatcaggcagcccggctgcatcccctcgccggtggtcacccaagacggtgacccccagcttctggacagggagaagcaagccgggctgcgatcttggttccgccctcagcttcaaggatgttcatcatccttgctggggcggaggccgggctgagccggagctctacctcccgcgcgggttcgtgggtcagcctccccttcagcatccaagggagagggcgctcactagccctgcgagcggggcagacttcgacaacgcggggccggtcgacggcagggctgtcctgcctttgcaacggtacggggcctccgcgcggaggttggtgctccgctcgtccgggaggatccgagtggggatctgccgatgggctgatgctccactcgaaggtgccgaggtggatgcggcccgagaagtccccgttgccgacgggactcgccttgtcgattatctgaaccgcttcaccgagcgtgagttgcctcgtgcaaaggtgacgagtgaggaacccctcggccgcccttcgatgagccgaagccggaggcagcggtgtcagcacgggcggaggcagagttggcttcgagaaggaggtgtagttggccagagcctggccgggtcgtccactggtggaaccgacgccggagttgagctgccgaggccacaagccgagctgatgtctttgggggtcagctggccgaggcctcggggtggccggccgagccgcctgctcgggccggattctcgaagaagaccctggcggcgatggcccgggcgtggtgctgatgtcgtccttcagagtgggggccctccgaccgcgtcgccgtccgaggctaggtcagaccccgccgaaggtgtagttgatgccgagggtgctgctgcctccttcggctgtcgacgtccgagcctgcaggatcaagttgtcttgtatatccggactcatttgtcggtaacagaattgtttgtgcgggcgagagttgcttttcacggaaggcgatga

SEQ ID NO: 7795 - DNA, 183 bp, Zea mays
  Peptide Sequence Number=SeqID_51170
atgcaggcggcatgcaaccgtgccgagtgggcgcgccccttcgactccaacgcgtccagcatggaggtccaggcccacgcgtcatgcaaccggcgcgccggttgctacgtggaccgggaaagggggataccccgaaaaggacccttctccgtgaaggaaacaggctccgagcctccctactga

SEQ ID NO: 7796 - DNA, 396 bp, Zea mays
  Peptide Sequence Number=SeqID_51171
atggctttgctagaccccccccccccccccgagcgcctccagcccgaggtggcacttgacttggtgcgcaacctgctcgaatggggtgcaccggcgttcgccggaaggatctgtgtcggcgcctctcctcacggcgacctcgtcgccggggagtttgtgcttttcgtctccaacctctcttgtgggttggcgctgccgatcccgtctttcttcgtgctgctgctggaggagctcgtcctccaacctcagcactccacgctctgcttcatccttcaagcggccatcatcgcctacctctgcaagatgtccgtgggggcgacgctccttcccgcttcttcctccagcattcggagggaaggatgttcactagccttgcgaaggcggaaagcgagctga

SEQ ID NO: 7797 - DNA, 630 bp, Zea mays
  Peptide Sequence Number=SeqID_51172
atgaagcagtggcgtgatgatgtcgaccgtctcgtcagcatggcgcattctggctcggccagacccaggcctcggtcattccggcgtcaacctgagacgtctgcgttagtgcgctcaccctcagtgaaggccgcaccgactgaggacctgcgggcggagctcaaccgcaggcgtgcgggtgaggatgctccaatatttcttgagaggcctgatgacctacgggcagaactcaactgtaggcgtgcgggcgaggacgcacgagtctctctggagagggtgcgtgagcgccggctaaacttcgagggtcgcaacctcgaccaggacttcgctccacttgcgccacaaactccaaggggtgcccgaatccacacgggtgtcccattggttggcttgggctgtgccgcgctagcgaatcacctccgcgcggcgacttggccacccaagttccggccgcacctgccagagaagtacgacgctgtgactgggggccggaacgagcgtggcaagcgcccacgaccacagggaggcaacagtgggtcatgccctgtgcaccccaacagtcgccacaacgcctcggaatgctgcgagatcatcaagctcgcgaagcgcgtcagcgagcgacgcgagtag

SEQ ID NO: 7798 - DNA, 1164 bp, Zea mays
  Peptide Sequence Number=SeqID_51173
atggttcacattgttgagcaccatgatttcttgcccgaggacttcatggtggaagaggcggctgcctctttcacaccgtgggccaccaacctccctacgcctggtgcagccgctgctgtgcactctatgcggcagcacactcccgcgcaaacgtccagggcgtctagggctgcgcctagggcgctgtctatggccagagaattgttgcgccatcctcctagctccacggcctctccaggggccatgaagcagtggcgtgacaatgttgaccgtctgctcggcatggcgcattctggctcagccagacctaggcctcggtcgtcccggcgtcaacatgaggcgtcaacgtcagtgcgctccccctcgactccaacgggcgcccaaatccaggcgggtgtcccattggccagcgtgggctgcgccgtgctggcggatcatctccgcgcggcgacttggccatccaagttccggccacacctaccggagaagtacgacggtttacgtcaccgccattacggtagtaggtggagacaccaccgtaatggcaacatacttccatgttgccttgtccgggccgacccggacttggctcgtgaacctcaccccaggatcgatctactcctgcgccatggcgtggaggctcacctccatgcagtgaggcaggaacccggggaaactcttcgggcaccaagtgcgccagggctaccgagggccgtgcatggcactcggccaccacagaccggggttacccatacgggtggctcgggtgctgtcgctcaagacggcaaaaagaagaagaagaaaaactgtggccacgagaggccaccgtctgcagctccggtcatcgcagctgtgactaggggccggagcgagcgcaataagcacccacgaccgcagaggggtaacagcgactcatgccctgtgcaccccaacagtcgccacaacgccgcagagtgtcgcgagatcatcgagctcacgaagcgcgttagcgagcggcgcgagcagatgtccaaggatggctccccacctcgtcgccggcctggcaaggaaagggtcgacgacggcgaggtggccgcgggagaacgagacctcgggtatcagtcgcccaagggggtcctgaaggatgttttcaccggagactctgactccggtgacgacagctag

SEQ ID NO: 7799 - DNA, 1239 bp, Zea mays
  Peptide Sequence Number=SeqID_51174
ctcaagtggggcacgtacaaggatactgagccccgacatgagggcccaggggcaaaattgaaggaagtaactactgcctgtaacgcctgggtgatctccgagcgccataatgatggcctggtcgccgctcgtcagcggagtggacatggctcattaaatgctgaggcggcacatcgcctgctagtggagtggacatggctcattaaatgccgaggcggcacatcacctgccagtggaatggacaggcggcgtggcttatccgcaataaaagcagaggccgcgcggcccagaggccttacgtcaggttccgcccgccggcttacgtcacgggcagtgagccacgtggcagcatcgggtctccgcctgagcggggagcagaagcaatcccaggaccctgctgtgagtggcccggaccccacacagaggggtccgggacccgtcctaggggtccggtttgtacctgtggaggtcctggaccttgcccggaggtccggtccgtatatgcagggttccgacactttcccatgggggtccgtacccactgttgataccttggaggatattgtcttctctagccacgtggcggccctggagccgtccacgtgtggcccccgggccccacctcagggggaggatatgagcctgcaggtggggtcaaagcttgattggcgattggtgcgccgcttccgtgcgctcgttgacgtaaccactgccagtccgccttcggtcacgccaactgccacgtttgtcctctgcggcggccccgaggaggcgcagtactggcgcgggcggtggttcgctcttcgcgtggcggttcgccttctccgcacccggagacccacacaccagctgtatgacttgtgggcccgggcccccgtgtcagaggctggggccgttgttttcggcggagatgaagaggcgcactaccgcgggcggcgattcacctatggcgcgcccctttgcattcgggctcctctgcctcccgccgccgtagtcaccatggcctcgctagttcatcccgagcgtttccagtccaaggggtcgctcaacttggtgcgcaacctgctcggatggagcgtgctggcgttcgctggaaagatccgcgtcggcgcctctcccctcgacgatctcgccgccggggagttcgtgctcttcgtctcctacctctcctgtgggttgacgctgctgatctcgcccttcttcctattgctgctggaggagctcagcctccaactttag

SEQ ID NO: 7800 - DNA, 965 bp, Zea mays
  Peptide Sequence Number=SeqID_51175
atggctattcgcgtgctgaaatctgcactcaacgcggcagaggatgaccatgcaggccttcaggagcttggcgggaatgccacgcatatattctacggcacggaggaggcaaaggaagggaagaacgcgtacatggagagacgacgcccagatttctccaaagctttgatggagagcaagctacttagtggaactactctcattgtagaccgctactcctattcgggagtggccttttcggctgctaagggccttgacattgagtggtgcaaggctccagaaaatggacttattgctccagaccttgtgcacctcgcgcgggctagcggcgtcggctggcgtggcctggaggtgctcatggcggtgtgctcaaggctggaggccgtcgacctctcgcactgcatcgccgccggcgacagggagattaccaccctcaccacggccgctgggctcatggagctcgtcaccgcctcagcgtcaccgatggtcgggctcgacaatgtcgtcgtcggatgccctgggcgccagaggctcagccacaaatggcggcagctatctgaggcggaaactcaaggttactattactcagctggttccaagaatcctgaaagagaaacaaaattccataatccaaagtttgtttctctactgaaccatttacgtttctacattcctcagatacttcccaacttggagaaaggtgaggaaggcgaacaccacatcgttgtaccattattggcaagagcaaaattcagatctattgctctggagaacgggaattcttcctgtaggccttttgacattttacggcctgatggagcccctagaccgcagatggcgtgtcttgggtatgatgtagacatagatgatcgtttgattgagagtgctgctgttgtgctatataatggaaacatgaaaccgtggctgaagctggctattcgccgttacaagtatatatgggagtg

SEQ ID NO: 7801 - DNA, 684 bp, Zea mays
  Peptide Sequence Number=SeqID_51176
atgcaggcagcatgcaaccgcgccacggggatgcaccctttcgacttcaacgtgtctagcatggagtcccaggcccacacgtcatgtaaccggcgcgccggttactacgtgcgaaaaactgcaccgccacttgcgccagtgccgcgccttctcgactgcggaaccggtgccgcgattcgaggcaaccctgcgcatggaccaacagtgccagccaagcacgccggtcacgggtcagtcagccgcgggagaaggcgcgatggtagatatggccagaagtgggccgacagtaatggcggccggaccgggaaaggggatactccgaaagggatccttctctgcgaaggaagcgggccccgagccctcctactgatcagaggttcgaaggctgacccctcggaagggttcgacagtcgcctcagagcactcgggcttcgcgcccactactggtcagaggttcgaaggctggcccctcggaagggttcgacagccgcctcaggccactcgggctccgcgcccactactgatcaggggttcgtaggctggccccccgaagggtttgacagccgcctcagaacacgccgagcgagggatgactctgggtacgtccgatacatgcccaaggctcgggctacgctcccgaggtaccctaggacatttccgagaccagcaggagcgattatgtaa

SEQ ID NO: 7802 - DNA, 942 bp, Zea mays
  Peptide Sequence Number=SeqID_51177
atgttcggcgccctccgagggcaacatggcgctttcccccctcctccttgcggaaaggcgacgaaggggcgtatgaaaaaagtcaagtcagtccttgaccgtcctctcgccctgtgcggaggctcgggggctgctctcgcaaacccggctccagccaaaccgttgacagcgtcaacataccagcccgagaactcggaacctgactatgcacccgggctacgaccagttcgcatgagggaacaatcagaccggccgaggcaccacgaaaggcactcagacctcggaggagtcaaaccacttctccgaggcctcgggggctacacccggcgggaaaacagcgacgcctgcgctgctccgactgctgtgccacccaccagggtgaggctgacagccgccaagtccggcctcaggcgccataggaagctccgcctcgcccgaccccagggctcggactcaacctcgacctcggacaacggactccgcctcgcccgaccccagggctcggactcaaccttgactccgaaagacggtctccgcctcgcccgaccacggggctcggactcaacctcgacctcggaagacggtctccgcctcgtccgaccccagggctcggtctctgcctcacccgaccccagggctcggactcagcctcgacctcagaggagcctccgcctcgcccgaccttgggctcggaccgaccacgtcgtaggggggtacatcattaccctacccctagctagctcaggctacggggaacaaggtcggcgtcccatctggctcgccccggtaaaacaagtaatgatggcaccccgcatgctccatgacgacggcggttctcagccccctacggaagcaaggggacgtcagcaaggtcccatcagccccaacagctgtgcttctacagggctcaagcgctcctccgacggccacgacatcacatga

SEQ ID NO: 7803 - DNA, 489 bp, Zea mays
  Peptide Sequence Number=SeqID_51178
atgtctagttcctgtatttgcatctttgactgtgtagagaaccgaggccagtgcctggggctcggtcttgtgcccgagcctgtccaatggaggagctgtccgagtcatagtggttggagttgtggcaagtatgacaaaaagctcttggcgatacgtagggtatccgacgttagctctgcagcttctgatgacgtcgggcgtcctttcgtcggtattatcaaggccgaagccatgctcggtgaggcggtagtcttcccgaggccatggccgagcttgctctggtgtgacaccccagtgtcacttagggttcttctcagtactatctcaagtgccatcatttcatattgcaatctcgctgacggagagtacgtgctcatccccgagcaaggagctgtccacgaggaagaccaggagcaagctcccgagactgccatcgaggatctccctgcagccccagctattgaaggcaagccccggttttatgcataa

SEQ ID NO: 7804 - DNA, 603 bp, Zea mays
  Peptide Sequence Number=SeqID_51179
atggacgacaatgacatgcatgttggagtgtttatcttgttacccatgttaaaatcatgctttgatgtcttccaagaatcacagcagccgccacaacaacagcaaccacaagtgcaggtgcagcaggcgcaaccacaaaaccaagcagcacctgttatgcgcagagcatcatctattgctgctcggcaagcagcaatggcacaacaatctcaggagactaaacccgttcaatcttcacccaagatcaagcgtcaaacatcagcgagatctggttcagtggcatccacaaagcctccgatagctgcatccgcaccaaaacctggtggtagcccaaagaaaggcgaggtcaaacctactgctgacccagttcaaactccaaccacaggtgctgattcaccaaaacccgagcctagcgctcgatcactccctggagtcgaaggggtggacaagatggccatcgatgaggccagtggtgacgccccagagggcgcagaagagcttgaccctgcgctggaagaagagacgccgattgaggagatgatccgtgtgacgcgcgccaagctaaggaggcgcacgaccaccgaagttcctgttgggaattag

SEQ ID NO: 7805 - DNA, 1290 bp, Zea mays
  Peptide Sequence Number=SeqID_51180
atggggtgcaaggggtccaagctcgacgaccaggaggccgtcgcgctctgccgtgcccgtgccgagctgctcgccgcggccgtccgccaccgttacgcgctcgcggacgcgcacgcggcactcgcggactccatcgactcggtcgccgcgccgctgcaccgcctcctccgcctgcaggccgagtcgccggggctcacactgccctccgcgcgcaagggcggcggcgcgcccgcggaccgtttgccgcggtccttccgcccgtcgtcctccgcgccgcagcctgcccacggccattcctcgcacctccagttcggcgcgtcgcccggatcggagccgccatcgccggcagaatcccctccgcgccgcgtacccgagcagctgcagcacccgcacccgcaccacgccgcgtacgggtacgagtacgactacgcgacgcagcctgcgtacgcgtacccgccgacgccggcgggctcgctgcagttctactacgctcgcagccgcccgccccccgcgtccgtcgccgtcacgcagcgcgttccggggccgccagagcgcgtagtgcgcttcggctcgttcgacgcagcgggcggctacccgcagcagtacgcctacagcgcccagcgggccccgatcccgcctcccgctccggccgcgctgcagcgggcggctccgcctgcgccgccgaaggcgagctcgtgggacttcctcaacgtgttcgagaactacgactcgtacgaatacgacacgtactactacgactccgccacggcagctactgcggccgcggcgccttacacgccgagccggagctcgcgggaggtgcgcgaggaggagggcatcccggacctcgaagatgacgacgacgaagacagcgtggtcgtgaacgaggtggccgggcagtactcagcacctgggagcggcggagcccgcagccggcgcagctcgctcggcggtgtcagtgccaccgccgagctcgaccaggcggagaatattatcgacgtcatcgcttcctcaaagatgatgtcggctatctccgtggctcatttggggtgcaaagacatggacgccgtggacgtcggagtggtagcgatggtggactcgcagagcctatcctcggcacttgagaaactctatttctgggagaggaagctgtatgctgaggtcaaggtcatggtcatgttaacgaagggtccagttagaataatacccaccacggaaagtggctttctagaagcccaacggccgaggagaaaatgcgcctacttatttccaagaactccaagcgactga

SEQ ID NO: 7806 - DNA, 726 bp, Zea mays
  Peptide Sequence Number=SeqID_51181
atgcattgcgcccttccaccttccgagcccccagatggggtgcacctgtgttgccttcttcttgctgttgttggaggagcgcaacctcgtgggggttggcgttcttcagacatcgctcggcttcaaggattttcatcatgcagcccggctgcagtcccccgtcggcggtcacccaggatgatgaccgtaggcctcgtggtggggagaagcaagtcgggctgtggcctctgccccgccttcagcttcaaggatgttcatcatccgggctggggaggagggcggggcgagttggggcctacctccgcgtgggccggtgacccacttcttcctccagcatttgagggaggagggcatcctccagccctgcggaggagatgtcctccggctacgcgggggaaggcgaactgctactgcctggacagggtgcagttgtccatcctccatccgagcgacggtcgtgccgcgcgtgggccggccacgtctaggtcctctttgcgccgtcggctgcaccggggggtcgcacaacacgccgtacgtcgtgagggccgtactcgtgttctgggatggtcccgttctcgttcttgtggcgagaacgggagtgaggacctgccggtgcgctttggggcgaccgccgttcgctggtgcagtgttggtgggcaggtggccgctatcgttggtgctgaggtcgggaaaaccgccgagggtgctgccgacgttcaagtctaa

SEQ ID NO: 7807 - DNA, 1701 bp, Zea mays
  Peptide Sequence Number=SeqID_51182
atggaggcccagacccacgcgtcatgcaaccggcgcgccgaatgctttgtgcctgcaactgcaccgccacctgcaccaccaccgcgcctcctcgactgcggaaccaataccgcgactcgaggcgggcaggagcagcggtcacgtcgtcagccaagcttacgtcccatccgggggcagcgagagaaccctctctcacggcgtgaagacaacgcgcccgtgagaagcgagcgacgcttcaccttcgccataatgaccgcgtcaaaaaaggctccgagcctccctactgatcagaggttcgaaggctggcccctcggaagggttcaacagccgcctcagagcatgtgggctccacacccactactggtcagaggttcaaaggccggcccctcggaagggttcaacggccgcctcaggctactcgggctccgcgcccactactggtcaggggttcgaaggctggcccccgaaggcgggaacgatcttgtaacggaatcccatcggagggaggcatcgagccctcggaccccatcaccaggggaccgggtccggcagatcacccgcagctcaccggagacaccatgttcggcgcccaccgagggcaacatggcgctctcccccctcctccttgcggaaaggcgacgcaggggcaggctcgggggctgctctcgcaaagccggctccggccaaaccgttgacagcgtcaacataccagcccgagaacttgggacccgaccgtacacccgggctacggccagctcgcatgagggaacgaccagaccagccgaagcattgcgcgagacgttaagacctcggaggagtcaaaccactcctccgaggcctcgggggctacacccggcgggtgcgctcgcgcgcacccaccggaacaaaacgcaaccgagaaaggctggtccccttgcaaaaaagtgcgacgaaagcctccaagcgagtgctaacactcccttcgaggctcgggggctactgtcggggaccataattaggggtaccctcaaggctcctaattctcagctagtaacccccatcagcacaaagctgcaaaggcctgatgggtgcgatcaagccagggatcagtccattcgagggactcggtcacgcctcgcccgagcccagcctcggacaagggcagccgaccccggaggatctccgcctcgcccgaggcccccctccagcggcgaacacgttctcggctcgcccgaggcccggtcttcgccaagaagcaaccccgaccaaatcgcaggagcatttaatgcaaagggctcggatttgggctcagctccagaacatggcgaactccgctccgcccgacccagggctcggactcgggctaagccccggaagacggcgaactgcgctccgcccgacccagggcttggacttgggcaaagccccggaagacggcgaactccgctccgcccgacccagggctcggacttgggctcagccctagaagacgacgaactccgcttcgcccgaccccgggactcaaattccgccctggcctcagccaacggcctccgcctcgcccgacccagaggctcggactcggcctcggccccggaagacggactcgacctcgacctcggagaagcctccacatcgcccaacctagggcgcggaccggccacgtcaacaggaggcgccatcattaccctactccaagctgactcaggctacggggaataa

SEQ ID NO: 7808 - DNA, 660 bp, Zea mays
  Peptide Sequence Number=SeqID_51183
atggtgacctccagttcgatggcgggggagagcgaaccgggccgcgacctctgcccctccctcagcctcaaggattttcatcaccagggctggggaggggactgcaccgtgcccggctctctgagccgagcggcttcggagccactcccggtgccgcctctcgccacggcagctggaagaggttccgccgccgacgagcttgtcggcgccacccacggaccgacctccaactccacggccttctgcccgtccttgcctcacaagtttgggcacgggtgggggcctcctggcagcagcatccgccctgaggtcatcgctgctgctgttcggccccccggagcagaagtcttcatcgtcgctgctgctggggcgggcgacggcgagtcgttcgtcggtcttctgttgctcagcaggcccctcccccatcgagtggggttaggaaaccctcggccgctcttcgatgagccgaggccaggggtagcggtgccagcgcgaacagaggcagagttggctcgaaaagaagaccagagcggagacccttggaccgcgtcgccgtccgaggctaggtcggacctcgccagaggtgttgtcgacgccgagggtgctgctgctccctttagccgtcaagatctgagcctgcaggatcggattatcttgtag

SEQ ID NO: 7809 - DNA, 339 bp, Zea mays
  Peptide Sequence Number=SeqID_51184
atggcttcatggagcagcagtgacaccatttcattttcagaagtttcaccctttgacactattctacatcttttacagctcatgtggtcttttaagccctgcctctacatggacttcggcctcgcttccgctgtcaccacgctctggacctgcaccgatgtcacgcacctcgtgcacgtgctcctgcagttccgcctcgtctggtgcggcaagctaatccgttatgcccgcgccgtcgccgcacactacgtctgctccgtcaagggcctctgctttgacctcttcatcattaggggtagaaacagagctttcaatgcatgttggaggtgcacgatgtga

SEQ ID NO: 7810 - DNA, 306 bp, Zea mays
  Peptide Sequence Number=SeqID_51185
atggcgaagaagccagtggaggaagcgctcctcgcagcggcagacgagcaggagagcctgagcgtgcgcgaggagctgaagaagcagctatggctggctgggcccatgatcgccggcgcgctcctgcagaacgtgatccagatgatctccgtcatgtacgtgggacaccttggagagctgcccctcgctggcgcatccatggccaactccttcgccaccgtcaccggcctcagcctgctgttaattgatgtatacacattagggcttattcgatataagaggattgatgggattgtagaggattaa

SEQ ID NO: 7811 - DNA, 543 bp, Zea mays
  Peptide Sequence Number=SeqID_51186
atgccgagcagacggtctacatcatcacgccactgcttcatggcccccggcattgccgtggagctaggagggtggcacagcaattccctggccacagacagcgccccaggcgcagccctagactccctggatgtttgcacgggagtgtgctaccacgcagagtgcacagcagcagcaccaggcgtagggcggttggtggcccacgctcaagggggcacgtacaaggatgctgagccccgacatgtgggcccaggggcaaaatggaaggaagtaactactgcttgtaacgccaggaggccttacgttaagcttcgcccgttggcttacgtcacaggcagtaggccacgtggcaggatcgggtctctgcctgagcggggagcagaagcgcacacggtattctttgtcccagaatctagggaccctgctgtgagtggcccggaccccacacagaggggtctgggacccgtcccaagggtccagttcgcgcccgtggaggtcctggaccttacccgggggtccggctttcttgtctgtcggctctag

SEQ ID NO: 7812 - DNA, 147 bp, Zea mays
  Peptide Sequence Number=SeqID_51187
atggaggcaacggatcatgctgatcgtgggagcatggacggattcaatggccagtgggtcccgcacggtacaacctctgcagagtgtaaaactggtatactagccgagctcacggtcatgagcagctcaggactctcgtatgattaa

SEQ ID NO: 7813 - DNA, 216 bp, Zea mays
  Peptide Sequence Number=SeqID_51188
atggccgtgataggttcaacatcggacaagatgtacctctgccaggtaccaaactttgggattttaaatgataaagctgagactggactaataccagaaaggccaacacgcaatgggagtggagagatggcgagagtagcgtgtaccctctgtggcaagaggctggacggtggtgtatctgtgctctcggttgttgtgaacccggtctggtcttaa

SEQ ID NO: 7814 - DNA, 1116 bp, Zea mays
  Peptide Sequence Number=SeqID_51189
atggaccgcctcgtcctcttctcccgccgccgccgccgctggatcctcctcaccgcggccggtgcagcggcggctgtcggcgcgtacaagatctaccaccatccggtcgtcgcggagcgccgccaccgcctcgtgcgccttgccgccgccgtcgcggccatcgccgacgccgccacgtcgtccgccgacgcggcggccctggtggtctccgatctcgccgacttcgtccggtccgacgcggacgaggtcccccgcagcgtcaagcagctggccaagctcgctgcctcccccgaggtctccgccaccgtctccaccctatccgaggcagtaacctccgggatgttccgcggggcgggatcctctagctccgggcccggatccggcggtaccgtggccctctccgatcgtttcgtagacaagctcttctctgattcaggcgagcgtctcgcgtccgcggttgccggaagcttcgctcgccatctcgtgctcgcctattactccgctccttcacctcagggggaggcgtcctcctccccgacggtgtgggtcaacgtggtcgcgactggaaagtgccggaaggcgataagcacctgggttgaggtcttcgtgggcaccgcggttagggagttcattgacaagaccatccacatcaacacctacgaacagatcttcgaagggctcaccaatccgaaacatgatgccaaggtcaaggaattgcttgtttcagtgtgcaatagtgcggttgagactttggtgaagaccactcaccatgccctgtacaatactaatgacaacttggatgcaaatgatagttgtagtggcagtggcaatggcaatggagttggggaaggttgggtggagagggtgtcgagcacattggcagttcctagcaacaggaagtttgtgcttgatgttacagggagggtcacatttgagacggtgaggtcatttctggagtttgttctttggaagctacaagatggggcaaggaagggtggtgactctatggttgacagtgggctgcgtgtcgtgagaaatcctagtcacctaaggcatcatttatatggtggatataccgatctagactccggtgaggcgatagtgtcactcacttga

SEQ ID NO: 7815 - DNA, 1056 bp, Zea mays
  Peptide Sequence Number=SeqID_51190
atggagagtcatgatctccaggcagaaagggaatcacggcttgtgggtggctatgagatcgatggttctggttatgactatggtgctggtaagtggtattctttccgtttggaaaggatggctcgacttagacacactgcacgaaagtccgtcatccccttcttaccctcccgccttgctgagcgtccgcttcgccgtcccgtggccggacagtccagccacttggagagactgcaccaccgcctgcatgaggagcaggaacgtcgacgacaggagcagcagggctcttctttctcgctccaacatgagatagagtctgtgaggagatgctcccccgtgcttcctctggaggcgccccctgcaccaccactgggcgccctagcctctggagtagctgctggaggatgggttgctcgacccatcactcgcgacgctgctcgcgggtgtcacttccatgatgcgctcgataccctgctacgtcggacacttaaccggcgtacttggtccatcgagtatcgctgtgtgatctaccagcatagtcgcggggtttacccggaccgctgggaggcgacctggttggtgcgccgtctggagaaaagtctccaaggtgctgaggtctgctcagagcactattctatctctgagcgggactcagctgaggcggccatgcaagatgctgcacagcgtgcgctttcgcactactgctcggttctcggtggggtagctgacggtcttgacctgaagtattacccccgtcgtccatctggcagcacaggaggcgtgattgtctcacccgtcggtgaggacaatcctaggttgagcagcacagtcaacctagccgtcgtgctaaacacggagctggaccatgcgctagacgagctgagtagggctcgtgctgaggtcgccctgctgtgggctgagcgcgcggaacgtcgtcacctagacgatggttcccccgctcccgtcgggactcagcacccgtaccactcacctcggcgtggacgccagttttatggcaatcccgactgcaagaccaagataaatctagaaccatag

SEQ ID NO: 7816 - DNA, 2246 bp, Zea mays
  Peptide Sequence Number=SeqID_51191
atggcggaggtcctacggaggttcgaggtccaggtccaccagctgacgccgaatgccgtggtggccttggcgaagtatgtttgggcggcgacttcgtatggcggcgcagttgaagaccacccagggctccccgtggccgtcatgtgctcccattattatgtagtgtacccgcagtttgaggtagcggaggatgatgaagacgaaggagcctttcggtgcgctgcccgcatgagtagcgggcatgatttagttgaggaatttgtcgggttgaatcgggtcttcgaattgaaccgcttgccgtacggtggttatcccggggaagacgccgccgaccgtcgtgggaagaaaccgatgggcgttgatggggacatgtgcggcctccgggggaaggatgtcttcgcccgacctccgggagtcttcggcgtgaatgctggagtgatgaacaaagatcggcaagacactgcgcagaagcgtcgggcggttatcaggctcgccgatcctaggcgtgaggcgaagaaagcgcgggggagcgcgaaggctgctgcccccggcaggagccagccggcgctggctgcgaaaccggccgcgcccagattcagcaaggcgtcggagagcgcgaaggctgtcgtcgttggcggaaccaagcctcccccgggcaaagctgcgaaaaggcgggagttgccttcgccggggaaacgtgttgccgacttcggcacgaacattagcgtggatgactattttgttgggtcgggcgagggggaattggttgttgtcccgcctgcggtggcaaccgcggcgtcaacggtggtggttggggtgaagggtgccgcgttctgcgcgagcggcgagattccatcagccgcggccatcaaggacgtggcgagctccatgtcccagcagctgagggaggcgtcgcagcagctgtcgcagcagctaagtcaagcggctgacttcgccgaccgcgtgacgttgggtgccctgactgcggatgtggctgccgaagtcgagagacttcgggcacaacacatggatgtcgtccgggagaagtcagctacggagagcaaaaacctctggctggcggagaaagtggccgccttggaggccgagaagacggacctccggcgccagctggtggaggagaggagggaggctaaccaggccatctctgaggcgcaggctgcgcaggcggaggccaaagtggcgtgggcggagggaagtctcgccagccaacgcgccgaggagtgggaggcaaggttcaacgccctgcgcggccgtgtggacaaggccgaggcctctacacacgcagaggaggagctgttggtgctcccgaccattgtggagggtttcatgtccttcgcctccctcgtcacctgcgagggggccatgaatgcattgtctcgcaagggctgcaggcactacgaggtcttcgaccaatcagacgagaactttgaacgcgagatcttcaaggccgaagaccctgttgtgaagcagtcagcgggggcactttttgataggatgtgggggttgcatggtcgggaggcgatggagcgtgccgaggatgtcgacgaccttgggggtctggctggctcggcgcccgaggcggcgaaggtcaatccagcgctgccctcggatgccaatgaaaacctttcggctgtgcccgtgcctactgtggccggcgaagacccagtgtcggcccctgcgccgacgggcgaagatgtcctgaaggtggtggttgagccggcagtcgaagatcccacggccgccgccgggcctttgcagggttttgagcctgcgcacgcaaccgctactgacaatgctaattttgtggcggcttcgaccatggttgttgaagatgattctgatgattccgtgtctaagttttttgagtctgatgattctgggagttcggttgtgtggacggaagagtcttcggatgaggacttggattattttgcggcattggatgtggctgcggcggaggcttctccgcgtgtgatgggtgctgaagttcttcctgttgcgagcgctgggcgtaggcggcgaagggtggtggcgaaacggagagttagtgaggtggagggtggtcgtcttcgtgtggacggggctggcaaacgggaattgttgtcctcgccgactggggcgagtgtgggagagggggagctgcgaaatctttttgagggtgaggagctgaggataatgctgtttaattacagggagatgggtatcatcccgaaggttgaaccaat

SEQ ID NO: 7817 - DNA, 1332 bp, Zea mays
  Peptide Sequence Number=SeqID_51192
atgcaggcggcatgcaaccgcaccaagggggcgcaccctttcgacttcgacgcgtccagcacggaggcccaggcccacacgtcatgtaaccgacgcgccggttactacgtgcgagaaactgcaccaccactcgcgccagtaccgcgcctcctcgactgcggaaccggtgccgcgactcgaggcgaccctgcgcatgacccgacagtgccaaccgagcacatcggtcatgggtcagtcagccgcgggagaagcggcaggacaggcggcacctttggcaggcgaagcaggcgacgcttcacctccgccataatgaccgcgtcaaaaaaggtgcgccacgtcgttcgatttcgtatccttttcgacttcctctttctctctcttgccacagggaccgggaaaggggatactccgaaagggatccttctccgcgaaggaagcgggccccgagcccccctactgatcagaggttcgaaggctggcccctcggaagtgttcaacagccgcctcagagcactcgggctccgcgcccactactggtcagaggttcgaaggctggccgctcggaagggttcaacggccgcctcaggccacccgggctccgcgcccactactgatcaggggttcgtaggctggcccccgaagggttctgacagccgcctcagagcacgcagagcgagggatgaccctgggtacgttcgatacataaccaaggctcgggctacgctcccgagagtgaggctgacatcagctaagtccagcctcaggcgccataagaagctccgcctcgcccgaccccagggctcgggctcaacctcaacgctggacgatggactccgcctcgcccgaccccagggctcggacacagcctcggcctcggaagacggtctccgcctcgcccgacctagggcttgggctcaacctcgacgctggacgacggactccgcctcgcccgaccccagggctcggacacagcctcggcctcggaagacagtctccgcctcgcccgacccagggctcggactcaacctcgacctcggaagacggacccgacctcgacctcggaggagcctctgcctcgcccgacccagtgctcggaccgaccacgtcacagggagggccatcattaccctacccctagctagctcaggctacggggaacaagaccggcgtcccatctggctcgccccgcctcgggcacaacagggagttccgcctcgcccgaccccagcctcggcctcaggaggaatcatcaccacgcccgacccaggcctcggcctcagcctcggcctcagcctcggcctcgggaggaggccttcgcctcgcccgacctag

SEQ ID NO: 7818 - DNA, 153 bp, Zea mays
  Peptide Sequence Number=SeqID_51193
atgcccagctatgacttcgtcgagctcgtcaatttccccctcaatgtgttcgaagtttgtatcttcggctgtagcggcttcggtagccgcgacctccgaagctacgccttcaacgattgctgcaccttcggcagctgccgttttttgaattga

SEQ ID NO: 7819 - DNA, 705 bp, Zea mays
  Peptide Sequence Number=SeqID_51194
atggtggagaaaggccacgggtcgcgcggcggaatgacggtcacccggtcggccatcaccaagcgaaggaggtggcggcggagcggacaagggcaggcgaagcgggcgacgcttcacctccgccataatgaccgcgtcaaaaaagggatcgggaaaggggatactccgaaagggatccttctccgcgaaggaagcgggccccgagccctcctactgatcagaggttcgaaggctggcccctcggaagggttcgacagccgcctcagagcactcgggctccgcgaccactactggtcagaggttcgaaggctggcccctcggaagggttcgacagccgcgtcaggccactcgggctccgcgcctactactgatcaggggttcgaaggctggcccccgaagggtttgacagccgcctcagtgcacgtagagcgagggatgactctgggcttcgcggagaagcaaccttggccagatcgcctcgccagccgaccggatcgcaggagcattcaatgcaaggatcgcctgacaccttatcctgacgcgcgctactcagtcgacaaggccgaagaaaacagcgccgcctgccctgctccgactgctgtgacacccgccagggtgagactgacagcagccaagtccagcctcgggcgccataggaagctccgcctcgcccgaccccagggctcggactccacctcgacctag

SEQ ID NO: 7820 - DNA, 462 bp, Zea mays
  Peptide Sequence Number=SeqID_51195
atgaatgctgtggtaacttcacacctacctgtctgtttatatagtgctgcaggtaagaaggtgaatcgtcaggatttttacaccgggaaaacagtcgctcgcacccactgcacggtgggccgcaagaaccaaaaagtgaacctgcatggtgggaccgctccgcactcggaaactgtatcgtttctcgacaacgagctcagggaaggtgtttttcggaccttcggcttcctgaagcctaagagactttttttcacggatcaagctcgttacgaaaaacgatctagcaccgcgaaggggctactgttgggaccatgcttcgtcgccgaaggtcctgcggaaagaaacagcttcggcttaagctgctcgtacgtgatgacgaaggtaccattcatgaagcttcggtattacagcatatccgaagatgaagggtcgaaccgacttaaagatagaatgaccttttag

SEQ ID NO: 7821 - DNA, 621 bp, Zea mays
  Peptide Sequence Number=SeqID_51196
atgggtgtgcccaaggggtgtcttggtaggaggggcagtggttggcctcgcagtgccgacggcaagctcaagcgtgctccgagtcctccctcggaggactttggcgactcagagtactcgaaggaggcctcctccgagtctaaccgattgcccactccggcttctcccctggtgtcatccgaggactcggatgactccatggggttgtccaccgtggctcgggcatactggcgctccatcgagcgcacaggtctcggtgggtcggatgagtcgggggtctcctcggacgaggtggactcctctaactcctccgaggagtggagcggggtcgatggtgacggcgagcgcgacgacagtagcaacgacaacgatggcggggacgacggcaacaagggcgatgacgacaagggcgatggtgatggtagaggcggcgacgacaagggcaacagtgacggcagcagcgacgacagtgatggtaggggcgaccgtagcaggggtggcagtagcaagggcgacagcgacaacaacagcggcaacggtgacggcggtggcaacgacggcagtggcggcaagggcgacggtggcagcggcaaggctagtggcacaatgccactggtttaa

SEQ ID NO: 7822 - DNA, 90 bp, Zea mays
  Peptide Sequence Number=SeqID_51197
atgacgaagctgatgcttgccgaaggtgtcgaaaagctcaggaaatggaaatgtaccttcggtcctgagagaagttcttctagcagttga

SEQ ID NO: 7823 - DNA, 1737 bp, Zea mays
  Peptide Sequence Number=SeqID_51198
atggatcccgctgccctcaagtttctcctcgacgagatcggcatgcttttcgacgagcagaacacgaagtgggacgcaaggttttctgagtggaatgcgaagcgggagccagaaccgtaccttggagacgaagttgcggcaaaggaagtagcggccaacgatctgcgcgaggcgcgtgatctggaacgggaagatgtcgagcatgtgaagctccacgaagatagaagccagggagcggccgttgcagggcgagaggtcgcgctcgcggcacgcttgcttgccgctgatgcgtgcgcagccagaatcgtcgactgcgctgcgcccttcgactcctacgtcccggcctatgccgcccagttcgacggcttcgacctcgaccacgcggccttcctcagcaacgggaccaactccgacctcatgggctccgccttcttcaaggaaagagaggaggccgacaagtgcatgccctcgcagagcaagctcgtcatcgacctggatccggcagacaacatggagacgttgttttcggagtcagccttccacgacgttcccggcgccaactacatggaggcgctcaccacatgttcgactccgggcctcattgagtgcgccatggacgagctcatcaggatggcgcaggccggcgagcgcctgtgggtcaatacaggtggtcgcgaggtgctccacgtcgacacgtacgacaacatcttcgccaagcccggcggctcgttcctcggcccagacgtgcacggcgacgcctggttcggcgcgcccccgtcgcgctcgggtgagctggagatcgaggacagggtttccatccacctgctctggttcggtaaggatcgcggcgtgtccggcaccttcgacgtcgacgtcacggcggactttctccgcgcgcaggagctggacatcatgtgcagggcgcgccaggtggtggaggaaggatacgagtacttccccgaccgccagttcgtcaccttcttctctgcccccatctaccaccagctcggctgctccttcaccatcttcaagtcaaagacggatagcagcagcagctcgccccttaggtgttcgaccaaatgtcccagccaggcgctgcaccccattgtcaagctcaatctggtagccgtggtgaatattgcaggcactgggatcaagttttgtggaggatttgatatcaacgttttcacaatggttcatcagattgagggtcaaggagatgtctggggttcattgccagttactctagctgcttgtggtcactatgtgatggttatgatggtaatggagccctgcgcacgagggaagcccttcgatcgcattattggcaagggttactacacggagcgtgttactgctatatcctgcagagcagctgtgaatgtccagcaacgattcttgtgggatccaggtgtcgtggtggcgttcagcaggaaactacgacacacatgtgtcgatggccggacgacgcactgctacgactgcgagctgctgaccggtgaaacactagtaaatttaccggatcaatatgatactacactgatattcaagcatatccagaagtctattctaatcatacacaagaattggtcatcccacgtgttgcttgagagaatgaagaacctttcaaaaatacggaagctcaaagaattgactagttgccttactgccactacagaaactatggcacttgatcactgctttttcatttcatttggctactactcaagtttctag

SEQ ID NO: 7824 - DNA, 879 bp, Zea mays
  Peptide Sequence Number=SeqID_51199
atgtcttctcgctcccttatgcatcgcgtctctccaccttccaagcccccggatgggggatacccgccgtcttctcgcctcatcgttggaggaatgcaactccgtgggagttggtacctttcagccatcgttcggcttcaaggattttcatcatgcagcccgactgcacccctccaccggcggtcacccaagatggtgacctccagcttgatggtgggggaaagcgagccgggctgcggcctctgcccctccctcagcctcaaggatttttatcaccagggctggggaggggactgcagcgtgcctggctttcggacgcgagtggcttcggagccgctcgcggcgccggcgactgccacggcagctggaagaggttcttccgccggcgagatagccaaggctggccacggaccgacctccaactctacggcctactgcccgtccttgcctcacgagtttgggcgtgagcgggggcctcctggcagcagcacccgccctgaggtcagtgctgccgctgttcggccccccggagcagaagtcgtcgtcgtcgctgctactggagcaggtgacggcgcgccgttcgtcggtcttctgttgctccgcaggccctcccccctggagtggggttgttcgtgcctgcggagggggaaccggagttccgtttgtagtggcacttcgaatgccagtgtttttgttcattatggctgtcgaggcctgaacatgcatggtgatgacgtcgtccttcggagtggaggtcttcggaccgtgtcgccgtccgaggctaggtcgaacctcgccaaagttgtcgtcgatgccgagggtgctgctggccccttccagcgtcaagacccgagcctgcaggatcagattgtcttgtag

SEQ ID NO: 7825 - DNA, 507 bp, Zea mays
  Peptide Sequence Number=SeqID_51200
atgcagattattgaaagaaagtgtgaggctcaaaagggtgttgggataaggagaaaaacactcgataaactcaccgatcaacctggaaatctgataccacttgatatagttgaggtgccccgatctttcggagaaaaaacactcgataaactcactgatcaacctagaaatctgataccacttgatatagttgaggtgcccgatctttcgattattgaaagaaagtgcgagcctcaaaagggtgctgggataaggtctaacctgaatttttatgtggttttgtggactgtaggagaaaaaacactcgataaactcaccgatcaacctggaaatctgataccacttgatataattgaggtgcccgatctttcggtgagtggagataatttcgatttggcggaagatgacccttgcgatccgactacgacgagcaagcccgaggcaccaatgcaatcgctgaaccaactccctgtggttaccgaccttgctgatgtgagatcggtctga

SEQ ID NO: 7826 - DNA, 273 bp, Zea mays
  Peptide Sequence Number=SeqID_51201
atgcagattattgaaagaaagtgtgaggctcaaaagggtgctgggataaggactaacctgaatttttatgtggttttgtggactgtaggagaaaaaacactcgataaactcaccgatcaacctgcaaatctgataccacttgatatagttgaggtgcccgatctttcgccgaaagagaaaaacaaggaagcggcattgactcgatttgtggcttatcaaacgggagatggtggcggcgcgttagggtttgaatggtggaagacgaatctctag

SEQ ID NO: 7827 - DNA, 333 bp, Zea mays
  Peptide Sequence Number=SeqID_51202
atgcagattattgaaacaaagtgcgaggctcaaaagggtgctgggataaggtctaacctgaatttttatgtggttttgtggactataggagaaaaaacactcaataaactcaccgatcaacctggaaatctgataccacttgatatagttgaggtgcccgatctttcggtgagccgagataattccgatttggtggaagatgacccttgcgatccgactacgacgagcaagcccgaggcgccaatgcaatcgctgaaccaactccccgtggttaccgaccttgctgatgccagatctgtcttatctcagaatggtgtcaacaagctcctgtaa

SEQ ID NO: 7828 - DNA, 396 bp, Zea mays
  Peptide Sequence Number=SeqID_51203
atggcgcctttggcagggcctgactgcctgtcagtctcactctgtcaagtggcactgaagtcggagtggcgcaggcggtgctgtccttctgtcatactggagcttgttgacactattatgagatcagaccgatctcgcatcagcaaggagcttgttgacaccattctgagatcagaccgatctcgcatcagcaaggtcggtaaccatagggagttggttcagcgactgcgttggcgcctcgggcttgctcgtcgtagtcggatcgcaagggtcattgttgggggccttcggcttccgaaggtcctcaaaaacttgattttacaatgcctctggagtataatatgtggacagggatcttcgaacaagagtccacggtttgaagaagcacgaaaataa

SEQ ID NO: 7829 - DNA, 762 bp, Zea mays
  Peptide Sequence Number=SeqID_51204
atggtgacctccagcttgatggtgggggaaagcgagccgggctgcggcctctccccctcccttagcctcaaggattttcatcaccaaggctggggaggggacgtgcccggctttcggacgcgagtggcttcggagccgctcgaggcgccggcgtctgccacggcagctggaaggggttcttccgctggcgtgatagccgaggctggccacggaccgacctccaactctacggccttctgcccgtccttgccttacgagttttggcatgggcgggggcctcctggcagcagcatccgccctgaggtcagtgctgccgctgttcggccccccggagcagaagtcgtcgtcgtcgccgctgctggagcaggtgacggcgcgccgttcgtcggtcttccgttgctccgcaggccttcccccatggagtggggtttctcgcctgttgattatctgaaccgcttcaccaagcatgagtcgccccgtgtcaaggtgacgagtgagccgggttgtccgtcagcgggaccgatgccggagttgatcagccgaggcctcggatcgggctggcgcccttggaagatggttggccgaggccccaggggtaaccggccgagccgcctgctcgggccggattcccggagaagtccctggaccgcgtcgccgtccgaggctgggtcggacctcgctgaaggtgtcgtcgatgccgagggtgctacagcccccttccagcgtgaagacccgagcctgcaggatcagattgtcttgtag

SEQ ID NO: 7830 - DNA, 513 bp, Zea mays
  Peptide Sequence Number=SeqID_51205
atgcagattattgaaagaaagtgtgaggctcaaaagggtgttgggatatggtctaacctgaatttttatgtggttttgtggactgtaggagaaaaaacactcgataaactcaccgatcaacctggaaatctgataccacttgatatagttgaggtgcccgatctttcggtgagtggagataattcagatttggcggaagatgacccttgggatccgactacgacaagcaagcccgaggcgccaatgcaatcgctgaaccaactccctgtggttaccgaccttgctgatgcgagatcggagaaaaaaacactcgataaactcaccgatcaacctggaaatctgataccacttgatatagttgaggtgcccgatctttcggtgagtggagataattccgatttggcggaagatgacccttgcgatccgactacgacgagcaagcccgaggcgccaatgcaatcgctgaaccaactccctgtggttaccaaccttgctgatgcgagaacgatctga

SEQ ID NO: 7831 - DNA, 111 bp, Zea mays
  Peptide Sequence Number=SeqID_51206
atggctaaagattttggcagcaaaacagtgcaaatagcaatgaatgctatggtaacttcacacctactcgtctgtttatatagtactgcaggctgcgtcctgtgcctataa

SEQ ID NO: 7832 - DNA, 540 bp, Zea mays
  Peptide Sequence Number=SeqID_51207
atgagggatcgggaaaggggatatttcaaaaggatccttctcagcgaaggaaacgggccccgagcccttctactgatcaggggttcgaaggttgcgccctgcgggattcggcaaccgccccagagcactcgggctccgagccctttactgatcaggggatcgaaggctggcccctcggaagggttcgacagccgcccaagagcatgcagagtcagggatgaccctaggtacgtccgttacatggccgaggcttgggctacgctcccgaggtaccctaggacatttctgagaccagcgggaatggtttgtaatggaatcccaccgaagggaggcaccgagccctcggaccctatcgaatgggtccgggtccagcaaatcacccgcagaggctcggaggctgctctcgcaccaggctacgacaaattgttgaccacgtcgacaaaccagcttaaaaactcggagcctgaccatgcacccgggctgcggccaggccgcatgagggaacaacaaggccaaccgaggaatcacaaaaagaattaa

SEQ ID NO: 7833 - DNA, 432 bp, Zea mays
  Peptide Sequence Number=SeqID_51208
atggtcccacacagcttgacagaaattcagaatgcacgtggggtcatggatgttctttcagagatgttaaatgctatcgatcctggtaacagagagattgttcaactggaccatacagttccagaagttctagtcatccctggatttctaaatagtactcaacatgcagggtctaaggcaggaggtcattgtggaccttgtggaccaatgtcgttcatacaagcaaagagtggtgcagcttgtcaactcaacatcggtggtctttcccttcctgtcaagtgcgtcgggcccgagggtaggaggaccgcggctccgaagatcgtaaccgccgtccgtgttgccgaccgggttatgcccccaggaacggcgttcttcgtcaacgggttatgccccctgttgccgactagagagagagagatagatggagaatga

SEQ ID NO: 7834 - DNA, 465 bp, Zea mays
  Peptide Sequence Number=SeqID_51209
atgcagattattgaaagaaagtgcgaggctcaaaagggtgctgggataaggtctaacctaaatttttatgtggttttgtggactctaggaaaaaaaacactcgatgaactcaccgatcgacctggaaatctgataccacttgatatagttgaggtgcccgatctttcggagaaaaaaacactcgataaactcaccgatcaacctggaaatctgataccacttgatatagttgaggtgcccgatctttcggagaaaaaaacactcgataaactcaccgatcaacctagaaatctgataccacttgatatagttgaggtgcccgatctttcggtgattggagacaattccgatttggcggaagatgacccttgcaatccgactacgacgagcaagcccgaggcgccattgcaatcgctgaaccaactccctgtggttaccgaccttgctgatgcaagatcggtctaa

SEQ ID NO: 7835 - DNA, 291 bp, Zea mays
  Peptide Sequence Number=SeqID_51210
atggtgtcaacaagctcctgtaaaaaattcagattttcgaacaaccgagcgaaaagttatgcccggtttaaggaaggtgaaaaaacactcgataaactcaccgatcaacctggaaatctgataccacttgatatagttgaggtgcccgatctttcggtgagtggagataatttcgatttggcggaagttgacccttgcgatccgactacgacgagcaagcccgaggcgccaatgcaatcgctgaaccaactccctgtggttaccgaccttgctgatgcgagatcggtctga

SEQ ID NO: 7836 - DNA, 1167 bp, Zea mays
  Peptide Sequence Number=SeqID_51211
atggggagcacccgcgttgccttcgtcttgctgccgttggaggagagcgacctcgcgggggttggcgcccttcagccatcgctcggcttcaaggattttcatcatgcagccgactgcattcctcaccaatggtcatccaggatgatgaccaccagttcgatggtggggagaagcaagccgggctgcggcctctgccccgccctcagcttcaaggatcttcatcatccttgctgtggtgggggtcggtgcctgcccgtccgcgaggacttgagtggggatctgccggtgcaggctggggcggccaccattcgttggcgtagcgccggcgcgcaggtggctgctgtcgtcggtgctgaggtggtggtcgccagaggaggtttctccgccgacgagaccatcggcgccacccgcggacagacctctagctctttggctttgatagcttgtcctcgcccctcgagcggggacgtgggcgagggccttcttacagcagcgtttaccctgagtggtcgtcggcgagccactcggagtttgttatcccgcaggccctctggtgtggagaacctctggccgctctacgatgagctggagccggaggcagcggtgtcggtgtggacagaggcggagtcggctcgagaagaggcttcgtcggcccaggagcaggtggcttcccgggccgaggaggtgcagcagcggcggctggggcttggccaggttatccgcgagcgggaccaaccccgaagtcacgctgccgaggccgtgagccgggctgaggtcctcgagggacaactggatgaggctacggagcgaccaaccgaggtgtctgctcgagccagggccctggcggaggccctggctacgatggcccgagcgcggtgttggcgtcctccttcgaggtggcgatccttccgcccgtgtcgccgtccgaggccgggccagattccgccaaaggatcccgctatcgaagcagtcaaaaagcgcaaaagacgttctggcagaaagacttttttcgaggaaaattttgacgcagagggggctcctctgagctttccagctgaacttaactttagctgtgatgagcttcttcagctgcagctgagctggacttcaactgagttgaactttcaactccagctgaacttcaacttcagctgtggacctctttga

SEQ ID NO: 7837 - DNA, 492 bp, Zea mays
  Peptide Sequence Number=SeqID_51212
atgtccatttatgagcaccaattcggatttgaaattcaaaatcagaaagtggacagacattggaaaactgagtatcaggccgcggaccgtccgcccatggaccgcggaccgtccgcggaatcaggaactggacagtccgatcagcaatacagaccgtctgaaatcatcagggcgcggaccgtccgcgacaggcatggttttggtggtctccgcaagaaacttgcaggtcgctttaaatcaaagcgtcctcgtggaggtgatgatgactatacaccgaccactgattcagaggcccaatcctcagctgggggcactgactctatggatactgaggactttcctcatgttcatcctgattatcccattgacacctctggatggacctttccaaagcgcaggttttctatggctgagtactgctctaggcggactgtgaaccagtacactctgccatctgataccaatatccaatttttccacactcagctgtag

SEQ ID NO: 7838 - DNA, 1308 bp, Zea mays
  Peptide Sequence Number=SeqID_51213
atgcaggcggcatgcaaccgcaccaagggggcgcaccctttcgacttcgacgcgtccagcatggaggcccaggcccacacgtcatgtaatcggtgcgccggttactacgtgcgagaaactgcaccgccactcgcgccagtatcgcgccttctcgactgcggaaccggtactgcgactcgaggcgaccctgtgcgtgacccaacagtgctagccgagcacatcagtcatgggtcagtcagccgcgggagaaggcgcgacggtcgatacgaccagaaatgggccggcagtaatggcggtggcaggcggacggaagcagcggtcaagtcgtcagcaagctcacgccccctcctgggacatcgagagaaccctctcccatggcgtgaagacgacatgacaggcggcacctttggcaggcgaagcaggcgacgcttcacctccgccataatgaccgcgtcaaaaaaggtgcgccacgtcgttcgatttcgtatcattttccacttcctctttctctctcttgccacagggaccgggaaaggggatactccgaaagggatccttctccgcgaaggaagcgggccccgagcccccctactgatcagaggttcgaaggctggcccctcggaagggttcaacagccgtctcagagcactcgggctccgcgcccactactggtcagaggttcaaaggctggcccctcggaagggttcaacggcctcctcaggccactcgggctccgcgcccactactgatcaggggttcgtaggctggcgcccgaagggttctgacagtcgcctcagagcacgcagagcgagggatgaccctgggtacgttcgatacataaccaaggctcgggctacgctctcgagcctcgggcgccatagaaagctccgcctcgcccgaccccagggctcggacacagcctcggcctcggaagacggtctctgcctcgcccgaccccagggctcgggctcaacctcgacgctggacgacggactccgcttcgcccgaccccagggctcggactcagcctcgcctccggaagacgacgaactccgcgcccgaccccagggctcggactcagcctcggctccggaagatgacgaactccgcctcgcccgaccccagggctcgggctcaacctcaacgctggacgacgaactccgcctagcccgaccccagggctcggacacagcctcggtctcggaagacggtctccgcctcgcccgacccggggctcggactcgacctcgacctcggaggacagactcgacctcgacctcggaggagcctccgcctcgcccaacctag

SEQ ID NO: 7839 - DNA, 474 bp, Zea mays
  Peptide Sequence Number=SeqID_51214
atggtcgccttccaagggggttaccccccttttaaaggcggctctccctacttgcgtccccagccgtcatgggctaagtcttctccaacacactccaaggtcctcccctacggcacgggggctgggtccccacacgtcgtgcaagccggctcaaagcagaagaagccaaaccgccatgcgcggcgacgcctctggcaggagaagcgggctacgcttcgccttctccataatgaccgcgtcaaaaaagggaccgggaaagggggataccccgaaaaggatccttccccgagaaggaaccaggctccgagcccccctactgatcagaggttcgaaggctggccccccggaagggttcgacagccgcctcagatcgcgtgggccctacacccactactggttagaggttcgaaggccggcccctcagaagggttccacggccgcctcaggctactcgggctccgcgcccattactga

SEQ ID NO: 7840 - DNA, 1210 bp, Zea mays
  Peptide Sequence Number=SeqID_51215
atgcagctcggctgcacccctccgccggcggtcatccaagacggtgacctccagttcgatggcgggggaaagcaagccgggctgcggcctctgcccctccctcagcctcaaggattttcatcatcagtgctggggaggggactgccgcgtgcctggctctctgacccgagtggcttcgaagccgctcccggcaccgccttccgccacggcagctggaagagcatccgccctgaggtcatcgctgctgctgttcggccccccggagcagaagtcgtcgtcatcgccgctgctggagcgggcgacggcgagtcgttcgtcggtcttctgttgctccgcaggccccccaatcgaacccctcggtcgctcctcgatgagccgaagccaggggtaccggtgtcagcacggacagaggcagagttggctcgaaaagaagacttggtcggccggagcctggccgcgtcgtccgttagcgggaccgacgccggagttgatctaccgaggcctcgggccaggctgatgtcttcgggggacagctggccgaggcctcggtgtgaccagccgagccgcctgctcgagccggattcttggagaagaccctggcggcgatggcccaggcgtgatgatgacgttgtccctcagagtggagatcctcggaccgcgtcgccgtccgaggctaggtcggacctcgctgaaggtgtagttgacgccgaggtcaagaaggcccgaagaatcgcttcggcagaagagctttcgagcgtgaagacttgttcggtccacggaatcacttatccgaacgcgagttacttatcgcagaaggtgatgagtgagaggcagctccactataattcaccggactgtcccggtgtacaccggactgtccggtgctccaaggaagagcggcctcaggaactcgctagcttcgggaaactgcaacggctgctccgctataattcaccggacatgtccggtgtacactggactgtccggtgtaactacggagcaacggctatttcggcgccaacggctacctgcagcgcatttattgcgcgccagcgcgcgcagaagtcaggcacgcccatgctggtgcaccggacactctacagtacatgtccggtgcgccatcggacatccaggcgagcccagaagacagaactccaacggtcgaatcccaacgactttggtgacgtggctggcgcaccggacatgtccg

SEQ ID NO: 7841 - DNA, 528 bp, Zea mays
  Peptide Sequence Number=SeqID_51216
atgaacaccagttcgatcaatgcagcttccagttggagcattatgaaggaggagttcacatttcaagcacatgatcgccctttcaataattgtcatgcttccaccattgtagaggttgagaaagaaatttttttggtttcatattttggtggatccatagaaggggctcctgatgtcaaaatctggacacagagatacagtgatggctattggcatcctccagtagtagctgatgaagaaaatgcgacagcaatgtggaatcctgttttatttcagctcccctctcatgagttgcttctcttctacaagattggtgaacaccctcaaaaacctaacgtgttcagctggagcggtgccatgaaaagatctctcaatggtggtatgtcctggttagagagggagcaattaccacctggtattcttggccctattaagaataagggcaaagatcaacttgggtcaccaaatctcaaaggcacagaaagtctgcaagagctccaacagataaactcccaggaatatcattaa

SEQ ID NO: 7842 - DNA, 1179 bp, Zea mays
  Peptide Sequence Number=SeqID_51217
atgactgccagatctacctgggtggcgggattcgcggcagggccacggtcacgttcctcctcgaggcatcggcaccgccgccattcggcgacttggagttggagcccatcagcgccgccgtcccgcctcacccgcggacgccgtcgcccgatgccggcagagaggagctcaggacaggagcccccgtgcctgcgcaagaatttcctcgtggcgctgggcctgcgcgccgacctgcccgtgcacttcatcgacgacgagaagtgcttgaaagccaccgacctggaccctcaccagaaccgggcgcttggcgtgcggatggttgcaggatttgcagcgggggagtgctgcgcgcgggcgcttcacggctggggagtacggcgggggagtgcttggcgcgagcgtgcatcgcggcggtcggcgtgcgtgtggacgacggggggatgcgggaggtggcgtgattcgcggagggggagtgctgcgcgcgggcggcgtgcgtgtggtaggcccggcgtgcgggagaagcggaggcggacgtgcatcgcggtgggcgtgcgggagaagcggcgagatgcgaccaatttgctcgcgcctgtagagcctggaccagagttgtcggggaccataattaggggtacccccaagactcctaatctcagctggagccataggaaactccgcatcgcccgaccccagggctcggactcgggcttagccccggaagacgatgaactccgcctcgcccgaccccagggctcggactcgagctcagccccggaagacaacgaattccgcttcgcccgcccccagggctcggactcgggctcagccccggaagacgacgaactccgcctcgcccgaccccagggctcggactcgggctcagccccggaagacgacgaactccgcctcgcccgaccccagggctcggactcagccctggcctcagccgacggtctccgcctcgcccgacccaggggctcggactcgacctcggcctcggaagacagactcgacctcgacctcggaggagcctccacctcgcccaacccagggctcggaccgaccacgtcacaggaggcgccatcattaccctaccccaagctaactcaggctacggggaacaagaccggcgtcccatctggctcgccccgggaccccccggggtcgaaacgccgatag

SEQ ID NO: 7843 - DNA, 115 bp, Zea mays
  Peptide Sequence Number=SeqID_51218
acattgtggtacaggtggttatgagattgatggttttggttatgactatggtgctggcgaagatgaagttgtggaaggagacttccaggagttccaagactacgacgagttctag

SEQ ID NO: 7844 - DNA, 471 bp, Zea mays
  Peptide Sequence Number=SeqID_51219
atggcggcgggcgaccggggggcgctgatgtggaggaggggaaaaaggatactgccagtattttcttggaagaacaaaatggttggacttgcatcttgtggagaaatgctatggcagctctctgtagcagcatgtggtcttcagcagagagagaaaatcaccatgtggtcttcagcagagagagaacatctggtgctgcacttcagcaggccatgcatttctcctacaaagtgtgaccttatcaatatctttagccaatacggtcatgtcaatgaagtgaagccagatgttgcaaacagtgccagctctgcccaggtgatcttcaagaggcgcatggatgctgaggcagcgtttgcaggtgctaggaagatcaatgcccttggacctgcccttgtgagctttcgtctcactgacttcccagctagtgcttcaggaaataaagcttcccatgttggatcaaagagtgaatag

SEQ ID NO: 7845 - DNA, 1461 bp, Zea mays
  Peptide Sequence Number=SeqID_51220
atggtcttactacactcggcgcggtaccagcagtccctgcgacgctaccacgcccgaggggtccggtcccgagacctccaggctcggatcttaacagctgaagggagcagcggcaccctcggcgtcaactacaccttcgacgagggtcttctccgagaatccggctcgagcaggcggctcggccggtcaccccgaggcctcggccagctgtcccccgaagacatcagcccggcccgaggcctcggcaactcaattccggcgtcggtcccgccagtggacgacccggccaggctctggccgaccaagtcttcttttagagccaactctgcctctgtccgtgctgacaccgctacccctggcttcggctcatcgaagagcgaccgaggggttcctttaactaagcaagagaagcctcggacatggtgtctcaaacgcgaggtcgaggcgggcaggagcagcggtcacgtcgtcagccaagctcacgtcccatccaggggcagtgggagaaccttctctcacggcgtgaagacggcgcgcccgcgtttcgttcctcgaacggctcgcgcacgcgcaacggccgccccgcgaactactcgccccgtcgcattaactccgcggtgggacaggcggcgcctctggcaggagaagcaagcgacgcttcgccttcgccataatgaccgcgtccaaagagccgcctcagagcatgtgggccccgcacccactactggtcagaggttcaaaggtcggccccctcagaagggttcaacggccgcctcaggctactcgggctccgcgcccactactgatcaaggcgggaacgatcttgtaacggaatcccatcagagggaggcatcgagccctcggaccccgtcgaaaggggaccgggtccggcagatcacccgcagtcacctcgccgctccactgaccggcctgacaaaaggacagcgccgcctgcgccgctccgactgctgtgccactcgacagagtgaggctgacaggcagccaggcccggcctcaggcaccataggaaactccgcttcacccgacccagggctcggactcgggcttagccccggaagacggcgaactccgctccgcccgacccagggctcggactcgtgctcagccccggaagacggcgaactccgctccgcccgacccagggctcggacttgggctcagccccggaagacggcgaactccgctccgcccgacccagggctcggactcgagctcagccccggaagacgacgaactccgtttcgcccgaccctagggctcggactcagccctggcctcagccgacggtctccgcctcgcccgacccaggggctcggactcgacctcggcctcggaagacagactcgacctcgacctcggaggagcctccacatcgcccaacctagggcacggaccgaccacgtcaacaggaggcgccatcattaccctaccccaagctga

SEQ ID NO: 7846 - DNA, 612 bp, Zea mays
  Peptide Sequence Number=SeqID_51221
atggaccctatgctcggcgccatcatcattggcgccgagcatgtgtgtgccggcgccaatactattggcgcttatacgtcagacgccgagatgtctaggcgtggtaaatatgctaaacaaaggaagggtcctttgaccggaactgccttcgacccgctgcctttgccaagtggtgttccagtgcctatgtgtttttgtggtgatccttgtaaggtcgataagtctgaagatcatgacacctatcgacagaggtattggatgtgtgctaactttgcatttgagccaactattgttcaacgtcggatgaatttaatgactcctccaccgctatgtgattttgagcagtggattgacacagaaatatcagagaaagataagaagtggctggagaatcttcaaaagtgggatgcagaggacaaagagaggatgaaaaaaagacgagaggagcttgctgccgagcaacaacgtgaagacgaagagaaaatgaggcgtgttgctgaatgcagggaagataaggagaagaagcttgagcgtgcacgtcgtgcaaaggaagcaatggaggagaaccctgatgcatttcacaaaggcaaatggccccgttgtactcagtag

SEQ ID NO: 7847 - DNA, 180 bp, Zea mays
  Peptide Sequence Number=SeqID_51222
atgccgagaaatatgggtaaatcggtttaccttgcaaggataaaactcgattcgaatcatctgcttctcgcaggttctctggaggacatggttgctggagtgacttggccgtccaccttaccaccgggttggactgttgagtgggaccctgcctcggctgaggaggagcatgaggagtga

SEQ ID NO: 7848 - DNA, 798 bp, Zea mays
  Peptide Sequence Number=SeqID_51223
atggaagaaactcacctccacgtgttcgacgccttctgcccgcgccagagcacgcctgcgcgcgctcccgcgtgcccagcgccgcgcccgagccaaactagcgtcgtggcccgcgcccgagcctataaaaccctcccaggcttcgaatacacccttccgcgcaccctcaaaacctcaccggagttagctcgtcgccgtttgcccgtgcgcagcgagtccgcggccgcccaatccccctgtcaccgtagaccggccagcagagccattcccaaccccgtccagccctcggagaagactgtgcacgactccgtgaagctccccgagcgaggaatcagagtttgcttcgccggagaggccagtccacgctcgccggagctctcaaccccgccggagtacgtggaccgggtaaaccactcagccatccttcgattccttgtgcacacagtcgctacgttacaccgtgaagctcaccgtgcccttggattgaaccagttcgccgtagtttggccggtacactcgccgccgacgagcacacccgcctgcgctcgtggaccggacgattccggccatccccgacgtcaagccgtacctcgacgtgaccgccagagtctccccgagccaacccccacccttcaccggacctccctcgccgccgactgtaatcttgctgacggagagtacgtcctcgtgccggagcaaggagctgctcaggaggtagccccagacccagcaccagagcctgcaccagaggacctgcctgccaccgctttggaaggcaagccccggttttatgcataa

SEQ ID NO: 7849 - DNA, 726 bp, Zea mays
  Peptide Sequence Number=SeqID_51224
atgacccccgaattggtggacgccgcgacatccacacgctctggtgaggcatcgggcggatctccgagcggtggagaggatgagcagcgcgcggcgaagggggcaacgccgagctccatagatggcgaaggcctggcacgcgcggccatggagctcgcgggggcaccctgtacttgggtttgtgggagctcaaagggaaggttggaggctcgcccatgggggggagctccacccggctgccaggaagaggagcaggggcactgggtgccgagcgccatggatgggcagaaggagaggaggtcgtgcgtccaggatatatggccagggattccagcgcgcgcggcgaagaagtcgcgttccgttgagggagaagaccgagcgcggttcgtggaattgctccccaagtcccagcgacgaagtagcgacgtctgttacggagctcgagcggaagaaggaactggcgtcccgggcccacgtggtagagacacagggcgcccacagtgttgtgctattgggctggcacggcaatgggccagcgcgaggaaaagggagcgtagatgggccagcgcggggagaatacagcccaaggtgccaagtaggttagaatcccttgctaggttaaaattgaggggttatgcaactatcggatggttaagatggaattgtggacattactccacaactcatcacattcaatcaaagaaccaaatcaaacagttatcataa

SEQ ID NO: 7850 - DNA, 432 bp, Zea mays
  Peptide Sequence Number=SeqID_51225
atggcgcctcctgtcacgtggtcggtccgagccctgggttgggcgaggcggaggctcctccgaggtcgaggtcgattctgtcttccgaggccgaggtcgagtctgagccctggttcgggcgaggcggagttcgtcgtcttccggggccgaggccgagtccgagccctgggtcgggcgaggcggagttcgtcgtcttccgaggccgagcccgagtccgagccctgggtcgggcctttgcaactttgtgctgatgggggttaccagctgagatttaggagtcttggggtatccctaattatggtccccgacaacgataaaataggggaatattcacatggatctgaaaacataaaggcgctaaatagcggtgatgcccaactcaccgacgacctagcatctaagggcgatatatatcagccatatttgcgctaa

SEQ ID NO: 7851 - DNA, 1407 bp, Zea mays
  Peptide Sequence Number=SeqID_51226
atggggggcgcccgtagttcttctgccttgtcgtcgttggagaaacgcaacttcgtggaagttggcagcccgactgcatcccctcgccggtggtcgcccaagacggtgaccgccagtttgatggtgggcagaagcgagccgggttgtgatcttggtcccgccctcaacttcaaggatcttcatcatccttgctggggtggagagcgaggtgagccggggctctacctcccgcgcgggttcgtgggtcaccttctccctcagcattcaagggagagggcgctcaccggcctagcgggaggatcggacttcgacaacgcggggctggtcggcggcgagcgtcgtcagcttcagcgcgttgggctcgctggctcagctggctctggctcggctcccggtgccccctctcgccgcgagagcggttgtcgcgccgcgcgcaccggaggaccgcccaagacgtcgcgcgctgctagggcggcgttcgtgttctggggctatcccgcctttgccccggtatggcgcctccgcgcggaggtcggtgcttcgctcgtccgggaggattcgagtggggatctgccggtgggcagatggctgccgccgtcggcgctgaggtggtggcggctgaagaagtcctcgtcgccgacgggatcaccgccaccatccgtgccccgggcttccggctctttggctttgatagcttgtcctcgcccctcgagtggagacgtgggcgagggcattgttgcagcggcgtccgccctgaggccatcgccgctgcagtttggccacctagagcagaggtcgttgtcgctgctgccggagcgggcggcggtgagccacctggagccttgtcgccccgcgggccctccaatggaccctcgaccgctcttcgatgagccaaagccggaggcagcggtgttagcatggacagaggcagagttggctcgaaaagaagactttgtcggccggagcctggccgggccatccactggcgggactgacgctggagtcgagttgccgaagccacgagccggactggtgtcctcggagaacagctggctgaggcttcggggcggccggccgagccgtctgctcgggccggattcctggaggagaccctggcggcgatggcccgggcgcggtgctgacgtcgttcttcggagtggagatcctccgaccgcgttgccgtccgaggctcggtcggacttcaccgaaggcggagttgacgccgagggtgctgctgctccccttccgtcgacgtctgagcctacaggatcagttcatcttgtagtaattgtctgtgcgagcgagagttacttctcgcggaaggtgacgagtgagaatcgcttatccgagcgtgagttacttatcgcaaaaggtgatgagtcaggtatccgtatcccggaggcatag

SEQ ID NO: 7852 - DNA, 672 bp, Zea mays
  Peptide Sequence Number=SeqID_51227
atgcaggcggcatgcaaccgcaccgaaggggcgcaccctttcgacttcgacgcgtccagcatggacgcccaggcccacacgtcacataaccggcgcgctggttgctacgtgcaagaaactgaaccgccactcgtgccactactgcgcctcctcgactgcggaaccagtaccgcgactcgaggcaaccctgcgcatgacccaacagtgccaaccaggcacatcggtcacgggccagtcagccgtgggagaaggcgcgacggtcgatacggccagaaatgggccggcagtaatggcggtggcaggcgagcaaaagcagcggtcaagtcgtcagccaagctcacgtccctcctgggacaacgggagagccctctcccatggcgtgaagacggcgcgcccgagaagcgggcgacgcttcaccttcgccataatgaccgcatcaaaaaagggaccgggaaaggggataccccgaaagggatccccctccgcgaaggaaacaggccccgagcccccctactgatcagaggttcgaaggctggcccctcggaggggttcaacagccgcctcagagcgctcgggctctgcgcccactactggtcagaggttcgaagggtcggcccctcggaagggttcaacggccgcctcaggccactcgggctccgcgcccactactga

SEQ ID NO: 7853 - DNA, 825 bp, Zea mays
  Peptide Sequence Number=SeqID_51228
atgaccgagccgagggactcctacgcctccgggatacggatacctcactcatcaccttctgcgataacaccacgcccgggggccatcgccgcccaggtcttctctagggaattcggctcgagcaaacagctcggccggccaccccaaagcctcagccagctgtcccccgaggacatcagcccagctcgtggccttggcaactcaactctggcgctggtcccgccagcgaacggcccagccaggctccggccgatgaagtcttcttttcgagccaactctgcctctgtccacgctgacaccgctacctccggcttcggctcatcgaagagcggccgagggtggcctgccgccgcccgctccagcagcagcgacaacaacctccgctctaggtggccaaactgcagcggcgatggcctcagggcggacaccgctacaacaatgccctcgcccacgtctccgctcgaggggcgaggacaagctatcaaagccaaagagccggaggcccggagcgcggatggtggcggtgatcccgtcggcgacgaggacttcttcatccgcctccacctcaacgtcgacggcgaaagtcatctgcccaccggcagatccccactcggatcctcccggacgagcggagcaccgacctccgcgcggaagcgccgtaccggggcaaaggtaggacagccccagaacacgaacgccgccctagcagcgcacgacgtcttgggcggtcctccggtgcacgtggcgcaacgaccgctcttgcggcaggaggaggcaccgggagccgagctagagccagctgagccagcgagcccaacacgctga

SEQ ID NO: 7854 - DNA, 129 bp, Zea mays
  Peptide Sequence Number=SeqID_51229
atggcgagagtagcctgtaccctccgtggcaagaggatggacggtggtgtatctgtgctctcggtgaagaagcagcaaatttttgttgcttctgttccaaggtggtaccgaaagaagaatcaagactga

SEQ ID NO: 7855 - DNA, 393 bp, Zea mays
  Peptide Sequence Number=SeqID_51230
atgcacaagctggcgcagatcttcctcctgggcctcgtcgctgtctgcatggacggcaccatgggggaccagttccgcagcccatccacggtggccgtggacctccgcagggagatgctggactacatcacacagcggagcaacagcttcatcgcggacgcactgatcgagtcggaggcaaaccaggacacgcccggggctgtggcagaacctcccaagtcattaggcccacctacagttgtccttgtccaacggacctcagacaaccctgcaggtgcacctgatcacttgacaagttcggtatctgtattctttaccttgcccaagagtgtttcacccgtcatgcagatattacaacacattggaggaacgagtatgcagaagcagttataa

SEQ ID NO: 7856 - DNA, 474 bp, Zea mays
  Peptide Sequence Number=SeqID_51231
atggcgcccaagcggaaggcctcgagttcatccgctgcggtgattccccccatcgaccccaacagccagttgcctttcgcagtttgggccttagagtgcgaccctctgctgaagaagttaacgccttggttgcctcgctcggggaaattcctgatgatgaacggcaagtccactttgagaaaaagaaaaagagacatcttcggcgagtatctagtttggatcgggacattggtccttcaattcctgctgctgaaggagtgcctgtgcctgaatttactgatgttgaccccaatgggtgtgctccacctgctgctgaccccaatgggggtgctccatctgccgctgaccccaatgggggtgctccatctgctgctgaccccaatggggatgctccatctgctgctaaccccaatgggtgtgttgtctgtgttgctgatgaaaacgacggggaggaagaagatgaggtccctttga

SEQ ID NO: 7857 - DNA, 1884 bp, Zea mays
  Peptide Sequence Number=SeqID_51232
atgggaggacttggggtttccgatggctttgctagagagttgatgaggacgtgcgcggccccgggggaaaggatgtcttcgcccgagctccgggagtcttcggctcggatgctaaaggttaccgggggttgctggcctaggaatgttcctatcccccgcgcggccagcggggacgtttttacatctcgcatggttcgcaaatggagagtttttccttacgggcggaatattgctgctgttgtgtcggcagtgatggacaaggatcgccagggggctgcacaaaagtggcaggcggctatcaggattgttgaagccaggccaaagaggcaaaagcgggggtcggcgacggctgcggcccccggcggaggcaagccgccgctggcggcgaagtctggcgtccctgcatctagcaaggcgccagaggcagcggcgggcgccggaggctccaaaccggcgaaggctgtgccgccgctcagcagggtggcggaggccgcgaaggcggcccgagcgttgccgtcggcaggcaagcgtgtcgccgacttcgccaacgacatttgtgtggaggactatcttggtgggtcggacgaggcccagcttgctacggttgcgcctgccgcggcgatcgcgacggctgccatagtgccgaaggcgaggggcgaggcccttggctccggaggcgaggtgtcggccctcgcggttgtcagggacgaggcggacgcagcgacccgccggctgaaggaggtgacggaggcactgagtcaggtggctgacttcgccagccgtactgcgtcgggggccctcacggcagctgtgtctgccgaagtcgagagacttcggacgcaacatgctgacgctgtccgtgagaagtcagcctccaacagcaagtgccgtaaactgacggacaaggcggaggccaagctggcgcgggcggagggcaatcttgccaaggagctcgccgaacatctgcaagagcggctcaccgccctggagagccgcgcgaagggggccgaggccgcgatgcgtgcggaggccgaacagacgcgcacgcagcttatggatacatatcgaggagctgctggaactccccgctgtcgtggggggtttatgtcgtacgcctccctggttacctgcgagggggcgatgaacgcgctctcctgcgaagggtgccggcacttcgaggtcttcgaccaggtggatgaagattttgatcgagatgtctataaggttgaagacctcgtggtgaaggattctgccgggggccctctacgaccggatgcgttgcgtggcgagcgggtggacgacctcggggcgttgaacagcgcgctgtctgacccggagccgacccctgcggaggccgtgtccggggtcgccctggagccaaccccggagaccgcggcgatcgcgacggctgcccccacatctgctgcggccggcgaagacctgcccccaaaggtggccgaaggcgaaccggatgccctcgcggctgctgcgccgagtgctgaagatcccgcggcggtggcggcggaaacaacagcggaagcagcggcggagccaatggcggaggcttccgcagcgccagggccttcgcaggttcaagattttgggcctgcgcacgcaactgctactgctaaatttttggcggcttcgaccgcggaaggtggtaatgaatgtggtggatctggatctgaattttctgagttttttgatgttgctgattctgggagctcggttgagtggactgaggagtcgtcggaggaggatttggactatttcgcggctttggatgtggctgcggcggagacctcgccgcacgctgcggacgcgcaagatgtgccaggtcctagcacccgggcgccgacggcgaagggcggttgcaaagcgtag

SEQ ID NO: 7858 - DNA, 558 bp, Zea mays
  Peptide Sequence Number=SeqID_51233
atgctggtctggcttcctccactcagacgcagaggaagatgcctgaacctcgtgtcttgcagctactaccgagtgggggctgaagcagcccgatatacgcagcgaagcaaatcatcggtccaacagccacacgcaaggttgggaacaggcgtaactcttacccgatcagcgatctccttctctgaaaaacaacaaataagcaagggtgagtacttatgtactcagcagcccacctttacccacggaatggggaaatcagatataatgcatggaatatgtggagctcgggatattttgcagaaattgcaatatttgatgcagatatcaaggagtataaaaattgattgcggcaagcggcttggtggccataacaatttgtctcaaaatcatattattgggggtctgcttcgtagccgaaggtcctgtaagaagaaacaccttcgaaagatcagcatggaaataatgccgaagctaccttacagggaacttcggcataatgtcaagcctaagacaaagggttgcaccgacttaaagatgaaaagacagattgacccatga

SEQ ID NO: 7859 - DNA, 1443 bp, Zea mays
  Peptide Sequence Number=SeqID_51234
atggcctcgctagtccatcccgagcgcatccagtccaagggggcactcaacctggtgcgcaacctgctcggttggagcgcgctagcgttcgccggaaggatccgcgccggcgccactcccctcggcgacctcgctgccggggagttcgtgctcttctcctacctctcctgcggcgccgacgccaacgaccgcctcgtcctaccgagcaatgggccaaccctcgaccgcaagctctggaggacccagccatcgctatcgccagagctcctgctcgtgctggacaggatcgagacctttggcgaccgcgtggggccgggaaccgatctgtcctgggaggggctggaagtcctggtgaaggggatcactagtgagtcctttatccctgaatccctgatacttccccagggcatcccaacgctctgtgatgacctcgcgctcgcttccgccacggctccccgccccttggataagggtaaaggggccgcaagcagctcctccgcccgaggcggcgccgaggtgtcagaggaagagaggcggcgccggctgcgtcgcgccgacgggtcgtttgtttcggaccccccggtgggaccgaggaggtcggctctcagaagcgtcataaggccgctggcggggccgaggagaccgactcccaggcccagggcacgcagaggcgcgtcggccctccgccaccacaaccatcgggtcccccgccaccacaaccaccactatgacggaacctcccaattggtaacccccatcagcacaaagctacaaaggcctgatgggcgcgattcaggtcaaggccccgtccactcaagggacacgatctcgcctcgcccgagcccaacctcgggcaaacaggaaaacagcgccgtctgccctacttcgactgctgtgccactcgacagagtgaggctgacaacagctaagtccagccccgggcgccataggaagctccgcctcgcccgaccccagagctcgggctcaacctcgacgccggaagacggacttcgcctcgcccgaccccggggctcggactcaacctcgacgccggacgacggactccgcctcgcccgaccccagggctcggactcagcctcgacctcggacgacggtctccgcctcgcccgacccccgggcccggactcagcctcgacctcggaggagtcaccgcctcgcccgaccccgggttcggaccgaccacgtcacagggggcccatcattaccctacccctagctagctcaggctacggggaacaagaccggcgtcccatctggctcgccccggtaaaacaagtactgatggcaccccgcgtgctccatgacgacggcggttctcagccccttacggaagcaaggagacgtcagcaaggacctgacaactccgacagctgtgctcctacagggcttaggcgctcctccgacgggcacgacatcacatga

SEQ ID NO: 7860 - DNA, 774 bp, Zea mays
  Peptide Sequence Number=SeqID_51235
atggcgagggggagggtgcgccctgcggcgaaggtggaggcgatgggaggtcatggcggcgcgatcgtcgttgtcgggggccgtgaggcatctatcgcggcaggggcagggccgcagggggcgagcagcgcggtagagagaggagaggaacgtgcgggggaaggggcgtacaagtacgtctcggagttatggagaaggaagcaatccgacgtgatgcggttcgttcaacgcgtgcgctgttgggagtacaggcagcagccggccatcgtccgcctcacaaggcccacccgccccgacaaggcccgccgcctcggcttcaaggccaagcaggggtatgttgtttaccgcgtccgtgtgaggcgtggtggcaggaagaggcctgtgccgaagggtattgtctatggcaagcccaagcaccagggtatcacccagctcaagttccagaggaacaagagatctgttgctgaggaacgggctggacgaaagcttggtggactcagggttctcaactcctactgggtgaatgaggatagcacctacaagtactttgagatcatcctggttgatgtggcccacactgccatccgcaacgacccaagaatcaactggctatgcaatcctgtgcacaagcatcgtgagctccgtggtctcacctctgcaggcaagaagttccgtggcctgcgtggcaagggccacactcaccacaagaacaggccgtcgaggagggccacctggaagcgcaaccagaccctgtccctccgccgctaccgttga

SEQ ID NO: 7861 - DNA, 120 bp, Zea mays
  Peptide Sequence Number=SeqID_51236
atgctcgcggagctcgcggccgtggactcggccgcatcggtgatgctgcgggccgccgaggcgctgctggaggccaacctgacgagggctcccccggagcgctgggacgccgcggtgtaa

SEQ ID NO: 7862 - DNA, 336 bp, Zea mays
  Peptide Sequence Number=SeqID_51237
atggcggtgcccctcgacttccccgactcccatctgcccctcaccgaccccacctgggccctctccaatccattgagtgtggccgagcccacgaccgattcagcgctagttacggtggtcctcacgctctggcggttcgccctcgccgaccacgttctcgatgacgtcatcgccccgttgtcctcatcttggcaccaaatggacagcttggtcctctcgtggatcaacgacaccctcatcgtcgagctccaagatatcgcccgtgagcggaagggcaccgatcaccaggcttggatcaccctcgaggaccagttcctcgggaacttggaggcttag

SEQ ID NO: 7863 - DNA, 1218 bp, Zea mays
  Peptide Sequence Number=SeqID_51238
atggcggtggctggcaggcggaagaagcagtcaagtcgtccgcaggctcacgtcccctcctgggatagcgagagagccctctcccacggcgtgaagacgacgcgcccgtgttccgttcctcgaacggctcgcgcacgcacaacggccaccccgccaaccactcgtcccatcgcattaactctgcggcaggacaggcggcacctttggcaggagaagcaggcaacgcttcacctccgccataatgaccgcgtcaaaaaagggatcgggaaaggggatactccgaaagggatccttctccgtgaaggaagcgggccccgagccctcctactgatcaggggttcgaaggttggcccctcggaagggttcgacagccgcctcagagcactcgggctctgcgcccactactggctggcccccgaagggttcgacagccgcctcagagcacgcagagcgagggatgactctgggtacatccgatacatggccgaggctcaggctacgctcccgaggggctacacccggcggctggtaacccccatcagcacaaagctgcaaaggcctgatggggcgattcaggtcaaggctctgtccactcaagggacacgatctcgcctcgcccgagcccagcctcgggcaaaggcagccgacctaggaggattcacgtctcgcccgagggagcatttaatgcaaggatcgactgacaccttatcctgccacgcgctcctcagtcgacagagccgaagtgaccgcagtcacttcgtcgctccactgaccgacctgacaggaaaacatcgccgctgccctgctccgactgctgtgccactcgatagagtgaggctgacagcagctaagtccggcctcgggcgccataggaagctccgcctcgcccgaacccagagctcaggctcaacctcgacgccggacgacggactccgcctcgcccgaccccagggctcggactcaacctcgacgccggacgatgaactctgcctcgcccgaccccagggctcggactcaacctcgacgccggacgacggactccgcttcgcccgaccccagggctcggactcagcctcgacctcggatgacggtctctgcctcgcccgacccccgggcctggactcagcctcgacctcggaggagtcaccgcctcgcccgaccccgggctcggaccgaccacgtcacaggggggcccatcattaccctacccctagctag

SEQ ID NO: 7864 - DNA, 477 bp, Zea mays
  Peptide Sequence Number=SeqID_51239
atggcgagagtagcgtgtaccctccgtggtaagaggctggacggtggtgtatctgtgctctcgcccggggtcgggcgaggcggtgactcctccgaggtcgaggctgagtccaggcccgggggtcgggcgaggcagagaccgtcatccgaggtcgaggctgagtccgagccctggggtcgggcgaagcggagtccgtcgtccggcgtcgaggttgagtccgagccctggggtcgggcgaggcagagttcatcgtccggcgtcgaggttgagtccgagccctggggtcgggcgaggcggagtccgtcgtccggcgtcgaggttgagcctgagctctgggttcgggcgaggcggagcttcctatggcgcccgaggccggacttagctgctgtcagcctcactctatcgagtggcacagcagtcggagcagggcagcggcgatgttttcctgtcaggtcggtcagtggagcgacgaagtga

SEQ ID NO: 7865 - DNA, 1230 bp, Zea mays
  Peptide Sequence Number=SeqID_51240
atgcagcaactggcgcgccggttgcttgacgcgtgggcctgggcttccaagctgtcgtgtcagaagtcggagaagcgcgtccacctggcgcggttgcatgccgcctgcatggctgcccgccccttccgcccgttggtctgggcaaaacccggctgcacccctccaccggtggtcacccaggatggcgacctccggcttgatggtgggggaaagcgagccgggctgcggcctctgcccctccctcagcctcaaggattttcatcaccagggctggggagggaagtgcgccgagttgaggtcggcccccgcgtgggcggcggcccgctccttcactcagtgatggggggaggagcggttgttgtccgtggcgctggcagctgcagcgtgtccggtcttcagacgcgagtggcttcggagccgctcgcggcgccggcgtccgccacggcagctggaagaggttcttccgccggtgcgatagccggggccggccatgaactgacctccaactctacggccttctgcccgtccttgcctcacgagttttgtcgtgggcgggggcctcctggcagcagcatccgccctagggtcagtgctaccgctgttcgaccccccggagcagaagtcgtcgttgtcgccgctgctggggcaggtgacggcgcgccattcgtcggccttccgttgctccgcaggccttccccctcggagtggggtcgttcgtacctgcggagggggaaccggagttccgtttgtaatggcatctcgaatgccgcggagccgacgccaaagtcgaccagccgaggcctcgggtcgggctggtgcccttggaagccggttggccgaggccccaggggtaaccggccgagccgcctgctcgggccggattcccgaaggaattcctggaccgcgtcgccgtccgaggatgggtcggactttgctgaagacgtcgtcgatgccgagggtgctacggctcccttcagcgtgaagatccgagcctacaggatcagatcgtcttgtagcgtgtgccttctgcggtcgccgaggccagaaaaacacaccctcgccgtgcttgcgaagctgcgtcttttttcctcttgtttcgagcatctggactctctgtcgaaggtgatgagtgaggtatccgtatcccggaggcgtaggagtccctcggctcggtcagccttggctgcttacgtgtactccgtcgtttccaggatccgctttccgaagtag

SEQ ID NO: 7866 - DNA, 1185 bp, Zea mays
  Peptide Sequence Number=SeqID_51241
atggatcccaacgacgccttctcggcggcgcacccgttccggtgggacctgggcccgccggcgcccgccgcgcccgcgcctccgcccccaccgccgcccgcgccgcagctgctgccccacgcgccgctgctgagcgcgccgagggagctggaggacctggtggccggctacggcgtgcgcccgtccacggtggcgcggatctcggagctcgggttcacggccagcacgctcctcggcatgacggagcgcgagctcgacgacatgatggccgcgctcgcggggctgttccgctgggacgtgctcctcggcgagcgcttcggcctccgcgccgcgctgcgggccgagcgcgggcgtgtcatgtccctcggcggccgcttccacaccgggagcacattggacgccgcgtcacaagaagtgctgtccgacgagcgcgacgccgcggccagcggcggcttggcggaaggcgaggccggcaggaggatggtgacggccggcaagaagaagggcaagaaaggggttggcgcgaggaagggcaagaaggcgaggaggaagaaggagctgaggccgttggacgtgctggacgacgagaacgacggagacgaggacggcggcggcggcgggtcagactcgacggagtcttccgctggcggctccggcggcggggagaggcagcgggagcaccccttcgtggtcacagagcccggcgaggtggccagggccaagaagaacgggcttgactacctcttccatctgtacgagcagtgccgcgtcttcctgctgcaggtgcagtcccttgctaagctgggcggccacaagtcccctaccaaggtgaccaaccaggtgttccggtacgccaagaagtgcggcgcgagctacatcaacaagcccaagatgcggcactacgtgcactgctacgcgctgcactgcctggacgaggaggcctccaacgcgctgcgccgggcgtacaaggcccgtggcgagaacgtcggtgcctggaggcaggcctgctacgcgccgctcgtcgagatcgccgcgcgccacggcttcgacatcgacgccgtcttctccgcgcacccgcgcctcaccatctggtacgtgcccaccaggttgcgccagctctgccaccaggcacgggggagccacgcccacgccgccgccggcctccccccgcccccgatgttctag

SEQ ID NO: 7867 - DNA, 246 bp, Zea mays
  Peptide Sequence Number=SeqID_51242
atggcccagattctacccgttcggcgccacgagcgacttcttggggactcggagaagcgcccagaccgaagccgcgacatccatggcggaaatctagcgttgttcgttcggatggggaaggagcatctggcaaggtgggcccacacgccggtgacagtgcccaagtgcgcggacgcaagggagataggtggtccacatgcaggcgacaccaggagggggaagatgggctggcgcggggtaggttga

SEQ ID NO: 7868 - DNA, 654 bp, Zea mays
  Peptide Sequence Number=SeqID_51243
atgactgccatagggttgattccggcagaaccttcttcttatcttctcttcactatcttcttttcacttctcacttctcacttctcactgcctctttctttctctttgctcttcccactcgaggattctatcaaagagtattactatcatacactggaggaaaccaaagactatgaaccatgtgcaacagtctttaacccaagaattaccaagcattgtgatctcaggggcgagggagtggaaaatggagttgcttgcgatttggcagaggggattttatctagtgtgttctttgctttgagcgagatgggagttgagagagctggtggggggttttataggcgagcggtattgatggtggtgctcgggtgcggagtggtgatgatggagcaggtgacacaaggcaacaagtgcgatggagtgggggatggtgttgctggcggtaatggtggtgggtgcgctgcaaaaaagggggtgggcggtggtagtgcgcatggaggcggggcacgtatgcggggggcatgggtgagtggtggggtcaatgaccctgatgtttgtggtctctggttccaagaatctttgcctctctgtatgggctctagccaaagtgaagaaaaacttcactacccaatgcatgcagaggactgggcataa

SEQ ID NO: 7869 - DNA, 1067 bp, Zea mays
  Peptide Sequence Number=SeqID_51244
tcactcaatctgaactcgtgcggtccaaccccagggttatgaaggctggggagcaccgggaggataaggagggggaaagttttgtccggtttggacatggtggggattttgttataatactgaaaaacttcctgctccttttggagaggatgcgctttgcgaaaaaaaaggagatcggaagtcagatggaggttcgctgccaaaccagcttttgccaagatgaagatggtttccccaagttgctgagagcatgcatagttcgcctcggaatcaggagccagccagagtatgatggtcgtgaattcgtcgagcatggcacagagaagatgcgtgccttggaaggtcaacagctgcttgaggacgatcccacagtcgtgtacctcactgcatacctgctcaccctggatgcacagtatgatttcttggctcgacaccaccgtcagatgattgcccgagcagaagatgcagagaagctcaaccgtaagctccatgtggatctcacctcagctcaagcccgtgtagctgccttggaaagccgtgaagccattgctgttgaagccctgaagcaggccaaggatgagcacgtccagaagttgatggatgcctacttggtaaccaataaccaacgtagagccctgtggatccaagagcccgctccatccaacccagttcaacccatcaaagctgaagacccccagattcttgaaggtcacccggtctctatcagaggagagaagaaggcttgggaactaccggaaggagccatagtcttggaaggaattccagtcttccctcaggctatggataagcaagagcaccccgagtcctcccaagatcccccgccagagttgtttgagcccctcaccatgaaaaagattcctgcaccatcccttgaagtcaaggaagaagctgcaagcaccccgccagcgctaccgccctctgaggagctacaagagcctgtcccgcttcaagaagagttcgaccccgtgctgccatctcagtcgccgccagaagaagccttcaatatcagctccctcttgacccatccaggagatgtctcagattga

SEQ ID NO: 7870 - DNA, 814 bp, Zea mays
  Peptide Sequence Number=SeqID_51245
gctggcccctcagaagggttcgacagccgccccagagcactcgggcttcaagctcattactgatcaggggttcgaaggctggcccctcggaggggttcgacagccgccccagagcactcgggctccacgcccactactgatcaggggttcgaaggctggcccctcggaagggttcgacagccgccttagagcatgcagagcgagggatgactctgggtatgtccgttacatggccgaggctcgggctgcgctaccgagtcacttcgccctaccactaaccgacctgataggaaaacagcgccgctcgccccgctccgactgctgtgccacccgcccgggcaaggctgacaacagccaagttcagcctcaggcgcaacaggaagctccgcctcgcccgaccttaggcctcggcctcgggaggaggtctctgcctcgcccaaccccagggctcggcctcaacctcggcctcggaaggtggtctccgcctcgcccgaccccagggctcggcctcaacctcggccacggaaggaagcatgctgtgaggcatggtgctgcatctggagcacttggacgaaccgtgcgaggacgtgaaggacgccggcgactgcacggcactgctcgacgcgttcgtctacatcgagacgtcttccgctgctctgcgcgtctagtgggctcggcctcaacctcggcctcgggaggaatcgcgtcctcgcccgaccccggcctcggcctcaggaggagtctccgcctcgcccgaccttgggctcggaccgaccgcgccacggggatgcatcattaccctacccctagctag

SEQ ID NO: 7871 - DNA, 177 bp, Zea mays
  Peptide Sequence Number=SeqID_51246
atgacgtcacttcggatggccacggaaatcctttctaaagacgttcccagggtcttccaggagctctcggacatgagttctgccaagtcgccgtttctccgccgagagagcagtgtttgggaatcgctgcggcagcagggggtcctgcttgccgaggccaacgagcgcctcgcctag

SEQ ID NO: 7872 - DNA, 213 bp, Zea mays
  Peptide Sequence Number=SeqID_51247
atgaagtcgggggtcgatttggaaagctcacggatgtcctcgtcccccctctccaccgacgacctcctcagacgggtagcaagcacggtagggaggctggacgctggcgtccttaaccagcccccgatgcgccccaaccatgggtatgtgtccctgggactgaggaactttaaaacctctcggccaccggtcccggaggacgcagcgggctga

SEQ ID NO: 7873 - DNA, 123 bp, Zea mays
  Peptide Sequence Number=SeqID_51248
atggctttgggtaagtctgttaacatgcccgaaggatcgggctacgctccccgagaggctcgggggctgctctcgcaactcggctacggccaaaccgttgacaacgtcaacaagccagcctaa

SEQ ID NO: 7874 - DNA, 600 bp, Zea mays
  Peptide Sequence Number=SeqID_51249
atgcccaccccgttggtagagtcactggccttcgcagctagatcatcaacctcagcaccgcctgcaccagcagttcaagctcctgcacccgaaggcgacgacccagacgactctggggatgatgatgaagatgacgacgacgaagaagatgaagaggagaacgtcaatgaagaggccaacgatgttcagcagaactacttcatggggtttgggcctgtcaccgaacattacacatcaatgtttgagacagggcacttccccaacctgctacaagacgtgctgcacgtgttgggaacctacgtccgacccttgtatgagacaaggcgagtatgcgagcctcctcgggcttgctactacatcactcgcattcacgttaggatgatggatgcagggatagagggtagccagaccagcatcgttccaggtggagctggagaagatcgccttaacaccttagctggtatagtggcaggtcctaacactgacctagacaatgccaccttggatctctctagtgtgcacttggagttggaagatgcccacgccaggattgcagccctggaagctcaacttcaaggaagggatccccctgaagcctaa

SEQ ID NO: 7875 - DNA, 795 bp, Zea mays
  Peptide Sequence Number=SeqID_51250
atggttgcgcacccttttggcatcgtcgcatctggaggtccagcatggaggcccggtcccacatgtcatgtaaccggcgcgccggtcactgcgtgcaaggaaaccgcaccgttacttgcgccaatgctgcgccttctcgactgcggaaccggcgcagcgactcaaggcagccctgcgcgtgacccaacagttcccgggaccgtgaaaggggatattgcaaaaaggatccttcccagtgaaggaaacaggccccgagccctcatactgatcaggggttcgaaggttgcgcccccggggggttcgaaggctggccccaaggaagggttcgacagccgccccagagcatgcagagttagggatgaccctgggtacgtccgttacatggtcgaggctcgggctatgctccagaggtaccctaggacatttccgagaccagcgggaacaaattgtaatggaatcacacctgagggaggcatcgagccctcagatcctatcgaatgggtccgggaaaacaacgccgttcaccccgctccggcaactgtgccagtcaccaaggaaatgctgacaacagcaagtcacgacttccctcgagttcagcctcgggcgcaacagggagctccgcctcgcctgaccctaggcctcggtctaggcctcggtctcagcctcggcctcgggagaaggactccgcctcacccgaccccaggcctcgagctcggaggagtcgccgcctcgcccgaccttggcctcgtatcagctacgctactggggatccatcattaccctacccttagctag

SEQ ID NO: 7876 - DNA, 915 bp, Zea mays
  Peptide Sequence Number=SeqID_51251
atgaaggccaagtcacaccatcaaccaaatcaaggagatcgacgacgtgaggcccgttctggcgagcgcgacgcagcgaagggcgtcgctgctactgcggctcgagctgggacgcagaccggcggaggagcacgtgaggaggagcacggcgtgtgctccagcctggtgccgagggatggcagcggccagacttgccggggaagaaggtcggcgtggggagaacttggactgcaggaacagcagggggaggaggtcgtcggctactggctgagggagacgatgggaaaaaaaggagcctgcgctagtgcccacaggtctgaggggaggcagggacgcttggtcctgggcttgccgtgcgcagggggaaacgcagcaggggcgcgcgccggccatgggggattccttgcgcgcgttgcaccagaggagggcccgcgccgtgggaggcgctatggacgagtaggagcacaggggctcgtggcttgttctgggcgcctgcacttggagattttctgctggcgaggtgcgccaggaagaagagcggctggagcttggggcgccggccatggagagaaggggatgagacaccatggatgggggagagggacatcgcgccatggatctgatggggaaggggcgcctacaccatgggtgctcggccatggaggagaggggtcgccggacctaggggcatcgccggagagcagcaccatggggaaacggccttccctgcggcatgttcccgaaggaatagggcacactggagaaggaatggagaagagggtgctcgaagctagaccggatagagctccgggtgcctggagtccgtcggccatcgaggttgctggccagctagagagttcctgcgcgcccactagagaggaggggaagacactaggaagggagagcgccggctag

SEQ ID NO: 7877 - DNA, 408 bp, Zea mays
  Peptide Sequence Number=SeqID_51252
atgacgcactcctacggcgagtgcctggcctgctcattcctgctcgatgttttgccggagttgcacaagtcgccccgcttcttcgtcgagcttggcctgcatctcggacttggaccacagctagctcccgcggatctcaacgcgagacgcaggtgcaagggcgccgtcacttcctggcatgccaaggtggttttctccgtcgtgatcctcctgatcgatgtggtagcactcgcgagttgggtcgcaaccctcgtcgtcaaggctgtgaccatcatcagagcagccggaaaggctgtggtcgcatgcgaacatgaagtcgcgcatggcactgggatcacggagtccggagaaatcccaactgacgtcggggtcgtcctcttcctcggaacccgcgggtccggaggttga

SEQ ID NO: 7878 - DNA, 132 bp, Zea mays
  Peptide Sequence Number=SeqID_51253
atgttgaaggatcgggtggagcatgccaaggacatctgggccatctacccagatggcccgggagatagcgtcgtggccagaatgagcgcgttcctccaccgccgcaaccgcctcccactctgcacgagctga

SEQ ID NO: 7879 - DNA, 138 bp, Zea mays
  Peptide Sequence Number=SeqID_51254
atggggaagcctgtcccatcactcctcctgctcctcctcagccgaggttatgcaataaaccggggcttgccttccaaagcagtggcaggcaggtcctctggtgcaggctctggtgctggatctggggctacctcctga

SEQ ID NO: 7880 - DNA, 625 bp, Zea mays
  Peptide Sequence Number=SeqID_51255
gcagcatgtgtcgagaggcctagatttcttcggggagttgaacagcgcgatgcattacccggagccgaccccggcggaggccgtatccggggccgccctggagccgcccccggggactgcggaaggcgcgccggatgcccccgcatccgttgcggccggtggagacgtgcccccagagactgccgaaggcgcgcctgatgcccccgcagccgttgcgccgagtgctgaagatccttcgacggtggcggttgaggcggcagcggaggcaacggctgaggcgacggcggaggcaacgacagggtcttcgcaggttcaagattttgggcctgcgcacgcaaccaccactactaaatttttggcggcttcgaccgtggatggtggtaataaatgtgatggttctacatctgagttttctgattttgctgactctgggagctcggttgagtggactgaggagtcgtcggaggaggacttggactactttgcggccttggatgtggctacggcggaggcttcaccgcacgctgcggacacagaagatgtgcctggtcctagtactgggtgccggcgacgaagggcggttgcgaagcgcagagtgagtgaagcggagggaagtcggcttcgt

SEQ ID NO: 7881 - DNA, 447 bp, Zea mays
  Peptide Sequence Number=SeqID_51256
atgtacccatggagacttggctaccggctcagagagatcctgcagcaaccgatctcttcagcaccaggatacaggagtctttcattagcacagatgtctgcacagattgctctacgagtgcaccggcttttggatcttcttgcgtttctgctagccgccggtgctgactctgagattattccggacaggagaagctttttggaaaaacaagccaagcgcggaccgtccgggcccctgcggcggaccgtccgcgacacaagaatgaccctcggacagaaccaatgcaaaaacacaagtttccactacagactgtccggcggaaaagcaaagaccgtccgagccctcgcgcggaccgtccggcctcaggcgcggaccgtccggtcggggcggaccgtccgcaccaggagggcggaccgtccgcgctcagcagaatggcccaacggctag

SEQ ID NO: 7882 - DNA, 1599 bp, Zea mays
  Peptide Sequence Number=SeqID_51257
atgtccggtgcaccagaggactccaactcgaactcgccaccttcgggaatttccagaggcactcgcgctataattcaccgaactgtccggtgtacaccggacagtgtccggtgcgccaaggaggagcggcctcaggaactcgccagcttcgggaatctccaacggctagtccgctataattcaccggacatgtccggtgtgcaccggactgtccggtgcaactccggagcaacgactattcggcgccaacggctacctgcggcgcatttaatgtgcgctgcgcgcgcgcagaagtcaggcgcgcccatactggcacaccggacaaggaacagcaccggacatccaggcgggcccacaagtcagaatctccaacggtcagaatcaaacggcagtgatgacatggtgggggcaccggacatgtccggcatggttctgtgcttcaagctcctcttcggccccacggccgccatcttcctgtcggcggtcgtgatcctctcctgcttcaccaacgtgccgcagctgcagctcagcctcaaatacaccggcgagctcgacagctcctacgtcgcgccggcgccggtgcccaagtgcgacatcttccggggcgagtgggtgccggacccggccccgccgcagtacaccaacgagacctgcgacttcatccaggagcaccagaactgcatgctgtatggccgcccggacctggagttcctcaagtggcgctggaagccggacggctgcgacctcccgcgcttcgacccgcacaggttcctccaggtcgtcgcgaacaagtccgtcgccttcgtcggcgactcgctggccaggaaccatatgcagtccctcttctgcctcttggccaaggtggagaagcccaaggacgtgtcggtcacggacagggcggacccgaacatgatcctgtactacgagggctacaacttcaccatgtacctcttctggtcgccgttcctggtgaggtcggaggaggacgtcgccggcgtgttcaagctgtacctggacgagcccgacagcaggtggctgtccgtcgcgtcccagctcgactacgtgctgctctcgggggccaactggttcacgcgccagtcctacttctacgagggcgggcaactcgtcggcggcgtgtacgtcccgctcaacttcaccagcagcctcaccaaccagcactcgcaccggatggcgttccggacggcgctgcgggcgctcgccggcgccaggttccggggcaaggtcatcctgcggacgctgtcgccgatgtcgcacttcgagggcggggcgtacgacgccggcggggactgccggcgcacgcggccgtacagggccgacgagacggcgccgatgggagggctggagctggagttctacacgtcgcagctggaggagttcagggaggccaagggcctggacgttgtgctcatggaccccaccgccgcgatgctgatgcggcccgacggccaccccagccggtacgggcactggccggacgagaagcggacgctctacaacgactgcatccactggtgcttgccaggacccatcgacgcatggaacgacatgctgcttcacatgctgtcacattctagttaa

SEQ ID NO: 7883 - DNA, 282 bp, Zea mays
  Peptide Sequence Number=SeqID_51258
atggagcttggcggagggacagctgtcggagcggttgagtccttgctgacgtcctcttgcttccgttgggcgatgcggaagctccttcgaggccgaggtcgagtccgagcccccgggtcgggcgaggcggagattgccggctggtgctggggcggagtccgagccctggggtcgggcgaagtggagttcgtcgtcttctggggccgagcccaagtccgagccctaggtcgggcgaggcggagatcgtcgtcttctggggccgagcccaagtccgagccctag

SEQ ID NO: 7884 - DNA, 744 bp, Zea mays
  Peptide Sequence Number=SeqID_51259
atgtccggtgcacaccggacagtccggtgcccccttccgaccgttgccttggccacgtgtcgcgcgcagaatccgcggccgaccgttggccctagccgaccgttggctcaccggacagtccggtgcacaccggacagtccgcacttgagttggcactcaatcaccaaaatacttagaaatggcccaagggcacatttccctttcaacagtaagtgccacaagctggcggacaaggtggccgcactggagagggagaaggctgacctccgacgccaactggtgggggagaggagggagaccaacgaggccctcgcccaggcgcaggctgcgcaggcggaggccaatctggcacgagcggagggcaatcttgccagggagcgcgccgagcagctgcaggagcggctcaccgccctggagagccgtgtggagagggccgaggccgcgtcgcgcgcggaggcggagcgaacgcgcaaacatcttatggatacataccatgagctgggcgcgcagaccggtgacttcgaagtgccggaccgagagcccggacttcgctgcctggagtgggtgcaggaggagttgcaggcactccccactgtcgtggaggggtttatgtcatatgcctccctggtcacctgcgagggggcgatgaacgcgctctcccgcgaagggtgcggcacttcgaggtcttcgaccaagccgtcgaagattttgagcgagatatctacaaggttgatgaccccatag

SEQ ID NO: 7885 - DNA, 150 bp, Zea mays
  Peptide Sequence Number=SeqID_51260
atggtgtttttgacgatagagctgcctgacgccaaggattttgattgtattggccttcctatttgcaggagagcaaagcagttgttgtcccaagaatcatatgctaccagaataagaaagatgagagcggttggtggccaaggctcgtga

SEQ ID NO: 7886 - DNA, 195 bp, Zea mays
  Peptide Sequence Number=SeqID_51261
atgcataggagtccaatactcaagaacaaaagaagcccgaagaaatcagcgaagaaatccaagaagagggctgtcagccagcgcctggtggcgcaccggacattgatgtccgacgacaacggtcggatccaacggtcgactgctacaggcgccaacggtcggctgacgtggcgtgcaccggacactgcacagtag

SEQ ID NO: 7887 - DNA, 276 bp, Zea mays
  Peptide Sequence Number=SeqID_51262
atggggggctcggagcccggttccttcgcggagaaggatcccttccggggatgggacgtgagcctggctgacgacgtgaccggtgcgcccgcccgcctgccaccgctattactgccgcaactgacgcaccggttgctcgacgcgtgggcctgggttcccaagctggcgtgtcagaagtcggagaagcgcgtccatctggcgcggttgcatgccgcctgcatggctgcccgccccttctgcccgttggtctgggcgaaaatggggggtcgcctgtaa

SEQ ID NO: 7888 - DNA, 234 bp, Zea mays
  Peptide Sequence Number=SeqID_51263
atgacgaagcagcctgtgaaggtgtacaaatgggacatggatgggacacttattttgctcaagtcacttctggttggctcatatgctagggattttgaaggcctcaaggattcggagtgccggtccaagagagattcaccaagccttttcagtcatgccaggagcatcatgtacgccctcaaggagaagaagattgacatggtgattgcttcttgctccccacctcggacatag

SEQ ID NO: 7889 - DNA, 216 bp, Zea mays
  Peptide Sequence Number=SeqID_51264
atgtctgggaccttcgcccatgcccccgccgaggacgcccttgctgcacttgtctacgcgctcgacttggtgtcctcgaagagcttttttgaaaagctattgacacacatacagacctacctcgaattgatcgttgagctttacaagttcgacgacgggatgaacgaggcgacgctatgctacttgctggtagtgcacaaggtttgcattgcctag

SEQ ID NO: 7890 - DNA, 690 bp, Zea mays
  Peptide Sequence Number=SeqID_51265
atgcagcccggtagcacccctccaccggcggtcacccaagatgagccgctctcggcgtcggtttctgccacggcagctggaagaggttcttccaccgacgagatagccagggccgcccacggaccgacctccaactctacggccttctgcccgtccttgcctcacgagtttgggcatgggcgggggcctccaggcagcagcatccgccctgaggagtccctcggctcggtcagccttgttgtccgaggcttctcttgcttagttaaaggaatccctcggccgctcttcgatgagccgaggccaggggtagcggtgtcagcgcgaacagaggcagagttggctcgagaggaagacctggtcggccggagcctggctgggtcatccgttagcgggaccgacgccggaattgaccagccgaggcctcgggtcgggctgacgtcctcggaggacagctggacgaggccccagggtgaccggccgagccgcctgctcgggccggattcccggagaagaccctggcagcgacggcccgggcttggtgatgacgtcgtccttcagagtggaggtctttggactgcgttgccttctgaggctgggtcggacttcgccgaaggtgttgtcgacgtcgagggtgctgctgctcccttcaagcgtcaagatccgagcctgcaggatcggatcgtcttgtag

SEQ ID NO: 7891 - DNA, 1053 bp, Zea mays
  Peptide Sequence Number=SeqID_51266
atgtatatgagggaacatggttccaagcacatgcttagaatcatgggactgcctaaagccctaaatctgacttcacctgttggaaatgcaatgcattgttctctggattgccacaaattcataggaataaccactaacgccagtgtatttgcccagggtttggtaagcaatttgatcacagctggccatggacgcgaagcagcctttgctgctgcagttttgggagataatgctctaatggagaaagcatggcaggacacaggaatgttggctgaggctgttttacatgctcaagcccatggtcgtccatcattaaggaacttggttataacgtggaacaagatgctacagaaggaactggatcacacaccaactgtaaaaaccgatgcggccgcagcattcttggcttctcttgaggatccaaagctcacaagcttgggggaaactgagaaaaagcctcccattgaaatacttcctcccgggatgcctcccctatctgcacctccaatcgtgattaaaaagtctggaacaaaacctggcctccccaatgcagtaaaagcctcaaatgggcctataggtgctccgatggttcagggtgctcccatggctcaaggtactcctggggcacaaggaatccccatgaatcaagttactccatcacagggcagcgacgaggcaaagccattagaagctacagtggttgatgcagctcccaccacttcagaaggcactgcagctcccgcagctgcagaaggcacagcagctcccagcagtgaggaagctaaagcagcacctgggagtgagggaggcacatcgcatccaatcaacgaggaagccacagcagttgcagtttcagatgcaccaggcagccctgatgctgcggctgcggctgctcttgctcctgcagctgataccagtagctcggatgcacctgctgttactcccagtgaagtaaccgtctctcccccttcaaccgacgcacccgagttgaccgataagccatcaccaacagaggcatcgttgccgcctccacctagtgtttctggtgtatag

SEQ ID NO: 7892 - DNA, 693 bp, Zea mays
  Peptide Sequence Number=SeqID_51267
ctccaccccactcacccctggctcgtcaccgcggacgccaacgaccgcgtctctgtctggaactgggagcaccgccaggtggcgttgatgagcgtcgcttggttggagcgaagcttgagaaactcgctgagggagatgcttgtgcggaggtatacaggtggacataaaggagcaatagcttgcttaatgacatacatgtctgcagctggtgaggcccatgatggaggtgtagttgcagttgaactttcaagggtgatggggagtgctccacagctcattacaataggggctgataaaactttagccatatgggatactgttactttcaaggtttactgcatggtggcacaccccttgcagccacatcttgttgctactggaactaatattggtgtcatattaagcgagtttgatccaagagcacttccagctattgctcctttaccaacaccaacaggcagcaaggaacattctgctgtttacatagttgaaagagaacttaagttactgaatttccaattgtcgaacacagcaaatccatcccttgggaatgctggtgttgcatctgatgcaggaagatcaaggaatgattcattggaacaactgatagtaaaccagagcaagaagcatatcagcactcctgctcctcacgattcctattcggtcctttctgtcagcagttctgggaagtaa

SEQ ID NO: 7893 - DNA, 749 bp, Zea mays
  Peptide Sequence Number=SeqID_51268
atgaaggcaacgcgggtgctccccatccgggggctcggaaggtggaagggcgcgatgcatgaggggagcgtcacggacaaagtcttcaccaacgtactccagggccctccccctacgacacgggggctgggtcccacacgtcatgcaagctggcccggaacgaaagaagccaaaccgccgcacgcggagcgtgtaactaccccgcggttacaagcactcctccatcctcgccgaaaccagcggttgaaagggcggaccgccatgcaggtggcgtgcaactgcactgcgagggcacaccccctcggcttcatcgcatccagcatggaggcccaggcccacacgtcatgtaaccggcgcgccggttactacgtgcaagcaaccgcaccgccacttgcgccaatgtcgcgcctcctcgactgcggaaccggtgccgcaactcgaggcaaccctacgcatggcccaacagtgtcaatcgagcacatcgatcatgggctggcccctcggaagggttcgatagccgccctagagcgctcgggcttcaggctcattactgatcaggggttcgaaggctggcccctcggaagggttcgacagctgcctcagagcactcaggctccgcgcccactactgattaggggttcgaaggctggcccctcggaagggttcgacagccgccccagagcacgtagagcgagggatgactctgggtatgtccgttacatggccgaggctcgggctacgctcccgag

SEQ ID NO: 7894 - DNA, 597 bp, Zea mays
  Peptide Sequence Number=SeqID_51269
atggcccccaagcgagctagttcaaaggcagtcccatccatcgacgaggcagcgaaggcagcgctactaatggagaaaaaaaggcaaggccctccggaaaataccccccaagaggccgccgaagatggagctgtcagcaaaagacagcgccaagaccaccctacccccgaaggcacgctacacacctgcagctctggaggcgtaccgcaagcacccccaccaggcttcgctccaccagagggcgaagacgcaatagaggacgacgaagtcatcggcatctcagccgaagaccagctacaattgtgggccctgcgcatcaagaaccacaacctccaaaagcaaaaatacatcctcgaggccaagcgccaacgtgtcaccgcgcaggccaaggtgcgccagatgatacaggacgaggagcagagagctcgggagctagagcaagaaatcgcgctcatgcagggcgagggccagtacaatctgcaacatggaccgcccctccagcagcgcgtcccagccggagatctatttataccacagcgcaaccccttcattccgcaagttacagctttccaagggatcaactacctcgatgagtga

SEQ ID NO: 7895 - DNA, 378 bp, Zea mays
  Peptide Sequence Number=SeqID_51270
atgatggtcctcgcctcagttaccaccacatcgtttgtcattctacttcttttctctctcccctcatgcctccacctttgtgccaccccattctcgacaaagggcgtaggagcaggcgcctactcctcgtattcgtccgacaccagcctcgacaccgactcgcgcagtggttattgcacgtccacgaggacattttcacatcatgcgcacaccatcgtcggacgtcccgttcgtcttcccggctttcgccctgttcttcctctccaacctgctgcctccgcccacggtcgcagctgcgacctgaccgacgctcgtcgacgcgagtacggggcgagtcggtcatgctcctggcctttctctgtgcgtgccgtcgagtag

SEQ ID NO: 7896 - DNA, 1299 bp, Zea mays
  Peptide Sequence Number=SeqID_51271
atgcgcgcaacgaatcgggaaatggtgaaggggtttacccggtccacgtgcgtcggcgggttcttgaactccggtgagcgcgatttggctacctcggtgacgcgggccctcagtttaagcttgagcaaggctcacggcttcaccaggaagctctctgaaggcttggatcgaacagaagaggacgggagaggggctggccacggtggctgctctcgggcggcactagcgggctgcggggaggtcgccggaggcaatggctggctcgggcaagacaggcgagggcattctagggttcatttggcgccactttgtccattaggtcgacaggttttgaagaggggatcaagatggctcgtcttagacacactgcaccaagaggtggaatctgtgaggccccgttcctctgtggcccagctggaggcgccccctgcaccaccgtgggacgtcccggctgttggaggagctactggtggagatcctggaggagaccccgacgacgacgactcagaccacagcacggagtcctctgagccgcaggaggtggaaggatgggtcacccgacccatcacccatgacgccgctcgcggttgtcacttccacgacgcactcgacaccttgctgcgccaggctttcgaccggcacacctggtcgatcgagtaccgttgtgtagtctaccagcacagtcgcgggaggtacccggaccgctgggaggctacctgcctagttcgccgtccggaggatgacctccggggtgcggaggccgtttcggagcactactctatctccgagagggacactgcagaggcggctatgcaggatgcagcacgacgtgcactctcccagtactgttctttgttcggtggcgtggccgacggtcttaaccttcggtactacccccgccgtcctactggcagcacggagagtgtggttgtctcacctgttggtgaggctaaccctaggttgagcagcacagtcaacctagtcgcagtgcttaacactgagctggatcactctctggacgagctaagcagggctcgaacggagattgcagagttgcgtgctgagttggcagagcgccatcaccaggagggtggttctcccgcacctgttgggactcagcacccttaccgctccccgccacgaggtcaccacacttatggttcccctatgtctgacaacaggcgccgatgcaacaggcgtgctcagcaggagcagcatgaccagcaggaggaacaacagaggcagcctcccccaccacccccgatgtcagtggagcagatgttcttgatgcagacctag

SEQ ID NO: 7897 - DNA, 132 bp, Zea mays
  Peptide Sequence Number=SeqID_51272
atgagcaatgttgtagtgttttgtaatacacttcctttgcaactgaaaaagggttgttctcaaagtgcacaatcacagggtaaagtgacagataatgagcactatcgtgataggcagcatcacaccgtgtag

SEQ ID NO: 7898 - DNA, 921 bp, Zea mays
  Peptide Sequence Number=SeqID_51273
atgttggagtcctccgtccccacgcctcgccggacccgccatcaccgcctccccgttgggccacgaaaccctagcggcgcttgcagcccctggatatcgcgtcccgctccctggcgcctccgcccgtgccctgctcccaccgacgtcatctcctcgctgggccacggatcccctccggatcgacggttgcgccacctggccacgccgtcggatagggacctcccccggtcctttgtcctcgggcattcccacgacgcgacgctcttatcctctcactcattggagtctacggtcgagaggagcacagaggcaggcgagcaggctcgagtggtgcgtcccattcacccgcgatgcctgtgccagccctgcccggcctggcgcgcagcacggggctcctcgacgccgccgccacctgccctaggggcgggcactccgataacggtgaccatggcggtgtgggtgcgggggctgggagtctgtgtcctgctagatccagttgacaccgactcattgaggccctctgtaaacatcatcttcgcctgtcgtcggcgggagaagcagcagccgcctccaggacaccggctggcgcggatgttccgcccgagctcgctgctctgctccacctgcaacaacaccgacgtcgcatcctcatcctactactcgtctcctgcaggcgacgaccaaggctcgtccagccgcgcactgctggtcatgaatggcgccattgacagggacctgtttgttgcctccttgcgccgtgacctgtcgaccgaaccaagtcaatctccattgttgtcgaccacctcagccatggtggtgtcaacgacggaggagaaggtgcatagagggttcgtggtggtaaagcggtcgcgagacccgtacagcaacttccagtcctccatggtggcaatgatcgtgtag

SEQ ID NO: 7899 - DNA, 417 bp, Zea mays
  Peptide Sequence Number=SeqID_51274
atgaagaagacccttgaagatctccgagcggagcatcgcaccggggtccagcgtatcgccgcatgggccgacgaggcaagctcagcgttggtgccgctgggagtgagccccatcccggtgtcagagcagtcggtgtccatttccgacgcgctcccagtgctggattccactgccgaccgcctccgacgcctggaccaaatccttggcgcccgcttggaggctgagggcagcagactttgccaggcggtaatagagtacgtcctgacgtgcttccggaaccaagaccccgccatctccttggagccggtgatcgcaggtccggtggccgacgccgaagacgccgcctgggggagcgtacaagatgatgtggatgtggtggccgagcgcttccagcgggatcccactgatgatgagtag

SEQ ID NO: 7900 - DNA, 390 bp, Zea mays
  Peptide Sequence Number=SeqID_51275
atgggcatttggccacgtggcagcatcgggtttctgcctgagcggggagcagaagtgtacatggtatggtccgaacacgtgtcggctctggacctccgcctggccttgattaaggcctgggtattctttgtcccagaatcccgggaccctgctgagggtggcccagaccctacacagagaggtccgggacccgtcccaggggtccggtctgtacccacggaggtcctgggctctgctcggaggcccggtccggatatgctggggtccggtgctttcccatggggtccggacccatcgttgataccttggaggatattatccttcctggccacgtggcgatcccggagccgtccacgtggtgggatcgggtactgtttaccgcgcgactag

SEQ ID NO: 7901 - DNA, 150 bp, Zea mays
  Peptide Sequence Number=SeqID_51276
atggaggcacgccgcctgcaagatggtttggtcgccgtccgtcagcagagtggacagggcacatttaatgctgaggcaacacatcgtctgccagcgaagtggcagggctcattaaatgccgaggcggcacatcacctgccagtggaatag

SEQ ID NO: 7902 - DNA, 549 bp, Zea mays
  Peptide Sequence Number=SeqID_51277
atgtccggtgtacaccagactgtccggtgtgacatcgaagcaacggatacttcggcgccaacggatacctgcagcacattgaatgcgcgccagcgcgcgcagaagtcagacacgcccatgctggcgcaccagacactctacagtacatgtccggtatccgttggcgccgaagtatccgttgcttcgatgtcacaccggacagtctggtgtacaccggacatgtccggggtaccccttactacattgagaaggcacggtgcccacgcggctatctctagtcgcgtggtaaacagcacccgaccccaccacgtggacggctccggggccgccacgtggccagaaaagatgatacactccaagctatcaacggtgggtacagacccccatgggaaagtgccggatccctacatatacgggtcggacctccaggcagggtccaggacctccgcgggtacagaccggacccccgagatgggtctcggacctctctgtgtggggtcggggccactcgcagcagggtcccgggattttgggacaaagaatacctag

SEQ ID NO: 7903 - DNA, 90 bp, Zea mays
  Peptide Sequence Number=SeqID_51278
atgacgggggagaagcagatgttctcttcctacgtcaagagcaaggatttccacgatacgatcatcttcggtgacgggaatcaaggaaag

SEQ ID NO: 7904 - DNA, 393 bp, Zea mays
  Peptide Sequence Number=SeqID_51279
atggagacaataacgagtggtcagaagtacagagattgcagacaaggtcattatatgagccatcaaattgcgatgacagttgccacaaatccagtttcatatgaaggttgcatccaaggttattcaattggatcagttaaggttgatgatactgaagtcatcagttttttgctgcaaactgaaataattcctctgtgcttacgaaccatggagatgggtagtgagctatccaaaactgagtttggggatcaaggagaggactccaatatcttgtcatcgcggctgaaggagattagtactcctgaccgccccgctaccctccgtttcctaggtacacgcataacagccattgatatggtactgttgtcagtttttactctgacagactcctaa

SEQ ID NO: 7905 - DNA, 294 bp, Zea mays
  Peptide Sequence Number=SeqID_51280
atgtcggacgaccttgttgttcctgtccactttgaagttggccaagaactttgctttcacttcctggatcatccgctccttgtgctcctcgaactggagctgctcgtcagccggcaaggcgcggacaatccgcggcccagggccggacggtccgcgacctggcgcgaggcggcggtgctctctggtcaggcgcggacggtccgcggcacagggctggacggggcggcggaagatcgccggcggcgcctggatctcgctcccgggagggaccccgtcggggaggagagatcatag

SEQ ID NO: 7906 - DNA, 81 bp, Zea mays
  Peptide Sequence Number=SeqID_51281
atggcatcgaaggagcgcttgccgtcgcacaaccccggtctattccgctcacagtcacagcctgacaccgatggttcataa

SEQ ID NO: 7907 - DNA, 936 bp, Zea mays
  Peptide Sequence Number=SeqID_51282
atgcatcgcgtccttccaccttctgagcccccggatggggagcgcccgcggttcttccgccttgtcgttgttggagggatgcaactttgtggaagttggtacctttcagccatcgttcggcttcaaggattttcatcaggcagcccggctgcttcccctcgccggtggtcacccaaggcggtgaccaccagttcgatggtggggagaagcgagctgggctacggcctgtgccccgctctcagcttcaaggatcttcatcatcctggctggggcggaggccgggctgagccagagctctacctcccgcgcgggttcgtgggtcaccttctccctcagcattcaagggagagggcactcaccggcctagcgggagggtcggacttcgacaacgcggggctggccggcggcgagcgtcgtcagcttcagcgcgttgggctcgctggctctggctcggctcccggtgacccctcccgccgcgagagcggtcgtcgcgccgcgcgcaccagaggaccgcccaagacatcgcgcactgctagggcagcgttcatgttcttgggctgtcctgcctttgccccggtacggcgcctctgcgcggagatggcttccgtcgtcagcgctgaggtggtggcggctgaagaagtcctcgtcgccgacgggatcaccgccaccatccgtgctccgggcctccggctctttggctttgatagcttgtcctcgcccctcgagcggggacgtgggcaagggccttgcagcagcagcgtccgtcctgaggccatcgctgccgctgtttggccacctggagcggaggtcgttgtcactgctgccggagcgggcgtcggcgagccaccaggggttttgtcgtcccgcaggccctccaatgtgtgggggggggggttgttcgtacttacgggggcggaaccggagttccgtttgtaa

SEQ ID NO: 7908 - DNA, 141 bp, Zea mays
  Peptide Sequence Number=SeqID_51283
atggatttgcttgtttctaattcattttgcttgttggatgtcgatatgcacatgcattttcaggtccttaatgctttgttcaacctttacataaaagaagacaggaacaagcagccgaaaatggaatcatccctcacttga

SEQ ID NO: 7909 - DNA, 387 bp, Zea mays
  Peptide Sequence Number=SeqID_51284
atgtcgaagggttgccttcttgtgtgtctgcagtctgctgactttatggagcaacgcaatttttgggccaatccttttcctaactttcttctgcggaagtggctccagggctgctcaaaggttcatgaccatgctcaagctaacagtttggattttttggtacctcagctgatccagatttgtgtgctggcaacctaccaacatcctggccatattaaaaatttagaagacttaggctatggacttctgagttatttgactactcctaagtttgtcttagcgaacggaacagagcgtgactgtgagagcgggattggaacggagcggctccgtcctattgattttttggagcggaatggttccggatctgagaagaatattccctaa

SEQ ID NO: 7910 - DNA, 168 bp, Zea mays
  Peptide Sequence Number=SeqID_51285
atgaaaggcgcgaagaaggctccaggttcaagtgaagaagaggaggaagaagaagatgatgatgatgaagatgatcaagcctcaacatcatcctccgaggatgaagaaatggctcagctcgtttccagccctagtgcctggtcctccttcgccgaggcagcgaggtaa

SEQ ID NO: 7911 - DNA, 210 bp, Zea mays
  Peptide Sequence Number=SeqID_51286
cgcctggcgttcgccctcgatgttttgactaagcagcgccggagcgcgcgggggcagcgcgacgggcgccggaagagccccgccctcgatgttttgactaatagaacggcgtgggtggccgggaatagtttctacttcgacatttgtggatccgagcctgaatcacctgtaaacgaaggcaagccccggtgcatttgccacctcccttga

SEQ ID NO: 7912 - DNA, 855 bp, Zea mays
  Peptide Sequence Number=SeqID_51287
atgtcttcgcgctcccttatgcatcgtgtctttccaccttccaagcccccagatgggggagacccgccgtctttccgcctcgtcgttggggggaacataactccgtgggagttggtacctttcagccatcgttcggcttcaaggattttcatcatgcagcccggtcgcacccctccaccggcggtcacccaagatggtgacctccagttcgatggtgggggaaagcgagccgggctgcggcctctgcccctccctcagcctcaaggattttcatcactagtgctggggaggggagtgtgccgagttggggtcggcccctgcgtgggcggtggcccgctccttccctcagtgatcgggggaagggtgggagtcgtccgtgacgctgacagctacaccgtgcccggctctctgagccgagcggcttcggagccgctcccggtgccgcctctcgccacggcagctggaagaggttccgtcgccgacgagtttgccggcgccacccgcggaccgacctccaactctacggccttctgcccgtccttgcctctcgagtttgggcaggggcgggggcctcctgacagcagcatccgccctgaggtcatcgctgctgctgtttggacccccggagcagaagtcgtcgtcgtcgccactgctggggcgggcgacgacaagccgttcgtcggtcttctgttgctccgcaggcctctcccccgtcgagtggggttgttcgtacctgcggagagtggagatcttcggaccgcgtcgccgtccgaggctaggtcggacctcgccgacggtgtcgtcgatgccgagggtgctgctgctcccttcagccgtcaagatccgagcctgtag

SEQ ID NO: 7913 - DNA, 659 bp, Zea mays
  Peptide Sequence Number=SeqID_51288
atggcggtggcaggcgggcaggtgcagcggtcacgtcgtcagccaagctcacgtctcgtccgggggcagcgagaggaccctctctcacgacgtgaaggcaacgcgcccgagaagcgaacgacgcttcgccttcaccgtaatgaccgcgtcaaaaaagggaccgggaaagggggataccccgaaaaggatccttccccgagaaggaaccaggctccgagcccccctactgatcagaggttcgaaggctggccccccggaagggttcaacagccgcctcagatcgcgggttcaaaggttggcccccaaagggttcacagccgcctcagacgccgggcgagggatgaccatggaatcccatcagagggaggcatcgagccctcggaccccgtcaccaggggaccgggtctggcagatcacccgcagctcatcggagacaccatgttcggcgcccatcgagggcaacatggtgctttccccccctcctccttgcggaaaggcgacgcaggggcaggctcgggggctgctctcgcaaacccggctcaggccgaaccgttgacagcgtcaacataccagcccgagaacttgggacccgaccgtacacctgggctacggccagctcgcatgagggaacgtcccggccagccgaagcactacgtgag

SEQ ID NO: 7914 - DNA, 585 bp, Zea mays
  Peptide Sequence Number=SeqID_51289
atggcgcctcctgttgacgtggctggtctacgccctaggttgggcgatgtggaagctcctccgaagccgaggtcgagtctgtcttccgtggccgaggtcgggtctgagccccaggttcgggcgaggcggagatcgccggctggtgccggggcggagtccgacccctggggtcgggcgaagcggagttcgtcgtcttctggggccgagcccaagtccgagccctgggtcgggcgaggcggagatcgtcgtcttccggggccgagcccatgtccgagccctgggtcgggcgaaacggagatcgtcgtcttctggggcttagcccgagtccgagccctgggtcgggcggagttcgccgtcttccgggacttagcccgagtccgagccctgggtcgggcgtacccgagtccgagccctgggtcgggcggagttcgccgtcttccgggacttagcccgagttcgagccctgggtcgggcggagcggagcttcctatggcggcgctgtccttctgtcaggccggtcagtggagcggcgaagtgacggcggtcacttcggctctgcaggctggggggcgtgcgtcaggataa

SEQ ID NO: 7915 - DNA, 66 bp, Zea mays
  Peptide Sequence Number=SeqID_51290
atggcgagagtagcgtgtaccctccatggaaccttcggactcggaatgaagttgtacacaatatga

SEQ ID NO: 7916 - DNA, 228 bp, Zea mays
  Peptide Sequence Number=SeqID_51291
atggttcatatttatacgcccagtgctttgcaacttggtggaccccgattgtcattgattgttgctattctagcaaagggaaggaaccttcggactcggaatgaagctgtacacaatatgaaaagcatggttgggacgaaggttgaaccagctacgaagctatgcgcaaagaagcttcggctcagtagcagaaaaaggaaccgacttaaggaggaaaaggctatctag

SEQ ID NO: 7917 - DNA, 496 bp, Zea mays
  Peptide Sequence Number=SeqID_51292
cgtctcctcagacgaggcggcggccggcggcgaggaatcggccggcggcgtagcggcagcagaagaagaggaggtcggcatcgctacgtaccgtcggcggcagcgggcggcagggcgcggctcttcgggaaacccgcaatccaacagggcgcggcgcttcgggaaacccgcaatccaacagggcgccgtcaatcaacggtcacatcaaaaacccccgcggaaccacttcgagcgagggcagcgtctccgccatctagcgacgtcttcggcaccaggtgactttgtcgaactggtccctcggagggcaaatgttggggtgaaggcaaagacgccacccttcgctcgaagtcttcgctgcagccgctggtctgatagagacaaaacaggcagggacacccctcgcttgatcggcaccagacgaagatcggcgacgaagtcatcccacagtgcggcctcgtccagctcaggggcccacgtgcgatccggcccattgtaa

SEQ ID NO: 7918 - DNA, 1884 bp, Zea mays
  Peptide Sequence Number=SeqID_51293
atgcaggtggtcgagttggttccttgcgcccgcaacaagtggggcaactggaatgaattttggttttacgttgctgagggtaccgttgaaggccatgagggactccccgtgtccgagatgtgttctcatttttactcagcgtacccgccctttgaagtggcagaggaggatgtggacgaaggggcccttcggtgcgccgccggcctgagcagtgggtgcgatttggttgaagagtttgtcgtgtacggggtatggcccttggcgcatggctgggcgttgggcgaagtgtgccctcgccagatgccttttcacggtggaagggtggtgcgaagtcctgccttcacactgaatctgcaaaaccgcgacccggccgcctttgtgcgtgaggcggaggatggggcggtgcggctcgttggacgttacgtgtcgaggacagagggccagcgcaactttgatatccgcgggtcgaatgaccgtttgaacagggtttttgaattaaatcaattgctgtatgacggctatcctggtcaagacgacgtggaccgccgtgggaagaagccggtggtggagactggagacgaccctgcgccggcggccgccccatcctctaaaaagagaaaattaggtactgctatgggaggacttggggtttctgatagttttgctagagagttgatgaggacgtgcgcggccccggggggaaggatgtcttcgcccgagctccgggagtcttcggctcggatgatgagggttaccgggggttgctggcctaggaatgttcctatcccccgcgcggctggcgaggacttttttacatctcgcatggttcgtgaatggagagtttttccttacgggcggaatattgctgctgttgtgtcggcagtgatggacaaggaccgccagggagcagcacaaaagcgccaggcggttgtcaggctcgttgaagctaggtcgaagaggcagcgagggtctgcgaaggctgcggcccccggcggaggcaagccgccgctggcggcgaagtcgggcgcccctacgtctagcaaagcgccggaggcgacggcaggcgccgggggctcaaaatcgacgaaggcagtgccgccgtccagcagagtgtcggaggtcgcgaaggcggcccgagcgctgccgtcggcgggcaagcgtgtcgccgacttcgccaccgatattagtgtggaggactatcttggtgggttggacgaaggccagcttgctataattgtgcctgctgcggcgacaacgacggctgccgtagcgccgaaggcgaagggcggggctcttagcgccggaggcgaggtggcggccctcgcggctgtcagggatgaggcgggcgctgcgtcccgccggctgaaggaagtggtggagtcgctaagtcaggtggcggacttcgccaaccgcacggcgtcgggggccctcacggcagttgtgtctgcggaggtcgagagacttcagacacaacatgctgacgccgtccgagagaaatcggccgccgacagcaagtgccgcaagctggcggacaaggtggccgcgctggagggagagaaggctgacctccggcgccaattggcgggggagaggagggagaccaacgaggccctcgtcaaggcacaggatgcgcaggcggaggccaatctggcacgggcggagggcaatcttgccagggagcgcgccgagcagctgcaggagcggctcatcgccctggagagccgcgtggagtgggccgaggccgcgacgcgcgcggaggccgaacggacgcgcacacagctgatggatacatatcgtgagctgggtgcgcggaccggtgacttcgaagtgccggaccgagagcccggacttcgctgtctggaatcggtgcaggaggagctgtag

SEQ ID NO: 7919 - DNA, 513 bp, Zea mays
  Peptide Sequence Number=SeqID_51294
atgaattcacccacccccgccagcggaggagacactcgtttcagctctgacttcctttctcacgatggctttccttccatcttgtgggaagtgcttaactctgccggttaccctatgccccctttgtacacggtggagttgtatgaggagcatcgggtacctcgttgccgagtctggctgactttggaggctcatccccttcagccgggttggcgttctcttgactccgagacgattgaattcagggcggacgacaccactgaagcagcagccatgaagactctgacgactttctgtggctaccatcccctggagatggtgatgcaccccttgggactttttcgtgctgagaagaaggatgaccccatgtggtgtaaccgtgtgagccacatgaaggacaaccagctccacgatgtgcagcgggaactcgaagaagctaatgacactttggacatgcaccacatggagatggaggccaatgaagccggaagcgagggagaagaggctccctag

SEQ ID NO: 7920 - DNA, 819 bp, Zea mays
  Peptide Sequence Number=SeqID_51295
atgaattcacccacccccaccagtggaggagactctcgtttcagttctgacttcctttctcgcgatggctttccttccatcttgtgggaagtgcttaactccgccggttaccctacgacccctttgtacacggtgcagttgtatgaggagcatcgggtacctcgttgtcgggtctggctgactttggaggctcatccccttcagccgggttggcgttctcttgattctgagacgattggattcaggacggacgacaccgttgaagcggcagccatgaagactctgacgactttctgtggctaccatcccctagagatgatgatgcacccgttgggactcttccctcctgagaagaaggatgatcccatgtggtgtaaccgcgtgagccatgtaaaggatgtgtgggcaatgcccttcagaggcgatgctatggcactccttgctaacaccgctcagactgccaagctcactctcgacagtcgggaaagattttgtggtcgacctatccaccgagttggtggagaaggatctgcagtggagaggcttaggcagcgcatcaaccacccttggagcaacaggtggagatccgagacaacactattgatgtcttggagaattagcttcacgatgtgcagagggaactcgaagaagcaaatgaccacttggacatgcacccacctggagatggaggccaatgaagctggaagcgagggagaagaggctcccgaggagctagggccagcccctggtgccaatgggactacctccgcgatgcctccttcacccgtatccagtgtcgcttccaccgctcagggataa

SEQ ID NO: 7921 - DNA, 423 bp, Zea mays
  Peptide Sequence Number=SeqID_51296
atggcttgttcccccgctgaagaaaggagggacgacccaatgtggaaggaccgaagtgggagcatgcccaaggatatctgggctatctacccagagaggaacttgtggttgatttgtccactgagatggtggaaaaaagacctacaagtggaacaactgtccaatgagatccaagagcttgaggagttagtgggaaccagggagaacaccatcaaggttctcgaggaccaactaatcaacactcagcaacagcttgcagaggctaatcagcacctggatatgcaccaccaggagatccaagacctggaggccaacgaggatgtcgacatcgagggaggagaggagcccgcctccagtttggacactgctggctcagggagaccaccttcccccgagtcgagtgttgcctcgtttgctcactag

SEQ ID NO: 7922 - DNA, 1050 bp, Zea mays
  Peptide Sequence Number=SeqID_51297
atgcgatacttgacctcagcgctggagcgggagactacatgctgctgctttgaggacctagagacgagaagtctgaaagggtcgaagaagaccgtagtcaagggtgccacggagatagcgaagaatccacttggcggtggtgaggtggggctcttgcgagaccttcgtctgagtgtcaacaagcgtggagcagagcttgtagtcggacatgcgggtccgcgccagaatgtcgatggtgtactggtactggtgaaggaagagaacctaggggcgatgctctatggtgaccctgaggaagtggatggagagggcccaggtctttcatcgcaaactcaagctgcagggtgggatcatgcgctggaggagggcaacactagacgtcgtgagcacgatgttgttgacgtagaaaaggaggtagacggtgtcatcgccacgccgaaggatgaacagggacctagtggactacacagtcccgagaagacgagagaggatggtccgaacgacggtaggattgatgacgaggctgaaggtctcgtcgtagtccatttcgaggtgctgagtgaagccccgaaggacacaacgggtcttgtactgatgcagagtaccatcagccttgaccttgtgatggaaaatccacttgttagttaccacgttggtggcatggggatatggcaccaagtcatagatgtggttggccagcgaggctgcatactcctccatagcactacgctagtgacgattggcgagcgcagtacagtcgaaggaggggacaggcgagggagttggagcggtggcggtcatgagcatcagccggtcaacttgtcagagaacatcgaccgatcggcgcatgaccatcaggtggacatggcgagggtcgcagtggatggttataggatggtgcactggtggctcgtcacgagagagggccagagcacgagtggctcatcagaagagtggactagaggatcgggccacaaacgttgctggagcaacgggtcgctcgtggcaccgtcggaggcgacaggccgtgatgggcacggtcgaaggtga

SEQ ID NO: 7923 - DNA, 561 bp, Zea mays
  Peptide Sequence Number=SeqID_51298
atgagcgccttgagagaagcaggaaggtcagcatcaatgcaggcgatgcggcaggtacaacagccactgcagcacgtggagggcgcggcgcgcaaggctgctcctcccccgcctcggcggtgcggcggcctcggcgtgcttggacgagatgggaagcgcgggaggttcgtcgaggtcctcggcgaggagaggggcggcgaggtcgggatcgggacccgcggtcgcggcgtcgtcgacgacgggcttcgtcgtgccgtcctccgcgcagcagtgggacgtccagacgaggaggacgtacgcggcgtaaagggagaggaaggaggcggtgacccagacagtgacggagccggtgagcagcacggcgaggaggtagaagagcgcgatgaggaggaagcagacgtcgcgcacgaacccggcgcgctcgatctcgacggggcctcctcggcgggacctcctagggtactcgcacggttggacgaccgggtggggggtggggcgatgcgtggggagagagtgcgcgcatccgacggaagagagactctagaccgtattgacggttga

SEQ ID NO: 7924 - DNA, 483 bp, Zea mays
  Peptide Sequence Number=SeqID_51299
atggaggatgagcctatttcaattgttttccaagtaactgcaaatggtgttggcctgctagatcctggtgttgaaagtaaccgtatttttttctttaggttgaagcatgttcaacaagttgaactatctaatcctaatgttgagatccgcttgcttgaagtattttaccacaagatttataagagcacgaccaggcaaccgtcgaccacgcccaatcgggagctctatcttggcgtcaaagtacattgtggcgaggaggtggctatcaagttgagatggaatgttggcaaagagaacatgcagagaggactgcaattcattggtaggaatttctctgttgctgtgtacgaacaagtcaattctcctataggtttcaacatcacctttactggtttgcttagcctcaccaccgatataggtttagaatttcctataatacaaactaatttctgtgggattcttaacggctattccattatttag

SEQ ID NO: 7925 - DNA, 159 bp, Zea mays
  Peptide Sequence Number=SeqID_51300
atggggaagcctgtcccatcactcctcatgctcctcctcggccgagtgaccgcacttgtacccaccataaccggaatgggagaccatgtctcaggtcgcgtgaggggtaaagtctgcgggcaggttcactcaggatttagtaatccttatgcaaagtga

SEQ ID NO: 7926 - DNA, 447 bp, Zea mays
  Peptide Sequence Number=SeqID_51301
ggagcttcaccgaggcatgcacggtctcttccgatggtcgggcacggctgggaagggctctgctggccggtctacggtggcgggggatcggctggccgtgggcacgtcgcgcgcggggcgaacaccggtgatctctggctccggtatggcgagactgatggttatccttctcagaaagggatcacatatgatgcacataggaaggacattgacataaccaggatagtaatctttggaagatctttaggaggtgttgttggagcagttctttccaaaaacaatcctgataagcatcgtgttccccatcgacaacgtggagctagatccctcaacctaaagcaacccgccatcgtgcctcctcaacccagtgaagctacagaaagcgtggaaggctcctgcagcgtcgtgttccccgacgacaacgtggagctagatccctcgatctaa

SEQ ID NO: 7927 - DNA, 792 bp, Zea mays
  Peptide Sequence Number=SeqID_51302
atgggtcctttgtttcggatcaacctcgagattcaggctctccccagaagtgtcagaagacagctggtggggctaaggagcccgaacctcgggtccaggacgggtagaggggcgcgagccctccgccgccaccatcttcagatcagataccaccaccagcgccgcctgtgtcagactgaccgccgtcaccgcgggggcaggggcggcagcagcagcagcaacgacaacgtgtgccccgcttccaaggccactggaaggttcacggtcccaaagcgggctgagcttgagcaggagcgtgaggacttcaaggaggacattcggaaggtgtctgaccgagaggaggaggtgacccggaaggagagaagcttggtcaagaagaaagaacacctagaccaaaaggaggaggccgccacagcgctccatgataagctgaaagcttataatgcagtgctggagaaacagcgagacaagcaggttgcggctgaggcgaagctacagaagctgcagcaggagcttgccgacaaggctagtgacattgctcgcgctgagggaaacctcaaggcgagggaagcttccctggtgaaacgaacaactgacctcacttggcaggaggaggacctcgtcttcagggaggagatgtgggcaaggcggaacaagctgctggatgagcttgagctcgaggcagaggagaaagggaagcgtctggaggggaaagtgcggaggagcaggtccgccagttctaggcagcgcaggcgacgcagacggccccgggctcctaggcggtggaggtga

SEQ ID NO: 7928 - DNA, 72 bp, Zea mays
  Peptide Sequence Number=SeqID_51303
atggggaagcctgtcccatcactcctcatgctcctcctcggccgagcagcatggatcaagcagtctcattag

SEQ ID NO: 7929 - DNA, 648 bp, Zea mays
  Peptide Sequence Number=SeqID_51304
atggcgcctcctgttgacgtggctggtctgcgccctaggttgggcgatgtggaagctcctccgaagccgaggtcgagtctgtcttccgtggccgaggtcgagtccgagcccctgggtcgggcgaggcggaggccgtcggctgaggccagggcggagtccgagccctggggtcgggcggagtggagccggtcagtggagcggcgaagtgacaacggtcacttcggctctgccggctggggggcgcgcgtcaggataaagctttatgctgatgggggttaccagctgagaattaggagccttgagggtcttaatgccttgcgtaatgcttcggctggtctggttgttccctcatgcgagctggtcgtagcccggggcaagagggcgatcagggacagactcggcttttttacatacgcccctgcgtcgcctttccgcaaggaggagggggggaaagcgccatgttgccctcgatgggcgccgaacatggtgtctccggtgagctgcaagcgggtaatccgagtggacgtccgtgccccgttcgttaggggtcggctaggggcccagaggcacgcccaaaagtacctgcgggtgatatgccggacccggtcccctagcgacggggtccgagggctcgatgcctccctctga

SEQ ID NO: 7930 - DNA, 294 bp, Zea mays
  Peptide Sequence Number=SeqID_51305
atgaagctgtggaaggagacttccaggagttccaagactacgacgagttctaggtgtggatgggctcgacttagacacactgcacgaaagtcagtcatccccttcttaccctcccgccttgctgagcgtccgcttcgccgtcccgtggccggacagtccagccacttggagagactacatcaccgcctgcgtgaggagcaggagcgtcgacgacaggagcagcagagctcttccttctcgctccaccaggagatagagtctgtgaggagtgaaagtcgcctagagggggggtga

SEQ ID NO: 7931 - DNA, 405 bp, Zea mays
  Peptide Sequence Number=SeqID_51306
atggcgccggcgccccgccgcgcttccagcttcttctcggtgctcctcgtcctcctctttgcgctgtcggtggtggggcgcgcgggcgccaccggcgtcttccaggtgcgccgcaagttcccgcgccacggacgacggggcgtggcggagcacctcgcggcgctgcggaggcatgacgtcggccgccacggccggctccttggcgccgtcgtcgacttgggcctcggcggcgtcgggctccccacagcggccggatgtcttcccgcccagcgcagcctgtactacacccggatcgagatcggctcgccgcccaagggctactacgtgcaggtggacacgggcagcgacatcctctgggtcaactgcatccgctgcgacggctgccccgccaggagcggcctcggg

SEQ ID NO: 7932 - DNA, 627 bp, Zea mays
  Peptide Sequence Number=SeqID_51307
atgtcccgtggtcatgagctgctggttcatgatgacgaagaactcccgcttgtccttgtcgtggacgaagcagtaccggcggcagtgtgtgccacgttcgtgcacggcacgcggagatgcatttcaggaggtgaagcctgcccccaatcccatcatgtcgtcgcgctcgcgcttgtccgccggtggcgggcgcacagcactcgtggtgcacgccccctcgtccctcggttcctgtctccatcatttccggctcccgcgctcgtaacgatgtctaggcgcggtaaatctgctaaacaaaggaatggtcctttgaccagaactgccttcgacccactgcctttgccaactggcgttccagtgcctatgtgtttttgtgtgatccttgcaaggttgacaagtctgaggatcatgacatctatcgatagagaggacacagagaggatagagaaaagacgagaggagcttgcggccaagcaacaacgggtagacgagcaggaaatgaggtgtgttgctgaatgcagggaggagaaggagaggaagcttgagcgtgcacatcatgcaaaggacacaatggaggagaaccctgatgcatttcgcaagggcaaatggccccgttgcactcggtag

SEQ ID NO: 7933 - DNA, 258 bp, Zea mays
  Peptide Sequence Number=SeqID_51308
atggccgatgttcctggtgtggattccaccgcggcaatgcgggaggacatggaggccatctgcgtggcgaagagccccagttggcgctggacttcagcaagggcggtggtgattgctgccaactccgacggctgggctgaagctgcagtttcagcttcagcagatcctggcatatctgataccaggttgttagaattaccccggctgcggaggttgtatgagtggctaatggttggagggttggaggaagaggtgtga

SEQ ID NO: 7934 - DNA, 2721 bp, Zea mays
  Peptide Sequence Number=SeqID_51309
atgccgtcctcttcctcttctactgccgatacaccgtcggtcggcgcatcgtccgaggacacgctgagcaacgtggcggcggaggagttgcgtcctggcgacacagtggaattcggcgcgtcgcggatgtccttggtccgcgtgcaagacatgcaacagcttggatattttggcggcggagtggcgcgtgtcccgggggcggaggaggtccccgagccagaaggcgagttggtcgtcttcgaggcctttttcgccgctggccttcgtctgcctgcgcatcgattcatggcggaggtcctgcgtagattcgaggtccagaaaaggaaaattggacataagattgcacaatttggatcttgcacatttacgccgaagaccggcaagacttcgatggaagtcgtggagttggttccctgcgcccgcaataaatggggcaactggtgggaattttggttttatgtttccgaaggcacagtcgaagactatccagggctgcccgtggctgtcatgtgctcacattattacgcagcgtacccgcagtttgaggtagcggaggatgatgaaaacgaagaggcccttcggtgcgctgcccgcatgagtagcgggcacgaccttgttgaggagtttgtcgggtatgtggtatggcccttggcgcatggctgggcgctgggtgaagtatgccctcgccagatgccctcccgtggcgggatgctggtgtggagtcctgccttcgcactggatttgcatggccgagatcccgctgcattcgtgcgtgaagcggaagacggtgcggcgaggatcgtggggcgctacgtgccgaaggcagagggtctgcggagctgggatatccgtgggtccaataacaggctgaatcaggtcttcgaattgaaccgtttgccgtacggtggttatcccggagaagacgccgccgaccgtcgcgggaagaaactgatgggcgggaccgaggaagggacttcgcagttgatggggacatgtgcggcccctgggggaaggatgtcttcgcccgagctccgggagtcttcggcgcgaatgctggaggttaccgggggtcggtggccaaagaatcttccgatcccctgggcagagggcgaagacatgtctacgtctcgtatagctcgtggattgaggattttcccttacggacggaatattgttgctgttgtgtcggcagtgatgaacaaggatcgccaggatgctgcgcagaagcgtcgggcggtcatcaggctcccctatcctaggcgcaaagcgaagagggcgtgggggagcgcgaaggctgccgcccccggcggtagccagccaacgctagccgcgaaaccggtcgcacccggatccagcaaggtgccgaagagcacgaaggctgtcgtctccggcgggaccaagtccaccccgggcgaagctgcaaaggtccgggagctgccttcgccggggaagcgcgttgccgacttcgccacgaatattatcgtggacgactatttcgtcgggtcgggcgaagggcaactggttgttgtcccgcctgcggtggcaaccacggcggcaaccgcggtgcttggggtgaagggtggcgctttctgcgctggcggcgagatttcgtcggccactgccgtcaaggacgaggcgggcaccatgtcccgccggctgagggaggcatcgcagcagctgtcgcagcagctaagtcaggcggccgacttcgccgaccgcgtggcgtcgggtgcccttactacagatgtgtctgccgaagtcgagagactttgggcgcagcacgcggatgccgtccgggagaagtcggctgcggagagcaagagccgcaggctggcggagaaggtggctgccctggaggccgagatgacggacctccggcgccagctggtggaggaaaggagggaggccaaccgggccatcgccgaggcgcaggctgcgcaggcggaggccaaattggcgcgggcggagggaagtctcgccagccaacgcgccgaggaatgggaggtgcggttcaacgctctgcgcggccgcgtggagagggccgaggcctcaacgcgctcggaagttgagcggacgcgtgcacaactcgtggactcgtacagcaagctgggtgcacggactgctgacttcgaggtgcccgaccgagaggcgggccttcgcttcctcgagtggctgcaagaggaactgctggcactcccgaccatcgtggagggattcatgtcctttgcttccctcctcacctgcgaaggggccatgaacgcgctatctcgcgagggctgcagacactacgaggtcttcgaccaaacagacgagagctttgaacgtgagatctttaaggccgaagaccctattatggagcgcgccgaggacgtcaaagacttcggaggtctaatcggcgcgccgcctgaagctgcggagggcaacccagtgctgccctcggatgctggtgaaggcccatcggacgtgcccgtgcctgctgctgctggcgaagaccctgtgtcggcccctgtgccgacggtcgaaggcgctcaggaggtggtggcggagccgacagttgaaggccctacggccgcggacgcgccctcgcagggttttgggcctgcgcacgcaaccgctactaaaagtgctaattttgtggcggcttcgaccgtggttgcggaaaatgattcgggtgattctgtgtggcagaaccacccgaattattctagcttaagtgcctaa

SEQ ID NO: 7935 - DNA, 581 bp, Zea mays
  Peptide Sequence Number=SeqID_51310
atggcggggccacgtcggtgttttagaggtaacagccgagtgactgatggtaacgtcggcgttttagagtgtccaacacaagtgcctaagtgtaaaatggtggacaaagtacaaatcaaggataaagccaagactctgctcagtctggagaaccggactgtcctgtggtgcaccggacagtgtccggtgcgccaggctggctctggcaaacaggctgctctcgggacttcgacggcggtgtacggctataattcaccggactgtccggtgggccgttcacaggcgaactcgtcgctctcgggaattcaccggcgacgtacagctataattcaccggactgtccggtgtgcaccggactgtccagtgagccaacggtcggcagggccaacggtcggccgcgcgatctgcgcgggacacgtggccgagccaacggctagaaggaggcaccggacagtccggatcacctattcacccccctctaggtgctctgagttcaccggactgtccggtggtgcatcggacagtgtccggtgcgccaggctggctctggcgaacaggctgctctcgggacttcgacagcg

SEQ ID NO: 7936 - DNA, 453 bp, Zea mays
  Peptide Sequence Number=SeqID_51311
atgggcaagagtaagaagggtagcagttctttgcctcgttctggtgacaagcgtaaacgtgagccgactcctccctcggaggacttcggcaactcggagtactcggaggaggagttctcctccgagtctgaggggtctccggcccccgtctctcccccggcgtcgtctgatgattgggacgactcccaggggattgccgcggaggtctggacctacatccgggccatcgagcgcgccgggctcgagggctcggatgagtcggagtactcctcggactcgtccgaggagggcagcggcggcgatggcggagacgacgacgacgacggaggcgacagtgacggcggcgacggcagcggcaagggcggtgacggcagtggcaagggcggcgatggcagcggcatgggcggcggcggcaagggcagcagcaggggcagcaaccaggccagtggctag

SEQ ID NO: 7937 - DNA, 639 bp, Zea mays
  Peptide Sequence Number=SeqID_51312
atgagcaagaacacaagagacacaagatttatcccgaggttcggtcacaccaccaaggtgccctacttcctcgttgaggcgcccacaaagagctgggtctctttcaaccctaatcctccctttgccgaccacaaagatttgaaatgggagaggcaagagatgtgtgagagagagtgggaggtgttcttcaagttagaaatggagtttgggtcgtgctcttgtgtggggagagaggaccggttgaaccgcccctgggaccggttcaaccgcctggggcaggctgacagtcaatctgccagtcagactggcagactgcaggtcagactgcaaaaacaggtcctgacaccggttgaaccgcccctaggggccggttcaaccgcctgggggtcagactggcagtcagtctgccagtcaggaggtcagaccggtcagttgaccctgacaccggttgaacctcccctaggaccggttcaaccggttttgaccagtgagctgaagaagctcagctcagctgcagtcaagttcagctggaaagctcagctgcagctgaagaagctcaactcagctgaagtcaagttcagctggaaagctcagctgcagttgaagaagttcagctgcttttcaacaagaacactctag

SEQ ID NO: 7938 - DNA, 636 bp, Zea mays
  Peptide Sequence Number=SeqID_51313
atggcgaggagctcgttcaagctggagcaccccttcagttcgtcccttcgattcctgattcccccctcctcatccgggcttcagctcatgttattggtcgtgctagggtttcggttgtttggctgctttgatggagtgctcgtgggtggcagcagcgagaacggcgacgctctgccagtggtggcgaagacgccaaagaggaggacgacgctggagagccagctgatcaagtttgaggacgaggacagcgagaaggcaagagcagtcgcggatgcgatgagtcctgtgcaaattccgagtctaaacagagaagttaaaattctaatgggacgattccttgcttctctttcctccaaatcaccagcaataaatgctattgtacttaacagcagtgtgctgtatgctattctagtgatatcaatatatgatttacgcatgtcttctcctatgagagttaaggatcacatgtatggtagcccaatattaaatatcaaatggcaccatacacttaattctactgaacctaaactgatcactgctgataagcacatagtgagaatctgggatcctaatacattaccatacatgctgccatctgaaaatgcattttcagctgctgtatctgctctggagtga

SEQ ID NO: 7939 - DNA, 186 bp, Zea mays
  Peptide Sequence Number=SeqID_51314
atggccatgatgggttcaacatcggaaaagatgtacctctgccagggtaatcggacagatcctgttgagttatctggtgcacatgcatggtcgtctgaggtctttgggacaaggacaggtgcatgtgggcccaataacttggaggcttaccggatgtatggcagccctgagcagattcatatctag

SEQ ID NO: 7940 - DNA, 531 bp, Zea mays
  Peptide Sequence Number=SeqID_51315
atggaccagtctgagctcaaccacaacctggtccccctggaggtcagggaggagtacgagctcaggagggacctcaaggtcagggctttcaggacctatcacgccatacccagccaggggtatgtgatatactcggtgaagcagaagcttaagcaggagttcattggcctaccagggagcgagatcaagcggctcaagctatcaggtgtggaggaggtctctgacaattattgtgtctatccaaacgaggtgcaccacactgctagggagcgaacacaggcaaatccaatggagtcgtgccccagtaaagaggtggaaaactgggtggagaagctggttgaagaaaattttaacctaatcactgagctaggtgaacaaggacgagtacgtgtacttctgctgaagcttgacgaccccgtccctagaagaaaaccagctatcgcgttcttgcacagctcttacaagtgcaaagagtggctgcgcccactgcttaaggcttacctacagaaattgatatcgttggagaagtaa

SEQ ID NO: 7941 - DNA, 432 bp, Zea mays
  Peptide Sequence Number=SeqID_51316
atgatggttctcgcctcagttgtcgccacctcgttcgccatcctgcttcttttctctctcccctcatgcctccgcctccgcgccaccccattctcggcagagggcatgaaagcaagtgcctcctccccgtattcgtccggcactagccccaacgccgacctgcgcagtggctattgcacgtccacgaggacgtttcacaacatgcacacaccatcgttttcgccgtcgacggacgtcacgttcatcttcccggccttcgccctgttcttcctgcccaacctactgcccccgcccacggttgcagccgcgagccgaccgatgctcgtaaacacgggtacgaggcgagtcggtcttgctcctagcctgtcacgcttaggttatcttggcgatgaggagtccaggtatgggatattggacaaccaagccctgtag

SEQ ID NO: 7942 - DNA, 470 bp, Zea mays
  Peptide Sequence Number=SeqID_51317
atgcaggcggcatgcaaccgcaccaaaggggcgcaccctttcgacttcgacacatccagcatggaggcccaggcccacacgtcatgcgggcagaagcagcggtcaagtcgtcagcaagctcacgtcccctcctgggacagcgagagaaccctctcccacggcgtgaagacgacgcgcccgtgtttcgtccctcgaatggctcccgcacgcacaatggctgccccgcgaaccactcgtcccgtcgcattaactctgcggcaggacaggcggcacctttggcaggcgaagcagggaccgagaaaggggatactccgaaagggatccttccccgcgaaggaagcgggccccgagccccctactgataagaggctggcccccgaagggttcgacagccgcctcagagcacgcagagcgagggatgaccctaggtacattcgatacataaccaaggctcgggctacgctcccgag

SEQ ID NO: 7943 - DNA, 351 bp, Zea mays
  Peptide Sequence Number=SeqID_51318
atggcgattctcttaaagcaaccgccaatggaaatatgtttccactggcgggaggcgctcgcgttggtgtcgctcatcgacgacgagaagaagtttggcgactgccagtttgacctctggaagcagtactacgtggtcgcatgcgtcgctgtgttcggcaagctccgccgcaaccgccgcttggacgcggtccagagcggctgcaccgcgctgtccatctcaaacaaggggacctcatggtcgtcaccaacgccgcccaaccaagagtcatcggtactcgccatgtcgtgcgcgttcgacgactactatatcaaggactatggcgtcatcttggcgccagaggtgacgtag

SEQ ID NO: 7944 - DNA, 933 bp, Zea mays
  Peptide Sequence Number=SeqID_51319
ggcggcgttcgtgttcttgggttgtcctgcctttgctccggtacggcgcctctgcgcgaaggtcggtgctcgcccgtctgggaggatccgagtggggatctgccggtgggcagatggcttccgtcgtcggtgctgaggtggtggcggctgaagaagtcctcgtcgccgacgggatcaccaccaccatccgcgctccgggcctccggctctttggctttgatagcttgtcctcacccctcgagtggggacgtgggcgaggggcttgttgcagcagcgtccgccctgaagccatcgctgctgctgtttggccgcctggagtggaggtcgttgtcgctgctgccggagcgggcagtgccgctctgcgatgagccggagccggaggcagtggtgtcagcatggacagaggcagagttggctcgaaaagaagacttcgtcggccggagcctggccgggccgtccactggtgggaccagcgccggagtcggggcggtcggccgagccgtctgctcgggccaggttcctggaggagaccctggcggcgatggcccgggcgtggtgctgacatcgtccttcggagcggagatccttcgcctgcgttgccgtctgaggctcggtcggacttcgccgaaggtggagttgacgtcgagggtgctgctgctccccctccatcgacgtctgagcctgcaggatcagttcgcctgtaaaagtcttttgagcgttaaggcttgttcggtcagcaggatcgctcatccgaacacgagttacttctcgcagaaggcgatgagtgagctatcggatgttccaagcgttgctgtagacctcgccttaactgttggccagcttgtacgtcctgggcttcagaaccttggtgatgacgaacgggccttcttagggaggcgtgagcttgtgccgccctcgggcgtcttgtcgtag

SEQ ID NO: 7945 - DNA, 78 bp, Zea mays
  Peptide Sequence Number=SeqID_51320
atgaagaggccgacagaagggacccaggtgtcggtgcaaactgcgaaggaaccagatttaagtttctatttgttttga

SEQ ID NO: 7946 - DNA, 447 bp, Zea mays
  Peptide Sequence Number=SeqID_51321
atggcggaaatcttttgtagattggcctcgattcctcgcttgaaaaccaataaatcgagcagcatgcctccgggaatgtcaaagacacacttttccaggttcaacttgatatcgttggcctttagcttatcgaatgtctctcaagtcatggacaaggccctcagtttgttgagtcttgactacgatgtcgtcgatattatatattctacaggtgccaaaggttcaacacaaaccaataaaaagatcaaagttagggttcaaaagaaaggagcaaaagaaaccgaagagaaccctggtctggcgcaccggacagtgtccggtgcaccagggtccgtacaggctgaactctccaccttcgggaatttagaaaagccgctccgctataattcaccggactatctgatgggtcacctgactatccggtgtgccaagcggagcaacggctaa

SEQ ID NO: 7947 - DNA, 180 bp, Zea mays
  Peptide Sequence Number=SeqID_51322
atggggctcggtgtatgcggctcgctctgccaagtttgggttcgccccttggggaggagtgcgagacattgtggtacaggtggttatgagattgatggttctggttatgattatggtattggcgaagatgaagccgtggaaggagacttccaggagttccaagactacgacgagttctag

SEQ ID NO: 7948 - DNA, 351 bp, Zea mays
  Peptide Sequence Number=SeqID_51323
atggataacctctcgggtaaaagaatctctgccgccggtgagctggaggtcactccggtgactcacagtggcttccccttctgctttgcggctggagcgataggctcgccggtgaaccgccgcctctcggccttgtgccgcgtggctctgcctttccactacgtcgctgtgactccctaccgctgtctcatcaacggtgaaaacgaagaagagatcgaagtgaccgaagagaagacaccaccacctttggaatctcaggcagagacttgtctctactttgacatctgcgggcctgagcctgactcacctactaacgaaggcaagccccggtgcatttgccacctcccttga

SEQ ID NO: 7949 - DNA, 540 bp, Zea mays
  Peptide Sequence Number=SeqID_51324
atggaaaatgaagaagagatcgaagtgaccgaagagaagacaccaccacctttggaatctcaggcagggactagtctctactttgacatctgcgggcctgagcctgactcacctactaacgaaggatccactcttagtaaagcatttatgcaaaacagagtctttgatcttgagataccttaccttgactcccttataaccagcatacccttgagagtcttttctttagtcggtttatgtaatcacttccgcattgctatatcttcgatgttctgtaatgtctgcaagacaggtgaaacgttcctggaaaggacaactgtaggtgggcctaatgacttgggaggttccgtcacagtccgatcatgtccagcccccagcatgcgaacgaccatgttacaggaatggtttatagctgctgtgcggttgcttcccaatagccgagtgaatgcacttcatgaggacttctgccacacctctcctgtacagtatgccccctatgagggtgtagtgggccgactgcctcgcaatgcattccactga

SEQ ID NO: 7950 - DNA, 318 bp, Zea mays
  Peptide Sequence Number=SeqID_51325
atgtacgacaagctccggcgcagccgccgcttggacgcggtgcagagcggttgctccgcgctgtccatcgtcaagcaggggaacctcatggtcgtcgtcaaagggtactaccttgctgatgagcccagggtgcactttgttttacagcccaaccaagagtcatcagtactcggtatgtcgcgcgcgttcgacgactactatatcgaggaccgtggcgtcatcttgacgcaggaggtgacgcagaggaggaccgacaacaatgaccagttcatcatcctcgcaaccgttggggtagcttttgtgccgacttgcctttaa

SEQ ID NO: 7951 - DNA, 1095 bp, Zea mays
  Peptide Sequence Number=SeqID_51326
atggagaacaatctctacatgcttcgtttaatgatgctgaagtggattgaagactatgagattgaggagtgtttgatatggaagtgggtagctaaaggtttcatccagaagaaagcaggaagcagcagcttgtttgagcagggagaggaatacttctatgagctcataaacagaagcatgatccaggcggtggagtccaaaaagtttgctggcatcatatacggttgtcgcgttcatgacatggtgcttgatctcatccgtgacctatcaaccgaagagaactttgtcactgtctcatacgttgatgatagaagaggcacaccgtcgtcgttgacacgaaacgtggtgcgccggttagctcaccaaaacagaagattaacgaaggagactcaccaggacaacctcatggagagcagcatgaggtcactggttgcctgtgggtgtgatatcgatggttgggtcttcgtcttccacccaagctctaagctgctgcgtgtattagctttagagaaatgcaggccatcgacggacattagaaatctgctttggttggaacattcagagacagtaaggacaccaccaccttctccacagccatcaagggattcacgacaatcaaagaaatctaaattccctctactaaaattggtgtccacattcgagaaaaagaagagtaaagctactactgctggcacatctcgatttttgaaagggattggacgggacctcacgtcacgtactgttgatttggccgagcacgaggagtctgtagaaaaggctaaggcaatggctgcaaagataaagatcccaactaaggcagattataaaaatgtgcctaaacattatgtgccggccagacctctactaactcttgagaaactgaggaaggtccctgctgaccaaaaggcctttcttgcattcgaggatatgtggttaatgatgaaccttcagaaactcgacgtgcaacttgtgactctgtttgcactggaccactggatatgcttcctcatttattctaaggttggaaaggtgctggtgctcgactccttgaactatgacccttcaacctatgcaaaattccttagtatcttatag

SEQ ID NO: 7952 - DNA, 324 bp, Zea mays
  Peptide Sequence Number=SeqID_51327
atgacaaactcaacttccctatatggtggcatctctggtaactcttatgggaagacatctgaaaaatctctaaccacacggatgttgacaccaacaaacttcccatctactaagaatgtcgctagtctggtggcggtagttactgcaattccaacttcaaatctttctcctttggaactggtcataaatgtaggatctcaaggtgtgaaatccatctcgtctcaaagtagagaaggtttcgtcctacagtcaacatttcctctgataccacttctgtcacacccggctttaaggaacaaagccaggattaagtgggaaatttaa

SEQ ID NO: 7953 - DNA, 444 bp, Zea mays
  Peptide Sequence Number=SeqID_51328
atgggcaagagcaagaaaggcggaagttcatcgcaccactccggcgacaagcggaagcgcgagccgagtcccccctccgaggacttcggtgactccgagtacttggaggaggagttctcctccgagtctgaggggtcgccagcctacgcctctgccccggtgtcgtccgatgactcggacgattcccaggggatcgctgtcgaggtgtggacgtacatccgggccgtcgagcgctccgggcacgagggctcggatgagtcggagatctcctcggacgaggaggactcctctaactcgtccgaggaggggagcggtggcgacggtgatgatgagggcgacggcgacggtggcaagggcgacggcggcaacggcaagggcgacggcagcagcggcaaggacgacggcggcagtggcatggccagtggaaaagtgcagctggcttaa

SEQ ID NO: 7954 - DNA, 450 bp, Zea mays
  Peptide Sequence Number=SeqID_51329
atgaagcgcaatccctgcatcacgagctcccgccggaagtgccgcaaggcgcacttcacgcggccccgtcctccgtccgctgcgttctcatgtccgccgggctgtcgacggagctccatcccgatccgcaaggacgacgaggtgcaggtcgtgcgcggcacctacaagggccgtgttgacttcatgtcagaaaatgttcgggcagtacttgatcaagcaggatttaataagtctcatatggaggctttgagggctaacctgttgctgaaggtgctgtcccagagcagctcacaccaattcctaaagagcgttggcatcaaaacatcggcatcctccaagtcatcatcatcaaatcaaagtgagcttcgggaacaacttgcagctgaagcgacggctgctgttcaaggtgaactcgaccagctcaggaagaaatgtgaagtcaagtggtga

SEQ ID NO: 7955 - DNA, 576 bp, Zea mays
  Peptide Sequence Number=SeqID_51330
atggatgattttcagtggcggttccttactctaaccgtctatgatggttctagtataaaaaccctttcttccactccggtctgtactgtttccgcaaccaccttccattggagggttaaagccaaaggtaagcttcggctaaacctactaatgcacatgaactataaggaagaaccttctaaggctcaagagttaaggatgatgatagaaagaactaaattaccctcggtatcgtcacagataaagatttgtgacgattccgatttggtcataggggtcgcgtcacatttgttgtgttgtgacggactacctattttcgtcatcgatgtgtatccattctgtgacgaaatacgcgttgtcatggaagtgatttcattctatgacgatcagtcgtttggaaggtgcccgatggcgtatgacgtcagagctgacatggcagctgacgtcaacgctgacgtggctagtgatgtggcagctgatgtcagcgctgacgtggtatatgttttattatatgccaccagtttggtcacagatgtgcagagaataattttattgggaaattgcaaaagatactaa

SEQ ID NO: 7956 - DNA, 123 bp, Zea mays
  Peptide Sequence Number=SeqID_51331
atggcgtctaggagaagagagagagagatggtgcgggaggtcgaggcggaggagcgcgtcagccaccggggcaagggtgtggcagtggtggtgcccgacggatgtggaggggcagaagcataa

SEQ ID NO: 7957 - DNA, 1377 bp, Zea mays
  Peptide Sequence Number=SeqID_51332
atgcaggcggcatgcaaccgcaccaagggggcgcaccctttcgacttcgacgcgtccagcatggaggcccaggcccatgcgtcatgtaaccggcgcgccggttactacgtgcgagaaactgcaccgccacttgcgccagtaccgtgccttctcgactgcggaatcagtgccgcgactcgaggcaaccctgtgcatggcccaacagtgccaaccgagcacatcggtcacgggtcggtccgccgcgggagaagacgtgacggtcgatatggccaaaagtgggccggcagtaatggcggcggcaggcgggcgaaagcagcagtcaagtcggaccgggaaaggggatactctgaaagggatccttctccgcgaaggaagcgggccccgagcccccctactgatcataggttcgaaggctggcccctcggaagggttcgacagccgcctcagagcactcgggctccgcgcccactactggtcagaggttcgaaggctggcccctcgaaagggttcaacagctgcctcaggccactcgggccccgcgccgactactggtcagaggttcgaagtctggcccctcggaagggttcgacagccgcctcaggccactcgggctccgcgcccactactgatcaggggttcgtaggctggcccccgaagggttcgacagccgcctcagagcacacagagcgagggatgactctgggtacgtccgatacatggccgaggctcgggctacgctctagaggctcgggggctgctctcgcaaacccggctccggccaaaccgttgacagcgtcaacataccagcccgagaacttggaacctgactatgcacccgggctacggccagtcaatgctccgtccactcaagggacacgatctcgcctcgcccgagcccagcctcgggcaaaggaaaacagcgccgcctgcgctgctccgactgctgtgccacccgtcagggtgaggctgacagccgccaagaccggcctcaggcgccataggaagctcggactcaacctcgacctcggacgacggtctccacctcgcccgacccctcagcgaggactcagccacgacctcggaagacggactccgcctcgcccgaccccggggctcggactcaacctcgacgccggacgacggtctccgcctcgcccgaccccagggctcggactcaacctcgacctcggacgacggtctccgcctcacccgatcccagggctcgggctcagccttgacctcggacgacggtctccgcctcgcccgaccctcgggcccagactcagcctcgacctcggaggagcctccgcctcgcccgacctcgggctcggaccgaccacgtcacaggggggccatcattaccctacccctagctag

SEQ ID NO: 7958 - DNA, 603 bp, Zea mays
  Peptide Sequence Number=SeqID_51333
atggcaggggaggttccttacctcaaggcgaaccccagggacctctcggtggcggcgaaggcgcgacgacggcccgggtcgatggtggcggaccactgcggctgcacggaggacggcggaaaagagaaagaggagattgggagaggtatgaagagaggagtaacacctgaatttgtgaatatgagcaaagaaattttatatccccaaattcagggtgttacacctgcgacgctaccacgccccgaggggtttggtcccgagacctccaggtgggtgacttggtgcttcggctacgacaagacgcccgagggcgccacaagctcacccaccctgggaaaggccattcatcatcgccaagattttgaagcccggaacatacaagctggccaacagtcaaggcgaggatcagacataagcagggggagcagcagcaccctcggcgtcgactccaccttcggcggaatccgacccggcctcggacgacgacacggtcggaggatctccgcctcgaaggaagctatcggcaccacgcctgagccatcaccgccagggcctcctccaggaacccggcccaagcagatggccgaatcggccgctccgtag

SEQ ID NO: 7959 - DNA, 1134 bp, Zea mays
  Peptide Sequence Number=SeqID_51334
atggggatctgcgcctcgtccaagcgcgtgcggcaggaggagcaggactccgacgagaacgtggtgtacgtgatggacgagcagggcggcgggggagaaggcgaggacggccgtggcgcccgcgcggcggcatcccgcaaggtggcctccctcttctcgcagaagggcaagaaggggcccaaccaggacgccgtcatactctgccagggattcggcatggaggacggcgtgttctgcggcgtgttcgacgggcacggccggtgcgggcagttcatcagcaagctggtgagggactacctcccgttcatgatcctgagccaccggaacgcgctcctcatgggctccgacgacgacgacgatgatccggccttcagcgacgcgtcggcgtcggcgtcggcgtcgtccacggacggcagcgggcagtcgtcgccggcgccggcgcagctgctggaggagtggcgggaggcctgcgccaacgcgttcgaggccatggacaaggagctcaagctccaggccaacgtggactgcaacttcagcggcaccaccgccgtgtgcgccatcaagcaggggaaggacctcatcgtcgccaacctcggcgactccagggccgtgctggcgaccatgtcggacacgggctacctcaaggccgtgcagctcaccaccgaccagaagcccaacgtgccccaggaggctgagcgtatcaagcgctgcaacggccgcgtgttcgcgctcaaggacgagccgtcggtgctgcgcgtgtggcttcccgacgaggactgcccgggcctcgccatggcgcgctctctgggcgactaccgcctcaagcgccacggcgtggtgtcggagccggaggtgacgcaccgccgcgtcgcgccgggggacctgttcatcatcctggccacggacggcgtgtgggacgtgctcagcaacgaggaggtcgtgtccatcgtctgcgccacgccgcggaagcagcacgcgtccaaggccgtcgccgaggccgcggcgcagcgctggcggaccaggtacccgacgtcccgcgtcgacgactgctccgccgtctgcctcttcctgcgggaccaggactgggccagcagcgtcgccgcggccagggccaaggcggccgctagccgctag

SEQ ID NO: 7960 - DNA, 660 bp, Zea mays
  Peptide Sequence Number=SeqID_51335
atgtcttcgcgctcccttatgcatcgtgcctttccgccttccgagcccccggatggggaacacccgcagtccttccgccttgtcgttggagtaacgcaacttcgtggaagttggtacctttcagccatcgttcggcttcaaggattttcatcaggcagcccggctgcatccccacgccggtggtcacccaagacggtgaccaccagcccctgggtggggagaagcaagccaggctacgatcttggtcccgccctcagcttcaaggatgttcatcatccttgctggggcagaggccgggctgagccggagctctacctcccgcgcgggttcgtgggtcagcctctccttcagcattcgagggagagggcgctcactggccctgcgagaggggcggacttcgacaacgcggggctggtcgacggcgggcgtcgtcagcttcagcgcgttgggcttgccggcttggctcccggtgccccctcctgccgcaagggcggttgtcgcgccgcgcgcacgggaggaccgcccaagacgtcgctcgctgctagggcggcgttcgtgttctggggctatcctgcctttgcaccggtacggcgcctccgcgcggaggtcggtgccccgctcgtccaggaggattcgagtggggatctaccgatgggctga

SEQ ID NO: 7961 - DNA, 120 bp, Zea mays
  Peptide Sequence Number=SeqID_51336
atggtaacccaaagggtattcaaggataagaggacacttgccttcaccaagctgctgctcagggacttcttctgtaacttcctcgggaaacacagactgcccgttgtctacgcaaagtaa

SEQ ID NO: 7962 - DNA, 231 bp, Zea mays
  Peptide Sequence Number=SeqID_51337
atggagtcgtacaaagttgatacagacaggtgtacgcagtgcagtcgtcgaacgacgccaaagaacgggatcagctctggtcgagcggacgaagcgagcagtcgtgagtacgatccccaaaaacctgatagcccgcacacccgtgcaagtgtacctctgaggacgatgattttggaggcctgctctcccactctctttgtgctcgcagaaggtgggacgggaatgggctaa

SEQ ID NO: 7963 - DNA, 426 bp, Zea mays
  Peptide Sequence Number=SeqID_51338
atggctgctgagaaaaaggaagatgaggagtgggaaagggagcgaccacatagaagtgagattgctgctaaggtagcaaaagccatgtttgaaaaaaggaagatagagaagcaaaaaataaatctacacgtcctatgttatctcagattatggaggtacataaaggttgggaagacgaagaggacaacacttagcttttgggagcacatcaatttagtggaagcaaactactacacacaaaatgacaaagaggaggaggatgctttcttgtccttggcagctaataaattagaggcccattactttaggcaaaaggtagttgaggctaaggaagatgagcccagtcacatgaatattttcttgcaagatggcaacaaggaatgggacgaggaagactgggtgaaatttgaaggtggtagtgactag

SEQ ID NO: 7964 - DNA, 303 bp, Zea mays
  Peptide Sequence Number=SeqID_51339
atggatgatgttggtgacgaacctgatggcttggtcagaggtgatcttcatgatgggccatgccttgatccatttggtgaacttgtcgacagcgaccagaatgtgcatgttgccatggggtgcctttttgaggggtccgaccagatcaagtccccataccacgaattgccaggtgttgccaattgtctggagcaggccagtagaaaccatgtcgaaaagcgttcctcacaaggcttcatggagcgacgtggtgcccgtaggttccactacgggtatcctcgaggagttattttcctttgttga

SEQ ID NO: 7965 - DNA, 387 bp, Zea mays
  Peptide Sequence Number=SeqID_51340
atgaggcaaagggagaaggtaagggaggggaccaagggggtctgtcataatggggcagggggccggggaagcagaggcaacatgcgagagcaggaacagggcgtggccagagtggagggatacgaggatggtgggcgtttggcgcgggcgtggaggaggcaaggagcgcgggatgtgtggggccgtggtcgacgatggcgcgaatgggggtgtcgatatagatggccaaatgggtcgtgtctagcgggtcgggccgaggcgtgggctccatttaatagtgatgtggcctggcccgacattattaaaatggggcgcgtgccggccccatcccgagatgtctgccatgcttgggccactgtctcaggccgcagcgtcggaccgtcttga

SEQ ID NO: 7966 - DNA, 1386 bp, Zea mays
  Peptide Sequence Number=SeqID_51341
atggaacccacccgcggatctcgcccacgatgcacgcctccaccgcgccgccaatggaaggtgtcgcggatcccgacatgcccgctcgcccggatctcgccgtgtccgcgcatggatcccgcccgctcgcccaatctcggcacgctctcgtggtggaggcgcccgctcgcccggatactcatgaatactgtccaagctcgcgaggcctccgcccgcctcccccaccgcgacagatgctttgcggcagcggcgaaccgaatccgaccgctcgccagggccttttgcgacgcgtcggccttgcgcgcggatgcgggggccaacgggacgcccagcccgcaggatcacgccgagaaggatccgcatccgcccgatgtgctagacattgctatcgttggtggaggcatgatgggcttggctgtcgcttatgcaatgtccaatatgccgttaacgaaacaccttagagtcgctattatcgatagcaatccagcgctgaagtcaagaagttacctgggcaaaaacagtatacctgattctagggtcagcaccgttacccctgcaaccatttccttcttcaagggttgcagcagcccccaactgacttttttctatgctctgctagcgggagatatacagtgtacagaaaagagagctcaagcagggaactcttattttgtagtgaaatctcttaaagagaagaaaaaagttttgcttgcttgtgtcactatgaaatttaaaattctagaggaaccgaagctggggagagcatggaagtttttatcaccaatgtctgaaatagtcgacttgaagaagctctttgctccatcaaccattgcagtggtacactggtttgatgacttgttagctctatttcaatatcatgattattttttgcgctgcaacctgataatagttgatgcagagcttgcagtgagcttgaaaatattagagcttgaaaatattagaacttcagaccaaaaggatctatggaaatcagtaaagattaacaagttaacatttcaaggtgtgaagttatgtggacgttgcaaggtgtactttgggcaaaatgtagtctgcaagcaatctctgacagtaaatggcgaaggaagaatcattaagctctttgcattatgtagatgggactctggcagcacagttggtgaatttgatgggcactcaaagagggttctaagttgtgacttcaatccaacacgtccatttagcattgtgatatgtggtgaagatattctagctaacttttatgaaggaccaccatctaaattcaagcattcgataaggtcaaatgggccatacttcatagctatttctccctcaatgtttcaagttaaagggcttaagagtattggagcactctatgttacctgctag

SEQ ID NO: 7967 - DNA, 300 bp, Zea mays
  Peptide Sequence Number=SeqID_51342
atggcgcctcctgttgacgtggctggcctgcgcccaaggttgggcgatgtggaggctcctccgaagccgaggtcgagtctgtcttccgtggccgaggccgagtccgagcccctgggtcgggcgaggcggaggtcgtcggctgaggccagggcggagtccgagccctggggtcgggcgaagcggaggttgcttcttagcgaatgcaaggcctcgggcgagccggaaatatgttcgccgttggagaggggcctcgggcgagacggaaatcctccggagtcggctgcccttgtccgaggctag

SEQ ID NO: 7968 - DNA, 279 bp, Zea mays
  Peptide Sequence Number=SeqID_51343
atgtcccatctgatggtactactggaggcaacaaagattacgttggacaacagagaggagctcgtggttgatttgtccactgaaatggtggaaaaggacttgcaggtggagcagctatccactgatatccaagagttggaagaactagagatccaggacatggaggccaacgaggacgttgacatcgagggaggagaggagcctgcctctagtgtggacactgctggctcagggagaccaccttcccctgagtcgagtgttgcctcgttcgctcactag

SEQ ID NO: 7969 - DNA, 441 bp, Zea mays
  Peptide Sequence Number=SeqID_51344
atgaagttggaagagtttgtttgtctgaagcaaggtagtgactcggtgaagcagtaccttgctaagttcaaccatctctctcaatatgccatagaacaagtcaatacagacttaaagaagaagaactgtttcatgagaggtttgaatgataggctacagcagaaaatggccacctgtttagatctcactttcaataaggccatgaatacaacaatcttggtggagaagaagaacttggggcaggggaagacaaaatggtttggacgtgaaggagattgtccttacccagagaaaaacaagtcaaaattccaaaagacctttggaaatgcttctcaaggcaagggaaatatggaaaacaatcaagtgggcaagggtaaaaggagaactagatgggttattatactcaagtggctactacaccagaaggagaacccatcttga

SEQ ID NO: 7970 - DNA, 483 bp, Zea mays
  Peptide Sequence Number=SeqID_51345
atggggtcccttatgaaggtggggttagagttgttagatctatcaagtactgcttcagctcctcgaaggctttctgctgagctggaccccattggaagacttcggcagatttcaatatttcaaagaaagaaccctaacctccaccgcctttgccttgagtccgtgcctgaggacctcgcccgcgccgccgtcccctgcggtgctgtgggctcagtagtgaagatcggtgctgggggcctctgcgacccgtgggggatactctcacgacatcaccaagccagattttggccggccctagctgggattcgccggcgggctccgcgggtgcagctgatccgcccccagtgtcgctgcactgctctgccgagtgatcaccgaatcgctgggatggtgtgctccggcgtgggcgtgggtgctctgctcggcttcgaacacggggtagaagagggaccctacaccgttggatctagatgggtggtgtag

SEQ ID NO: 7971 - DNA, 465 bp, Zea mays
  Peptide Sequence Number=SeqID_51346
atggcaccgacgaagtgcacaagcggcggcgggctggcacagagttccatccgaaaagccactaaaagcaggtctaggggtgctttcagatttgcactacgagaaagtcagcttttagaaaaagctgcttcctggatccagccctttggttggcttttggcttttagaggggcaaaagccaaagccaaaagtcaaaccaaacacacccttagagtccggtcagtggtcatgggagttgttgctcgtatgacgaaggttgtggacttagctgatgtcgttgtatatgctttgggatgtatggggagtaatatgaggaagtgtggaggatttgcttgggttgattctgttgtgtttgggcttcaacaatttccttctgtttttggattgtcacttggcatgtccatgtggtgtgccctttatcttcgccatagaaagggcataacatcttccttagttgagagctaa

SEQ ID NO: 7972 - DNA, 648 bp, Zea mays
  Peptide Sequence Number=SeqID_51347
atggtccgtaccattcaaaccactcggatcaacaccaacatcatccctccgccacggcaagttcctgtctacccagtggtagttgaggaaactcctgtggatctccctcgcattcgagtggagcgtggagtcatcttggaggacaacttggaggaacttctgcctatgcccaccctgttggcagaatcactagccttcgcagctagatcatcaacctcagcaccgcctgcaccagcagttcaagcccctgctcctggaggcgacgacccggatgactcttccctaacctgctgcaagacgtgctgcacgcattgggaacctacgtccgacccctgtacgagacaagaaccagaccagcacgttccaggtggagctggagaagatcacctcaacaccctagctggtgtagtggcaggtcttaacaccgacctagagagtgctaccctagacctctctagggtacacttggagctggaggatgcacatgcaaggatcgcatccctggaagctcagcttgatggaaggaatcccccggaagttcaagtccccgccatggcgttatcccctccccgcaagaggatccgctatgtagaaccaggatccaaccaggctgctttagattttaaaatttattttgtaataagttag

SEQ ID NO: 7973 - DNA, 102 bp, Zea mays
  Peptide Sequence Number=SeqID_51348
atggcgtcggcgtgctggaatagaggaggggagagagccaagggaagcagggcgcagataggagtccggggaagctcagagggcactgtttgggatacttag

SEQ ID NO: 7974 - DNA, 1374 bp, Zea mays
  Peptide Sequence Number=SeqID_51349
atggagttgtgtcgtgcctgggtcgtcttctcggtctacagtgccggccccgtccgacacaatcgctcgccgcacggccacccctccctttgcatggagcgccttcaagcccgcaacgcagccctctgtcggtccctctgttcgacggaagtgaacagaagaccgccacagaccatccgtgcaccatgttctgccctctcacctcgaccgtacgattgtcccttcgctcgggtgcgtcgtctgatctccacgctccagtgcgcacgcaccctaccctctccacaaccaacccctgcgagatctgctcccatttctctccgtctcccccatcgcacgaggtctgcgccttcctgctcgccgtcggcccatctcgactccctctgctgccatccgaagcccgcgcgcgaagccgagaacgagggagagctgctggtggccctcgtcatcggcagcgaccattcgctccgtcagcgtgctccatctctgatccccaatccctcctttaggtttcgcattcagcgcaagcacagtcacttccctatgaaggtcggtcccgccgtgggcggtggcggcggcggccacccatcgtcgatcatcactaagcataccgcgcggtcagggtcctcgcgctccatcgccaacctttggcacgccacgcaatcgggatcgcatcagcaagaagcagcagaccgcgtggacacagcgacgtccgtcaccgacccgctcctcgagtgggcacgcgaggcgcactggtccatgcggggtctccccgcagcaatctccctaccccgcgccaatctccctccccgtaatggcgtgccaaagcaattacagccatacatgctcagatccagtttccctcgagttccagaaactccgcccccaatagccctcgcgtcctcgatggaaggttcgcctccacgccattcatgctgctccgtgagtcctgctcccttcctcttcctgacttgtggcttccaattctcctttctgccctcagatggagttctagatcagcgcgacagggtccacggcactgtgtcgggggcagcgttggagttggaaaagggttgcgtcgcgaccgcggagggaacaacgccagtgagcggtggaggtgttccactccacaaccctccaaccccgccactgccatccaaccacgtcggcgccaaggtgtactaccttccctacgtcaccgacgtcgagtactacacgatcggtggtaagaagatatcttccacctcgatctactttgagagcctgtcgatcaacccttcactagatgatatacaatacgcctacttcgccatccccatgcctggcagtgccaagcaaagcaagacttctatagagttatgcggtgggtacaattag

SEQ ID NO: 7975 - DNA, 147 bp, Zea mays
  Peptide Sequence Number=SeqID_51350
atgagggtggaatggggtggttatgagattgttgattctggttatgactatggtgctggtaagcggtactctttccgtttggaaaggggcgaagatgaagctgtggaaggagacttccaggagttccaagattatgacgagttctag

SEQ ID NO: 7976 - DNA, 612 bp, Zea mays
  Peptide Sequence Number=SeqID_51351
atggtggcgcaaggggcaggaagggcggtttcctcttctctggctaagtctctcgggttgcgaaaacctaagagggaggcaggaagcggagcaaagaaccgtcaccagaccctctcccaggctccaagcctccctactgatcagaggttcgaaggctgcccccccgaagggttcgacagccgcctcagatcgtgtgggccctacacccactactggtcagaggctggcccccgaagggttcacagccgcctcagacgccgagcgagggatgaccatgggtacgttcgatacataaccaaggctcgggctgcgctcccgagctcaccggagacaccatgttcggcgcccatcgagggcaacatggcgctttcccccctcctccttgcggaaaggcgacgcaggggcgtatgtaaaaaagccgagtctgtccctgatcgtcctctcgccctgtgtagaggctcgggggctgctctcgcaaacccggccccggccgaaccgttgacagtgtcaacataccagcccgagaacttgggacccgaccgtacacccgagctacggccagctcgcatgagggaacaaccagaccagccgaagcattgcgtgaggcattaa

SEQ ID NO: 7977 - DNA, 483 bp, Zea mays
  Peptide Sequence Number=SeqID_51352
atgggcaagagcaagaagggtggtagttcttcgcatcactccggcaataagcggaagcgtgagccgactcctccctcggaggacttcggcgacttggagtactcggaggaggagttctcctccgagtcagagggctcaccggtccatgcctctcccccggcgtcgtttgatgactcagacgactcccaggggatcgccgcagaggtgtggacctacatccgggccgtcgagcgcgccgggctcgagggctcggatgagtcggagtactcctcggatgaggagaactcctcggactcatccgaggagggtggcggcgacggcgatggcggtgacgatgacgacgacggtggcgatggtgacggtggcggtgacggcggtgaaggcgacggcaagggcggtgacagcggcggcaagggtggcagcggcgacggcggcaatggtagcaagggcagcagcaggggcagcaacaaggccagtggctag

SEQ ID NO: 7978 - DNA, 1023 bp, Zea mays
  Peptide Sequence Number=SeqID_51353
atgacattgacctccctatcaatgcgtgagaaggcacccccaccacccccactctattatagcggatgttcttgtaggtctggttctcttcatggtaggggccgcagtggttggaatggtcgaccatggccaactgagttcttgaagtccctgcaattacatagggtatggcgcatctccttgaggcttcatgtggccgatgaggtcctaggcccattcatcggcagtgatgtagatgtctgcctcttagaacaactgttccaaggtggttggagctttctaaaggatggctccgacgaaagccgagtcattagacccgcggaacgagcagagggactcgtcgctttggtgcttgatggatttgaggtcctagggttgcgccggtttgttgaaaagggattggaaatttgtgacaaaccgctggcagaagttggtccagtcattgatgcactgttgaggaaggtgttggagccactgcagcgcatcttgcccgagaacaatgggaaaggctcaagcgaagtctggcagcagatttcagggaaggattgtgttctcgcatcgaagcctgacatcatgcttcgctcgttcccgctcgtgctcttgggcatggcgacgatcacggtgccgagagttgtggcgctcgcggagtgccttgttgttaggagtctcccatgctttagatgcctcatcctaggatacgggctgagcaagatcctgttccctggcctcatggtgacgccgaatgttacgacgcctgtttcgaagttggtgtgccttgcactgcaggggctcctcccccagtacagtgggctcatcgtcggagatgggtgcataccctactcttccctgaataaagaggacatccgagaagaaagagcttggggctacaacacatgctctggctatctcccatgtaggcagagcggacaaaacgatcatcagccttattcccgtcgccatactggtgctggggttacccacttcttttcgccgagtgatccgggtccacacctgattgggtga

SEQ ID NO: 7979 - DNA, 339 bp, Zea mays
  Peptide Sequence Number=SeqID_51354
atgggtgaaggtgttcccggtaatccatggtggcttggtccaatcaaaagggtcagtgagcatgtggaaagcctagggacgttagaacaagcaacggtgcagcttgaactaacctgggttgagctggccacgctccccggcgacgatgggacgggtagagggagtcatggcgacgctgtaaaacggctaggccacgcggcgcacggtcgggaagcggcggtcgacggcgaatacttaccgcgggcggtgagccagggggggagaacatgccgtgcccgacggggtgacttccagctcaccggtgacgaggacccttaccgcgacagccttatccggtga

SEQ ID NO: 7980 - DNA, 852 bp, Zea mays
  Peptide Sequence Number=SeqID_51355
atgggggaggagaaacggagggattcaagctccaataatcacagaaacggcggatgcaatcgcggtgctcgggtcggtcggcttggtcgtcgcgttggacttcggctctgctacagggaagggcggctcggtggatgctcggccgcggttggacgcgcgctcgggatcgcgcgcaggggctggcgcgcggcgaggcttgcttgcgtgcagggccggctcggcatcgggtgcggcccggtcggctgctcgtgcgtcgcggctgggagcaggcgctgggcgctcggccgcctgggctcgcgcgcaggcagcggctggctcgatctccttgtcgcaggtgggaaggtgaatcgtcaaggtcttccgcaccgaacaaacagtcacccgcactcactgaacggtgagccacagggtccgagaagtctcatcacgaaggtgccgcccgctcctccctccaatatccctctgttctcctatcaatatcgcagcgccgcccgcatcaatcttgaagagttcgaaagtttccagacccccaaaaggcgaagcggcgatgagttccaccggaggcggcggccgcgagcgcgtcggcgctgggcccccgtgtacctctccaccgttctcgagtatctcgtcgccgaggtgctggagctggccgggaacgctgctcgtgacaacaagaaccgtatcgtgatgcgccagatccagctggcggtgcggaacgacgaggagctgagcaagctgatgggcactgtgacgatcgcggctagcggcgtgatgccagacatccatcagaccctgctgcccaagaaagctggtcagaagggggacatcggctctgcctcccaggagttctaa

SEQ ID NO: 7981 - DNA, 81 bp, Zea mays
  Peptide Sequence Number=SeqID_51356
atggcgtccttcgcgctgtggatgggcggcggcgcgtcgttcgtcgtcgtggcagtcaacgtcgcagagaggagcgggtaa

SEQ ID NO: 7982 - DNA, 165 bp, Zea mays
  Peptide Sequence Number=SeqID_51357
atggccatgatgggttcaacatcggaaaagatgtacctctgccagaataagataacacacaatgggagtggagagatggcgagagtagcgtgtaccctccatggcaagaggctggacggtggtgtatctgtgatctcggttggcgtgaacctgatctggtcttaa

SEQ ID NO: 7983 - DNA, 885 bp, Zea mays
  Peptide Sequence Number=SeqID_51358
atgcagcgccgcgcggcccagaggccttacgtcaggctccgcccgctagcttacgtcatgggcagtaagccacgtggcagcatcgggtctccgcctgagcggggagcagaagtgtacatggtatggtccggacacgtgtcggctccggacccccgcctggccttgattaaggcctgggtattctttgtcccagaatcccgggaccctgttgagggtggcccggaccctacacagagaggtctgggacccgtcccggcgatctggtatatacccgcggaggtcctggaccctgcccggagggtctcctccccctctgctcccaaagtcgctcccaccagtgaatccggctcccaacagcaggcgtccgctgggagtggtgccggcgacctgcctccgcctgccactaccgaggcggcgctgtcgggccccagctccatcccgctgcccactccggaggagctggaggttattcttggacggcggctccagtccggcgccgagccagaagcggcgccgactcccctccctcgggtgctctcccgcgctcatcaggctctctgggagaccgaggcggcgatcctacgggagtgggaggcgctcgcgaccgagcaccagcgcctcggtgattggcgcgcccagctagaggagcgcaccaaggccgcgtcccaccaattcgcctcagagcgatccgagcttgagcaggagcgcgaggactataaggaggacctccagaaggtgtttgatcgggagcgggaggtgacccagaaggagaagaggctggccaagaaggaggagcacctagaccagagggaggaggtcatcacggcgctccaggaaaagctgaaggcctataatgtgatgctggagaaacagcgggacgagtag

SEQ ID NO: 7984 - DNA, 258 bp, Zea mays
  Peptide Sequence Number=SeqID_51359
atggatgttttaatgattagaaatcttgaagaggaccatcaaggacttaagaaaagccaagatgtcaaggaggagaagctagaacattcacaacaagagaaagccaaggataagccttcattgcgaggtcactcgtgtgtcacgggtgataaccaacggagcagtggtgtagtgattcagaggattcgttcgctcggagccttggatcaacttcgagatcttcacccaatcaagttatcaggcctcgtcctctattaa

SEQ ID NO: 7985 - DNA, 645 bp, Zea mays
  Peptide Sequence Number=SeqID_51360
atgatgaacacggacgtccctggcagcaacgcgctcacagatagagcgaagatcgacctcaacatgcttcttgcgttggtgttggacgaggttgatggagaggtagacaactctgacgttgccgcagtagacacacatacttctagggaggtggttataaagctcctagaggagctagcagaactggctcgcctcagccaccatattagcaatagcctagtatgcagcctcagcactagaacaggagaccaccggttgaagcttggaggaccaagagatgaggttgtccccaaggaacactgcatagctggatgtagaccggcggagacagacctgctggatagcatatgcgatgtcgggcttggtgaagattttggaggacagccgcggctgcttggagcgcttagcccggagcgggaggccgggagggtgcaacaggacgtggaggcatgcgagccgccacaacggggatgggagagccagcgaccagcagggggaggacaactggggagggggaggggagcggggaagggtggccggcggttaggtgcacaggcgccgacggccaggtgcgcaggagctggcgactggggtgggaaaggaaagggagaggctctagtaccaagttggaatggaaaaccctaa

SEQ ID NO: 7986 - DNA, 213 bp, Zea mays
  Peptide Sequence Number=SeqID_51361
atgtgggcccaggggcaaaacagagggaataaaatagaagtatacaatgccagtgtcgcccagaagatctccgagcgccataatgatggcctggttgccgcccgtcagcggagtggacagggcacattaaatgctgaagcgacacatcgcctgccagtggagtggcagggctcattaaatgccgaggcggcacatcacttgccagtggaatag

SEQ ID NO: 7987 - DNA, 453 bp, Zea mays
  Peptide Sequence Number=SeqID_51362
atgggcttcgactggaaacactggaagctaatgagaagcatttatttgagcttcggccatgaagcgacaatccttggccaaacagatgagtaccgagtctgggccacacttctgtccgccatgacgaaagactttgccatgactgatgagtttccaccatatgaggatatggttgtcatgttcttggttcttgttgtattggttttcgtgcgcttcgatgttgcacatgtctttggctgcttcgtcgatcttcttttggagctcagagagacgaagcatattctccttgtgcatctcgatttggtgatggatcacttcaaggttgttgatctcgtcatcaagctcctcttctcgtggctttgtactattggccttcctcttttagttccttgccgccctgatgagagcttcgtctccttgattggggtccaaggtcatgaggatagagcctag

SEQ ID NO: 7988 - DNA, 183 bp, Zea mays
  Peptide Sequence Number=SeqID_51363
atgggggttctcccctacttaacctttcgtggaaggaagctgaaggagaagggtcgcatgtggcacgctaagagacgggcagctgaaggagaagggtctcgcatgcggcagatcaagagacgggcatctcaaaggtttaatccggagttgaaactccagtggttagtgaatgctaaaaattaa

SEQ ID NO: 7989 - DNA, 269 bp, Zea mays
  Peptide Sequence Number=SeqID_51364
atgttgagactggagggaaacgcaaagaaaacactcgacggcagccccttggtgaagatgtcgatgaactgcagcgtggtggggacgctgagaacccgaacatcgccggcggcgacacactcgcggacgaagtgcaggtcgatctccacgtgcttcgtgtgctaatgctacacgggagtggtgaagaggtagaccgcgctgacgttgtcgcagtagacgagggtggcccactaaagggggctgtggagctcctggagaagctggcctga

SEQ ID NO: 7990 - DNA, 342 bp, Zea mays
  Peptide Sequence Number=SeqID_51365
atggaggaaggatgtgaggggtgtggaagatgggagtggaataacgagctagtggtaggagtggtgtggaaggaggctccggagtcaaccacccagtcggtgggaaagggagagggtggtgaggccacgatgtgtgcggagagggccaggggaggtgctccaacaaggccactaggaggggagggggacaacgaaggctcgattgccagggaggcgatcgcagcacggaggaatacaatggaaatcggagatggagaagcagttgatgcaaggagcagaaagtctgaaggcaatggtgttcttcttccacaaacaggctgcaaagaaaggcaaccacgatga

SEQ ID NO: 7991 - DNA, 753 bp, Zea mays
  Peptide Sequence Number=SeqID_51366
atggttgcggcctcgccagagaagctccactgcggcgacgcggggtcaggtgacaaagaaaaggaggtggcggggagggatgatgccgaggttatgtcgccgcagctctcggatgagctgttgcgggagaaggcgcagcgcatccaggtcatgctcaccagaggcatgtccgaacgcctccctgaccgcggcaagaagctactcgccacacttgatgccatccaccgggagcaagaccgccgccaggcccgaggcgacggggcacgagcgccgctgagatctctgaccagtggaaactggaatgctgtaattgtacaatatagtgacggcttgggtaatgaagcatgtgaaaggatagtccgatcaaggtgtattgaatcatctggtttgcatagtgacctcagtagagttaaagtatcagtggctgatttcatgtcttcatttggagcggataaagaggcaggcatcaaaatatctagtttggaaataaaaggtaggagcccaaacaagcctagcacttcgatagaaaacaaggggaagttatgtgaagagaaagactcttgtgaagcctcttcacaacaaatgaattcagttcatgaagagttgcatctggacacctcagagaacatgcggaagacatcttctgatgttggcgctagcaacaatggcaacaatgtaatgtgggaagaggttcccacaccctctcgtaaaagggttcaccagcaaagggaggtcatttttggtgtcctttga

SEQ ID NO: 7992 - DNA, 204 bp, Zea mays
  Peptide Sequence Number=SeqID_51367
atgtcgcccaccacacatgggagctggagactagagggtgtagtggcggagcgctatgctagagcggttgagccgcaagcggagaagcaggctggaagcaaagctggagagggggagctagaacagcggcggtcaacagagaagtgggctgcgagagacctagagtatgtgatgtgtcatgcgagcgactcagcgaggttgtga

SEQ ID NO: 7993 - DNA, 258 bp, Zea mays
  Peptide Sequence Number=SeqID_51368
atggaggggggtgttgctggcggtaatggtggtgggtgcgctgcaaaaaggggggtgggcggcggtagtgcgctgcaaagggggtgtgggggggcggtggtagtgcacatggaggcggggcacgtatgcgggggagcatgggtgagtggtggggtcaatgaccctgatgtttgtggtctctggttccaagaatctttgcctctgtatgagaaaacctttcttaaaaagaaagaaaacacacaagctcagcaatgttaa

SEQ ID NO: 7994 - DNA, 210 bp, Zea mays
  Peptide Sequence Number=SeqID_51369
atggatgagtacataagggaagacattgacatcctccaaagaagggagggagtccaaagatatgcagaaactgctaggggcttcgagggaagattccacttgagggcgagaggctccaacttgtggatattcctcacaaacgggaagaaaactataaggaagaaagccgtggtattcaagttgatcattggatcacttgaaaggggttga

SEQ ID NO: 7995 - DNA, 772 bp, Zea mays
  Peptide Sequence Number=SeqID_51370
aggttggacatcttacccccaagtcatgtccccatctgccaagagacggacatagcatacacctatacagaggaggcgaggcaggggttcgggatgacctccatcgcagcaaaatcatccagggacctccatacactgaccactcccctactgcccctgcccctttcggtaacgctccgcggtcgttgcacggacgccgagatcaccggcgaggaagacgcgctcgcgtgggagatggacctgactccaggggcccacgcgcagcgaggacgcgagacccgcgcgcgcaggagcctgacccgtggggtccccacgtcagcgccgggtgtagctgatccaggcgcgtggaagagaggtgagaggatgggccggtaccctgagacatttcttcagctgagacacatgaaatacatcatgaacatccgcgagatgatccgctaccctcaaattctccctgattatacagacttgttcttctacctcttgaataagttcaagtccaaagaactgtcttcctccagtctgatccaatatagaggagtcctgtatttcctgccatacagagtctcatacggtgacatcttcagactggcctgcacttggttagtcctctcagtctgcccatcagtctgtggatggcagacaatccgtgtcatgtacaactctgccaacttggctcctgaatacgtggtcttcaatggaacaaagtgggctaccttagttagcctgtccacaatcacccatatagaatcatatccagcagacgtgtggg

SEQ ID NO: 7996 - DNA, 561 bp, Zea mays
  Peptide Sequence Number=SeqID_51371
atggcggcgcaaggggcaggaagggcggtttcctcttctctggctaagtctctcgggttgcgaaaacctaagagggaggcaggaagtggagcaaagaaccatcaacaggccctgtcccaggctccgagcctccctactgatcagaggttcgaaggctggcctcccgaagggttcgacagccgcctcagatcgcgtgggccctacacccactactggtcagagggccctcttagagagggttggccgcgcggggacgaggacgagacaggcgctctcttggggccgctcgcttccctctcccgcgtggacgcttgtaaccccctactgcaagcgcacccgacctgggcgcgggacgaacacgaaggccgcgggattcccacctctctcacgccggtctccggccgcctcgcttctccccccttcgcgctcgccctcacgctcgacccatctgggctggggcacgcggcgacactcactagtcagcccaagggaccccccggtctcggaacgccgacaggcctgaaaaaccatctttctccaggttctgaccaatttaagggg

SEQ ID NO: 7997 - DNA, 267 bp, Zea mays
  Peptide Sequence Number=SeqID_51372
atgggtaagctttgcctcaggcagactaataccagaaaggccaacacgcaatgggagtggagagatggcgagagtagcgtgtaccctctgtggcaagaggctggatggtggtgtatctgtgctctcggttggcgtgaactcggtctggtcttaagaaacccggtggtgaggaaacaacagacttttactgttttagttctaaggtggtgcctaaggaagaacctcaacagtgaagtcgcgggaggatgttgtaacacccggttttaa

SEQ ID NO: 7998 - DNA, 303 bp, Zea mays
  Peptide Sequence Number=SeqID_51373
atgggcgtccactcggatcacccgttagcaactcactggagacaccatgttcggcgccctccgagggcaacatggtgctttcctcccccctcctccttgcggaaaggcgacgaaggggcgtatgataaaagccgagaaaacagcgctgcctgccctgctccaactgctgtgccacccgccagggtgagactgacagcagccaagtccagcctcgagtgccataggaagctctgcctcgcccgaccccagggctcggagtcaacctcgacgtcggaagacggtctctgcctcgcccgaccctag

SEQ ID NO: 7999 - DNA, 315 bp, Zea mays
  Peptide Sequence Number=SeqID_51374
atgcagattattgaaagaaagtgcgaggctcaaaagggtgctgggataagatctaacctgaatttttatgtggttttgtggactgtaggaaaaaaaacgctcgataaactcaccgatcaacctggaaatctgataccaattgatgtagctgaggtgcccgatctttcggcgagtagagataattccgatttggcggaagatgacccttgcgatccgactacgacgagcaagcccgaggcgccaatgcaatcgctgaaccaactccctgtggtggaaggggtggcgcctgggctggagaaggtgctgctggtgtag

SEQ ID NO: 8000 - DNA, 98 bp, Zea mays
  Peptide Sequence Number=SeqID_51375
tcggaatagcacaacgtcgacctcccaccccaaatcgtagttatctggagacggtgtacctgtcgctcaagggcgccacaccatcttggttgtggtag

SEQ ID NO: 8001 - DNA, 315 bp, Zea mays
  Peptide Sequence Number=SeqID_51376
atggagacccgtgcactcttgttttgcttaggaatcagggagaagaccgaaagggaaaaggatttgaacatgctggattcggactgcagaagaacaccaacttgtgacggtcaccacggtcagatgcgggctcggattggaatgttcaagcacaacatggaaagcttatcaagtctactttcatatggatccggagttatagacgagtgccctagtggccagggtgtcacgctccacaagatcgtgacagccataggaggtggtgtatcggttgctaaggcgcagcgtctttggaaggctgtagtcgggccgtga

SEQ ID NO: 8002 - DNA, 105 bp, Zea mays
  Peptide Sequence Number=SeqID_51377
atggccccatctgtcggcgccgtggggaaagctgggccgcgcgaggtgagatgggccgaggaggttcacctacggaaaccttgttacgacttctacttcctctaa

SEQ ID NO: 8003 - DNA, 521 bp, Zea mays
  Peptide Sequence Number=SeqID_51378
gctgtgccccggtgttcgccttggggcgcggcctgagactgaggttccgccttcgcccaaaaaacgggctgaatagccatgtttgcccgtacacccaagcctccgtgtttgttttgcttgaatgcaccggggcattggagggaaccgggaggaagcttctgccactttcggacgggctgttcggccttgcgtttgagctgaaaaccaggggttccccttgcggcccgggccgaaaactgaagctctcgttctacccccaaaataaacgaagaccaagcatgtggaaagacaccgaacctaaagtgcatgtcttgagtgaagggcacggtggaacggagggaaaacggctcggaggcgcgctgccacgggcggcagggctgttcggccttgcgtttgggctgaaaacgagggatgggtttcgtggcgtcctgggaaaataccctggttttctgaaggctgaactccccgaagtcctgggagggggtctcctcggccaagccccgcaccccctcgcggcctag

SEQ ID NO: 8004 - DNA, 435 bp, Zea mays
  Peptide Sequence Number=SeqID_51379
atgggaaaggacaacaagcgcaaacgtgagccgactcctccgtctgaggacttcggcgactcggagtactcggaggaggagttctcctccgagtccgagaggtccccggcccccgtctctctcccggcgtcgtccgatgactcggacgattcccgggggttagccgcggaggtctggtcgtacatccgggccgtcgagcgttccgggctcgagggctcggatgagtccgagtactcctcggaggaggaggactcggacgacggcggcgagggcggggacgaggacgacgacgacgacggtgacgacgacgacgacgacgatgacgacgacgacgacgacgacgacgacggcggcagtggcgggggctgcacaaggggcggcggcgggggcggcgccaagtgcggcggcggcggcaggggcagggccagtggctag

SEQ ID NO: 8005 - DNA, 600 bp, Zea mays
  Peptide Sequence Number=SeqID_51380
atgaagaacgtagcaaaatgcgatacctggtgtgaattgcagaatcccgcgaaccatcgagtttttgaacgcaagttgcgcccgaagccttctggcggagggcacgtctgcctgggcgtcacgccaaaagacactcccaacacccccccgcggggcgagggacgtggcgtctggccccccgcgccgcagggcgagcgtcccggcgcgcggccggccattcggccctacggacccatcgagcgatcgagcttgtcctcggaccgcgaccccagaggcgtcctcagcgacggactgggcccaagttctctggaaagggacgcctgggaggccgtcgtcggcgcggacggtatccgcgcgcctctggcgcgcccctcggggcgctgcgccgcaacggcctggttcgagttggagcacgcctgtcgggacccgaaagatggtgaactatgcctgagcggggcgaagccagaggaaactctggtggaggctcgaagcgatactgacgatagcaagagcccacatgagttctatcgggtaaagccaatgattagaggcatcgggggcgcaacgccctcgacctattctcaaactttaaataggtag

SEQ ID NO: 8006 - DNA, 99 bp, Zea mays
  Peptide Sequence Number=SeqID_51381
atggccggccaggcagccaacagcgccagctggagctgggcgcgcagcgttccgcccgggtttcggctgcacgagttccctaccccctactatacctga

SEQ ID NO: 8007 - DNA, 1542 bp, Zea mays
  Peptide Sequence Number=SeqID_51382
atgccagaccaaaaattgatgtcatggagacgcggatacgttccgatactgattttacggacgtcgcggcagtcgtcattaccgctgcggatagtcgcagtggcattctttgcgttgcttaaagcgcacccggttttcatctaccgggtgtttttgtattccgaacatgctgttgaattacctgcgggcgttacggcggtaatcaacggcaacgagcagcagtggctggagctggaatccgcagcctgtcagtatgaagagaatttgctgccaccgttttatgacacgctgacgcagtacgttgagatgggcaacagcacctttgcttgccctggacatcaacatggtgcgttttttaaaaagcatcctgccggacgccatttttacgatttctttggtgagaacgtctttcgcgccgatatgtgtaacgctgacgtaaaattgggcgatctgcttattcatgaaggatcggcgaaagatgcgcagaaattcgcagccaaagtctttcatgccgataaaacctattttgtgctgaacggcacatcggcagcgaataaagtggtgacgaatgcgctgttaacgcgtggcgatctggtgctcttcgaccgtaacaaccataagtcgaatcatcacggcgcgctgattcaggcgggggcgacgccggtctatctggaagcttcacgcaacccgtttggtttcattggcggtattgatgcgcactgttttaatgaagagtatctgcgccagcaaattcgcgacgttgcgccagaaaaagccgacctgccgcgcccgtatcgcctggcgattattcagctgggaacctatgacggcactgtctataacgcccgtcagtcggtgcacaaacagcaggcgggattctcacagacgtcgcagatccataaaaaagataaccatatccgcggacaggcgcgtttttgcccgcataagcggttgaataacgcctttatgctccatgcttctaccagccctttctatccgctgtttgctgcactggatgttaacgccaaaattcatgaaggggagagtgggcgtcggctgtgggctgagtgtgttgagatagggattgaagcgcgcaaggctattcttgcgcgctgtaagctgttccgcccgtttatcccgcccgttgttgatggcaaattgtggcaggattatccgacatcagtgttagccagcgaccgccgttttttcagttttgagccgggggcgaagtggcacggctttgaaggatatgccgcggatcagtattttgttgatccgtgcaagctgttactcactacaccaggtatcgatgccgaaaccggcgaatatagcgactttggcgttccggcgacgattctggcgcactatctgcgtgagaacggcattgtgccggagaagtgcgatctcaactccattctgtttttattaactccggcggaaagccacgagaagctggcacaactggtggcgatgctggcgcaatttgaacagcatattgaggatgactcgccgctggttgagggtgttgccgagcgtttataa

SEQ ID NO: 8008 - DNA, 666 bp, Zea mays
  Peptide Sequence Number=SeqID_51383
atgccaacggtatacagcgagtcgctctttgtggaggttacggccaagttcggggattcatcagtgctgggcgcggaactgcagattaccaacatgttcggtaataccttcctgcacagcttcgacaaagatccgatgtttgccagcagctttattgtgcagcatgcgtcaatcatcatgtcgatttcgcagatctctgaaaccctgttcattctgaccatcccgttcttcttaagccgctacggtattaagaacgtaatgatgatcagtattgtggcgtggatcctgcgttttgcgctgtttgcttacggcgacccgactccgttcggtactgtactgctggtactgtcgatgatcgtttacggttgcgcattcgacttcttcaacatctctggttcggtgtttgtcgaaaaagaagttagcccggcaattcgcgccagtgcacaagggatgttcctgatgatgactaacggcttcggctgtatcctcggcggcatcgtgagcggtaaagttgttgagatgtacacccaaaacggcattaccgactggcagaccgtatggttgattttcgctggttactccgtggttctggccttcgcgttcatggcgatgttcaaatataaacacgttcgtgtcccgacaggcacacagacggttagccactaa

SEQ ID NO: 8009 - DNA, 657 bp, Zea mays
  Peptide Sequence Number=SeqID_51384
gctccggcccggcacgctgcccctccaaacctcccgcggggaaggggggccgcgaaaaagaacccacggcgcctcgggcgccaaggaacaccagtactacctcctgccccgcggagcggtcggcccgccttccgctccccgggcagcggttacaccttaatcgacacgactctcggcaacggatatctcggctctcgcatcgatgaagaacgtagcaaaatgcgatacctgcgtcccggcgcgcggccggccattcggccctacggacccatcgagcgaccgagcttgtcctcggaccgtgaccccaggcgagagaccgatagcgaacaagtaccgcgagggaaagatgaaaaggactttgaaaagagagtcaaagagtgcttgaaattgccaggagggaagcggatgggggctggcgacgcgcaccggcccgtatgcggaacggctcctgctggtccgccgatcggctcggggcgtggaccgttgtcgcccgcgccggcggccaaagcccgggggcccgaggcgcccccggcagccgtcgtcggcgcggacgggttcgagttggagcacgcctgtcgggacccgaaagatggtgaactatgcctgagcggggcgaagccagaggaaactctggtggaggctcgaagcgatactgac

SEQ ID NO: 8010 - DNA, 1233 bp, Zea mays
  Peptide Sequence Number=SeqID_51385
atggtgcaggctgcggatttaggcaccaacattcagcgtctgtatcagcatgagctctacttccggaccaatggtcgcaaaggtgagcgtctgagcagcgtcgatctggaacgtctgtaccagaacatgtcggtctggctgtggaacgatacgagctatcgttatgaagaaggcaaaaatgacgagctgggctttaaaacgttcaccgagttcctgaactgctacgccaatgatgcctatgcaggcggcaccaagtgttctgcagatctgaaaaaatcgctggtcgataacaacatgatctacggtgacggtagcagcaaagcgggcatgatgaacccgagctacccgctcaactatatggaaaaaccgctgacacgcctgatgctgggccgttcctgtcaactgggcctgtgggcaccggctcagaaagaggtcaccattaagtccaatgcgaacgttcctgtgaccgtcaccgtggcgctggctgacgacctgaccggacgtgagaagcatgaagttgcgctgaaccgtccgccaagagtgactaaaacgtactctctggacgctagcggtacggtgaagttcaaggtgccttacggtggcctgatttatatcaagggcaatagctctaccaatgaatctgccagcttcacctttactggcgtggatcgttatctcggcaagatgaaccgtgtcgctgacgatattaccgtcgcaccggaatatctggaggagagcaacaaccaggcatgggcacgcggcggtgcgggtgaccgtctgctgatgtacgcacagctgaaggaatgggcagagaaaaactttgatatcaagaaatggtatccagatggcactcctctgccagagttttacagcgagcgtgaagggatgaaaggctggaacctgttccagttgatgcatcgtaaagcacgcggcgatgaggtcagcaatgacaagtttggcggcaagaattactgtgctgaatccaacggtaacgcagcggacacgctgatgctgtgtgcctcctgggtcgcccagacggatctttcggagttctttaagaaatggaatccgggcgcgaatgcttaccagctgccgggggcgagcgagatgagcttcgagggcggtgtgagccagtcggcttacaacacgctcgcgtcactcgatctgccgaaaccggaacagggaccggaaaccattaatcaggttaccgagcataagatgtctgccgagtaa

SEQ ID NO: 8011 - DNA, 87 bp, Zea mays
  Peptide Sequence Number=SeqID_51386
atgtcggaaccgaagatgaggaaggacaagcacaaggggaaggctgcaagaattttacatcgcaatcgattgttgcatgtccagtga

SEQ ID NO: 8012 - DNA, 315 bp, Zea mays
  Peptide Sequence Number=SeqID_51387
atgggttcgtcttcccgtagctcatgctctcgtcgaccgaacgagcaggagttggagattatgaggatgcgtgaggagatgagacaacaacgagaatttatggaggcttgcaatgcacataaccaagcgatgtatcaattcaacacccctccgacacatatacctgcacctgcagatagggttacgaccgaagcgggtggtagtgggtctgatcccacaacagggactggatttgttgactccctcttcgcgttccctcctcctggtggcggcagcggtcaaagctctaaccacccaagtggtggttatctctaa

SEQ ID NO: 8013 - DNA, 99 bp, Zea mays
  Peptide Sequence Number=SeqID_51388
atgaggttttcccagaatacacttaatacaaagcaacctgctaaggtttctaagtcggtgtggatgccctctgggcgaggtaaggttgctaggtactaa

SEQ ID NO: 8014 - DNA, 780 bp, Zea mays
  Peptide Sequence Number=SeqID_51389
atgttggccgtcccattttgtaagctccccttccccgtctggccgtctcgactgccccagtcctttctcagatccatgtctacccagaatctgctaactggcgcgtgcacgagctccgccccggccccgtccgaggcggaggaaggggacaggacgcctttggctgacgctgcgaacgcggcggaagagctgtaccgcctccgtgacacctttttcccccgggacccttccgagaaagtcgccgcactccgcgcccgcgccgacgccgccctcgcgctcctcgacgccttcccgtccgttgtgttggacgtttgcctagtggttattgcggacttcatcttgtgcatgggtggagaagctacatatttatatgatatctggctagatggtaggagaattgcagagctggctcctagtttgtttgctgctgttaatagaaaagcagtgaggacgcggactgtccatgaagctgttatgggaggcagctgggttcttgatattagggtagggggaatttttcccctagtgccttctcggaatttttccaaatctgggatcttgttcaggagatcaacttgctacctgatactccagatcaacacatttggacaccatcctcttcgggttcttattcttccaagtcggcctatgatcgatttatggtgggggctgctggtttcgcgccggctgatcatatttggaggacctgggctccaccaagatgcaagttctttctctggcttgcagctcaagataggtgttggacagcagatcacttag

SEQ ID NO: 8015 - DNA, 615 bp, Zea mays
  Peptide Sequence Number=SeqID_51390
atggctcaggcgttgtctgaattacttgctgaagagactcgtcttaagtttatgtcttctattactgatgtgagttctcacaatgtgttggctgctgctcagaagtccagaaacaccttgtttcagtcttgtgaacattgcaaaacgaccactcatcggtctgagaactactttgctaaatttccagagaagctggccgattttcgtgtccgtcgtgctactcgtggtcgtggtacaggaccatctcctagaggctcagttgcggttgctgctacttcatctgctggtgattcgtcatcatcttgggttcttgattctggagcttcatttcatgtgacatctgatcagtcacggctggcgtctactacacctgtcaccgagggtacttatgttcagactgctgatggtacatatcatgatcgcaaaacaggggatgtgattgggactgaccgtcgccgtaaatcttcgcctcgccactacatcttggacacttcgcgtcttccttcaaaccataccactacacctcatgtgcttgctgcttcgggccccacgacgtcgttcgcccgtggtatcatcgtcttggtcacttatgtggatctcgtctgtctactctaa

SEQ ID NO: 8016 - DNA, 483 bp, Zea mays
  Peptide Sequence Number=SeqID_51391
atggagtcttggtatcgtttcgatgttactgtcgatcgaatcgagtctttggtgcggcatgatcatatccccgcgaggacgaagaaaagggagtgggtcgcgtcaggacacgaggaatcgaggagacgtcgcaacccccggtggggatccagcatatctccaccttcgttgacctccaccacctgcgcccgtggacgcgccaattcagctcgtcgccggccaaatcaccgacgcccccaaattcgtcgaaccgacccgaagctccgcaacctcgtccccaaggcgctaccgcagcagattgcaatctcgcggacggagtacgtcttgatccaagagccagaggcacagcaagaagctcgagaaccagctcccgaactcgtcgccgaagaatctcccgctgcacccgcatttgaaggcaaccccggtacactgcaggacatggttgatggtgtgacttggccctccaccctgccaccgggttga

SEQ ID NO: 8017 - DNA, 513 bp, Zea mays
  Peptide Sequence Number=SeqID_51392
atggtaccgatccggggagggagaatcgcgccgcctttagaggccgcaatctccgtcgactcggtcgccgccgccgggagcaccgtcggcgcgtctacgcccgtctgggctgccgccgcgtgcgcccccgcctggagcgccgtcggcgcgtcggcgcctatccgggctgccgccacgcgcgcccccatacggatgcgcggctgcccactgtgccgcctgctctcgcgctgcttccctcgccagcctgagctcttcgtcggtgttgtcgtcgacagaagcagagctgccagctctactgccgcgcagaacctcgagctctgttgccgccgcacgtgcagcatccgccgcctccgctgcttctacttccgctctcgccgctgccagttacgccgccgccaaccgtgctgccctcgccgttgtcgctgcagccgctgctgctgctcgctcgcgttcttgtgccgcggcgacctcggcctcctgctggcgccgcgcactcgaagtgaccgagcgtag

SEQ ID NO: 8018 - DNA, 171 bp, Zea mays
  Peptide Sequence Number=SeqID_51393
atggacatccttccacaggaagatgaccggggccgcttctcactctccctcaccagccaccaccaccgcgccgccgcaacacccttcgccacgctgcagctcccacctgccttaggctccagagcaaggcgaggaggacgccttacgtcctcgactcgccttactgcctag

SEQ ID NO: 8019 - DNA, 117 bp, Zea mays
  Peptide Sequence Number=SeqID_51394
atggcgttggagcttcgtcgaagcaagactgctgtggactgtggcccgcgcgcgcgcgcggagcagggaggggctagctttaggtgctatcctctgggcatgtacagtggtgtttaa

SEQ ID NO: 8020 - DNA, 2550 bp, Zea mays
  Peptide Sequence Number=SeqID_51395
atggaggagggcagcaaggcgcaactgccgcccccacttcacactgaagccatggaccagctgcccccagtcctaatggaccaagacgagggtcgggaagctgcggaaaccatggaggaggaagaagccgccgccgcagacatctccgacgccgcggatcccatggacgatggggaggcggcaggagattccgcggcagccgcggaacccatggaggacgacgcgcccacgtcctccccgactccctccgcgccgtcggccaccgcggccgttgacgactccaccatcgctcggaagcgccgccgccgtaagaagcagttcccgggtatgatccccacggccggcgtccgcgtcctgcgcggctcctcctcctcatcctcccacaccgcggctcatctgtccggcgtcccccgccgccgggggcggccccccacctcctcctccctccgcctcgcccgggagctggattctgaggccctcatcgctctcgctgcggggttccccgcggactccctctccgaggatgagatcgtggccgccgtgctcccacgcattggcggcgccgagcagtctaactaccttgtcgttcgcaatcacattgtagcgctctggcgttccaatcccctctcccccgttgccgctaacgccgcgctcgcatctattcgcgccgagcacgctccccttgttgccgcggcgcattccttcttgtctgagcacgcatacattaatttcggtcttgcccccgccgtcctctcgcttcccccacagcctcctccctcttctcctcccccatccgtccttattgttggcgctggccttgccggtctagctgctgcacggcacctgattgcgcttggattcaaggtggccgtcattgaaggccggctccgccccgggggccgtgtgtttaccaagacaatgcgttcttctgctgtagagtatcccgacactgttgctgctgctgaccttggaggcagcgttctcaccggtatcaatggtaatccccttggtgtcattgctcggcagcttggattcccactccacaaggtgcgggataaatgcccactgtatcttccagatggccgcccagttgaccctgacatggatgctcgtgttgaggctgcctttaaccagcttctggacaaggtttgccagttgagacaggtgattgcagatggtgtaccacatggtgttgatttgtcattgggcatggcacttgaagcattccgggcagcgcatggtgttgcagctgagcatgaagaaaggatgcttctggactggcatttggcaaacctggagtatgctaatgctgccccacttgctgatctctccatggccttctgggaccaggatgatccatatgaaatgggcggagaccactgctttattcctggtggaaattctcagtttgtccgtgcatttagtgatggaatcccggtattttacgggcagaatgtgaaaaggatacgatatgggcgtgatggtgtgatggtgcacactgataaacaggcattttgtggtgatatggtcctgtgtacggttcctcttggggtgctaaagaagggtgacataaagtttgtgcctgagctgccagctcagaaaaaagaggccatccagagattgggttttggtctgcttaacaaggttgtgatgttgttcccttatgatttctgggatggcaggattgatacatttggtcacttgacagaagattctaggcagcgtggtgagttcttcctgttctacagttattcttctgtctcaggagggccattgctcattgctcttgttgcgggggaatctgcagtcaagtttgagcaggcttcacctatggaaaatgttgagaaggtactggaaacacttaggaaaatcttttcacccaagggtattgaagttccaaatccgttgcaagcaatatgtactcgatggggcacagacaggtttacttatggatcatactcatatgtggctattggggcttctggtgatgactacgacattttggccgaaagtgtgcatgatagagttttctttgctggagaggcaacaaataggcggtacccagctacaatgcatggagccctgcttagtgggtatagggaggctgctaacatcttaagggcagctagaaggagagcaaaaaatgtgtactcacctgagaaaatggatattaatgttgatgtaaaagtgggtgttaatggtgaactaaaagacactgttagagatagctgcattgatttggatgatctattccgttctcctgatgctgcttttggcgggttctcagctctccatgacccatctacctctgaaccagactcagtttctttgctgcgtgttggaattggtgctagaaagttaggtgctggttcacttttcctctatggattaataatgagaaagcatgtagctgtgttggctgcaattgagggtgatgaacaacggttgagtataatgtatcgagattttgggacaaaactggtgggattggatagtttgggtgatgctggggaaagccttatctcccggataaaggctgctaggaagtaa

SEQ ID NO: 8021 - DNA, 362 bp, Zea mays
  Peptide Sequence Number=SeqID_51396
tcggggtggcgcaggcggcgctgtccttctgtcagactggccagtggagcagtggagtgacggcggtcacttcggctctgccgggggcgcgtgtcaggatagaggtgtcaggccacctttgcgttaaatgcccccgcaatttggtcagtcggtgcggcgatttagtcaaggttgcttctgagcgaagccaaggcctcgggcaagccggtgatgtgtccgccataaaaagggggcctcgggcgagacggaagtctctcgagctttatgctgatgggggttaccagctgagaattaggcgtcttgagggtacccctaattatggtccccgacaatatggattggaggggattgatatggattga

SEQ ID NO: 8022 - DNA, 474 bp, Zea mays
  Peptide Sequence Number=SeqID_51397
atggaccgagctccacggccggagcactcgccgccgacgagctcgtccgcctgcgcatgtggaccggccgattccggccatcaccatcgtcaagtcgtacctcgttgtgaccgcaaggaccttccgaagccaaccccacccttcgtcggacctccctcgccgctgcacccgcgcgaggtcaggaattggttgtatgcatttgtatatcatattgatgatggttatggtgggtacaagtgcggtcactgcacgacggaagtcggggtcagtgaggcattgtacgccaaggcggtgagcccctctctgctggcggggaatcgatggggacggttgatgtgtgtggggacagagttcctcgccacgtcgtgttctctggaggacatggttgctggagtgacttggccgtccatcttgccaccgggttggacagtcgagtgggaccctacctcggctgaggaggagcacgaggagtga

SEQ ID NO: 8023 - DNA, 1362 bp, Zea mays
  Peptide Sequence Number=SeqID_51398
atgaagcaagtggaccgtcctccaaataaccccaagcgtataacaattcagtcaagccaggagtgtttcagtgttgacattccctctgtagaacagcctaatccatgtccagaagttgaaaatcctccaaatgttgacagtcaaaatttgaccaatgaaacagttcagattgattctgatgaagatgacttcatgctagctctgaagaagtgtaatgtttctgaaagccacacaagagtgttaagaaaagtcatgacaaagaggattaaacatgaggagctaccccgacagaggcttaatgtgaggtgcaaccctcaagatgtcattgcaagcattaacattttgaatgaaagacaacgtgaggctataagacgtaaaggtttctctaccattcttgatatgacagtagatgcgctgtgcagtagatcacaccttcaatggttgatggacaagctagaccccaaggatatgacaatacgtcctggtccaggaaaggaactcaagatcacaaaggacattgttcatcttatccttggcgtgccaaatcatggcggtggtaaacctttggggattgacgaagcagttgcagcaagcaacttgagggcagagcttggtgtggccaaagatgagttcaatgtgacatttctacaggatcgtttaaggaaaggcgaggatgatgacctttcaatcagatgtttcttcctcattctattcaaccgtctgctgtttccaactgctagctggggcataacatatcatgaggtgcttctcacagaagaaatgcaccgtttccatgagatcgactggtgccagttgatttttaatgatctatgtgaagctgccaagaagtggcacaaccgaatcaccacaaatgtctccacgactatatatggatgctccattgttgtccttccgctgccccccaaaataagactggcacacctcgcattaaatttttttgataagaatatcataaaagctttgaccaaagctgacaagaggaagccagagtgtaggaccaatatttttgatgcaccgcgccctgcccccatgcctcggccaacttttaacatcaaacttccatctatcaaagagatgatgtcaagtaagatcaacgatctcccacatcgtcatcgatctaaattcacagatattcttgctgcatatgacttggaggttgacaagtcatgcgtagccataaaagacagcattgacaaaattattgagaagcaatacgacatagcagacaagtttatagaattgatagacgaggtactacgtgccgagtctgaaaatttagaaaacgagactgatgagccacatcaaccggggaattcggctgattcagcagggttgtcatag

SEQ ID NO: 8024 - DNA, 2301 bp, Zea mays
  Peptide Sequence Number=SeqID_51399
atggggggacttggggtgtctgatagttttgctagagagttaatgaggacgtgtgcggccccgggggaaaggatgtcttcgcccgagctccgggagtcttcggctcggatgctgagggttatcgggggttgctggccgaaaaatgttcctatcccctgcgcggctgaggaggactgttttacatctcgtatggttcatcggtggagagtttttccttacgggcgaaatatcggtgctgttgtgtggacagtgatggacaaggatcgccaaggggcggcgcaaaaacgccaagcgactgtcaggattcacgaagctcggccgaaaaggcagcggggaactgcgaaggctgtggcctccggcggaggtaagccgccgctggcggcgaaggcgggcgcctctgcacctagcaaggcgccggaggcaacggcgggcgccggaggctccaaggcagcgaaggtggtgcccccggccggcggagtggcggaggcttcgaaggcggcccgagcgctgccgctggcgggcaaacgcgttgccgacttcggcaccgacattactgtggatgactatcttggtgggtcggacgagggccagctggctatggttgcgcctggcgcggagatcgcgacggcggccatagtgccgaaggcgaggggcgaggcccttgacgccggaggcgaggtgtcggccctcgccgtggtcaggggcgaggcgggcgcagcgacccgccggctgaagggagtgacggaggcgctgagtcaggcgacggaggcgctgagtcaggtggctgacttcgccagccgtactgcgtcgggggccctcacggcggctgtgtctgccgaagttgagagacttcggacacaacatgctgacgctgtccgtgagaagtcggcctccgacagcaagtgccgtaagctgacggacagggtggccgccctggagagggagaaggctgacctccggcgccaactggcggcggagaggagggaagctaacgaggccgtcgccaaggggcaggctgcgcaggcggaggccaagctagcgcgggcggagggcaaccttgccaaggagctcgccgaacatctgcaagagcggctcaccgccctggagagccgcgctaaggaggccgaggccgcagtgcatgcggaggccgaacggacgcgcacgcagcttatggatacatatcgtgagctgggtgcgcggaccggtgacttcgaagtgccggaccgagagcccggccttcgctgtctgcagtgggtgctggaggagctgctggaacttccagccgtcgtgggggggttgatgtcgtacgcctccctggtcacctgcgagggggcgatgaacgcgctctctcgcgaagggtgccggcactttgaggccctcgaccaggtagatgaagattttgggcgagatatctatgaggtcgaagaccccgtggtgaaggagtccgccggggccctctatgaccgaatgtggggtctgtacggtcgtgaggtggtcagggaacgggccgaggctgcgagggctcaggcggagcgtgacgagcgggtggacgacttcggggcactgaacagcgcgctgcctggcccggagccgacccctgcggaggccgcgactggagtcgccctggaaacaaccccggagcctgcggaagacgcgccgagcgtgcccacctctgccgtggccggcgaagacctgcccccaaaggtggccgaaggcgcgcctgacgcccccgcagctgctgcgccgagcgctgaagattccgcggcggtggtggcggaaacagcggcggaggagacagcggaggctcccgcagcggcagggccttcgcaggttcaagattttgggcctgcgcacgcaaccgctactactgggtttttggcggcttcgaccgcggaagatggaaatgaatatggtgggtctgtatctgagttttttgattttactgattctgggagctcggttgagtggactgaggagtcgtcggaggaggacttggattattttgcggccttggacgtggctgcggcggaggcttcgccacacgccgcggacgcgccagacgtgctgggtcctagcaccgggcgccgacgacgaagggcggttgcaaagcgtagggttagtgcggaggaaggggctcggctttgcgtgagtaggggtggtcggcaggaactgttgtctttgccggccgccacgagcacaggggaaggggaactgcgaagtctttttgcgggtgaggagcttaggataatgttatttaattatagggagatggggattattcctaaggtggagccgatgtag

SEQ ID NO: 8025 - DNA, 543 bp, Zea mays
  Peptide Sequence Number=SeqID_51400
atggtggcgccatggggtaacaagtccataagaagaacaacaaggagggaaccagttagcgtcagatggaattacgcatacagaatcagctactgctgtagatgcaattactccaccagcagctttgagggccccggggttgatgatcagaccatatttgaggcatcgaggatgacagtaaatcaaggaggacaacaccttaatattatgcgtactattggtgagcatgaacaggacacaccagtgattctgcagagacatgaagttacaattgatccgagattagtacctaaagttggtatgacattcagtggggtggatgaaacatataaattttatagtaggtatgcatatgaagttggatttccattgaaaaagtatagggaacggaaaaattgtaagttgttgaattgctcgatggaaggcaaaagagcagtaaggggaatatcaaacccaaaggataccgaaaagaatcaattacaatgcaacaagacgcatgatcctgaatacatggagttcataagttcaatgcaagagagttaa

SEQ ID NO: 8026 - DNA, 618 bp, Zea mays
  Peptide Sequence Number=SeqID_51401
atgagctcggaggagtttctgcctacgcccaccccgttggcagaatcactagccttcacagctggatcgttagcttcagcaccgccatcaccagtagtccaagcccctgctcccggaggcgacgacccgagtgactctggttatgatgatgaagacgaagaagaagaagaggaggaggagaacatcaacaaagaagccaatgatgaacagcaggaccactacgtggggttatggcctgtcactgaacattatacatcaatgttcgagacatggcacttccctaacctgttgcaagatgttctgcatgcgttgggaacctacgtccgacccgtgtatgagacaaggccagtgtgcgaaccccctcgggcttgctactatatcagtaccattcatgtcagggtgatggatgcaggtcttaacaccgacctggatagtggtaccctagacctctctagggtacacttggagctggaggatacacacacaaggattgtagccctggaagctcaactagaaggaaggaatccccctgaagttcaagtccctgccatggcgttgtcccatcctcgcaagaggatccgctatggagaactaggatccatcaccaggctgctatag

SEQ ID NO: 8027 - DNA, 522 bp, Zea mays
  Peptide Sequence Number=SeqID_51402
atgaggacaaggctcaagaagaataagatgaagatcaagacgatgagccacctcaagaggaggacattgatcaagggggagatgaagataatcaagacaaggaagatgttcaagaaattcaggatcaaagaccgccacacccaagagtccaccaagcaattcaaagagatcaccccgtcaactccattcttgcattatgccactagccttgccgtcaacgccgtcgccgtcgcctttgtcaccgttgccatcgctcttgccgccgtcgctgttgcccttgccatcgtcgtcagtgtcaccgtctcccttgccataatcgtcgtcgccatcaccatcgccctcgccgtgccaccgccaccgcccttaccgtcaccgtcgcctctgctgccgtcgtctttgtcgccatcaccttcgctgccgctcaactcctcggaagagtcggaggagtccacctcttccaaggagacctccttcgagtcatccgaccagccgagcccggcacgctcgatggagcgccagtag

SEQ ID NO: 8028 - DNA, 522 bp, Zea mays
  Peptide Sequence Number=SeqID_51403
atgggatccactttagtaagcatttctgcaaaacagagtcttttgattattgaaaagccttaccttgactcccatataaccagcatacccttgagagtcttttctttagtcggggctcggattcgggctaagccccggaagacggcgaactttgctccgcccgacccagggctcggactcgggcttggccccagaagacgacgaactccgctccgcccgacccagggctcggactcgggctcagccccagaagacgacgaactccgcttcgcccgacctcagggctcagactccggccctggcctctgccgaacggcctccgcctcgcccgacccaggggctcgggctcggcctcggccatggaagacagactcgacctcggcttcggaggagcctcccgtcgcccgacctagggcacaggcccgccgcgtcaacaggaagcgccatcatcaccctaccccgagccgactcgggccgcagagaacaaaaccggtgtcccatctggctagctccgctagatag

SEQ ID NO: 8029 - DNA, 609 bp, Zea mays
  Peptide Sequence Number=SeqID_51404
atggccgcccgcctatttagatttagtcaacccgtgctcgccgtgcttgcctcgaaccatatcacgaggcagtcctgggagcgatactgcgccgccgccactgcaattcgccccagttctcaccgcggggactcccaccaaggttcgagcgaattcgcctgggtgccggcattgcgcgcgtggcttctagaggcaagggcgcgactcgaagactcgccaattgttcgccgtcgtcatcgcgccgccgcatttccgcctatcaccgcggccagagaccccctgcgacaacactcgggaatgctctggttggaccggggatcatcggggaaggttaccccggttatggcgccgccgccgtggccgttggtcgcgctggtgcttgtgcgtattattaatatgtattatgtcatgtttggtgtgatgttaatttctgctataccatgtttgtttgtactgatgcgagtagacgagcaagccacagaggatcctggtgttcagcagccattcaacttggtagtgtctaagggtctagctaaccctggcaacatggaatacacgacttgtgggtacagggtacaacctctacagagtgtaaaactggtatactag

SEQ ID NO: 8030 - DNA, 291 bp, Zea mays
  Peptide Sequence Number=SeqID_51405
atggcggggcggcactgcgagctgggtgagcatgagggtagggggagagcgaatgaggagcatgggcaagttgagtggggtacggggtctttgaaagggaaatgtgcccttgggccatttctaagtgttttggaaaagaacaattggaaatgtcttggctcgagcagccaagactctgctcagtctaggagcaccggactgtccggtggtgcaccggacagtgtccggtgcgccaggctagctcaggtgaactgccgctctcgggaagagtttaacagcgtacggctataa

SEQ ID NO: 8031 - DNA, 348 bp, Zea mays
  Peptide Sequence Number=SeqID_51406
atgaccgcgtcaaaaaagggaccgggaaagggggataccccgaaagggatccttctccgcgaaggaaacgggccccgagcccccctactgatcagaggttcgaaggctggcccctcggaggggttcaacagccgcctcagagcgctcgggctccgcgcccactactggtcagaggttcgagggccggcccctcggaagggttcaacggccgcctcaggccactcgggctccgcgcccactactgatgtggcagaaccacccgaattattccagcttaagtgcctaagtcacgcctcaggggtcgcaacacacttaaatcggaataacccgtcagtccctcagatctag

SEQ ID NO: 8032 - DNA, 231 bp, Zea mays
  Peptide Sequence Number=SeqID_51407
atggcggccgagaaatggcccaagaaatcattcaaaaaagcgaaaaaggcatccatgatgctagaaagtaatatatccatatcttctcttccctcagaacctgctgagctatctcctggcccccacacgaagggggatgacaaaattagacaaatggccgaagccatcatggacagagttgttgatcagcttctaaacgaagctgcagaagtagttttaaaggaagattaa

SEQ ID NO: 8033 - DNA, 672 bp, Zea mays
  Peptide Sequence Number=SeqID_51408
atgttcggcgccctccgagggcaacatggtgctttcccccctcctccttgcggaaaggcgacgaaggggcagcctgatgggcgcaattcaggtcaaggctccgtccactcaagggacacgaactcgcctcactcgagcccagcatcgggcaggaacagtagacccaggcggattcacgcctcgcccgagggcctcctcaagcaacgggcacaccctcgactcgcccaaggcctagctcgggcaggcttcgcagtgaagcaaccttggccagatcgcctcgccaaccgaccgtatcgcagaagcattcaatgcaaggatcgcttgacaccttatcctgacgcgcgttcctcagtcgacagggccaaacagccgagtccagcctcaggcgccacaagaagctccgcctcgcccgaccccgaggctcggctcccgcctcggcctcggaaggtggtctccgccttgcccgaccccaaggctcagcctcaacctcaacctcagaaggtggtctccgcctcgcccgaccccagggctcggactcaacctcgacctcgggaggaatcacgtccttacccgaccccggcctcggcctcaggaggagtctccgcctcgcccgaccttgggctcggaccgaccacgccgcagggggtccatcattgccctacccctagctag

SEQ ID NO: 8034 - DNA, 372 bp, Zea mays
  Peptide Sequence Number=SeqID_51409
atggcgcggaggcacacggccacggtggagggcggattcacggcggaggcgccacaccggcgagcaattcctcgcgtcacggtggtgtccaactcgaattggaggcgcggacagcttccccaggcgaagtcgatactccacaatccgacaccaagagtggagaccccccagcggcggctatccccggcggcggcacttctcggtgttcttcgttcgatgctatggacgagaggaggtggctggttttatagtcagtcctgcgaatatctcggcggggttggattcttggaggtcgggtcgcggactccgttgcccgagatccccggcggcgggttcgtgcggttgttgcggcgagctcggcgaagctgttga

SEQ ID NO: 8035 - DNA, 267 bp, Zea mays
  Peptide Sequence Number=SeqID_51410
atggctttccttccatcttgtgggaagtgcttaactccaccggacagacgacacctcagatgcagcagccatgaagactctgacaactttcatcccctggagatggtgatgcaccccttgggactcttccctgctaagaagaaggatgaccccatgtggtgcaaccgtgtgagccatgtgaaggatgtgtgggcaatgtatcctgacttggttgggagggtcactattcagtgcatgagtgtgttgtactgccttcaggccctgtag

SEQ ID NO: 8036 - DNA, 336 bp, Zea mays
  Peptide Sequence Number=SeqID_51411
atggaacagttaccgcggcggaagaaaggggcggaggggcttaccggcggcgagactgctccgcttgaaaagctccacgggccactggcgaagctaaccgaggggcaggcgcaacttggacgtggctggagtgagctagccacggtggccaaggctcgggcggtgatggcgggcggaggaaagctcgccagagctaaggaggggtgtctggctagcgagggtttcgctaactggatcaagagatatggaggggagaagtcagcattaggattagagctaaggatcaaggtgaacgtgctcggttttagttcaaaggctgaaaattcagaaatctga

SEQ ID NO: 8037 - DNA, 825 bp, Zea mays
  Peptide Sequence Number=SeqID_51412
atggctaggtcacgcctgctcgttaccagatcaacgacatcggtaccatcttccccacccgacgccgggccatggcgagttatttgcccatttgccattatcaaatacgggtttcgcccaaatgccatcataaaaatgggtttcgccgctacgccattttcaatcattgttcaacagacaaaatgccattttatcccttcagcacattatgagagacttttatcctgggtaaaatcacgacgttatcttctcaccgtgagtcttcccatttcgacgagccaccagcgccgcccagtccttgccccgccgccgcccagtccctgcccccgcccccgccgccgcctaggccatccaggccttgcccccgccgccggagcccaggcctcgtcaccaccaccgcccaggcctcgccaccagcactgcctagagtttcaagtccgcgacgccgcccaaggcctccagtctgcaccgccgcccaagcccatcgaggtcgcgccgtcgcccaaggccatccagtgcgtaggatcaaactgtcctctttttgtaaacatggattccaatcttagtgatattgttgcaatgctcgatggagagcctgagcttactttagctgttgttgacccaattgttgctattgacaatgtgccacaagcacaatatattgattggaacacactgcaaatagtagaaagacaagatgaagagggaaggctggaagtaatagatgaggatcaactgtataacctcttgggcttgacggttgatgaagagaatcctcctgcagatgctatgggcaatgatggtgatgctgggacgaatctctag

SEQ ID NO: 8038 - DNA, 393 bp, Zea mays
  Peptide Sequence Number=SeqID_51413
atggcgagcgtcctctgggcaagcccctgctcccctgctccatgccgacaccccctgtccctcccctctctaccggcgccctccccaaaacagcaagttccagcaccccctacatctcccatggaaaacagcaagcccccaccgcgtcctggtgttctcgctgctcagcttggcctcgcgagctcactgtcgagacaccctagccgctgctccaccgcgcgtactacctgctcgacgatatgcgcaaccggctgcgtgtggtcatgctggtgttctgcgcagcgcttgcgcgacgccatcgatctgcgcagcgcctacgagtcgtcgtcgaaacccgcgcccttatcgacgtcacaccttgcacatcgctcgtcggcaaagagcccaaactaa

SEQ ID NO: 8039 - DNA, 462 bp, Zea mays
  Peptide Sequence Number=SeqID_51414
atgatggaaaatttcggtagcaaaacagtgcaaatagcaatgaatgctgtggtaacttcacaactacttgtcagtttatatagtgctgcagtggaccgcaaggatcaaacagtaactctgcaaggtgggaccgacacgcgctcggaagtcggatcgtttctccgcaacgagctcagggaaggtgttttttgggccttcggcttcccgaagctgaagaggcttttttcacgggtcaagctcgttacgaagaacgatctagcaccgcgaaaggggctactgttggggtcgtgcttcggtgcgccgaaggtctcacacgaagaagcagcttcggctgaagtcgtctccaagagatggccgaaggaccgaaggtgtttgttgcagtcgactgttgcgctggtagccattgcttcgctggtgcaccggacagtccggtggcacagcggacaatccagtgaattatag

SEQ ID NO: 8040 - DNA, 396 bp, Zea mays
  Peptide Sequence Number=SeqID_51415
atggaaggacacgaagcctgctattacgggaaaatcaaaaatatagtcgagattacatttgctgaaaataagcctttagcgctagttttctttgagtgtaaatggatgccgccaaagtcaaagaagtcagtgaaggggctgttcaagggcctgggactttttcagggcagttcttcgagcagcagcagacgtcgagagctgttgagcgctgtacatggagatgaggacgagcagctcactaaggaggagcacaatgaggaggagcaacacaatgaggatgagcaacacaatgaggaggtgcagcacaatgaggaggtgcaacacgcgacatgggaccaggccgcgcagcagcaccagccatgggacctgtttgaccaccagagagagcagcaatag

SEQ ID NO: 8041 - DNA, 453 bp, Zea mays
  Peptide Sequence Number=SeqID_51416
atgaacagcgaggggcgagctgcagagggtgtccatgagagagggttggggtttcctgcgcttgaggagtccctgcacgtgagcagagagggagggcatgcacgccgtggggaaggagaagcaggggctcgcgtccatggagctgaggaacagggaaccatggagggagcgtacgcaggggcgtcgggtcctgagcgtcccttggccacgggcagggaagagcagggggcggctggaggtacgccggcgccatggacgccagggaggagcttcagcgccgaggaagaagggcgccctgctgcaggggcgtcgagcgccatgggaaaaggagctgcgctccctgctgcagcctcggagaaggcgaatggtgataatttaaaattgctgtcgatacgggattttgagttcagttcggacatgagatatttggccgagtcggataaaattgattag

SEQ ID NO: 8042 - DNA, 678 bp, Zea mays
  Peptide Sequence Number=SeqID_51417
atggcacagtggtttatcccgtggttcggccaagaccaacgcttgcctactccacgttgtggcgtcccaacggacgagggttgcaatcaacccctctcaagcggtccaaagacccacttgaataccacgggtggtctggcggactcggccatgggcatcacaccggcgcgggagcacaagagggcgctgcacacggcgaggcaggctaatggcggcgtggggcaactccaacgaacaataggacgtgaaggggcgacgttggcggagctccggctgtgcaagaactgctccaaacaggcagcggtcgatggtgagtggtggcggagctctctattcgcgtgggcagagcgagagagagggcgaggggatttggctgagggcacaagtgagcgatgggaggtgggcaagcagggcgcgggcgcggggacatggccggagaacgcgcggacgtgggcgcgtccatggcgggggatcgtgggcgagaggtttgggacggctgacaggtggggtcagcgggacagagagggaagcgatcgcgtgggcgagagaaacgacaccaacaagcctggcccacggggcagcaagagagggcgcgctggaggtggcgccgacaggcggggcccgcctgtcaggcaccaagggcgcgctggcgtgggcgcgcgcgggggctgggcttag

SEQ ID NO: 8043 - DNA, 306 bp, Zea mays
  Peptide Sequence Number=SeqID_51418
atgtcgtcatctccatctccgtcaggatctcctccagcagtcgggatgccctatggtggtgcagggggcatctctggctggagtgcaggggaggcagcctctcggactccacctcctactgaggcgagggggaagagtcctgctgctcctgctcatgctcttggcatcggcgctcctagttctcgtgcaggcgacgatgcagtctctccaggtgactggactgacctggcaccgtatgacgtagtggacgctccaccaggtgagaaggcaaaaatgggatcacagacttacgtgcagtgcacctga

SEQ ID NO: 8044 - DNA, 396 bp, Zea mays
  Peptide Sequence Number=SeqID_51419
atggcgcttagaagtgacagacgcggcgtcggagccggagtcaaccgttgtgatggtagccgttgctccactggtgcactggacagtctggtgaattatagcggagcgcggccacagaaacctgaaggtggcgagttcgcagctgtacggtcctggtgcaccggacactatccggtggcacaccggacagtccgcttcgatatcggttgcctaacggagaggattacatggggcacgctgaacgtgatggttccatggatggcgcccgtgcctgatgcgtactatgcttggtgtcaatattgggcttctgaaggcttccaaaaagcgtcagtgcatcacaggaaatatcaaggaaccaatcctaaccacaagtttggcagtgacggcatgctctaa

SEQ ID NO: 8045 - DNA, 504 bp, Zea mays
  Peptide Sequence Number=SeqID_51420
atggatccgccctgcatcgtcgtcgtggtgctctgctacacaatacgtggtaagttgcccctagatcaattcgtgactctctccttttggcgtggggtcattcgggggagggtgtggatccttggttcgatagggctgtgcacgtcgacggtgtcgctgtcacgggcgttgtggcgccgccatggccgagttatttgcccattcgccattatcaaatacgggtttcgcccaaatgccatcataaaaatgggtttcgccgctacgccattttcaatcattgttcaacagacaaaatgccattttatcccttcagcacattataaccttcggccatttaacgccgttaactgtacaaataagaggagcgttcgaaaactggcacataggctgttccaacccaggttcaaaaaaaacgtccagaccaggttcaaaaactactccacccttggttcaaataagagtagcgttcagaccaataaattgctccaacccaggttcagataa

SEQ ID NO: 8046 - DNA, 654 bp, Zea mays
  Peptide Sequence Number=SeqID_51421
atggctgaaaataatggtttattgtgggccgaggaaccagaacatggcctcacagtagctggtcctaaaagagcagaggaggaagaggtggagcactatatggatcttggttttgatgcagaaggagatgatccaactggagctgacgaagaatggaggtatttcaagaatgcagatttcgatcatccaactgacgcaagagctgcagatttggatcatccaattgaggcaagacttgtagatcttgatgttggcttcctggtcttcaatgccgttggtcgtggcactggctctggccttggttctctcctccttgagcgcctgtctgtggagtatggcaacaaatccaagctgggcttcactgtgtacccatctccccaggactacaaaagctttccggtggatattctcatggatgctataaggggcaagatcatggaaaagatagcaacaaggcaaaagattgctgcaaggctaaccggacgagtacttcctagtgttatcaatgagctgaacattaagagcagatccttgaaatatacaatcacaggaagtggtggtcttaaggccgaagtacttcctagtgttatcaatgagctgaacattttggtggtatttttcgaatctgaagaactttcaatgctagagaaataa

SEQ ID NO: 8047 - DNA, 639 bp, Zea mays
  Peptide Sequence Number=SeqID_51422
atgtggccaatcacacccgcgcagcccaataacttccccctcacgctcgcgcatgcttacctgcgggtcccgcttgcagcctctctaacccgcgcgctctctggaactcaggcccgctgcgtcagccgcacagccgttccaagcattcggtcactgacctctgggtcccctgtggcagaaccatcctcctcctcaacaaaccccgcgcatgtcgcgctcgtgccatcgatctcggaggtgggcgattatatcccggcggagggtagttccaaagccataaatcaatcgcgacgcaaccctctgttctccctcgtccgtagattcctaagacaccccagggaactgagtaagggagagagaaagtcgtgctcagccgccgtagttgcgcaccggcgattgccgtcgatcttgggcagacccgtgcactcggggaagctcgactcgggttggcgggcgtcgtcgggaggaattgcggggcggtatacgacctacgcgcagaggattcctcaccggtgtgccatcctcgccgtgcaatccgcacatcgccgtcgacggtgcgcctgcggtcgccaaactaaggtgaggatcatcgtcgagccttcggttacctttgtgaatacagcacacctagaatcgtag

SEQ ID NO: 8048 - DNA, 675 bp, Zea mays
  Peptide Sequence Number=SeqID_51423
atggagaagggagaagaggggatcgtccatgggatctctgcccacggcggtttccacgcctggggaggggtcgggctcgcctacacgccaccaagggcctcctggccgcgccctaggggctcgccgggggtgctcgactgctgggcacacagggagatgcaactaggaacgacaccggcaggggcgagacagccatggacgcgatcgcgcagactacctggaggcggggcgtcggcactgagggtgtgcagtaggacaggtggagcagcgatgctgctcgaccagggagcagggggcaccgaggctgggcaggctgggagccacacgcgcaggacctgtcgaccgcgccgtgcagagaagacgaggggggaggggctccttacctcgacggggaatagcagctacagcccatggatgaaccttcaactcgccatggatcatcgacgactcgtcagagtagtggctggccggggcacctcagtggggctgcgtgcaggggcttcgaacgaccacgcagagcgcacacgccgggaggccgctcggccgggggaacagagggaggacgcacgagacgggagagaggagaggactcacctggaaccgccatttgcaaatgcgcgatttgaatctggggagggagacgaggagttatgcgacggtggggtgagtatatag

SEQ ID NO: 8049 - DNA, 558 bp, Zea mays
  Peptide Sequence Number=SeqID_51424
atgtgctgctggtggctcggcgtcatcttcgagtgggagggggtcatcgttgaggatgatgccgaattggaaaggcaggcgtggttgaccctggcacaggaggagggcaagtcgccgcctcccgcttttgtgctgcggagagtcgaagggatgaagaacgagcaggcgatttctaaggctctttatcacgaatactatggagataaacagggcgcactggagaatttgattcagtgtggcaactggaagaaagctcatactattttcgtgacttctgttgctcattctatgtttctgtcatacttctacgttctgaagaactcaatgcaagaaagaaatgccatggatgattcgggttcactcgaggagatgagtgaatcatgcagaagtttctttggccgattaatcgagtcgttgttagtctggggaagcaaattacctgttgagtcaagcgaaacatgggcatccatccacaggaagatgaccgggggtatcactagactagcatccatggagttcagcatcatatcttcatctgcaacttctgatcaaaattaa

SEQ ID NO: 8050 - DNA, 792 bp, Zea mays
  Peptide Sequence Number=SeqID_51425
atggcgcgccagcagccggagcgagtgccgccgcagcggcgtcctgtcggttgcggaggtggttggaagcgcgacggggtttgcgggagcccgcccctgagcggcgggctgttcgcggcggcgacgagcgccagcagccggagcgagtgccgccgcagcggcgtcctgtcggttgtggagcccgcccctgagcggcgggctgttcgcggggtaccccgtggtgggcccgaggacgtgctgctgacggtgtgcccctgggacccgcgcgtgcggggcggcaccctcttccaccagaccaccttcagcctccccgtgcgccgcgccgtgctgttcgtcgtcgaggtgcaccggctgcgggacctggagcccagggcgctgtgtggcgtggagctctacgacggcatcctcatgcgctacgtgaaggcgtccacaacctacctaggcaagcccgcgccgcgcggggagccgtcgggagacatggtggacttcgacatcacatactaccgcagctgtgaccccgggcaggcgcgcctgttcgaggacgtgctggaggaggtcgagcagatgggcatcttcaagtacggtggcctgccgcactggggcaagaaccgcaacctcgccttcgtcggtgccgcgcgcaagtaccccggcctgccgcgcgcaagtaccccggcctgccgcgcttcctgcgcgtcaaggacgcctacgaccccgacggcctcttctccagcggtggcggtgagcgctgcggccagctgcgcgcactggtcctgctcgtggagcacgacatag

SEQ ID NO: 8051 - DNA, 75 bp, Zea mays
  Peptide Sequence Number=SeqID_51426
atgtcgtgcgcgttcgacgactactatatcaaggattacaaatggattatgaaacattttcttataacaatataa

SEQ ID NO: 8052 - DNA, 546 bp, Zea mays
  Peptide Sequence Number=SeqID_51427
atgaatcttgtcttctggttcttacatctgtctgaaagcctttgcaaatatgatgcccgttgcattgcctgtgtcaaccagaacattgtggaccagaaatcccttgatgatacaagatatcaccatggcatcattgtggggataatctctgagctgaagatcctcctaggagaagaaagaaattttatacccccaaattcaaggtgttacactagccttagacgtggcggcgccgccgagtatcgtggtggcggtatcgccgatgaggccgcgatcgcacactggttcccaaattcgatacaagtgaggctacccgaagctaagatcatggggaaaaacatggggaagctcatactgacgggttgggcaaccgtttggctcgcggtggcaccatggcacaccaagtcactggtgagtaatctggagccgcacggcaaaatctactcccgccgaggcaccaatacgcactacgcgactaaggcaatggcccggaacaccttccgagagcgcagcagcgaagcaatgggtggactaccacggcggtga

SEQ ID NO: 8053 - DNA, 291 bp, Zea mays
  Peptide Sequence Number=SeqID_51428
atggatgttttgatgattaggaaccttggagaggaccagcaaggacttgggaaaggcctaggtgttgaggaggagcagcaagggcgccacaacacgaaggagatcaagtccgactcggctacgactccatctcgggttgcaggaccagtctgcactaaaatggacgccaagatgcatctggactccaattgcgacggccttgatatggaattagccctcgtggcgaggtcaatcgcgcagtacacggttgataaccagaggagaagtggtgctgcgattgcggggttctag

SEQ ID NO: 8054 - DNA, 87 bp, Zea mays
  Peptide Sequence Number=SeqID_51429
atgggggcgcacggcgtgcatctccttgcaaagaactttttgatccgggttaaatgggaaatttttggagcatttagaatggcctaa

SEQ ID NO: 8055 - DNA, 384 bp, Zea mays
  Peptide Sequence Number=SeqID_51430
atgtgtgtgcatccacaggaggccctcggtttcatcgcggtgccatcggttttagtcataacaccattgccagatgtaaccaataagaaatctcgcgtgacactaatggattgggcaagggtgacaatatacaaagatactccatcagtaaagatggttacaaagaagggctttgctccgaaaccagttgtgacggaacctcccaagtcattaggcccacctacagttgtccttgtccaacggacctcagacaaccctgtaggtgcccttgaatcacttgacaagttcggtatctgcttttcttacctttcccaagagcgtttcacccgtcacgcagacattacaagcatcggagttacaagaatgcggaagcaattacattaa

SEQ ID NO: 8056 - DNA, 498 bp, Zea mays
  Peptide Sequence Number=SeqID_51431
atgtcaagtctggttctagggcaatatccgttacgtcaatggttcgatcgggaacccgaagacacttcttcaactgagacacgtggaacacattatgtacaacagacaaggtttcgggtagttgaagtcggtatgccactggtccacactggaccaatgtaccggggtgcaagcttccctttaactccgaaacgtgatacacccttcatcggtgaaactttcagtctacccgcttgtttgaggatgataggccgaactgtggagcaatttggtacccagggatttatgaagttcttcccagaatttggatacgaattgaggtccacgatccgacactatagtcttcggaaccccatgcaaactgagaatgcgagcaatgtacagttccgcataggtgatgatgggatattttactttgactggaaggaagtgggcgatctttgtaagtcaatcaatgataacccagatagaatcataccctttggtggtcctgggtaa

SEQ ID NO: 8057 - DNA, 114 bp, Zea mays
  Peptide Sequence Number=SeqID_51432
atggcagttgttctggtctggtgcctggacgcggctggggcgctggtgaccagggcccaccgggcttacaaatcctacccccttaaaagaaatctcgtcctcgagatttgttag

SEQ ID NO: 8058 - DNA, 315 bp, Zea mays
  Peptide Sequence Number=SeqID_51433
atggacatagttgaagacatcctgaggccccgtgttgactcaatccgtggacaaataaagaagaatggggtaagcaagctggtgttactgaaagggaaatgtgcccttgggccatttctaagtattttggtgattgagtgcaaacacaagtgcttaaatgtgaaaatatgcccatggatgaacaaagtgcaaatcacaagtaaagatcttcgctctagccacttggcctcaactgtgctaacgcttaacaaagtttttgtggctgctatatacaaagcatcgaacccaaattccaagaagcgtgatcctgtctga

SEQ ID NO: 8059 - DNA, 108 bp, Zea mays
  Peptide Sequence Number=SeqID_51434
atggctcctcgtttaccgaagcaaaaggtacttttcaggggtacatactggatgagacaatggatgctgctgctaaaggaagaagaaaaattacaaaggctggaataa

SEQ ID NO: 8060 - DNA, 633 bp, Zea mays
  Peptide Sequence Number=SeqID_51435
atggcgcctcctgtcgacgtggtcggtccgcgccctaggttgggcgatgtggaggctccttcgaggtcgaggtcgagtctgtcttctgtggccatggtcgagtccgagtccctgggtcgggcgaggcggagaccgtcggctgaggccagggctgagtctgatccctggggtcgggcgaagcagagttcgtcgtcttctggggctgagcccgagtccgagccttgggtcgggcggatcggagttcgccgtcttccggggcttagcctgagtctgagccctgggtcgggtggagcggagttcgccgtcttcaggggcttagcccaagtccgagccctgggtcgggcggagcggagggctgagcccgagtccaagccctgggtcgggcggagcggagttcgccgtcttccggggcttagcccgagtccgagccctgggtcgagcgaagtagagcttcctatggccacctttgcattaaatgctcctgcgatttggtcggtcggcgcggcgatttggtcagggttgcttcttggcgaagacagggcctcgggcgagccggaactttatgctgatgggggttaccagctgagaattaggagacttgagggtacccctaattatggtccccgacagtag

SEQ ID NO: 8061 - DNA, 1446 bp, Zea mays
  Peptide Sequence Number=SeqID_51436
atgaagctgtggaaggagacttccaggagttccaagattacgacgagttctaggtgtgggttagcggcaacccccagtcggctgcctgtgaaggccgcgttatctacgtttcttttccgcactttgatttattgtaagaactatatggacgtctcagacatggctcgacttagacacactgcacgaaagtcagtcatccccttcttaccctcccgccttgctgagcgtccgcttcgctgtcccgtggccggacagtccagccacttggagagactacaccaccgcctgcgtgaggagcaggaacgtcgacgacaggagcagcagggctcttccttctcgctccaccaggagatagagtctgtgaggagctgctcccctgtgcttcctctggagccaccccctgcaccaccactgggcgccccagcttctggagtagctgctggaggagacccagacgacggagatggcgacgacagctcgagccacgacaccgacttctctgctaatcctgagccggaaggatgggttgctcgacccatcactcgcgacgctgctcgcgggtgtcacttccacgatgcgctcgacaccctgctacgtcgggcatttgaccggcatacttggtccgtcgagtatcgctgtgtggtctaccagcacagtcgcggggtctacccggaccgctgggaggcaacttgcttggtgcgctgcccggagaacagtctccagggtgcggaggcctgttcagagcactattctatctctgaacgggactcagctgaggcagccatgcaagatgctgcacggcgtgcgctttcgcactactgctcggttttcggtggggcagctgacggtcttgacctgaagtattacccccgccgtccatctggcagcacaggaggcgtgattgtctcacctgtcggtgagggcaatcctaggttgagcagcacagtcaacctagccgccgtgctaaacacggagctggaccatgcattagatgagctgagtagggctcgtgctgagatcgccctgctgcgggctgagcgcgcggaacgtcgtcactttggatggtggttcccccgctcccgtcgggactcagcacccgtaccgctcacctcagcgtggacaccagtcttatggcaatcccgcctgcaagaccaagataactctagaaccatagatcatgtcagagaacaggcgcagaggaggaaggcgtgctcagcaggagcgagccgctcaacaggaggaggtgccccagcagcagcacctgccgcccccgcccccgatgtccatcgagcagatgtttctgatgcagactcaggcagttcaagccatcggtcagactttggccgccattcagcagcagcagcagcagcagcaagcaccaccccagcctcagatgcctcagatgcccagagacaagcactacaggagacgcctaaattttcgtag

SEQ ID NO: 8062 - DNA, 189 bp, Zea mays
  Peptide Sequence Number=SeqID_51437
atgccgtcaatggggctcggtgtatgcggctcgctctgccaagtttgggttcgccccttggggaggagtgcgagacattgtggtacaggtggttatgagactgttgattctggttatgactatgatgctggcgaagatgaagctgtggaaggagacttccaggagttccaagattacgacgagttctag

SEQ ID NO: 8063 - DNA, 237 bp, Zea mays
  Peptide Sequence Number=SeqID_51438
atggcgctcggcacccagtgtctctgctcacccttggcgaccgaacaggtcaccactggtagagggattagcgcccgatgcgtcggattgagatttgccggtgatgctccgccgtatgggagcggctgtgccgctgctctggcgctggcggctggaggtgggagattgtccctgcgccgtcgattcggagataaggggtcaggattggatctcacaggggctagctgtaaacggtag

SEQ ID NO: 8064 - DNA, 378 bp, Zea mays
  Peptide Sequence Number=SeqID_51439
gctcgcctaatagagaggactccatccatgagtgacctgaatgaagtgatatttgggcaggaacatctgtctcgagatgatctgtcttttatcttctccctcaaggcggaggagcgatgcaggaggccacacacggatcttgacaaagtagaggtgatcaacgcgagcgagcagaggcggtcggtgtgggtggcggattgcgcgggtgggaggagggcagacgagccagctgacaggagcaggcgttggcaggtagtcgcaacatgcaccggtaggtgggcgagaggcgggcatgtggacaaggcgatcaccggtagacaggttgtcacaactgacgtgccaactttgacgagcattcacaaagatgagcgccgctag

SEQ ID NO: 8065 - DNA, 681 bp, Zea mays
  Peptide Sequence Number=SeqID_51440
atggcggggtgcggggcggcggcggacgagaacccggcggcggaggagctcgcgagcggcgcggacgccagcttgaatgccttctttgaccacgcggggttggagctggcggcggcagccggaggcgggcagggggcggacgacgacgaggaggaggagctggagtggctctctaatatggacgcgttcccttcggtggagaccatgtcggcggaggtggaggctgcgccgtcggctgcgccgccggcgcgcctggagccgctgccccacgcgtcgcacgcggtggggccgaggaccaagggcttgcggcggcggcggcgggtgacggcgccgtggagcgtcccgccggtcctgccgccgcccgcgggcagcggcgcgccgcggcgccggtgcacgcactgcgcgtcggaggagacgccgcagtggcggcagggcccagcggggcccagcacgctgtgcaacgcgtgcggcgtgcgcttcaagtccgggcgcctgttccccgagtaccgccccatcctcagccccaccttctccccgctgctgcactccaactcgcaccgccgcgtcatggagatgcgccgccacgtggaggcggaggaggccgcccccgccgccggccgcgccggcgccagggtccgccgcgccgagcgcgccgcggcgcgcgccgccaagggcgagtga

SEQ ID NO: 8066 - DNA, 771 bp, Zea mays
  Peptide Sequence Number=SeqID_51441
atggaggaagaggaactcacctccggcggcggcgacgcggcgttgctggcgccggaaccgcgcgaacaggcggccgaagaggggaggtcaccgcgagacgcggaggcgttcgaggacgcggtggaagaggcgtccgccgcctccacgtcgccggtggcgtgctgcaatggcgacgccgcggagacttcgtctccgccagcttggaaatcgcaggtcgacgggccgtcggccccggaggaagcggaaacgtacgagtcgccgtcggcttcgtcgtcggggtgtgcggcgatggaggtggagtcttcgttggtttctgaattgcgggaggagccggggagggtggatgctggaagcgccgcgtcgccgtcggggcagcgcgcgggaggcacggaggagcacgagaattcgatggccacgccgggggcaggatcgccgtccagggaggagacggactcgtgtatgcactcggcaccgtcgtccccgccgcgctcggcctcgtcgacgtcgtccccgccgcgctcagcctcgttgacgtcgtctccgccgctgccgcagattaagcagcagtcgcggcatgtgcgaaccggcagcttccagcggttccgtgagcagatgcagcgcgcttggaagtgggggcctattggaggtggaggaggtggcgagaggagtcctagggagcagttgttacggacgactgtgaacattgaggctatggcgaatcagaagcggcactggtatcaagtccgctccaagtcgcagatgtcggagtag

SEQ ID NO: 8067 - DNA, 135 bp, Zea mays
  Peptide Sequence Number=SeqID_51442
atgggcgcaccggacagtccggtgcgccaccggtgcgccaacagtgcgccaccgaagacctacttccggaagttcgggctctggtccctcttccggggctacgagatccggatttgcggttccctcttcttctag

SEQ ID NO: 8068 - DNA, 477 bp, Zea mays
  Peptide Sequence Number=SeqID_51443
atggacatgtcattttcactagtcgatgaggtcgtgggctcgtttgttggtggtgatgtatctgtcggtgtcccagaagagttgctcggaggtcgtccgctcggcaagctcacgctcgacatgctcgtgtcggtgctcatgctcgtgcatgaaatcttgaacatcatgtcgactctttcgtctagcattcatctgctcaaggaatcctcgctcgtctggggtcggatcatgttcgctggcgttatgatgacaccggatattctagcgctggttccagtgatggcgcctgttacgctactacaagtcctcccctgccatggtggatttgtcgtcagagacaacatcgtcttccactcccccgttgatgacgagctcctcatggaagtagaggggtggttctggcaccgtagccatggtgaccacatcagtagacttggtgatcatgatagcttcaaaaatcttggagatcttgggtag

SEQ ID NO: 8069 - DNA, 400 bp, Zea mays
  Peptide Sequence Number=SeqID_51444
atgagggttgtatgggacgcccttggccaaggatctagtgaggacgctagggaaaagctacgtagtgaaaccttggaagtgtttaagggtccgtacaacccgaggcaaaagggatcacaactcatgggtaaaaccaaggcgaggattgtggtttccaagaaagctcgtaaagaggcgagatcatcatctttataccaagaggccttgattgcaaaccaatccatcgacacggtggttgtccttcaagatttgcgtgggccggacagccctgagccggtcgttgatctcatcctcgaaaagggattcaacctttcggagctgatgtcatttgaccctgccttggtgggctcgactatcatcgatgtcgctgatcaaccatcaaggccaaatgttatctttg

SEQ ID NO: 8070 - DNA, 249 bp, Zea mays
  Peptide Sequence Number=SeqID_51445
atgaggaaatgggcaaggcctagcccactactcctcgtgctcctctcctgccggagcaacatcccactcgaccgtccaacccggtggcagggtggtaggccaagtcacaccatcaaccatttcttgaatggtacctgcaaaaattgtgccacaagcaaggctgagtatactaatactcagctagacttaaccggcctcaccgccttggcatacaatgctccactgaccccggctgccgccgtggagtga

SEQ ID NO: 8071 - DNA, 174 bp, Zea mays
  Peptide Sequence Number=SeqID_51446
atggagagtcatgatctccgggcagaatgggaatcacggcttgtgggtggttatgagattgatggttttggttatgactatggtgctggttgtcagcattgcaaccactgctcaggagaagatgaagctgtggaaggagacttccaggagttccaagattacgacgagttctag

SEQ ID NO: 8072 - DNA, 726 bp, Zea mays
  Peptide Sequence Number=SeqID_51447
atgaaggctttggtcaaagtccttgtagactgtgccgaggatgccaccaaatcactgggtggtttagtagatcatgctttaggccacatgcatgatgaagagatcgtagctagaaccttgtttgccatgaaagaaaaactagaattgctacagcaagatgccttagaggcaaaagtgcaagcatttccagaaattgctaagtacgagggggatgacataagtgttgaacctacaactccgtcgacccctccaactattactgatccatttgttgatgaagaggagttctactaccccgatgtcagtgatgagtggtacttcagcgattctgataggtctacacgtaaacggccccatggtcgtgattatagtaaattagagagaaagaaaggtgcatcttcctcatctccagaatacttaagccgtttgcaagaaataactgaaaaacaaattcagtggtccatagaaaagtctgaaaagaaagaaaagtgcacagaagaagagagggaaatagagaaaaagaggttggaattggaagcacaaaagttaaggattcgacaaagggaattgaaacatgaagaactcgaatcggccaataaacgattgcagatgctgctgtcaacaaatgaagaagatgttgatccagaagtatggattatgatgaaggaacaaaaaaacgcttgcagcagttcctattttgttttgattaaacattgtgttgtgtga

SEQ ID NO: 8073 - DNA, 384 bp, Zea mays
  Peptide Sequence Number=SeqID_51448
atggtcgcacctgaagatctgaagatccgggccgcaacaacacgaatcgaaccgatgaagtttggatctgaggaaggcatcgatgctccgagaggaaggcaacggatgcgcagacgaaccgcctcaatggactgtgatttctgggcgcttcggcttccgaggcgaacggggttcactactcacgaactggacgtgctcctcgtcgtcctcctcgccgccgacctccaccgatactttgcagcagagatgggaaagagaatgaaagagaaatacgataagtattggggaatttggcacatcaataacaacaccattgaaagaggacagttgcacagaaggagaaaggaaggggaaatgaaaggacaaagagaaggagaatattaa

SEQ ID NO: 8074 - DNA, 393 bp, Zea mays
  Peptide Sequence Number=SeqID_51449
atgtctctgtcgaagttgcaggccacgacatttttcgcggttcctaggaatcggacccccaacattaccctcggctcaaggaggtggtgccaaccgctaagcacgacggactgtgccatctgcctcgacccattggccgatatcgctggtcctgatcacaagaaggacgacgcggcagctacgtcgatgcttcgggccatgccctgctcccacatcttccaccagcactgcatcttccagtggctccatcgcaacgccgtctgtcctctctgtcgctaccagctgcccaccactttcgaggacgaggacaccgaagtcgaggaggacgctgaggagatggacaactcaaattctcgattcagggggtgtttggttgctcctgctaaagtttag

SEQ ID NO: 8075 - DNA, 243 bp, Zea mays
  Peptide Sequence Number=SeqID_51450
atgaagaccgtcgacacagtggttgtccttcaagatttgcgtgggccggtcagccctgagccagtcgttgatcccatcctcaaaaagggattcaacctttcagagctgatgtcatttgaccctgccttggtgggctcgaccatcatcgatgccggtgatcaaccatcaaggctaaatgctatctttggtaagctccagtgcatcaaggacatgctctcaaccccgactcaggcattagtctag

SEQ ID NO: 8076 - DNA, 339 bp, Zea mays
  Peptide Sequence Number=SeqID_51451
atgctggtgctgctgctgctggtgcctcgcgcccttcccctggccgcggatctcacacaccacgtggtcgtggtcgtggtcgaggtcgtggccgtgggatgggtgcccgcctggcccacggtttgttttggcatcaatcaccaaaaagggggagattgtgtagcctattcacccccctctaggctactttcaagtccctgcgacgctaccacgcccgaggtgtccggccccgagacctccaggtgggcgacctggtgcttcggctgcggcaagacgcccgagggaggcacaagctcacgcccccctaggaggggccattcgtcatcgccaaagttctga

SEQ ID NO: 8077 - DNA, 141 bp, Zea mays
  Peptide Sequence Number=SeqID_51452
atgcataccgttgctgttgaccgcgcgcacagaagacaatgggtcaaggctggtcagtggagcggcgaagtgacggcggtcacttcggctctgccggggggcgtgcgtcaggataaaggtgtcaggccacctttgcgttaa

SEQ ID NO: 8078 - DNA, 847 bp, Zea mays
  Peptide Sequence Number=SeqID_51453
atgtccggtgcaccaaaggactccaacgcaaactcgccaccttcgggaatttccagaggcgacttcgctataattcaccggactgtccggtgctccaaggaagagcggcctcaggaactcgccagcttcgggaatctccaacggctagtccgctatatttcaccggacatgtccggtgcaactccggagcaacagctactcggcgccaacggctacctgcggcgcaataaatgcgcgcgcagcgcgcgcagaagtcaggcgcgctcatactggcgcaccggacaaggaacagtgcatgtccggtgtgcaccggacacccaggcgggcccacaagtcagaagctccaacggtcagaatccaacggcagtgatgacgtggcgggggcaccggacatgtccggcgccaaaggttcacaacaagccaattaaaaagatcaatgttgggttccaacttcgggaattctcagagccggcgcgctataattcaccggactgtccggtgtacaccggacagtgtccggtgctccaagaggacgcggctctggaacttggcagcctcgggaaatcagaacggccgctccgctataattcaccggacatgtccggtgtacaccggactgtccggtgtaactccggagcaacggctatttcggcgccaacggctacctgcagcgcatttaatgcgcgccagaagcgcgcagaagtcaggcacgcgcgtactggcacaccggacattgaacagtacatgtccggtgtgcaccggacatcgaggcgggcccagaagacagaactccaacggtcaaattccaacggctttggtgacgtggctggcgcaccggacatgtccg

SEQ ID NO: 8079 - DNA, 621 bp, Zea mays
  Peptide Sequence Number=SeqID_51454
atggcgcagggcacttctctggttcgagctcgagctggtgagctgctgtcgcccatggccagcgccctactcagccacttcttccaaaagcgcgcagcacccctcctccctgctctctatttggcgcaggaacccccatggtgccttgaaatggttggtgtcctccacttggccagaaatctcctcatccatactcgttgcctttcctcgcgggttgcgtgcagcgagcatcccttgccgacgtcctccctcgcctcgccagccgagctccttcttggccgagctctcctcatgcccgtcgcgcctattcccatccagatatcgtgccctttctccagtgcagcagcactgctgcggggtttccttgtcgcgctcgtcgtcggcctccaaccgggtgtgcgtagccctatccgtgacgccgtcgaaacccgtggtgagaaaacccccgctgcccttgctgctattatttttgtgctcggtaaaactgttgaacggttgtgtgtgtctaattcgcagctagccgtcatgtcgcgctccgcgccttacccgttcaacaaaatgccaagccacgtggacaacccatgcggcaagtctcgactcgttcaggttgaatccatgtga

SEQ ID NO: 8080 - DNA, 354 bp, Zea mays
  Peptide Sequence Number=SeqID_51455
atgggggagggaccggaggaggacgcgtcggcgcagggcgtgcaccgtcgcctgtggtcgaagtccagagatggtggcgcttccgttttgattagtcgagcaacaagagatcaaagatcctacaggagcaagaacacgtctgcgcaccacaggacaggcggctggagtctcgctgctggtgagtgtgctggctcccttctggctgctggccttggggatatgcgggttgcattggtggtggaggtggaggctattgccaagatgcctgaggttggcttgccgaagcaacagaaactgcaggatggttacccacatactctgcttctgttatctccttctgtttctggatggtga

SEQ ID NO: 8081 - DNA, 2697 bp, Zea mays
  Peptide Sequence Number=SeqID_51456
atggcgtcgtcgtcgtcgccgccgccgccgaagctgccgattcccggccgccgcaacatactcatcactagcgcacttccgtacgtcaataatgtcccgcacctagggaacatcatcggctgtgtgctcagcgcagacgtgttcgcgcggtactgccggctccggggttacaacgctatctacatatgcgggacggacgagtatggcaccgccaccgaaacgaaggccatggaggagaagtgcacgcccaaggagatctgcgataagtaccatgctatccacaatgaagtttacaagtggtttaacataaaatttgacaagtttggacggacctcttctcctgagcagacagaagtctgccatgcaattttccataaattgatggaaaacaattggctcacagaaaatactatgcagcagctttactgcgatacatgccaaaaatttttagctgataggcttgttgaaggaacatgcccgaacaaagtctgcaacgcatcagcaagaggagatcagtgtgaaacatgcagcaccttgttgaatccaactgaacttattgacccaaagtgcaaggtttgtaagaacactccacgtattcgtgacacggatcacttatttttggagcttcctctattgagagacaagctggtaaactacatcaatgaaacttcagttgctggtttgtggagtcaaaatgctattcaagcaacaaatgcatggctgaaggaagggctaaagccacgctgcatcaccagagatcttaaatggggtgttcctgtcccccatgagaagtataaagacaaggtgttctatgtttggtttgatgcacctatcggctacgtgtctattacggcatcctatacacctgagtgggagaagtggtggaagaatcctgataatgtagaattgtttcagtttatgggcaaagataatgtgccgtttcacacgatcatgttcccttcaacgctactcggaactggggaaaagtggacaatgatgaaaacgataagtgttactgaatatttgaattatgaagcaggcaaattttccaagagtaaaggtattggagtctttggtaatgatgcaaaggatacaaatattcctcctgaagtatggcgatactatttgcttatgaatcgccctgaggcatcagatacactctttacttgggctgatttgcaagccaaattgaacagcgagttgctgaacaacttgggaaacttcattaatcgtgtgctaagttttgttgcaaaaccagctggagctggatatggttctgttgtacccgatgcacctaatgcgggcgcgcacacattgacaaaaacacttgcagaaaaaaccagtaaatgggttgaacaatatctcgacgcaatggaaaaggttaaactgaaacaaggactcaagagtgcaatgggcatttctagtgatggaaatgcatatttgcaagagagccagttttggaaactttacaaggaagatcctgcagcatgtgcaatcgtgatgaaaacttcagttggccttgtttacctgcttgcctgtctgctggagcctttcatgccctctttttctgatgaaggagtcaagctgagagaagctcaaaagcagcagctgatgctgaagccaacaaagttgctaaccagctcaagggcacaaaattatctggacgacgacactgaagatggctacatgctccccgtgccacttccgcgggctccggccccggcgccggtggagaagcggacacagttccagtgcgtcgcgtccaaggtgttctgctcttaccagacgctcggtagccatcacgccagcaacgtgcacggcggcaggggctgttgcttcgtgcctcccgtttgctcccactcctcccctgcagccccagccgccactcctctgtccccgatcaacagtccctgcatgatcgatccccacttcaatccagatggaggaacaaaaaaggaaccgaagaaacaatctggtggctcaaaatcgaagacagctgaggctgacattacagttgcaaagttggatattagagtggggcttatcagaaaagcagagaagcatccagatgctgattccctttacgtggaggagattgatgttggagaggacgcgccgagaacagtagtcagtggccttgttaaattcatacctcttgaagaaatgcagagccggaaagtctgcgtgctctgcaatctgaaaccggtggcaatgcgtggcataaaatcacatgcaatggttctggctgcatcgaatgaggaccacacgaagttggtggaacctccagagtctgctgctgtgggggagcgtgttacctttgctgggtacgcgggtgagcccgaggcttccctcagtggcaagagcaagacgtgggagaagctggccgccgagttgcacagcaacggtcccgcccccgcccccgcggccccgccccctccacggacaacggctccacctccggtcctcctccccgcgccagattattgcggtctggacgtacgccagggcgaggtcgaggagactcgagggggcgcgcgctggtacgggcgaactggcggcacatcaatcggctatcacgcgtctatcagggcgctatgccccgtcccctcgccctcgcgggcgcggccgtcgccgtccccaccaccatgcacctcgcaaaaagcaacagctcctggtgctgccccggtgggcgagtga

SEQ ID NO: 8082 - DNA, 93 bp, Zea mays
  Peptide Sequence Number=SeqID_51457
atgaagagtatatgtgatcttgacaagacccctggacctggtcgtcaggtgaagtacgacaatttggaggaaatattgttgagtttgtcttga

SEQ ID NO: 8083 - DNA, 153 bp, Zea mays
  Peptide Sequence Number=SeqID_51458
atgacgaagcatttgagaacaagtccccaacattggcgcccacctccggtgaactcactcgaccaccttcggcaagccctgaccttcgtcatgccgtcgaagaaagcttcagtgccaggggctgctgcgctgcagccactggacacaaattag

SEQ ID NO: 8084 - DNA, 765 bp, Zea mays
  Peptide Sequence Number=SeqID_51459
atgcagcacactgaggctgtgcgagacaaatcagccgcggagaacaaaagccgcaacctgatggagaagctatcggctgcggaggccgaaaaagaggacctcgctcgccggctgacgacagaaaaggaggatgcggatagggcctgcgtggaggcccaggctgcgcgtgccgaggccaacctcgctctccaacgtgttgttgaggcagagttgagccataggggcctgcgtggctatctagacaaaacggaggcctctacccgcacaggggtcgaccgagcacacactttgctcatgaacgcgtaccggcaacttggtgcgcgtaccgctccctttgatgcgtccggtgaggaggtgggccttcgctttctcgaatggctgcaggaggaactggagctgcttctggcgatcgtgacgggtctcatgtcctttgcctccctcatcacctgtgaaggggccacgaatgccttgtcccatgagggatgcaggcacttcgaagtctttgaccgatccgacaaagacttcgactgcggaattttccaggtcgaagacaagatggcgaacgctgaacaggtcgatgactttggtggcctagacaacacggagccctggcggaagatgcgagggcggggattggggagcgaccggcgctggctactggtgctggcgaggaccctgtggcggccgccgcgccggctggtgaagacatctcagtggcagctgctgtggggggatagatatcccccgggtccactaaaagagtaa

SEQ ID NO: 8085 - DNA, 591 bp, Zea mays
  Peptide Sequence Number=SeqID_51460
atgaagcaccaggtgttggggcaaagacgaacacgctacccttcgttgtatgacttcgcctgcccatcgcacggatggtcacatccacagaacacgcccgaacaagccgaaggcaccgaccggacggagacctgcgcggtccccttcgcgggcgggttgcgagacaaaggctatgtcgaagtctatgggtctcccacgtcgtcaccgccccgggaggcccatatgggattcgacccatgttccgcatacgcgccccaggcaccatcgccaagctccgctccaccagagggcaaagacaccgtagaggacagagaagacattggcatctcagccaaagaccagctaaagctacgagctctgcgcatcaaaaaccaccacctccagaagcagaaagaaatcctcgaagccaagcgtcaacgagtcaccatgcaagccaaggtgcgccagatgatacaagacgaggagcagagagctcgggagctcgaacaagagattgcgctcatgcaaggcgaaggccagcacaacccacaacgcggccttttcatcccaccagtcacagctttccaggggatcaactacctcgatgagtga

SEQ ID NO: 8086 - DNA, 297 bp, Zea mays
  Peptide Sequence Number=SeqID_51461
atgaagcacccagagcgaggaatcaagctctgcctcaccggagaccccggatcaaggtcaccggacttcacccgaccgtcggcaaacgtagaccgagccccacggttttaccatttaaaggcatttttgctcaaagttaaagaaaatagaaaagattgcaacctcgctgacggagagtacatcctcgtgccggagcaaggagttgctcaggaggtagccccggatccaccaccagagcctaccttcgaggatctacctgccccagctttggaaggcaagcctcggttttatgcataa

SEQ ID NO: 8087 - DNA, 1899 bp, Zea mays
  Peptide Sequence Number=SeqID_51462
atggaggtagttgagttggttccttgcgcccgcaacaagtggggcaactggcatgagttttggttctacgtcgcggagggcacagtcgaagaccatccggggctccccgtgtccgagatgtgctcacattattactcagcatacccgccgttcgaagtggcggaggaggatgtggacgaaggggcccttcggtgtgccgccggcctgagcagcgggcgtgatttggttgaggagtttgtggcgtacggggtatggcctttatcgcatggctgggcgttgggcgaagtatgccctcgccagatgccttcccatggtgggaagctggtgcgaagtcccgccttcgtgctggatctgcatagccgcgatccggccgcctttgtgcgtgaggcggaggatggggcggtgcggatcgtcggtcggtatgtgccgaagacagagggccagcgtagctgggatattcgcgggtccaatgaccgcttgaacagggttttcgagttgaaccgtctgccgtatggcggttatcccggccaagacgatgtggatcgtcgtgggaagaaaccggtggtagagactggagacgaccccgcgccggcggccgccccgtcctctaagaagagggaactaggtattgctatgggaggtctgggggtttctgatggttttgctagggaattgatgaggacatgcgcggccccggggggaaggatgtcttcgcccgagctccgggagtcttcggcgcggatgctgagggttaccgggggttggtggcctaagaatgttcctatcccccgcgcggccggcgaagacttttttacatctcgcatggttcgtgattggaaagtgtttcgttacaggcggaatattgctgctgttgtgtcggcagtgatggacaaggatcgtcagggagcttcgcagaagcgccaggcggtcgtcaggcttcatgaggccaggctgaagaggccacggggggctgcgaaggctgctgcccccggcggaagccagccgccgctggcggcgaagtcggccgtccctgcatccagcagggcgccggaggctgcgaaggcggctgccgccggtggttccaagtctgtgaaggccgcccctgtgtccagcagggtgccggaggctgcgaaggcggcccgagagttgccgccgccgggcaagcgcgtcaccgacttcgccaccgacataagtgtggaagattatcttgttgggtcggacgaaggccaacttgttgttgttccgcctgccgtggtgaccgcggcggctgccgtggtgaccgcgacggctgccgtggtgcccagggcgaagggcagtgctcttagtgccgacggcgagataccggcactcactgccgtcagggacgaggcgggtgctgtgtcccgccggctgaaggagatgaaggaggcactaagtcaggcggctgacttcgcagaccgcgcggcgtcgggggccctgacggcagttgtgtctgccgaagtcgagagacttcagacgcaacatgccgacgtcgtccgggaaaagtcagccatcgacagcaagtgccgcaagctggcggataaggtggccgcgatggagggtgagaagactgacctccggcgccaactggtggaagaaaggaaggaggctaatgaggccctcgccaaggcgcagtctgcgcaggcggaggccaatttggcgtgggcgaagggcagtcttgccaggcagcgcgtcgagcagttggaggagcggctcagcgctctgcagacccgtgtggagagggccgaggcctcgacgcgctcggaggctgagcggacacgcaaacagcttatggattcataccatgagctgggcgcgcggaccgctgacttcgaagtgccggaccgagagcccggacttcgctgcctcgagtggatatag

SEQ ID NO: 8088 - DNA, 324 bp, Zea mays
  Peptide Sequence Number=SeqID_51463
atgaagctgtggaaggagacttccaggagttccaagattacgacgagttctaggtgtgggttagcggcaaccccccagtcggctgcctgtgaaggccgcgttatctacgtttcttttccgcactttgatttattgaatctaaagagcctacacaagcacaagatcaaccatcatcttccatgcaagcatctccaccaactcaagacgaggatcaggctcaagatgatgaagataaagatcaagaggatgagccacctcaagaggaggatattgatcaagggggatataaagatgatcaagacaatgaagatgatcaagaaataa

SEQ ID NO: 8089 - DNA, 1195 bp, Zea mays
  Peptide Sequence Number=SeqID_51464
atgaagaccttcgagtggattatcttcaaaaatccactcgaagctcgggggctacacccattgggtgcacctccggaaccgacgtccaaggaggatgactcgtgggcctgggcccccgcgtcagagactgggccgttggttttggcggaggtgaagaggcgcactaccgtgggcggtggcccgctcctcacgtggcggttcgccttcttcgcactcggagaccgacgcccaaggagtatgactcgcgggcccggaccccccgagtcagaggctaggccgctgcattcgacggagatgaagaggcgtactaccgcgggtggcagctgggttgcattggtgcgcgtcgggcgagattctctgcggcgtctcggggtgcgagcaagggagtctttcttgaaaaaggattcaccctgcgtgtggcagttatgctttcacattttctcccaacagctgcgccctttcgccttcgagctctccgcgcccctttgcttttgcgctcctctgctttccgccaccgtagttgccatggcctcgccagtccatcccgagcgtttccagtctgaggtggcacttaacctggtgcacaacctacttggacggggtgcgccggcgttcgccggaaggatccgtgccggtgcctcacccctcggttgcgggctgccgctgccgatctcgcctttctttctgctgctgctggaggagctcagcctccaacttcagcacctcacgccccactccatcctccagtctgccatcttcgcctgcctgtgcaagatgtccgtgggggtggcgcttctttcgccagtgcttggtcgaaagggtgttgtgcagcgaccttccggagaaagcgaaatgagttgcggctccatcttcgcacgaacttcaccagcatctcatggtacgcttccacgaactggtcgagctccggcccgtctcagcggccaggccggcgagcaccgtgcgctgccgtgtctccatctctttggctttaatggcctcgacgttgcctccaacgatgagggctcctttgtcttgatgcatgcatcgaggaggccgccaccgttggcaagctgtagcaccgggctcgacgtgtcaaggctggataccaccatacctaagaaagagctggtgacccggcccccaggaggtagcctcgactgggacctggacctgtacacaactttggctaaggagc

SEQ ID NO: 8090 - DNA, 849 bp, Zea mays
  Peptide Sequence Number=SeqID_51465
atggtgaaggggtttacccagtccacgtgcgccggcgagttcttgaactccggtgagcgcgatttggcttctccggtgacgcgggccctcggttcaagcttgagcaaggctcacggtctcaccaggaagctatctgggggcttgaatcgaacggagggggactggagaggggttggccacggcggtggctcttggtcggcactggcgggctgcagagaggtcgccggaggcaacggctggctcgggcgagtccggcgaggtacggaggggataacggggaaggcaaccgagcgctggggcgggttttataggcgcggacgcggccggggcgccggctcaaccgtttggcgcgacgcgggcacgcggggcgcgcgcgcgggcgtgctctggcgagctcagagcgcgtcgaacacgtggcgcgttgcttctgcccgtgttcttcgctctgctgagcggccaagcgtacgaatctcgccctaccgcctatgggagatctcttccctgcacctagggctacctagttcatgccggattcctcgccgccgactagctcacccgcctgcgcacgtggaccgacctactccgaccaccaccgccgacgatctgcacctcgacgtgattgccagagacccctggacctcgcctgacccttcaccggagcaacctcaccaccggcatgcatcttattcattgaattccttagattgcaacctcgctgacggagagtacgtgctcatccctgagcaaggagctgtccatgaggaagatcaggagcaagctcccgagcctgctattgaggatctccccacagccccagcaattgaagacaagccccgattttatgcataa

SEQ ID NO: 8091 - DNA, 630 bp, Zea mays
  Peptide Sequence Number=SeqID_51466
atgacgacttcctgtggctaccatcccctggagatggtgatgcaccccttgggactcttccctgctgagaagaaggatgaccccatgtggtgcaaccgtgtgagccatgtgaaggatgtatgggccatgtatcctgacttggttgggagaatcactgttcagtgcatgagcgcactgtaccgccttcaggccctgcaaagcgacgttatggcacatcttgctaacctcgctcaaaccaccaagctcaccctcgacagcagagaggacttcgtggtcgacttgtcctcagagctggtagagaaggacctacaggtggaaaggttgagccagcgcatcaccaccttggagcagcagcaggaacttgaagaagctaatgactacctggacatgcaccacctagagatggaggccaatgaggccggaagcgagggagaagaggctcctgtggagttaggaccagcccctggtgccaatgtgactgcctccgcgatgccgccttcacccccgcccttgttcaccaaggcaaaggatccgttggacgctgacgtgtggttacgcatcgtggagtccaagtttcccctcctcacgggagactgccctgatgacaccaaggctcgcttcgccgcgtag

SEQ ID NO: 8092 - DNA, 597 bp, Zea mays
  Peptide Sequence Number=SeqID_51467
atgacttctacggccgtgatagcgaagacggatcgttatctcggcaagatgaaccgtgtcgctgacgatattaccgtcgcaccggaatatctggaggagagcaacaaccaggcatgggcacgcggcggtgcgggtgaccgtctgctgatgtacgcacagctgaaggaatgggcagagaaaaactttgatatcaagaaatggtatccagatggcactcctctgccagagttttacagcgagcgtgaagggatgaaaggctggaacctgttccagttgatgcatcgtaaagcacgcggcgatgaggtcagcaatgacaagtttggcggcaagaattactgtgctgaatccaacggtaacgcagcggacacgctgatgctgtgtgcctcctgggtcgcccagacggatctttcggagttctttaagaaatggaatccgggcgcgaatgcttaccagctgccgggggcgagcgagatgagcttcgagggcggtgtgagccagtcggcttacaacacgctcgcgtcactcgatctgccgaaaccggaacagggaccggaaaccattaatcaggttaccgagcataagatgtctgccgagtaa

SEQ ID NO: 8093 - DNA, 450 bp, Zea mays
  Peptide Sequence Number=SeqID_51468
atggctacccgcccgtggaggtcatcgacgggaaggggatccgaggacatccgcgaaccctccaagtcggcccctgccgtcatctcccaaagcggcaaccgccgcttcgccaagggaagcaccctccggcgatggatggcggcaatcacccccgcagcgggaccgggaaagggggataccccgaaagggatccttctccgtgaaggaaacgggccccgagcccacctactgatcagaggttcgacggctggcccctcggaggggttcaacagccgcctcagaacgctcgggctctgcgcccactactggtcagaggttcgtaggctggcccctcggaagggttcaacggccacctcaggccactcgggctccgcgcccactactgatcaggggttcgtaggctggccctcgaagggttcacagccgcctcagacgcagagcgagggatga

SEQ ID NO: 8094 - DNA, 1569 bp, Zea mays
  Peptide Sequence Number=SeqID_51469
atggaattgggaagccacggcgctagaggaacttcatggcacgcaaacaccagagaactcgacggcgacgcgaaaaaggttccggccataggggaaaatccgagcaggggtcgcagccggctagctgaggacacgacggtgcgcagggaaataagacaggggcgcgcggctagcagagaggcactgggcagcactggcaggaaagcaggcgagcagatggtcaagcgcctagggagccggacgcgcctggctggagctggagcttcggtcggctggaaggggaagcacgacgcgcggcactgggaaaaactgagccggccgaccggacctgggaccaggctccgcccgctggcttacgtcacgggcgataggccacgtggcagcatcgggcctccacctgagcagggagcggaagcgcacaggtcgaagtccggacacgcatcccacccaaggggtccgacttgcttacttgggagtcccgtgtcgtactcggaggtccgggttgagtgtataggggtccagtgctctctcgtggaggaactggcgcccaaggagggtgactcatgggcccaggcccccgcgtcagagcctgggctgttggtttcggcggagatgaaggggcgcactaccgcaggcggtagcacgctcttcacgcggcggactagtccgctgcttttggcggagacgaagaggcgcatttaccgcgggcggtggcatgctcctcacgcggcggactggtccgctgcttttggcagagatgaagaggcgcatttaccgcgggcggtggtctgctcctcactcggcgcagaggtgaagaggcgcgccatcacgggtcaactgtacgctccttgcacagcggttcaccttctccgcacatggaggccaacgcccaaggagtatgactcgtgggcccgggccctcgtgccagagactgggtcaccttggcgcacgtcgggcgagcgtttgctggaaaggatccgtgtcggtgtctctcctcacggcgacctcgccaccagagagtttgtgttcttcgtctccaaactcccaagcgggttggcgctgccaatctcgtctttcttcgtgctgctgctggaggggcttggcctccagcctctacacgttacgccctgcttcatccttcaggcggccatcatcgcctacctccgcgggatgtccgtggaggtgacgctcttcctgtttcttcctccagcatccgggggaaggatgatcaccagcctcgtgaaggtggacagcgggctgagccacaggtccgctgcacccacagcgccccctgcgctgccggccaccgcaggccacgctgctccgacgccgcccagggggtcgtacaagacgtcgtacaccgtggaggtggcggacgcgtgcttggatggtcttgtcctcacccccgtaggaggacgagggctagggcctcctcgccatgatgcacacgctgaggtggtcgccaccgctggcgatccgctggtgcagaggtggtcgctgccgctggcaagccactcggagctagctttcaacacgaccctgctggtgcagagtagtccatacctgtag

SEQ ID NO: 8095 - DNA, 471 bp, Zea mays
  Peptide Sequence Number=SeqID_51470
atgagtcaccctccttgggcgccagttcctgggtgcagagaagccaaaccgccgctcgcgctagtaccacgctccctcggggccgccgcagaagacggagaagttaaattttcaaatccaatgcggtggtaccaaggcaccccgcacgtggcccagcaaaaccataagtacgaaggcaacaggctcgttccctcccctgaggcaggcccaggggccactgtcggtaccctgaatcaggggtaccccttactacagtatgaagacacggtgcatggtgaacagcacctgactcctcctcatgaccggtcccaaggacaccacgtgaccagaaaaggtgatatactccaagacgccgtcagtgggtccgtacctccacgagagagcactggacccctatacactcaacccggacctccgagtacgacacgggactcccaagtaagcaagtcggaccccttgggtgggatctga

SEQ ID NO: 8096 - DNA, 279 bp, Zea mays
  Peptide Sequence Number=SeqID_51471
atggatgttttgatgattaggaaccttggagaggaccagcaaggacttgggaaaggcctaggtgttgaggaggagcagcaagggcgccacaacaggaaggagatcaagtccgactcggctgcgactccatctcgggttccagaaccagtctacactaaaatgaacgcccaagatgcatccggactccgattgcaggaattagccctcgtggcgaggtcaatcgcgcagtacacagttgataaccagagaagaagtggtgctgcgattgcggggttctag

SEQ ID NO: 8097 - DNA, 549 bp, Zea mays
  Peptide Sequence Number=SeqID_51472
atgcagccaggagagcatgaggtggggcgcaaggttgcggactatggatggggcaacaaggatattattaagagcgaaatttgttgtaggtgtaggaaggacagaatgacctctagacataacagaggcgccggagtcaacaacccagggcgagttgccctgcaattgcatgttcaacaaggcagcgatgaggccagctgcatcccaggtgctggtggaggtgttggagctgctggaggatgcctggagtggagcgaaggcggtgtgggcctgcggggaagacccgagaatacccagggtgcgcccagcctgggcaccagaacctccctggcggcgctgtccaggaggggtgacgcgctctctaggggccacacgttcgccggtccagggattaaagccctagggaacgcgtttgttggtgatggtgttgccggagttgttggagaagctgccagaggtgttgtagaagggctgttggccgccctttttggtattagggcgtcggccgccctgctggtgctgctgctgcgaaccaccaacattagctag

SEQ ID NO: 8098 - DNA, 342 bp, Zea mays
  Peptide Sequence Number=SeqID_51473
atgcaattgcagggcaactcgccctgggttgttgactccggcgcctctacgcacatgacgtcctcggatggtgggactccatcctcgacgcccgtggttgctccaccccactcggatgttgagcagccgcccccagacgttgcggcctcacacgactcgccttctgcgacaccgggcgggcgtggtcccgtgcccccgtttggacccggcgtggggctggcggacacgacgtcatcctcaccgtcgctgcttccgacgaactaccgtagcgcgctggctgacgccaactggcgtgccgcgatgatggatgaataccaggccctcgtcgacaacaacacctga

SEQ ID NO: 8099 - DNA, 543 bp, Zea mays
  Peptide Sequence Number=SeqID_51474
atggagagtcatgatctccgggcagaatgggaatcacggcttgtgggtggttatgagactgttgaatctggttatgattatgatgctgcggggcgaattcccgaagttggcgagttccagaggcgctcttccttggagcaccggacactgtccggtggcacaccggacagtccggggcagacccgagtgttcctcttccgccacggggggaagtcgtcgtcgagttcgcctccgtcgggcgagccggcgaccgtcgttgttgtcatgctgcgaggggaggagtaccatgtcgtagccgccgtcgtgggacatgaactcgagactcccgaagcggagcaccgtcccgggccgaagaggctgctgaagactatccatctggaactcaacgggaaagtatttgtcaacacgcagcaggacccctacctggcgcgccaactgtcagcgtttcagacccgcgaggaccctcgaccgaccagtgaatttgtcgctgcgtgtccctgcccagatgggttgatgcaagatggaacacaagacgggggatga

SEQ ID NO: 8100 - DNA, 663 bp, Zea mays
  Peptide Sequence Number=SeqID_51475
atgacgtcggcaaagaaacgtcagcagggtccatgccgcaccgccagctgcgcttctacagggctcaagcactcccccgacggccacggacacgcagcgacaaattcactggtcggtcgagggtcctcgcgggttcgaaacgccgacaatactgatacaaagatttacgaggagggatgtatcgagccgatgatagaagatgttgctttgaaagaaaccctaaacaaagagcagaggtctgcctatgataagattctatctgtcattgacacaaataacagcggagtttgctttgtggatgggcctggtgggactggaaagacctatctgtataagggattgcttgcagcactatgcagtcaggacaagattgcagttgcaacagctacatctggggttgctgcttctataatgcctggggggaggaccgtccattcgcgcttcaagatgccacttactattgatgatggtgcagtgtgtagcttcacgaaacaaagtgggacaacaaagttactacaaaaagcatcactcattatttgggacgaggcatcaatggctaatagacaagcaattgaggcgctagacaacatcatgcgtgatataatgggggcatcatgggctgccctttggtgggaagacaattgtgtttgggggagattttag

SEQ ID NO: 8101 - DNA, 729 bp, Zea mays
  Peptide Sequence Number=SeqID_51476
atgcaagaagcgtgcaaccgcaccacggtcgtgcaccctttcggctccgttgcaactgacggtccagcatggaggcccgggcccacatttcatgtaaccggcgtgccggttactacgtggaccgggaaaggggatatttcgaaaaggatccttctcagcgaaggaaacgggccccgagccctcctactgatcaggggttcgaaggttgtgctctgcagggttcggcaaccgccccagaacactcgggcttggagccctttactgatcaggggttcgaagactggcctctcagaagggttcgacagccgccccatagcacgcagagtcagggatgaccctgggtacgtccgttacatggctgaggctcgggctacgctcccgaggggttcgaaggctggcccctcggaagggttcgacagccgccccagagcacgcagagtcagagatgaccctaggtacgtccgttacatggccgaggctcgggctacgctcccgaggtaccctaggacatttctgagaccagcgggaacgatttgtaatggaatcccaccggagggaggcaccgagccctcaaaccctatcaaatgggtccaggtccagcaaatcacctgcagaggctcaggggctgctctcgcaccaggctacaaccaaatcgtcgaccgcgtcgacaaaactagcttaaaagctcggagcctgaccatgcacccgggctgcggccaggccgcatga

SEQ ID NO: 8102 - DNA, 477 bp, Zea mays
  Peptide Sequence Number=SeqID_51477
atggtgatgttcgccttccagatgaggaatatagacccgggtaacagactttgcaacggtacacgactggtggttcgtggtttccaaaaaaatagtattgatgctgaatttgttcttggtcagcacgctggaatgtggattttcttgcctcgtatacccctgtgcccctctgatgacaagatgttccctttccattttaaaaggaagcagttttcggtaagactaagttttgccatgaccgttaacaaggcccagggccagacgattcctatggttagtgtgtacttgctggaaccagtgttctctcatggccagctttatgttgctctatcaagggccacaactcgatcgaaagtaaagatacttgccattccagtcattgatgagaagaagaagaaatgggtgaaaaagaattcaacgataaatggcgcaacatacacaaagaatattgtttataaggaggtccttactttgtag

SEQ ID NO: 8103 - DNA, 396 bp, Zea mays
  Peptide Sequence Number=SeqID_51478
atggcgaccgggccatcctacatgcggtgtgcctgtctattccgttggcaggcagtacgcccatgctgcggcatacactatgctcatcatcactcgcgcgttaccaagaaggcagcgcggcatatctgcactataggcgctacggacattatggcgctcggagatcttctgggcgacacgtgcattggatacttctatatgtattccctctgttttgaccctgggcccatatgtcggggcccagcacccttgtatgtgccccccttgagctataaaagggagggcacgcagcgttacaaggcagacacacttagacccaacttaggctcaagctcacttagactctcacactcacaaggtcatacaagctctcaagctcaatacatcacagagtga

SEQ ID NO: 8104 - DNA, 300 bp, Zea mays
  Peptide Sequence Number=SeqID_51479
atggtatcccttatgctcagaagggtatctaaggaagacatacagagtggaacgaggtgcaagtttgtggggagcaaccgcaaaaaggttgagatagcaggcgcaaccaaaaacacggaggtgttcgtaggacaggggagtaccaaacaaggaaaaatgggggtaggaggtgttgatggtctttctggggagaagattcaacaaggacatgacatccatagcaaagtgtcatgggtaaggagaaacgatcaagtggaagcattatcgaactcacgcccattgtcgcactggatggcctaa

SEQ ID NO: 8105 - DNA, 609 bp, Zea mays
  Peptide Sequence Number=SeqID_51480
atggctcccaacgccctcgccgtggccccccgccccttggacaagggcaacggggctgcaggtcttaatccatcctttgcttgtcagggcttcctccccctctgctcccaaggccgcgcctcctccgccagataccatgtccgacgggctctttgtgagactgaggcggcgatcctatgggagtgggaggcgcttgaggccgagcaccagcgcctcagcgactggcgcacccagctggaggagcgcaccaaggtagcgtcccgccagtttgcctccaagcggtccgagctcgagcgggaccacaaggattacaaaaaggacctccagaaggtgtacgcccgggagctggaggcgagccagaaggagaaggggttggccaagagggaggatgccttgagccagagggaggcggtcgtcacagagctccaggccaagctgagtgccatggacaagatcctagatgagcagcgggtccagcagaccacgactgtggagagaatccaaaaatgggagcgggagctggaggacaaggctagcaacattgccctggtcgaggagaacctgggccccctcgggcacgatctaggaccccaatcagagagggcctga

SEQ ID NO: 8106 - DNA, 231 bp, Zea mays
  Peptide Sequence Number=SeqID_51481
atggcttcgctagttcatcccgagcatttccagtctaagggggcgctcaacctggagctcgggctccagcttcagcacctcaggccccactccatcctccaggtggccatcttcgtccacctctgcgagatgttcgtgggggtggccccctgcacctccctcttccgccatttcttcgtgttggtgaagtctgggaaggctaaggaccaccttggcgcctactacttctag

SEQ ID NO: 8107 - DNA, 462 bp, Zea mays
  Peptide Sequence Number=SeqID_51482
atggcctacgactactacgcgtccggcgccgaggatgagtggacgctgcaggagaacatggaggccttctccaggatctttgttgcaattgcccctgtacttgacagatttgcattagatgctcaagctatagaggatgttgatcctagggcaatagaccttgccatgagaatcgccgaaaggatgttcctcaaaatgaagaaagatgaggtgaagatcaagattgaagaagaagacaatgatcgatggagaccatacgacgaatccacctcttcacaaggtgcatctttcaaatctacttctcatatgtgctttgtctctaatgagagtgacaatgaaagtgaggatgaggaggagcatgaaagtgatagtaaagatgaggatgatcttcaacaattcttcgctcagttaagcaagaaaaatcggacgagcttgctcaaactcatgaaaagagcagaataa

SEQ ID NO: 8108 - DNA, 615 bp, Zea mays
  Peptide Sequence Number=SeqID_51483
atggagcgcccaaccgtccgttccggccgcccctcggtcagctccacgacggcacgacctcagctctccaacctgggcctcggctactccatcgccatcgcgctcggcttcctcatcctgttcgcctccttcctgctggctttctacttctgcttcggccgcggcggggactactgggccggggaagcagtcaccacggcgtccagctccggccacctctccatcaccgtcccgcgcgtgctcttcgtcgcggaggggtccgagtcccccgaagacgacgcttacccctcctcctccgccgccgcggcctgctcccccgtcgggctcgacgcggccgccatcgcttcctaccccaaggtcgccttctccagcagggtccgccgaggccaacgccatgtgctccatctgcctcagcgagtacagggacggcgagacgctgcgcgtgatgcccgagtgcaggcacggcttccacgtcgcgtgcctcgacgcctggctgagccggagcgcgtcctgccccgtctgcaggtcctctcccgtcccgacgcccaatgccacgccgctctccgagctcgtcccgctctcgcagtacgccgccgaccggaggcgccgcagtga

SEQ ID NO: 8109 - DNA, 198 bp, Zea mays
  Peptide Sequence Number=SeqID_51484
atgaggctcacagatgctggtgatggtcagccaaatgaaagcctctatgaaaaaaagcctgaagagccaactctcgtcctgacatcattggtgattgagatactacaaccaggagcaaaccccatacttaccaatttgaatatgtcgaaaatgcaccttctcctaagactgggaacagctcagaaggaaaacagatga

SEQ ID NO: 8110 - DNA, 411 bp, Zea mays
  Peptide Sequence Number=SeqID_51485
atggacgctagagaccaggtttatgagggtggacctcaccaggccgtcctcataggtgtcgagggtagagcttggctggtggccgacgatgacaatcttgggttcgccagtggcggtggcgaggaggccgagagagtcgaacttgatgatgctcctatgggcggagatctttgcctcgtcgggtttctcgacaatgagttggtcggccagtccgccttggagagttggtcggtggagctgggctccttccgaagcatcgcccgagacgccctcgggcgagtcgaaaatgcactgctcgtctggggttggcctcgggtgagacagagagttcgacttccacccgaggttagcgtctcccacccggcgatggcctcgggcgagccgtgtcttgagtccctcgtgccttggtga

SEQ ID NO: 8111 - DNA, 354 bp, Zea mays
  Peptide Sequence Number=SeqID_51486
atgaagagagcatctctatgtaaaggtacaaaaaggtgccaaaggttcatctacaactattctaattcgactgtccggaataccgtagattattccggacaggagaagctttttggaaaaacaggccaagcgcggaccgtccgggcccttgcggcggaccgtccgcgacacgaggatgtcactcggccagaaccaatgcaaaaatccaagtctgtgctgcggaccgtccgatggaagagcaagcaccgtctgagaccacacgcggactcgtccgggcctctttgcggcggaccgtccgcgacaccggagttgactttcgaccaaggaactacaaatcagggacagtccgactaa

SEQ ID NO: 8112 - DNA, 987 bp, Zea mays
  Peptide Sequence Number=SeqID_51487
atgaactgggaggctgccagcacacatctgattatggtcacaattgctcttgccctaaatttacatcattgtaaatttggaagttgtgtgatgctggcagagcgaaaattcccttttcatgggtttactgttgctcattgtgatgctggcacacctgctggatggaatgatggttctgatgatcttgttaatgagattaataccaagattattgattccttgcaatatgcaagaaaagactacttccagaacacaacaaaggaatacccttcagagctgaagccactcttttctgcctttgggttgaaaaattttactatcacaaccctaaggtctttcctattatattatttgccactcatacaacctaaacctcacactggttctgatgatgaggatgatgatctgcttcatgacactcaagagaaaaccatggatctggttactcccttctacaattcagtaaagcaaatcgtgcgggagacttctattgtaacgaccagacgagtatttgaaaggattgtagttcgtcatgtttcacaaagaacagcatggaaacttctcaaagatgcttcaaaatcatcaaaaaggaaagctgcaagggggatgccaactccacagtacacatactgtgttgccagaacaactttccgagcacatgcactgggaataaccgctgcttgggtagtgcaatccataattgaagtatacagatgtttcatccgtaagcctagtgaggactgtgaagcactatcaagcgacggcaatgaacagtttgacgatatgaataaattcagattgtttgggaggaagatttatgggattaccatcaaaagttgtttctctttggttttggcctcagctggagcaggcattggtgccctcgtgcatccagtgcatggacaatggttgggttgtgccttgggagatgttgcaggtccaattatcgctataattgtttttaagaagatgcagctaccactatga

SEQ ID NO: 8113 - DNA, 126 bp, Zea mays
  Peptide Sequence Number=SeqID_51488
atgcggacgacgtttcgccttcgccgtaataaccgcgccaaaaaagcaacagggaccaggaaagggggataccccgaaaaggatccttctccgcgaaggaaccaggctccgagccccccctactga

SEQ ID NO: 8114 - DNA, 120 bp, Zea mays
  Peptide Sequence Number=SeqID_51489
atgacgcttcacatctggcacctctttggagaggttctccaggtcggcgatgagggcctcggactcggcgagggcctcgaccttgagccaaagatcagggatgttcaccttgatccctaa

SEQ ID NO: 8115 - DNA, 1998 bp, Zea mays
  Peptide Sequence Number=SeqID_51490
atgaattcacccacccccgccagtggaggagactctcgtttcagttctgacttcctttctcgcgatggctttccttccattttgtgggaagtgcttaactccgccggttaccctacgccccctttgtacacagtgcagttgtatgaggagcatcgggtacctcgttgtcgggtctggctaactttggaggctcatccccttcagccgggttggcgttctcttgactctgagacgattggactcaggacggacgacaccgttgaggcagcagccatgaagactctgacgactttctgtggctaccatcccctggagatggtgatgcaccccttgggactcttccctgctgagaagaaggatgatcccatgtggtgtaaccgcgtgagccatgtgaaggatgtgtgggcaatgtatcctgacttggttgggagggtcactgttcagtgcatgagtgcgctgtaccgccttcaggcccttcagagcgatgctatgacacttcttgctaacaccgctcaggctgccaagctcactctcgacagtcgggaagattttgtggtcgacctatccacagagttggtggaaaaggatctgcaggtggagaggctgagccagcgtatcaccaccctggagcagcaagtggagatccgagataacactattgatgtcttggagaaccagcttcacgacgtgcagagggaacttgaggaagccaatgaccacttggacatgcaccacctggagatggaggccaatgaagcaggaagcgagggagaagaggctcccgaggagctaggaccagcccctggtgccaatgggactacctccgcgatacctccttcaccccccagatgggtcgagcgcgtgggcgagcgcgaaggggggagaggcgaggtggccggagtcgagcgtgagagaggtggaagtcccgcggccttcgtgttcgtcccgcgcccaggtcagggcgacgtgggggttcctccgaagccgaggttgagtctgccttctgttgccgtggccgagcccgagccaaggggtcgggcgaggcggaagtcgttcggccgaggccagggcggagtccgagtcctggggtcgggcgaggcggagtttcgtcgtcttccgggttttggcccgagtccgagccctggggtcgggcggagcggacccgagtccgagccctggggtcgggcgaggcggagtttcgtcgtcttccgggtcttagcccgagtccgagccctggggtcgggcggagcggagttcgccgtcttccgggtcttagcccgagtccgagccctggggtcgggcggagtggagttcgccgtcttccgggtcttagcccgagtccgagccctggggtcgggcggagcggagttcgccgtcttccgggtcttagcccgagttcgagccctggggtcgggcggagcggagttcgccgtggcgcctttggcaaggcctgattgcctgtcagacttcactctgtcgagtggcactgcagtcggagtggcgcaggcggcgctgcccttctgtcagactggccagtggagtggtggagtgacggcggtcacttcggctctgccgggggcgcgtgttaggatagaggtgtcaggccacctttgcgttaaatgcccctgcaatttggtcagtcggtgtggcgatttagtcaaggttgcttctgagcgaagccaaggcctcgggcgagccggtgatgtgtccgccataaaaggggggcctcgggcgagacggaagtctctcgagctttatgctgatgggggttaccagctgagaattaggcgtcttgaggcccccgagcctctgcacagggcgagaggacgatcagggacagacccgactttttacatacgcccctacgtcgcctttccgcaaggaggagggggggagtgcgccatgttaccctcgatgggcaccgaacatggtgtctccggtgagctgcaagcggcaactggcgcgccggttgctcgacgcgtgggtgagagcacctag

SEQ ID NO: 8116 - DNA, 264 bp, Zea mays
  Peptide Sequence Number=SeqID_51491
atggacagagtacgatccactgctagagtatctcgtgagggagacgaagccatagctgctgaaacaacgcccatctcagaagtgatgaggcaatcaggtcttgttgtgccagaggaggctgttgccgaaggcagacgagaaaagaagggagaagctaatgaccatggtcatgagtccactaaaattgagctttgggatgacaagacccttgtgccacatgcagcttggctctccatgccaagcgactctctaaattccggttag

SEQ ID NO: 8117 - DNA, 843 bp, Zea mays
  Peptide Sequence Number=SeqID_51492
atggcgcttcctgttgacgtggcgggcccgtgccctaggtcgggcgacgtgggggctcctccgaagctggggtcgaatctgtcttccgttgccgaggccgagcccgagcccctgggtcgggcgaggcggaagtcgttcggcagaggccagggcggagtccgagccctggggtcgggcgaggcggagttcgtcgtcttccgggggcgagcccaagtccgagccctggggtcgggcggagcggagttcgccgtcttccgggtcttagcccgagtccgagccctggggtcgggccgagcggagttcgccgtcttccgggtcttagcccgagtccgagccctggggtcgggcggagcggagttcgccgtcttccgggtcttagcccgagtccgagcccttgggtcgggcggagcggagttcgccgtcttccgggtcttagcccgagtccgagccctggggtcgggcggagcggagtttcctatggcgcctctggcgaggtctgactgcctgtcagactcactctgtcgagtggcactgcagtcggagtggcgcaggcggcgctgtccttctgtcagaccgctttatgctgatgggggtttccagctgagaattaggcgtcttgagggtacccctaattatggtccccgacaggtgggcggatcatcaacaggcaccgagggagagcagcgagtgagagaactcaatgacgccgtagttgttccgcgtctgcgcggttgtctagggtgccatggaagaccgtggtgcatgctaggaattgtgagcaacttggtcgaagcatctgcaagcttagggagcccggggcagcaaggaaattctcgccagtga

SEQ ID NO: 8118 - DNA, 222 bp, Zea mays
  Peptide Sequence Number=SeqID_51493
atggcgggcggaaatgagctcgccggagctaaggaacggtggctggccggtgagggattcgagttagggatcaaggtgaacatccctgatctttggctcaagattcgaaaggcaggaggaggggttgggggtgattacataccagcttccttaggtaggcaatcggggaagttggatcttaagaattcctcggtttcccaagtagcttcctcctctgagtga

SEQ ID NO: 8119 - DNA, 198 bp, Zea mays
  Peptide Sequence Number=SeqID_51494
atgggatacacgacttgtgggtacatggtacaacctctgcagagtgtaaaaatgatggtcaataccaggaagggtggtggaatttatctacctcccaatcgacacactcggaggatatttagacaacaacaacaacaagctgagatggatccttcaaatcctccaccagccggagctgatcccgcagttgcagcctag

SEQ ID NO: 8120 - DNA, 99 bp, Zea mays
  Peptide Sequence Number=SeqID_51495
atggtgtatatgctgcttcgacctgtgcagtttatggatgaagacgaagctgacctacagatcttatttccaagaatacagattaagaaccagtggtag

SEQ ID NO: 8121 - DNA, 244 bp, Zea mays
  Peptide Sequence Number=SeqID_51496
atgacgtggcaagggggcaccggactgtccggtgtgcaccggactgtccggtgcgccatcgagcagacagcccagccaacggtcaagtttggtggttggtcctcccgtgcgcacggcgcgacaaccgccctcgcggcaggagggggcaccgagcgccaagccggcgagcccaacgcgctgaagctgacgatgcccgccgtcgaccagccccgcgttatcgaagtccgccccgctcgcagggcca

SEQ ID NO: 8122 - DNA, 2334 bp, Zea mays
  Peptide Sequence Number=SeqID_51497
atggaagcagcagctgatgcctttccctgggcagcgcagtgcgcgggcatggccctcctcgcctcctcgctctgcgtggtggcgctggccctggtgcttctgctcctccgccgctggccgtggtgcagctgccacgtctgccgggcgtacctgacggggtcgtgggcgcgggacttcaccaacttgggcgactggtacgcgcacctcctccgcgagtcggccacgggcaccgtccacgtccacgtgctaggctgcaccgtcacggccaacccggccaacgtggagtacatgctcaagaccaacttcgacaacttccccaagggcaagaccttcgcggcgctcctcggggacctcctcggacgcggcatcttcaacgtggacggccacgcctggcgccaccagcgcaagatggccagcctggagctcggcagcgtcaccgtgcgctcctacgcgttcgggatcatcgcgcaggaggtggaggcccggctcctgccgttggtcgctagcgccgccgacgccggcgcggtggtcgacctgcaggacgtgttccgccgcttcgccttcgacaccatctgcaagatctccttcggcctcgacccgggctgcctggagccggagatgcccatgtccgagctcgccgacgcgctcgacaccgctacgcgcctcagcgccacgcgcggcgccgccgcggcgccgctgctgtggagggccaagcgcctgctcaacgtcggctcggagagggagctcagggcggctatcaaactcgtcgacgagctcgcggccgccgtcatccgggagcgccgcaagctgggcgtcgccgccagtggccacgacctcctgtcccgcttcatggcctcagccggggccgacgacgacgacaggtacctgcgcgacatcgtcgtcagcttcctcctcgcggggcgcgacaccgtgtcctccgcgctcacgacgctcttcatgctcctgtccgagaacccgggcgtggcggccgccatgcgcgccgaggccggcgacggtggcccggcgccgccgctcacctacgagcacctcaagcgcatgcactacacccacgcggtgctgtacgagaacatgcggctgttcccgccggtgcagttcgactccaagttctgcgtggggccagacgtgctccccgacggcacctacgtgccgggcggcacgcgcgtgacctaccacccctacgccatgggccgcatgccgcgcatctggggcgccgaccacggcgccttccgcccgggccgctggctcaccggcgccggcggctcgttcgtccccgagagcctgtacaagtacccggtgttccaggcgggccttcgcgtgtgcctcggcaaggagctcgccgtcaccgagatgaaggcggtcgcggtggccgtcgtgagggcgttcgacgtccacgtcgtcggggacagtggcagcgccgcctgcaagccgaagttcgtgtcggggctcaccgcgtccatcagcggcgggctcccgccgcccgatcccgccgcccaggccctgctcctgccccggaggttggaggcgcgagggcgatggtgctcctgcagcaccagctgcttcaacagcaacggcggcagctcgaggaggaggatgaggttcggcggggtggcggcgttcccggcagcgatgggccacggccaacaggtggactacggggaggacgccggcgggctcggggacagcgacgcgggcgggtcggagcccgaaccaccgctagagcggacgcgcggggggtccggcggcggcagcaagcggagccgcgctgctgaggtgcacaacccgcactccctctgctcccagccgctagaacgcccgcccgaaatccggattctctccgccgccactgccgccgctatggacgcctccttcaccttatcctactcccaccactgccccaacctcctatccgcgctcgatctgcccagcggtgaagcggggaccacatcttcggccctgacccgtcatcccagcggtgctccacgctcggctgcaaccgtcgcgcacgcgcccgccactccccgtctctgcgccgctcccccgtctccaccgttccccgtctccccctccaagcaagcacccgctccagatctccaactcgtgtgtcgattcccagtgagcgagacccctcgcgtgtgcaactgcaggagatggacgatgaagcgttggatcaaggagatggaggaggatggccgccacggccgccacttccaggttagcactgcacctccccctcccttccttccaccagattctatatctcttgatcccgacaccagttttcttggatctattagcgagttcatcgactcatga

SEQ ID NO: 8123 - DNA, 1065 bp, Zea mays
  Peptide Sequence Number=SeqID_51498
gttgtcagcattgcaaccactgctcaggcgaagatgaagctatggaaggagactttcaggagttccaagactacgacgagttctaggcgtgggttagcggcaacccccagtcggctgcctgtgaaggccacgatggctcgacttagacacactgcacgaaagtccgtcatccccttcttaccctcctgccttgctgagcgtccgcttcgccatcccgtggccggacagtctagccacttggagagactgcaccaccgcctgcatgaggagcaggaacgtcgacgacaggagcaggagcaggagcagcagggctcttctttctcgctccaacaggagatagagtccgtgaggagctgctcccctgtgcttcccctgggaggcgccccctgcaccaccactggggcgcccccagcctctgtagtagctgctggaggagacccagatgacggaggtggcgacgacagctcgagccacgacaccgacttccctgctgaccatgagccggaaggatgggttgctcgacccatcactcgcgacgcagctcgcaggtgtcacttccacgacgcgctcgacaccctgctacgtcgggcacttaaccggcagaacagtctccagggtgcggaggcctgctcagagcactattctatctctgagcgggactcagctgaggcagccatgcaagatgccgcacggcgtgcgctttcgcactactgctcggttctcggtggggtagctgacggtctcgacctgaagtattacccccgccgtccatctggcagcacaggaggcgtgattgtttcacctgctggtgaggacaatcctaggttgagcagcacagtcaacctagccgccgtgctaaacacggagctggaccatgcgctagacgagctgagtagggctcgtgctgagatcgcccagctgcgggccgagcgcgtggagcgtcgtcacctggatggtggttcccccgctcccgtcgggactcagcacccgtaccgctcacctcggcgtggacaccagtcttatggcaatcccgactgcaagaccaagataaatctagaaccatag

SEQ ID NO: 8124 - DNA, 399 bp, Zea mays
  Peptide Sequence Number=SeqID_51499
atggtcgaggcgttcaaaaaatctttatggttttccccaagtgggggagccaagctagctagggtagtggaacctggtagttgctccaaccaatggcgagctcctataattgcaccattggtagatgggcagatggcgatgtttctcggttgctgtcataagctgctgcccgacacctcggctaaaaggagccgtccaaccgagccttttgtccccgaacacgcaggtgagatgagtgtttgccccgtcggcggcatgcaccagcagcagccgtgccagtttgccgacgccgactcgggagtcagggatcactacgactgtgtactgcacgcaacaggcagcgccactctctctttatccacagcagtgaagttgatccatcccctcgtcagtacatga

SEQ ID NO: 8125 - DNA, 687 bp, Zea mays
  Peptide Sequence Number=SeqID_51500
atgggccattctatctcctcctttgattcgcctagactcgatgacaatccgcccccacctgtcaggtcaccttctaaccaaggaccaagccacgatatctcgctctggtctgttaccgagcagctcgtggggtttgatgctgctgaatcctcgccgcgcaacccactccctgctccccaaggctggcccctatttgctcgccgcgagacccgcgtgtccacacgccttcaagccctgtcgactgcgcctgcgtacaagcaccaccgacagagagagaggaaagtgagtggccaccgccatctggtgcttgcacagccgcttgcggtccgtgttgcgattcgagagcttcgtgagcgcgcctgtgaggcaaatccatccccgatttggcaagaagcatcatggtctggtggtaattcttcaccggagcctggtggcggcgcagaattcctttccctccgtggaccagctcgagcatcctcgcaaccaccgggcgctgggtcgtggagtcgtgttctcaccggcgtacgtgggtctgctgtgtgtgtctatggcaccagcggctggaggaggaagacggcacctggtgccgttgatctgcgaggtaacgaccagagtagaacgcagaaccgtgaccgcagatttgtgatccaagggctcacggcgcgtaccggttcgcataagcactag

SEQ ID NO: 8126 - DNA, 168 bp, Zea mays
  Peptide Sequence Number=SeqID_51501
atggagagtcatgatctctgggctgaaagggaatcacggcttgtgggtaaaagacattatggtacagatggttatgagatcgatggttttggttatgaatatggtgctggcgaagatgaagctgtggaaggagacttccaggagttccaagactacgacgagttctag

SEQ ID NO: 8127 - DNA, 1212 bp, Zea mays
  Peptide Sequence Number=SeqID_51502
atggacagcggctatcgccctgctacagataatcaagaccaccgcgactctgcccgcaatggcagccacctgcgcagaagcagtgtcggtagcgacggcgtagatctgcagcgcaggcggacggcgcggaagtggcgagggcgcagatccggcggacagcgcagaaatggtgatggcgcagagcagggcgagatccgaccgagatccgctcctgccgggcacaagaagagggtggcggatggtgcaggcgcggcggacaggccctggcggcggacggcgcagtgcaggcgagatctgcccctggcggtggacggcggagtccctggcggcggacgggggagcggcggacagagagagagatccgcgcgcacagtgggacaagatctgagcggacaggcggtggatgtcatagtgggagagagatccgcgcgccccgggcggtggacggcacagcgggtcggggaagaaggcggcggacgaggcgtagaccgaggtccgcccttggcggcggacattgcaggcaagggagaaggccgcgcgacggagagacggcgcgaccagagggctggccgcgatggcagcacaacgacggcgcgacgacgccaaaaatttggatcagggtcagcttttaagacatggccactagcagctgagtgggaaatgccgaagatatttgaaaaagacgcttcggacgccaagcctaggctagtcagacttcgttacaaaggcaaagattggagaagctattaccttgatagcgtaaagagttacacctttggagtcgctcccaaagagcaaagaagaggagcgaatagctccggcgatgagctcatttttgatgtcgatgaagacaaaactgaggaaaaagatattgctgagtataagggtaaggggtttgctaagactgaagaggccaaaaaggcaattgaagatgatacaccgcttggagaaggacctttcgatcaagacttgggtggtcgaaggtatagggttcatcatgctgcagggaaagtcatgggtgcgaagcagctggccgaagctattagttttgttgagcaacttggatacccttttgggtctactatatttgcgagcgggctagacgattacttgtactgctgcccagacaatatggaaactgaaggtttgcttctgagcaaggccttgaggaacaagagaaatattgagagcgaagctgccaaaaagagataa

SEQ ID NO: 8128 - DNA, 228 bp, Zea mays
  Peptide Sequence Number=SeqID_51503
atgaccgttggtggaggctgcctgtcgtatggtgcaccggacagtccggtgtacaccggacatgtccggtgcgccagccacgtcaccaatgccgttgggattcgaccgttagagcttctgtcttctgggcccgcctggatgtccggtagccgttggcgcgaagtagccgttgctccggagttgcaccggacagtccggtgtacaccggacatgtccggtgaattatag

SEQ ID NO: 8129 - DNA, 846 bp, Zea mays
  Peptide Sequence Number=SeqID_51504
atgaagcgcaatccccgcgtcacgagctcccgccggaagtgccgcaaggcgcacttcacggccccgtcctccgtccgccgcgttctcatgtccgccgggctgtcgacggagctccgccacaagtacaacatgcgctccatcccgatccgcaaggacgacgaggtgcaggtcgtgcgcggaaccttcaagggccgtgaggggaaggttgtgcaggtgtaccgccgctgctggatcatccacgtcgagcggatcacccgtgagaaggtgaacggctccaccgtgaacgtgggtatccacccctccaaggtgatcgtcaccaagctgaagctcgacaaggaccataaggcgctcctcgaccgcaaggccggggccgcgccgccgacaaagctaagggcaagtttactgccgacgacgtcgccgcggccgccgctggcaccgccgccaccggcgcctctctccaggagatcgactaggctcttcacgaagcagaagagaaacagagaagaacccagcttagatcagactgaagaactagatgcggtggacgccttcaagacctgccatactagctccaaacgtggcttgagtgaatcggcaagagaagcacttagcagctcacaccaatccctgaaagagcgttggcatcaaaacatcggcatcctccaagtcatcatcatcaaatcaaagaagaaatgtgaagaagctgaggaacaacaagagaggacacaaagggagttggaggagtacaagaagataacagagaagaacaacaaggagatggaggagaccaatgtgctcatcaagaagctcttgtccttgcatggtaatgcttcttcttcgacatga

SEQ ID NO: 8130 - DNA, 360 bp, Zea mays
  Peptide Sequence Number=SeqID_51505
atggagactggagagcagagggagcaagcttttctcggcaagcttcttctcggactgcggcgtggtcagcagtgttcaacgcagcaagcttcttctcgggctggtctcggacggcggcgtgtggaggctggccgtctgggagggagccgccgagccgtggcctctggactctggaggctggaccggcaccgctacccgctggagagagcagttgagcagagagtaggagaggacggcggcgtttgctacggctcacggctaggagaccagagagcaggaggacggcgacgtttgctactttgctacggctcacgcgcggctgagagagagcaggaggacgacggcgtttgctacgactag

SEQ ID NO: 8131 - DNA, 507 bp, Zea mays
  Peptide Sequence Number=SeqID_51506
atgccccctgcaccacctcagggcatcccagctgctggaggaatccctgacggagacagagacgacgacaacgccggtggcagttcgagccacgacacggagctctcggaggagccagagccggatggatggattgtgagacccatcactcatgatgctgctcgcggcggggtagctaatggccttgatctaaaatactaccctcgtcgtttgatcggcagtgctggaggtgtgattatctcgccagttggtgagggcaatcccaggctgagcagcatggtcaacttggtcgtcgtgctcaacacagagttggaccacgcccttgatgagttgggcaaagttcgggcggaggttgcggaattgcttgctgagtgcgcagcacgccactatcttgatggtggttctcccgcccctatcgggattcagcacccttaccgttcaccgccccgtggtcgcttcgactatggtaccctagactgcaggacccggatagatttggatccctag

SEQ ID NO: 8132 - DNA, 414 bp, Zea mays
  Peptide Sequence Number=SeqID_51507
atgcacgacttcctccttgagctggcgctgctagattgttctggttggttgctggggcaggaagacgggctgcctagttgctctaacgctggtattgatttcctccttgctggttgttctgacggtactgctattgctgaggaaactgcctctggtactgctgctgctggtgctggtgctgtcatgattgctctgtctatcagatgttggaaggtggggaagggttggcatgggtggcaaggtaggactctcaccaagagtgtgctgctcccctcagctgtcggggaccatacaacaccttctcacgatcgtttgcactgggcagtgtgcaactcacgctccacggcacttgaggcatctggacttgcactggaggctgaggcggtggtggctgctgctacgcctgctgcatag

SEQ ID NO: 8133 - DNA, 117 bp, Zea mays
  Peptide Sequence Number=SeqID_51508
atggggtcgtattcttggctaaggtacttcacccagggggccaccaccatcgtctttagaaaccttagcgggttgcttcgtattaaggatgacgaagccgacgaagctgaagagtaa

SEQ ID NO: 8134 - DNA, 273 bp, Zea mays
  Peptide Sequence Number=SeqID_51509
atggggtcgtattcttggctaaggtacttcacccagggggccaccaccatcgtctttagaaaccttagcgggttgcttcgtattaaggttgctatcagaagaactgcttacaaaagtatcgcctatgttgctcaagatcagccagcaccctctaccccgcctttggatgatgaagaagaaacaactttctctgccttatcctcattctttttggaaggctttgttatggaacccctaagtctatcaccatactcctttaggttgataggataa

SEQ ID NO: 8135 - DNA, 744 bp, Zea mays
  Peptide Sequence Number=SeqID_51510
atgtggtcgtcgtgggtccgccggagcaagacctccttgcgactcacttcgtcgccgtccttctcatcgcccacggtttcgtcgccgtccttctcatcgcccacggtttcgtcgcccaccggcaaggaccatcctggcatcggcgctgtcctcgatgacgaggcgctcgacgatgatagcccctgcgccggcagcaagagcgtccttcaccgtacgcggtcggcgacaaggctgcggacgtgcaagtcgttcgcggcggccgcggaggccgcggcggcttccgtggcgggggagcgccgcgtggtgctctacttcaccaccctccgcgccgtgcgcgccacgttcgaggactgcctcgccgtgcgcacaatcctgcgggggctccgcgtctccgtagacgagcgggacgtgtccatggacgccgcctacctcgccgaggtccgcgcgctgatgcggcgagaccgcccatccctgccgcagctcttcgtgggtggcaggctcctcggggacgccgatgtggtgcgcctcctgcacgagagcggggagctgcggcgcgtcctggccggcgcggcgcaggcggagcccacgccgtgcgcgtggtgcggaggctcgcggtttgtcccgtgcggcacttgttgcggcagccaccgccggttcagcgagaagaccggcggtttccgcgtctgcgcgtcctgcaacgagaatgggcttgtccgctgtgccgcctgctcctcctgcagctaa

SEQ ID NO: 8136 - DNA, 2655 bp, Zea mays
  Peptide Sequence Number=SeqID_51511
atggatatcactcaggttctgatagctgctcaatctccagatgctaaccttcggaccgtggcagaaggcaacctcacacagttccaggagcagaattttcctaactttctcctctccttatcaatagagctctcgaacgatgaaaaacctccagagtctagaaggcttgctggtattatccttaagaattctttggatgcaaaggattctgcgaaaaaggagctactgactcagcaatgggtaagtgtggatccatctatcaaattgaaaatcaaggagttgttgctggtgacactaggatcttctgtgcatgatgcaagacatacctcttcacaagtcattgccaaggttgcatcaattgagatagcacgtcgagaatggcaagatctcgttgccaaattactggggaacatgacttctgcaggtgcacctgctcctttgaaacaagcaacactagaggcattggggtatgtgtgtgaggagatttctccacaggacttggagcaggaccaagtgaatgctgttctgactgctgttgtccagggaatgaaccagacagagctcagccctgaagttcgtcttgctgcagttaaagccctatataatgctcttgactttgcggagagtaactttgcaaatgaaatggagaggaattatataatgaaggtggtttgtgatactgctgtgtctaaagaagtggagatcagacaggctgcatttgaatgccttgttgcaatagcatccacctattattcacacttagagccttttatggaaaccatattctacctgacagctaatgcagttaaaggtgatgaggaaccggttgcacttcaagctgttgagttctggagcgctatctgtgacgaagagattgcactccaagatgaatatgagggatctgaggatggtaactctgctatacacttccgctttattgaaaaggccctccctttacttgttccgttgctgctagaaactttgttgaagcaagaggaagatcaagatcaagatgataatgcttggaatatttctatgagtggtggaacatgccttggactcatttctagaactgttggtgatgcagttgtccctcttgtgatgccatttgtcgagaccaacatcacaaagcctgattggcattgtcgtgaggcagctacctttgcatttggttctatccttgaaggcccctctgttgggaaacttgctccacttgtccaggctggtcttgatttcttgctcaacacgatgaatgatgcaaatagccaggtaaaagatactactgcttggactcttgggagagtatttgagctcttgcattctccagctggtataaactcaatcataaatggttcaaaccttccccgtatcatgtctgtattgcttgagagtactaaagatgctccaaatgtagccgagaaagtctgtggagctatttattttctcgcccaaggttatgaagatgcagagtcaacgtcttctgtcctcacaccttatctatctaatacgattgctgctcttctttctgccgcagaccgtgctgagaccacccatttcaggcttcgtgcttctgcttatgaagcactgaatgagatcgtgagggtcagcaacatacctgaaacttcaggcatcatagcacaattattgcaggagatcatgagaagattaaaccttacatttgatctccatatactttcttctggtgataaggagaaacaaagcgatctgcaggctttgctatgtggtgttctacaggtcatcatccagaaactgagcagcacagatgcaaagtctataatttctcagaccactgatcagctgatggtgctttttctgcgtgtctttgcctgccacaattctactgttcatgaagaagcaatgcttgcaattggtgctcttgcatatgctactggtccagattttgtgaaatacatgcctaacttctttacatacctggaggctggtttgcagaattatgaagagtaccaagtgtgttccatctctgttggagtggttggtgatatttgtcgtgccttagaagataaaagtttgcctttctgtgatcgcattatgacggttcttcttaaggacctatcaagctctatgctcaatcgatctgtgaagcctctgattttctcgtgctttggagacattgctcttgctattggtgagaattttgagaaatacctaccttatgccgtgccgatgcttcaaggagctgcaggactccttggtacacttgacctgagtgatgatgatatggttgattatggcaaccagctcagacgtggcatttttgaggcatactctggtatactccagggcatcaagggcccaaaagctcagctgatgatcccatatgcaacccatctactacagttcactgaagctgtctccaaagataggagcagttataatatatatccctgttctgttgttatttgtgccataagggatgacagtgtgacaaaggctgcagttgctgtccttggggatctcgcggacacgcttggccaaagctcaaaggatctgttcaagacccacctattccatgttgagttcttgagggaatgtcaagctcaagagttggatgatgaagttcgggagactgcacaatgggcccaggggatgataaaccaggcggtggtctcttaa

SEQ ID NO: 8137 - DNA, 522 bp, Zea mays
  Peptide Sequence Number=SeqID_51512
atgggacaagaggtccgaatttctcttcccccctccttccctatgaaccaagcagcggaatctccaaagtctgcaaaggcaccagctcaaggttggctgggcaagatggtgatgctcccaggcatgttgggacacatgtcggtggagagcagtcgacgtgtcaacctccggactaggcgattgagccgcgcccaggggtctactatcttgatatggacctcaacaaccatccataagagaaacttcgagaaagaagatacaactgtctacagaaacaataaacattttttcttctcggactactcaatctgttggagtgatgttgatgagacatttgaggtagattgggagttcttaaatgctcaatggtctgatggcatgtgtgccaatcttcaaattgtgcagacgattggtattgcttggcttccaaatgaattttcatttatgaagcttatcctctctaaagcaaggcttcttcgcacgttgtatgttgatagaaaccaagatgattttgataattag

SEQ ID NO: 8138 - DNA, 2775 bp, Zea mays
  Peptide Sequence Number=SeqID_51513
atgccgacctcctcttcttccgctgtcgctacgccgccggccgattcctcgccgccggccgccgcctcgtctgaggagacgctgagtagtttgatggcggaggagttgcgcgccggcgattctgttgattttggcgtgtcgcggatgtcgtcggtccgcgtgcaagatatgcagcggttgggttacttcagcggcggagttgctcgtgccccggggccgggaggaaatacatcagctgacaccgaatgccgtggtggctctgtcgaaaagaggatgattggggacgaagttgctcagtttgggtcctgcacattcacgccgaagaccggcaagaccacgatgcaggtggtcgagttggttccttgcgcccgcaacaagtggggcaactggaatgaattttggttttacgttgctgagggtaccgtcgaaggccatgagggactccccgtgtccgagatgtgttctcatttttactcagcgtacccgccctttgaagtggcagaggaggatgtggacgaaggggcccttcggtgcgccgccggcctgagcagtgggcgcgatttggttgaagagtttgtcgcgtacggggtatggcccttggcgcatggctgggcgttgggcgaagtgtgccctcgccagatgccttttcacggtggaagggtggtgcgaagtcctgccttcgcactgaatctgcaaaaccgcgacccggccgcctttgtgcgtgaggcggaggatggggcggtgcggctcgttggacgttacgtgccgaggacagagggccagcgcagctttgatatccgcgggtcgaatgaccatttgaacagggtttttgaattaaatcaattgccgtatgacggctatcctggtcaagacgacgtggaccgccgtgggaagaagccggtggtggagactggagacgaccctgcgccggcggccgccccatcctctaaaaagagaaaattaggtactgctatgggaggacttggggtttctgatagttttgctagagagttgatgaggacgtgcgcggccccggggggaaggatgtcttcgcccgagctccgggagtcttcgactcggatgctgagggttaccgggggttgctggcctaggaatgttcctatcccccgcgcggctggcgaggacttttttacatctcgcattgttcgtgaatggagagtttttccttacgggcggaatattgctgctattgtgtcggcagtgatggacaaggaccgccagggagcagcacaaaagcgccaggcggttgtcaggctcgttgaagctaggccgaagaggcagcgagggtctgcgaaggctgcggcccccggcggaggcaagccgcagctggcggcgaagtcgggcgcccctacgtctagcaaagcgccggaggcgatggcaggcgccgggggctcaaaatcgacgaaggcagtgccgccgtccagcagagtgccgaaggtcgcgaaggcggctcgagcgttgccgtcggcgggcaagcgtgtcgccgacttcgccaccgatattagtgtggaggactatcttggtgggtcggacgaaggccggcttgctatagttgtgcctgctgcggcgacaacgacggctgccgcagcgccgaaggcgaagggcggggctcttagcgccggaggcgaggtggcggccctcgcggctgtcagggatgaggcgggcgctgcgtcccgccggctgaaggaggtggtggagtcgctaagtcaggtggctgacttcgccaaccgcacgacgtcgggggccctcacggcagttgtgtctgccgaggtcgagagacttcggacacaacatgctgacgccgtccgagagaaatcggccgccgacagcaagtgccgcaagctggcggacagggtggccgcgctggagggagagaaggctgacctccggcgccaattggcgggggagaggagggagaccaacgaggccctcgtcaaggcgcaggctgcgcaggcggaggccaatctggcacgggcggagggcaatcttgccagggagcgcgccgagcagctgcaggagcggctcatcgccctggagagccgcgtggagcgggccgaggccgcgacgcgcgcggaggtcgaacggacgcgcacacagctgatggatacatatcgtgagctgggtgcgcggaccagtgacttcgaagtgccggaccgagagcccggacttcgctgtctggaatgggtgcaggaggagctgcaggccctccccactgtcgtggaggggtttatgtcgtacgcctccctggtcacctgcgaggcgatgaacgcgctctcccgcgaagggtgccggcacttcgaggtcttcgaccaggccgatgaagattttgagcgagatatctataaggttgaagaccccgtagtgaaggaatccgccggggccatctacgaccggatgtggggtccgcacggtcgcgaggtggtcagggagcgggccgagacggcgagggctcaggcggcgcatggcgagcgggtggacgacttcggggcgttgaacagcgcgctgcctgacccggagccgaccccggcggaggccgtgtctggggtcgccctggagccaacctcggaggctgcggaagacgcaccggaagcccccgcatccgctgcggccggcgaagacctgcccccaaaggtgaccgaaggcgcgccgagtgctgaaggtcccgcggcggtggcggcggaaacaacagcgggagcaacggcggagccaacggcggaggctcccgcaacgtcagggccttcgcaggtggcgtag

SEQ ID NO: 8139 - DNA, 165 bp, Zea mays
  Peptide Sequence Number=SeqID_51514
atggggctcggtgtatgcggctcgctctgccaagtttgggttcgccccttggggaggagtgcggtggctatgagaatcgatggttttggttatgactatggtgctggcgaagatgaagctgtggaaggagacttccaggagttccaagattacgacgagttctag

SEQ ID NO: 8140 - DNA, 1698 bp, Zea mays
  Peptide Sequence Number=SeqID_51515
atggcgaagactggtgagccagggctggagcaccacggatcactctaccacctgacacatcgcaacgggggcaccacacacgatgagactggagtagaggccgaaggtaggagccgacgggttgaaatccccccgcagtcgcagcgtcatgatggtgcgaatgttgtggctggagtagagaacggtgtgtgctccaagaagacgatagcccctagatgccgaggtagccgaagtcgaggtggtcgcggtcggaagacgcgcagcaaaagcctgatcttcgggaggggtcgacgttcgagcgtcaacgatcgacagggcgacacagcaaaaaggcaccagcagaccgaccttcctgcttcttcgatcgtccgggcgtcaagaagtcccgccagggaggccgacggcagcgcacgcgtctgcgccagtcatggtgtccgcgcccgcggcagaatagaaggggaaacgacagatccggccgggaaggccacggcagcgacggatccagtcgggaagacacgatccagccaaagggacggcagatcgagccggaaaggtcgcagcaacgtggatccggccgggaaggccgcggcagcgacggatccaacgaaggcgaagaaaggggtgggcggcggggcgtgtccagccgggcaggggcctgcgccggacctggcagagggtgttgacggcaccggcgacgggagaagctcgaagtgggaggcgctgctgctggggccgaagaggaggacgccgaccaagggagaccaagggaggccgggcagtcacgcccgcgccgaactgcgaggggccgcgcggtcggtgttgggcggctcggcctggtcggggcgcgcgcgtccaggctggtgcagggcgccggtcgatgcaggggcaggggccgcgggcgtgcgcgctgccgtggacgtcaggcgcgcggggagctcggttgcgcgcgggcgctgggcgcggcatcgcgcggtgtgcgcgcggggcggctcggcgggcagcggctcggtcgcttgcagggcgcttggcctgggcgacgcagggggttcgggtgtaggagagttggggaggggcgctcggtggagagaggagcagtcagaggtggaagaagggcgccgagcacagggagctttggacgccatggaacagggagggcgcggctggaggagcttcggcggccctagacaaatggagcccgcgccatggctggagagctcctgctctaggggagctcggccatggaggccgctgggagatgggagccgctgctcgcctgcaggggacgcgcccatggggaggaggtcagggagcgccggcgttgagggagctcggcggccatgggaggcccctgcgctggctgctgttgtggtgctcggtgtaggagcacggcggccatgggaggtgctggcggatccgccaccggcggtgcggatccagggagaagagggccgtccgcttccacgcgcacccgcgccgcgcgccgtcggagctgggggctgcgcgccgaggctgggcagccacgcccgcgccgagctgcgaggggccgcgcccgtcacagccgcgccattggaaggggccgccccgggagggaggagcctcccgggggcggcggcggctcaggtgggaggcggctgctcctggcggctgctgggtgggagagagcccccggcggctgcagtgggaaggaagaaaacctaa

SEQ ID NO: 8141 - DNA, 321 bp, Zea mays
  Peptide Sequence Number=SeqID_51516
atgcccattacatttgttaacggtttatggaaatctattgaggaccccgaagtcttttcatctttaagtcggttcccccttctgccatcgcgccgaagctttcctgcgcacagcttcggctacactcgaccttcgtctggttcaggcttcgtcctggctgtgctccatatccataattctggatccgaaaatacctgttcacataatccactcggaaaacattgtcaaattatgtttttgaggaccttcggaggacgaaggcccccaacagcaacttttaaggtcagggctgtggtctacgaccagtcctataggctctga

SEQ ID NO: 8142 - DNA, 600 bp, Zea mays
  Peptide Sequence Number=SeqID_51517
atggctgaaaggtaccaactcccacggagttgcgttcctccaacgacgaggcggaaagacggcgagtatcccccatccgggggcttggaaggtggaaagacacgatgcataagggagtgcgaagacatggtcgccttccaagggggtcaccctccttttaaaggcggctctccctacttgcgtccccagccgtcgtgggctgagtcttctccaacacactccaagaccagcgggcgaaagggcgggcagccatgcaggcggcatgcaaccgcgccaagtgggcgcacttctccaactcccaacacgcccggcatggaggcccaggcccacgcgtcatgcaaccggcgcgccgagtgcttcgtgcatgcaactgcaccgccacttgcgccaccaccgcgcctcctcgactgcggaaccgataccgcgactcgaggcgacccagagcacgacccagcggcgccagcctggcgcgatggtcaatgcggccaaaaatgggccggcagtaatggcggtggcaggcgggcaggagcagcggtcacgtcgtcggccaagctcacgtcccatccgggggcagcgagagaaccctctctcacggcgtga

SEQ ID NO: 8143 - DNA, 1308 bp, Zea mays
  Peptide Sequence Number=SeqID_51518
atgcaggcatgcataccgtccgaaacgcgttacgcgtcttccgatctgatcgtgtgcaagcgaagcgtacgtggctgcttccgtgcttctcgcttgtgccctgcgagctcagctccagtcagcagtcagcagcagggatccagctacgccacagcacggcggcgcccgacctcccacctcccagtccctcccgcccgccaccgaacacggagccgtcctgatatgggtcccgggacgggaaacggtgctggcgctgcactgcagtatctagcagcagcagcatctgctgcgacaggaaacaacgtctccactgttccgcatagccgtacactattttatagtatagagtatagatgtctaaatgacgtcttttacgtccacagcaagctcctacaggctacagactacagtcctaccatgcccgagggctcgaggggagcagcgcaggacgacaagacagacagtagaaaggggtcacacacacagtcacagccatgcgcgaaggcctaccctaggctgccgagggcagcgtccaccaggtacgatacaaccctccccgatcccgacctcgatccttcttcaaacaagccgggtacgggagtagagcgctgcggcgtcacatcacggcgcagcagagtccagaggagatccagcacaccgtcgcctcgattctcatgtgccagccaggcgcatgcaagaccacggtcagactccgacgcccccacccctgctttcctctcacacgtccacctcactcccgtccgtgcgaccgtgcctcgtctcacttgcccacatatataccagataccagttaccaccaccaccaccaccacgagctccctccaccctcctcgcatttcccacccaaccttctggagcaagctcagagagacctccagagcaacagaccagttgcgacttgcgagcagtgcagtagcagtacaaatggctagccgccgcggcagcttcttgtcactgccaaggcagctcctcctcatggcggcggttcttggcaccgtcgtccttctcggcgagggcgcgacggccaggccgctgctgggcatcgccgagccaccggcctcgccaggcgccgcggcggcggcgccgggaccgggggtcgccgcgcaggctgcggaggcaggcggcggcagggcccccgaccgctcggaggccggcgtggaagtgatcctcgccgggttcgcggcggcggtggccgttgtcatcgtctgctacatccgggtcaccagggagagcaagaacggcagcggcagtgtgggagagaagcgcggaagcttgggagggttctga

SEQ ID NO: 8144 - DNA, 342 bp, Zea mays
  Peptide Sequence Number=SeqID_51519
atggcgacctgctgcagcatctccctgccgtcgtcgccatggctcctcctgctggcggtcctcatcatcggcgacgccgcggctgtgatggcggtgcccaccaggccgctgctgcgcatcgccgagccgccaaccgcgccgggcacggcagcggggcccgccggcgcgtcgcggcccgggggcggccgaggcgggaggctgcctgaccggtcggtggccggcgccgaggtgatcctcgccgggttcgctgccgcggtgatggtcatcgtcttctgctatatcagggtcaccaggagaaacagcggcggcgtaggactgggagggaagcagcagcgcttgtga

SEQ ID NO: 8145 - DNA, 624 bp, Zea mays
  Peptide Sequence Number=SeqID_51520
atggaccaagtgaaaagcgcatcggacgatccggtgccacccaccggaaagtccggggcatggtctgaccaacttgttgctctcaaaaattctagcctgggcggttataatttcactggacggtctgcacgaggctcggacagttcggtgtgccagtcgcgtaacggtagctgccacgttggcctcgggccaacggtgaagtggtgcaccggacggtctggtgcccccaagacaggaaaacaaccaatcagggattctctgcccgcgcctagcctgcgcatagttcactgtccggaactgggtgcccgaggaaggcccaaaaggcctcccaaccgaccagcccgcctgccgagcgactcggcgaagcagcccaaaaaggcctcccgaagacgacagatcaacccgctcgccaagcaaatcggcgaggcagagttgccaaccaacccacctaccgagcaagtcggcaaggcggagttgccgaccaacccgcccgccgagcaagtcggcaagtcggaatcgccgaccaacccgcttgtcgagcaacacgccgaggcggagttgtcggccatccgactgttgagcaacttggtgaaatggagttgccaaccaaccctctggcaataa

SEQ ID NO: 8146 - DNA, 330 bp, Zea mays
  Peptide Sequence Number=SeqID_51521
atgggcgcgcatggcggtcgtgaggtcctggcggccgaccgatggcagacgtctctggtgctcggcgggtcgcgacggcgcgatgccatgctttatgggggaaggggcgagtccgcgccaaagaagtcggtagcagagctcgaaagagataaggaagaagggatacacactgacatgccaggcccacactccagacaccaacgtcagataccgcgcgagagggagctagcttcgggccctacctgccactgcctccgtgtagtgcagaggctgcccagcgagccccacccgataggccgcaggcacctgcgcacaaatgggccaggatga

SEQ ID NO: 8147 - DNA, 198 bp, Zea mays
  Peptide Sequence Number=SeqID_51522
atggtggtgcgcttgctacagcagggctatgatgtcactgttgctagcaacttccacaactccgccctcgaggcgctcgactacgtaaaacttggtgtgcataacttggagacaactggtcataccaaggatggaggcaataagaactttgaggtaactagtgcacgggagaaggtcaaggaggctaaggtaatctga

SEQ ID NO: 8148 - DNA, 402 bp, Zea mays
  Peptide Sequence Number=SeqID_51523
gaatccgaagagccaaccaaatgcacaagatcaaccatcttcctctatgcaagcatctccaccaactcaaagatgaggatggggctcaaaatgatgaaggagaagatcaagaggatgagccacctcaagaggagagcaatgatcaagggggagatgcccttgatcaagatgaggaagatgaacaagttccaagaccgctacacccaagagtccaccaagcaattcaacgagatcaccccggtagaggaagcactacaagattcggattgggtggtggcgatgcaagaggagctcaacaacttcactaggaatgagatgcaattttgctcagagatgttggttattattggacatccgcccgccgcgaacaacagatcttctgcataccttgatgaggattag

SEQ ID NO: 8149 - DNA, 1290 bp, Zea mays
  Peptide Sequence Number=SeqID_51524
atggagaacagggacctcggcagggagttcagcggtcatgggatgcgtgctggaacgaagaataggggcgagctccatgggaagccaggggctcggatgcctacggccggggaagatgcagcacggccagcgaagctcgcggggaaacaacggccgactcaaggaaaagtcagggcgcagtccgggagacgtggatcgcaggagaagctgatggccaggctggctgtgccgtgggatgaggcacacaagagaaatttccaggaaattagagcaccccgcgacatcctcggctccgctgattcccaccgctccccgacatcgtgccccttgctctcccctccctcgtccctctcgtccctcctcccgtccttcgatagcacgccgctgcccgacgcccccagtctcgcgttgccccctcctccagcccccgcccgccgcgtggcccccgtcctccccgcgacgccgcgtagcgcagcttgttcgccccatcacccacacctcgatgtcacgtcggatttgttagggtttagggttttgcggttgactccgaatcccgccgccgctgctcgtgcagaggcctcgagctcccagtgctcccctcctcaaccacaccgggtaagtggttcccctccgtgcttctggaggccgcgtgctcctgctgctcgcgctcctgtgctcccacgtcgcgctctgctccttcgccgaaccgaggaaacccaatcccaagcccaaggcctccggcagccgcaggcgctgcttgcggacagcgacggcgacgaggtgcccaccgccaagccgggcaagtcggccccggcggggaagaccaaaaagaagctgcttgccggcgacgccacttccaagaaccagaccaaggttgccaaggctaagggggtgtttgggaacaaagtttttctgcagttttggaagaatactgcagaaagggagaacatggtggggaagaagaggggtattatctccccgctggaccatctcgctgggctgctggaggtgcgcgtggtgaggggagtggacctcgccatctgcgacctccgatccagcgacccctacgtcgtccttcgcatcggcaaggcgctgaaagtgaagacgcgagtggtcaagaagagcatcaatccggaatggaacgaagacctcaccctctcccgtggatgtgcgtccttggttccattgaaattcttttcagcagacattgtcccatatgaaagggtagctcagaccgacttccacgccagcttgggtccaccccaaaaggatagggttcatggactttga

SEQ ID NO: 8150 - DNA, 1101 bp, Zea mays
  Peptide Sequence Number=SeqID_51525
atggcctcatatgttctcaacggaagccatttaggagcaacaccaaatttgagggatagttacacatcgaggctttttgaacgctactcttctggcttcctcctgatcaaggtagaggatatggatgcgtatgcccctaaagatcttttggttgtcactacaggttcacaaggagagccacgtgcagctttgaatcttgcatcttatgggggaagtcacactcttaaactatcaaaagaggatgtccttctttattcagctaaggttattcctggaaatgagacacgggtaatgaagatgatgaatcgtctcactgatcttggcccaaaaattatcatgggtaaagattctggcctgcatacctctgggcatgcctaccgagaggagctggaggaagttcttcggattgttaaaccacaacatttcttgcctgttcatggagaactcctatttctcaaagaacatgaatcacttggaagatcaactggcatacggcacacaactctcatgtatagtgatggtgataaggcttttggtacatccactgatctctgcattgacgagagactaagaatcgcatctgatggcattatttttgtcaacatggagatcttccgacctcagaaggaacatggtttagcgcagactggtttgaaaggaaaatttaagattactacaagatgtctatggcttgataatggaagattgttggacgcactctacaaagcagctcatgctgcattgttaagttgtcctatgaattgtccacttagtcacatggagaggatggtagctgaaatcttgaggaaaatggtacggaagtatagtgagaagaggcctgatgtcattgcggttgctatggagaacaccacagcaagtttctcagaacacctcgatgctaaatcatctggaaattttgaaccttcctcagctactagccatctgagcaggagtccagctatgagtcttgaaggcagttataaaacacacccagacaacccagaggtggatgctgaagggcagaagcccttcctgaggccacgagaacagcactggatgatgcaaccacactgttatgcatctatcatgcataatggataa

SEQ ID NO: 8151 - DNA, 1746 bp, Zea mays
  Peptide Sequence Number=SeqID_51526
atgtccaagccatggggcagcgtcggcgccggcgcgtgggcgctggacgccgagcgcgccgaggaggaagagcgcgagcaggccctgacctttccggcgcccgagccgcccttgcccgcgggcggcgccgccagcttcccgagcctccgggaggccgccgccgcgggcggcgggggcaagtcgaagaagaagaacaagggtaccacgctgtcgctgtccgagttcaccacctacggcgcggccgcggcccagcggcgcgcggcgcccgtcgagcccaagggcctgacccacgatgagatgctgctgttgcccacggggccccgggagcgctcggccgaggagctggaccgctcccgcgggttccgctcctacggcggcggcagcggcttcggcggccccgggggagagcgccgcggcggcttcgacgacgaggaccgccgcgggccgggaagaagctcggatcttgatatgccctcccgcgctgacgaggctgacgactggggcgccaccaagaagtttaccccggctcccacggactctggccgccgcgataggttcggcggcccttcccctctcggccgtgctgatgatattgacgactggtcgcgcggcaagaagccgctcccggcgcgctaccccagcctcgggtctggaggtggcttccgcgactctccagccttccgcgactcaccagctgcttctgattctgaccgttgggtccgtggcgccacccctttgccacacaacggcgagggggcgggggagaggccgcgcatcgtcctgaatcctcctaaacgtgatccgttagttgcctctaccccacctgctgaggtggcccgcaaccgaccaagcccgttcggggctgcaaggccccgggaggatgtgctggcggagaagggggtggactggaggaagtttgagaatgagattgagcacaagaccagccgtcctaccagttcgcactccagcaggccgaatagcgctcattcctcccgccctgggagccctgggtcgcaggtttcggcagttgggagtgaaggagcaccgagggcacggccaaaggttaacccatttggtgaggccaagccaagagaagtggtgctgcaggagaaagggaaggattggaggaagattgatattgagcttgagcatcgtgctataaataggtatgatgtccgtggaattaccatagaatttctgttacttgtggttgaaagctacaagctcatacaaaacctcgattttgtaatggaagcacttgctaatggcacaccttttatctgttgtgtcatacaagttctctttgctaaaactgacctttacccctggccagagtctgatgaagaaagaaatttgaaagaagaaatcaaccttctgaaggtggatcttaaggaaatcgagagaaacatgagtaatggttctgaccagacatcggtagatgcaaaaggtttgtctgagaagatatctcagttggaaagccagcttgagcagctttcaagggagttggatgacaagattcgatttgggcaaagaccacgttcgggtgcgggcagggttacagcacttgcaccaactagtttaggggaggaaccacatgctacagtggtggacagaccgcgctctcgtggtggtatggagccaccaccaaggcaggaagaaagatggggatttcaaggaagcagagaaaggggctcttttggtgcaagcagaaattcggacaggccaatggcaaggcagagatggtga

SEQ ID NO: 8152 - DNA, 285 bp, Zea mays
  Peptide Sequence Number=SeqID_51527
atgttgcttccgcagaaggtcgagcagatgtcgacgacccaactcgactcaacacagatgctcccaaccgacggcggcgacgaaggcttcgagcgcgtcattgaggatgtctgggaacaacacaacgatctgctcgtcggtgaggccgctggtgcccatgcggtcggggtcgaaggggatccaagcagggacacgatcttgagatgggagattatgagcaagctagcaggaagaggtggaggactaaggaagagaaactctaaccctagaagcagccaaagatga

SEQ ID NO: 8153 - DNA, 285 bp, Zea mays
  Peptide Sequence Number=SeqID_51528
atgacggcgacgtcgtcgagtacaccgtcggcaacggcggaggaggtcccaactgcgcccacccctgtcgtcgagggtgacacggggggcgcgtccagctccatcccgccgcccacttcggaggagactgagaccgaggcggcgatccggcgggaatgggaggcgctggaatctgagcaccagcgcctcagcgactggcgcacccagctggaggagcgcaccaaggcggcatcccaccagttcgcctttgagcggtctgaactggtgcgggaccgcaaagactag

SEQ ID NO: 8154 - DNA, 435 bp, Zea mays
  Peptide Sequence Number=SeqID_51529
atggcgcaccggacagtccggtgcgccaccggtgcgccaacggtgcgccaccggtgcgccaacgcgctctcgggattctgcgactgggaaggctctgctgtggaccagcctggtcccaccaggcagagggtgcaccgggacagtccggtgcacaccggacagtccgacaaccgttgcacctcggcgtcggttggcgcaccagacactgtccggtgcacccttctgaccgttggtgcgggccacgtgtcgcccgccaatttcgctgccgaccgttgcgcagccgaccgttggctcactggacagtccgagcatcctcagtctaaaccaccacgtgtgcagagatccagtcttagaaataccatccaggaatcgcaaatcagcccaagtccggatcatgctccacacttcctcggcgaagggacaatccttacatag

SEQ ID NO: 8155 - DNA, 534 bp, Zea mays
  Peptide Sequence Number=SeqID_51530
atgaacgcaatcttggaagagcagcagacccagcagaccacgactgtggagaggatccagaaatcggagcgggagctggaggacatggccagcaacattgccctggccaaggagaacctcaaggagaaggatgcctccctggataagcgggcgacggatctcgcctggccggagaaggacctcgccttcaaggaggaaatgtttgaaaggcgggacaagttgctggccgagcatgagctcgaggcggagcagaaggagaaggagctggaggatcggatccggcaactccaggcggcgcaggctccacatggccccaagcggtggaggcgacaaagaaagcacttgaagatctccaggaggagcatcgtgccggggtccagcgcatcgctgcatgggccggcgaagcgagcacgacgctgccatgacccggccatctccttggagccgatgatcgctggtccggtggccgacaccgaagacgccgcctgggtgggtgtacaagatactgtggaggtggtggccgaacgcttctag

SEQ ID NO: 8156 - DNA, 147 bp, Zea mays
  Peptide Sequence Number=SeqID_51531
atggtgctgcgtcacccttattttggcccaatggacgagtgccctagtggccagggtgtcacgctccacaagatcgttacagccataggaggtggtgtatcggttgctaaggcgcagcgtctttggaaggctgtagtcgggccgtga

SEQ ID NO: 8157 - DNA, 195 bp, Zea mays
  Peptide Sequence Number=SeqID_51532
atggaggtggaaaacttgttggagaacgacgttggctgcccgactaccacaaccaagatggtgtggcgccttgagcgacaggacgagtgccctagtggccagggtgtcacgctccacaagatcgtgacagccataggaggtggtgtatcggttgctaaggcgcagcgtctttggaaggctgtagtcgggccgtga

SEQ ID NO: 8158 - DNA, 372 bp, Zea mays
  Peptide Sequence Number=SeqID_51533
atggcaggagcacacgacacggtggatgcccagttgctggaagtaaggggacaagttgatggacttgctgctgacattaggacgatgcatgaacggcttaattcaacggtcacttcgacgatcgagcgtttcaaccagcttgaccttgctcaaacggcgactcgcaccacactcgacaccatcctggcacgccttgatgcgttgaccacaaagatggagcaggactacggcggtgacactgagcaagacgatggagatcgccatggtcgtgcatgccatgtggactgcccaaacaagcgcactttgctcattcgtgacgatggtgagtactcttccgctagtgattctgaagaaattgaacatgcactatga

SEQ ID NO: 8159 - DNA, 753 bp, Zea mays
  Peptide Sequence Number=SeqID_51534
atgaccggtctcatgtccttcgcctcgctcgttacctgcgagggggctgcgaatttcttgtcccgtgagggatgtaggcatttcgaagtctttgatcgggtaaccgaggacttcgaccacggaatcttccaggtcggagatgaggtgctaaagcagtccgctggggcgctttaccacaggatgtggggccctaacggccgcgacactgttcaggagagggtcgaccgagcattggagctgatgctgaacgatgaaggagtcaaggacttcggtggcctggaaatcttggtgacccgggcagaagatgcgaggacgggggctgaagagcaaccggcgccacaagatgaccccgacggagaccctgcagcggcggctgctccttcgcaggttccgatgtccgggcctgcgcaagcaacccctactgatgttgatattaattttgtggcggctgcgaatgcagtgcctgttaatggaaattcgtctggttctgaaaccgagtcttggtcatcggatgggggtgattttgggagcccgttttcgtggattgaggagtcttctgatgaagatttagattattttgctgcattggttgtggccacgacggagtccttgccgcagcctgaagtgcgcgaagggtttgctcccccggctggggcgatagccgaagagcaccgccgacaaaaggtggtgttgaagcacaatgttggtgagatgtcacgaaatgggaggcgtcgacagatggggatggaatga

SEQ ID NO: 8160 - DNA, 723 bp, Zea mays
  Peptide Sequence Number=SeqID_51535
atgtcttcttcctcccttatgcgtcgtgtctttccatcttccaagcccccggacggggggtatccgccgcctttccgcctcctcgttggaggaacgcaactccacgggagttggtacctctcagccatcgttcggcttcaaggattttcatcagccggcccggtcgcacccccacgccggcggtcacccaggatggtgaccaccagttcctgggtggggaagagcaagccgggctgcgatcttggtcccaccctcagcttcaaggatgttcatcatcctcgctggggtgggggccaggctgagccggcgctctacctcccatgcgggcctgcgggccaccctctcccgcgacgttcgggggtggaggcgctcgctggccctgcgggcggcgcggacttggacaacgtggggctgatcgacggcgggcgtcgtcacctccagcgtgtcggagtcgtcggccgggctcccggcggcccctcctgccggagggcggctgccgcaccaggccggtgccccactcgtctgggaggatttgagtggggatctgccggggggctggtgccccctgccatcggcgccgaggcggaggcgactcgagaagtcctcgtcgccgacgggatcactgccaccatccgcgccccgggcctccggttcttcgtacttgtcctcgcccctcgagcgtcggcgtgggcgagggcaagattgcagcagcggccgccctga

SEQ ID NO: 8161 - DNA, 465 bp, Zea mays
  Peptide Sequence Number=SeqID_51536
atggcagaacagcatgggccatggctgggccaaagcgtgcgcgcgctcggccagctgccaaccaacgccacaggccacagcgcgacgcctcaaccacggcaccacgcgcggtacccaatcgggctgccatggctcgcagaccaatggcgtcgagtacagcgcgtggactgtggagcgacgcttctgcctgtgcgcgaccggccggccgggccggcggaacggaacggaaccccgcggcgcgcgggagggcgaaccgagggagtgcgtgcgcgcccgtgcctgtgcccctgtcctgtcgtgctgccaccgaggtggttcgtgcgctgcttggaatggaagccaacaaagagatcggccgtgccgaggcagtggaaagtggggcggccgcatccgctacacatggagatggtgcgctgccgctcgagctcgacgtacgtggggcggagcaggtgctgcttctactga

SEQ ID NO: 8162 - DNA, 522 bp, Zea mays
  Peptide Sequence Number=SeqID_51537
atgaagatcaacatcgatgagaacggtaaatctctcaaggagagtggtgccaagcagcactttgttgatgaattcttcactctcaaagaacaatatgatcttagtgaagacacagttattggacttcgttctatgggttcagtatcaacttgtagtttgtgtctgagcgagtgggcggtagcgcgtgatcccaaggtctggagtaacccgcttcagtacagaccagagcgtttcctagaggagaacatcgacatcaagggcagcgacttcaaggtgccgtcgttcggtgttggccggcatgtgtgcccaggagcgcagctcggcatcaacctcgtggccttcatgatcggacaccttctgcactacttcgagtggtccctgccagaaggcaccagaccagaggacattaacatgatggagtcccccaggctcgtcacgttcatgggcacactgttgcaagctgtcgcgaatccgtgcctggagaaggagctgtacaatagggcacaccgctgcaagatatga

SEQ ID NO: 8163 - DNA, 1374 bp, Zea mays
  Peptide Sequence Number=SeqID_51538
atgaagccgagtcgagcggtagtggaaccgaggccttgctggaaagaaagaagaatagcaaatagcaaattcctgagtccagaacaggcgtgcacacaggccctgttctgcccgccgcgagcacgccgcgatttctccacgcgcagcccccgcaatctgccgcctttccatccatggccgcaatccgcagcgccaaatccgccgccacacccctgcgcccgcaacgcccgcacgccgcgatttctccgcccgcagcccccgcaatccgcggcctttccatccgcgaccgcaatcgtttccatccgccggagatcagccgcgacagacaacttctcccacgcgataccatgccccgctcccgcctcagcgcaccccctcgccctcgcccccgtcttcgaagaggtcgtgaccctgcctccatcctcaacgccgccagctctccctcatcctcctaatccttggtcgctgctagattcgccagactaccgaggcgctgctcgtaggatctacggggcggcatcggtgctcgtcggaatccggagaggtggcagttgtttgccggggatcggcgccgcatgtctcagatctgagatggacaggatccgggacgacaggaggggcggggtgtcggccggaggcgttccgcggcctccgaggaaacgcctcaggagcaacggcggaggggggcccagggactcgcctcgctccgagcgccgacggggcgagcgcctcatgctcttcggcgggggtggctgcgcaagtcgggaccacagcgacgacatctccgacgagagcctcggcggcgacgacgccgagcaggagctcgcgcggcggtaccaccagcagcggcggtcaccgagcacggcaccacctccgccgtcgccaccacttctacaccatgcctccgccccccgcctccgtaatgtccatcccgttggcgtcaacaggatcatctcggtgggcgtccctcgcgtgctgccggatgagcggatccaccgtttcgtcggcacggacaagttcgtgttcctggctcgtgaagcgctcgacatcttcaagcatcgcgggtgctgtcgatcgaccgaccgtcaacccatgctctgtgtggcgctcttccgctcaggaaagcgtgcagcccaactgcaccctgtcgatccggcattgtgggcatgcgcggcggtgatggaagacccaaggggcgccgaccgacggaagcggaggatgtcgcgcgagggtgcaggaggaggtacttggtgtcgggggcatctatccttccagggtcaggatctcagggcggcagcaacaaccgcgacagggaggagcaaatcgatttgtgaaaaaaaaccagaacaggttcctggatctgaacgagcctga

SEQ ID NO: 8164 - DNA, 102 bp, Zea mays
  Peptide Sequence Number=SeqID_51539
atggtcacggaaattgcctcgctgctcattccctccggcgctcatcccctccggctgctcccccgccggctgctcccctccctgctcccccgccgtggttag

SEQ ID NO: 8165 - DNA, 1329 bp, Zea mays
  Peptide Sequence Number=SeqID_51540
atggccgacccacaaagctacttgaagacacggaacaaggtggagtgttctccaaggcaaaaggccaccgacctagtcagactaaaggagatggctggcccacgaagctgcgtgaagacacggaacaaggggttgcatggctttacgtcaggctcggcccgatggcttatgtcatgggccacaagcagcgggtctccgcctgagcgggaagtgaagggaaaggcctggacacgtgtcagcaccggacccctactcacgacagggtcctcctcgttccgggaccttgctgaggttcggaccttactcggaggctctggacttatacgtataggggtctggtgtccttctgtggaggtcgggaccccacgatacatactgggatgtgttgtcttttcttgccacgtggcgccctttggcctgcccatgcgatggggtcaggcgccgtcctccgcgtggcctggagacgtcgcatgggtgcggcgtctccatgttgtagaagaggttttccgcgacgaccccgaggagtcgtgcattggcgcgagtggcgcgaagctgagggggcgcataaccgcgggcggttgtacgcttcccgcgtggcggttcgacttttcgaccgctggtttcgacgaagatgagggagcgtttaaccgcggggcggttgcatgctcctttgtgcggcggttcaccttcctgaccgctggttgccccgagaatgaaggggcgcataactgtggggcagttgcacgctccctgcgcggtggttcgccttcttcgcgcttcggatggggtgcgccggtgttttctggagaggtccgcgtcagggccaccccctccggcgacctcaccgccggagagctcgcgcccgtggtggtgccggcggtcttgccttcttcttgctgttgtttagaggagcgcaacctcaaggaggttggtgctcttccaccattgctcggcttcaaggattttcatcatgcagcccggctgcagtcccccgccagtggggagaaggcgttcaccggccttgcggagaaggcgaacttcggctacgcgaggccggccggctgcaagcgctgtcagctgccgcgtgcctggctccctggctcagatggccctagggccgcctccgacgctgcctcctgccgcttggtcgggacgtggttgtccgtccaccgcacggtgacggtcgcgccatgcgcgggtccgccacatccacgccttctcccgcgccactggccgtactggggggtcgtacaagacgtcgtacgccgcgggggtggcggcggcgttcttggatggtcttgtcctcactccgtgggagtacgggagtga

SEQ ID NO: 8166 - DNA, 390 bp, Zea mays
  Peptide Sequence Number=SeqID_51541
atggcgcctcctgttgacgtgactggtctgcgccctaggttgggcgatgtggaagctcctccgaagccgaggtcgaatctgtcttccgtggccgaggtcgagtccgagcccctggttcgggcgaggcggagaccgtcggctgaggccaaggcggagtccgagccctggggtcgggcgaagcagagttcgtcgtcttctggggctgagcccgagtccgagccctggggtcgggcgaagcggagttcatcagcggagtttgtcgtcttctgggggctgagcccgagtccgagccctgggtcgggcggagcggagttcgccgtcttccggggcttagcccgagtccgagccctcggtcgggcggagtggtgttcgccgtcttccggggcttag

SEQ ID NO: 8167 - DNA, 783 bp, Zea mays
  Peptide Sequence Number=SeqID_51542
atgcaagtggcgtgcaaccgcaccacgggggggcaccccttcgacttcgacgcatccagcatggaggcccaggcccacacgtcatggatcgggaaggaggatactccgaaagggatccttctccgcgaaggaagcgggccccgagccctcctaatgatcaggggttcgaaggctggcccctcggaagggctgacccctcgaaagggttcgatagccgcctcagagcactcgggcttcgcgcccactactgatcaggggttcgaaggctggcccctcgaagggtttgacagccgccaaagagcacgcagagcgagggatgactccgagtacgtccgatacatggccgaggctcaggctatgctcccgaggagcattcaatgcgaggatcgtctgacaccttatcctgacgcacgttcctcagtcggcaaggccgaggaaaacagcgccgcctgccccgctccgactgctgtgccacccgccagggtgaggctgacaacagctaagtccagcctcaggcacaacaggaagctccgcctcgcccgacctcagggctcggcccccgcctcggcctcgcccgaccccagggctcggcctcaacctcggcctcggaggatggtctccgcctcgcccgaccctagggctcggcctcaacctcgacctcagaaggaatcgcgtcctcaccccaccccggccttggcctcaggaggagtctccgcctcgcccaaccttgggctcggaccgaccacgccacagggggtacatcattaccctacccctagctag

SEQ ID NO: 8168 - DNA, 1104 bp, Zea mays
  Peptide Sequence Number=SeqID_51543
atgcattgcgaccttcctccttccgagcccccggatggggagcacccgtgttgctctcgtcttgtagttgttggaggagcgcaacctcgcggaggttggcacccttcagccatcgctcggcttcaaggattttcatcaggcagcccggctgcattccctcaccaatggtcacgcaggatggtgaccaccggttcgatggtggggagaagcaagccgggctgcggcctctgccctgccctcagcttcaaggatcttcatcatccttgctgcggcggggggcgagctgagtcggagctctacctcctacacgggccggcgggccacgtcttccttcagcattcaggagagagggcgctcattggcctagcggaggggcggactttgacaacacggggccggtcggccgcaagcgtcgtcagctccagcatgcctggctcgctggctcagctagctctggcgctgcttccggtgccacctcccaccgctggggcggagcgcggctgcccacccaccgtacgggtggctgttgcgtcgtgcaggctggggggccactcgtggacagacctccggctctttggctttgacggcttgtcctcacccctcaggtcgccggcgagccacccggagtttatcgtcccgcaggccctccgatgtggaggttgttcatacccgcgggagtggaaccggagttccgtttgtaatggctggttgagtgccggtgagcgagtggcttcccaggccgaggaggtgcagcagcggcggctagagcctggccgggtcattcgtgaggaccaacttcggagtcacgcttccgaggccgtgagccgggctgatgtcctcgggggacagctgactgaggctacggagcggccagccgagccgccgggccagatcccgccgaaggtggaaacaacgccgagggtgctgctgttccctctgtcgatgtctgaacctgcaggaatagacttattcatcggtagcagaatcacttatccgagcgagagttacttatcgcggaaggtgatgagtgaggagtccctcagctcggtcggccttgccgcttacgtgtactccgtcgtttttaggatcccgctatcgaagtaa

SEQ ID NO: 8169 - DNA, 459 bp, Zea mays
  Peptide Sequence Number=SeqID_51544
atgggcaagagcaagaaaggtggaagttcgtcgcaccactccggcgacaagcggaagcgcgagccgagccctccctcgaaggacttcggcgattccgagtactcggaggaggagttttcctccgagcccgaggggtcgccggtctacacctctcccccagcatcgtccgatgactcagacgattcccaggggatcaccgccgaggtgtggacatacatccgggccgtcgagcgctccgggctcgagggcttggatgagtcggaggtctcctcggacgaggagaactcttctgactcgttcgaggaggagagcggcggtgacggcgacgacgagggcgacggcgacgacggaggcgacggtggtggtgacgacaacggcggcaagggcgacggcgacggtggcggctgcaagagcggcggtggcggcagcaaggccagtggcaaagcgccactagcttaa

SEQ ID NO: 8170 - DNA, 2832 bp, Zea mays
  Peptide Sequence Number=SeqID_51545
atgccgtcttcctcctcgtctgctgcgaccacgccgacgaccgaggcgtcgtccgaagatacctcgggcactgtggcggcggcggagttacgaccgggtgatacggtggaattcggtgtttcgcggatgtcgtcggtccgcgtgcaagatatgcaacggttggggtattttggcggcggggttgggcatgtcccgggggcagaggaggttcctgagcccgagggtgaattggttgtttttgaggcatttttcatcgccggccttcgtctgcctgcgcatcgttttgtgttggaggttctgcagaagttcgaagtccagaagagaaaaattggacataagattgtgcaattcggatcgtgcactttcacgccgaagtccgggaagtcttcgatggaagttgtggagctggtcccttgtgcccgaaataagtggggcaactggtgggactactggttctatgtttcagaggctgaagtcgaagaccacccagggctccctgctaccattatgtgctctcattattatgtgacatacccgccgtttgaagtggcggaggatgaagagaatgaaagggcccttcggatcgctgcccgtacgagtagtgggcgtgatctagttgaggaattcatagggtatggggtgtggcccttggcgcatggatgggcgctgggcgaagtatgccctcacgagatgccctccctgggtgggcagaaagtgcgaagtccgctttttgctttggatgtgcgagggcgggatcctgccgcggttgtgcgcgaggcggaggatggagcggtgcgaattgttgggcgctacgtgccgaagacggagtcccaacggtgctgggatatacgtggatccaacgactgcttgaatagggtcttcgagttgaatcgtttgccgtatgacggttatcctggggaagacgttgtcgaccgccgcgggaaaaaaccagcggctgtgactgaagacgaccccgcgccggaggccgccccagctactaagaaaaggaagctaggtactgcggtgggagaactgggggtctccgatagttttgctatggagttgatggggacatgcgcggcccccgggggaaggatgtcttcgcctgagctccgggagtcttcggcgcggatgctggaggttaccgggggtcgatggcccaagaacgttcctatcccccgcgcggctggcgaagacttctctacgtctcgcatggctcgtgacttgagagtgtttccttatgggccgaatattgctgctgttgtgtcggcagtgatgaacaaggaccgtcaagatgctgtgcagaagcgccgggcggtcatcaggatggtcgatcccgtgcgcgaggcgaagagggcgcgaggaagcatgaaggctgcagcctctggcagtggcaagctggtgccggctgcgaaaacggctgcgcccaggggcagcaaagcgtcgacaggcaagaaggctgcggccgctgtcggaaccaagcctctcccgggcggaccgtcgccggcgaagctgcctccgccggggaagcgtgttgctgacttcggcacaaatatcagtgtcgaggattatctgggtgcggttgagggaagtgtatcagcagttgtcgcagcagctgacgcagcagctgaagcaagcggccgacttcgccgactgtgttgcgtcgggcgtcctgactacggacgtcgccgccgaagtcgagaatctttcgggcgcagcacacggatgctgtccgggataagtcggccacggagagcaagaaaccgcaggctggcggagaaggtggccgccctggaggccaagaagactgacctccgacgccggctggcggaggagaggagggaggctaaccaggccatcgctgaagcgcaggctgcgcaagcggaggctaaggtggcgcttgcgaagggtagcctcgccagcctactcgccgaggagtgggaggcaaggttcaacgccctgcgcagtcgcgtagacaaggccgagacttcggtgcgctttagaaagtcgtgcggacgcacgcgcagctcatgggaggcataccgcgatctgggtgcacggactgcagaatttcgaaagtgcccgaccgcgaggccagcctccgcttccttgaatggttgcaggaggagctgctggtcagatgacaacttcgagcgggagatttttaaggttgaagaccctgtggtgaaggattccgcgggggcactcttcgatcggatgtggggccctcatggtcgagaggcggttagggagcggtctgaccgggcgagggagcagatggcgcgtgccgaggatgtggaagacctcggacatctgaatggcatgcagcccgaggcggaggtcaacccggtgctgcccgaggctgaggtcgacccggcaccgcccccaaaaactagtgaaggctccctcgctgcccctgcgtctactgtgtcttgtggaggctcgtcgccagcccctgcgccgatggcggaggatcccccgaaggaagcggcggagctggcagcagaggatcccatggcggcggctgggtcttcgcaggttcaggattttgggcctgcgcatgcaaccgctattgctaattttgtggcggcttcgaccgtggttgctggaaatgaatcggatgagtctgtgtctaagttttctgagtttgatgattctgggagttcggttgtgtggacggaagagtcttcggatgaggacttggattactttgcggccttggatgtggctgcggtggaggcttctccgcgtgtgacggatgctgaagtttttcctggtccgagtgctgggcgtaggatgcgaagggcggtggcgaagtgtagagtgagtgag

SEQ ID NO: 8171 - DNA, 624 bp, Zea mays
  Peptide Sequence Number=SeqID_51546
atggcggacctccccccggacgcgcacaccgccggcctggggcacccacccctggccgcgggcctgggcgcggcccccgcttccctggctgccggcatcgcctccctgggcctgcctgctgccggccagacccaccccatgggccccggccgctccctggcagatgccgaggctccctacatcgtcggcctcaggcccctccgcgacgtctcttccccggccctccgtcgaggctctccaccggggtttcctgccctcgcggcacccccccgtgcccaacacaagtgcctaagtgtaaaaaggtggacaaagtacaaatcaaggataaaggaaaaatccaattggaaatgtcttggctcgagcagccaagactctgctgagtctgagagcaccggactgtccggtggtgcaccggacagtgtccggtgcgccaggctggctcgagcgaactggccgctctcggaaattcaccggcgacgtacggctataattcaccggactgtctggtgtgcaccggactttccgtgcgttgctaatccctcccttgctccttgcttctttgtgaatttcaagtgtaagggcgagaggctccaagttgtggagattcctcgcaaacgggattga

SEQ ID NO: 8172 - DNA, 648 bp, Zea mays
  Peptide Sequence Number=SeqID_51547
atggcttcggcggagctcccgggggtcgagcgcaagaagaagagcaacgtcacgtatgccttcatctgctccatcctcgcctccatggcatccatcatccttggctacgacatcggggtgatgagcggggcggcgctgtacatcaagaaggacctgaagatcactgacgtgcagctggagatcctgatgggcatcctcaacttctactcgctcatcggctccttcgcggcggggcggacgtctgactggatcggtcgccggttcactgtcgtcgtcgcggccgcgttattcttcgccggcgccctgctcatgggcctcgccggcggctacgccacgctgatgctgggccgcttcgtggccggcgtcggcgtgggctacgggctgatgatcgcgccggtgtacaccgccgaggtgtcccccgcgtcggcccgcggcttcctcacctccttctccgaagtgttcatcaacgtcgggatcctcctcggctacgtctccaactacgccttcgcacgcctgccgctccgcctcggctggcgcgtcatgctcggcatcggagcggcgccgtccgtcctgctggcgctcatggtgttcggcatgcccgagtccccccgctggctcgtcatgaagggccgcctcgcggacgccagg

SEQ ID NO: 8173 - DNA, 615 bp, Zea mays
  Peptide Sequence Number=SeqID_51548
atgtctctacagaccaacgacggcggcgcggtgatagagacccctgcctctcccctccctcaggaggatattctgggccttaggcaagaattagctgtcattgaagacgagatccatatacttgccaaacaaaccattcctagacttcgtgttgataatgaaatggaatacagggatattatccagggaggcatgaagttagaggaacatatgcatgctcttaaacttatcaaggaagaagtgttggtcctaagttctgaaaagatggagttggaagctttgtgcaaagagctatctgtgaaggttcagtcattgtacagggagctggagcagatccaatccgagaacaagcagatacctgctataagagaagggttgcatgatatacaagaggagatttcgagggccaggatggcatacgagcatgagaaacgtgcaaaagttgagcttcttgaggggagtcaggccatagagagtgattttatcaacataaaaatagaagcacagagattacgaacagagctggagaagcggaggtctcgtgtgttcaagcatcatgcatttggctcatactataaaaagatagagcatggcattgcatcctccaactggtag

SEQ ID NO: 8174 - DNA, 480 bp, Zea mays
  Peptide Sequence Number=SeqID_51549
atgtcgtcgattccgccgccggcgggcgggttgtcggccgccattgtcgttgtcgcgcggcggtggaaggagtatcatgtcgtagctgtcgtcgaaggacatgaactcaagactcccgaaacggagcagcgtcccgggccggagatgttgctggagactgcccatctggagcttgacgggaagctgttcgtcaacacgcagcaggcccctacctggcgcgccaactgtcggcgtttcgagaccggggggtccctaagccgacgagtgaatgtgccgcgtgccccagcccagatgggtcgagcgcgtgggcgagcgcgaaggggggaagcgaggtggccagagacgggcgtgagagaggtggaaatcccgcggccttcgtgttcgtcccgcgcccaggtcgggcgtaaggagaggatccaggtgtacaatgggggtgtagcagagtgctatgtgtctagcgggggagagctagcgccctaa

SEQ ID NO: 8175 - DNA, 414 bp, Zea mays
  Peptide Sequence Number=SeqID_51550
atgcctccgtccgccaccgtgggcgagtgctcgggtgtcaccgttgagctcctcatcgcgcagatcgcccagagatttggtcttcctgaggatgtactggttcttcgttctgcgattttcctgctttacctctcggtggatgagacaacgaccacttgtgttagtgtcagacagccttttcatctctatcatctcagggatcacttcatgagatgcatggccaagattttacagctcctccaggctccaggagcaggcaaatggaagcgattggtcttgggcgccatccatgtcatggccaaggcacaagggtgtggcggtcaaacgggtaaggctgcaacaaggcactggtacatcaacgtcacactaccggtggctacaggctaccgcacactacggattgcaatggattag

SEQ ID NO: 8176 - DNA, 393 bp, Zea mays
  Peptide Sequence Number=SeqID_51551
atgaacctcttcgtgaggcaaatcaccatcagggcgtccccacataatagatcaaatgccaataagtcaaatgtggatatgatattaatcccgggaacgaaagatgacacatatcaaaagctcaaagaagaaaatgagaggctaaaaatgagcttgacacaacttaaagggaagtgcattgctcaaccttctcaagataaccgtgatcacatggtgaagaagcttaagacgggaacaaccgtgacatacactaagtcccttgaagaaaatgtcaaggacttgaggattgtcaagaagaaggaacaaaagatgaaaatcaatgcctcctccaaaagcctcaaccacgcctccataaaaggagaaggagatgatatgaagctttggggtgcttga

SEQ ID NO: 8177 - DNA, 762 bp, Zea mays
  Peptide Sequence Number=SeqID_51552
atggaggatcccttagcgcatggtaatgaatctggtttccagactggacagtcagaaggactgaaggctgggaaaaattccgaaggtgacaaagggtatctagacaatctgggtaatgaggaagatgattttaatgaaagtgaggatgatcttttggattcccaagatctggaagaattcattaaagatgaagaacttattctttccccttctcaagagaaaggaaaaatgagtataagtgctactcattctgaagatgctggcaaagaagctggggttaagaaaggagggtccatggaaggggagtttgtagaaggtgtccgaagaagcagcaggctggagtccaacgatgagatgaagattgcggataagtctacagcgagagcaatggctaaagacgcgttcatcaacaaaggtgttgaattaggatcttcttttaatgaagctgtggaaaatttagacctgataaaatctttagagctttctaggaagaatcttgttgtgcaatctgttaagtgtaattttgatcctaacaagtcggttattcatgactctgatatggataatagtgtccataatgaaggagaggataatgctttgactgatttagaaaatgtgatggtgctcagaaaaggtcgcaaaattcgccacagaaaaaagtctgtgaggaaaaagaaagataacaagtctcctaaacataggaatattcctattaaaaggaaaggtttgaaagaggggctcacccaaagttgttcagaatga

SEQ ID NO: 8178 - DNA, 738 bp, Zea mays
  Peptide Sequence Number=SeqID_51553
atggggcgggctatgagatgcggggatggggaggacgagggtggaggcgtggatcccgcggcgtggctgcgagatgcgggaatggagtgggctgcgagatgcgaggatgggcgggagggcgagggcgagggcggaggcgtggatcccgcgacgccatggatggggcgcggctgcgacatgcgggcaggctgcgagatggggggcggaaagcgagggtggatgaccccgctggtgacggctgcgagatgcggggatgggttgggcgcggatcgaccgcgagatagcggcagggggaagggcggagccgcggtgaagcggccggcggtggcggcggttcccaggccgacggtggcggcccccgatccagagggcgagtggcggcggcagcgctcttctgcggtggtcgcggtttccaggccggcggtggcggcccccgatccagagggcgagcggcggcagcgcccttgtgcggtggcggcgattcccaggccggtggccgcaactccattacctcgacgcgcggtggcggaggttcctcgatccgcagcgaggcccttgtgcaggcaagcggcggcgtccccgaagccccgaggaggcggcacttacaaggccggcgagcaagcgacgcccgtcgacgtgcgagtagcgacggcgacgcatgaggcgcgatgttcgagcgagcgacgtcacggaaggggcgagatgcgcacagcgatgatcgcgcgtgacatcctctga

SEQ ID NO: 8179 - DNA, 405 bp, Zea mays
  Peptide Sequence Number=SeqID_51554
atggcgccgcggtgggggatccatggcgcccaccggagacgacgcccttgcccccttccccaccgcatcccccacgttcgagcctgtgtgtggatgctgagcgcaggatctggagcacacactcctagattaacctacctcgtcggtggctcctttcccgatgaatgggcagggttctcacgcaaggcgttcgacagcctcggcggcttcgtcaggctctccgtcgcctcggtcgtcatgctgtgcctggagatgtggtattatacggcggtgctcattctgatgggatgcctgaagaacccagagattcaagttgatgcaatttccatatggtcagtgccctttgttctaacagaatccgcctctgcattcggtgagaacacgactcctcggacgaatgtgtag

SEQ ID NO: 8180 - DNA, 555 bp, Zea mays
  Peptide Sequence Number=SeqID_51555
atggttcctctggcgcctgtcggggtgttctcgacgctccctcttctcgccacttggatcgccggcgtcacgcgggctctttcctttgcggaaaatcgcccctactgcatcctcccagtcggcgaacttggtcgctatgtcaaggagatcggcagttgttcttggccgccctcgccccagctcgtggatgagcgcctcattggtagtgccgtaggtgaaggcgctcaccacgtcggcgtcggtggcgtcggggagttcgtttctcttctaggagaacctccggatgtaatcccagaggctttccccattcttctgggtgcacctcttaaggtcccaggagctctcggggcgcttgtaggtgccctggaagttctcgacgaaggccttccggaggtcgatccagtcgtggatggtgccggctggcagatgttcgagccaggccctcgctccctccgcaaggtggatggggaggaactggatgatgaggtggtcgtccttgatccccaccatgcggcacgcgaggcggtagtcttccaaccatacaccgggatttga

SEQ ID NO: 8181 - DNA, 495 bp, Zea mays
  Peptide Sequence Number=SeqID_51556
atggccaactcttcaacattcttcggcgacgaggtttacgctcctgggagccgcatcacatttggctccattgacttcctcgccaccgccactggcgaacttcgccttgcccgccccgacgtgcctaccgccacaagcacgggacccacacgctccaccaggagcagggtggagaagcgatgcctcaggaggcgcaccaccggccttaagcggtgccttaatcggctcgttgccgctgcaaaacagcgggcgaaaagaatcctgccatcaaccttggtggctgtcgttggctgccagccagcatccgtccttgacctactcgaggacgactcaagccatgcctcaatggagtgtaactccgactctgacgaggcagtagggagagcttgcttcatggcgacgccgccacaaaacaataatggagggggagacaaggagccccccaaccaagaagaagagtaccagcgccagcgtcaagcgcgcatcctcgcctag

SEQ ID NO: 8182 - DNA, 201 bp, Zea mays
  Peptide Sequence Number=SeqID_51557
atgccgccccccctccctttattttttttcccaaaacccctctccctctccctcccttctctcattttctccctagccgccgccccctgccctagctgccgcccctcgccggttcggccgcccctgcagctcggccgccccgtccccgtctccggcaagttaatcattgttcatgatattgaaataggaaatttaatttag

SEQ ID NO: 8183 - DNA, 597 bp, Zea mays
  Peptide Sequence Number=SeqID_51558
atggcgttaaaagatggaaagttaggactcactttacatacccttgagagtctttttcttagtcgggtgaggaagcgacatatttttgttgcttttgcgccaaggtggtacctaacgaggaaaaacaagactgaagtgcgggaggactcggtcctccacttaggatcttttgcttatcgggaggagtttgtgcctcccttgatcttcccactcgggtttggaattttggtatccaatggaaccgatgggtcagacaatcctttgatagagcttaggctctcagcctctgctgctggtagattgactgttttatatggactgaggctgcaactgaggccatccccttctttgactattcgacctgctcctcgaagcaaggaagggaattcagatggcattgaatgccctttccgcaagaaggataggagttggcttaccgcatctaccttctcatcgcgggataagggctggggcgttaacttaagtactaaagcagctggaccggctgccttcgttgattccccacgaaggaatcggaatatcgctacttccccttactgtcctaagcaggggagatggattaaaaaccttgtgtga

SEQ ID NO: 8184 - DNA, 1824 bp, Zea mays
  Peptide Sequence Number=SeqID_51559
atgaccgttgaacaaagaaacgagaaaaatagaaagcgtcgtgaagtaagccagcgaaataaaggacttgctatacaggcagaggcatctagagaagacattaatatgaagacatttgagacagttaactttgaaacaagtggctgtagcgcaattgatttcacaaattttgcaacacaagttccaaataataacacttcaccgaccgataatattatcgaacgagaaaggcaaaggcatagagaaagacgtgcaaaaatgtcagtagaccaaaggaacgagttgaataggaagcgtcgtgaggcgcgacaacaaaacaagggacaacatatgatgtccactatgtcaggagatgtagacgaaaaagtaaatgtgaatcaagatgatgatagcgattggttgcataggaatgatacattcaaggcagacgacgttttcacaacgagagaccttctggcaccaggcggtgtgcatgacactgttggtaacacgcccaaccataatttggaaagggccgcctactttagagagcggtacaaaaacttaactcccgccgagatggagtttaggcgtgaacgccttaggttgtatgataatacaccaaagcggaaagggtcaaagatagagtatataagaaaacgtagagcactgttggctgacacattgagtcaggagtccatcgccatggagtccccaatatatacccctgaggttgtacaccctacaacagatgcaattgaacctgatggattcgtagttaccccctgcgactgggttatccctgaaatcgccagtaacccgttcctgccagctccaacacagactgaggatgttgattcaccgcatatgtctactggaccactaagacgtaaacatgtgccacgtggtgaaagacaagctatcttagcccgtcgaaaccggcaatttgaagcatccatttcaaggaacatggctactacgactgaggatactatcagtgacgctggtgaaggggctgattgtacacaaccccatatgactacagagaacaacaacaatgtacaatgtaggaatcaatgtcatggtgatatcgtggcaacaaatgagagtgcaagtatgaccgaacaaggaagtggggtggatcatacccagtcgaagccaagggtcatttccaatgttgatgacgatgacggtgtcgtatttgaagacgatgctgatgagaacgagggatacctattcgctgggcaatatgaggataccgatgaagatatagagatcgatggtagtcaagatgaatcgactgccactgatgttcctgatccgtatgacaaggtgtacaacaacatccctgaagaaacacatatgctcaagactgttcccaactgcggttattgcaccgcaaagaagtttgagtatgagacacctggtttttgttgtcgtggtgggaaggttgagctagccccactggagacccctccccaactcaagaggttgtgggatagtgcagactctgatgctaggcactttcgtgataacattaggttttttaatggccatttctctttcacttccctatactgttgcctcgatagtatgacaactaatgtaagggattctggtatatacacgttccgagcacagggcatgatgtaccacaatataaagtcatttggtaaggaaggtggggcagagcataaacaccttgagctatacttttatgatgatgatcccacactcgagcaccggtaccgtaagtgtcgcgaagagcatcaacagaaagacaaagaggttattcgacagatagtcgacatactacgtggaaaacccgtactccgagcacattag

SEQ ID NO: 8185 - DNA, 383 bp, Zea mays
  Peptide Sequence Number=SeqID_51560
atgaagacattgatagcaatatgggggaagttcccatcaggcaacaacggttctgcccgaccctacaaaagcatgcatatgttgtcagtgaagattttgtgtgaagccttggagacgacgtacccggggctagggcgggccatcaaccttcgaatggtgttggtcctacggaccgtgaacggattcgcctctggcctctgggcacgtcggaaccgcatgagttcaccggggtggagcacggtccgccaaaatcggcataggttaggtgctattgatggaacatggagcgggatttgcccaagaacgacctgtggtggtacggactccgcaagcgtcccgcaccctctgagaaagaaactcctcaaccatcacaagataaagaa

SEQ ID NO: 8186 - DNA, 471 bp, Zea mays
  Peptide Sequence Number=SeqID_51561
atggacctccacggtgaggtggacctcgccgtggcggtgagaggaggcgtacgtggacaaggtggtgcggtggccaatccaactcggaatgttggggctttgatagaggaggattcagcggtggtggtgcgcgcgacagtagggagcgaggaggtcggagcaggcgatggcgtggagcttgtcactccatcggtgccgattgcaggagtaaggatcctctctccaggcagtgagggggttggccgcctcggcgacttcgatgacgacgttggtggtgccaggcagctcgagcggccacgcgtcaaccatgatcttgatagcgtcgaagatgtcgagatcgtgcagccgcacagtagagacactggcggcgcggagcagctcggcgacctccgcctcgatgagatcatcctacgtcctggtgtttcccttgatgatcacgtcgtggacgcggatgcccacggggtccgatga

SEQ ID NO: 8187 - DNA, 456 bp, Zea mays
  Peptide Sequence Number=SeqID_51562
atggcgcgtgcggcggcgcgagcgcggagcgaagaagcaggaagacgaaggggcgtaactgcttgggagaaggatgcgaatgcgaaaaggtccggtggtgccacatgtccaagaaagccatatgctcagggacttcagcaacgagtcaggacccccatgggcgggatccagacccccctggtaggtccagcacctccacatgtacaagctggacccccaggtagggatccgaaccccccttgtaggggtctgggtcaccaacaggggatcctagtgcttcagggtaggacatgctccaggccctacttcggacccgggcaggggtccgatgacgccatgtggccgctgggcgcacggtgcgaacctttgcggagaagcaagacctcagtccgcattaaatgcaaggcgaccgaggcgtgctctgaccaagtgcagggcatgggtaggtctctataa

SEQ ID NO: 8188 - DNA, 744 bp, Zea mays
  Peptide Sequence Number=SeqID_51563
atggcggcgctcaacggctcggccggtttcctcgccacttctgtgcaatctcttgagcaaggtcctccgtgtgcctcgctgctcctccgtgcgcctgtgtggtgccggtctgatctggtctctgtccaccatggcctggtgtttgggctccctgctgcgcggtgttcctcttctcgggctggtgccgtggacgtctccctcggctccggtagcggctctagtatctccgtcaacctcccgccgtgcaggagcagtctgggccatgctgaggaggcggtcgacgtcttcatgccattacctcatggcccccgcagcggcaccaggtttagggcggtaggagcctcgtggcgtggaagatgctgcctcttcccccattgggaaatcctcagaggacgagtcgaggttcgcaccgtgcgcccagcggccacgtggcgtcaccggacccctgcccgggtccaaagtagggcctggagcatgtcctatcctggagcactgggatcccctgttggcgacctggacccctacaagtggggtccggatccctaccttggggtccggcttgtacacgtggaggtgctagacctaccagggggtctggatcccatccatgggggtccggaacccgcccatgggggtcctgactcgttgctgaagtccctgagcatatggctttcctggacacatggcaccatcggacctgcccgtagggcgggggcaggccccgaggcctatggccttagctga

SEQ ID NO: 8189 - DNA, 408 bp, Zea mays
  Peptide Sequence Number=SeqID_51564
atgtcgagaggcgaactctgtaattcccctcctgcaaaagtgatagcggctgtagcatccgtgtggaagagggtggggacggggctaagaaaagagagtgcttctatcgaagaggcccatgcttcttgtgttgaaggtatgctcaagaaatcaatccgcgaactcggagttcaaactgtaagcctgagagatggcttgaatggcgggggaagaaaaggaaggaggaaagtccctctatggactgatgttctccgttttacggatccaaaagtgggtaacgcattgcgatctctagattttatggctgatgcttataatatgcccgctgcagaagcgaaacctgttgccatcgtcatttcaatcacaattaagggagaccgaacgggttcaaggcattgggcagaatga

SEQ ID NO: 8190 - DNA, 648 bp, Zea mays
  Peptide Sequence Number=SeqID_51565
atggcagtatttcttcagcggatgggtgactccgggggcgatcagctgtacgttggctcggccaactttcaaatccgcttcggtcggaaggcggagtacttcaagatcccactcccctcctccgagcgatatgagggcgagtggttttacgtcaggaacatggctggcagcgccccgcagtttaccggtcgagagccggtatcgacggaggagtggcatcatggggtggaggcgtccttcaagagcgaggtggagcaccttctgacggcgatcaaaacactaaagcaacaaggccttaccggcgcgcggctggtgcgcgtcttcatgcatcgtggggttcagcctttgatggcctgccagaagccgatgcacaggaattccggtgtaaatgaccttgaccgccattcctctgaaccacttgcgctgactgagatcgaggcctgggtcaaggtcatcatgacgttgtcgttagggtcctttatggacgaggattcacccctccctctctccaaaggagtcgcgagcagtttggtgagtttcttcttccttgtattttttttgttcctgtggccttcttcatcggtgatgttcgtccgcggctctgcatgggatcgggcccctagcgccctgccttccaccccttcctga

SEQ ID NO: 8191 - DNA, 1767 bp, Zea mays
  Peptide Sequence Number=SeqID_51566
atgctcctccgtgccctgatcttcccggacgacctcctcccgctcctgccctggtccgtggcgcagtcgctgctctgccgcctcgcgctgcggagccccgccgacctgctcccggcctttgtcggggctgcgcacgcaccgaggtctgacgacgcccaccctgtcactaagtggaagggcgcctgcttcttcgagaacagggcatggctggagttccgcaacgggaccggcagggggctcggaggcggcgtagtccatgtagagcatacagttttctcgtttaaagaaccagaagtgctccatccccactctcatggtacatctactcccagctgggcgaaggctctcggagtggacggcaggtatggctcccctcccctcccccaccccgaaccaagcgccaccaaaattgccccaaatccaaatccaccaaaaacaacgcgaaatcacgcgattcaatccacaaatcctgaagcaccatctctcgatctactttccaaggggattcactatggcagtctccgggatgtggaggcctttcaggcggggaaggctctcagctcatccattctggtaagtccgcgcaagatcaatccggaattgcaggggcatgccaggagggtccttgagaatctggtccaggatgtgcaccttcacggtcatggacctcccctatcgcagcagggagcggctgcccctaaccttcgtcacaaagacagagccaacctgactgcggaaagagacttcaatgcaagcagtaatggagacggagtcgcagagcaagctttaagagaagatccacataatacgattttgcggaagagaatcccagcctctgagaagatgaaatggacagtagacaacgacccgccatgcctcaaggccgttcgggtccggagtgcgttgaaggctccttccgtggggttcggcgaggtgaacctctttggctcggcaggcaatgggcagcaccgcacaagtcatccctctgcaggcaagttctcaatgtcctcaatggaggaggagggttgggttgtagtcaaacctcgattctggtggcgcgggaagatcatcaaccatgggggcaatttattccaccaggaagatgaggtcaagagggccagtttcttcaaaaagaaatttcagggtaaatgctacaactatttattaacagaacactatgctttccgttgttgggcaccccctagatgctggtgctgcctacgatctggtcataaggcggagagctgtcctgacaaaatcaatttagtgaagtccaattcaaaaaacaaccaccatgattcgctgaagcattcactcaggccaattcattgccagggagccaacaacaccacccatactgtacaacagcacagacctagcaccactgctcttcaaaagggacatgaacaactccaaagacaaccacacaacctcctccccagacacaacagcaagtcataccttgaagccgctcaaggaaatcaagacatggcagcccgttatcccggtgacccaagagcaagaccgtccagagcgttttgtgcgatctcagtgacaagcaacatccgacgccgcagagacgaactcatcaacaaggctgtggtttgctcatatgatgggagggacaccaagggaggacctcctaatcgcaagtcgcgcagagagtttgtatggagctatggggctccaattggagagaagtgtgatcgtgctgaagactccagaggcagggaggtcaatcgtcgggactggagagatgatgtatga

SEQ ID NO: 8192 - DNA, 618 bp, Zea mays
  Peptide Sequence Number=SeqID_51567
atggggaacggcacgaccgtgggctctggcctcgcctccactgtgctcttcgaggctaacatccttgccatcctcgccgaggtcctgtccgtcgtgttctgcgaggtcatgaacggcaagccggagtacaccgaccacctgacccacaagctcaagcaccactcgggacagatcgaggctgctaccatcatggagcacatcttggagggcagctccttcatgaagcttgccaagaagctcggcgagctcgaccccttgatgaatcccaagcaggaccaaggaaatgcatatagagatggtgcaataagaagggcaacattacatgtgaaatctgcaaccaggtatactccccaaattatgccatccctccacccaagtgttgctcagatgaaacgggcatggatcttagccatcaccatcgcagagcagcagctgttgcaggctgagttcgacgactgtgtatccgcaaactctagcggcgccacgtgctgtcgaaccattgctttaactttgatgctccttctgcttgtgcgacatgtaatcgtcgtcgtgagggacgttagcatgctgcaagacgcaaccgtgctgttcagcgtgagtttcagcacacctacctag

SEQ ID NO: 8193 - DNA, 114 bp, Zea mays
  Peptide Sequence Number=SeqID_51568
atgctaagtccattggcgccacatctgacgaagctttttcagaagaagaaggagccttcgatagcgaagaaggcagctgggttgaaaaaacgaagaattattactgtgacataa

SEQ ID NO: 8194 - DNA, 639 bp, Zea mays
  Peptide Sequence Number=SeqID_51569
atggctactcgtgagccgcccgatcagattctgaaggtccagatcagatcgcgcgaagggaagttagattccagggtttacagctcccgaggtaccctaggacatttccgagaccagcgggagcgatcttctaacggaatcccatcggagggaggcatcgagccctcggaccccgtcgccaggggaccgggtccgacagatcacccgcagaggctcgggggctgctctcgcaaacccggctccggccgaaccgttgacagcgtcaacataccagcccgagagcttgggccccgaccgtgcacccgggctacggccagttcgcatgagggaacaaccagaccagccgaagcattacgcaaggcattaagacctcgaaggagtgaaaccactcctccgaggcctcgggggctacacccggcgggtgcgctcgcgcgcacccaccggaaccaaatgcaaccgagaaaggctggtccccttgcaaaaaagtgcgacgaaagcctccaagcgagtgctaacactcccttcgaggctcgggggctactgtcggggaccataattaggggtaccctcaagacgcctaattctcagctggtaacccccatcagcataaagctgcagaggcctgatgggtgcgattaa

SEQ ID NO: 8195 - DNA, 1995 bp, Zea mays
  Peptide Sequence Number=SeqID_51570
atgcaggtagtcgagttggttccttgcgcccgcaacaagtggggcaactggaatgaattttggttttacgttgctgagggtaccgtcgaaggccatgagggactccccgtgtccgagatgtgttctcatttttactcagcgtacccgccctttgaagtggcagaggaggatgtggacgaaggggcccttcggtgcgccgccggcctgagcagtgggcgcgatttggttgaagagtttgtggcgtacggggtatggcccttggcgcatggctgggcgttgggcgaagtgtgccctcgccagatgccttttcacggtggaagggtggtgcgaagtcctgccttcgcgctgaatctgcaaaaccgcgacccggccgcctttgtgcgtgaggcggaggatggggcggtgcggctcgttggacgttacgtgccgaggacagagggccagcgcagctttgatatccgcgggtcaaatgaccgtttgaacagggttttcgaattaaatcaattgccgtatgacggctatcctggtcaagacgacatggaccgccgtgggaagaagccggtggtggagactggagacgaccctgcgccggcggccgccccatcctctaaaaagagaaaattaggtactgctatgggaggacttggggtttctgatagttttgctagagagttgatgaggacgtgcgcggccccggggggaaggatgtcttcgcccgagctccgagagtcttcggctcggatgctgagggttaccgggggttgctggcctaggaatgttcctatcccccgcgcggctggcgaggacttttttacatctcgcatggttcgtgaatggagagtttttccttacgggcggaatattgctgctgttgtgtcggcagtgatggacaaggatcgccagggagcagcacaaaagcgccaggcggttgtcaggctcgttgaagctaggccgaagaggcagcgggggtctgcgaaggctgcggcccccggcggaggcaagccgccgctggcggcgaagtcgggcgcccctacgtctagcaaagcgccggaggcgacggcaggcgccgggggcacaaaatcgacgaaggcagtgccgccggccagcagagtgccggaggtcgcgaaggcggcccgagcgttgccgtcggcaggcaagcgtgtcgccgacttcgccaccgatattagtgtggaggactatcttggtgagagcgcgccgagcagctgcaggagcggctcatcgcccctggagagccgcgtggagcgggccgaggccgcgacgcgcgcggaggccgaacggacgcacacacagcttatggatacatatcgtgagctgggtgcgcggaccggtgacttcgaagtgccggaccgagagcccggacttcgctgtctggaatgggtgcaggaggagctgcaggcactccccactgtcgtggaggggtttatgtcgtacgcctccctggtcacctgcgatggggcgatgaacgcgctctcccgcgaagggtgccggcacttcgaggtcttcgaccaggccgatgaagattttgagcgagatgtctataaagttgaagaccccgtagtgaaggaatccgccggggccatctacgaccggatgtggggtccgcacggtcgcgaggtggtcagggagcgggccgagacggcgatggctcaggcggcgcgtggtgagcgggtggacgacttcggggcgttgaacagcgcgctgcctgacccggagccgaccccggcggaggccgtgtctggggtcgccctggagccaaccccggagactgcggaagacgcgccggatgcccccgcatccgctgcggccggcgaagacctgcccccaaaggtcgccgaaggcgcgcctgatgcccccgcagctgctgcgccgagtgctgaagatcccgcggcggtggcggcggaaacaacagcggaagcaacgacggagccaacggcagaggctcccgcaacgtcagggccttcgcaggtggcgtag

SEQ ID NO: 8196 - DNA, 891 bp, Zea mays
  Peptide Sequence Number=SeqID_51571
atgaggcgtcttgaatttgccttcttgttcaaggtaagcacgccaccgcgacgtagcggtgggaggaggaggagcatgatagggagaagcgagacccacaagcgctggcttcgacgagagctgggcataaccaaggatgtcacgtcgcttgtgcagataattaagtttgttcagcttcatgctcatttaaatggtggtgctgagtctttcttaaatgtcaagtcttgtaagggttccaagtctggagcttcgtcgaggtgtgctggttgtcaaggttctggcttcaaggtccaaatccggcagttgggacctggaatgattcagcaaatgcaacatccttgcaatgagtgcaagggttctggagagaccatcagtgataaggatacatgcccacaatgcaaaggtgataaagttgtgtcggagaagaaagttcttgaagtggtagttgagaaaggtatgcagaacgggcagaagatcacattccctggcgaagctgatgaagcgtttgttctgactcacttggataacaggcagctgctgatcaaaccgaaccctggcgaagttgtgaagcctgattctttcaaggcaatcaacgatgaaggcatgcccatgtatcagaggcccttcatgaagggcaagctgtacatccacttctcggtggagttcccggactcgttgagcctggagcagtgcaaggccctggaggctgttctcccgcccaagccaatatcacagtacactgacatggagctggacgagtgcgaggagacgatgccctacgacgtgaacatcgaagaggagatgcagaggcggcggcagcaccaggaggcctacgacgaggatgatgatgtgccaggcggtgggcagagggtgcagtgcgcccagcagtag

SEQ ID NO: 8197 - DNA, 1281 bp, Zea mays
  Peptide Sequence Number=SeqID_51572
atggcaatgggtaaatacccaccgggtattactaccccatacccatacccacgacataaaaataaccccatcgggtcacccatatacactggtaaggaagaggagggcaggatgtcgcaccgtaagttcgagcacccgaggcacggctccctcggcttccttcccaggaagcgctcctcccgtcaccgcggcaaggtgaagtcattccctagggatgaccccaagaagccttgccatctcactgccttccttggctacaaggctggcatgactcacattgtccgtgaggttgagaagccaggatccaaactccataagaaggaaacttgtgaggctgttaccatcattgaaacccctcctcttgtcattgttgggctcgtggcatatgtgaagactcctcgtggcctccgcacactcaactctgtttgggcccaacatcttagtgaagaagtgaggagaaggttctacaagaactggtgcaagagcaagaagaaggctttcacaaagtatgctctcaaatatgaaaatgatgctggcaagaaggaaattcagctgcagcttgagaagatgaagaaatatgcttctgttatccgtgtcattgctcatacccagattaggaagatgaagggtttgaagcagaagaaggctcacctgatggagattcaggtcaatggtggtaccattgctgacaaggtggactatggctacaaattctttgagaaagaggtccctgttgatgctgtcttccagaaggatgagatgattgacatcattggtgtgaccaaggggaaaggttacgagggtgtggtcactcgttggggtgtcacccggcttccccgcaagacccacaggggtctccgcaaagttgcttgtatcggtgcatggcatccggctagggtctcctatacggttgcccgtgctggtcagaatgggtaccaccaccgcactgagatgaacaagaaggtgtacaagatcggcaaggctggacaagagacccacgatgcctccacagagtttgacaggactgagaaggacatcactcccatgggtggcttcccccattatggtatcgtgaagggtgactacctgatgatcaagggctgctgtgtgggaccaaagaagagggtggtgaccctccgccagtccctcctgaagcagacttcccggctggcgctggaggagatcaagctcaagttcatcgacacatcgtccaaatttgggcacggtcgcttccagactaccgatgagaagcagaggttctttggcaagctcaaggcgtaa

SEQ ID NO: 8198 - DNA, 372 bp, Zea mays
  Peptide Sequence Number=SeqID_51573
atgacgaaggttagtgcttaccgaaggtggtcgaaagggttcaccggaggcacgggacacagcccgtgtaaaattacacccatgccctttacatttgctaataactttaaggaccttcagaagacgaagacccccaacaggaagggtatcagatgtaaagattatggtggaaggaagaaaaataaagagcttggatggtttgaaaagaagcggtacaaggggtcaagcagtctcattagctgcgagaagcagacgattcgaattgagtttttatccttgcaaggcatcctccctggatccaagtccatagaccatcatagatcccgttatcaagatgagtacaatcaattcctgacctcacgcgagtgctag

SEQ ID NO: 8199 - DNA, 1638 bp, Zea mays
  Peptide Sequence Number=SeqID_51574
atgggggtggcccccagcacctccctcttccgccatttctttgtgctggtgaagtctgggaaggctaaggaccacttcggtgcctactatttccaaacaaggtcggatccagccgtggcctacatcccctcccttggtggcacatggtgggagaactggtgcggcgactgggtgatcgctagtgcggaggccaacgatcgcctcgccctgtcgagcgatgggccaagactcaaccggaagttgtggatggccaggtcgtccctggtgccagaactccagctcgtactggacaggatcaagagcttggcggcgggtggcctgacgtcgatgcgcgtgcgcgggccagggaccgacctgtcctgggaggagctggaggttctggtgaaggggattactgggttgaggacgatgattttggccacactgtcgacccccgacaagagcggcgtggcagttcgccagaccgcacccccaccagagcttcccgcgcccccgccgtggccccctgcccctcggacaagggcaaaggggctgcaagcagctcctccgccctgggcggcgccggggtgtcggaggaagagaggcgacgccggctgcgccgcgccgacgaatcgttcgtttcggacccccccccccccattggggccaaggaggccggctcccagaagcgtcagaggattgctggtggggccgaggagaacgactcccaggcccagggcgcgtagaggcgcgtcagtcctccgccaccacaaccgttgggtctgccgccaccacaaccaccaccaccgtcgggcccgccgccgcctacagcacctagggatgatctcccctaggggcaccaccagcagcaacaacagcagcaggaacatcagcagcagcagaagcagcggtcgccccgcttccagggttgctggaagggcttcctccccctctgctcctaaggtcgtgcctccatcgcccccggctgctgccgccgagacagcacaactgggtccccaggctccagccgggggtccggcagcagcggcgccaacaccaagcggtgtcgcagcggtggagggggtccctactgctccgacggctgccacagcctcaacgaaggcgatgtcgtcgagtacaccgttggtagcagtagaggaggccttagctgtgcccgctgccgccatcgaggtcgacgaggggggtgcgtccagctccaacccaccgcccactctggaggagacggaggtgatttttgggcggtggctccggtccggcgtcgagccagaagcagcaccagttccccttccccgggtgctgtcccgcgcccaccaggccctccaagagactgaggcggcgatcctgtgggagtgggaggcgcttgaggctgaacaccagcgcctcagcaattgtcgcgcccagctggaggagcgcaccaaggcagcatcccgctacgggtccagcagaccgcggctgtggagagcctgcagaggctacaacaggagttggatgacagggccaacagcattgccctggccgaggagaacctcaaggaaaaggatgcctccctggataagcgggcgacgaatctcggctgaggagaaggagcgggcgctggaggagcgggtccgccagttcaaggcggcgcaggcggcatag

SEQ ID NO: 8200 - DNA, 372 bp, Zea mays
  Peptide Sequence Number=SeqID_51575
atgaccctccaaagtcagccagactcagcaacgaggtacccgatgctcttcatacaactgcaccgtgtacaaaaggggcgtagggtaaccggcgaagttaagcacttcccacaagatggaaggaaagccatcgtgagagaggaagtcagagctgaaacgagtgtctcctccgctggcggggtgcttgatagctctcaagcttttgagcttcggtttgaaggacacgttttcgtcatttctgaagagaagatgtctcaagacaagaagacagttgctgagacgaagctaaccgaagaggagaagctccttgaggagaagactgcaggatttgttgagtcaatagcaaaaacaaaatacagagaagattactaa

SEQ ID NO: 8201 - DNA, 231 bp, Zea mays
  Peptide Sequence Number=SeqID_51576
atgaagactctgacgactttcagtggctaccatcccttggagatggtgatgcaccccttggggcttttccctgctgagaagaaggatgatcccatgtggtgtaaccgtgccctgcagagcgatgctatggcacatcttgctaacctcactcaaaccaccaagctcaccctcgacagccgagaagattttgtggtcgatttgtcctccaatttggtagagaaggatctatag

SEQ ID NO: 8202 - DNA, 822 bp, Zea mays
  Peptide Sequence Number=SeqID_51577
atggcgccccggcgtttctcccagccgagcacttcttcttcccacaaccgcgcccttggtccccgccatgaaattccctgcatgctcctcaagttcccagcgccggccgtgcctggccagatctccctccagctcggccccgccctctgcgtgtgctcctccctgctcagttctcctgcgtgccgcgcgcccttcgttcctgtctcacgcgcgctagccagcccagagcttccctgcgcgcgcctggatcttctccctcccaggcgttcggctgttcgaaccgcgtccagccgaacggctcctcccacgcgtgctcctccatcctccttgtgtccctggttctttcccctgcgctcccaaccgtcgaagctccctacactcgcccctgacctcccatggctgtatgccccatctcagctttgccctctgttcggcgtgtttgcccctgtagagcccgcccagcctccattttttcccagcctggatctccctgctcgccttgctcctccggcgccgtggttttctgctcgcttggccggccatggtggctatgcatgccttctggccgtggatggttctgcccaggccaccgtcgcgcccagagaaatggtgcgcgtccctgcgcctggttttcgtttccgtcgcgccgatctgtgctccgtcctggccatcttctctgcctccgatctgtggcgccgtcgcaagctcgtcgtcgttcttcgctcagcaaggtttcattctaagcgccgcccttcaagttcgcgtccttggcggactcgcacctccgtgtcgtgtccgctcgtccatgctgtcgacccgtga

SEQ ID NO: 8203 - DNA, 264 bp, Zea mays
  Peptide Sequence Number=SeqID_51578
atgccggcggcaaggtggggagccgtccttggaagactgctcgtgccactcgctgacgcgcttcgcgagcttgatgatctcacggcactcggtggcgctgtggcgactgttggggtgcacaaggcatgtgccactgttaccctctacggccgtgggcgcttgttgcgctcgctccggctcccagtcgcagctgcgacaaccggggcagcagtttgcggcttctcgtggccgtggttcttcttcttcttcttcttgccgtcctga

SEQ ID NO: 8204 - DNA, 324 bp, Zea mays
  Peptide Sequence Number=SeqID_51579
atgggcaatggccatgaaccggtacagggccggcctgccgatgatggtgttgaaggggaggtaaacctccgcgacgtcgaactaaacgttctccgtgcggaagttctccttggtcccaaatgttaccgggagtgtgatgctcccgagggggtacaccggttgtgggcccactccagagaatgggcgagagggtcccagctgggaccctgggatctacagctgcttgaatgcaacatgactgatgacgttgaggccggcccctccgtaaatcagaacatggtgcagccgcatgttggcgatgacaggggcggtgatgagcggtag

SEQ ID NO: 8205 - DNA, 1059 bp, Zea mays
  Peptide Sequence Number=SeqID_51580
atgcaggcggcatgcaactgcaccaagggggcgcaccctttcgacttcgacgcatccagcgtggaggcccaggcccacacgtcatgcgacacctttggcaggcgaagcgggcgacgcttcacctccgccataatggccgcgtcaaaaaagggactgggaaaggggacactccgaaagggatccttctccgtgaaggaagcgggccctgagccctcctacggatcagaggttcgaaggctggcccctcggaagggttcgatagccgcctcagagcactcaggctccgcgcccactacttgtcagaggctggcccccgaagggtttgacagccgcctcagagcacgcagagcgagggatgactctgggtacgtccgatacatggctgaggctcgggctatgctcccgagggctcagtccactcaagggacacgatctcgcctcgccggagcacagcctcgggcaaaggcagccgacccaggaggattcacgtctcgcccgagggccccctcaagcaacggacgcaccttcgactcgcccgatgcccagctcgggcaggcttcacggagaagcaaccttggccagatcgccacgccaaccgatcgtatcgaagctccgcctcgcctgaccccagagctcggggctcaacctcgacgccggacgacgaactccgcctcgcccgaacccagggctcggactcagcctcgacctcggaagacggactccgcctcgccccgaccccagggctcgaactcaacctcgacctcggatgatggtctccgcctcgcccgaccccagagctcgggctcaacctcgacgtcggacgacaaactccgcctcgcccgaccccagggctcggactcaacctcgacctcagacgatggtctctgcctcgcccgacccccggggctcgttctcaacctcgacctcgaacgacggtctccgcctcgcccgacccccgggcccagactcgacctcgacctcggaggagcctccgcctcgcccgacctcgggctcggatcgaccacgtcacagggggggccatcattatcctacccctag

SEQ ID NO: 8206 - DNA, 363 bp, Zea mays
  Peptide Sequence Number=SeqID_51581
atgcctcgcagactgtacctcctgttgaggcgaggaggaagatccctgcttctccagctcctggcatgcggcgctcctgcccctcgtgcaggcggaaacgatcttcgtgatcaggccgatctcgcatcagcaaggtcggtaaccacagggagttggttcagcgattgcattggcgcctcgggcttgctcgtcgtagtcggatcgcaagggtcaacttccgccaaatcggaattatctctactcgccgaaagatcgggcacctcagctacatcagtggtgcaacatctccaagtgcctagaatagccagtcactggcacgaagcggacgctccggaagacgagagggcaagaaagggactttag

SEQ ID NO: 8207 - DNA, 384 bp, Zea mays
  Peptide Sequence Number=SeqID_51582
atgtccagctcaggccagacgtcggtgacgaaacagtggcgccacggcggggagcacatactctccagggtggcgcatgcaatagctcgccccgcggcggagtgtggcctgcgtgatggaccttcggcgacgaagcatggtcccaacaggccaactaataggaaacggcccaagccagaggatggtctccgaggtgtggacgtctgctcggagcattattctatctctgagcaggactcaactgaggcggccatgcaagatgctgcacgactcaacctagtcgtcgtgctcaacacggagctggaccacaccttggacgagctaagtagggctcgtgctgaggttgacgagttgcgggctgagcacgttgagtgccgtcactaa

SEQ ID NO: 8208 - DNA, 369 bp, Zea mays
  Peptide Sequence Number=SeqID_51583
atgagcatcaaggccgctggtccgacggaggcaaagcgggcagggacacccttcgcaggactcgacactttgacgaagacctgcggcgacgtcctcacacggcgcggcctcattcagccccaaggcccaccagagagcaagttccaacatttggcgcccaccgttcgtgctacgacaaaaccacccgcgatggcacccaagagagctaaccccaaggctgacgaggctgcgaaggcagcactgctggccgcaagaaagggcaaggccctcgccctcacccaatccacccaccaagagcccatcgccttccgtttccccacaccggcgaagacgacaccttccgcacctgcggaaccgacgaatctctag

SEQ ID NO: 8209 - DNA, 249 bp, Zea mays
  Peptide Sequence Number=SeqID_51584
atggcggtcagcgagcggggggtcaaggggggagccacccccgcgggagcttcgttatcagaaatctttggcgcagaacaatggaagtgcaacgaaatgaacaatatccccatactgttcacgctggattggaattgcattcacgcttttaccttcgagcaagccgaagacttgtttaaaaccttcgtccgaggctcattatacccgaaaggagataatgcttcgaaggacgaaggtcattacgtttaa

SEQ ID NO: 8210 - DNA, 831 bp, Zea mays
  Peptide Sequence Number=SeqID_51585
atggtcatggaattaccactagacgcgcagagcagcggaagacgtctcgatgtagacgaacgcgtcgagcagtgctgtgcagtcgtcggtgtccttcacgtcctcgcacggttcgtcctagtgctccagatgcagctcctccgagggcatatttataacagggagaagggccacttctgggactactgtccaactatgaccaaacccaaaaaggagaggagcaaaggcaaggcgctaacaagtgttagaacttgggatgattcttcaagtgaagatgaacctccaaggacgcgcagccaccggtcctcatcacgctcatcacggtcatcacacaaatgccttatggcaagaggattgctagaaaaatttgaaacttttgcaaacctaaattgtgagttatcaactaaaattgagctattagagtctagtgctccatccactgctactgatgatggacttattaaaaagaatgaaaaacttaaggctaagttagctagctcccaaggtacgatggaaaatttgctagagaaaatggaaattcttagcatacacaataatgagctaactactaagctagaaaacattggtagcaccccagcagcatctttagttgaaatacctaaaattattaagaaagatgcttctacttcttgctttgatttaatcgataattctaacccctgcaaccaagttcttgttgagaatattgttgtagaaacatgttcggacgaggttgcaaaggaaaatgaacaattaaggcaagaagtggctcgccttggcaaggctttgtatgacaagaaaggcaaagcaaaacaaatccgacctctatag

SEQ ID NO: 8211 - DNA, 333 bp, Zea mays
  Peptide Sequence Number=SeqID_51586
atgcaggtggcatgcaaccgcaccaagggggcgcaccctttcgacttcgacgcgtccagcatggagacccaggcccacacgtcatgtaaccggcgcgccggttactacgtgcaagaaactgcaccgccactcgcgtcgctaccgtgcctcctcgactgcggaaccagtactgcgactcgagcagggaccgggaaaggggataccccgaaagggatccttctccgcaaaggaaacgggccccgagcccccctactgatcagaggttcgaaggctggcccctcggaagggttcaacgaccgcctcaggctactcgggctccgcgcccactactga

SEQ ID NO: 8212 - DNA, 117 bp, Zea mays
  Peptide Sequence Number=SeqID_51587
atggcaggagaaattattcagagaagtgaaaagggcatccacaatgctagagaagtggctaaggctgctgaaaagagcacagagcccgaagttttaaacctcaatttccgtttgtaa

SEQ ID NO: 8213 - DNA, 411 bp, Zea mays
  Peptide Sequence Number=SeqID_51588
atggcgcttcctgtcgatgtggctggcctgtgccctaggttgggcgacgtggaggctcctccgaagccggggtcgagtctgtcttccatggccgaggccgagtccgagcccctgggtcgggtgaggcggaggtcgtcagcagaggccgagtccgagcccctgggtcgggcgaggcggaggtcgtcagcagaggccgagtccgagcccctgggtcgggcgaggcggaggtcgtccgcagaggccgagtccgagcccctggggttgggcgaagcggagttcgtcgtcttccggggccttagcccgagtccgagccctggttcgggcgaagcggagttcgtcgtcttccggggcttagcccgagtccgagccctgggtcgggcggagcggagttcgccgtcttccggggcttag

SEQ ID NO: 8214 - DNA, 102 bp, Zea mays
  Peptide Sequence Number=SeqID_51589
atggagtcggagtcgcaaccgcagcaccagaagaagggggaagagctcgccgcggatctcgcgatgcccgttgacggggtgttcacatgtgatgatgcataa

SEQ ID NO: 8215 - DNA, 273 bp, Zea mays
  Peptide Sequence Number=SeqID_51590
atggccaaggctcgggctatgctcccgagggtaaaactaacgacaataagtcactacctcccccaagttcagcctcgggcgcaacagggagctccgcctcgcccgaccctaggccttggcctcagcctcggcctcgggaaaaggtctccgcctcgcccgaccttgggcctcggcctcgacctcagcctcgacctcaggagaagtctccacctcgcccgacctcggcctcggaccgactacgccactggggatacatcattaccctacccctag

SEQ ID NO: 8216 - DNA, 201 bp, Zea mays
  Peptide Sequence Number=SeqID_51591
atgggatccactttagtaagcatttctgcaaaacagaagccttaccttgactcccatatgacccgcatacccttatgtcagagaacaggcgcagaggaggaaggcgtgctcagcaggagcgagccgctcaacaggaggaggtgccccagcaacagcatatgccgccccgcccccgatgtcgatcgagcagatgttttctga

SEQ ID NO: 8217 - DNA, 924 bp, Zea mays
  Peptide Sequence Number=SeqID_51592
atgaagtgccgcctcgtgcctggccacggttgctccgtcttctcctcctccagcgaggagggtggcggggcaaacccggatgttcctcttttgccgtggggagatgtcgtcatcgagttcgccaccgccgggcgagccgacgaccgtcgttgttgtcgtgctgcgaggggggagtaccatgtcgtagctgccatcgtgggacatgaactcgagactcccgaagtgaagcaccgtcctgggctgaagaggctgctgaagattgtccatctggaactcaacgagaaagtatttgtctacacgcagcaggcccctacctggcgcgccaaatgtcggcctttcggacccgcgaggaccctcaaccgactaagagttgagaacaaccgacgtcatggacgcacgcagggaaccatcattacctattaccggaagacttctcctgaggccgaggctgaggtcgggcgaggatgtgactcctcccgaggccgaggccgaggcccgaggtcgggcgaggcggagaccttctcccgaggccgaggcctggggtcgggcgaggcggagctccctgttgcgcccgaggctgaactcgggggaggtcgtgacttactgtcgataaggtgtgaggcgatccctgcattaaatgcgcatgcgatacagtcggttggtaaggcgatttggctgaggtcgctgcacgacaaagtttgcccgagcttggcttcgggcgagccgagggtgcgcccactgcctgaggaggccctcgggcgaggcgtgaatccgtctgggactactgttcttgcccgaggccgggctcgggtgagacgagattgtgtccctgaggcttcaactttgacccgcgcttaccggtctttacggtctattttgaggatgttttctagccaggttaaggagcattgggggtacccctaa

SEQ ID NO: 8218 - DNA, 294 bp, Zea mays
  Peptide Sequence Number=SeqID_51593
atggcgccatgcaacagccccctccccgtccatggccgccagcccctgctcctcttcaccgagccgagctcgtcgtccctgccatggtggatgctcagtgcccgagctccatcccctgcttgcgtgctgctgcgccgtgcgccgttgatgcttgctatgtgctcggcaaaatgcgcagcaagccgcgcgacgcagcagcccatccgcgacgccgtcaaaacccttgctagtggtcaacgtcgtgctttgcccgttcgacgaaataccgagccatgtggacagccatgcgtctag

SEQ ID NO: 8219 - DNA, 312 bp, Zea mays
  Peptide Sequence Number=SeqID_51594
atggagtttggggtgcccggacctagggcagaggaggccggcgttgagggagttgaggaggtgagcggctgctccctggaagcttctgcgcgctgggcgttgagggtcccggtaggggagagcaggggcgaggggggcgacaggaaggaagggagccgaactccctgcgctggggaagaaggggaggacgccatggttggtcggtctccctgccaaccgctgtgggggaagaagggtgccatggataagagctggaggcgcctgttccaagggctcggccagcgcccaagcagggaggtggaggcgccatga

SEQ ID NO: 8220 - DNA, 81 bp, Zea mays
  Peptide Sequence Number=SeqID_51595
gccagatctgcaagtctacgccagacggtggagccagaagccagttctgcgagctcccctcccctcggacgaatcttctag

SEQ ID NO: 8221 - DNA, 324 bp, Zea mays
  Peptide Sequence Number=SeqID_51596
atggcagatccgccaggaacagagctctttcggaggaagaaccccgatagatacaaggtggagaaggtcggattcagagacaacagacatatggttacctgcaaaaggcaactaactgttggggtcgatgggagggatgaccgcgacggacgaactcgaagctttccgcttgggcgccatttcaaccttgccggcgaacggagcggaagcagcgttgcaagaaagcggagaaggcctgggcgcagaaaagcaagaactagggcacagaatgtggaggcgcacgacagtacagtgcatatagggttttccgaagccagatactga

SEQ ID NO: 8222 - DNA, 1344 bp, Zea mays
  Peptide Sequence Number=SeqID_51597
atgacctccgcgcctccagccagatgctctccgccggccactggctccaccgcgaggtccgcctcgtcgacgacatccccgggcgtcctcgtcggcgacgccttctactaccgcaccgagatatgcatcgtcggcctccacaccgccactcaggccgacatcggctacatcccccgtagactcctcgacgggggccagtccatcgccacgagcatcgtctcctgcggagggacgctcgagcgtggcaacctcgcgctccacaacagctaccagtatggcatggaggtgtgcgtcatccggtgccgcgacgtcgaccaaggcccccaccgcaaggtctacgtctacgacggcctctacagggtgaaatctgttttcttggatggcgtaccacctcactgggatgaagacaaagtgagagaaattttcaggaaatttggtgaaattgatagcatacaacttgctagaaatatgttcacggcagcacgaaaagattttggtttcattggctttacagcaagacagtcagctttagactgcattaagatggtcaataaagatggtgttggtgaaggtagtggaaaggttcccataaaagctagtttacaaaggccaaggcatgctttcaagaagtattcccggcaaggctcaagttccttgctaggcgtcagaagaggatttgtagataaaagttctagtggtagaggacaccactcggacagatataggcattttagtcctgtaaggcattcgtattcagataatcattctcgtcgtcactctattgatgttgaagagaggcatacttctgtgcgaggatacagagcttactatagaagagactctccagtgcatgctccaagctataaatatggaaggacacatctagagaccagaattagcgaagaatatgctgagggacgatacactagtaaatatccaaaacacagatacgcgatgcatggaaccatggagcgagatgcataccgcaggatcaagtatggacattcataccaggagagggcacatagaacttgcccagattgtaagttgtgtggtcaaaattacaattaccccaatggtgaggaattttctgcaatcagcggttgtcaggaggcatactaccagacagaccgtgatctgattccttcaacttctcaagtagcatctcattgcgagggttcttgctgcaaggttagatctctgacacttgatgtcagagtttgggagccatctgtaatcaatctctttcagtcattagtctacatgtttgtcaacagtatttgggaagagacgctaccagatgataattcaagtaattccatgtctattgctctccagtgctga

SEQ ID NO: 8223 - DNA, 600 bp, Zea mays
  Peptide Sequence Number=SeqID_51598
atgtcaggtcaattcacaacttcactcagagtgatgacagaggaagtcagctgcagaggccacagtatacttcacaatcttcggggcagcaacaaagctctttccgaccgccagctccaagaggcagaggcgccagaggcttcggagaaagatatggggatcagccaagaaagatctactgcctattttgtggtgaagacaagggccatactacaagaatgtgccaaatcaccattcaaaagcagaaggagatcgcagaagccgaagcccggcaaaatcaaccgaagcaggtcctgcacactgcttcgtgtcactcaccctacataccagaatatgtgggtaatcatcctgcagcttctgttgcttcggctagtcagccacaggctttttggccacagcttccacctccgccaccactacaacctgcctattcatgaggtcagcagccagaagggagccaacagacccatcagcagcgagatttcagggaggaatccgaagctcgcacagtcaacagtactgtgccagaatcaaaacacatctattgagagatatcctacctctgaagcatttttacattcattgtcattttctttttaa

SEQ ID NO: 8224 - DNA, 339 bp, Zea mays
  Peptide Sequence Number=SeqID_51599
atgggtgtaggcaagggacggcttgtggccgtggtaggaggtgagcagttgccttcttcttctataaatagtgctcttgcttctccggcattttcacatctcttattgctgtttgctgtttaccctcctcttcttccttccatttccaacatgggcaaaagtaagaaaggtggtagttcttcgcatcgccctggtgacaaacgcaagcgtgagccgactcctccctcggaggacttcggcgactcggagtacttggaggaggagttctcctccgagtccgagggctctccggctcctgcctctcccccggcgtcgtctgatgattcagacgactcctag

SEQ ID NO: 8225 - DNA, 173 bp, Zea mays
  Peptide Sequence Number=SeqID_51600
agatcttgataaaataggacaggggtttacatcggctgatcctttggaggaaattgacataggagatggaatcaaggacgaaatccaccggctgttagaagttgattttattagaccttacagatacgcagaatgggtctccaatagtgtgccggtggagaaaaaggagtcag

SEQ ID NO: 8226 - DNA, 276 bp, Zea mays
  Peptide Sequence Number=SeqID_51601
atggcagttggggtcagtgaggcattgtacgccaaggcggtgagccctgatctgctgacggggaatcgatggggacggttgataaactcagctagtgcttttggcaaccaaaccccacagccaaacaactgcatgtctagaggtagaggagtagactcgttcacaccgggttctctggaggacatggttgctggagtgacttggccgtccatcttgccaccgggttggactgtcgagtgggaccctacctcggtcgaggaggagcatgaggagtga

SEQ ID NO: 8227 - DNA, 1092 bp, Zea mays
  Peptide Sequence Number=SeqID_51602
atggcccgcgcccgcgcctataaagcccactcaggcgtcgaccacactcttccgcgcacgctcaaacctcaccggagctcaactcaccgtcgtttgcccccctcagagaagactgagcacacctcggtgaagctccccgagcgaggaatcgaagtctgcttcgccggagaggccagtccacggtcgccggagttcaccaccccgccggagtgcatggacaggatgacttcccacgaatcctcagacgacggaaatgcactgtcccacactgacgggcttgcacgagagggctttccccgcattttgtgggaggtacttcaggaggccggatacacgacgcctcctcagtacgcggtgcagcagttcgagaagcatcgagtgccccgctgtagggtaaggatgaccctggagcctcatcccctacagccaggctggcgttcactggactctgagtcctttggataccgggctgaggacacgatcgaggtgattgccctgcacgggttgaccactttctgtggattccatcccttggagctgtctacccaccccattggcttgttccccgcggaaagggaggacgacccaatgtggaaggatcgggtggagcacaccaaggacatctgggctatctacccaggtcagactgcgcacttgactgtacggtgcatgaatgctctgtaccatctgcaagtgatgcgcggtgaggcgatgtcccatctgatggcactattggaggcgacaaagatcaccttggacaacagagaggagcttgtggttgatttgtccactgaaatggtggaaaaggatttgcaggtggagcagctatccaatgagatccaagagttggaggaattagtgggtaccagggagaacaccatcgaggttctcgaggatcagctcattaacactcagcagcagctggctgaggccaatgagcacctggatatgcatcaccaggagacccaggacatggaggccaatgaggacgtcgacattgagggaggagaggagcctgcctccagcgtggacattgctggctcagggagaccaccttcccccgagtcgagtgttgcctcgttcgctcactag

SEQ ID NO: 8228 - DNA, 474 bp, Zea mays
  Peptide Sequence Number=SeqID_51603
atgggcaagagcaagaagggtagtagttcttcgcatcactccggcgacaagcggaagtgtgagccgactcctccctcggaggacttcggtgactcggagtactcggaggaggagttctcctccgagtccgagggctcaccggtccatgcctctcccacggcgtcgtctgacgactcagacgactctcaggggctcgccgcagaggtgtggacctacatccgggctgtcgagtgcgccgggcttgagggctcggatgagtcggagtactcctcggactcgtccgaggagggcagcggcaacgatggcggtgacggcgacgacgatggaggcgatggtgacggtggcaaaggcgatggtagcggcggtgatgatggcggcaaaggtggcaacggcgacgacggtgatggcagcaagggcagcagcaggggcagcaacaagggcagcagcaagggcagcaacagggccagtggctag

SEQ ID NO: 8229 - DNA, 291 bp, Zea mays
  Peptide Sequence Number=SeqID_51604
atggcgacggagcaggggcacggcggcatcagacggttcggcgagcgccgactcatcctcgctcagttccgatgtacagggcccctgcgcgggaaggttggctcactcttgcgtttactgctcaaatccatcgggccgtctgggcctgtgtcgatccagtcttgtgtcaatccgccttattggacgttcctcctaggcccacgaaagaatgacctcacgaatttattgggcccatgggccttcgtgaggttcatgcttcagaggtcagcatttttcactatagaactttga

SEQ ID NO: 8230 - DNA, 234 bp, Zea mays
  Peptide Sequence Number=SeqID_51605
atggcagaggaggtgaggggccccgagctgagggcatgtacatgcgcggaggcttcccgtgacacgcccagaacacccgcctggcgcagcggtgccgacggcaacagagcgcccacacgatcgcaggggtccaccgccatggctggggaacggcgtcgagtgtcaagggaaaaaggggcgcccggcaacgagctcgcgacggcatggccgatgggtgacgatggccgccagtag

SEQ ID NO: 8231 - DNA, 441 bp, Zea mays
  Peptide Sequence Number=SeqID_51606
atgtggtttgtttgttctgtggtcaagccaaggatctactgcttgaggataggaatcaagatgagcagccatgatgccaaagtgctgcaaaacttggtcctcaatcttgcatcctcagtggaaactggtgcattgaatattagaagctttctagaagaggctttccatcatttgggtgacgagcattaccttctgaatgcactacttgcaattcgaaaggagatagacctgatggagcaggatgcacttgagaacaaagcaaggtcagacccagagaaggagaggatggaggaagaaattaaacttgtggaggctgtgaacccagtgcctagacaatttcctttcacccccaccccttcctcaccagaattgtatgaggccagtgacaatgactcgtacgactcggacaggtccactaggtatagcatttggaacctgtaa

SEQ ID NO: 8232 - DNA, 339 bp, Zea mays
  Peptide Sequence Number=SeqID_51607
atggaggaccgtgagtggatgtacatgggccgctcaggtcagggtcaggtcaccaatgaatggatcaacaagactgatgctttcttggaacgagcatttgaggcccaactgaaagaagagaggaggcaccatttggagttggatgcgaggatgaggtccaagcagcagaggacggaggacattcttcgttacatacagtctgcaacgggtgtagctccaccaccttcgctattcactccaaatccacctccatctcagttttccactcctaatcaatcggcggcatcgaatgatcctcatgtttcaccaactgagcctaattgcgtgcgtcgtttgtga

SEQ ID NO: 8233 - DNA, 1062 bp, Zea mays
  Peptide Sequence Number=SeqID_51608
atgtcgctcgatacgaagctcatcctcaacgccattagcgagctcttcgacaagttcgacgcgcgatggtccatgagggatgccgcgcgggaggcatccaggcgcgtccctgttccgacccagtgcacggttgtcggagccgacgtggtcgccgacaactggggcaacctcttcgacagtggcgtcgattccgacgagcagcgctacgaggaacccatcaacgccgacaattggggtggattcttcgatggagcagacgtgtctgccaacgccgagttcgccggccactgggacaacccttcctccaaccccgacgcgactgcctatgtcacaccagaggttgcggtggaatcggtgcacccggccgcacgcggacgcttcttcaacgacgattcgggtgccccgcttgactcggacgacgacagctccgtccacggcggccacggatccgtgatgtcccatctcctggagcgcgaggccgacaccgccttccttccccacttggatcagcgggatggagttgaggcgtggctcatcctgcgccggtgcactcccgcctccttcaacgtcgcctccaccgaccccaacaacgaggtctcgagcgccgttaccgcggacgcgctcgctaaggccgcgcccgcgctcttcgcttcgagggcgcccagaccatcgctcaagtacctggagctgcttctccaggcagaaatcgacttcgaccacattgacctaccgactgctgccgccgcagagcacatcgtcgcccaggtcaccggcaacaacgcggtgtccgtggtggaggaccaactcaggtgcaccctcttcctcacgcgtaacttcctgtcaagccaccaccaggccgtcagcaaggagtgggacatggtcgccgtcgtgcacccagtgtgcaacgtgggggaaaagaaggtggacgccatctgcactggccagatcgagcacctgctactgcatcacctcaagcgttcacctacctcgattggtgccaaggcgcatcttctgctcaagaagatacaccaataccactcctcttccttcgcggtggactga

SEQ ID NO: 8234 - DNA, 804 bp, Zea mays
  Peptide Sequence Number=SeqID_51609
atggggtacccaaggcaaggcccacaaacctcgaccaagtccccgctgggtgggaaggagacaacactgagtcacgactcgcccaaggccaacctcgggtggaagacgaagtcacgactcacccgaggctatcgtcgagcgggagacatagtcatggctcgcctgtggccaaccctggacgaggagcgcattactgactcgcccgagggcatctcaagagatgctccggaaggtgcccgactccgccgaccaactctgcgaggcggaccgaccgaccaactctctgactcgcccgagtgcgtctcaagcgatgctccggaaggcgaccaactccgccaaccaactctacgagcggacaaggcgaccaactcactatcgagcaacccgacgaggcaaagagctgagtacggtgctagtgatccactcgccgccgcccgagctcaccggtggtccacgcccgccgcgtcgtctgcccgaagctccaaataccgcgccaagccctcatggagcgtagtcccgagccccaccccgtgcctgcttttcggccctatgtgtcccacatccctcatcagagcctacaccagcctcggcgcgcttgatcacccctccccgcggctgggattgcttgctggagtgaccccgacccgcccggagcgccccctctaccgtttgctcgcttcaagccccgctctcacggtcaaaaccctgccattgagttcgccggattcccctaagcggtcctggccagctcctgcaacctcagaccccctggagcccgcacctgcctcgtctccggcaacttga

SEQ ID NO: 8235 - DNA, 432 bp, Zea mays
  Peptide Sequence Number=SeqID_51610
atggccgcgaggtcagcctccctctgctcggtagctccggcaagcgcctcggcaagcgccttggcggactcgtcaagggcggactcgagctctgcgaacagccagaagaaagatctcaaacacaagcagaggaaacagacaagaacaagaaccaaggacggccaaggcgtacctccggctcgggcacgctgctccgaggccgcgacctgggctgcggctaagtcggctgcgagggtttcagcccggctttcggcctcggcagcccggccccgagattggtcccgctcctcgacgacctggacgaactccgaccgctgccgctgcacctctgcgcgcgccactgcacctctgcgcgcgccgctgccgcctccgcgcgcgccgctgccgcctcggctctcaggtatcttcggattcgagtcgatatcacagtag

SEQ ID NO: 8236 - DNA, 1338 bp, Zea mays
  Peptide Sequence Number=SeqID_51611
atggagacaaagacacatgcgccgtgtgaggcccatctaccaatttgtacgaggcccatctcccatggaaaccctaatccgcagccgcgacatccagccctgcgcccccgcccatggcttgctcgcctccacccgcggccgtggcctccagtgccctgcgcccccgccgcttgtcagcctccaccgccccaaccgtctctcaagtacttctacttcaccgccgacggccgcaagtcccccgacgtcgagatccccgtggacgcgcccaccatgatgcacgacttcgccgtcaccgagaaccacgccatcatcccggaccagcagatcgtgttcaagctccaggagatggtcctgggcggctcccccgtggtgtacgataggaacaagaccgcgcggttcggggtgctgccgaagcgcgccaccgacgtgtcgcggctgcggtgggtggacgtccccgactgcttctgcttccacctctggaacgcgtgggaggacgaggccacgggcgagatcgtggtgatcggatcctgcatgacccccgcggacgccgtgttcaacgagtccgccgccggcgaggagagcttccgcagcgtgctgtcagagatccggctggacccgcgcaccggcacgtcctcgaggcgcgcggtcctgagcgatgccgaccaggtgaacctggaggccggcatggtgaaccggcagctgctgggcaggaggacgcgctacgcctacctcgccattgccgagccgtggcccaaggtgtcgggcttcgccaaggtggacctcgaggcaggcaccgtcgagaagttcatctacggcgacggccggtacggcggcgagccttgcttcgtgccgcacctcaacgcccccgcgggcgccgcggaggacgatggctacgtgctgtgctacgtgcacgacgagggccgcggcgcgtcggaaatgctcgtcgttaacgcccgcgacatgcgggccgaggccgccgtcaagctgtcgggccgcgtctcgtacgggttgcacggcacgttcatcgccagcaagaacatatgtagtcttcaaagtggcgaccagcaagagtttggcgatggagccaaagtcgaacatgccggacagattcatgtgtgtgaggcaaatgctggaggacttaaggtcagcttgaatggccttgaagagctggttcagacttcagactggacccaagttgacctcaacttagatcagagtttgagccaagtcgggggttatttttgtttgctaactagaagtgttgtagaatatcgttttaaatttaagactgttgttgctctgttgatctacaagagaacacttaattcacataactga

SEQ ID NO: 8237 - DNA, 1374 bp, Zea mays
  Peptide Sequence Number=SeqID_51612
atgtcctgttcttcgcggggctggagccgcctcgtctatgcgctccaactggatcgttacaatggaggttggtttgtgtctctgattcggcctcctgtggcggaagaacagtggcctcttttgggtcacgttgcttccgtgttgaagatggatccaaaaggcagaaaccctaactgggatcgttggggtccgaaagatgttcctcaaggctcccagtcgtggggtaagaatcggaatctcacttggagattgaaaccaaatcttggaaaatctgacaacaaggaagacatcttgacttcttctggcgatggtggtcaatcaggcacaacaattggtgctgttgaagaagtggatattctgtccttagacactaaggatattgtgaggttcaaagtgcatgttaaaagtgttgctatgattccaccaattattgaggttggcgttaaacccttcctttatgacatctattttaaaattgataatatcactgatgagggatggaatgatgattccataaacctgggtaagagagcttcggttgacaggcaaggttttggtgatcctacttttgaaaaatctagcaaaaaggctagaaacgttggggacaactctgagaaggaagatctcaggcttgaaaacattggtgacattatgtctcaaggtaaaaactctgggcgttgttttgaggtgttagatggtatggaagatgtgaaacccgtggatgaggataaaggttatgatgataaccctataaatgaggaagatgattttaatgaaagtgaagatgatctcatgaattctcaggatttggaggaatttgcaaaagatgatgatgtagttttgcccttcccccaagataaagataacaagattctagcagtaacgcaatctgaaggggttgtcaaaaatgatggggaaaaagctatgaatatggaagttgatcatgttgaaggcatcagaaggagcaacagacttgaatcaaatgatgagatgaaaattgctgataaggccacggcaagagctattgctaaggatgctttcatcaacaaaggaattgaactaggtccttcttctactgattctgtggtaaacttagaattaattaaatctctagaactttccagaaaaaatcttgctattcaatctatcaagagccctcttggtccaagtgttcctgttgtttctgaatctgaagtggataagattgtccaaaatgatgaggaatgcaacgagttgactgatacggagaatgtgatggtcttaagaaaaggcagaaaaattcgtcataaaaaatctgctaaaaagaatcttaggtatacacctaataaagggaggggagtctattctgacctcatccccaatcttccagaatga

SEQ ID NO: 8238 - DNA, 309 bp, Zea mays
  Peptide Sequence Number=SeqID_51613
atgatcgacttgaaagttgaaagttacaagtattatccttggctcaaggttcatcctgacaccctggagctaaaggatgtggttgtttaccggtgttctgcttggtgtttagacccgtccttggtgcctgcttcaagggagctctggatcgtcgaacctccctttgccgttgatggggtgtcttctggcaggagaatgttgatgtatccaatccgcatcacattctcgtctgccccgcggagggatggatccgatcctaagcttcatgctattacttcgggcggtgatggttctggtcatgtgcagtag

SEQ ID NO: 8239 - DNA, 309 bp, Zea mays
  Peptide Sequence Number=SeqID_51614
atggccaccgccaccgccgctccagcatctgtggcgcgacgacggatctggggacacgctcgcgacggcggatccctgaggcgcgacggcggatctggggacacgctcgcgatggcagattcctgtggcgcgacgacgaatctagggacacgctgcggcatcggatcccgagggcacgcacgcggcggcggccccatgagcttttctgaaaatccggttgtggggagaatctggctgtggggagaatctgagtattgttacaattacgtgtggaggaagataaagttggttatagggctcaggatctag

SEQ ID NO: 8240 - DNA, 1896 bp, Zea mays
  Peptide Sequence Number=SeqID_51615
atgccttttcacggaggaagggaggtgcgaagtcctgccttcgcactgaatttgcgaaaccgtgacccggccgcctttgtgcgtgatgcggaggacttggcggtgcggctcgtggggcgttacgtgccgaggacggaaggccagcgcagctttgatatccgcgggtcaaatgaacgtttgaacagggtcttcgaattaaatcaattgccatacgacggctaccctggtcaagacgaggcggaccgccgtgggaagaagccggcggtggagactggaggcgaccctgcgctggcggccgccccctcctcaaaaaagagaaaattagggtcggacgagggccagcttgctcttgctgcgcctggcgcggcgatcgtgacagctgcgctagcgccgaaggcaaggggtgagacccctggcgtcggaggcgaggtgtcggccctcacgctggtcagggacgaggcgggcgtggcgacccgccggctgaaaggagtgacggaggcgctgagtcaggcgacggaggcgctgagccaggtggctgacttcaccagccgcactgcgtcgggggcccttacggcagctttgtctgccgaagtcgagagacttcggacgcaacatgctgacgctgtccgtgagaagtcggcctccaacagcaagtgccgtaaactggcggacaaggtggccgccctggagaaggagaaggctgatctccggcgccagctggcgggggagaggagggaggccaacgaagccatcgccaaagagcaggctgcgcaggcggaggccaggctggcgcgggcggaaggcaatattgccaaggagctcgccggagagctgcaggggcggctttctgccctggagagccgcgcggagggggccgaggccgcgatgcgagcggaggccgaacggacgcgcacgcagctcatgactgcatatcgcgagctgggtgcgcggaccggtgacttcgaggtgccggagcgagaggtcgggcttcgctgtctggaatgggtgcaggaggaactgcaggagctccccactgtcttggaggggttaatgtcgttcacctccctggtcacctgcgaggcggcgatgaacgcactctctcgcgaagggtgccggcactttgaggccctcgaccaggcagatgaggatttcgggcgagatatctttgaggtcgaagaccctatggtgaaggaatccgccggggccctctatgaccggatgtggggttcgtacggtcgtgaggtggtcagggcgcgggccgaggctgcgagggcccaggcggagcgcggcgagcgggtggacgacttcggggcgctgaacagcgcgttgcctgacccggagacgacccctgcggaggccgcgactggagtcgccccgggaccgaccccggagactgcggaagacgcaccaggcgcccccgcatctgctgcggccggcgaagacctgccctcaaaggtggccgaaggcgcgcccgatgcccccgcagctgctgtgccgagcgctgaagatcccgcggcggtgggggcggaggcagcggcggaggcctcggcggaggctcccgcagcggcagggccttcgcaggttcaagattttgggcctgcgcacgcaatcgctactactgagtttttggcggcttcgaccgcggaagatggaaatgaatatgatgggtctgtatctgagttttttgattttactgactctgggagctcggttgagtggactgaggagtcgtcggaggaggacttggattattttgcggccttggacgtggctgcggcggaggctgtgccacatgttgctgacgcgccagacgtgccaggtcctagcaccgggcgccgacgacgaagggcggttgcaaagcgtagggttagtgtggaggaaggggctcggcttcgc

SEQ ID NO: 8241 - DNA, 291 bp, Zea mays
  Peptide Sequence Number=SeqID_51616
atggcactcggatgcgggatgccggatattttggcagaacttgggggagctgttggatgggagacattttttgtttccatgtctaaaacgggttttgggattgccaccatctatgtccatatcttaaggggtgacaaggaatctgtcttcccagctgcaatctcgaaagatggcagagcatacaacgatcaggtatccgagtgcccaacgccttgtgttaaggacgcatgtgccctcagacacctagtttatccccagaatattcccataaagcagggttacaaggagtaa

SEQ ID NO: 8242 - DNA, 66 bp, Zea mays
  Peptide Sequence Number=SeqID_51617
atggcagagcatacaacgatcagagtcctccaacagagaaccggcagctctaggagcaatgaataa

SEQ ID NO: 8243 - DNA, 163 bp, Zea mays
  Peptide Sequence Number=SeqID_51618
gcacaccaaggtggagggcctgggcggcagatccacatttggaggcgggcgggcgtgggctgggcggcgtgctgatggcggcagcggtggtagcatgggagggggaggggttcacagcggggagaacatcacggtcgtgggggaggctattgagagcacctag

SEQ ID NO: 8244 - DNA, 627 bp, Zea mays
  Peptide Sequence Number=SeqID_51619
atggcttccctgtccccaattgttcccctctctgtcttggcgtcgctggagggatggggtgttgcgtggaggccggcgctagggctaggattttcctggagatcgaattgtccttttgtgatcctaggtttggatacagtgctgcgattttctgctctcccaccattcccatcaacaagaaaaacaagaaagatagctactaggagaagctttaatacgctcgatacctggcatgatgagttcctcaatcaagctggcccatcggatcctcagcgctttccgttcattttggtcgggaacaagattgatttagatggcgggagcaaacggatggttctggagaagaaagtgagggaatggtgcgcctctaagggcgatattccatacttcgagacctctgcgaaggaggaccacaacatcgatactgctttcctatgcatcgctaggctcgccttggagcatgagcatgaccaagacatatacgcatttgttatttgtccgttttgtgtgcccccagttacttcaagacagttgcggaacaagtcccggacactaaacagacaagcggatgtgcttcctaggagccagccatttcctggaaggctggaactacgtggatgttactga

SEQ ID NO: 8245 - DNA, 1080 bp, Zea mays
  Peptide Sequence Number=SeqID_51620
atgtgggacccagcccccgcgccgcaggggaggaccttggggcgtgttggagaagactcagcccgtgacggttggaggcgcaagcagggagagtggcctttaaaaggagggcaatccctttcggaaggcgaccatgtcttctcccttccttatgcatcgcgtctttccaccttccaagcccccggatgggggatgcccgccgtcttttcgccttatcgttggaggaacgcaactccgtgggagttggtacctttcagccatcgttcggcttcaaggattttcatcatgcagcccggctgcacccctccgccggcggtcacccaagatggtgacctccagcttgatggtgggggaaagcgagccaagctgcggcctctgcccctccctcagcctcaaggattttcatcaccaaggctggggaggggagtgtgccgagttggggtcggcccctgcgtgggcggcggcccgctccttcactcagtgatcggagggaagggcggtcgtcgtccgtggcgccggcagctgcaccgtgcctggctcacggacgcgagtggcttcggagccgctcgcagcgccggcgtctgccacgacagcttgaagagcatccgccctgaggtcagtgctgccgctgctcggccccccggggcaaaagtcgtcgtcgtcgccgctgctggagcaggtgacggcgcgccgttcgtcggtcttctgtcgctccgcaggcccaccccaatcgagtggggttactcgcctgttgattatctgaaccgcttcaccaagcacgagtcgccccgtgtcaaggtgacgagtgaggccaggggtagcggtatcagcatgaacagaggcggagttggctcgaaaatgaaacctggttggccggagcctagctgggttgtccgtcagcgggaccgacgccggagtcgatcagccgaggcctcgggtcgggctggcgcccttggaagatggttggccgaggccccagggagcggagatcctcagaccgcgtcgccgtccgaggctaggtcggatctcgccgaaggtgtcgtcgatgccgagggtgctgctgcccccttccagcgctaa

SEQ ID NO: 8246 - DNA, 783 bp, Zea mays
  Peptide Sequence Number=SeqID_51621
atggcgcttcccgttgacgtggctggcctgcgccctaggctgggtgatgtggaggctcctccgaagccgaggtcgagtctgtctttcatggccgaggccgagtccgagcccctgggtcgggcgaggcggaggtcatcggcagaggccagggcggagtccgagccctggggtcgggcggagcgaagttcgtcgtcttctggggctgagctcgagtccgagccctgggtcgggcggagcagagttcgtcgtcttccgggtcttagcccgagtccgagccctgggtcgggcggagcggagttcgtcgtcttccgggacttagcccgatttctaggtaaaccttttacttattttatcgggtgtcatgctttgttcttggagtccaactattttgatcctattgggaaggcaagtgatctagcattattgtctatattaatatttatattgctggtagcttctactttaactgatctcaatggggcatttgggtggctagcaattcacattgataatttaaaagtgaatttcaggtgtacatttgatggcctccgatatggtgctgccttcaatcctctacaatgcgcaataatgctgctcaggaggatggctaaaaaactcccagtgctgctacgctaccagtgtcttcatgtgcatacttacttcaagaactcaagacccagtgagaagctcaaagaaggggaagacatctacatctatcagggtgacaaatccttttgctatgaagatgaccacagggttcttgtttgtgagttcatcctctag

SEQ ID NO: 8247 - DNA, 441 bp, Zea mays
  Peptide Sequence Number=SeqID_51622
atggaggtgcaagagaaaggcatgctgacgtccaggagatatagcaagaggatgaccaaagctaatccaaaggagttgttggacatcgaaccccagacttattgccggcttgacaagaaagaagaactcctctgtgaggaacacgaaaacgagggagctccgaaggcggaggatccgatcacgcagttgttgatgaagatcgaggagggaaacaaggagacgcataggcgcatggagttgatgcaaggcgcggtgggaaatatggagtcagcaatgaagttggtggtggcggaacaaggggatctgcaggaatggagaccagaggtggagttgaagatgaaggagatgactgaaacgatgagatcagtgcagattcaagtggagaagatggagaagaaaccgatgatgttcgcaggcgaaccaagtggagggggttgctga

SEQ ID NO: 8248 - DNA, 2847 bp, Zea mays
  Peptide Sequence Number=SeqID_51623
atgacgccgccgccgccgccgccgcaggcgcggctccaccaggggtcatcagccaagggcgggcacgcggagcggaggaagcaaccgctgcagagcagcgtgacacagcccaaggcagagcccgcggcggcggcggccgtgctgccggtgccggagggaggcaagaggtgcagagggggcgggaggcgccgcggcagggccaaggcgcccggtgagcctcgcgccgcgctactagcgccagcgcaggcgcagacgcaggcgcctccgccgcgcacggtcattgggccgcccgtgccgagcaaggggctgtcattctgccgccggccagggttcgggacggtgggcgcgcgctgcgtcgtcaaggccaaccacttcctcgccgagctcccggacaaggacctcacccagtacgatgtgaagatcacgccggaggtgagctcgcggaccgtgaaccgggccataatggcggagctggtccgcctctaccgcgcgtccgacctggggatgcgactcccggcctacgacggccgcaagaacctctacaccgccgggacactaccgttcgacgctcgcgagttcgtcgtgcgcctcgccgatgaggacgacggctccggcgtcccgcctcgggagagggagtacagggtcgccatcaagttcgccgcgcgcgccgacctccaccacctcaggcagttcatcgccgggcggcaggcggacgcgccgcaggaggccctacaggtactcgacatcgtgctccgcgagctcgccaaccagaggtacgtgtccatagggcggtccttctactcgccggacatcaggaagccgcagcggctcggcgacggcctgcagtcgtggcgtgggttctaccagagcatccggccgacccagatgggattgtcgcttaacatcgacatgtcgtccacggcatttattgaacccctgccggtgatcgagttcgtggcccagatattaggaaaggatgtcatatcaaggccattgtccgatgctaaccgaatcaagatcaagaaggcattgcggggtgtaaaagttgaggtcactcaccgggggaatgtacggcgcaagtatcgcatttcaggcctcacaacacagccaactcatgaattgattttcccgattgatgaacaaatgaatatgaaatctgtcgtggaatacttcaaggaaatgtatggtttcaccattcagcatcctcatcttccctgccttcaggttggaaaccaaaagaaggcaaactatctacccatggaggttttttaccaggcctgcaagatcattgaaggccagagatacacaaagaggctgaatgaaaaacagatcacatcgctgctaaagacagttcatcaaaatgattatgagcaagatccatatgcgaaggaatttgggatcaacattagtgagaagctaacctctgttgaagcccgagtccttcctgcaccttggttgaagtatcatgacactggaaaagagaaagagtgcttaccacaggttggtcagtggaacatggtaaacaagaaagtgataaatggatgcaaggtgagccattgggcatgtataaacttctcaaggagtgttccagaaaccacagctcggggattttgccaggaattggcacaaatgtgtcaaatttcgggcatggaatttaacagtgagcctgtgatgccaatatattcagctagaccagatcaagttgtgaaggcacttaaaaacgtgtataatattgcattgaacaaacttaagggtaaagatcttgaacttcttttggctatcctccctgacaacaatgggcagttatatggtgacatcaaacgtatttgtgaaactgatttggggttgatatcacaatgttgcttaaccaagcatgtttttaagatcagcaagcagtacttggcaaatgtctcactgaaaattaatgttaagatgggaggaagaaacactgtgctcctggacgcaataagttggaggattccgttggtcagtgacatcccaactattatatttggtgcagatgtaacacatcctgaaaccggggaggactcaagtccatcgattgctgccgttgttgcttctcaagattggccagaagttacaaagtatgctggattggtttgtgctcaggcacaccggcaagagctcattcaagacctttacaaaacatggcacgatcctcagagaggcactgtaacaggcggcatgatcagggagctcttaatatccttcaggaaggccactggacagaagccattgagaataatattctacagggacggtgttagtgaaggtcagttctatcaagttctcctttacgagttagatgccatccggaaggcatgtgcatccctagaaccaaattaccagcctcctgtaacatttgtggtggttcaaaaacgtcatcatacaagactatttgcaaataatcacaaagacagaagtagcatggacaagagtggaaatattttgccaggaaccgttgttgattctaagatatgccacccaacggagtttgatttctacctctgtagtcatgctggaatccagggaacgagtaggcctgctcactaccatgtcctctgggatgagaacaatttcacagcagacgaaatgcagacattgacaaacaacctttgctacacttatgcccggtgcacacgctcggtttctgttgtccctcctgcatactacgcacacttggcagcattccgggctcggttctacatggaaccagagatgttggacaaccagacgtccaagacctccaatggcacgagcggagtctcggtgaagcccctgcctgctgtgaaggagaaggtgaaaaggatgatgttctactgctga

SEQ ID NO: 8249 - DNA, 537 bp, Zea mays
  Peptide Sequence Number=SeqID_51624
atgcatggtgatggcgcggcccgtaaaaaagccgtggaaaacgagccggggcacgcacgcacgagagacgagacagtggatggatgggcttcggttggcagcggcaagcacagagggcgcggcggtccagtccagcagcaacaagcaccgcaggccctagttcctcgtagccacgtctactcacacgcctacgagctgagcctgagcatgcgtacagaacgtgccgccgcagacagcagcaggcttgcttgcattgcattgcagcggcgtgcgcgcggccgggcagggcaggacgtcgcatgcccgccgggggcggcacgggcgcgcgtgccgaggtcgtggggctggcgggcgagcgacaaagcggagcgttcgggcaaggcggggcaggcaggcaggcaggcctacacgcgcatgcagtgtccaggcgggtgggagcgggagcaggagcagcgtcgctgctgccgcagcgcgcggcgggccctccctgccggtgcggtgcggagggagaggtacgtaccagagctagaccgctaa

SEQ ID NO: 8250 - DNA, 1704 bp, Zea mays
  Peptide Sequence Number=SeqID_51625
atgggcttcgccaccgtcggcgccctcctcctcggctccgcgcccgcctccggccccagcgacagcggtggggcgcccaagtccgcggagtcaaacccaccttttgatatcggttcatatggggagcaaatacttgacacactttcatcaagaactaacaatacaggaactgcatcttttagtgagattgttagcggcagaccaaagtttgagattgcaagaacgttctctgcccttctccagctgggtatcgcagtgtccgctggctgtcgagaagactcgacagatgtcaccgggtcgccggcgccggccgctcctaagaacggccttggagagcgcccagagagcctggacgtccgcggcgttgcggcgaagccgggagcctcgtctaatgccgtgagggcgggcaagacgcgcgcccacgctgccgtccccaaggtgaacggtggcaagtctgcggtggcggatgtggaacacgagaccgtaactgtaccttcgtcggtgccgaggactttctacaaccagcttcccgactggagcatgctccttgctgccatcacgaccatcttcttggccgccgagaagcagtggacgatgcttgattggaagcccaggcggcctgacatgctcactgacacttttgggtttggccggatcatacatgatggcctcatgttcaagcagaacttctccattaggtcctatgagattggggctgataggacggcatctatagagacaatgatgaaccatttgcaggaaacggcacttaatcatgtgaagaccgctgggctgctaggtgatggattcggctccacaccagagatgagtaaacggaacttattctgggtggttagccagatgcaggctatcgtcgagcgttatccatgctggggtgatactgttgaagtaaatacatgggttagtgctaatggtaaaaatggaatgcgtagggattggcatatacgtgattctatgacaggccacacaatactgaaggcgacaagtaaatgggttatgatgaacaaactcactaggaagcttgcaagaattccagatgaagtgcggactgaaatagagccatactttgttgggcgttctgctattgttgatgaagacaaccgcaagcttccaaaactgccagagggtcaaagcacttctgcagctaaatatgtgaggacaggcctgactcctcgttgggctgatcttgatataaaccagcatgtcaataatgttaaatacattgcgtggattcttgagagtgcaccgattactatttttgagaatcatgagctggccagcattgtgctggattacaaaagggagtgtgtccgcgatagtgtgctgcagtcacacacctctgtccatgaggattgcaacattgagtctggagaaacaaccttgcactgtgagcatgtgctgagccttgaatcagatgttcgagatggtgactttggcagcaaactatctggcagaagatcagaatggattgtcgaggacgagcctgttgtacagatgaaaatgctaccgagcgtgtttgcgatgaatctcatggtgtcaaagacggtccgcgacctgtcgcaggactcgggtcctctgcctgacaactggacggtccgcgcgtgcgcaggggcggcggaagtcgtcggcgacggcctggatctcgctcccaggagggaccccgtcggggaggagagatcctag

SEQ ID NO: 8251 - DNA, 612 bp, Zea mays
  Peptide Sequence Number=SeqID_51626
atggtgggtacaagtgcggccactgcacggcgacagtcgagctatactaaggagcatcgggtaccatgtttccgagtctggttgactctagaggctcatccccttcagtcgggttggcgttcccttggctccgagacgattggattcaggacggacgacaccaccgacgacaccaccgaagcggtagctatgaagaccctggcgactttctgtggctaccatcccctggagatggtgatgcaccccttgggactctttcccgctgagaagaaggacgaccccatgtggtgcaaccgtgtgagccatgtgaaggacgtatgggcgatgtatcctgacttggttgggaggatcaccgttcagtgcatgagtgtgttgtaccgccttcaggccctgcagagcgacgctatggaacatattgctaacctcgctcaaaccaccaagctcacccttgacagccgagaagacttcgtggtcgacttgtcctcagagttggtggagaaggacctacaggtggaaaggttgagccagcgcatcaccaccctggagcagcaagtggaaatccgagacaacactatcgatgtcctggaaaaccagctccatgatgtgcagtag

SEQ ID NO: 8252 - DNA, 870 bp, Zea mays
  Peptide Sequence Number=SeqID_51627
atggctcatcttagacacaccgcacggaagtcaatcattcctttcttgttttctcgtctcgtggagcatccgcttcgccgtctggtgactggtcagtctagccatttggagaggctgcaccaccacctgcacgaggagcaggagcgtcggcgacaggagttggagcagcagggctcttcttcctcgcttcagcaggagaggagcaggagccggagggatgggttgctcgacccatcacttgtgacgccgcccacgggtgtcactttcatgatgtgctcgacaccttgctacgccaggcacttgaccggcgtacctggtctattgagtatcgttgtgttgtcttccagcacagtcgtggggtttacccggaccgctgggaggcgacttgcttggtgcgccgtctggagaacagtcttcggggtgtggaggtttgctcagagcactactctatctctaagcgggactcagctgaggcagccatgcaagatgtcgcatggcgtgcgctttcgccactattgctcgatgctcagtggggtggccgatggtcttaatctgaggtattacccccatcgtccatctggcagcacaggaggcgtggttgtctcacctattggtgaggacaaccctaggttgagcagcacagtcaacctagccgccgtgctaaacacggagctggaccatgccttagatgagatgagtagggctcgtgctgagattgcccagttgcgggctgagcgtgcggagcgccgtcacctagaggatggttctcccgcccccgtcgtgactcagcacccgtaccgctcacctcagcatgggtaccatgcctacggcaactccgactgcaggaccaggataaatttagaaccatag

SEQ ID NO: 8253 - DNA, 525 bp, Zea mays
  Peptide Sequence Number=SeqID_51628
atggcgcaaaccaagaccacccaacgaaaagcaaccggacctcatggtgtaccccgacatcaactagctcctagacatgaggggagcagcagtggaagcaacgatccaataggggatctggaggccagggtggaacgacttatgtcggaactatgccacgggagtagggagctggaggttaatcgcttacaacaggaaattacggaacgagacacgaccattgactgggccataaattcgcgctctttctcctgggattgtgaggccaaggctctagcccgggtagcagaactaagtgcatccctggaaaatctgcaagcgtattgtaacaccctacatgaagaggtgcacgtgttatatgaccggctgcatccaaatgtgccaccagaagttgcagcaatgggagccggaccatctggagcagctaatggaggacctgatggggagttggacctttttggagcccctccttccatgaacctcgcagatgaacgttctcctgaagctggcagtggagcagcctag

SEQ ID NO: 8254 - DNA, 366 bp, Zea mays
  Peptide Sequence Number=SeqID_51629
atgaagacgaactcactcgaggaaaccgtaccgaaagtcatgcgtggtggcgggctgtcaacggcggtcgcggactccgatcgacgcacgaacggcgacgagcaacttccacccactggcaatagaatcctacctaggattggcttctacacttgcggcggggcctttcattgctcccaggacacctttgaagctgcgcttgccgtatgggtcgggatcgacgtcggcggcaatcctgacttggttctctctctcggtttccttgaaatgtggcgagtgcatggcggtttgaaggcatggagagctcggccgaggcggtcctctatcatttatgcgccctggtcaagcggctggggccacacgtga

SEQ ID NO: 8255 - DNA, 711 bp, Zea mays
  Peptide Sequence Number=SeqID_51630
atgaagagggaccttcggccatcttacacaaacagcttcagccgaaggtcgcttcttcctagaagaccttcggcgacgaagcataggcccaacagcaagcgcgatccaggggtgaacttggctgggcgcagggacgcgaatccgagcaagcgtcgactaggagcaggtgttggcgaaatggaatccgagctaggtcgacgactggcgaccactacgaatgggagttggggtgagctgcgcgcgaggaagcaccacgacggggtcacggcagggaacgacggaacgctacgcgcgcgacgaggaagcaggaagccacgacaagggagctcggtggccatcgccatggcgacgagcgagcagaggagaagtaccgcgcgcggttggggaaaaagcagaggaactcgagttcttgggagaggctgggcgtgcgtcgcgagcagagggagctgggctgctgagcaccagagacccgcgcgaggagctaggcgcgcgtctgggaaagcgcgcagggagagagacgaactggagatggaggctgatcctaggaacgacggccacgggcaagcagagccgggcgccatgggagggcttcggcaggggaagaaacgcgtgtgggagctccacggcgcgcaacaggggaagaagacagcgtcgctggaaaaatctaagtggagggcggcgggattttcttcgtgcgtgcgctggagataa

SEQ ID NO: 8256 - DNA, 255 bp, Zea mays
  Peptide Sequence Number=SeqID_51631
atgacgtcgaccggaaaccgtcgtcgtgcttgcgactatcgcgtcaaattggtcagggttatctatcttatactatttatactcatgctcatacatatgcatcgtgcatcccatgagatcttgtggatagaggttgtcctttgcgtttatgccttgtttgatttcctgaggaatgatggcttctgcctgaagggtactggagcaatggtgggatctactgcaaagtcaacgaatcaagctgattcatcagagtaa

SEQ ID NO: 8257 - DNA, 1567 bp, Zea mays
  Peptide Sequence Number=SeqID_51632
atggagggggtcagccgggccacgtggatgctgcttcacatcatcgcaggctcgcagtgcagcggcgaatcggatctggtgcagttgcatctagagtcggttctcttggtggcgctaggcagcagcacaactgatctgcaccacacctgctcgactctggaggatctctccttgggcgccttcagcacacaggaggaagcggaggcatacgatatcacaacgatcaaggtccgtggcctcaacgccttcaccaaatttgacatgagtcgctacaacatcaagagcatcctggatagcagtgctctccccttcggtggcaccgccaagcgcctcaaggagaccgaggccgccgcgtccgcacgagatcataccggcgtgctaagctatgacattgggggtgacgcgcacagtgcggtcagagttggcacccaacgtttgctacagcggagtgaagcacacagggcaacccttgtggagatggtaagtctacaaatcggtgcacagggtgttggaggtatggcccataccatatttgatgaaatgcctctaaacagcggcgaggaagaaattgccctgttctctggtggttattctaattattcagtgttcgatgaaatgccacttggggatgtgatttgggatgaggaatatgggcatcatgatttgttggatcagctagcaccagatgcatattacttagctgccaagaggacgccctatgactccgtcccaatgaacttactcaatgacgttgcagtctctgctcccaagtatgatgatctgactaatgttgggcaggccaaaggaattgtgtcgatgattgaagcatacctgcgagctaacaaaatgtttgtggacaagcatgagcttgagatggaacgagttttctcttcatatctggagatggaccttagtgaggtggagccttgcgttttaggccccaaaaggcctcatgaccgtgtccctttgaaggaaatgaagtcagactggcatgcttgcctggacaacgaagttggtttcaagggctatgcggtgccaaaggaacagcaaggcaaagttgtgaaattcgacttccatggaaggccagctgaaatcaagcatggcagtgttgttcttgcagcaatatgtagctccacaaacacatcaaatcccagtgttatgattggtgctggccttgtggcaaagaaagcctatgaattgggccttgaggtgaagccatgggtaaagacaagccttacccctggatctgtggttgctatcgagtacttgaaacatagcttatggtctacccttgcacatacagatatcgttgctgctacggtgttgtcagccaaccgaaacttcgaggggcgtgtgaaccctctcactcgggctaactaccttgcctcgctgcctctggttgttgcctatgctcttgccgacactgttgacattgactttgagaaagagcccattggagttggaaagggtgggaaggaagttttcttgagggacatatggccttcaaaccaagagattgatgaggttgtggagtccagcatgcagactcacttgataattcaagaaa

SEQ ID NO: 8258 - DNA, 270 bp, Zea mays
  Peptide Sequence Number=SeqID_51633
atggaaagactactcaagcttcgtcagtatcctaggagtttggtctccttactcctcagcttcggcttcgacttcgacatcctgtatgaatcaaagtatgccagacttcaggaaggcaacagttgtgccccaagaagctaccagggcacagaagtcaccatgtccagctatgacttcgtcaaggtcatcaatttcaccttcgatatgttcgaaggcacccggcaggtcttcaaccgaaggagtaaatttttcactgctggctccaactga

SEQ ID NO: 8259 - DNA, 396 bp, Zea mays
  Peptide Sequence Number=SeqID_51634
atgaagccgccactgttgggtcagggaccgccgcgttcactccacgcgagcaccgtcgttcggccatccctgggtggtcgggcgagttcgccagggagcgcggctcgtgcgcagggtctcttcgggcttccttggctagattggtggctcggggctctggaatttcttgccggtgggagaacttcgccgcggatccgcccgctgccgtggctagcccgcaatgtgcatgaccaacgcaggcctaggacaattcggttatgggttgggcgcgccgggttgccggacctctgtgtgccggtgaactacaacaccgccgtggggagctcggctgcaggcataaggtatcttcagaattgggtcatgattatacaagagcatggtcaggacgaagcctaa

SEQ ID NO: 8260 - DNA, 1338 bp, Zea mays
  Peptide Sequence Number=SeqID_51635
atggcgtgcgtgggagcggcaagtccgaccgcgagggcttctacgcctccgcactgtggctccacgcgcggcacccgtgcacgctggccctcaatgttgccccctcgccgactttggctacctcaaggacctccccgagctgctccaccgaatcgtgcacggcggggtgtccaccaggaccccaggcaagaaggcacacctaaccacaaagtgcagccggggccagggccacatctgcttcagcaaccatgtatctgccatgcaactttttcttgcccaccatggttttcttctggagcaaggaagattattaagcacattatcgatcctaaccctgacttagccaagcagtgggcatgctacaatctgctgaaggagcacagggacattcaggttctctaccataatgatagagtgaaagatagcccctctacaaatggcagtaaagagcatcagggaagaaggccaacactagattgcaaacgggctcggttcgctatgaaggatactggaagcttcctagatgaatgtgtgggtagagcctgtgtccaccagtgccaccaatgttcgatccttgaccctgacctagatcttcatggtgctgctgatgtcaatgcctgtgagggcatgaagagaaatgcccagccgagtactgttgcgaagagacttcatggggactggatacaggatccagcgatacctgttgttactgggttccttgggaagggctggaaatctggtgctataactactttaggccaaggtggtagcgacttgattgctataaccattggtaaagccttgggactgagagaaattcaggttttgcatccacaatcgatgagacctgctagagaaggtgatattccagttatggttaagaattcatacaacgctaaagctccaggaaccattattacaagacaaagggacatggataaggttgtactaactagcatagtgctcaagtcaaatgtcactatgttggacattgtgagcactcggatgcttggtcagtatggttttctagcaagggaacttgaccatgtagttgaagagcttgagaaaatagcaatcgttcgtctacttcagcagagggcgataatttcacttatcggaaatgtggagcaatcgtctctcatattacaaaagatgggacatgtgctgaggaaaagtgggattaatgttcagatgatctcgcaaggagcgtcaaaggttaacatgtcgctgatagtccatgatagcgatgcaaaggaactcgtagaagcccttcatcaggcgttctttaaagacgatgtcctggcacaagtcgaagcggagaacctactcgtgggctga

SEQ ID NO: 8261 - DNA, 354 bp, Zea mays
  Peptide Sequence Number=SeqID_51636
atggacttcgcctcgcccgaccccagggctcggactcagcctcggctccggaacacgatggactccacctcgcccgaccctagggctcagactcagcttcggctccgtaagacgacggtctctgcctcgctcgacccagggctcggactcaacctcgacgctggacgacggactctgcctcgcccgacaccagggctcggacacaacctcatcctcggaagacggtctccgcctcgcccgacccagggctcggactcaacctcgaccttggaagacggactccgcctcgcccgaccccaggggtcggactcagcctcgactccggaagacggactcaacctcgacgctggatga
